United States Patent Application Publication US 2009/0077685 A1 - sequence listing, part 3

SEQ ID NO: 13235 - DNA, 516 bp, Glycine max
  Clone ID: jC-gmle01810067g02d1
ggttgcaaaatatgattttctcagtatataattcttgttaaaactgatgtattattatacatgcaaatctgtacaaattcaatgtcactgcaaatggtaaaaccaatcaaactccagtaactgcacgaattttgcaacagaatttgaaggatacaggcaaacacaaagtcagatcttatgccttggtttgcaaagcaattgacatgttttgggtcgcaatgttcttcaagctgccaatggttcctccataacttttcttttcgtagatacttcagcatcactggtaacaggtgctttggttgggacatcaggaaggtccaacttttcttcaatttcttcattagctgagggaggaacttcaggaagatcttggactgtaagctggatttccaagtcctcaaattctgctaaaatctcctcctcgtcttctgctgataacttctcccccattatttcattaatttcatcttgataagctttagcttcagcagtgtcatccataagtttctgaacatc

SEQ ID NO: 13236 - DNA, 468 bp, Glycine max
  Clone ID: jC-gmle01810067g03a1
gtttccacttgaatccctcgaaatttttacccacccacctcacaatttttggtttcgcctccttccaagccatgaattttaggagcctggaagatttctgggccttctacatgaaccagcactccaaggcttacacaaggcgctggcacttcgcaggaacactcttcagcattctatttttcttttgctccctcttgttcagctggaggttctcgctccttgtccctttctgtgggtatggatgtgccttctatagccacttgtttgtagagaggaatctccctgagactttgagacacccctattggtccctcatgtgtgacttcaagatgttcgggttcatgctcactggcaacatggatagggagatcaaaaggcttgggaagagacctgtgctgcaagtgttttgatttttgtataagcttttggtgagtattattgttattattattattatgaataaacatt

SEQ ID NO: 13237 - DNA, 567 bp, Glycine max
  Clone ID: jC-gmle01810067g03d1
gttggaataatttacacatcttcaacaactataaacagcaacgcacaggttaaaccatattcatccgattccctttagctccacttacctattaagctataatgtctcaacaaaatctgtctcaccacactccatcaagttgcagcatcatcacacacatattgggtccattcagccacaatatacagcaaaatcatccacacacacccaaataacttattaaagcaattaaaaaaaattctaaaaaaatacattaaaaaatccagtttcaatgtttattcaaaattataatcataacactaattatcaccaaaagcttatacaaaaatcaaaacacttgcagcacaggtctcttcccaagccttttgatctccctatccatgttgccagtgagcatgaacccgaacatcttgaagtcacacatgagggaccaaaaggggtgtcttaaagtctcagggaaattcctctctacaaacaagtggctatagaaggcacatccatacccagagaaagggacaaggagcaagaaccaccaactgaacatgagggaacaaaagaaaaagagaa

SEQ ID NO: 13238 - DNA, 469 bp, Glycine max
  Clone ID: jC-gmle01810067g04a1
gtttgtgaccgttgcatggctgaagtgactcagcggctgactagtgcgaaagagtcatcaagtaaacctgcattgcagagtcatgaggatcttgcaaagaaacttcaggaggaactagagagaaatcaaaaggcatcaggttccaagtctgatggatctgcaagacggatgaaggaagttgcatgtcctatttgcactgtccatctgcaggttcaggtgcctagctcgggttcagagactattgagtgtggagtttgccagcacccatttcttgtgagtgctcattgagttccgataaacattaatatggatgagaaggtgtcttcgtgtttcacaagtttaaaattcatttgttttactgagctatctcttgcacattaattatcaatgattgggattgccttccttctactattatttgtgggcttgtttcatgtactaagtttaccctgcatgcatctttttttta

SEQ ID NO: 13239 - DNA, 504 bp, Glycine max
  Clone ID: jC-gmle01810067g04d1
gaaaccataatgaattcaccatagctacacatatatatatacatgtatagctatgtgttcagcgtctattttatgcaaaaagataaacgaatttaagtgagaattgaacaactaacgaagcacaccaagctttaagcacaaaataaaaaaataaaaaaaagatgcatgcaaggtaaaactaggacatgaaacaagcccaaaaataatagtaaaaggaaggcaatcccaatcattgataattaatgtgcaagagatagctcagtaaaacaaatgaattttaaacttgtgaaacacgaagacaccttctcatccatattaatgtttatcggaactcaatgagcactcacaagaaatgggtgctggcaaactccacactcaatagtctctgaacccgagctaggcacctgaacctgcagatggacagtgcaaataggacatgcaactttcttcatccgtcttgcagatccatcagacttggaacctgatgccttttgatttctctct

SEQ ID NO: 13240 - DNA, 569 bp, Glycine max
  Clone ID: jC-gmle01810067g05a1
caatttttggtgcatgatcgtttagggtttgtgcttgttgttgccgccttagtgacaataatcgcgccaactcttgtatgatccatcactcagatccttccaattccgctgtctcgctttgaccgccgccacaccaaactagcatgttcttcagtgtttccctttcagatatttgatgcttggaaacgtagggaaagttgcccaatctattcttagaacccatagaagaagatatttggaagcaagtagaaatgaggcttttacctcagttggaccaaatatcaagcaatgcaggatgtacatgcaatataagtttccaattgaaggatgtaattcattcttgtggcactggacaagagaaaactttcacaaaggctgttcttttaggaacttctctgtaacttctgcaagaaatgtagcagcatataattctcgaatagcttggaagttgctgtacaaaaaatactctttcaatggttataatggatttacctccataaatatgattgctcaagcagtgagcctggctttgactcgttcttatttgctgggtcctgggtttttagcat

SEQ ID NO: 13241 - DNA, 408 bp, Glycine max
  Clone ID: jC-gmle01810067g05d1
acctcggaatgtcagttaaccatatctcaagatttcaacattatcaaacatatcaaggttctgggtgtacaactgtataaggggtacaaaattgactgctttattaagctttttctcgtaaactgtgatgctcaggcacacagtaataactgctggaaattgacaaagatgaataaaggggataaccttcccaaaagaaggcaagcaaaaaataaagggcaaatttggtagtgcccattagtacaaatcctgtttcaggttttggtaagaaattgtttttttaagagcctaaagtcctcaacaaggaaaccccctcaaggggccatgagcccatcaattgtgtatgaaagagactttgcccaatcagctctaagcagcaatgtctgcaaagtattcatcacatcatac

SEQ ID NO: 13242 - DNA, 534 bp, Glycine max
  Clone ID: jC-gmle01810067g06a1
ctcgagccgctttaagctttgctactcaacattagttgggaattgggtgtgtcacagagagaaataaagaaaccgagaaaagacagcgatgcaaccaacgctccctctcctccttgtacgctttcacacacatccctaccttcttcatcctcgttcgacaatcttttgaacaaacccttctttcttctcatcatcgccttttcttttccaccgccactttttttttttttcaattcgcttcatttctggcaaactgtctctgtcacacacccaataattgaactcaccgaaccaaacccctctctctcaatcaccgaacagcaatttcttcactctactcctttcaagtttagggcttttcccacgtgctgccccaagaacactgatttccagggtttgttcttcccccacccaacccttttcgtttttctctatttctaatcatgggtatgcgctgaagtgtggaaatttttaaattttattttctcggatcggcatggaacccgaacatcatgattcttcgaacatgctttt

SEQ ID NO: 13243 - DNA, 535 bp, Glycine max
  Clone ID: jC-gmle01810067g06d1
accctataaaacatgagattctaattcacaacaaaagcaatacataatacattacttgacaaatgttacctacatctttggtctcacaagaagcaacaacatgtaaatataacagcagggaagtgtactctctgacagccacaagcaatgcaattcccgaaaccaccgacagctaggaagcttataggatatagtctctttgtcaatccatactaatctgggcccacatcctaggccccactaatatactagtattgtgcattccttggtgaagacaaaaaattggaagagctagggaagccagcaaacacattcgagtaggactttgtcagatatgaaaaattggtaaccggaggcagagaaggtaccctttcacccttcttcaaaagttcttgcaagttaagtctttgcaagttcaaaacagcccttgactccttccaaatgaaggcaaggataccattttctaaaacaaagagggaaccaggctttgatccagggtatctgaacccgaaccacttgcaataccctctcccac

SEQ ID NO: 13244 - DNA, 289 bp, Glycine max
  Clone ID: jC-gmle01810067g07a1
gtcagctgccgatgcttatttctcccttcgctcttctccctccaaactcgaccctccaaaacttaacttcggtacgcttcgcactcctcaccttaatacgctcaaatcacagcgccttcagagtccacacacgataccgttggcgtttacaaccgcaacgtgcaaacgaggccgagctatctcgtggctgccattatctcaaaggaggtgcaaactgatggatgaccatcgctgcaggagggagatcataaagaggagggccaaggggttcaggaactggaacaacatt

SEQ ID NO: 13245 - DNA, 508 bp, Glycine max
  Clone ID: jC-gmle01810067g07d1
ggatgacatattttttttattgatttttaatcacggacttaggggttaaatattatattttcaaaaataaaagttaaattgagcccttcatgctttggttttttgacagcaaagacacccaccataagggtgatttaggggacaacttatcggtccttttggccatttaccaatctattaaataaaacaacgggctactgcccaaccagtacataaatttttggggtccacattggaagcgcacgaagatgttacagaacaaaaaaaattatcatactttgggcataagaaatccaaaactatatatacacattgactcaacttggacaaaaaaatattttaacgaagttcaaaaacgaaaggaaaatggccaaggtgtaaaattgaatttattttggacaccaattacaaatggcaccttcgttctcctaaaaaaaatggcggaggagttctataatgcaccttgcacattggggggtgaggattgaaatgtaaaatcaacttaagg

SEQ ID NO: 13246 - DNA, 270 bp, Glycine max
  Clone ID: jC-gmle01810067g08a1
tctctctctatactataggtctcgcccaatacctactctccgctcccaagagcacgcaccaccactattgcacttcttcctcgttctccctctttttcttcttcttggctaaacccttttttctatctcactcacacaacaatgggagacgagaagaagggcaagcctgctgcttccggcgtgtggtccaccatcaagcctttcgtcaatggtggagccttcggtatgctcgccacctgcgtcattcaacccatcgatctgatcaaggcg

SEQ ID NO: 13247 - DNA, 555 bp, Glycine max
  Clone ID: jC-gmle01810067g09a1
tgaaaacctaacagaagaaagtgcactggaaagaaagcagaaagcagaaagcagcgatggaaatccactcagaggaggagaatggcgtagcgaacgagtcacaagcacttgagcagaaggagaagcgaaaggggaagcacgacaagcccaagccatgggacgacgacccaaacatcgaccactggaagatcgagaagttcgacccttcatggaacgacggcggcatgctcgaagtgagctccttctccactctctttcctcagtaccgcgaaaagtacctccaagaagcttggcccatggtcaaatccgctctcaaggaattcggcgttgcttgcgaactcaacctcgttgagggttctatgacagtttcaacaaccagaaagactagggatccctatattatcatcaaagccagggatcttatcaagcttctatcacgaagtcttcctgctcctcaggcgataaaaatacttgacgatgaaatgcaatgtgacatcattaaaatcagtggcatggttcgcaataaggagcgatttgtaaaaagaagacaacatc

SEQ ID NO: 13248 - DNA, 538 bp, Glycine max
  unsure at all n locations
  Clone ID: jC-gmle01810067g10a1
tgatgttcctgttgggagataccgcagtttgatttatggacagaacttaagtgatgtggtgattacaggtgataatggaattattgatgggcagggttctgtttggtgggacctaatcagtactcattccttaaattatagccgaccacatattatagaacttgttggttctgataatatcataatctcaaatttgacatttttaaactctcctgcttggagcatccatcccgtatattgcaggtacaagtggttcatgtttgtgtcactgacttcttaaatggaactgttctgttttataagtatcttctttacacaatgtatgcagtaacattcaaatccagaagataacagttcaggcaccaaccaagttcccttacacaagcggtatagttccagattcttctgagcatgtttgcattgacaactgcaatattagcactggtcatgatgcaattgtgctgaagagtggttgggatgaatatggagttgcctatggcaaaccaacnctcaaacgtccacatcagggggtgttatc

SEQ ID NO: 13249 - DNA, 484 bp, Glycine max
  Clone ID: jC-gmle01810067g11a1
gctacagtgtcgctttaccaaaacgccaaaatacagtgagattggttttaaagcaactccggcgtgaccacaacgccacttgttccagccatgcctcctgaacagacccaacaacctctgttatcggaggagcaagaagagacagcctacgattcctcggagaaggtggtggtggtcggaatcgacgaccacgacggcgacgtggaggcgccgccgttctcatggcggaagctgtggctcttcactgggcccgggtttctcatgagcatcgcgtttttggatcccgggaatctcgagggggatcttcagtccggtgccattgctgggtactcgctcttgtggctcctcatgtgggccacggctatgggccttatcatccagcttctctcggctcggctcggcgtggctacgggaaggcacttagccgaactctgcagagaagagtatcccacatgggctaagattgttctgtagttgatgactg

SEQ ID NO: 13250 - DNA, 511 bp, Glycine max
  Clone ID: jC-gmle01810067g12a1
attcttattctttttctctctttctctctgcttgcggtgcttcacaagccaaatctaacttggctctgttttctccgatctagtactactatcaatggccggaaaaggagatggtcctgctatcggaatcgatctcggcaccacctactcctgcgtcggagtgtggcagcacgaccgtgtcgaaatcatcgccaatgaccagggtaacagaaccacgccgtcttacgtagctttcactgattccgagcgtttgatcggtgacgccgccaagaaccaggtcgccatgaaccccgtcaacaccgtcttcgatgctaagcgtttgattggaaggagattttctgatgcctccgttcagagtgacatgaagctatggccatttaaggtcatccctggtcctgctgacaaacctatgattgtggtcaactacaagggtgaggacaagcagttctccgctgaggaaattacttccatggttctcatgaagatgcgtgagattgccgaggcttatctc

SEQ ID NO: 13251 - DNA, 541 bp, Glycine max
  Clone ID: jC-gmle01810067h01d1
gaagaccccaaaatgtattagatttataaactgatgtgattcataattcctttaaattgctttatatgtaatacactttaacataggatgacaagttttacattccctccaacaattaaaagatttttttttaatatccaccatctgtaccaaaaataaaatgaataggacactgtagtcactgtctgaatgtgacaaaaaatttccttccactgcatacatgttcagtgcttccccttgtccttcacggcttcacttagtcacatacagtttcattttgaatttttgattcacttcatttgtggttcctaggatagatcaatgccaccatctatacaaagtatacgtatgtgaatttctagtgcttcttgattgatcacactgaacccttgaacaaaaagctgaattgaactgtacaaatttcctttttaaaagcccattggtcctaaacctggtgtagccatgggcatgggcatgggcatgggctttctacgtggtattggtaatgaatctaattcattacctgaggtgggcatgggct

SEQ ID NO: 13252 - DNA, 381 bp, Glycine max
  Clone ID: jC-gmle01810067h02d1
aaaaaaaaaaaccccccttaaaaaaatttttttttcccccccaaaaaaaacaaaaaattttgcaaacggaaaagggggtttttttttaagggaaacttaaaaaaaaacaccttcccccttttggggcttccccggggaaaaacgggaaaaaaagcccttttttgaaaaaacccccctttgttttttttggaacctttggcccggggggttttttttccccggtttgggcactaaaaaaactgggaaaggtttgggaaatcccaaactttttttttcccccttttttgggggaaggccaagggggcccaatcttgaaacaaaaacccccccctggaattggaatctggttttgggtgggggacggggccccccttttttttt

SEQ ID NO: 13253 - DNA, 560 bp, Glycine max
  Clone ID: jC-gmle01810067h03a1
tttctcatttccaccaggcggtgtaccttcactaagattaccattggtagtaaccagccatgagaccagtttgatggctcgatgccgtagagtatatgcccatgctcatgattatcatattaattctatttcaaataacagcgatggcgaaactttcatatcagctgatgatttacgaataaatctttggaacctggaaattagcaatcaaagttttaatattgttgatgtaaagcctgcaaatatggaggatctgaccgaggttataacatcagcagaatttcaccctacacattgtaatacattggcatatagcagttcaaagggttcaattcgtcttgttgacttgcggcagtcagcattatgtgattctcatgccaaactatttgaggaacaagaagcccctgggtccagatcatttttcacagagattatcgcttcaatctcagacataaaatttgggaaggatggaagatatatacttagtcgtgattacatgaccttaaagttatgggacatcaatatggattctggtccagttgcaacgtccaggttcatga

SEQ ID NO: 13254 - DNA, 484 bp, Glycine max
  Clone ID: jC-gmle01810067h03d1
gttgtaggagagctacaatcacattttcttcttcatttgcaagccaaaacacaatatgaagcattgactgcaccttctctttttataagaagatacagaaaaaaggggagaaagaatattagggttggaagaaggtggaaaaattgaacaaaaaaaagagatgctgcccatcatcatccagaaacaaaataaggtctgcccaccccaggaattttgaaacagccacttctggatctttttttctaaaagctcctgctaaagattttgaagggcacttgtagtgtgagttaaatgtagcatccaactcattggttggtaagaaggggaaagaagccttctccacagcaaccccaaaaacaggtcaaccaaaagcaaatacatgttcttcaatcatctttcttcctcaagcatagtacatgtataagctatttgcagcagcacaagcaattgaattctcagttgggtgccatgctaagtgcagcaa

SEQ ID NO: 13255 - DNA, 557 bp, Glycine max
  Clone ID: jC-gmle01810067h04a1
atttgaacgctctcatgatgggcagatcactgtgataatttacaagggaacacatgatcatcctaaacctcaaccaaaccgccgttactctgctggaactattatgtctgtgcaagaagagagatctgataaagtttctttgaccagccgagatgacaatggatcctatatgtgtggccaggggtctcacctggctgagcctgacagtcaaccagagctatcgcctgtagcaacaaatgatggtgatctagatggtttgggggttttgtcaaaccggaataatgatgaggttgatgatgatgatcccttctcaaagcgaagaaaaatggaccttggaattgctgacatcactcctgtagttaagcctatccgggagccacgggttgttgtacaaactctgagtgaggttgatatcttggatgatggctaccgctggcgcaagtatgggcagaaggtggtgagaggcaatcctaaccctaggagttattacaaatgcacgaacactggttgccctgttagaaaacatgtggagagggcatctgatgatccaaaagctg

SEQ ID NO: 13256 - DNA, 504 bp, Glycine max
  Clone ID: jC-gmle01810067h04d1
acagctaattctgcttaagagcagctctcatcatataaggatatgaacataaaagaactatcagcatttccaaagagaaaatgaggagctatgcttttaaagctttacccgccaaaaaagaaaaagcaaaatggaactcagaatttcattttatttagttttttggtgtacaaacaattttaaggacccattagtattctccctatgttctgagggcaaggataagcagaatggtttaaagatggaccatcacttggattttctctagaaccatatgggttagagttgttatttagcacaccaaagtaccccggcactgtcgtagtatgaacaaaattgaaattggaattgctggtgtgagtttgactatccccaaattcagaaagcatcattctcccttgactgtttggtgtgttttcagcagctgggctaattcccatcccaaggtcaaggctgatggtatcactttcttcgggcctaattcttgtctggccacttgcactt

SEQ ID NO: 13257 - DNA, 493 bp, Glycine max
  Clone ID: jC-gmle01810067h05a1
ggaaggaggaaggagagagactttatatacgatgtaacagggcactgtggaattgcgcgtgtgggtgtgttgtttgaggttgttgtcgttggttgtgttgtgttgtgttgtgtgggttttatgagagtgagtttcacatggggagggtttttgttcttgaattggatggcagatcttacggatgcaaattctgcaacaccccttttgccctcgctgatcacattctctctcggaatttcaactgcagtcaagggagagcctaccttttcagcaaagtggtgaacgtaatacttgggcctcaagtggagagaatgatgatatctggactgcacactgttgaagacatattttgttgcaactgaggaaaccttcttggatggaaatatgttctggcacatgaaaagaatgaaatatacatagaagggaagtttgtgcttgagaggtggactattgttgacaatgaagaggatgaattgaattttgatgcacaagc

SEQ ID NO: 13258 - DNA, 531 bp, Glycine max
  Clone ID: jC-gmle01810067h05d1
gactcataaataagatgaattatatgccctccataaatatattgcaagattcggtgcgctatgacaatatttaagacttatatatgctgcaaatgagctaagcttaagttgctctaagaagtttctatgtgaaattgtatcttgaggaatactaaaggtataatatatttgcaacctacaatactaaaggtataataataatactataatatattaattgctagctacaatacttcaaattcatgaaaaagaagccacttgctaggcgttttctgtgtcacttgagccagcttgagagccagtttgagagccagcttgtgcatcagaattcaattcctcctcttcattgtcaactatcgtccacctctcaagcacaaacttcccttctttgtatatttcattcttttcatgtgccagaacatatttccatccaagaaggtttccacagttgcaacaaaatatgtcttcaacagtgtgcagtccagatatcatcattctctccacctgaggcccaagtattacgttcaccac

SEQ ID NO: 13259 - DNA, 496 bp, Glycine max
  Clone ID: jC-gmle01810067h06a1
caggttcaaaccggagcaaaaaaaacttgttacgatggtttcttccgacaaggatccacgagaggaagtccttcaagcatggtacatggatgatagtgatgaagatcaaagactcccccaccacaaagaacccaaggagtttgtctcgttggaccaacttgctgaacttggagtccttagctggaaattagatgctgataaccatgaaaatgatccagagctgaaaaagattcgtgaagagcgtggctacacctacatggatgtttgtgaggtctgcccagaaaagttgccaaattatgagcagaaaatcaaaagcttctttgaagaacatcttcacactgatgaggagatccgcttttgtgctgctggaagtgggtattttgatgttagggattgcaatgatgcttggattcgagtgtgggtcaagaaaggaggaatgatcatcttacctgctggaatttatcatcgctgtacactagatgagagcaactacatt

SEQ ID NO: 13260 - DNA, 528 bp, Glycine max
  unsure at all n locations
  Clone ID: jC-gmle01810067h06d1
gataaatcagttaattgaatcttataaataagaataaagatagtacttgatagcataattttacaaatcaactaaatatatgacatagcttaaaatgtactataacttagatgaatatgtagttataatattatggctatctttcaaagggtcacctacacagaaacacaggcgtgggtaaaaggcttaaagggtcatctacacaaaaaccataacataaaaagctgggaccctttatttaaaggcaccattattttcatttgttcaaaccttactttagcaacacaaagtctcagtcccacgtactacgattaggcggaaccagatcttacgcggcggcatcaacagcatggttgccaacatccttttccacaaaatccttgacatattgttgtcttgcagggagatggtcatttggacgattgtgtggagtccaaactggctcaccaacaaaaaaacgcanagccttaatgtagttgctctcatctagtgtaaagcgatgataaattccagcaggtaagatgatca

SEQ ID NO: 13261 - DNA, 389 bp, Glycine max
  Clone ID: jC-gmle01810067h07a1
tctctctctatactataggtctcgcccaatacctactctccgctcccaagagcacgcaccaccactattgcacttcttcctcggtctccctctttttcttcttcttcgctaaacccttttttctatctcactaacacaacaatgggagacgagaagaagggcaagcctgctgcttgcggcgtgtggtccaccatcaagcctttcggcaatggtggagccttcggcatgctcgccacctgcgtcattcaacccatcgatatgatcaaggcgaggattcaacttgagcaaggatcagctgcgcaggtcacttacaccatgcttaagaatgagggctttgctgccttctatgagggtctatctgttggattactcaggcaggctacatacac

SEQ ID NO: 13262 - DNA, 401 bp, Glycine max
  Clone ID: jC-gmle01810067h07d1
gagcccccccttaaaaaaaattattttattatttaaaccccccccgtttaaaatttaagggggggggggggggaccggtatcaatggtcaaaaaaaaaaaaatggggggaaaaaaaatcttcccccattggggaaaaaattacaaaacttgtggggggaaaggtgtctgaaaaaggattacttatttttggttggggaattcccacaagttttttaagggcatcccggctaaaagggaatttttcttttttggtccagccggctccaatttttttttttttccctaaaacaagggggggaggcaaatttctggtttgggcggggggttaattaaacttaaaaaggggccgctcctttgggggttatctgccaaaaagggaactccccccaaaaaatttttt

SEQ ID NO: 13263 - DNA, 233 bp, Glycine max
  Clone ID: jC-gmle01810067h08a1
cttattgctatagtataggtcaagctgaatacctactctccacacacaagaacgcgcatcaccactatagcacttctttctctgtcggcctttttacttcctactgcattaaaccctgttaccttctcactaacacagaagtgcaagaccagaggaccgatcaaaaccgttgctttcagagtgagggacaacatcaagccttgaccacagtggtggagtgcttcagaatgctc

SEQ ID NO: 13264 - DNA, 542 bp, Glycine max
  Clone ID: jC-gmle01810067h09a1
tctttctctaattaattccctttgttatcaaaatggctgtggctatggctgcttgcagtcttggacttcacttgagtgctgacaacaccttgagaccttttgaaaaaaccactatcttgaaggccctctctatctctgatgctactaaaccatgttacatttctcacaaaacaagattatcatcttcatcttcaggaataacaatgatcccacgagcaacaacagttattggtactgtggaggatggaaatcaaggagaggctgataccattccaactccggtagttattattgatcaagactctgatccagatgcaactgtggtcgagataacctttggtgatcgccttggggctcttcttgacactatgaatgcgttaaaaaacttggggctgaatgttgttaaggcaaatgtctttctagattcttctggcaagcacaacaagttttccatcacaaaagctgattctggaagaaaagtggaagatccggagttgttagaagcaatccgtttgacaatattgaataatatgattcagtat

SEQ ID NO: 13265 - DNA, 673 bp, Glycine max
  unsure at all n locations
  Clone ID: jC-gmle01810067h10a1
ggggnnnnnnnaagaggacgttcagctcnggtanctanagctaagtatgacgatgcaagcactcttccggtagcggttaattctgctcgaggatttctataattaatgactttagttatcaaaatggctgtggctatggctgcttgcgggcttggacttcacttgagtgctgacaacaccttgagaccttttgaaaaaaccactatcttgaaggccctctctatctctgatgctactaaaccatgttacatttctcacaaaacaagattatcatcttcatcttcaggaataacaatgatcccacgagcaacaacagttattggtactgtggaggatggaaatcaaggagaggctgataccattccaactccggtagttattattgatcaagactctgatccagatgcaactgtggtcgagataacctttggtgatcgccttggggctcttcttgacactatgaatgcgttaaaaaacttggggctgaatgttgttaaggcaaatgtctttctagattcttctggcaagcacaacaagttttccatcacaaaagctgattctggaagaaaagtggaagatccggagttgttagaggcaatccggttgacaattttgaataatattgatcagtatcaccccgaatcaagcgcccaattagctctgggagcagctt

SEQ ID NO: 13266 - DNA, 485 bp, Glycine max
  unsure at all n locations
  Clone ID: jC-gmle01810067h12a1
gggagggagatccaaaaagagagagtggaaaagatggcgcggttgatcacagtggtgtggtgcgcggtggcggtgctattatgcgccgcggccggtgcgtcgtgggtggaggaggcggcgaacccgataccaatggtgtcttgcgtagaagcggatgtggttcgggtgatcggagagtgccggcgtgcgttgaagtttgctaggttcgcgagcaggttcgggaagagttaccaaagcgaggaagagatgaaggagaggtacgagatattctcgcagaatcttaggttcatccgctcccacagcaagaagcgtttagcctatactctctatgttaatcattttgctgatagcacttgggaggagttcaaaagacacagactaggagctgcccaaattgctctgtcactcttaacggaaccacaagctcaccgatgctgttcttncttcaacgaaagacttgagacaagaaggtttagtgagttcag

SEQ ID NO: 13267 - DNA, 293 bp, Glycine max
  unsure at all n locations
  Clone ID: jC-gmle01810068a01a1
tgccggtagcctttgagntcagncangtttatgacacgacccagctcgaattctctcgagggaagagtatcttgctcctgatgcttgctacgactcaggtgcaaggctgctggggtggtcacaatcatcattgtctgagcccctataaagtgacagggatcagggagagcctgcttgtttttcagttccttcaggggcagctttaccattgggaaccatggaattggagctagagaagagcactgcgactgtagcattcaagtctatcctggacaagatagaaacaggcaagc

SEQ ID NO: 13268 - DNA, 343 bp, Glycine max
  Clone ID: jC-gmle01810068a01d1
gtctataccataggggtttatggggaggggaagaggacatcaatccaatttcaaccttatgctgtggaaagaaacattcacgtgaatttaattacattccatttaactaatgttgtaaatagaaggatattatatgtatccatcttcaatattattaccctgaagcgtttcttgcactgcgtgtactccctttgattgactcaattctttgaagccttattagctctctaaacttagcaatgaacttatcagccttcttattcacatttggtccttcaataccatctgtttttgaactttcttcaccaataacaggtggactcttttcactgttattgttttt

SEQ ID NO: 13269 - DNA, 419 bp, Glycine max
  Clone ID: jC-gmle01810068a02a1
cttctcttctcttctcattcacttcccttcttttctcgagaacaaacatatagcaaagggggacattcacacaaaagcacagttccatcccctggactgacttaattcttttaattccccccaaaaaatgagccagtgtgtccctagttgggatgttaaagacaacccaccaccctaaagagttttttttggttcaacttcaaataaactggcccttgagttcccatagttgactacgaggttgctgagctgacatgggaaaatgggcaactttttatgcatggcttagggctaccgggtgtgccggtaaaccaccaacaagtcgtcacgaataagtacacatgggaaaagccttggggaagtggtatcttggagtccatagtgaaccaagccataagtttttccaccaggaaaagtcc

SEQ ID NO: 13270 - DNA, 567 bp, Glycine max
  Clone ID: jC-gmle01810068a02d1
gctcacagaccattatttatttatttatggattttctgaatatgtctgcttcttttctatggaaacccttttgacttttccaaagtgtacatgatttacttcaggtttactatgttgctggagagaatcttaaacggatacagtgggaaaaagtttgaagttcaaatcccatagctcaaaagtaccattaacgaaatcataatgtgctcctttcaaagccagagttttgttaacaactccatctctaacaaatggatatgttaataggttaccaagtgatacgttcacagcttccttctcacagttagtacattgctctgagaaacttaagtcacttggtcctgctttaaccttggactttgctggagtacaaatttggacccattgctctatgaattcacttgcagtggtcccgtcatctgggatagacatgagcccctttatacctccacagcaactgtgtccaataactacaatattcttcacctttaaatgcaatactgcattttcaatggcagcccccagctctgaatacttcgtcttgtcatatggggaaccatgttagca

SEQ ID NO: 13271 - DNA, 545 bp, Glycine max
  Clone ID: jC-gmle01810068a03a1
ctcgagccgcgcgagcataagaagcggttccaagaagagtaccagcgcttccggagcgggtgccgttccctcaaggcggaatccgtctcccatttgcaggaccttctctgctgcatggtcctctccgagtgcgtctacaagagacctgctgctgagatgattcgtgctgtaaataaatttaaggatgattttggtggacaagttgttgctttggagcgggtgcaaccttcgtcagatcatgttcctcataggtatttgttggcagaggcaggagacactttatttgcctcctttattggaacaaagcagtacaaggatgtaattgctgatgcaaacatacttcaaggtgccatctttcatgatgatgctttcgaggaatctgacaagcatgatgcgactgattctgacgggatgaaaacccaaacggatagattatatgtggaattctctacaatcaagcctaaaaaactgaaagaaaatacaaacctgcagttcataggggtttcatggctcgtgctaaaggaatacctgctttagaattatat

SEQ ID NO: 13272 - DNA, 425 bp, Glycine max
  Clone ID: jC-gmle01810068a03d1
gttcaattaattactcgaatagtaatcgagtggctaaatttatgaacccctccaactaaagccaattattattttattttcttattaatcaacaatttcctatatagctagaacggccctcacaaattgcaaatcctaatttgttaagaattaatcgaattgaggctttcgcatcatcattagctggaaccgaaattttggggagggccgggtcacaatttgcatctgattaaacaaagtgttggaatccccgaagttatacgttctggaaaagccgtatattcttcttgttgatcgacgattattacaatatcaggtgaccccgacatatattgaatgccgacaagatatgattccgaatgagctaagcgcctcttcagtataacggcatatatttttggaaaactaggtgacctccccgtctt

SEQ ID NO: 13273 - DNA, 631 bp, Glycine max
  unsure at all n locations
  Clone ID: jC-gmle01810068a04a1
tgcttagagcataagcantcttcganntttatgacacaacccgaagctggaattcggttcgaggggatggaagcgaagttgccagagatgnttaagctttctcatggctactaccttggggtcgcaacgctgtcactaccgtcgtcttcccgtgtttccattggcggagctccgattcgccaccaccgttctccgaaccggatcgggttgttgccgcctctcaaatgctcctctttggagccggaaaccgccccgcctcctcccttcgactggactcacaagttgatcgccggtgtcgccggcgtcggattcctcgaaacctcgtacctcacttaccttaaactcaccggcgcagacgccttttgccccgtcggcggcggcacctgctctaaaatactcgacagtgattacgccctcgatttcggtattcctcttcctctgattgagatggctgcgtatggcttggctgctgcacttggtgttcaattggcttcgaagaattttcgttntgggattgagaaaccaactgctgaagcagtgttgcttggagccacaaccttcatggcagctgctagcgcgtattttttgtacattctaaccaccagattctttgactcgtcttgctcctact

SEQ ID NO: 13274 - DNA, 521 bp, Glycine max
  Clone ID: jC-gmle01810068a04d1
aggcgcaagtatctctctcggagaacccgcccggaatttatttcccgggtccacgcgctctcttgtcggcgggcgccctttttttttttttttttttagcgcttaaactatcacattgaataagagtcattggaagctccataagaaacagtcctttttataccgtcatagaaattcctttaccaatgacacacacactcaacatattcctatatgaacaaatgaaacataaatctccaatgtgttgagaaatcaaataatgtgcttacatgctgagcagcattcagggagaggttgcttctttggcttttcatatgccacaccaatcttcaacaccagataagggaaatcttaatctttcttctcctgagaatccttgatcattgttggagcacccaccctatagcttgagcaatcgtaattacccgaacgctccagtgaaaaaattaaaagaatatgtcctagcttctaaagttgctaaactttatttgtcttgactccactagtcccattgcatccat

SEQ ID NO: 13275 - DNA, 363 bp, Glycine max
  unsure at all n locations
  Clone ID: jC-gmle01810068a05a1
tggcttcttctattatactagantttaaganagaacgaagctcgaattctctcagcaaccacggaatacaatactanctaattttacgcaaatatctccggcgacgagagcactttaagcaggtatattatactctccccttacacgggttgatgtggatgttgaggattaccttcatgtccttatgaacataggaggttttcttacaacaatggaatgcgtaggaagcagtgattggttactttcgacacctacttttgaaaaaaggaaaagagtgattttgttgaaggccgcatcattgtttcagggagcctctaaaggaccattgatagatttggctatttaaataaaaacaagccttat

SEQ ID NO: 13276 - DNA, 528 bp, Glycine max
  Clone ID: jC-gmle01810068a05d1
ctacaccctaaattgaagttactactgggggaggcggggggccaataaaacattcaccaaattgtccatcgacacctacctaagggttcatatgctgaaagaccattacctcgttacatatgaaaaatgaaagctcaccttccaagactgttatcagtgcaacatctcatgggagatatttgataagaggattgcgcgctcatttctttttgggcctaaaggtcctactgtatataaagaacaattcgaaatgtttatgattaggtggccggttgccattcattattgagctctgaacttgacctttcattacaagatatctagagccttttcactttaaaatgaactttttaaggctaactatttctaatatttgtacatcaaacaaaagaaataaattttcaaaaaataaatcaagaatattggaccaaaagcaaaggccccaaatttaatttaagtggacccctgtactcaaaattttgaggaagacggtccaattttaaaaatatagaagatcatttaaactta

SEQ ID NO: 13277 - DNA, 570 bp, Glycine max
  Clone ID: jC-gmle01810068a06a1
cttcttactctttcgtttgtctctccttccttccttacccctctctttcgagggtttggggtttttttttttttcccccttttttattcccccttttttttttttactttctcttgtttttcagttttgcttccatttcctttgaatccccatttcttgttcctctgcaactctaaccctagaattgaagatgcaaccacagaggttaaggcagcatgccatgttgcaaccatctctttaccaccaccccgctttccttactcctcctcagatagagcctatcttgagtggaaatctgccacctggctttgattcgagttcatgccgcagtgtttatgttggcaacattcatccccaggttacagattcccttctttaaaagcttttttcaactgcatgcgcccttgaaggatgtaaacttattaggaaagagaagtcattctatggttttgtggactaatttgatcgcagttctgttgcatttgccattgtaacctttaatgggaggaatatttctggggcaacctatttaggttaactgggcttatgcttacagcccaagagaggata

SEQ ID NO: 13278 - DNA, 462 bp, Glycine max
  unsure at all n locations
  Clone ID: jC-gmle01810068a06d1
ntgccaatcagttctactgaacacctccgcaaaatttttccggggctacacgcgcatctctacgcggggcgcgccctttttttttttttttttttactttttcaaaacaattttttggtgttatttcttggggtggcggggggttaataacccatcaataaaaatgggcctctacacttacttaagggtacatatgcttaaagaccattccagttttcactattgaaaaaagaaggatcacgttaaaagagtgttatcatagcaacacttgatgggagttatatgataccaaggattgggtgctcatttctttttgggcctaaaatatttactgtgtttaaagcacaatcactattgtttatgatttggttgccgcttgccattcagtttggatctccgaacgtgaactttctctccaagtgctaaagatgcttaacacttgaaaatgaatctataaaggct

SEQ ID NO: 13279 - DNA, 542 bp, Glycine max
  Clone ID: jC-gmle01810068a07a1
aaaatatattcaattttgcgtttgcctcctaaaggatgaaagatgggtcaagcatgcggttgctaccaagtcgatcagtcaaatgcgccttcaaggagcattttggaaaatttgatgatgtcctagagcctggatgtcactgcctgccttggtgtcttgggtaccagattgctggtagtctgtcgctgcgagtgcagcatcttgatgttcgatgtgagacgaaaaccaaggacaatgtttttgtcaatgtggttgcatctgtgcaataccgagctgtgtctgagaaagcatctgatgcattctataggcttaccaacacaagggagccgatccaatcatatgttcttgatgtcatcagggccagtgtaccaaagatggagttggattctgtctttgagcagaaaaatgatatagcataggctgtggaggaggagcttgagaaggccatgtcaacctatggatttgagaaagttcaaactctcattgttgatatagagactgatgttaatgtctagagagcaatgaacgagataaacgcagct

SEQ ID NO: 13280 - DNA, 341 bp, Glycine max
  unsure at all n locations
  Clone ID: jC-gmle01810068a07d1
gtntntaaaaaaggggaaagggtgtctagctngctactcnggnanaccaatnggaaggattgaccggctcactcagctgacgtggcgccgcggccgcccttnttttatctcctagtttttttcttttttttgagagaaaaagtgtttgtggggcatcgtggagagtgtatactttgcctgaaaacactgttgtgccttttgaccctcaaagaaaaattaagaagtgggggggcaaaggggattaaaataactttcagtttaatttgctgaaaattccactggttcttctggggtagggtctacaacctttgcatttgggagtttttttaataaaaggtcct

SEQ ID NO: 13281 - DNA, 312 bp, Glycine max
  Clone ID: jC-gmle01810068a08d1
tttcttcttttttaataataattttacaatttactttaataaacatgatactagtgtatgggtgaagaagaatcatgggcgggcaaaaatttattcacagtcgaacagcatacaaagatatttactttggggtgcaaacacccaaaaacactgctgcctcttggaaaatttccaaataaaaaatgaaccacagactacgaatttgcacacacacgctttgttaaaattataacaacaataattgtatttgccaactccggacactaaaacatattattcaccaatcaaactgaagatagggcaacttcactc

SEQ ID NO: 13282 - DNA, 418 bp, Glycine max
  Clone ID: jC-gmle01810068a09a1
accatatcaaaatgacacgcacttcgtgattatctatataccgggaatggttgtggggagggattattagcggaacgagatagctgccaccgccaaagcgtctgtggagaaatgccaggccagtacggactacgttgtttagaactctgggtgcttaaatcaccgcctttttgcccgcgaaaccgacatgcgccccacacagatcataacgcattctatttggaaagcccatgatattcttgataggactttgaagtcttgagaggccatattggctgactttgatcaacagtctggggcgaaaccaaaaaaagtccaaggaccacatgacgatgggaagaactgttttggtacaatagatcagctgagaagaaacattaaattttttggtgataacaatgtgtctatgaatgatgat

SEQ ID NO: 13283 - DNA, 500 bp, Glycine max
  Clone ID: jC-gmle01810068a09d1
attgtattcataacatcacacaatgggggaagtgattataaccaccaaaaccccaaccatgaatccagatcgtttcatatcatacgtaccctactgttgatgatgttgcaggttgtacgtgctgaaaaggaaattatgtgcattgagagggatagggaagcactcctgcaattcaaagctgcccttgtggatgactatggcatgctatcatcttggaccactgctgattgctgccagcgggaagggattcgctgcaccatccttaccgagcatgttctaaggctcgaccttgacggccagcttaattattattcatatggaatggcctcgcgacgttatatcataggagagatccaccagctcgggatggggttgcaacatttaaactatttaaaccatggttcgaattattttcaaggctgaggaatcccagagttttttggttatcttagcaacctgagacaccttgaactgtgaaatttttgattttggcggaaaaa

SEQ ID NO: 13284 - DNA, 348 bp, Glycine max
  Clone ID: jC-gmle01810068a10a1
caaaataagttggagcatagagacacatccttctaggaggtgactaatataaggcggggccaaattcgtcttaaggcaaagcatctccccgttggaaccgaaaggacgaataagggaacatggcaaatggaataaaggcaaggctaggcttgacattttgtctttgacggtgcttagagaacagaacaaaggcgaaacctgtacttgataatattatcctctacttccaggtttctttttccccccattcaatcatcaaaacaatcctctttagcaacaatggcaggggcaatcccaaaactaccccttgaacaaaaccaaaaaggacccaaataaaattctattacc

SEQ ID NO: 13285 - DNA, 472 bp, Glycine max
  Clone ID: jC-gmle01810068a10d1
ggaaggtccaaatacaccttgggtccttgtatcaatttatatttttcccggtaagagagcttttatgatcacatgacaacaacgtgtagtagtgtacctatctacattctacatacaatagctgtacacatgctactactactagggacaggtcaacaaacatgcaccgttggatcgtcatcgtcgtcgtcgtcgtcacatagcaaaacaccaaaaagaaccggtgcagacggtggacccaacaaacacatgcgtttccagcttcaatgtttttatctttctttgccctagctaagctaacttgataaataatcgcctgtgtgtggtcgcacaggcacactcatagaccttgagtctcgtgctaccgtgcaaatgcgaatgggcggagaggatcggcttgttcataagggctcgttgggccaaaacatgaacatgttctggggcggcgacattatctgattattgccctgga

SEQ ID NO: 13286 - DNA, 530 bp, Glycine max
  unsure at all n locations
  Clone ID: jC-gmle01810068a11a1
acaaacttccttattttcttccaaatcnctantacccagaaagcacaaaagctacacacatgggcaatcttttctttttcttcatttcgtccaccagattcatacacaattcacgtatacgtacaattattaagtaattgatttccaccaatctctttctttgatgatcaatcattaattgatccattgttgtttacctgtaaaattcatagagatttcgtacatactagttattgatcgattcatcgattatgaatgatgatttccattatatatatgaagagattgatgatcgtgtgttgtttttgtttggaacccaaatagaaggaagagatggcaggagaatcatacgaggaagccatcacgagtctgaccaagcttctcagtgagaaagctgagctcggtggcgttgccgccgcatagataaaggagctgacggcggagcttgatgccgccggttcgaagccgtttaacccggaggagaggatcagaaccgggtttattcactttaagaatgagaaatttgagaa

SEQ ID NO: 13287 - DNA, 389 bp, Glycine max
  unsure at all n locations
  Clone ID: jC-gmle01810068a11d1
ggttnnnnaagcccgaactatctgatgtatcttgnanaccaatnnnggggttgaccagctcactcatcgacggccgccctttcttttattattttaactactattttttaaattttataaccccccaaccaggaagaggaatagaggtagcttttaagaataacgctctcataacccaatataataattaaactgtttttttaatttttcccaaattggaacctacactatttcacaatcttaatcgataatatttcttcaaaaccaatccaaactatgatatataaactacataattaaaaatgatctgtatggcaaaaataattgttactacaacatacacggtcaaaatggctgcacttaacggtattccctacaacacaatttaa

SEQ ID NO: 13288 - DNA, 590 bp, Glycine max
  Clone ID: jC-gmle01810068a12a1
cagaagcttgtgatttagtttttgatgctgcttgtgagggaaaacaattcttaattgtgggtacaaaaaaaaaagcagcggatttagtagcacgggctgcaataagagctcggtgtcattatgttaataaaaagtggctcggcggtatgttaacgaattggtatactacagaaacacgacttcaaaagttcagggacttgagaatgcaacaaaagacggggagactcaatagttttccaaaaagagatgccgctatattgaagagacatttagctcatttggaaacatatcttggcggcattaaatatatgacggggttacctgatattgtaataatcgtcgatcaacaagaagaatatacggctcttcgagaatgtataactttggaaattccaacaatttgtttaatcgatacaaattgtgacccggacctcgccgatatttcaattccagctaatgatgatgctatagcctcaattcgattaattcttaacaaattagtatttgcaaattgtgagggccgttctagctatatacgaaattcttgattaataatataataaaaaaattattggatttagtttgagggg

SEQ ID NO: 13289 - DNA, 504 bp, Glycine max
  Clone ID: jC-gmle01810068b01a1
ggaagagttatcttgcttcctgatgcttatctacagacttcaggtgcaaaggctgctgcatgtggtcacttatcatcattgtctgcagtttctgataaagtttacagtgatcagggagtgcctgcttcttttcgagttccttctggggcagttttaccatttggatccatggaattggagctagagaagagcaattcgactgaagcattcaggtctatcctggaaaagatagaaacagccaagctggagggtggtgaacttgatgttctatgccatcaactccaggaattaatttcttccctgaagccatcaaaagacataattcaaagcattgggagaatattcccaagcaatgcacgtttaattgttcgatccagtgccaatgttgaggacttagctggaatgtcagcagctggactttatgaatcaatacccaacgttagtccttccaatccaacagtttttggaaatgcagttagccaagtatgggcttcactgtacact

SEQ ID NO: 13290 - DNA, 453 bp, Glycine max
  Clone ID: jC-gmle01810068b01d1
ctcacagcccagtattcatttatttatggattttctgaatacgtctgcttcttttccatggaaacccttcagacttttccaaggtgtacatgatttacctcaggcctactatgttgctgcacagaatcttacactgatacagcgtgaaaaagttagcatttcacatgccatgactgaaaattcccattcacgaaatcctaatgggctcctttaaaagccagacgcttagatgacaactccatctctaacaaatggatatgcttatatgctaccacgtgatacgttcacagtttccttttgacagatcgaacattgctctgagaaacttaagtcacttgggcctgctctaaccatagactttgctggcccacaaaaatggacccattgctcattgaactcacttgcagtggtgccgtcatctgggatagacatgagcccctttttacctccaca

SEQ ID NO: 13291 - DNA, 550 bp, Glycine max
  Clone ID: jC-gmle01810068b02a1
tgccattgaagatgttatctaccatattgatacatatgatgtgactacaattagagcgggcacacctatgtttctcatgtctcggaagaccaaatcacttggtgtcaaatgggttatctcaggagaaggatctgatgagatctttggagggtatttgtacttccacaaggcacccaacaaggagggagtccacagagaaacatgccggaagatcaaaacacttcaccaatatgaatgcttgcgagccaataaatcaacatttgcttggggtctagaagcccgtgtaccatttttggacaaggcgtttatcaatgctgcaatgagtattgaccctgagtggaagatgataaaaagagatgaaggacgaattgagaagtggattctgaggagagcctttgatgatgaagagcatccttatttgccaaagcacattttataccgggagaaagaacacttcaatgatggaagtggctatagttggattgatggccttaaggccatgctgcaaacatgtgactgaaaaaatgatgcttaatgtggtacattaccc

SEQ ID NO: 13292 - DNA, 329 bp, Glycine max
  Clone ID: jC-gmle01810068b02d1
aaaatacttattctcacaaccctttctctatttatttagggggtttccgaatacatctgcttttcttccatagaaaccctactgacttttccaaggagaacctgatctacttcatgtttactgttttaatgcacacaatattactctgtttcagcgtgaaaaaagttccttttgacatgccatgagtgaaaattcccaataacgaagtcctatattgctcctttataagcctgacgtaaaatgccatcctcctctttaacaaaatggctagtttatatgctcccacatgctacgttttcagtttttttttcacagacctaacattaatt

SEQ ID NO: 13293 - DNA, 515 bp, Glycine max
  Clone ID: jC-gmle01810068b03a1
cgagccttatctcaaaagttcttcttctgcatacactgtccaatttacaaactctccagcgtcacataatggtttcaaattcaatgttaacccccttcttctctgcattcaccttgcaccctcttcagttcccacaagctttgttcttcttcgatcaaaaccatctcaaaacaaagccacacatttctccatagaaatccctctctccatcgccctttgagtttgggttccaaaagggttcttccttcagtttgcttctttaatactggagacaaatctgactccaaggaatcgggatggcctattctcaggcgatgggaggtgccttggcaatggcaaacagtttcactgacctctcttgcctgtggattgggttttgtgttgacaaggttgactgaagcaattgccttaccatatctcgggatcaaacctgatgtgctaaagttagatgacaaggcagagatacttttattcgatcagagcatcacaactgcttgtgtacttggaatcatata

SEQ ID NO: 13294 - DNA, 455 bp, Glycine max
  Clone ID: jC-gmle01810068b03d1
ttttcgggggtcgacgacgctcacttgtcggggggcgcccttttttttttttttttgtttctttttttaataagcacgcattcattaatttccattgaagtccgaaaacagaaaccaaaaatacaggatgaggaaatctgtataaagctaaaacaaatgggaatgtcgtttaagtccaacaaacaaagtgggggggctacagatgctttgcaaatttttcaatgacttacaaccctgggggcttgtaagcgatgaagatgatgcactgtacttggcgaacgtagggaaatacaatgatacggatgaagccattggggtatgcatgattagcctctcgaagcttcttcaacacctgagaagcatttgtgcggcctagcatttgcagggtccacatgggccacaagcgtgcatcatagaatccatgagacctgtcgcgctcactgaacacaaaaccg

SEQ ID NO: 13295 - DNA, 498 bp, Glycine max
  unsure at all n locations
  Clone ID: jC-gmle01810068b04a1
gttacattcttacccactgcctttcactantcccatttaccccttcattattgtttcgggtcaattaatctctattcctatcccctcaccccaatcattatttagctggctttaggacatagcaaattccagtgcaagaaaaaatgaccaagatcttctttgtattgctgctatgtctaatcatagcatcttcttctgggtttgtgaattgctctgatgttgagaaggaggaaaagattggaatatttgagctcaagaaaggtgacctttctttgagggtcaccaactggggtgcttcaattttgtccctggtgattcctgataagaatggaaagttgggtgatgttgttcttggatatgattctgtttaggattacagtaatgatacaacctattttggagctactgttggccgggttgctaacagaattggaggagcttagtttactctaatggaatctattacaattattgcttatgaagaaacaatacttttat

SEQ ID NO: 13296 - DNA, 292 bp, Glycine max
  Clone ID: jC-gmle01810068b04d1
accatccatgcatttatcattttggggggccttacaataaacatcaccttgaataactgaactgttaaaatgtgaacactgtgggacatagcaaccccaatagcaccatagatacattattaaaattcatacaaactacaagcacagacccaaacaccaccaccctatcaatcctattcattttgagagaaagcaacgactctacgtgtaatcaaagggcgatatttcagattgagccggctgtggccagctaatcactaacttgttgccatccagttctggatggatagat

SEQ ID NO: 13297 - DNA, 584 bp, Glycine max
  Clone ID: jC-gmle01810068b05a1
ggttcagttaattagtttctctcttcgtactttctcttgtttccacaaagccatgaaaggacgttctttgcacatagcaatgtatccatccctggccatgggtcaccaaaccgcattcctccacctatgcaacaagttagccattaggggccacaaaatcttcttcatcaccccaccaaaagcacaagccaagttagaaccattcaacttgcacccaaattcaatcacctttgtcaccatcaatgttccacacgttgaaggccttcctccagatgcacaaacaacagcagatgtcacttaccctttgcagccacagatcatgacagccatggatctcaccaaagatgacatagaaacccttctcactggcctcaaacctgacctcgtcttctatgacttcacacattggatgccagccttagcaaagcgtttaagcatcaaggctgtgcactattgtactgctagctctgtcatggttggttacactctcacaccgtctagatttcaccaaggaacagacctaatggaaagtgatctcatggaaaccccagaaggtaccctgactcatcaatcaagcttcaact

SEQ ID NO: 13298 - DNA, 390 bp, Glycine max
  Clone ID: jC-gmle01810068b05d1
aagaatatagactgaatttgttattttttatccatgtggtaagaataaagactgaattagttctacaaagcaaagaaagaggaagctgacacgtagaattacagtggaaaaggacagcagagaaagggagaagaaaacttatgactacatttgtataaacaaaaataaacggttggataaactgcactaagccgaccgtccaatttttggccggaatctgaagcctaattttcggggggcatgccgcaattcctcaacttacattcttcgtgcatgtgtaaatcatacctttttttatagtgaaaacatatatttatattaactgtgtcgttgttttacaacgctatatactgtgtaaaaccctgggcgttacccaacataaattttttt

SEQ ID NO: 13299 - DNA, 540 bp, Glycine max
  Clone ID: jC-gmle01810068b06a1
tctgaatggctgataataccaattcagtaatggtttttccttagagacctatggaatgtggactattaaatgctacttttattgccatccttagtaatacattcttatgtaatgaatatatttcaattcccttttactgttagatgattacttttttcctttctaaaacatatatgtctgtgattgaaggccatatacaattttgtttggtcaaacatgactgctgacattttattcttactatatttacctctccacctgtgcctctataaaaaaagttattttttgactggcttttctttattacaatattatctactcctagtgttgacattgatggctcattgggggattctgacagtctcaaagagtctggctcaaagaaaagagttaggtctgaatcatgtgctgcttctagctccaaggcatgtcgagagaagttgccaagagataggcttaatgacaagtttgttgaattgagctccattttggaaccctgaaggcctgccaaacggacaaaacttgtattctgattgatgc

SEQ ID NO: 13300 - DNA, 389 bp, Glycine max
  Clone ID: jC-gmle01810068b06d1
atccatatgggaagaataaagactgaattagttctacaaagcaaagaaagaggaagctgacacgtagaattacagtggaaaaggacagcagagaaagggagaagaaaacttatgactacatttgtataaacaaaaataaacggttggataaactgcactaagccgaccgtccaatttttggccggaatctgaagcctaattttcaggggcatggcgaattgccacaaaatttttttggcgttggtaaacaaaacctcttggaaaaaaaaaaattatttttacaaatttggtttttcctcaaacctcattttctgtttaaatgcccggtgtatgccaagtaaattgtctttaattttgtcccctaaactcaatttggtggggggggtttt

SEQ ID NO: 13301 - DNA, 410 bp, Glycine max
  unsure at all n locations
  Clone ID: jC-gmle01810068b07a1
tgccctgagctancganncagcagagntgaaggaaatacgaagcntgaattcggtcagaaaatatagcaatctgccaagtcctcctggaggacgaaagaaccgacaggagggggctgttaacagctacataatcgcacgcccaatcaaggatcattatggaaaaaatatagatgacctacatcctgcaggtcaatgactgccttggtgctttgtaaaccatatatgtgggagactgaaggtcatagaccattatgttggggctaacttgaatactaacaccatggacaaagtatattgaaatgtgcaccgtgtgcgtgcataaaaaaagctgttttgagaaagcatctgatgcattacaatagcatacacacccaacggagacaatgcaagcttatggggggaatgtcac

SEQ ID NO: 13302 - DNA, 439 bp, Glycine max
  unsure at all n locations
  Clone ID: jC-gmle01810068b07d1
tggccccaaaggggnaaggactactactcgactcngnaaancattnnagggatgaccgctcaccagctacgtgcgcgctttcttcctttttttaattaataatttttccattttacataaaccaacatgcattctgggcttaggggataaaaagaatcaggggcggactcatactatttctttgcaccgagagcctatattaaatttaccctggcctgcatacacgcaaaaacactgaatacacctggaaaattccggaattcaaaaattatcgcaagaacatgacacgtggacccacacgcttggctcttgataataacttctctaacatgggcttccatctcaccaaaccaaatcatgtgcattaccgatcccactgcacagaggaaaactgcactacataaaacagcaagtggtatggccaacccagatttaccac

SEQ ID NO: 13303 - DNA, 564 bp, Glycine max
  Clone ID: jC-gmle01810068b08a1
aaaacttaaaaaaatgtcatgcaccaatccttaattatgtacgtctcgtgattcggtgaaagaggctttattgggagtttattttttaaacttgccaaaaatctgagcaacactcaatattttgtaattatttctttttttagcacgctttgtgcttaaattaaagttatattcttcgtgaataaaaatgtttttgcttaaaaaatatgcagtgttgaatttaatttaaaatccatgtgcataaaaaaaaaattatctcctaaattttcttcctgatggctgagcatatcccgacaggaagtaaactaaattataaccaagtttaccctaacatataatatagggtatagtgtaaataaattcaagcagcctttgggaataaaatatttactgtcgaattttatactttcaatcaagtgaaaagttttatagtaagtttgactattaaggaagtaattataaaataaaataaatttactattcattaatttgtgatatattgcacggcaaccgtcaaattcttatacatctttaattatgggacggcttttctataccaatttt

SEQ ID NO: 13304 - DNA, 53 bp, Glycine max
  unsure at all n locations
  Clone ID: jC-gmle01810068b08d1
cggtnntnnnaaagggccnnaggnaggggcttgngnctgactcnggaagaacc

SEQ ID NO: 13305 - DNA, 609 bp, Glycine max
  unsure at all n locations
  Clone ID: jC-gmle01810068b09a1
aaaacttaaaaaaatgtcatgcaccaatccttaattatgtacgtctcgtgattcggtgaaagaggctttattgggagtttattttttaaacccgccaaaaatctgagcaacactcaatattttgtaattatttctttttttagcacgctttgtgcttaaattaaagttatattcttcgtgaataaaaatgtttttgcttaaaaaatatgcagtgttgaatttaatttaaaatccatgtgcataaaaaaaaaattatctcctaaattttcttcctgatggctgagcatatcccgacaggaagtaaactaaattataaccaagtttaccctaacatataatatagggtatagtgtaaataaattcaagcagcctttgggaataaaatatttactgtcgaattttatactttcaatcaagtgaaaagttttatagtaagtttgactattaaggaagtaattataaaataaaataaatttactattcattaatttgngatatattgcacggcaacgtcaaaattcttatacatctttaattatgtgacggcttttctatacccaatttttcagtggatacttcacgattgagtgatgacaatgcttgagttgt

SEQ ID NO: 13306 - DNA, 558 bp, Glycine max
  Clone ID: jC-gmle01810068b09d1
gataatcatattaagcagaagagatggtagccattcggatcaagctcaaacttccttcttgaatacgcgctcctccggacgcacattccacaattagaggcaaaaggtgattaggagcatattctaccaaacgggtgattttctgacctactgcggatcccatactggccccgataaactgaaaatccataattacaatagctacaggaataccatttagttgaccagtacctgtttgaacaggctgaggtaatcccgcttttctttgataagaatcaatacgatctttataaggatcctcttcggaatgaaattcaataggatccagagaaaccatgtgttcatgcataggattgcacgttcccgaatcaagcaaaagttggattctatctgaactgcccattctgaaatgatatgcacagtattcacaaatattcattttcgatacaaaaaattgtttataattgaatacataacaattttctcattcaagccacaaatgcttatatttttgactttgatcgagatgattagaactttatcctatagtggaatcac

SEQ ID NO: 13307 - DNA, 434 bp, Glycine max
  Clone ID: jC-gmle01810068b10a1
acaaacttacttattttcttccaaattgatacatgccacaaagcacaaaagctacacacagagggaatcttttgtattggttcattgggacaccagattgatacacaattgacgtgtacggacaattaataaagtatggatttgcaccaatctctttctttgaggaacaatcattaattgatccattgaggattacctgtgaaatagatagagattaagtacatactagatattgatcgaattatcgattatgaatgatgatttccattatgtatatgaagagattgatgatcgcgtgttgcttttgtttggaacccaaatagaacgaagagatggcaagagaatcatacgaggaagccattaagagtctgaccaagcttctgagagagaaagctgagctcggaggcgttgacgccgtaaagataaaagagctg

SEQ ID NO: 13308 - DNA, 405 bp, Glycine max
  Clone ID: jC-gmle01810068b10d1
gcatcgggttttagtttttttttttgtttctgctgcgcggaaagactctctttcaatttttagaagataaaaaaatgtgggggaaaattttacccaccaggcgagggggtgatcaaccgcggatcccaaaaagaaaacggcgcgctggggatccacatttacaaaaaataaggggtttccccttatttggaaaacacctgaacaaattttctggggcaaaggggaaaacccccgaaatgattacaaagaaccaaggtggggtttccttatgcccgaaccccaaaaggggccacagaaaccatgtgggaaaacacagcaccccacttgcccgaaaaaaacaccagttagaaaatatcagaaccacccggccttatttcttatacaccgcaaacccccccaaggggg

SEQ ID NO: 13309 - DNA, 409 bp, Glycine max
  Clone ID: jC-gmle01810068b11a1
acaaacatacttatttgcggccaaatggataattgccacatagcacgacaagctagacacggggggcaaactttatgactaaggtacaatggtgaccaccagaatgatacaaaattgaagtgaacggacaattaataaataatggatttggaccaatgtgtttttttgaggaacaatcataaaatgatccaggaagagttaccgagtaaaattgatagagattaatatacataggagacattgaatcgaatatcggttataaatgaagatttccattatgtatgtgaagagattgatgagcgcgtggcgctttagatagaaacccaaatagaaggaggagatgtgccagagaatccatactaggaagccataaagagtttgaccaaacttattagagagaaagctgatg

SEQ ID NO: 13310 - DNA, 419 bp, Glycine max
  Clone ID: jC-gmle01810068b11d1
gataagtgtgcgcaaggcgttcaagggagaaaataagatgccagtgagcctgtacataaaatttctataagaattttaaccatagtattggtgattatttttccttgtatctctgatgttcaatgtctaacctgccacccaaattgaaaaccgatcttcgtcaaaatggcagtattcgtattcaggccataatttctttctccatcccaatgactttaattcttgaagcatgaatatacaatcttcgcaaggagcacctaactgcaattgacagtttgagtcaaaacattctgcaaagctatgacaaggcttgggccatcgtagaacgatatgagaactgctgttcataaaggccacggaagatcttgtatttggcatcatggtacttttttacctttggatccttagatggatgaatg

SEQ ID NO: 13311 - DNA, 571 bp, Glycine max
  unsure at all n locations
  Clone ID: jC-gmle01810068b12a1
cagaaaaacaagtagttgagaactatgatgnatgaaatggcttcctcaatgatctcctgggcagctgttaccaccgtcaaccgtgccggtgccggcatggttgctccattcaccggcctcaaatccatggctggcttccccacgaggaagaccaacaatgacattacctccattgctagcaacggtggaagagtacaatgcatgcaggtgtggccaccaattggcaagaagaagttcgagactctttcctacttgccagacctcgatgatgcccaattggcaaaggaagtcgaataccttctaaggaaaggatggattccttgcttggaattcgagttggagcacggtttcgtgtaccgtgagcacaacaggtcacctggatactatgatggacgctactggaccatgtggaagctgcctatgtttggctgcactgatgcttctcaggtgttgaaggagcttcaagaggctaagactgcataccccaatggcttcatccgtatcattggatttgacaacgttcgccaagtgcagtgcatcagcttcatcgnctacaagcccccaggctttt

SEQ ID NO: 13312 - DNA, 555 bp, Glycine max
  Clone ID: jC-gmle01810068b12d1
cagatgtatttgatttgatgatgctactattactactatatcatgctttgaacataaagtcttcatctcttttccttgagcttccccaatttgaatggtatctgaaaatccacctccaacccttcatgcttttccttcccctcttgattcctctgtcattcacagtgagtctacatgaccctccattggttaaaactccatcccctaccaaccctccataagaacctccaccaacatcatgtggcatgaaattcccatttctgaaagaagagaaagtatcaccccccatattgttgctcatctttgcagcagaaaactcgtgctttgattctgatgagtaatcaagcttcaagtcaataaagcttgactcatccatgcctttgaaatcactctctctgagtgaaaacacacgcctatttaccccaccgtagaatccaccaccatctccaccaccatccattagtccaccctttttcacaccacctttgagatcatttccactttcataactatcaaacaagaaatccctcctctctactccatcaaaaccactcc

SEQ ID NO: 13313 - DNA, 555 bp, Glycine max
  unsure at all n locations
  Clone ID: jC-gmle01810068c01a1
caacggtggaagagtgcaatgcatgcatgngtggccaccagttggcaagaagaagtgggagactctttcctacctgccagaccttgacgcatgcacaattggcaaaggaagtagaataccttcttaggaagggatggattccttgcttggaattcgagttggagcacggtttcgtgtaccgtgagcacaacaggtcaccaggatactacgatggacgctactggaccatgtggaagctgcctatgtttggttgcactgatgcttctcaggtgttgaaggagcttcaagaggctaagactgcataccccaacggcttcatccgtatcatcggattcgacaacgttcgccaagtgcagtgcatcagcttcatcgcctacaagcccccaggcttctaagtgtgaaaaatttgcaaagcatttgtagccgccaccccactttgtttgtttgtacttaaactacattcccatttgtttttgctttttgagatttcatcatcctgtattttttgggttctgttttccgacttcaatggaaattaatggatgagaactaatg

SEQ ID NO: 13314 - DNA, 372 bp, Glycine max
  Clone ID: jC-gmle01810068c01d1
aggaataagtaggcggggcttcaacaaggagttaatatagtaagaaaggtacatccttggaaaaagcataaatcaaagctaatctaatggcacacacaaccatgagttcatgaaatccagtcattagttacattcgttgttggggtgacaatatcttagtaaagtactcaaaatataaattaatagatataataaagtatctaaatgatggttcccccatcagacaaaagaccagttcatgaatacgaaggcaaggcagtgattggaatcatcatcatcgagaactttccatgcaatggcctgctcataagacactgggcgaatcatacttgatacacatattcctgctggcagatatgcaaatccccgttg

SEQ ID NO: 13315 - DNA, 576 bp, Glycine max
  unsure at all n locations
  Clone ID: jC-gmle01810068c02a1
aagcttaaaaattannnatctaaanntnaagacacgacgaagctcggaatcggtcgaggcaacatgctcgccctaagtccaactcctctgctccgctcttatcgctggcggggcaatttgcgcccgcgcccgcccgagccaggcgtggcgctaggagaacgacacgccccccgtgtacgaggttgctctgacttcgactaccagcgttcgtcggggcctgaaccaggagtggatgagctcgatctgtcaactacggtgtcgccgatctcccccgaggagttcgccgaggccggtctcggacccgatgacatctcgttgatccagtttatggccaaccaggagatcggccacgccgcgctcttgaccaacatcatcaacaacggcggccgacccgccccgaagcagtgccagtacaagtacgactttgacaccgtccgagactttgtcaacttctgccagaggctcacccgatggggagagtccggagtgtacggtttcctcccgcaccttgactcgcgacccgtcgcgcagctgcttttccagccatcaccaccgaggcgcgacagcagatggtct

SEQ ID NO: 13316 - DNA, 536 bp, Glycine max
  Clone ID: jC-gmle01810068c02d1
atataattggaagtagaattaattcacaggatttggttcaactctctttagaatagatattctctttacaaggttaaacagctgtaaacactatgctttcatttctcaggtatgtccctcacctcttaaattgttactatgttatagtcttccatagtactgcctgaagttttcaaagtttccatttcttgcctaccgaaactccagttagtctaaaacttctaaaagagtaaatgacaaaagaattaccttgttaagtatacttgtaagactatagaaaaggggtggtccaatactcatgcacccctattgtggggtgtgaagatgctaagatgtacataaatcttaattccatgagcagagactatttctgcaactagattctctgaccaccaggtcacaatgcaataatcttacctttgagccaaagtttaccctttggatcctttgtagactatggtggcaataaagtttataaaatggcatctagcttcaataggctgttcgaactacatgctactatttcactttgttga

SEQ ID NO: 13317 - DNA, 450 bp, Glycine max
  unsure at all n locations
  Clone ID: jC-gmle01810068c03a1
gcaacatgctcgccctcaagtccancctcntcctgctcccgctcttcatcgctggccgggccaacgctgcgcccgcgcccgtcccgagcccaggcgtcggcgcgaggatgaacgacacgccccccgtgtacgaggttgtctctgacttcgactaccagtcgttcgtcgtgggcctgaaccaggagtggatcgagctcgatctgttcaactacggtgtcgcccgattctcccccgaggagttcgccgaggccggtctcggacccgatgacatctcgttgatccagtttatggccaaccaggagatcggccacgccgcgctcttgaccaacatcaataacaacggcggccgacccgccccgaagcagtgccagtacaaagtacgactttgacaccgtccgagactttgtcaacttctgccagaggctcacccgatggggagaagccggagtg

SEQ ID NO: 13318 - DNA, 537 bp, Glycine max
  Clone ID: jC-gmle01810068c03d1
tggccaagttgcggcttcagaaaccccgcccagaaaatttccggggcgacacgctctctcttcgcggggcgcgctctttttttttttttcacacacatattttggaatgagccgttaaatatagattttgggatggctaaaggggctttagctttataccaaccaactacatctctttatactatgaacatgcatatatattctccactgtatagcatataaccaaaggtcgactaatattatttgacagacaaaacggggttggacactgaccctctattaaagtagatatttcaagtgacaaaggtggccaagatagttgaagttacaaccatgagccaaggaaggataaaagcaaacaacataatttgcttataaccaaacctttaaaaactggagagctaacaactttggtattagctggaactaaaagctgtatgaacatatgaggccaaccttcgcccgagaacactatgcaaatcccctctatgaatctagatatggtggagctgatgagtgctatcattgctgcaacga

SEQ ID NO: 13319 - DNA, 547 bp, Glycine max
  Clone ID: jC-gmle01810068c04a1
cttccgccgccgtaagcgacggcgcatccgtcttgccgatagagtccgccgccaggtttccgccggaggaggagatgacggtgttcgccacagactccgacctcgaactcgccggcgacgcggcggttcttctcagccaccaccaccaccacttcggctggttcgatgacgtagcgtccaccggcgtcctagagagcccgatctgcggcgaggtagatgacgtggcggtgccgatgagagaagaggacgagtcgctcttcgccgatctcggcgagttgccggagtgctcggcagttttccggcggaggaatattccggcgaccagcgcgatccggtgcggcggcatcacaggataacgcgggtggaccctttttctgtagtcccgcgttgttgcgtagtggttatattatattagccgcctgaaaatcgtgggctattaaaaaaagttggaaaagtaaagaaataattaattaaataaattaatttacaattcatggatttctttttcttttcttgcgttgtcatttgataaacattgattacagca

SEQ ID NO: 13320 - DNA, 546 bp, Glycine max
  unsure at all n locations
  Clone ID: jC-gmle01810068c04d1
nagggcctaaagtacggatgagtacnctgcccggaaaattcccggggagacacgcgcactattcgggggccgcgctctttttttttttttgacaaatattttttcatatgcttaaagaaatatataaatttgggggggtgaatgggggttgactgtatcacacccaactacatcactgtatactgtcaacatgccgttatattctccactctatagcataaaagcagagctggacgaatatttttggagagacaaaatgggcttttacactctgcttatgggagaatatatcgaaaaaaagattattgtggccaagatatgtgacggttcaactagagcaatggaaggataaatgcgttcaacatttttacttatcaccaaaccttcaacgattggagagtttacaacaatgatctatgctggaagttaaagctttctgaacatcttgacccaatcttccacaaataacagtgtgcacactcctcctatgaaggaagatacgttgattatgaagagcgcttccatcggcaccaggaacatgttagt

SEQ ID NO: 13321 - DNA, 479 bp, Glycine max
  Clone ID: jC-gmle01810068c05a1
cttccgccgccgtaagcgacggcgcattcgtcttgccgatagagtccgccgccaggtttccgccggaggaggagatgacggtgttcgcgacagactccgacctcgaactcgccggcgacgcggcggttcttctcagccaccaccaccaccacttcggctggttcgatgacgtagcgtccaccggcgtcctagagagcccgatctgcggcgaggtagatgacgtggcggtgccgatgagagaagaggacgagtcgctcttcgccgatctcggcgagttgccggagtgctcggcagttttccggcggaggaatattccggcgaccagcgcgatccggtgcggcggcatcacaggataacgcgggtggaccctttttctgtagtcccgcgttgttgcgtagtggttatattatattagccggcctgaaatcgtgggctattaaaaaaagttggaaaagaaagaaataattgattaaataaat

SEQ ID NO: 13322 - DNA, 524 bp, Glycine max
  Clone ID: jC-gmle01810068c05d1
atgcaaagtagttcgtgcgtatacagccccgaatttttccccggctccacgcgcatcactactcggcgcgcgcccttttttttttttttttaaaactttttttttgactctacatttttttttattttggggaaggaataaaagacaacattagtggttatttctaccaaagttgtctaacggattatgtaattttccatttggaaatggaggacaacttaatttcaagaaagctataactttatttgttggccagctttaaaagaaaaataaaattaaggcacactcaatttacaatttaattaaggaaaaactcaaaaatgcccttccaatcaaataagcactttgatgcctgcagggtcagttagctgttgaaatcagaagaagaacactctgaaagtatcaacaactttatcaggccaggcctcttgtggcatatgaccagctccttacatcaatctaagctggatttgagctggattccctttgtgaaactgatctgctacaaactggggcaagatctt

SEQ ID NO: 13323 - DNA, 469 bp, Glycine max
  unsure at all n locations
  Clone ID: jC-gmle01810068c06a1
gagcgtctttagttgaaaaatcacgcttanatgcctcaagatagaatcaaaattctgaggagtgctgtaggaaattgctacaacgatgatcctgttctttcttcctgtggcatttttattgagaaacaagtgagtctgattgaaggtcgtgttcttgagacaccaaaggtatgcattgatcgattatatatttcacatttttgtgtgcacaggatatatagttgaggagagataaaagagaaaatggtgtaaaggaggtggttagtcaagtgtctgttagtgagagaggaaccacattaactagattttcaaccaagtcccaattctatttcaccaaatgactagattttatttcttttttattttatttgattaatccatttcaaatgtacttaaatatctacgcagaacattgaacggccatatactttgatagaggaggaaccacagttgagaaaatctaaccctg

SEQ ID NO: 13324 - DNA, 360 bp, Glycine max
  Clone ID: jC-gmle01810068c07a1
gaccaaagcaaacaaacaaaacagccctcgtcattccaattcgaagaagaatagtagggggagagtttgttggcaaccatggcgatgccccacctcgtttctggtgccgcggcatgtggcgactcttcttcttcttcctcaaaccctctcgcttccctcgccaacgcccttattggctcttcgtccaaaactcaggagaggctgaaggagattcccacatccactcctactgaccctgcttcccaattttactccacagctctccccgccaatcagcttccccgtttccaattcgataagcctctattgaatttaaactcccaggctttggaagtttttgcataagttcccgtggcttca

SEQ ID NO: 13325 - DNA, 117 bp, Glycine max
  Clone ID: jC-gmle01810068c07d1
acgtagaactttttaattttttaactattaccctctataagggactcggagaaaattctatccttaactaattatttaatttatgtgcaacaatttctcttgttatcacatacatct

SEQ ID NO: 13326 - DNA, 453 bp, Glycine max
  unsure at all n locations
  Clone ID: jC-gmle01810068c09a1
gaactttatattcacattggatggccctcgtttcgcaaatatggncatgcttttgagggggtcaaaataattgtgactgatcctgataccgccctaagtactctcactcgtgaagttaaggaagttggccctgacgggcaagaggtgactaaggtggtgccagctgtatcagaagaagagaaggattctcttgtgaagaatattagaagacgaatgaccccccaacccttgaaaattagggcagatattgaaatgaaatgttttcaatttgatggagttcttcacatttaggaggcaatgcataaggctgaagctgcaggatatgatgactgccccgtcaaaattaaacttgttgctcccccactttatgttcttaccacccagacacttggcaaggggcagggaatattggttctcaacaatgccatagctttctgcacttgagccatagaa

SEQ ID NO: 13327 - DNA, 422 bp, Glycine max
  Clone ID: jC-gmle01810068c09d1
gtaatgaaaatcattcaattctctcggtacgttgttaaacagaagaacggcataacttgcttggacacttcagattccaacgtgtctcacctaatcagagggggccgttcttacaagaggtggttcctgcttcaaccttgaaagattgttacatgctacatccttcaaagattattaccctatcgaatatgagttaaatcgacggagcacggaaaaagaacttcattgctggttctggcactacagcttcgaaggtgtatcaactaatctagagtgctgccacggcatttttactacacaatctgtaggtactaatacagagctaaaatctactctgacctcgctcatatttccaggcaaagaataatgtgccaccacctattgcattaacttgtgacacgagtctcaatcaagcatgaaca

SEQ ID NO: 13328 - DNA, 539 bp, Glycine max
  Clone ID: jC-gmle01810068c10a1
cttgcattgcaggatggtttggcttaaataattacattggacttagcatcaacactgggggcaggatctggtaatgcccgctcagctggccacacgtgactcgaataactacaaccttaggtcggtcctcacaattgcattccaatttacctttgagaaccatttgcgggacaatgtggctgatatggctcgccagtatgtgcgtaatgttgtgcgatctgttcagagggttgccatggcaattgctccctctaggctcagtacacagttggggccaaagtcatttcctggtccaccagaggctcttaccttagcaagatggatctgcagaagctacaggctccacacctgcacagagcttttcagcgttgagttcacatttggtgatgcaatcttgaaacaactttggcaccattcagatgcaatattgtgctgatctgtaaaaacagatgcatcttcggtgttcacccttgcaaaccaagctggacttgacatgcttgaaaccactcttgttgctcttcaagacataatgcttggat

SEQ ID NO: 13329 - DNA, 453 bp, Glycine max
  Clone ID: jC-gmle01810068c10d1
accaaaaaaacaacttgtgtatcacatatatcagtacagtagagctcgagatacgtgtattacatatatttacagagaaattttttgtacaacgaaaatataaaggtctcaaataaaaattggaccacctttttttgcatgctacttacatgtttcatgatttatatatacacagttggagttaattacaattaaaatatttgcaacatgggagagacttgtttttgtatgacaatcgttagaaacgaatcaaacgaaagggaggaagattctgaaaaataggggaattcctctgcctctagaatctttcgaagttctattcacacttccatcttttcttgcaaaaggggtaccatcttggccaaagaatcagagctttcgtcacagcttgtctcttcttaattttctctgagatgtccatacattactgtataatgccccattccaagtaca

SEQ ID NO: 13330 - DNA, 550 bp, Glycine max
  Clone ID: jC-gmle01810068c11a1
actgacagcatgggaggtggtcattaatccgtatttgtccatcgaggcggtgatcaggggtatgacttcgatgatagccatgttaatcccctcagcaaggagaagataaagtcttcagctgcctatgttcttttctacagaagaaatttcgaagtatcaacatagtgatatagtagcatgtagttcgaacagcctattgaagctagatgccattttattaactttattgccaccatagtcttacaaggatacagagggtaaactttggctcaaaggtaagattattgcattgtgacctggtggtcagagaatctagttgcagaaatagtctctgctcatggaattaagatttatgtacatcttagcatcttcacaccccacaataggggtgcatgagtattggaccaccccttttctatagtcttacaagtatacttaacaaggtaattcttttgtcatttactcttttagaagttttagactaactggagtttcggtaggcaagaaatggaaactttgaaaacttaggcagtactatggaagactataa

SEQ ID NO: 13331 - DNA, 320 bp, Glycine max
  Clone ID: jC-gmle01810068c11d1
aaaataaaaaaaattacaggggtaacggtaaatcattaatccaaggaagccaaaaactcattcaaattcataatgcaaacaaaaaattttaatactatttctaaaacaaaaaaaaactggagtctcacaaatacttcccaaaataaaaataatgtataatgttcaatttaacacacacacactttcttaaaatgttaacatcatgattttatttcccaacaacgaatccttaaacttatcattcactaaatcaaactgaatattgggcaacgtcactatataatacagattggaacatataaataccatatttatcacac

SEQ ID NO: 13332 - DNA, 529 bp, Glycine max
  Clone ID: jC-gmle01810068c12a1
attttatttattctatttttttttttaataaattctataggcatacgaattcattttagggggtattaatattatattcaaatgaaatacaccgatattaaaagatactaattataagaatttgaaagtgaaattataaagttattaaatgattaatcaatttttttctacctgttcctgtagtaaaaagagttccatctgttcttgaatagcttccttcaaaaggacttttgcttccccagtgaatgtcttggtagaagatatgatttctttgaattgaggtttattcgtgtttaagtaagcacgtaactaaacaagaaatttccttacctgtccaatttctaatgaatcaagataaccattcgttccagtataaatagttattatttgttcttccacggtaagaggagctgattgggattgtttaagcaactcgcgcaatcgttgaccttttgctaattgattttgagtagctttatcgagatcagaagcgaattgggcaaaacttctaattttgcgaattgtgcta

SEQ ID NO: 13333 - DNA, 493 bp, Glycine max
  Clone ID: jC-gmle01810068c12d1
atcattcaatcttttttaagtattagtccatagtggtgcatgggttacgatacacacaacacaaacccataaaagtagtaagtagggcacaactcagaacacaaatatctgtttcccacatgcgtcctacactacactgctgtaactatcccggtggaaacttgtgaacgagtgtgcccgagccaaccgcaccaagttacctcgatctctcacagccagtgaaaaaaagttgttcattttctctctaacatgactaggatacaaaaagaggaagcaagggggggccccatatcagcgtgcactcgtttttgggacccttatctggaataaccaaccacacccttctcattcaaaatggttcactcaccatgctatggtgagagtgctactttctttttagtctaagacacggactaatgaataatgattcataggtcctttattgcgcgtgatacactggacactttcggcttgcttacacaatgcttaacat

SEQ ID NO: 13334 - DNA, 569 bp, Glycine max
  unsure at all n locations
  Clone ID: jC-gmle01810068d01a1
agcctagactgaaatantcagaaaantttaagananaacgaagcnngaannctttcggaaagatatgactcagactatgatgctacatagctaaggcatgggagataccgtgtgagaatttaaaaccagacccagttctgacacacctgtgctgatcctaccctataggaaacttatcttcacaaacgcagacaaagtccacgcggctaaggcgcttagcaggcttggattagaagactgctttgaaggaatcatatgctttgagacccttaattctatccacaagagcactgtttctgatgatgaagatgatattgagtttgtgggttcaaggaccaccaatcctaccacttgtaatggtttaggcaccttttaaatgtttgacattatagggcattttgctcaacccaattccggtgcaatctctgacaaagacaccaattgtttgcaagccatcaaaaaacgccattgaattggccattaagatagccaatcttatcccacaaagaaactttggtctttgaggacagtctcccgaatatacaatgctgtaaaacgtgtggggctta

SEQ ID NO: 13335 - DNA, 494 bp, Glycine max
  Clone ID: jC-gmle01810068d01d1
caactcaattatacattatagctattattttgcgtacaacctaacccgaaatttcatatattcataattgtcacacctttgattgttggaattcaacacattaaaccaaactattcaacaaaagaaaaattattacataattcaagattatcatagacaatctggaataattttcaaatgatacgtaattgagtttttaaactgtttttttatattaaaaaactcaattacatatcacataaaatttcagtaggaccatagatatataatggtcttagattatgcaataatttatcttccagacacaatgatttacaaaaatattctaccacttctcaactgaagaaatggcggggggaacgatggggagagaacaggcgaagaggggagagcatccccatgaagcctggggaagcaagaccattgatattctggtgcttaagcatgttgtaacccacatgttcaggtcggttcccatttctaaattgtttatt

SEQ ID NO: 13336 - DNA, 537 bp, Glycine max
  Clone ID: jC-gmle01810068d02a1
gcaacatgctcgccctcaagtccatcatcttcctgctcccgctcttcatcgctggcctggccaacgctgcgcccgcgcccgtcccgagcggaggcgtcggcgcgaggatgaacgacacgccccccgtgtacgaggttgtctctgacttcgactaccagtcgttcgtcgtgggcctgaaccaggagtggatcgagctcgatctgttcaactacggtgtcgcccgattctcccccgaggagttcgccgaggccggtctcggacccgatgacatctcgttgatccagtttatggccaaccaggagatcggccacgccgcgctcttgaccaacatcatcaacaacggcggccgacccgccccgaagcagtgccagtacaagtacgactttgacaccgtccgagactttgtcaacttctgccagaggctcacccgatggggagagtccggagtgtacggcttccttccgcaccttgactcgcgacccgccgcgcagctgcttcttcagtccatcaccaccgaggcgcgacagcagatggtct

SEQ ID NO: 13337 - DNA, 475 bp, Glycine max
  unsure at all n locations
  Clone ID: jC-gmle01810068d02d1
atggcgcgactcatgtccgnttgcggtacacccccccagaatattttccccggctccacgagcatctctactccgcggccgcccttttttttttttttttttttttttttttttttgttttttttttgctttttttgtggtggttttctttccctcttgtgtttggaaaacccaaaaaaaaagggtgtccctttgcccaaacttaaacccccggtatcccatttttaatcccggaaaccaaatgggaatgggatttccaattgggctgggggaatctttttttcctgaaataacccccccaaataaagatgtctaattgaaagcttttgtgccggggttttaaaagccccaaaacccctccccctttaaaaaacccccccctggttaaagctcaaaacccccccccggggggaaacccaaaaccgggggttccccgttttttttttgcttcttcccaagaaaaccaaaacccctt

SEQ ID NO: 13338 - DNA, 584 bp, Glycine max
  unsure at all n locations
  Clone ID: jC-gmle01810068d03a1
gcaacatgctcgccctcaagtccatcttcttcctgctcccgctcttcatcgctggcctggccaacgctgcgcccgcgcccgtcccgagcggaggcgtcggcgcgaggatgaacgacacgccccccgtgtacgaggttgtctctgacttcgactaccagtcgttcgtcgtgggcctgaaccaggagtggatcgagctcgatctgttcaactacggtgtcgcccgattctcccccgaggagttcgccgaggccggtctcggacccgatgacatctcgttgatccagtttatggccaaccaggagatcggccacgccgcgctcttgaccaacatcatcaacaacggcggccgacccgccccgaagcagtgccagtacaagtacgactttgacaccgtccgagactttgtcaacttctgccagaggctcacccgatggggagagtccggagtgtacggctttctcccgcaccttgactcgcgacccgccgcgcagctgcttctccagtccatcaccaccgaggcgcgacagcagatggtcttccgccagttcttcggcgcgcaccccatgcncgtgtggttcgagagc

SEQ ID NO: 13339 - DNA, 450 bp, Glycine max
  Clone ID: jC-gmle01810068d03d1
ccagcaactaaaagatttatttgaatggatggctctcagccagggtttacagctacacccaatttatgtgtgaagccaataataactcaagcaagataaaatttactctaacagactttgaagggtcctacaacatatgctcttttacaagattgacaacactgacacctgaggatgggaaaattttccaagatgaaaagtgtgttacacatcgactgggacggcttgatcaagaacaaggactcctggaagctatttgccttccaataactccaaactggcaccaccaccagtagatatgtgggtcatgacactagcaactactactttctacacagatgcaacagaatcttctcctacaataattgtggacaccccctttccactgaggtcaaccaggttctttgcaatagcctttggtccaacagcaaacttgtcaaactcaaacac

SEQ ID NO: 13340 - DNA, 465 bp, Glycine max
  Clone ID: jC-gmle01810068d04a1
ttcacacctaacacaaacccacttcccttcttttccggaggctcaaccggccaccatgggccttcttctacaccacccaacctccctcgcctagatctactcagatcacaatcccaaatctctcaaattcggcgtcgtcgttttagctcaccttatataaaaaaagcagaaaggatgccgtttcctctataattcgcttactcgcgctgtgtgctgtgtttctttctaacattcgtgttccgtgtgtgcgtttctttttttgttcctttgttctttttggagcttctttgatttttccggcgagaagaggatgacgtccgtcgcgaggcagccaacgtggaaggagcgggaaaacaacaagaggcgagagaggaggaggagagccattgcggcgaagatcttctccggcctgcgaatgtacggcaactacaagctccccaaacactgcgacaacaaccgaagttc

SEQ ID NO: 13341 - DNA, 484 bp, Glycine max
  Clone ID: jC-gmle01810068d04d1
gtgatcatcatcagatttttcaacgagagggaatcattagtaaattcggtggcaatggatacgtcacaccaataacatgaaggctaggagttaagccgcatagtgcagcttttgtctatgctgtatctttttcttaggcagttgtaggattgttatgataagagaaatgctagtgatattctggtgggatattataatttttgtatcatggtggttgggccgctttggacacatcttgaacatgaaattggcccttttcaataataagaaatatttatttgctactaaaaaaattaactgcaaatcaatgacaggcatcttctggtggtgaaaacaattttcacttgacgtgcttgataaaccaaattaacatgtcttgatgcgccttttttgcactcttaacagttgctttatcatcatcattgtacccgaaagtccatccatgactaacaccagggtatagtttcacaaagctcttaaactt

SEQ ID NO: 13342 - DNA, 614 bp, Glycine max
  unsure at all n locations
  Clone ID: jC-gmle01810068d05a1
gatgtctcgcaaggaaaacctgatcctcgtattgcataccaagaaaggggcttggaagatagcaatatgaatcactgatatgtggcacgccaacaagcacaatggtaggcaagcaattaagatggtgttgatggaccaaatgacgattttgatgttattcgatatactggaattgagtacattcattttagtgctttgatacattcatgagtttcattcctgactcttgtagggtgcaatgattggcgttactctatggcaataactgtttgctgaatttgaggcaaagttgcattgtggttctgcatatttgattcagaacattaaagttgttgacaatcattctacatacaaaacaaatatcccttcaatgtccaaaatatcaagcatgggtcaaagntgtatgtcaacattgatatagcaaaaatccaagaattccataatagatgtaggtatgtcgttctatgctggcggagtatcaaatgaaggaagtgtttctcaatcacaatatagctaatatttcccacgaaactcaattgaaaagttcttgcataatgctaaaatgttaagttagttgaaataagcagactgagaaaggtacaagttaactttaa

SEQ ID NO: 13343 - DNA, 530 bp, Glycine max
  Clone ID: jC-gmle01810068d05d1
ccataattccattcaaagcagaagcataatcagttcctcataaatatccacagttttcgcaaaaaaaattaatataatgtacagcagtaaatatatatatatatatatatatatatatatatatatatatatcaaattagttagcagcctccccggcattattgtcatttccatcctccaagttcttctgttgaagttcatgttttagtctttgatcctccaagtttttctgttgaagctcatgttttagtctttgatcctccaagttcttctgtttaatctcatgttttagtctctgtatctgccgatccttctcttctaatttttcttgtaacataagaaccatttcattggatctttccacatcatttggcagtccttccatgtgcttgtgcaacccttcaaattgatttctaagttgtgaattttgggacttctgcaatgcaagtttcatccctaattcatgcatcttcccctcagacgcttgatttccaatctctttattttcctctgcaggggtctacatttag

SEQ ID NO: 13344 - DNA, 477 bp, Glycine max
  unsure at all n locations
  Clone ID: jC-gmle01810068d06a1
tagctatacgttaacgantagtnaanntttaagaaagnacgaagcncgaattctctcgagcagaattctctgggctagatccaccctaagtgtcacatatgtaacagtgctagagagggttctttttttgatcttgtagcttaccaccccactcccaagaccaatggatcaactactgtgaggggagagacagtggccaagttgaaggtggcaatcaatggtttcggacgcattggtagaaactttcttcgctgctggcacggccgaaaagactcaccccttgaagtcgttgttgacaacgacagtggtggtgtcaagaatgctttgcacctgctgaaatatgattctatgctgggaacctttaaggcagatgtgaaaatactagacaatgaaaccattactgttgatggaaagtccatcaaggttgtttaagcaaggacccttttaagcttccatgggctgatcttggaattgaca

SEQ ID NO: 13345 - DNA, 599 bp, Glycine max
  unsure at all n locations
  Clone ID: jC-gmle01810068d06d1
aagccaattcatctcgatccctagtanacctgtcccagaatttntcccgggctccacgcgctctctactcggcgcgcgccctttttttttttttttaaaattttttttcttccataccatgattaatttatttaggggtccacagaattcaacagcttcttcaataaagaaaaccttttggctcttccaaaaagatcatgatttacttcaagtttactatgttgctgtagagaatcttatacggatacaccgcgaaaaagcttgaagatcaacaccccctcactcaaatctaccaataacgaaatcataatgtgctcctttcaaagcctgagatgtcgataacaactccatatctaacaaaccgatatgttaataggttaccaagtgatacgttcacagcttccttctcacagttagttcattgctctgaaaaacttaagtcacttggccctgctttaaccttggactttgctggagtacaaatttggacccattgttctatgaattcacttgcattggtaccctcatctgggatagacatgagccccttttttcctccacaagaactggggtccataactacaatatttgcaccttaa

SEQ ID NO: 13346 - DNA, 476 bp, Glycine max
  unsure at all n locations
  Clone ID: jC-gmle01810068d07a1
agggggcaccaaancaccaaatctacctcgtacaaataacttatgagctttctgagggggtaaagtttgaccttgctagagtagaagccccaaaggaagctacccttgtttaatataaccagtgcttagagacaatatctaaactggaggagagaataaaagaagttgaggataatgcattaaggattcatgagcatgctgatatagcagaaaaagaaatgaaggctttgaaattacaagtcactaaacttaatgaagaaaaggaagatgccactctccgttattagcaatgcttggagataatttccagtttggagtataagctctcttgtgctgaaaaggaggcgcgtattcttaatttcaaaatagttgatggggatgaataattacagagttctgagcaatagtgttttttttggagacataaatcacacgctgaagtcggaatacaatttttggacaataatggggtctta

SEQ ID NO: 13347 - DNA, 341 bp, Glycine max
  Clone ID: jC-gmle01810068d08a1
gaacatatattacagaggtggccctggttcacaaagatgacatgcttatgaggggttcaaaataactgtgactgatcctgataccgctttaagaactatcactagagaagctaaggaaacaggccctgactgtcaagaggtgactaaagtggagccagctgaatcagaagaagtgaaagattcttttgtgaataatattaaaagaccaatgaccccccaacccttgaaaattaaggcatacatcgaaatgaaatgtttacaatttaaaagagttcttcccattaaggaggcatagcgtaaggtggatgctacacgaaatgatgactgacccgtcaaaataa

SEQ ID NO: 13348 - DNA, 536 bp, Glycine max
  unsure at all n locations
  Clone ID: jC-gmle01810068d08d1
tgtnnaaanaatggggnnnnagcagttgcaatcgnnctatactagnanaccaatnngcagggtcgaccagctcactcagtcggctggcgccctttcttcctttttttttttttttattttttaattttttgtgctaattgttttttctcggtgaatgggataaaataattattgattcttacagtgtacaactaagagcgtattttattgttcaaacataattctgagacttgcgtgaatgattatgcaacatataattcggcttttccatcaatgaatagactcatgaactcttcaccatccacagtttctttttctatgagaagttgaacaagcttgtgaaggatatcaatgtgagttgagataatatgtgttgccctagaatatgctctctataccagctccctcactttcgcatccactacatccggagatgccatggagtaatccttttgcgatgacatcggatgacccaagaatggatttccaccaggtccaccaaaggcaacttgtccaatttttttgctgaatccaaa

SEQ ID NO: 13349 - DNA, 520 bp, Glycine max
  unsure at all n locations
  Clone ID: jC-gmle01810068d09a1
ntggctagtagcanatgacgnantnagnaannntttaaagngaganacnaagctnggaattcttttcgaggttctctctacctacacagcaagatccctgnttttttttgagccaagatggctggctcaggtattgttttcgaaggctatgaaaaaagaccccagatatcattttttgaacatggtgtgtttgctgaccctgaaggaataggcctccgagctttgtccaaagaccaattggacgagattcttaaaccagcagagtgcagtattgttgcatcactttcaaacgattatgttgactcttatgttctgtcagagtcaagcctgttcatctatccttataaaattattatcaaaacttgtgggactaccaaattgcttctgtccatccctgtcatcctcaagatggctgatgctcttgacattgctgtgaaatctgtgaggtacacttgtggaattttattttttctggggcacagtctttttctcaccgcaatttttaagaggaggtttttgt

SEQ ID NO: 13350 - DNA, 477 bp, Glycine max
  unsure at all n locations
  Clone ID: jC-gmle01810068d09d1
ggggnnattgcggggagactgagcactcgaaacattgcggtcaccgctactcgcgcggcgccttttttttttttgttgaatttttctttgaagagcctatatgggagcttcttattaatacatggtgggtctgaactacctacagctaattacgtagctactgcccacctattgtataggcatgatataacagataaatggattaacctttgcttattgataatgggacattatactaactattgatgctgaacttctacgtctctatgtgtacactgactctagaatattttaatgctagtgatatatatacaaatcttttttatacaaacctaaagattctgaataggaaccttttattcatgtactagaagtaatttgagcttgccatgacacatctatctgaatgcatcgtatggacttccttcacactcgggatactagagtaattatgggaagttctagaggtggcattgg

SEQ ID NO: 13351 - DNA, 569 bp, Glycine max
  Clone ID: jC-gmle01810068d10a1
acactgtataatcccccacaacccttattttttttcaggatccagccctctctctctttggaagtgttggaatttgttttcaactggcccacgggaaaaaaaagtcaaaaaacaagaaaaaaaaggggaatatcgtttttgacttttgtatatatcaagacaaaatcgagtttttattataaagtggggtattttacaattatgaatatgtaccaattgcaacagtttcatattcaacccatgatgaagatggataacacgatgaggaagagggagagaagcaaagccatggagaaagagaggcttcaagtgatggacttgagtggcatgtccttggagtttcttcccaaaccttcgcttgatttagccaccatttgcaagttggacctatctaataacaatctccaggaaattccggaatccttaacggctagacttctaaacgtggaagtgttggacgtgcgttccaaccagctaaactcccttcccaattccattggctgcctctctaagctcaaggttttgaatgtctcaggcaacttcatcgaatccctccccaaaccattgag

SEQ ID NO: 13352 - DNA, 525 bp, Glycine max
  Clone ID: jC-gmle01810068d10d1
cctataaaattcttatgttttagggaagggaaacatttggatcgtcctgaataggatatcaccagacaaaaaaaaaaaaaaacttttatcctatcaaattcgcagaagcactgttacataaaatttttgttcttaatcaaatgtcatctgttaagtttcatgccagaatggattcaaacaatggtgaatataaataacgctccccgtaactaggaaataccacctgcacatcaacaggagcaaatgacatgatttagcattcccaaatattttgtacctctaactggaattttcacaatttctcacacattttggaaccttgaagggtttttgattggtttccaagcaccgattacaatgaagcaaaagatgttactcaagtgtatgacgtaaagatgaaggctttggcaacaaaacaggggaacaagactgttactgagtacactgacaagcttagcccttatggatggaatttgaccaattaagacccaatgttctaatgatgtaacagttcctaaaaagttt

SEQ ID NO: 13353 - DNA, 495 bp, Glycine max
  unsure at all n locations
  Clone ID: jC-gmle01810068d11a1
gggtgcttcttcactttctctctccaactactttcactcccaagctccatggccgcaagggttttacccctttcaatttcatgctcctctcccccccacattctctgtcttccctcccctcccaaacccctctttctctgccgccactctctgctccgttaccgttccactccgcgactcacatgtaaggcagcccaagtttcggtcgccgaagagtcgtcggcgtccggcgacaactgggttccggtggtgcctctgtctgctctgccgaagggggagcggcgcgtgatcattcaggacggcgagaccatactgctgctttggtacaaagaccaagttttcgctattgagaataggtcccctgctgaaggcgcctatactgaaggcttgctcaatgccaagctcacccaggatgggtgcatagtttgcccatcaactgatagcacatttgatctgcgaacgggagatattaangaatggtattcaaaaatcctg

SEQ ID NO: 13354 - DNA, 442 bp, Glycine max
  Clone ID: jC-gmle01810068d11d1
atcattcaattttttttaagtattagtccatagtcggacatgggttacgatacacacaacacaaacccataaaagttgtaagtagggcacaactcataacacaaatatctgtttcccacatgcgtcctacactacactgctgtaactatcccggaggaaacttgtgaacgagtgtgcccgagccaaccgcaccaagttacctcgatctctcacagccagtgaaaaaaatttcttcattttctctctaacatgactaggatacaaaaagaggaagcaagtttgggccccatatcagcgtgcactcgtttttgggacccttatctggaataaccaaccacacccttctcattcaaaatggttcactcaccatgctatggtgtgagtgctactttctttttagtctaagacacggactaatgaaatatgattcatagctccttta

SEQ ID NO: 13355 - DNA, 598 bp, Glycine max
  Clone ID: jC-gmle01810068d12a1
gtgaggttttacaaggaggaagaaaagatttgaccccgagcatgcaaaaaagcttgcctgggtggcagatctgtatgtgaatgatgcatttcctcctgctcacagggcacatgcatcaacagagggtgttactaaatacttgaagccatctgttgctggttttcttttgcaaaaggaacttgattaccttgttggggcagtatcaaaccccaaaaggccatttgctgccattgttggtggctccaaagtctcatctaaaattggagtgattgagtcacttttagaaaaagttgacatccttcttcttggtggaggaatgatcttcacattttacaaggcacaaggtctttcagtgggttcatcccttgtagaagaagataagttggatcttgctacatcactacttgcaaaagccaaggaaaagggggtgtctctcttgttaccaagtgatgtggtgattgcagacaaatttgctcctgatgctaatagcaaggtcgtgccagcatctgccatcactgatggctggatgggattggatattgctccagattctgttaaatcattcagtgaagcattggatactacccaaccatcttat

SEQ ID NO: 13356 - DNA, 378 bp, Glycine max
  Clone ID: jC-gmle01810068d12d1
ggagaaaaagtgtttgtcttgcatcatagagagtgtatactttgcctgaaaacactgttgtgccatttgacccccaaagaaaaattaagaagtgggggggcaaaggggataaaaataacttcagctttaatttgctgaaatttccactggtactcctggggtgggttctaaaaccttggcttctgggagttttttaaataaaagttccttaaatgattccactgttccttcaccactaattaagcttgcaagaagccctttgctttctaggtttccatttttaatgggcccatggaacttggcttgaaccagctttgcaagtttcactgcatttttttgtcccgaaaccaaggtaaaatggggcaaaagctgtttttt

SEQ ID NO: 13357 - DNA, 483 bp, Glycine max
  Clone ID: jC-gmle01810068e01a1
aattggtcttggatcctcaattgtagttgtgtttacaccaagtgatgacctggcaagggaagtttttgatgcttctgaagcgagtggggacaaactatggaggttgccgctagaagaaagttactgggagtcaatgaaatcaggagtagctgatatggtgaacactggtggtcgaccaggtagtgctattactgcggctcttttcttaaagcagtttgttgacgagaaggttcaatggatgcatattgacatggctggtccggtgtggaatgaaaagcagcgctgtgcaacaggatttggtgttgctactttggtggaatgggttttgaggaacgcatcttaaatgcgaactgacatgaaatcttgttcaatcgtagtgggatatatatactaataacttatctgaagggatataaaaggtgtgtgccccgaggcagatcttagccatatttcagtgtatttaaaatgtttttattaggatgc

SEQ ID NO: 13358 - DNA, 126 bp, Glycine max
  Clone ID: jC-gmle01810068e01d1
attcttatatttttaataattacaaggtatttaaaaacaattttcatccataaccaaaatattaaaaataaaatactatcattatattttcaaaataatcaatacacaaaaattctcacataaaaa

SEQ ID NO: 13359 - DNA, 589 bp, Glycine max
  Clone ID: jC-gmle01810068e02a1
gatttaaccaaatatgtgaaaagattgattgagagtcttatgtttataacctttatgcgatcattaaccattatggtggtctaggccccgggcattatactgcgtattgtaagttgatcgatgacaataaatggtgccatttcgatgatagtcatgtctctcctgttactgaagccgaaattaaatcttcagctgcatatgtgttattttatcagagaaatagaagtaaaggccagatggaaggagagacatctcaggttcatacagtttagatcatgattggacattttgttgcttgatgcctactttatatgcttagcagttagcacaaagccaagcttatgtcttagatagttattttacctcgcagtgctagactgcaaggtaatatattgagacaaaatgttaccgtagtgaaagagcaattaaacaaaaatgtttaggtgaggctctagttagttttaagttcttaatcactacatgaatgatatcattttttgatagaaaaaatttggcagtctatgaacttaaaaaatttctgttatttcattttattggaggttaaacacatcatgaattcaccataatt

SEQ ID NO: 13360 - DNA, 507 bp, Glycine max
  Clone ID: jC-gmle01810068e02d1
aaacacactcattgcacatagtaatgcgctgtatttaagtgaataaaatattacatactagttcacaaatgcaaaaggacactcatcaaccagatatttgagactcttacagttctcaagaagtcgcgtcagcatagggttagtggcgttagaactcagaatttcattcttaacgccaaaaagaacagccagtaaagctactggaaaaggatcaactctagtaagaaaaacaattttcttacctctcccaagtgctgtgcgaatccttttgttgatatctgaggagcgattgttaactgcagaactaatccaagcagtggtgggtaaaccaccacgtccactaccacatgtaacatttacaacgacagcttctgaaggtaattgacttacaggataaagacaattcacaaaaattggtaaccaagaatccactggaaaatttccatcgaagaattcttgtgtgttagccaacacaagcttatcataaaaaacaatcttgtttggaaa

SEQ ID NO: 13361 - DNA, 518 bp, Glycine max
  unsure at all n locations
  Clone ID: jC-gmle01810068e03a1
tgcccttagcccgtagcnntctttnaanntncaagnacaacngaagcncgaattctgtcggccttacgaaaatcaactaaagaaactantttggcgctccctactccatctctgggttacctcacactacactctcctcccccccaccaaaccccataaagttaacccctttcccttttcctcgaaccgaaattcacaatttttaacgaaacaaacgcgacccagaagcagaagaaacctctccctaacccctgcacgcgttgcggcgccaccctcaacggttgaagccgatcgattatacccagaggccgaaaataacgaaactgaggaagagtttagcgacgagagctcttcctctaaattcacttggagggatcactggtaccctgtctcgttaattgaagatctgaaccctctcttgcccacaccgatttagcttctgtgtcgagaaattgtgctctggtacgacaagttcatttcccaatgggttgcttttgatgacaaatgcccccatcgtc

SEQ ID NO: 13362 - DNA, 408 bp, Glycine max
  unsure at all n locations
  Clone ID: jC-gmle01810068e03d1
ntgggctatcatgtcgctgagtangctgtccagaatattttcccgggctaccacgagcatctctactcggcgggcgcccttttttttttttttttggaactatttttttttatatttcaactttacgtaaagtgagatgagcaccatattggggctgaagagtaaatactgtaacaggagcatgagcataagctggataaagttcaaatgagaaatgttgtaaaatcgctgacaaaaccatttttgcctccaacaaagaaaagttttgtccaatgcatattctaggaccccatccaaatggaaaaaatgaaactctgccatttgtggccttaagaactccttcagaaaatctctcaggtttgaattcattcacattatcaccccagagttcgcgggcatggggaacca

SEQ ID NO: 13363 - DNA, 335 bp, Glycine max
  Clone ID: jC-gmle01810068e04a1
agtgaaatgacaaggggaggatcgtgctttagtgcgtaacgaaggatactaagagggaaaaatattataaaaaggagactgtagtcccccgtatgaaaaggatcatacgatgacgaaaaatgcaggaggacaccctgagaggacacactaaacctctgtgccttataacaatacgacccagctaacggccatatgaagagggtgaatacagaaccatcgtcgacacacgagggatgagggagttacttgaggtgaagaaggattgagttctgacgatgaaaccgtgcaagaggagcaatggtacacaattatggactgtaaaaaaagtgctggga

SEQ ID NO: 13364 - DNA, 471 bp, Glycine max
  Clone ID: jC-gmle01810068e04d1
atacggagttccgcaagggcaaggaaaattgacatacacttgtaagcaagatacaaggacattacaacataaatataaacaataaaattgagttattaactagaataaatcaaggtatacacgattctacgtctaagcatttaccattttatgtccaagctgacatgatattgatgacacatattggtgaatcgaaatataaacatctaagctgatacaattactgatgaaaataactagtaagaatacatgtgatcttatctttgagcctgatcagcactgtggttgcttgctgtatatgatgatcctgccctaccattcaatattccattgtgcataggtggggaggttccccacttaccctctgattcgatccgttttattactttgacagatgcattcgtaagcctaacaacaaactgattaagttctataggatggacagcaaccacaagaggatacacaccttga

SEQ ID NO: 13365 - DNA, 546 bp, Glycine max
  Clone ID: jC-gmle01810068e05a1
atgacattgcattcaatggggaaaatcctggcctggagtcatcattaacaaaccagggggaggttatgtttataaaggagttccaaccgattacaccggcgaagatgttactgttgataacttttttgctgctttacttggaaataagtcagcactgactggtggcagtgggaaggttgtggacagtggtcctgatgatcatatatttgtatactatactgaccatggaggtcctggggtgctcgggatgcctgctggtccttacttatacgcggatgatctgattgaagtcttgaagaaaaagcatgcttctggaacatataaaaacctagtattttatctggaggcatgtgaatctgggagtatctttgaaggtcttcttcctgaagatatcaatatttatgcaaccactgcttccaatgcagaagaaagtagttggggaacatattgccccggggagtattctagtcctccctcagaatatacaacctgtttgggtgacttgtacagtgtcgcttggatggaagacagtgacagacacaattt

SEQ ID NO: 13366 - DNA, 371 bp, Glycine max
  Clone ID: jC-gmle01810068e05d1
acctcacccgatttatataaactaggaagcctggatcaaacaatttgtcagtttaccacaggcttacatgacacgaaaagatataataccaaactttccaaacgtataccatttatttacacaaaatattgctctttcacggtagcacaacacatttcctgtcagttgccaataaagaaacaaacgattacctaacgcaaaaacaacctcctaaaccttaacaagaataaatgacatacgaattaccttgctaagaatactaccaagactatagtaaaacggtcaccccctacttatgcacccatattgaggtgtttgaacatcctaagatgtacataaatgttaattccacgctcagatactaaatccac

SEQ ID NO: 13367 - DNA, 589 bp, Glycine max
  unsure at all n locations
  Clone ID: jC-gmle01810068e06a1
cattacacaagaactctccaaggtattttcttcccacgaaattcatttggtgggaaaatccaagaagagggtggaatttcaagccagccaagatggattatttcaatgcaccaggaagaaaccatctctttgttccggggccggttaacatcccggaccagatcattcgggccatgaacagaaacaatgaggactaccgttctccagcaattccagctatgaccaaaacactgcttgaggatgtcaagaagattttcaagaccataactggaatcccatttctcatccctacaactggtactggtgcttgggagagtgctctcacaaacacactgtctcctggggatcgaattgtatctttcctgattggccaattcagcttgctttggattgatcagcagcaacgcctgaaattcaatgttgatgttgtagagagtgaatggngccagggtgctaagcttgatgttctggaatcaaagattgcttcagatacttcacacactattaaggcaatttgcattgtccacaatgagactgcaactgtngtcaccaatgacttggcaaagtgagacaaattctcgattcctac

SEQ ID NO: 13368 - DNA, 273 bp, Glycine max
  Clone ID: jC-gmle01810068e06d1
aacccttctttcttttccaaagaaaacaagaactaccacaagtttactttattgggggaaaaaaccttaaacacaccccgtgggaaaaaccccctagtaaaaatacaagagggaatatttcaattcaatagaacaaaaaggcccccctttaaagccagacaaataataacaacatcctctcgagccaaccccccccccaacaggcaaaaaaacgctacgttaacaacttcctactcacacccccacattaataacagaaacttaagtaactag

SEQ ID NO: 13369 - DNA, 560 bp, Glycine max
  Clone ID: jC-gmle01810068e07a1
cattacacaagaactctccaaggtattttcttcccacgaaattcatttggtgggaaaatccaagaagagggtggaatttcaagccagggaagatggattatttcaatgcaccaggaagaaaccatctctttgttccggggccggttaacatcccggaccagatcattcgggccatgaacagaaacaatgaggactaccgttctccagcaattccagctatgaccaaaacactgcttgaggatgtcaagaagattttcaagaccataactggaatcccatttctcatccctacaactggtactggtgcttgggagagtgctctcacaaacacactgtctcctggggatcgaattgtatctttcctgattggccaattcagcttgctttggattgatcagcagcaacgcctgaaattcaatgttgatgttgtagagagtgaatggggccagggtgctaagcttgatgttctggaatcaaagattgctttagatacttcacacactattaaggcaatttgcattgtccacaatgagactgcaactggcgtcaccaatgacttg

SEQ ID NO: 13370 - DNA, 559 bp, Glycine max
  unsure at all n locations
  Clone ID: jC-gmle01810068e07d1
ggggnanaacaggggnnnagagcggatccgatcagctatactntgnanaacnatttanaaggttagaccggctcactcatcggcgtggcgcccttacgttcttttttataatgttatttttttttttttaccatctaataactgtttgggtgtcggggtaaaaccctttagctgtatgatctatctttttttacaagccaatttggggtcaaagctgctcaagcatattgcaaaagcttggaatgcagataaagggtaccgattattcatggtgaacatgtctttaccaactttgccaaattgaagaatgattttattatgctccggtggagcttgttgatatggagttggtgcaccaacgggtggttgggtggcatcaatcaactgaaagtttttaacagacgcaactgtttctttgtcacggaaattaaagcaccaacattgtaactgttcgtgccatcttggaggcttgtttttagaaccaaggggttcatcttgccatcatcatccttgatgatagattccccaatctcagaaaatcgtgaactggtgaacttaa

SEQ ID NO: 13371 - DNA, 571 bp, Glycine max
  unsure at all n locations
  Clone ID: jC-gmle01810068e08a1
gaccaataaaatcagaatcgatnatatgtcagaaatgggaatggctgtggcgagtgatgatttgctgagcgagaaagctgccgccatagagcgtctctggagagaagccaggccatcacggacgacgcgnttcattctcggctccttcgatcaccgcctctccgcctcgaaaccgcatgcgccccacccagatcagaacgcattctattcggaaagcccatgagaatattgataggactttgaagtctgcagaggccatattggctcacttgatcaatattatcaggcagaagcaaaaatagttaaaggaccacatgaagatgtgaagaactatcttgaagcaattgatcagtggaagaaacattagatttttggcataagaagggttttaagaatgatgatggtgttgcatccgtgccacaatttgaaagcgagctatttctaaactagaagagaattaagcggctattatcgcttcaggtnaatgcatttcattgataatcaatcttaaagcaaatgaacagcacctggaacggcaggtctttactttagctgtacatatagaactttc

SEQ ID NO: 13372 - DNA, 481 bp, Glycine max
  Clone ID: jC-gmle01810068e08d1
tttctttttttttttttttttttttttttttttttttaaaaaaaatccattatggtggttgtaggggtcctatcacactattttcttgttcaaccaaatttataatcacaatatgccatatacctgatagaatggataacggaacaacgaaaaataaactcataaaacggctaataaattattaacttcctgcctgctgggttaacctaccacttaaaaaaaaaaggttacaggaatcccacctccctagaatcaaaaatcttaatgttcttcgtcctatctggtgataattaaataaaacagtattagggtcccagctaccatgggtcactcgaaaatttggaacctgcggaacaagacaccaaaacttttctcttgcccgactttcaggaaaccaggatctgaacctttcacgtttggccccatgcccttgtccttaaatttgaaaatatattcaatttgcccactttggatttcgaaa

SEQ ID NO: 13373 - DNA, 535 bp, Glycine max
  unsure at all n locations
  Clone ID: jC-gmle01810068e09a1
tggccttaaaccttagacgtantacagaaganntttaangaaacgncngaagctnggaatttttttcgagaccaaatcaaaatcagaatcagaacctgatgttaagaagatgggaatggctgtggggggggatgttttgttgagcgagaaagctgccccgacgagagcgtctttggagagaagccaggccatcacggacgacgtcgtttcgattctcggctccttagatcaccgcctcttcgtcctcgaaaccgccatgcgccccacccagatcagaacgcattctattcggaaagcccatgataatattgataggactttgaagtctgcagaggccatattggctcactttgatcaatattatcaggcagaagcaaaaattgttaaaggaccacatgaagatgtgaagaactattttgaagcaattgatcagctgagaagaaacattaaaatttttgcgcataagatgggttctaagaatgatgatggtgttgtcatccgtgccaacaatttgataagcgaagctatttctaaa

SEQ ID NO: 13374 - DNA, 254 bp, Glycine max
  Clone ID: jC-gmle01810068e10a1
gaaaaataaaaaaaaaaaaaaaataaataattaaaaaaaaaaaaaaaaaaaataagaagaagaaatttaaaaaaaaaaacaaaaaatccccccaattaaacaaaaattaaataaagtgaaaataaaaaaagaaataaaaaggaaaaaatgtaaaatatttaaggaaaaataaaataactaaacatagagaattataaatgaaaaatataaagattaaaaaaaaagtagaaattgatttaattattcgatataaa

SEQ ID NO: 13375 - DNA, 477 bp, Glycine max
  unsure at all n locations
  Clone ID: jC-gmle01810068e10d1
ttnnttnnnttttaatttttttttttttcgcaatatctcacaagatgtgggtacttggcttcgtacagacgaatgtcgctcgcctttgctttgtttgccgttgtcttagctgctgtctccgatctgtgccatcgtcctcttcaactcctccatgacgcccttaaccactccaaccttttcaccttcatgtgcagaggacagactgtcctcccccacgttcaattgagctttgttgcctttcttcacccacttttcgagcccgcccagctcgctgaggcgccccagcaaacctctcagcttgtcctgcgtattgcaacccggaagctgctcgagcagctcgggctgttgattgggtccggccgccgagatgaacttggatattaggagggcggtgtaggaggatatgatttccgaggtgccgccgggctcattttcttcctccatgtgcgataggtagaccttccaatgttacctaac

SEQ ID NO: 13376 - DNA, 619 bp, Glycine max
  Clone ID: jC-gmle01810068e11a1
gctgatgtgcctaccatagcacatattgaagagttccattcgatgcagaggatgatgaatgctcctgattcaaatgataatattgatctactgttgagcattgatttgttgggtttacaaggagcaggtaaagcttttccaaacaagattgtttttgatgataagcttgtgttggctaacacacaagaattctttgatggaaattttccagtggattcttggttaccaatttttgtgaattgtctttatcctgtaagtcaattaccttcagaagctgtcgttgtaaatgttacatgtggtagtggacgtggtggtttacccaccactgcttggattagttctgcagttaacaatcgctcctcagatatcaacaaaaggattcgcacagcacttgggagaggtaagaaaattgtttttcttactagagttgatccttttccagtagctttactggctgttctttttggcgttaagaatgaaattctgagttctaacgccactaaccctatgctgacgcgactttttgagaactgtaagagtctcaaatatctggttgatgagtgtccttttgcatttgtgaactagtatgttatattttatttacttaataaagcgcatt

SEQ ID NO: 13377 - DNA, 254 bp, Glycine max
  Clone ID: jC-gmle01810068e12a1
gaaaaaaaaaaaagaaaaaaatataataattgaaaggaaaaaaaagcgaagaaaggaggcggaaataaaaaaaaaaaaaaaagaaacccccccgaaaaaagaaaaataaaaagagagagagagaaaaaaaaggaagatagaaggaaaagaaaagataaggaaaaagaaaaaaaaattaataaaaaaaaataaagagagaagaatagaggaaataaaagaaaaaaaaaagggagggcgaaaataaaagaacttgg

SEQ ID NO: 13378 - DNA, 464 bp, Glycine max
  Clone ID: jC-gmle01810068e12d1
gacatatgaaaaacaccgtgtaacattatgtccttaaatcatcatacagatttggcaacaaaatcatacaattcctttcaacccagccacataatttaattcaacctggcctgcatggatgcgaagtacaaaaatagacctgagtagcaatggaatcaagctcatcaaagaagaggacacgtggagctgattgtttggccttgtcaaaaatttctcgaacattggcttcactttcaccaaaccacatagtgagcaattctgggccccttacactgatgaagttagcttgacattcattagcaattgctttggccaacaaagtttttccacatcctggaggaccatagaagagaaccccttttaatggtgacataccaaacttctcaaatttttctaggtgctccacaggatattgaacagtctcttgcagctcacgcttgacattctcaaggcctccaatatcc

SEQ ID NO: 13379 - DNA, 514 bp, Glycine max
  Clone ID: jC-gmle01810068f01d1
ataacatcattatttctcaatttatatgggggtttaaccataattccctggatacaacatgtatactagtgtatacaccatattcaaagatagctaataaatacttgactgtataattaatatcacacaaacgtaaagtggcaatatatagtgtaaatatatataagcttaatttatacacagaaaccatgagtataaagcatctttatacaaaatattcaacaagaatttactttattaccacatcattatagtaaaatgtcatgataaaggggtgaaattgtatggaatgcttgtgtgaagatgtttttataggagcaaagtgtgtatataaagtaaactattttttaatcaatatatatatattgttcacacattttatatatatatataagaggtgcttaacaagttggataggcaataccacaagaactaacggtttttttggcattaggagagttaacatactgtttcaagctagggtttttgaggtagccacagaagcatggctttt

SEQ ID NO: 13380 - DNA, 561 bp, Glycine max
  unsure at all n locations
  Clone ID: jC-gmle01810068f02a1
cccaaagaagaagcaccagaggtncctcntagccgccttgcttccctcaacaagccagggattccagttcttgtgattggatctgtacccgccatagcaaatggggttatatttccaatatttggcgtgctgatttccagtgtcatcaagacattttatgaaccatttgatgagatgaaaaaggactccaagttttgggcactgatgtttatgatccttggtcttgcatcatttcttataattcctgcacgaggatacttttttgcggtggcagggtgtaagttaatccaacgtatcaggcaaatgtgttttgagaaggttgtcaacatggaggttagttggtttgatgagcctgaaaactcaagtggtgccattggtgcaaggctctcagcagatgctgcttctgttcgtgcccttgtcggagatgcgctgtgactattggttcacaatttcgcaactgtactggcaggtttgattattgctttcgttgcatctggacgtggcattaatattcttgcttgttcctttgatggagaaattgatatgttcaatgaaatcatg

SEQ ID NO: 13381 - DNA, 524 bp, Glycine max
  Clone ID: jC-gmle01810068f02d1
aacttcttaaacatattactttggtttcgaactgaaacaactttaagaaaagaatgtggaaaacattaatgcaccaaaaggaaaatgggatcaaggtacccccttccctctttatgcctttcttctgttttccggttcccctgagacagttaaggaactgaatgatatccctaaatatttacggacacaaattgcaaagacaaacagaggaaatgaaatgccagatattgcctgtgatgtttacatccacatatttacagacacaaggcaaataaataaacattgcagttttaaagacaacctaaagttgctggtttcagctacttgtggaagggccaaagtacatacagattgggggatcaatcctcaaaatagaaaggattgcataaggaattgtccatatcccgtcaccgcatatcagtccagaagcaactgctccagcatagtcttctgcatcctttctattcacctctcccatacaaacaatatcacagttccaacaaacatatcaactgcaaagtaag

SEQ ID NO: 13382 - DNA, 154 bp, Glycine max
  unsure at all n locations
  Clone ID: jC-gmle01810068f03a1
tgcctaaacgttgacgantaaganaannttnaagaagaacngaagctngaattcggttcggaaaaaaaaaaaaaaaaaaaaaaaaactgattaaaaaaaaaaaaaaaaaaaaaaagggcgcgcgctttctagtgagttcgtcgacccggccctt

SEQ ID NO: 13383 - DNA, 372 bp, Glycine max
  Clone ID: jC-gmle01810068f03d1
aggcgagagttgcacctgcagtaccctccggaaaatttttccggggctacacgcgctctcttctgggggcgcgctctttttttttttttttgaacgaaatttcaaaatgtctatgaggagcgaaatctacgggctagaacaattctggggccttaccacatttcaatagacaacatagttgggtttttcactagagaacatcaacggatacaggatgcttcagcttatcatataccattgtaagggcatcctgacaagatggtgcataaacatatcatcgtattgaacactacccatcttgacgggtacatgttcttatgtatattggaagtataacacatctgatctaatttccgagacaccaaccttttg

SEQ ID NO: 13384 - DNA, 570 bp, Glycine max
  unsure at all n locations
  Clone ID: jC-gmle01810068f04a1
atgacattgcattcaatggggaatatcttggcctggagcatcattaacaaaccagatggaggtgatgtttataaaggagttccaaaggattacaccggcgaagatgttactgttgataacttttttgctgctttacttggaaataagtcagcactgactggtggcagtgggaaggttgtggacagtggtcctgatgatcatatatttgtatactatactgaccatggaggtcctggggtgctcgggatgcctgctggtccttacttatacgcggatgatctgattgaagtcttgaagaaaaagcatgcttctggaacatataaaaacctagtattttatctggaggcatgtgaatctgggagtatctttgaaggtcttcttcctgaagatatcaatatttatgcaaccactgcttccaatgcagaagaaagtagttggggaacatattgccccggggagtatcctagtcctcccncagaatatacaacctgtttgggtgacttgtacagtgttgcttggatggaagacagtgacagacactaattgcgaacagaaactctgcaccaacaa

SEQ ID NO: 13385 - DNA, 358 bp, Glycine max
  Clone ID: jC-gmle01810068f04d1
gggggcgtcctaaaccgatttttcatatattcataattgacacacctttgattggtggaattcaacacattaaaccaaacttttcatcaaaagaaaaatcattacataattcaagattttcatagacagtctggaaagatttcaaatgagacgttgttcactgtgtaagctgtttttggataggaaaaagctcgatcaggtaccagagaaatttgcagtggtaccatggatatataaggggcttggattaggcaagaatttatcttccagacccaaagacttacaaaaatactctaccactttttaactgaagaaatggcggggggaaccatggggacagaacaggccaagatgggag

SEQ ID NO: 13386 - DNA, 327 bp, Glycine max
  unsure at all n locations
  Clone ID: jC-gmle01810068f05a1
angacactgcaatcaacggggatactccattagctagaaacaaaagcaacaaaggagagggattttaagtaaaaaaaggagttacacccccttatattagggaagatgtgacggatgataacttataaggagattaacttaaaaagaaataaataatgactgttgatagcgaaaaaatcgaaggaaagtggatctgaagaatatatattagaaaactatactgacaatggtggacttgagaagatagagatgtttgagtggtatcactaatacaggaaaagaccgattgaaagcatgaacaaaaaacatgtattatggaaaataaaa

SEQ ID NO: 13387 - DNA, 499 bp, Glycine max
  Clone ID: jC-gmle01810068f05d1
cagcatgtgacaatcagcaccttcattcttctatcaattgaaaatgagtaaaaacacattaaactaaataaattatgaaaatcataaactactatggagtatctagtaagcaatatccacacattgtattaaaaaaagggtcgattcaccaagtaaaaaaaagaaaatcagacaacgttcttcctgaagcaaatttgtttcatctgcctcacgtagttctctacaaatatactcagcagccaacttctcacgggcaaagttatatggaagtgtaacaaagagaatgactccattttctacttcactgtccattgcttatgaaaccagtgtcctttcagtatctacactttgtttaggcttcagaggtggcggcaatttttccaaaacccactctgatgaagaatcaagccacaaccctttaccggtttctttgtgcttgaaatcgggagcttttgcatttctcttattaatctactatcccaccagtagcatagttttg

SEQ ID NO: 13388 - DNA, 587 bp, Glycine max
  Clone ID: jC-gmle01810068f06a1
cggctcgaggagagggagtaagtggttataggaaagaaaactaaagaaacaaacctaggacaacacaaatccttgaaacgacgacggacatggccgtttcgagctcgcacatgcgtttcacctttgagtgccgctccgatcccgatttctcgccccccccgccgtccttcgacaacctccgccgccgaaacttccgctcctccgcaggatccggcgcggcgtttcacggcatctcctccctcatcctccgcttccctcccaacttccagcgccagctaagcaccaaggcgcgccgcaactgcagcaacatcggcgtcgcgcaaatcgtcgccgcttcgtggtcgaacaacagcgacaactcttcggccgccggggcttcggcgccgcccgcggtcaccgacacggacgccgctacggtgcctctccccgtcgtcgtcgccgccaacgaggacgtcgttgtctccgccgcggcagacgagaacggtgctgtacagttaaacagtagttcttattcttcatttttgaaatccgatgcaagcaaaacgattcatgccgctgaaagactgggtaggggtattgagactgat

SEQ ID NO: 13389 - DNA, 489 bp, Glycine max
  unsure at all n locations
  Clone ID: jC-gmle01810068f06d1
aagtcctatcatggctnntagtacntctccgcaaaattattcccggggtacacgagcatactactcggcgcccgcccttttttttttttttttttaacttttttaaagtaatctctcaaagtatttaataggaaaatactctccataaaagtttctgggatttcattttcctacgagggaggacactatcatcgtaactctatgtattatagagtataaacaccctatgccacattgattcctcattaatcattcaaacaaaggagtatttgtgttataccaatgtgcttacgcggttctttaagctaccaaggctttctcatattcttcaatggatttgaaaagctcaaaaaaattgactttaccaaaacccccacatgcacccttttggtacaccttcctttccttattctgcaccatgcacccaatcctgggaattatttttatgaatatcggtggcctgtgaatttaacacaaaacacatttaac

SEQ ID NO: 13390 - DNA, 598 bp, Glycine max
  unsure at all n locations
  Clone ID: jC-gmle01810068f07a1
cctgtgttctttttgacaaatggnggtcgttaaatctatgaagatgtgaggaggaactcattgtatgaggccatgaagctctgtttcccgaatggattggaaggaattgtctcatagatcaagggaatattcagaaatcctggtgcagtaaccaagatcaaagagtccaagctttctctactttcttatggaaaattaaacaatgttccagaggcagtttacatgcaacatctaatgggaatcgatggggtaattgtggatttggttcaagaaataactgaggcagttgcggatatgataaagccaacaaagggtggtgaaggagagggtttggttgagggttgtgggaaggtgcacggaaactcaaagcctcaattttcacagcaggagttgtctttccttttgaagctcattccacagctgatacaaatttgaatagcagaagagaagacatttcttgaggctttttaattaatttcacaatatgtactgtgtggcccttccaaaatcagtggacccgcttgggggggtcctataaagcttaacctttgacatattttcttcttttactttgtaatataaagaaagatgatcatgt

SEQ ID NO: 13391 - DNA, 417 bp, Glycine max
  Clone ID: jC-gmle01810068f07d1
tgtcgtccttttttttttttttttttttttttttttttccttagcaaaactaaatgggggttgaacggaagttaaaagtatagggataagattttaaccacctactaaaattgaataccctttcaattttaaccgaataccaacctcacttacccgtgaatgcaaccaaaaaaaaaatatcttgtgttaactgaaaataaaataaaggcccgtgtttttccacatcatgacggggaaaaccatggggataacaaaacttattacccttgaagctaccaacctttggtctcatgtgagcataatagaatagggcccctctgatgggccttaccaaaacctgagcatcctgaatggttaacgggacccacgctgaagacgaacaataagaaccgcggggaacgttgttaccctcatctt

SEQ ID NO: 13392 - DNA, 548 bp, Glycine max
  Clone ID: jC-gmle01810068f08a1
accaaatcaacatcagactcacatttttatgtctgaagatgggaatggctgtggcgagtgatgatttgctgagcgagaaagctgctgcgatgagagcgtctatggagagaagccaggccatcacggacgacgccgttttgattctcggatccttcgatcaccgtctctacgccctcgaaaccgccatgcgccccacccagatcagaacgcattctattcggaaagcccatgagaatattgataggactttgaagtctgcagaggccatattggctcactttgatcaatattatcacgcggaagcaaaaatagttaaaggaccccatgaagatgtgaagaactatcttgaagcaattgatcagctgagaagaaacattatattttttggcaataagaagggttttaagaatgatgatggtgttggcatccgtgccaacaatttgataagcgaagctatttctaaactaggaaatgaatgcaagcggctattgtcgtcttacaaggcaaagtcatttcattagatgaatcaatctttaaagcgaaaatga

SEQ ID NO: 13393 - DNA, 500 bp, Glycine max
  Clone ID: jC-gmle01810068f08d1
ccttagcaaaattcaattttttttaacgaagtaaaaagagaaggataagttttttaacacttacttaaaattaatacactttttaattttatttagtaacaacaccaataacaaaagaataaaaccaaaaaaaaaaaaacctatgttaaatgttaatttaatcaatcatcatctttttcctcatcatcatgctcttgcaaatctgcaagaaaaaagcttttagccttgaagcttccaagtttaagtctcatatgagcagcataagattctggcactctgttgagtcttagctgaacctgatcttcttgtttcttttcctcggccaagggggaagacgaagaaaatgaagcagagggaacttttttagctttttcttggacatcttctttttcttcttcctcttcataatcataatcctgatcctcatccacaggcaaaagaggcatggattgtgggttggaccaggaatagaaagatgatcttttggaccacttggatgc

SEQ ID NO: 13394 - DNA, 513 bp, Glycine max
  unsure at all n locations
  Clone ID: jC-gmle01810068f09a1
cttctagataccgagatagagaaanatcttttaagaggctcgngcacactaaaacagggtaaatcttaacatatgaagtagagggaacccctattttcaaaagaggagggaggtcagtgtaaattaatcatctttttggagaaggtgaatgtaatttgccctatttattgttctgttcttttaatgaggaggtatataatgtgagattaaatgttcttttatttatacaggctttggacgtttaaacaatgccgatcaagatccaattttgccttcccattttctagtcgtttttttgtaacggtcttttcatggcatattccttttctgatttcaagtactcagatggcctaagtgtagtgggtttcttcttctgacagctattgtctgagaggctatctcatgggttcttatctatcagaccaattttttcaaaaaccttagagtcttcattgacatagcctccaatatacttgtgaccattaagactgacagctataaaattaccattta

SEQ ID NO: 13395 - DNA, 433 bp, Glycine max
  Clone ID: jC-gmle01810068f09d1
gggaaagaaagagatccgggaatatatttttttttttcccgggcaacccctttaaacgaaaaacacaaaataaaggttttggattgcattattcagagtaaaataaagcccgatcagattcaattttttatgcaaaccaccaagcatttttatccttccctattaaaaccatttttttttactagcaaaggaaaggccttccttagcaagttgatctacatttgcaaccggggggtggaccttagcaactttagcaatagcctggttcttttcaggagttccaccttccaaaaagaccccaacaactttcccatttttaatccagtttgtcccaaacttaggctttgacgacccaggattgttgtctccgaatagaactgggtcgccgacattgtcgccataaaattgccaagacagatcaaatgaacgggaa

SEQ ID NO: 13396 - DNA, 522 bp, Glycine max
  unsure at all n locations
  Clone ID: jC-gmle01810068f10a1
ggctcgagtcaaattctctgtgtagatanttgtacttgtgttaattgtgttgttggggggggaaatttaagtgaagagagaatgatgcacccacacgtctgctctgtgtgcattggtgcttgtggcactggttgtggttgaagtggggcccatggctgaggctgcggtgacttgcaacccaacacagttgactccttgtcttccggcaattaattcaggttctgcaccttcgagtgcttgttgccagaagctgaaggagcaaaagccatgcttttgtggctacctcaaaaaccctagcttgaagcagtatgttaactctcctaatgccaaaaaaaccgttagtttttgtggtattgcctatccaacttgtttagcaccttttatatatatatataaaaatgtgtgaaccatatatttatattgattaaaaaattgtttaatttatatacaccctttgatcctttaaaaacatcttgacacaagcattcaatagaatttcaccactttatcatgacattttac

SEQ ID NO: 13397 - DNA, 535 bp, Glycine max
  Clone ID: jC-gmle01810068f10d1
atagcaaatggtggacatatcttcattacatgttaatcagggggtctacaaggatgcatgggacactagccaaataaaaataccaatatctaaagttctaaactaaactttggaaaatagttgctatgtattaatgctttgaagtacaacgtgattcatgtttaggcaataatgtcttacaaagcaattacttttcagcatgcattgttgtggttgtggtgcaatcaccattgcgtcctttctcagtttcataatgtgtcaaccgtccttcatcttgttctagccgaaaagtatgaccaaaattgcaatttttcctttccaagcgggaatcaataacacaaaccataacaatggtcatagaattcaaattaaactaaaatccccaattatttacacaattacactttctgatccttcacttcactccctaaccccgaacccaacttgctgacccataataaacccaaacccgaatgggtcacctgagcccggtaacaatcgggtatttgattcggttgaaaatgccccggcccgt

SEQ ID NO: 13398 - DNA, 525 bp, Glycine max
  Clone ID: jC-gmle01810068f11a1
ggttggtggtgagtgctgtgttggtgtgcttgttctgcatcatcacccacaagctaaatctcaccgttgggatcatcccttctcttaatgctgctgctggcttgttggggttcttctttgtgaggacctggactgggttgttgaccaagatgggatttttcaccaagccctttactaggcaagagaacactgttattcagacctgtgttgttgcttgctatggccttgccttcagtggggggtttggttcatccttgattgccatggatgagagaacatatgaactcataggccctgattaccctggtaatagagctgaagatgttaaagacccaggcttgggttggatgatgggttttatgtttgttgtcagtttccttggactttttagtcttgtaccacttcgtaaggttatggtcatggattataagcttacatatcccagtgggacagccacagctatgctaatcaacagtttccatacaaaaactggagcagaacttgcagagaaccaaagttcgcagc

SEQ ID NO: 13399 - DNA, 315 bp, Glycine max
  Clone ID: jC-gmle01810068f11d1
gggaaggggccctctcctgaccgtgaatgccggcacagctacttcgggcgctttttttttaaagaattgacttatgtaaccaggctacgaacttccaaactataataggacattactgttccacatgacaagatataactctattactgctatccagcaatattacaataaaccactatatggcttaagactggcagatactttgatatattacattcacttatctgggttaaacacgtgctaggacaccaggaacccatcatttattgtatataagagtcattgctggccagcacttacattcacaatgaacca

SEQ ID NO: 13400 - DNA, 536 bp, Glycine max
  Clone ID: jC-gmle01810068f12a1
tgccaacattggcgtttttgatgcaatagtttgaggctcagatgtcgtattgcacgggggatatgcttgtcaccggcagctttaagccccagccaaggtgtgtatcctcttgtggttgctgcccatcctctagaacctaatcagtttgctgttgggctgacggatggatctgtcaaagtgatagaaccgaacgaatcagagggtaagtggggaaccttcccacctatggacaatggaatattgaatggtagggcaggatcatcatctacaacaagcaaccacactgctgatcaggctcaaagataagatcaaatgtattttactagttattttcatctgaaattgtatcagcttagatgtttagatttcgattcaccaatatgtctcatcaatatcatgtcagcgttggacataaaaaggtaaatgcttagacgtagaatcgcgtataccttgatttattctagttaataactcaattttattggttatatttatgatgtaatgtccttgtatcttgcttacaagtgtatgtaaat

SEQ ID NO: 13401 - DNA, 560 bp, Glycine max
  Clone ID: jC-gmle01810068f12d1
aaaagataattaagaactattattgtcttagacaacatgtgggtaaacagtaagcattaccaaactaattaattaaagtgcaacaatttcacttgtttccacaaacatgacaaaagtaattaataaactcgcgatgatttcagctagctaactagccaatgccaaatcactctaacaaaatcaaaacacgacatagatagatggcattagaagagcaatggacaagattacattatgatatatatcgatcattcgatctctccatccttgtgtgtctcaatgacaacgtctgacctaggtagagcaacacaggtgagaacccatccactttctatttgttcatcatcaaggaagctaccatctgactggtccacgtcacctttcacaattttcccaacacatgaaacgcaagaaccagccctgcacgagtagggaagttcaatgccttcttccttagccttgtcaacaatgaaaacatcatctgggcattcaaactccacttctccttctggggttatgagctttaccttgtacgaagccatgcaagttacacgaccacc

SEQ ID NO: 13402 - DNA, 487 bp, Glycine max
  unsure at all n locations
  Clone ID: jC-gmle01810068g01a1
gatttgcaggcaatggtttctgacgtgnttgtgattggtgaggccaatggagtgctgagtgggcttggtgaggctgcaaaagggactcctgctgagtttgagaattgtattaggaatgagacttccaagaagccggtcataaccggggatgttcatcctttgcctcgttatgttatgaattatctcaggttgcttgttgattatggtgaccctatggattcacttctggagcttagtgaggaggatctctatcggtttaaaaatgatcttggtggtgatggttcgcagttagaggccatgtcgcccttgggacagtggattctgctgctcatgtctgagcttgagtacaatcttgaggagaagtcaaagctttatgaagacagtgcgatgcagcaggtgtttttgatgaacaatttgtattacctcgtgcggaaagtgaaggactctgaccttgggagggtcttgggggataattggattaggaaac

SEQ ID NO: 13403 - DNA, 416 bp, Glycine max
  Clone ID: jC-gmle01810068g01d1
ctcaaacaattttatgttggggccattttttggcttgtaatgcattcaaatttcccattttccatttgcatacaggcactaactatatacatgaattacccatttgcatgatcataggaattattcagcatccattccctaaccaaaacaagttcagctatttaacgagctgaggccccgacccgacacaaactccgatacacctctctattgtttaaccgtacccgtcatcggtgtaacctgttgaaccggaaccaaaccagtattcggcactggatgatacccatgctgttataaaccatcatgaaccaccgctggcgaagggctgtaaagatgcaatggggtcacatgcctcacgctccccccatattattgacccgaaccctgaaccaaatgatggttctccgattggaacc

SEQ ID NO: 13404 - DNA, 461 bp, Glycine max
  Clone ID: jC-gmle01810068g02a1
taagcacaatcagggaatatcctactgattgatatccataatattatacactatcggaagggttttatttggtggttccctgcatgccgcctactttgtacccatgcatgatgcatgatgccaaccatgatgtacgtacttgcttaagcaagcaggaggtgcatacttgctcttggaccttggggggcttacttcctggagaccaactgtgtgattcgtacccctgtgtcatacttattagagtatgttattaatattagaatctctatatattatggtccacccaaagttgaagaagcctaacgctgacactgggtattagattctaatcaaccagcatgctcagaatttggatgttgaatatgattaatccaatgctgatagttatatcaacagcaaagatggtgttgttgcctgctacctcgttaataggaagagagaaatatttaatgatggaatgt

SEQ ID NO: 13405 - DNA, 412 bp, Glycine max
  Clone ID: jC-gmle01810068g02d1
aagataatgtttgctgttactggttgatttttttttctcctattattcacaatcatgcttctccaatgtatcagagacagttcttagattatagcatctcaaacaaaactatttctgaatgagtatctcagacagcctttctcaatgcatgcagcacaacaggcaaagcaggagaactcacttcaatgaatagatccttatttctcagagcatcaccaaaatttagttgccgcagtatacttaaggcaaacccttctctagtgatctcagcaatcaggactttgtcttctttcattattagcaaatctcatgaactcacaatctgaccaactattacagtgatatcatcaagctttccacctgtaagcttcattccaagaatcttcttccataagggtggctcaaaacccct

SEQ ID NO: 13406 - DNA, 601 bp, Glycine max
  unsure at all n locations
  Clone ID: jC-gmle01810068g03a1
taagcacaatcagggaatatccttattgaatgatatccataatattctacactatctaaatggcgcgatttggtggtttcctgcatgatgcctactttgtacccatgcatgatgcatgatgccaaccatgatgtacgtacttccttaagcaagctggaggtgcatccttcctcttggaccttgtggtgcttacttcctggagacccctgtgtcattcgtacccctgtgtcatccttatcagagtatgttattaatattagaatccttatatattattgttttcccaaagttgaggaagcctcagcctgtcagtggttatcagattctaatcaaccagcatgctcagaatttggatgttgaatctgattcatccaatgctgttagttctttcaacagcaaagatggtgttgctgcctgctaccacgttaacatgaagagagaaatatttaatgatggaatgttagtaatagactctcttgacacttttttttccccacacattatcctttattggttaaaattcatgcgaatctcttaacttgaaagtgagaccaaatgcatggaactcanatatttaataggatttcacatcaatttcact

SEQ ID NO: 13407 - DNA, 300 bp, Glycine max
  Clone ID: jC-gmle01810068g03d1
atattgggggaaaaaaaaaataaatatacaaaaaccccaccacaaaaaaaaaaatacttttaaaacacaaaaaaccaatctcctaaaaaaaaaaaaaattttcctttacaaaccctttttaccttaaaaacaaaaaccaaatctttcccctcttttttttaagcaattcccctttcttttttgaaaccccctttcttccttttccagggattttaaattttatcctccggaccctatcttgaactctatgtttttttttgccaatttttgcccacttttttccctcctaaaacccttttt

SEQ ID NO: 13408 - DNA, 514 bp, Glycine max
  Clone ID: jC-gmle01810068g04a1
ctattttattatcttcttcgtctggtttttgcattgaagaaaatttctttgaattgaagaaaacttgaaatcgaattgtgaaacagaaaataaaccaaaggaaatttttactgattgaattgcagagattggaaaaatggcgttgagtatgactcaacagatcgggaccctagctggtgcgacggtgccggattcctcggccggagaatcgaccgcggcggtgagtgccgccgcggtgtggaagtcaccgacggcgagtctgaagtgcaaggtaatgaggacggatggctgcgcggaggggctttcgccgccgctgagtccgtgcaggtcgccggtgctgcgggcggatctgtcggcggcgtgtcaagcattcacggcggaggtggcggaggaggagtacgttgtcggagggaaggaggagaaagggaaggggaaggaaggagtgccggtgtttgtgatgatgcctttggacagcgtgacggcgggggacgcggtgaaccggaaaatggcgatt

SEQ ID NO: 13409 - DNA, 450 bp, Glycine max
  Clone ID: jC-gmle01810068g04d1
accaaagcattcaattttcatatacttgaaatctgccaggaactgtaaactaaataacattaccagccaaaacctaaagggaaattaatcacgcagttataactgcattatccaaacaaaagatataccaagcacaaattatagaacctctactaccataaattgcactactgttgagcacattgcactcggtgaccagatggctgatgatcatcgtcgacgtatgcctcgcggtgttgctgttgctgctttcgtctcatctcctccttaaaggtgacatcatgcaaagcggacttctcacaatcatccagctacatatgtgagacgtgcttgctggtattctgaggcaacaccttttacaataactggcattggtcaggggaaagaaaccctgagtcggggaaatcaacattaaattggatgtaaaggcgacccttaatgaatggccta

SEQ ID NO: 13410 - DNA, 536 bp, Glycine max
  unsure at all n locations
  Clone ID: jC-gmle01810068g05a1
tgctttgttatcgaacatttctttctgatttcaaaaattttccggaaaaaatttgaatctatttttatatgcgaatcaatcctactacttctggtcctgaggtttctgcgcttgaaaaaaaaaatctgggacgtatcgcccaaataattggtccggtactagatgtagcttttcccccaggtaagatgcctaatatttacaacgctctgatagttaagggtcgagatactgttggtcaacaaattaatgtgacttgtgaagtacagcaattattaggaaataatcgaattagagctgtagctatgagtgcgacagaaggtctaatgagaggaatggaagtgattgacacaggagctgccctaagtgttccagtaggtggagcaactctaggacgaattttcaacgtgcttggagagcccattgataatttaggtcctgtagatactcgcacaacatctcccattcatagatctgcgcctgcctttatacaattagatacanaatagccatttttgaaacaggaataaaagtagtag

SEQ ID NO: 13411 - DNA, 346 bp, Glycine max
  unsure at all n locations
  Clone ID: jC-gmle01810068g05d1
tccgatcntataactagttagctgcttatcttatacattatatctataatggtgaggcaacctaactcttattttcatatattcataatattcacacctttgattgttgtatttcaacacattaaaccaaactattcaacataacaaaaattattacataattcaatattattatagacaatctgtaataattttcaaattatacgtaattgaattttcaaactctttttttatattaaaaaacccaattacatattacataaaatttcagtcggaccatagatttattatggtcttagattatacacaaatttatcttccacacccactaattcacaaaaatatt

SEQ ID NO: 13412 - DNA, 394 bp, Glycine max
  Clone ID: jC-gmle01810068g06a1
gagagagagtcctgaaacttgggcgtgattccttcactcacaacaacaacacatcaggatggctgttatgagtcgagcctcttcacgcctccctcagatggtttcccctcaaagggtaggtacactacacacaacgctcccatttgtgaacgcatccacatccacaggcacgcctacaccatatgccccgccaccggctgcgttcgcttcctctcccgccggtgtttagaaggcggaggagttcgtgatctcgaaggtggacgatctgatgaactgggcccgccgcgggtccatctgggccatgaccttcggacttgcctgctgcgtccggcaaatgatgcacaccggcgccgcccgctacgatctcgaccgcttaggcatcaatttcaggccc

SEQ ID NO: 13413 - DNA, 177 bp, Glycine max
  Clone ID: jC-gmle01810068g06d1
cccattcataaaaatgtggggagcttatgtaacgagtgatggccaccgcaaacgccaggcctgcctggcttgaatgctcttttccctgatggtcatggtctcattccatgccaatgcgaaaatgcgtctataaaatgctccccccttctgccgaaagccatgtttcgtatctaatgc

SEQ ID NO: 13414 - DNA, 473 bp, Glycine max
  Clone ID: jC-gmle01810068g07a1
gagagagagtcctgaaacttgggtgctattccttcactcacaacaacaacacatcagggtggctgttatgagtcgagcctcttcacgcccccctcagatggtttccactcaaagggtaggttcagtacacacaacgctcccatttgtgaacgcattcacatccacaggcacgcctacaccatatgccccggcaccggctgcggccggttcctatcccgccggcgtttataaggcggaggagttcgcgatctctaaggtggacgatctgatgaactgggcccgtcgcgggtccatctggcccatgaccttcggactctcctgctgcgccgacgaaatgatgcacaccggggccgtccgctacgatctcgaccgctgaggtatcatttacaggcccagccctcgccagtctgattgcatgatcgctgccggcgctcttaccaacaagatggcttccgtcttcgcaaggtgtatga

SEQ ID NO: 13415 - DNA, 514 bp, Glycine max
  Clone ID: jC-gmle01810068g07d1
ttccttccttttttttaatgctaaatttaaacatttgataaaatgatgctcctagggggctataggaagcctcttacaaaaatatatccaccttttctcttgatcatccccaattacattggcattttaaaatccaactaaaaccctttatgcttcttctttccctattgatggctttgttatttacagagagtacacatgaccgtccattggctaaaacttcgtgctcttccaacccttcataagaaccttaccaacatgatgtggcgtgaaattcccattgctcgaacataacaaagtatgacccgccatattggtgctcatctttgcaccagaaaactggaactttcattttgttgagtaatcaagctttaagttaataaaccttgactcatccatgcctttgaaataactttggttggactgataacacacacctatttacctcaccggagaattcataaccatttccagcaccatacatttattcaccctatttaacaccgcctttgag

SEQ ID NO: 13416 - DNA, 469 bp, Glycine max
  unsure at all n locations
  Clone ID: jC-gmle01810068g08a1
tgcctagacgtggaccantcagcnanntttaagnnannaacgnaagcnggaanacggnnngagganactgaaagaagaagggaaatggctcagttttcggtggagagacacacacattatgatgagctgttgggccaacaatcaatcttcacccccaaaaagcttttgcagatctacagcaaatgcaaactgttcatattgagaagcttattgacatacagtgtcagcctgagtctcagctcaagtacataactgaagcctggctacaaataattgagtgtagaagagtgctgaaatggacatatgcatatgggttttatttgccggagcatgagcatgcaaaaaaacagttccttgagtacttacaaggtgaagcaaaatttgggttggagagactttatcaatgagcggaaaaggaactacagtccgtcttatgtgctgatgatccatctagagaattctatgactt

SEQ ID NO: 13417 - DNA, 499 bp, Glycine max
  Clone ID: jC-gmle01810068g08d1
acaagccaaattttatactaccctcagaaaatgcagaagaaaaagaaacagaaaaaaaaaaaaaagaaacatcaattatcattttttattttactgttttcaagatcccagaaaggaagaatggggggaaagaatatactgcagacttgtattgatacaataatggaatatattatgttcttgtactttgcaggaagctgcaaatatattaaatgatgagaatgcgcgcttgctttgcccttcaatgactataaaagtaccccaaaagtagcacaagtgtagatttgcttgaaattcttgaaatgacaaaaagttcaaggctctctcatccctatattaggaccaaaagaatctttttgtgttttttctttaacaatgtgtcatcagcatgcacaagcttatgcaatccgttgaaggttatatgccaccatatcttcaagggctaaacgaaatacactctgaggtaggcattggagactttgaattgcaagatcggctt

SEQ ID NO: 13418 - DNA, 329 bp, Glycine max
  Clone ID: jC-gmle01810068g09d1
acaaaatcattatttcctggggctttggacactttaataaaataaaattcacctttgtgactccttccacaggcagttatcattttactcctgtaaaaagtggttcttatagaaccacttttcaaattgtatggttcaacccctcattctgattgattgaagggggtatatccaaaatttgaaatgatttaatcaatatgctgtaacaaaagtaaattacatgtccttttcctacaaaagttcacatgaactcactacagaagatgttattgactggacaatctggcttgggtgagtgttaatactttgccaccatttaagatctctaa

SEQ ID NO: 13419 - DNA, 416 bp, Glycine max
  unsure at all n locations
  Clone ID: jC-gmle01810068g10a1
atgccattagccttagcattcattaaganaattangcaagancngaagcgaggaattcgtgtgaggcgattaagaaccgaaaaaacttaataatttacgagaaagacggaggagatttggggggggcacgtggaaaataagaaccaagtcccccccccaatctaagataactatctaccattttaattggataactaggaatagaaactaaatttacaaaaccaaaggtaagttaaaatcaaagagatagttcaataaaaagtgcgaagtgctgagaaatgtaaaaacaacatggtcaacgcatgcgctaaaaggataagcgaatcaggatcaggagcagattgatatcctagtctaacggagggtaaaaactaacttagatatgtaccctgaaaattgagtcaaattataaggaa

SEQ ID NO: 13420 - DNA, 582 bp, Glycine max
  Clone ID: jC-gmle01810068g10d1
aaaattgaacattaaaagtgataccttttcctttatttaaatggaaattgcaacattgggaaaataaattactaaaaggagaaatagtgttcgttgagtttcgccaaatggtcataaagaaataaattacaccgctgaaaatttcaattcgtagaaatgcttctcttcatatttgagtgaccatcctgatcctccatatgagtgccgcatagactcttcaacagttcttgtctgattcaatcaataggcaggcaattcctaagaatttctgaaggaaggtgatggtgatgcaggaggcttcaagtcttcatacctggatgttcatttgaatgaaatcagaatgttaacaatgcctccaagaaacctaagacaaatatagattaaataagaaatgtagttagatttgcttaaaaccaattgatactaagtgaagttactcaatagatatgtaagctacagtccaagaattgagacaggcaatgtggaacttcgtaacacctctccttacaaatgtctatagacaggcgagcctaatgataggcgagaaccatatgggcttagactctgatatatgttagattt

SEQ ID NO: 13421 - DNA, 564 bp, Glycine max
  Clone ID: jC-gmle01810068g11a1
gtaagcgggaaacaatggaattctcatgttgagggctgcaatgatttctcattggcaatctcaaccactcattcattccatatctgctatttatgaaaccgctaagaggaggaagagagtggtgttctcttcttcttcttcagaacttaaccctgtaattcggtcagaggtatcattttgtgttgggacttgcctcattccacatccaaaaaaggttaacacaggtggggaagatgctctctttgtgagcaactataatgggggagttatggctgatgccgatggtgtctctggttgggctgaagaggacgtggatccttcagtgttccctcgtgaattgcttgctaatgctcccaattttgtaggagacgaggaggtgaactatgatcctcagattcttattaggaaagcacatgccgacactttctccacaggctgagctactgtcatcgttgctatgctggagaagaatggaactctgaagattgctaatgttggagattgtggattaagactcatccgtgatggtcatgtagattatttcacttcttcacaagagcacta

SEQ ID NO: 13422 - DNA, 195 bp, Glycine max
  Clone ID: jC-gmle01810068g11d1
aaatatataaaaaaaaaacaaaataacaagaataagggtaaaataaaaaaaaaaatctcaaatataacaaaaaaaatataaaaaataatataaaaaatctaaattaaaaatcttataaaaaaattaaaaataaaaaaataactttatttaaatattaaataatcattaattaaatttccattaaataaaaatttt

SEQ ID NO: 13423 - DNA, 114 bp, Glycine max
  Clone ID: jC-gmle01810068g12a1
gaaatttaaaaaataaaaaaaattaataaattatgagaaaacaaaaaaaatagaataagcagattttttaaaaattaaaaaagatttccccccttcttataatatacatatttt

SEQ ID NO: 13424 - DNA, 539 bp, Glycine max
  Clone ID: jC-gmle01810068g12d1
attgcgtaagttgctgtgctaattgttttttctccttgaatgggataaaataattattgattcttacagtgtacaagtcagagcgtattttatagtacaaacataattctgtgacttgcgtgtatgattatgcaacatataattcggcttttccatcaatgaatagactcatgaactcttcaccatccacagtttctttttctatgagaagttgagcaagcttgtgaaggatatcaatgtgagttgagataatatgtgttgccctagaatatgctctctctaccagttccctcacttccgcatccactacatccgcagttgccatggagtaatccttttgcgatgacatctgttgacccaagaatggatttccaccaggtccaccaatggcaacttgtccaatttttttgctgaatccaaatctctcaaccatctgccttgccactcgtgaaacttgcatgaagtcgtttgatgctccggtggtgacattttcctggccaaaaataaccttttcggcaacccttccacccagggcaaca

SEQ ID NO: 13425 - DNA, 236 bp, Glycine max
  unsure at all n locations
  Clone ID: jC-gmle01810068h01d1
atcccaatcattgtctgtagactccccgaanatttcccggaacgacgacgctcactagntcacaaccgcccttttttttttttatatataatttaataatttataaaaaaaaattatttaatttaagtaattttttaaaaaaatataacctattcccccccacattaaatcttaatctacactcataaaaatcaaccataaattccaacaaaataaaattattaaataaaataata

SEQ ID NO: 13426 - DNA, 580 bp, Glycine max
  unsure at all n locations
  Clone ID: jC-gmle01810068h02a1
agcctaagctttagcnntcataaanntnnagggagccccgaagctcgaattcggtcgaggccgaaaatgttgtttgtctctctcnatggttgcattaaatgccgtgatgggggggctatatacatgagctgtttcattgccccaaaatggtatctgttgagaggatcaaacagttcacaaatattccatcggaagcttcatggaacattaaggatcgcctgccttctgcaaattggcccggggaaggccatgttgatatcaaagacttgcaggtcagatatcgtccaaacactcctttggttcttaaaggcatcaccctaagcatcaacggaggggaaaagattggagttgttggtcgaacaggaagtggaaaatcaactttaattcaagttttcttcaggctggtggaacctacaggaggaaaaataatcattgacggcatggacatatacgtcttggggctttatgatcttaggtcacggtgtggtatcatccctcaggagccttgcctttttgaaggaaccgtcagaagtaacatcgatccaactggacagtacacagatgaagagatatggaagag

SEQ ID NO: 13427 - DNA, 470 bp, Glycine max
  Clone ID: jC-gmle01810068h02d1
ctgggcaagtagttcgttcagtaaacggcccagaaattttccgggggtccacgagctcatctactcggcgcgcgcccttttttttttttttttatcccttttatcctaaggaacgatattttattcataggagcaaggcttttaaattctagatacattgatacctttacatgatttcatcacaaagctacaaacataaacacgttaaacaggcagagaatttcagatacacacacgtatccaattaaaaacttaacactacgttatccatggacaacaacaatgtactagtcttttcttatgaccaacccaccaacacacgattttagagcttcaggacccaaaatacccctcaccatcgtcactagaaccaaaatacaaaaaaacctcgataccgtcactggtggctcctgctgcgaccccccaaaaattaacgtcttgttaaactacctgtatggcttcaccaaccc

SEQ ID NO: 13428 - DNA, 548 bp, Glycine max
  Clone ID: jC-gmle01810068h03a1
gccagaaaatgttggtttgtctctcttgatggcttgtcattaaatgccgtgatggggtgggctatatacatgagctgtttcattgaaaccaaaatggtatctgttgagaggatcaaacagttcacaaatattccatcggaagcttcatggaacattaaggatcgcctgcctcctgcaaattggcccggggaaggccatgttgatatcaaagacttgcaggtcagatatcgtccaaacactcctttggttcttaaaggcatcaccctaagcatcaacggaggggaaaagattggagttgttggtcgaacaggaagtggaaaatcaactttaattcaagttttcttcacgctggtggaacctacaggaggaaaaataatcattgacggcattgacatatgcgacttgaggcttcatgatcttaagacacggtttggtatcataccttaggagcctgtactttatgaaggaaccgtcagatgtaacattgatccaactggacagttcacagatgaagagatatggaagagtatggaacgttgtcaactaaa

SEQ ID NO: 13429 - DNA, 132 bp, Glycine max
  Clone ID: jC-gmle01810068h03d1
gggccaaggggggcgttcacaataacattaccacccgaagactaaagggactacaatgtctctgtgttaacgaaaaaatcctaaccaatgtcaaaaccaagaatatctccttggttcataataccacaacac

SEQ ID NO: 13430 - DNA, 359 bp, Glycine max
  Clone ID: jC-gmle01810068h04a1
ggttgaggggttaaaattcaaacccctcgatggggcggaaaaagcagacgatggggcgagttattttacagatgcatcacacaaatatcacgcgaaggatgctgtgtttgacggcttagaagggatgctaaatagaagattctttagttataatccagcaacaaagaagacaatcctgcttgcccaagacctttattttgccaaaggggttgtagtttcagcaagatcaacaatttgtggtcttctgagaatctgttttgatgagaagcaataaatacttcgtactgggccctaaaacaggaaccatagagaagttctgtgacctggctggcataggctgataacatttattatgaagg

SEQ ID NO: 13431 - DNA, 486 bp, Glycine max
  unsure at all n locations
  Clone ID: jC-gmle01810068h04d1
cagtccaagctacggcgttctagnacaccggcccagaatttttccgcgggctacacgagcattctactcggggcgcgccctttttttttttttttacataaacatttaaaaaagtttattctcaaaaaatatatggggacattacacaaaatgcacctacgcactctaaacctataaggactaactatcactctgtacaacacaaattaacgcaaatataaaagtaccaagtgctgagaactttgtattacaatccaaatggtccacacactgctcaaatgcaggagtgcaaaatatgtggagtttaagataacatgagcatcccccttgtcatgaaaggtgtttattttttgagttttgcacaacaagactcttaaatgaatttatggtaagtaacgaattgcaaaagttttggaactgttctaaaataaaaatgctcctcaaacagctggttctgacataaacagatattaactagttatgttc

SEQ ID NO: 13432 - DNA, 545 bp, Glycine max
  Clone ID: jC-gmle01810068h05a1
aaaatgtacccttttgatcggcttctagttccattctgtagcatagaattgagaacagagatagaatatatttcttaatacatcctcccgcgaattgtttctagtgccttttaagggaattcaagtagaaaatgaaacacaaaaaatgatatgttctcctaatatacacattgaacagatctttaaatatcttgcttgggttgaacttgaacatcccagttcccgctttaatacaatcattttgttatgtacaggactataggtatcatgtgcaatttaaacttattgttttgttaataaaaaccctttaaaattgcataatggagaattgaacttgattaatctgtattagtcttacattatgtattaggccaaagctatgtatcaccttcttaaggagtgacaataatttttcttttgtaactcctctactggtttttgtttccctcaattagaactcaacgtgattgctatgtactaatagggaagaaaactgttcatcaaatgtttggaacaagagttgcagtgctggctggagacttcat

SEQ ID NO: 13433 - DNA, 368 bp, Glycine max
  Clone ID: jC-gmle01810068h05d1
aaaagaggaaaactttaaaagaagggcgtcccaaatacaggctttaaggatcgaaacattagcgctagctttcttttaggatgtccactaatgatgaacgaagtatctagctagcttgaggtcatatacattaatcctacagaacaaggatctatcactgtttctttaccatcatccgggttgtaattactgtgcgttaataccaacatccgctttgttattgaaggcttttagatccatgctgaaaccagcaacgactatccttggaatttatcttacgtaacgcacatccatagagatcttgcccttgtcttataaaggccctgctaataccattggatgtagcttacacagacatgtcctcacta

SEQ ID NO: 13434 - DNA, 434 bp, Glycine max
  Clone ID: jC-gmle01810068h06a1
gagatcacatactgaaacgggtttgttatattgttacttgcaccaccatgctattactatggctgtcagaagcccatcacatcgcatcatggctagcaccaagcctaatcagatggtttgcaaagtacacacaccggaggaatttgtggtcgcaccaatatctacagggatagctataacatatctcatggcagctgctgcgtgcggttcctaagcccaccctgctgatacagctgatggggaagctatctatgaggtggacaagccgaagaactgcacccatcgcgtgtcctacaaggcaaagagcttcaaactatcctgctgctcagagtggaagacacacaccgaggccgagcactcagatcaggaccgttgatatgaggataacagggccacacccacccacgcggatggcatgatcgctgccactgata

SEQ ID NO: 13435 - DNA, 411 bp, Glycine max
  unsure at all n locations
  Clone ID: jC-gmle01810068h06d1
tggggnnnnnnaaggggnagcggctttccctantgtactagtagnaaacaattnnanggattgacgcagctactcgtcggcggccgcccttttttttttttttttttttggcagtttttaaattttttattcgaatttatggctctgggccaggggttacagttacacgcaatttatgtgtgaagccaataataactcaagcatgataaaatttacactaacagactccgaagggtcctacaacatatgctcttttacaagattgacaacaccgaaatctgaggatggaaaaattttccaagctgaaaattgtcttacactgcaactgggacggctttatcgagagcaaggactcctggaagctctttgccttccaataactccaaagtggcaccaccaccagtagatatg

SEQ ID NO: 13436 - DNA, 433 bp, Glycine max
  unsure at all n locations
  Clone ID: jC-gmle01810068h07a1
tggctatgaccgtagcacttatnnnnntttaagnnangacgaagnngnaanntnntagagcagtacagatcgcgagcggtccctcctttaanaaaaacagacatgaagaaagcgtttttaataataagataacagacccccatgaaatttgtgaattaaaaaaagatatgatactaaatttcaattaggatttgaaaaataatatagtttatataagaagactgtatttttattgtgagtagattaaaggctaaagtaatttttagtttgtaaaaaaaaaaatacatataaaatggattaatatgaagtggaaatcataggttatatctagttaaatattattatttttgttgaaggaaacttaaagttttttatatagaagttaaaaaaaactattttagatatgaggatttgagtaaaagtaaaaatatat

SEQ ID NO: 13437 - DNA, 315 bp, Glycine max
  unsure at all n locations
  Clone ID: jC-gmle01810068h07d1
caccacacaaatatatatctgagattccaaatgtatgtactagaatacagtacagaaaactgtagccgatgaagggagatgaaataaaagctaactttattgtcaccctcaaaaacaaaagaaaaagaaaacctgttttcactaaagataaatcaaagagcgaagaatcctaataaatagaataatagaaaaaagccgcggcaactgaaaaaagggtgggggttacttcaacaagaccgagagatgcagcagcagagttctgggggggaggactgacagcacctgatggagaaaggctaaaangagtggtggggg

SEQ ID NO: 13438 - DNA, 533 bp, Glycine max
  Clone ID: jC-gmle01810068h08a1
acattattagttatagagtctactagctacattaataaataaaattatttttctcttggcaagaaggaccatgtcctttaatttaaaaccagaacatttaaatcccatactgcatacaggcttaggattcctgaaagatgacaaagaataggaacttatttaacttgttttcattgggtcctttggtctcatccaattgatttggctttgaatgattgcattcccatgtctttgagctatatttctcatgcttacatgtatgttttctgcctatgtacatgcatgacagagtcttacattttcaggtgcgcaaaagctaaggagatcagatcttgaagcagcatgtgaagattttagtaatgtaattggtacttcacccatcggtacactgtacaaaggaactttgtctagtggcgttgaaatagctgtagcttttgttccggtaacatcatccaggaattggtcaaagactttagaagctcaatttaaaagcaagatagatacatttgtcgaaagtgaaccacaagaatttt

SEQ ID NO: 13439 - DNA, 73 bp, Glycine max
  unsure at all n locations
  Clone ID: jC-gmle01810068h08d1
cgtatatctnnattggccagggaaccgaggtgangcgcactncnnnaagaacnaattgncggggatcgaccac

SEQ ID NO: 13440 - DNA, 434 bp, Glycine max
  Clone ID: jC-gmle01810068h09a1
acattattagtatagagtcactagctaattaataaataaaattatttttctctggggaagaaggaccatgtcctttaatttaaaaaccgaacatttaaatcccatactgcatacaggcttaggattcctgaaagatgacaaagaataggaacttatttaacttgttttcattgggtcctttggtctcatccaattgatttggctttgaatgattgcattcccatgtctttgagctatattactcatgcttacatgtatgttttctgcctatgtacatgcatgacagagtcttacattttcaggtgcgcaaaagctaaggagatcagatcttgaagcagcatgtgaagattttagtaatgtaattggtactttacccatcggtacactgtacaaaggaactttgcctagtggcgttgaaatagcttgtagctttt

SEQ ID NO: 13441 - DNA, 580 bp, Glycine max
  unsure at all n locations
  Clone ID: jC-gmle01810068h09d1
aaaattgaacattaaaagtgataccttttcctttatttaaatggaaattgcaacattgggaaaataaattactaaaaggagaaatagtgttcgttgagtttcgccaaatggtcataaagaaataaattacaccgctgaaaatttcaattcgtagaaatgcttctcttcatatttgagtgaccatcctgatcctccatatgagtgccgcatagactcttcaacagttcttgtctgattcaatcaataggcaggcaattcctaagaatttctgaaggaaggtgatggtgatgcaggaggcttcaagtcttcatacctggatgttcatttgaatgaaatcagaatgttaacaatgcctccaagaaacctaagacaaatatagattaaataagaaatgtagttagatttgcttaaaaccaattgatactaagtgaagttactcaatagatatgtaagctacagtccaagaattgagacaggcaatgtggaaccncgtaacacctctccttcacaaatgtctatcagaacaggcgagcctaatagaataggcgagaccaatatgggctatagactctgaatcatg

SEQ ID NO: 13442 - DNA, 424 bp, Glycine max
  unsure at all n locations
  Clone ID: jC-gmle01810068h10a1
ntgctaaaagctttagctantaagaaanaattacgncaggacgagagcggggattggtctagagggggataatggaactaggcttggataaaatctgacgaccgaggcggtaatgagggggggaagtattatgatagggatattaaaacccccccataagataatattgagaagatatgtgtcaatggtaatacaaacaaaagaacgtgttaacaatgaagatagtgatatactaatatgcatgtcgtacatgctatagaagccagatgtcaaatgataaactatatggtcacacaaaaatggacaaggatacagaaaatatactttggcttagaggtaatacaatggtatcgagacctgtagagcatagaatatacaagcacaattagttgctgtttaaggaaaaaacatttatgaacataag

SEQ ID NO: 13443 - DNA, 414 bp, Glycine max
  Clone ID: jC-gmle01810068h10d1
tttcgtcattttttttattttttttttttttttttttctttcccaggacaaaaggggggggcgggaaattcaatttaaggggtctcttcaacctaaaattattaaggaagaccgtcccttataaaaaatatagtgagaacaactaaaacttcccatcttttatttgcacctaaaacattgagaaagctaaaaatgctccaccctagttccataaaaacttctatcacttggattacatcaacaacctttacgaacagaaatatttacttgccaagagtgcttttgctccacatcaaaactggaaaaaaattcccctttgaatagtatcctccattgcatttccaagaggagcactcttaaaaaacttgtcagaccaatggactctcttgacattctttcgcttttggacaagca

SEQ ID NO: 13444 - DNA, 513 bp, Glycine max
  unsure at all n locations
  Clone ID: jC-gmle01810068h11a1
gtgagattgttgcaatggtgtgtgcatacncatcatcaccgttctcaactctctcgggggggcgtctcgtcgagagcaatgcgacggcccctccgtgcaagccgcgtgccgtgaaactcttaacggcgcttccgagcgcggggcggaggcagttgctgttttttctaacggcgacgacagcgttcacggcgagggaagcggcatccgtggcgcaggacattcccttgttcgggatacggaagagtctaaagaaggtggaggaggaagcggaggagattgtgaaggagggatttgaggctgcggacaaggggttggtggcggcggataaggggctggagacggcggagaaggggctggtggcggcggagagggagattgaagaggcggtgagttctggggggttggcgcaagcgggagcagtggcgggagcggaggtttttgggattttggttgcaacggcggtggtgaacggttattttgggcctgaagctcaaaaatcgtgacttggtgagt

SEQ ID NO: 13445 - DNA, 448 bp, Glycine max
  Clone ID: jC-gmle01810068h11d1
aacataaactttttgcaatttattgatcaattaaacatatagggttgctatgtgaggggcaactacacaagaattcttggataaaataaaaaaagtctgtacgttatgattcccattcccatgagcaatatttagcatgggaaagtcaaagtatcaactacggataacgttaggtagatgatgctcatgagggtcaaattccactttgagaaggactactactagcgcgggaagaagaattgatgatctcccaacccagttcatttattttgctgagtagaagcatttgctctgtctccaactgtgttatatacccttcctgtgtattctctagacttcctaactcactcaaagttgttgttaatccttgaagattttcatccttttttaatgatcgaaactttttcatcatctctttcatatgggtaggaatttggtgtgatttact

SEQ ID NO: 13446 - DNA, 480 bp, Glycine max
  Clone ID: jC-gmle01810068h12a1
ggactttgcattggaccgaacaatgataggtcgcggaggaagagagccgtgaggagggggcatacttacacaagcgacccgcggagccccccgagggagctgaggcacgccaagagaggcatccaccatgaaagccccaaccttgatagctatgtgtacaccgaacaccatgacaccgcccgtcaatgcggaagggctcgtaccctcgatcggttagaggtcacgctcctctcttgtgcaaagggggttctttgggacaggagaaagcggagtgaaaagactacttatgcgcactataccatgattggtcaaagggtgggctctgtggacctcgcatgggaggcttcatgcaagctaaccctagtgtaatactttgacacatgtggatgtgcttgtacatacccactagctcggacgaatggatgcaaagttatttgccatacacatgatgcgactatcacctcagacatgttagctcgt

SEQ ID NO: 13447 - DNA, 481 bp, Glycine max
  Clone ID: jC-gmle01810068h12d1
accatcatcataactgtttcattagctgacttaaaaccctttagcttcatgatttatctttattcacaagccaatttggtgtcaaagctgctcaagcatattgcaaaagcttggaatgcagataaagggtaccgataatccatggtgaacatgtctttaccaactttgccaaattgaagaatgattttatcatgctccggtggagctggttgagatggtgtaggtgcaccagcgggtggttgggtggcagcaatcaactgaaagtttttaacagacgcaactgttactcgtccacggaaattaaggcaccaacattgtaactgttcgtgccatcttggaggcttgtttttcagaaccaagggtctcatcttgccatcatcatcctcgatgatagattccccaatctcagaaaatcgtgaactgctgaactcaatcgaacgatctagagactttgaaaacgagatgctccgaaacgagtcct

SEQ ID NO: 13448 - DNA, 193 bp, Glycine max
  Clone ID: jC-gmle01810069a02d1
ggggcgtaatctgtagattttcaatcatacatgcgaatcaaggagaatttcacggggccataaaacaaaaatggattatcgcatgaacaagatgcctttgtatgcccattcaaatgaatgcttatttcggccagaacaggtcacaaaacttaactggaggacgagtgtcaataattgaaaaaacccccttttt

SEQ ID NO: 13449 - DNA, 263 bp, Glycine max
  unsure at all n locations
  Clone ID: jC-gmle01810069a03d1
naatgcgtagtctgattcgaanacngattgacgacagctcactaagcggagtccgccgctgtcgtcctttttttttttttttgaacaagaaactattttgtatttttatcgaacccctagatctatgaaccgggacaactgaatccaatacattttttattttatcattaatcaagaattttgcatatagctagggcggccctcacaaaccgcaaatactacttagctaataattaatctaaatgaggctattgctatactat

SEQ ID NO: 13450 - DNA, 468 bp, Glycine max
  Clone ID: jC-gmle01810069a04d1
aacaaatacaatctcagggaagttttattattaaatagaatacatggcacactgacgacaaccttacactacaggtagcaaacctgtattcacaaactgctaaacgtttcatcagatgtaatatttacagagggaggaagaatggtaaaagaacatcaccaacttccctattaaaaggccaattttcctaccttgataccccctccaccaccagattgccaaacgatttggatattctttcaactcaatttcaactgatgacagaataactcaattcgtcaacaacctaacgtagaatggagtaataatgtaacatgctgataaaatttgttaactacggagaccataacaatgaaaactagatttaaatccaactctggggcatggggtaacctttgattggttcagatggatcactaactagacctctcccgctgcttgagccacggctagaactccccgttagca

SEQ ID NO: 13451 - DNA, 147 bp, Glycine max
  Clone ID: jC-gmle01810069a05d1
ttttcgtccttttttttttttttttttttttttaggttaaataaataggcatagtggattaataaacaatatggtttcggtggctttctgcaaaaaatttaaaaccacacaacattgctttgtggatacaagaaaaaaaaatagggg

SEQ ID NO: 13452 - DNA, 600 bp, Glycine max
  Clone ID: jC-gmle01810069a06d1
ccaaaacttgcctcttgagatagtagaggcagccaaggcaatcaattaacaaaaggataatacagttatctcatgttcccaagacacaaatttttcctcatcatattcataggcatgcgacaattgatatacaaactgcagtatatgcccaatagtccttcctacaagcgagaacctgaaatttttttaagcacttcctgaatctttaatatctcagtcgtataggccattttgctcccatatatccacaagaaaatctaccatttcagcaagagggataggctgacggaatggcttgttgctcccaagtaaactttcatatgttgcattccaactcaatttaggatcttgtaattggtgtgtttggttctcaggctttttatttccaacccaacgttgccgagtctgattccaaagaattacaccgtgatttacaaattcagtggggttggtgctgcttttggaagaaccagcatgagaaaccacagcttggtttgttagactggctgaagagatgctcccttgtgactgaacagcgctgttgtccatatcatgcgtgctggtggtccaaaaatcctctgatgaactcggttcctcact

SEQ ID NO: 13453 - DNA, 425 bp, Glycine max
  Clone ID: jC-gmle01810069a07d1
acacatcacaatatcttattcattattacacgtccatttacttacattggagcccgaggacagaagccaaatataccgggtgatgaaattttgtacagcaaaatgaaatggcaacgtattataagatctacatacaaaggggggtggttacaaatgcttggcaaatctttaaatgacttacaagcctggcggcgttggcggcaatgaaaacttgtgcactgcacttgccaaacggtgtcaaatcgaatgataccgatgacgccattgagggatgcggcattagtctattgaagctccttcaacacctgagaaacatataagcagtcaaacatatgctgattccacatggtgcaagttcgtccatcattgaatccatgtgaccggttgtgctcacggaacaccaaaccgagctttatacgaaccct

SEQ ID NO: 13454 - DNA, 357 bp, Glycine max
  unsure at all n locations
  Clone ID: jC-gmle01810069a08d1
naagtcgagatcgacgtacttcgcatnactggatnaangactagctcgccaagctcactagcgcgcgcggccgcccttttttttcatatttataccctacccaatttttttctttttattactgagcaacacatttatattggggctccggggtcaaataatatcacaatctatggccgtaaaacttttgcgttaaaaaactcctaaaaaattcttaacaccataaaataaacttccttcctttccaaaaaattgctctccctcaatctcttactttattaccaatgactcaagcttctttacctaaatcctgacttacatggccttgctttccacggcatctctcgtaaatagggt

SEQ ID NO: 13455 - DNA, 276 bp, Glycine max
  Clone ID: jC-gmle01810069a09d1
agcatctaaataaacagcaaaaaagtatacatatctagagaactatatagggcgagcaaatacatgcatcgagttctgtagctgatgctattgaagctagttattcaaggacatatatggaaaaaggacttgaatgcaaatctacttgggaacccaaacaacatgatccttaagaagggagggggcaaacgggaatagttcctggcttaactttgagcacctgaaaggccaaatgtttagggttccattctgatgtgtcagtgtggcacactgcta

SEQ ID NO: 13456 - DNA, 276 bp, Glycine max
  Clone ID: jC-gmle01810069a10d1
agcatctaaataaacagcaaaaaagtatacatatctagagaacgatatagtgcgagcaaatacatgcatcgagttctgtagctgatgctattgaagctagttattcaaggacatatatggaaaaaggacttgaatgcaaatctacttgggaacccaaacaacatgatcctcaagaaggaagtggccgaaaaggaatagttcctggcttaactttgagcacctgaaaggccaaatgtttagggttccattctgatgtgtcagtgtggcacactgcta

SEQ ID NO: 13457 - DNA, 129 bp, Glycine max
  Clone ID: jC-gmle01810069a11d1
catactattagggcgggcctatttttttatatcaataaacaacatactttcaacttttctttaaaaacataataaaaaaaaaaaattctctcaataaaaacaaatactcttcaaccagaccacattttt

SEQ ID NO: 13458 - DNA, 150 bp, Glycine max
  Clone ID: jC-gmle01810069a12d1
cttccttctccttctcttcgtcaacatcctccaccttaccctcctcatccttcttctcttcctcatcctcatcatcagagatctccttctcagtagttttctcaatccaaagagaaattgggtagctaatgaactcagaatgcttttgga

SEQ ID NO: 13459 - DNA, 188 bp, Glycine max
  Clone ID: jC-gmle01810069b02d1
aatagaaaacatatccctccttttcctattttttatgaaagagaacgttacaattagagggatatgggtaccgttaggacagatcgttgtcttccctaccgcatacatggagctctcttgcactggtgccgccaactacatatagcatacttgttacatttttccatctaattgcacctatattatgt

SEQ ID NO: 13460 - DNA, 561 bp, Glycine max
  Clone ID: jC-gmle01810069b03d1
attactagtatagtaatcgattccctaaatctatgaacccctccaactaaatccaataatttttttattttattattaatcaagaatttcgtatatagctagaacggccctcacaaattgcaaatactaatttgttaagaattaatcgaattgaggctatagcatcatcattagcttggattgaaaaattcggggaggcccgggtcacaatttgtttcgattaaacaaattgttggaatttccaaagttatacattctcgaagagccgtatattcttcttgttgatcgacgattattacaatatcaggtgaccccgtcatatatttaatgccgccaagatatgtttccaaatgagctaaatgtctcttcaatatagcggcatctctttttggaaaactattgagtctccccgtcttttgttgcattctcaagtccctgaacttttgaagtcgagtttctgtagtataccaattcgttaacataccgccgagccactttttattaacataatgacaccgagctcttattgcaggccgtgctactaaatccgttgcttttttt

SEQ ID NO: 13461 - DNA, 528 bp, Glycine max
  Clone ID: jC-gmle01810069b04d1
attactagtatagtaatcgattccctaaatctatgaacccgtccaactaaatccaataatttttttattttattattaatcaagaatttcgtatatagctagaacggccctcacaaattgcaaatactaatttgttaagaattaatcgaattgaggctatagcatcattattagctggaaattgaaatttggggggggtccggggcacaatttgtatcgattaaacaaaattgtgggattttcaaaggtatacattctcgaagagccgtatattcttcttgttgatcgacgattattacaatatcaggtaaccccgtcatatatttaatgccgccaagatatgtttccaaatgagctaaatgtctcttcaatatagcggcatctctttttggaaaactattgagtctccccgtcttttgttgcattctcaagtccctgaacttttgaagtcgtgtttctgtagtataccaaatcgttaacataccgccgagccactttttattaacataatgacaccgagctcttatt

SEQ ID NO: 13462 - DNA, 135 bp, Glycine max
  unsure at all n locations
  Clone ID: jC-gmle01810069b05d1
ggggnnnnnnnccttgtctactatgtcatcagtanncancctnnnnnattagcncacaagcgccggtcgccctttctttcttttttttcggttctaactactgattttatcccttttgcatcaaaacggccacat

SEQ ID NO: 13463 - DNA, 543 bp, Glycine max
  Clone ID: jC-gmle01810069b06d1
aaaataacacactcttcacacatcattacgacaattaaaagaggtgtggaaattttcaaatagacagagcatactcaacaagagggtcatgtctaatttcctttattgaattaaacaaacgaacaaacgaaagaaaacacaaattccagatcatgcagaggattcccgattttcaaaaaaatttggcagtagcctgtggaacagaaaaagcttgcataagagttttacccagcaattcaaaatcttgagaaattcccaagagaatatcaaaaactgtagactgtttgggattgtcaataaggaaaatcaagtgccatgaagtttgatttgcccactcagaactccacatttcaaaaccattattaggaccacatacctctattgggaagatcaattcccaggaatgtggttccgattttgtccacttacatgcatcgaaatgctctgtactgttgctgtttgttaaaaacacttgtaccaatgaggcccaatcactccttttgactgctgcattcccagacatcacaattttaaccattaaac

SEQ ID NO: 13464 - DNA, 170 bp, Glycine max
  Clone ID: jC-gmle01810069b07d1
cttcctaatattttatttttttataccctttaatcggtttacattggggcacagggaacaattcaaataacacgctcttctgaatcaaaaatcccgagcaaaaaattgcgaagccttctaaacactaaaaacataaatcttccacttcaataacagggcctcgatcccca

SEQ ID NO: 13465 - DNA, 424 bp, Glycine max
  Clone ID: jC-gmle01810069b08d1
aacgcaacacaatgtcttattcattcttactcaagcattaatttccattgaagcccggaaacggaatccatgaataccggatgatgaaatctgatctctcgaactcataagggaatgtaccttaagttctacaaacacataggggtggttacagatgctcggccaatttttcaatgacttacaagcctggtggcatcggaagctattgaaaccgaggcactgttctcggcgaacgttgtcaaatccaataatactgatgaagccaccgccgcctgcagcactatgctcttgaagctacggccacaccggaaaaaaatcgccgcagtcaaacatatgcagattacacatggtgcaacaacgtgcattatttggtgctagtgatctgttgcgctgacagcacactaaagggtgctatttacataca

SEQ ID NO: 13466 - DNA, 267 bp, Glycine max
  Clone ID: jC-gmle01810069b09d1
ataaacagcaaaaaagtatacatatctagagaactatatagtacgagcaaatacatgcatcgagttctgtagctgatgctattgaagctagttattcaaggacatatatggaaaaaggacttgaatgcaaatctacttgggaacccaaacaacatgatccttaagaaaggaagtggcagacaggattagttcctggcttaactttgagcacctgaaaggccaaatgtttagggttccattctgatgtgtcagtgtggcacactgcta

SEQ ID NO: 13467 - DNA, 146 bp, Glycine max
  Clone ID: jC-gmle01810069b10d1
gcccttgcatttaaaggaaggggtattgggggaggatttaaatactcagaattgcgcacttgaattaagaaaagggatttatactcagatcccccatgtgtaaagaacagctggcatgcatggttcggggccaaaagttttttgaa

SEQ ID NO: 13468 - DNA, 435 bp, Glycine max
  Clone ID: jC-gmle01810069b11d1
gataagtgtgcgctaggcgttcaagggagaaaataagatgccagtgagcctgtacataaaatttctataagaattttaaccatagtattggtgattatttttccttgtatctctgatgttcaatgtctaacctgccacccaaattgaaaaccgatcttcgtcaaaatggcagtattcgtattcaggccataatttctttctccatcccaatgactttaattcttgaagcatgaatatacaatcttcgcaaggagcacctaactgcaattgacagtttgagtcaaaacattctgcaaagctatgacaaggcttgggccatcgtagaacgatatgagaactgctgttcataaaggccacggaagatcttgtatttggcatcatggtacttttttacctttggatccttagatggatgaatgacctggccagctgcat

SEQ ID NO: 13469 - DNA, 361 bp, Glycine max
  Clone ID: jC-gmle01810069b12d1
gaaaacgatgccaccaggaatcatagaacctttaaaaaaacggacaggcacatgacctgatagggcacggcgtgcatcgattacaaacatgaacgcctaaagccaaacgtgcggtctatgacgagctaagtggcacacacacggatgctgggcccgcgtcgcaaagaaagttacacagagctcccacggcttgaacctgctttagaggcgccggtatgcaatcaacgggtcgttgcaaaacaaccgggagccggggtataccgtgaccgggaaccaaccaatcgagaaacctcactttcctctgtacacccggggaaccctatcgattaggcgcgtaacgctcgccctgggctcatttgac

SEQ ID NO: 13470 - DNA, 360 bp, Glycine max
  unsure at all n locations
  Clone ID: jC-gmle01810069c02d1
gcccgggaaggagaatttttaggattaagacggctatacttaaacaaggaggtgatatagtacgaaaggttcattcttgggcaaagcatctatcaacgctaaactaatggcacacacaaccatgagctgatgaaatacagtcattacacacattccttgttggtgtgacaagatcttcaaatagttctttgnaccatatattgattaacccttggaagggctccacatgatggttcccccttcatacaaaagatcttttcatgaattccaacgcaggggagtgattggaattatgatcatcgggaaccttccatgcaagggcctgctcataagacactggtcgaatcatacttgatacac

SEQ ID NO: 13471 - DNA, 533 bp, Glycine max
  Clone ID: jC-gmle01810069c04d1
gaatgactattttattgcaatcttacaaatcatctacatcaactacaactactacatgtgaagttgggggaattcccgtgggcttcttctctcttttgttcgtttttttttttgttgttggtggttggattttcaattttgattaaatgaacaattttgaagggacttaattaatttcatgcacttaataataattccaagccgtgaccgaatgtctccacagctagcttttcagggtatgcaacttttgatttattatcacccttccatagttcagggccagccttcctaaggttgagaatgctttcaaggcataatctgcttctttacatctttgggatgtacccacctgtatttaataatcaatgagtatatagagcctcaaattagtacatggtgggtttggacaaattaaaatgcaatgaataatgtagtttctagaagtcagtttctactaaataacaacattttcaatgactaaccagcacagtgtgaagccccacacgttttccagcttgtttgttgcgggtact

SEQ ID NO: 13472 - DNA, 515 bp, Glycine max
  Clone ID: jC-gmle01810069c05d1
ggaaatctggcaaaactaaaaacgtagattatgatagggaagaaacaacataatacaaccataactctactcatctaacaaaacaggaaatcacattctcagaatgactactacaattatatttgtgaggaagattatctaaacctatacagggatacttctagctgagaatctttcgttttgtggacaaaactgcacttcccattttcagtgaatggccaaaactgtgaagaaatttattgccggtgttgtacgacggaacattgagcaagatactcaattaaccatcaccgtaaagcattcacgaatgccgtcaatgaatcaacatctctcttttccgaagggtacttaattggttgagaagagtgtttggggaagagaagtattgtggggaagctttccaactgcagttcagtctttgcatattccttttggtcttcattcgctctgaattttggaaccttcacttctgacccagctaactgttttgccaaatcaacatatggattcttcat

SEQ ID NO: 13473 - DNA, 521 bp, Glycine max
  Clone ID: jC-gmle01810069c06d1
ggaaatctggcaaaactaaaaacgtagattatgatagtgaagaaacaacataatacaaccataactctactcatctaacaaaacaggaaatcacattctcagaatgactactacaattatatttgtgaggaagattatctaaacctatacagggatacttctagctgagaaatcttcgttttgctgtcaaaactgccattcccattttcagtgaattgccaaaactgtgaagaaattattgcccggattgtacgacggaacattgagcaagatactcaattaaccatcaccgtaaagcattcacgaatgccgtcaatgaatcaacatctctcttttccgaagggtacttaattggttgagaagagtgtttggggaagagtagtattgtggggaagctttccaactgccagtcagtctttgcatattccttctggtcttcatccgctctgaaatttgcaaccttcacttctgacccagctaacttttctgccaatcaacatatgattcctccatagcctgac

SEQ ID NO: 13474 - DNA, 250 bp, Glycine max
  unsure at all n locations
  Clone ID: jC-gmle01810069c07d1
natggttacatgctntgtanacancttnannactagcnactaagcgcctaccgccctgccgtcctttttttattttctcatacattcctttttttctttttcaaaaacccacccactgaagttcctggggtaaagagaatacattttacattgacgaaaaccttacactacaggtatcaaacctgaattcacaaactgctaaacgttcactcaaaagttaaatttaccgagggaggaaaaatgggtaaaa

SEQ ID NO: 13475 - DNA, 255 bp, Glycine max
  unsure at all n locations
  Clone ID: jC-gmle01810069c08d1
aatgtgaatgttgcgtcgcanaccngatgganngttngcncctaagcggaccgccgggctttcgtccttttttttttaataacagggaacccatgattttgtatttttcaatcctttatgtaacccatactgggacacgggtgacgattttcacaacacgatcccctaaacgaagtaagtttggcacatcacagtgaacacatagatgtgctttcaacatgcgttctacacttctcatgatgaataactttcccc

SEQ ID NO: 13476 - DNA, 591 bp, Glycine max
  Clone ID: jC-gmle01810069c09d1
cacagcaaagccttcttattccacagagtgggttacaggttgaagcaagtactgggtaaaaacaagtttgaaaaatactcctccattttatcaagtcttagaaatactgatgaattgcagcttttcacagacacctaatgatgtttagtttggctccttgacctgttcctgattttctgggaaacacttaccactgtttctatgcacactggaacttgaccctccatggccgccacctttctttagtgctcttctgtaggaggtccggctgctgttaccaagtgcagctttggcaacactatcagtgagtatttctcgtcccctttgagtcttgatagattgcttgttcaggtaaacaagctttggaagaagaccacaaactgctttgcgcagctgatcatcactgatgttgctttgaattggatttccaagcagattcagggcctgaagtgagttgtagttagccaccagctggcctaatgcttttgttgttgcgatcttgttaaagctcaggtccagaactgttagcttaataacctatgtagcccctcaacatcacttatcttgtttccagcaagatatagctctttg

SEQ ID NO: 13477 - DNA, 634 bp, Glycine max
  Clone ID: jC-gmle01810069c10d1
gactagttctttagatctagataatccgaagcgatgcgttggttattagttcttttttaattcatttatacgatgaaccggtttataaatttgttaaattggaaccgttctaaaaaactaacgagtcgcacactaagcatagcaatactatcaatatgaaatgattcatttcattttttaagcgatttaattcttataaaattgatcattttggagaaataaaaatcgagtaatttttcattttttgttttctaaaaaaaaatatagcacatttaagataaaatatagcacatttaagataaagaataatatatttttctttatttagaaaatatccaaactttgatccctaaaaccccataaatagttcgaactgtatagcaacaataatcgattttcgctcgaatggtttgtagaggaactctaccttctctgatccattcaacacgtgcaatttcttttccgtcgatacgtcctgcaatttgtacttgaactccttttgtacccgcctgttcagttaattcaatagcttttttcattgctttacgaaacgaaactctattctttaattgtccagctataaattctgcaataatattaggggtttataagcatttgcaacttttacaatagc

SEQ ID NO: 13478 - DNA, 524 bp, Glycine max
  Clone ID: jC-gmle01810069c11d1
actaaatatcctgctgatgctacattcatccaaactctgatatcaaggaaaatatcatttttcctaaatacaaataagcaagtctaaagctaaattactgtaataattttcaaccaaataactttcacctaagaaaggcaatgcagtagtctatctgtggaattgcctatcaaatgttaaaattgcatattacgagataaaatctgaattgagaaagtaacacagttccacgaaacgttccagcttccccaagtatatacttccatgccaacatctcaacgagagggaatcatgccggttttcctggcataggcaaagatgccaccggcctcgatcactggacccgcgtcgccgatcggtttcaagcgatactcctttccggtggtgtgattgatcaagcggctctctccgagctcaatcgtcaccacatcgccggtggtgcactcctcgcagaggcgtccctccgactctagcggatacacctcgccggtggccacggagttccgaaagaagacctagcgtac

SEQ ID NO: 13479 - DNA, 486 bp, Glycine max
  Clone ID: jC-gmle01810069c12d1
actaaatatcctgctgatgctacattcatccaaactctgatatcaaggaaaatatcatttttcctaaatacaaataagcaagtctaaagctaaattactgtaataattttcaaccaaataactttcacctaagaaaggcaatgcagtagtctatctgtggaattgcctatcaaatgttaaaattgcatattacgagataaaatctgaattgagaaagtaacacagttccacgaaacgttccagcttccccaagtatatacttccatgccaacatctcaacgagagggaatcatgccggttttcctggcataggcaaagatgccaccggcctcgatcactggacccgcgtcgccgatcggtttcaagcgatactcctttccggtggtgtgattgatcaagcggctctctccgagctcaatcgtcaccacatcgccggtggtgcactcctcgcagaggcgtccctccgactctagcggatacacctcg

SEQ ID NO: 13480 - DNA, 465 bp, Glycine max
  Clone ID: jC-gmle01810069d02d1
cattatgaactgataagggaaacacttttattaagacttcaaatcacagcattcaagatgatacagtgcgcaacactctttagagagccttataactataaactataaaagcttggcccagatgaaattacactgcaggcaaatttttcattcacctttagcttagctatgttcattgtcgcccaaattattcttagtcacatcgttcgtttaaccccggaacggcaacaccaaggggagcggcatccataggtgtaatcttctcaagttctacacccttgtagttctggtgttcataggctgaaatgtgcactccaagtgctgctctaccagagggatcaaggttgttagaccaagcggcatcccactcaacagctttggctgtgctacatgcaacacttgctcctgcaagaacagcgagcctagctgtgttctgagggaagaacctctcacagatcatgctgt

SEQ ID NO: 13481 - DNA, 571 bp, Glycine max
  Clone ID: jC-gmle01810069d05d1
ggaaatctggcaaaactaaaaacgtagattatgatagtgaagaaacaacatagtacaaccataactctactcatctaacaaaacaggaaatcacattctcagaatgactactacaattatatttgtgaggaagattatctaaacctatacagggatacttctagctgagaatcttcggtttggtgtcaaaaactgccattccaattttcagtgaattgccaaaactgtgaaaaaaattattgcggtattgtacgacggaacattgagcaagatactcaattaaccatcaccgtaaagcattcacgaatgccgtcaatgaatcaacatctctcttttccgaagggtacttaattggttgagaagagtgtttggggaagagtagtattgtggggaagcttcccaactgcagttcagtctttgcatattccttttggtctccatccgctctgaattttgcaaccttcactcctgacccagctaacttttctgccaaataaacatatgattcctccatagcctgacagaagcggcaccatggtgcatagagcacaacaagccagggttcttttcg

SEQ ID NO: 13482 - DNA, 435 bp, Glycine max
  Clone ID: jC-gmle01810069d06d1
gtggaaatctggcaaaactaaaaacgtggattatgatagtgaagaaacaacataagtacaaccataactctactcatctaacaaaacaggaaatcacattctcagaatgactactacaattatattggcgaggaagattatctaaacctatacagggatacttctagctgagaattttcgatttgcttgtcaaaactgccttccccatttgtagcgaattgccaaactgcgaagaaatgtatggccgggatagtacgacggaacattgagcacgatactcaattaaccatgaccggaaagcattcacgaatgccgtcaatgaatcaacatctctgttttccgaagggtacttaatagggagagaagagcgtttggggaagagtagtattgtggggaagcttcccaactgcagttcagcctttgcatattccttct

SEQ ID NO: 13483 - DNA, 587 bp, Glycine max
  Clone ID: jC-gmle01810069d07d1
agggagaacccaatattaaagttgatataactatgtgtaactcatacagagaaataacaacgcaacacaatttaaagctatccaatacaaatctctcatacaagaggagaggggcatataagtggagccctcatcaccctcgatcttattcttaatattaataatgctactcatatactagtgagtaggtttcggttttccggcgtccatgactttctcttcaaaccttgatggtagcgcagttggaggaggtgctgatcttgtaggggatggagactccgcatttgccggggagcgaggcggcgttgttggctttgaagccggagatttggctggcggccgacttgaggcagttgcacgccgtctggcggtcggcggaggtcttggcggcggcattgaggctcttcactccgttgcagcatcccgacggcggcgttcctccgttctggaggtaaccgatgcaattgatcaggctattcgtcacctgcccgcacgtgatagctgcatgtgccatgggtgcactcaccacaaccatgcagagcactgcagccaataatgcaaccttgatgctagccatggaaactgaa

SEQ ID NO: 13484 - DNA, 466 bp, Glycine max
  Clone ID: jC-gmle01810069d08d1
agggagaacccatttttaaagtatatataactatgggccactcatacagagaaataacagcgcaacacaatgtaaagctatccaatacacatttatcatacaagaggagaggggcatataagtggagccctcatcaccctcgatctgattcttaatatgaataatgctactgatatactagtgagtagcttgccgatttctgggtacatgacttcctattcaaacttagatggtagcgctgtcggcggaggtgctgatctcgtccgggatggacacttcgcatttgtcggcgagcgaggcagtgtcaacggttttgaagcccgagatttggctgacggccgacttgaggcaagtgcacgccgtctggcggacagcagaggtctaggcggccgcattgaggctctttacttctgtgctgaatcacgacagctgcagatgtccgacctggaggttgccgatgcaattg

SEQ ID NO: 13485 - DNA, 144 bp, Glycine max
  Clone ID: jC-gmle01810069d09d1
aataataacactaggaaccaaagttgctttttcaattcatatatgaaatttgacataatgttgcctttgtgtatcaattatgaatatgaagcatgagagtcaaacatgctgtcgtttttcacctaagtctcaaacacacctcta

SEQ ID NO: 13486 - DNA, 586 bp, Glycine max
  unsure at all n locations
  Clone ID: jC-gmle01810069d10d1
atgtgactcgtataatttttggctatttatcactgaaatggaagatattgaggactcatgagtggctgcttgaacatgaagttccattgtggattagagttaggaaaattgcaagaggaactttgatatttctttgaagggtataatatcatgttgtcctcatgatccatggttgaaaaggtggcgttttggcctacccatgttttccatgtgggaagggttcttctgaaacaagtagctattggtgttgttgttgtagtagtaattttggggggtaatttcctgatccagattctcacaattattgaataaggcttcacttggagtaaggtaattattggagtggttattctcagataagatggtgctgagcatggagtaatctgtggcatccaagaggttggaaaaggataaagatttctgagacatgagcagtgtggtttgttgaggagggacaagagtagtgttgttcttcaaaattggtaaaaggttgtctttgatttgctcctcttcttctgctngatctaatngctcattgatcacttgcagtgttgatgatgctgcctctgtggttggagatacagca

SEQ ID NO: 13487 - DNA, 352 bp, Glycine max
  Clone ID: jC-gmle01810069d11d1
cacattaaaatcgtacatgattgtttccataaacaagagatcgaacatgctaaaatagttacacatacataattgttttatttcaattctacatttattcccacaatacagattcagtgcatgtctggatacgctttctgaatgcacatatcaacaaattttcatgtcaaatttataaaggtgacgcagaagctagtcatattaactctgatctgacacacattgatctcctctgaacggcatccaaacacacactatcaaacaccaaccaagtccctgaaaagcaaattaactttcggagctgtaagatgtctctccagcagacaaatcttcttgacgaagtcgcttcatc

SEQ ID NO: 13488 - DNA, 240 bp, Glycine max
  Clone ID: jC-gmle01810069d12d1
tttttattttttttttatttttctttttcttttttttcttgttctatcttgttgctgagtatgggtggttccataaaaccaccgctgacaaggacgatccccaggaggaggaataagaaaaagatattgctgcttatgcgccctctctcctagtcagaaactcgtcctaatatcgataaggcgggccttgaaccagcggtgacagtacaaatggtgccgcccacaaaggaaaaagactcg

SEQ ID NO: 13489 - DNA, 548 bp, Glycine max
  Clone ID: jC-gmle01810069e02d1
aagaactgaagtactaaatgaagtgggtgtttactaacagataacagaaaactagctaacaaactggaacatgtatcattgccccttgcgttctaatgtcaaataagaacaaatgggaaaaaaaaatacctgacttagaaatcagactctttcataataagtcctacggtttcaaaagatgaacagaagttgaacattaccaggcaattttaaatttgaggtggtgaggtcaagagcgaacataggaaccaatagagtaaacatttgatcactcataattgggctggtctttctctaggcctcacaaaaggcttggactaacaacattatgcttcaatggatttgccacgtcaccggcaccggcgtgcttaacaaactcggaaggggtgaggaaactgccatggaaaacgcatactatcctgactgactcacctctcccataccggaaaagaaagccttctattctttgcccattcgggccatttcctttggtggagaccagggcatgtcttcccacaagttgctcacaaagattatggttctgcttt

SEQ ID NO: 13490 - DNA, 212 bp, Glycine max
  Clone ID: jC-gmle01810069e03d1
gacagagaaaccatacacaatttatttcgtttgatgaaagagtaacacaatgatattgaatcatccgaatcatcaatcatcaaaatcaatggccccaaatttttggggttagaattttccaaaaaaattcttgacaagattaaagcttcagcattacaaaacaacgggttgctctccttccagctcaaatatgactatcaaggagtcaatca

SEQ ID NO: 13491 - DNA, 218 bp, Glycine max
  Clone ID: jC-gmle01810069e04d1
gacagagaaaccatacacaatttattttttatgatgaaagagtaacacaatgatattgaatcatgggaatcattaatcatcaaaatcaatggccccaaatctttggggttagaattttccaaaaaaattcttgacaagattaaagcttcagcattacaaaacaacgggttgctcttctttcagctcagatttgacttattaaggaggtcgtcacttgt

SEQ ID NO: 13492 - DNA, 650 bp, Glycine max
  Clone ID: jC-gmle01810069e05d1
aacaaagtgtcctcggcatgcacaagcttatgcaatccgttgaaggttatatgccaccatatcctgaagggctaaacgaaacacactctgaggtaggcattggagactttgaattgcaagatcagctttctcttttgctaactcttgtgctctttcaatgcccccacaactcttgaccaaattgatggccttcgtaaggcgaaccaacctcactgaattcagactcaatgatatccctcaattttggttctttcttccaggaaaaaatcactggtgcagtcaggttgcccttggcaaggtcactgccagcaggctttcccagttgctccgctgattgcgtgaaatccaatatgtcatccacaacttgaaaggatagaccaagattctttccatattcatacattttctcagtgacactgctgtcagaaccactaaagatcgcagctccttttgtgctggcagcaatcaacgacgctgtcttgtaatagctcttaattagatactcatcaagttgtacatcacaatcaaacaagcttgaagcctgctttatttccccacttgcaaaatctttgatcacctggctgataagtttaatgacttcaatattttcaaggttgctagataccatgatgactgtgcaaacatgaagt

SEQ ID NO: 13493 - DNA, 545 bp, Glycine max
  Clone ID: jC-gmle01810069e06d1
aacaaagtgtcctttttatgctttagcttatgcaatccgttgaaggttataggccaccagtatcctcaagggctaaacgaaacacactctgaggtaggcattggagactttgaattgcaagatcagctttctcttttgctaactcttgtgctctttcaatgcccccacaactcttgaccaaattgatggccctcgcaaagcgaaccaacctacttgaatcaagactcaatgatttccctcaattatgggtttttcttcagtgcaaaaatcactggtgcagtcaggttgcccttggcaaggtcactgccagcaggcttttccagttgctccgctgattgcgtgaaatccaatatgtcatccacaactttgaaaggatagaccaagaatctttccatattcatacattttctcagagacactgctgtcagaaccactaaagatcgcaatttcttttgtgctggcagaaatcaacgacgctgtcttgtaatagcttttaattagatactcatcaagttgtacatcacaatcaaacaagctcgaagcct

SEQ ID NO: 13494 - DNA, 424 bp, Glycine max
  Clone ID: jC-gmle01810069e07d1
ggaaaaagggcccgtttggggaaatttctgtataattgaaaaaaggtaccaaacccaaagtataaaccctgagaaaatttaaaaatgttttccctgaaaagaaaaattgaatctgttattggaacattattattgggggttcaaaaaaaataaaggccccttgggaaaccccccctccagtgtaacgggccgaagtttttgccctaaaaaaaaatccgctgtttattaaaggattgggtcctagccctggtaaaaaaacaatttggggacttaaaattttttttttaacccccaaaaattttgggttcggggggattaaaaaactttttttttggggggaaacccaaaacgggaagggggagacccattccgctgcattggcggggagaaaccccccccaaaaaaaaggttgggaaaatggaac

SEQ ID NO: 13495 - DNA, 155 bp, Glycine max
  Clone ID: jC-gmle01810069e08d1
aaaaaaaaagaaagttccaggggtaaggggatatccattattattttccacacagatctttttacctttagatagacaatcttccccctccttataatgggggtagatttctattttttaggagcttctccctccctatttaatggccccgaaaa

SEQ ID NO: 13496 - DNA, 541 bp, Glycine max
  Clone ID: jC-gmle01810069e09d1
aaaataacacacacttttttacatgattacgactattaaaagaggggtggaggggctcaaatagaccgagcattctcaacaagagggtcatgtctaatttcctttattgaattaaacaaacgaacaaacgaaagaaaacacaaattgcagatcatgcataggattccgccttttcagaaaaacctggctgtttcctgaggaacaaaaaaagctggcataaaaggtttaccagctatttcaaaatcttgagaaatttccaagagaatatcaaaaactgtaaactgtttgggattgtcaataaggaaactcaagtgccatgaatgttgattagcccactcagaactccacattttaaaaccattattcggaccacatacctctattgggaagatcaattcccaggaatgtgggtccgattatgaccacttacatgcatcaaaatggtctgttctggtgccgtttgttaaaaacacttgtaccaatgaggcccagccactacttttgaccgttgcattccgggcatcacaattttaccattaac

SEQ ID NO: 13497 - DNA, 552 bp, Glycine max
  Clone ID: jC-gmle01810069e10d1
aaaataactctacacttttcacatcattacgacaattaaaagaggggtggaagggttcaaatagacagagcatactcaacaagagggtcatgtctaatttcctttattgaattaaacaaacgaacaaacgaaagaaaacacaaattccagatcatgcataggattccgcattttaaaagaacctggctctttcctgtggaacagaaaacgctggcataagagttttaccagcaatttcaatatcttgagaaattcccaagagaatatcaaaaactgtagactgtttgggattgtcaataaagaaactcaagtgccatgaatgttgattagcccactcagaactccacatttcaaaacctttattaggaccacatccctctattgggaagatcaattcccaggaatgtggttccgattttgtccacttacatgctataaaatgctctgtactggtgctgttagataaaaacacttgtaccattgaggcccagtcactccttttgactgctgctttcccagacatcacaatttttaccattaaacagcctttct

SEQ ID NO: 13498 - DNA, 520 bp, Glycine max
  Clone ID: jC-gmle01810069e11d1
actacaaagggtattaatatcgcaatcgctgaacaatgttattcaagaaaaggatcgaccacaaataaaaacaacccaactccaatcatcatcaccacgtgcagcaaaatacattcaaaagctatctaaaaatttgaggaacccacagtggcgcattagaaaccatgaccatagaatttatgagagaaatattatgggcaccgtgcctctccaacaatacccaaaacgttgcttacgcttcagcaaacccaagctcagaaagcttttggggagcctcagcgtaaacagcgaagaaagcatcttcgtccgatgcatatttctaacaagagggcggtacacagggtcagacaaaagtgccttgtcagaaggtagctgaaggaggccttctttctcaccactcaacaactacttgaagtatgagttgaccgaaataacaggattagaggtccagggaccctcgaatgcagagcgctccttgtgcgcaaatgcgatagtgtgacccccagacagagcaacgata

SEQ ID NO: 13499 - DNA, 567 bp, Glycine max
  Clone ID: jC-gmle01810069e12d1
actacaaagggtaataatatcgcaatcgctgaacaatgttatttaacaaaaggatcgaccacaaataaaaacaacccaactccaatcatcatcaccacgtccagcaaaatacattcaaaagctatctaaaaatttgaggaacccacagtggcgcattagaaaccatgaccatagaatttatgagagaaatattatgggcaccgtgcctctccaacaatccccaaaacgttgcttaggcttcagcaaacccaagctcagaaagcttttggtgagcctcagcgtaatcagcgaagaaggcatcttcgtccgatgcatatttctcaacaagagggcggaacacagggtcagacaaaagtgccttgtcagaaggtagctgaaggaggccttctttctcaccactcaacaactccttgaagtatgagttgtcgaaaataagaggattagaggtccagggaccctcgaatccagaacgctccttgtgcgcagctccaatagtgtgacccccagacagagcaacgatatctcggtcactaagccccatagctttgccaaacacatctctcaaat

SEQ ID NO: 13500 - DNA, 134 bp, Glycine max
  Clone ID: jC-gmle01810069f02d1
gcttcgctaattgcatcaccgagggggtaaagggcacctttgttgttataaaatctaatgtatttcaacaaaagtagggagaacactgcttaaaaatgaacaatcacatctagcgagatgggtccctatgttac

SEQ ID NO: 13501 - DNA, 219 bp, Glycine max
  Clone ID: jC-gmle01810069f03d1
gacagagaaaccatacacaatttatttcgattgatgaaagagtaacacaatgatattggatcatcctaatcatcaatcatcaaaatcaatggccccaaatttttggggttagaattttccaaaaaaattcttgacaagattaaagcttcagcattacaaaacaacgggttgctctccttccagctcaaatatgacttttcaagagtacgtcccttcagc

SEQ ID NO: 13502 - DNA, 251 bp, Glycine max
  unsure at all n locations
  Clone ID: jC-gmle01810069f04d1
gaccgtactgtgccgaanccnnctgggnngtcagctcctaatcggcggccgccctttttttttttttttgacagagaaaccatacacaatttatttcttttgatgaaagagtcacacattgatatggagatatgctaatcatcaatcatcaaaatcaatggccccaaatttttggggttagaattttccaaaaaaattcttgacaagatgtaaagcttgaccattacaaaacaaccgcttgctatcctttc

SEQ ID NO: 13503 - DNA, 207 bp, Glycine max
  unsure at all n locations
  Clone ID: jC-gmle01810069f05d1
nttggagatcgatcgtanacngntgaangttagcncctagcgcctgcgcctttcttcttttttgaataaagggaaaaggggtttttaattttgagcagaatacgcttacacacgaggtagaggaaccattgcggcaacatatccactactcccctttacattcgatgagcactgacgaatacagcacacaccttcattactcttcct

SEQ ID NO: 13504 - DNA, 198 bp, Glycine max
  Clone ID: jC-gmle01810069f06d1
tttacttttttttttattttttattatttttttatttttttttttatttttgctaattatttttgaggtgttgggtaatttttttaatttatttttttgattttttattttttattcctactaatgtaattttcattacagaagagaaaaaaaaactcatctgccgatctatacaatgctggaatcaccccccctatt

SEQ ID NO: 13505 - DNA, 512 bp, Glycine max
  Clone ID: jC-gmle01810069f07d1
gtaagaaaaaagaaagttctagggattaatgaattatatctatttttatatatatacagatagattttctatttcttttatcttaattaatatttgacccctccttataagggggtatagctttctttatttttaggaacttatccattccttttttaatgggccccacaatcccaaagaattttggggggaggggccaattcggttttgatctaaaataaatagagcttccagaattgggagaatgaagaatccccacgagaaacactatgcccatccataatgatgtcccggaaaatacaacatttttgttattcgaccaaccttcaggagaagcaaattcaacgggtgcacttactaataaaataaatgaaatagcaattaatgcaaaaaccgctaattggaaagcaatagtcatgtgtctaatcctccaatttaccaacaaaagaactttaccatttgagcccccaaccccttgatccctttattgacaaaaaagattataataaaaa

SEQ ID NO: 13506 - DNA, 107 bp, Glycine max
  Clone ID: jC-gmle01810069f08d1
ggtaatatcaaaaacatcttccaaggggacgggagttgtcttgcgctcaattagactagaaccaaatatttaccccgcgcgctttcttcctatgttacatacacacc

SEQ ID NO: 13507 - DNA, 409 bp, Glycine max
  Clone ID: jC-gmle01810069f10d1
gaaaacctaaaatccttttacatttcaagcgccatttgattgagcataaggggcacgcccttcctgcctatgataaggactttccggccttaacgaaggcctgaaaacaaagggtgtgcccattatggttaaaagggcgatctcattcatttgagattcctgacaagggagtggtttcttggcggccgttaatcaatcaataacccaacggcgttgacgtaagaggattgttttggaacggtacttaaatcatccatcatcggggtcacataattcgaactatgccgagcctgcgccaacttggccaccagaatggactcatcggaccaagcacggggagaaccctccgccgacagatgactcctcggagaccctaccggattttgcgcattgaagcacaatctaacca

SEQ ID NO: 13508 - DNA, 557 bp, Glycine max
  Clone ID: jC-gmle01810069f11d1
actacaaagggtaataatatcgcaatcgctgaacaatgttatttaacaaaaggatcgaccacaaataaaaacaacccaactccaatcatcatcaccacgtccagcaaaatacattcaaaagctatctaaaaatttgaggaacccacagtggcgcattagaaaccatgaccatagaatttatgagagaaatattatgggcaccgtgcctctccaacaatccccaaaacgttgcttaggcttcagcaaacccaagctcagaaagcttttggtgagcctcagcgtaatcagcgaagaaggcatcttcgtccgatgcatatttctcaacaagagggcggaacacagggtcagacaaaagtgccttgtcagaaggtagctgaaggaggccttctttctcaccactcaacaactccttgaagtatgagttgtcgaaaataagaggattagaggtccagggaccctcgaatccagaacgctccttgtgcgcagctccaatagtgtgacccccagacagagcaacgatatcttcgtcactaagccccatagctttgccaaacaca

SEQ ID NO: 13509 - DNA, 557 bp, Glycine max; identical to SEQ ID NO: 13508
  Clone ID: jC-gmle01810069f12d1

SEQ ID NO: 13510 - DNA, 142 bp, Glycine max
  Clone ID: jC-gmle01810069g02d1
ttgcctttctttttttttacaacttgaaaagatatttttaaacatttttatggcattaccatttttcgccttggggtgcagggaaatattccattacccatgggcgtacaagcccgtactattgacttgaattacccatttg

SEQ ID NO: 13511 - DNA, 184 bp, Glycine max
  Clone ID: jC-gmle01810069g03d1
tcttttttttttttttttttagatcacatcaaccaaagatatggttttttccgatcctttaagttgtccatagtggtacaccggtaacgagtcacacatcacaaacccataaatgtagggagccgggcgcagctcatggatcacaactatctgtttcccacatgcgtgctacactacgctgctg

SEQ ID NO: 13512 - DNA, 174 bp, Glycine max
  Clone ID: jC-gmle01810069g04d1
tcttttttttttttttttttagatcacatcaaccaattttatggtataattcgatcctttaagatgtccatagtgatacacccataacgtgtcacccctcacaatcccatcaatgtagggagccgggcgctgctaatggatcacaaccatctgtgatccagatgggtacgacac

SEQ ID NO: 13513 - DNA, 495 bp, Glycine max
  Clone ID: jC-gmle01810069g05d1
tttctttacattttttatactgataatctattgtgttttcaaacatgcattaaatgtatcacgacatataccaatcttggggtttcaatgaacttttctgttcgtacttgatacgctacacaattttgaatttatgaatcgctattcaactatacaagtttaaagaaaaaacctatccatcccaagtccatattcttcaaggaatattggatttaaataggaactttgttttggccttcttgttgcacactaattaagggaatgtaatattggattcttcccaaagtgcatatgcttcaaaaactactttggtattgcatgcttgaacttaccaaagggtgtaatatgacgcacatgccttgtttagaaggtcttgaggcctattttcgagctgtcacagaacaaagccaaatgtgtgcatgctcttgcgatggcaacattgattcttttgctatccccaaggaatttctacatctcccaatgtgtttgaatcgt

SEQ ID NO: 13514 - DNA, 188 bp, Glycine max
  Clone ID: jC-gmle01810069g06d1
tctctatctacaactagttagctgcgaacttttttttttttatgaaagagtaacacaatgatattggggtatcgggatcatcatttatcaaaatcaatggccccaaatttttggggttagaattttccaaaaaaattcttgacaagactaaagcttcagcattacaaaacaaccggttgctctccttc

SEQ ID NO: 13515 - DNA, 472 bp, Glycine max
  Clone ID: jC-gmle01810069g07d1
caaatgcaaaggatcaacactttttgaaatttctagcggaggaagttacagaagctctggcctaaaaatatagccacctatactacgactcaacccgaaatacataatcactatgacgccaaactaaaacccactccaatccctcactaatgagccttggcctttttcgctggagatcacacgcttttagggaagttcgctaccctttaggggataatttacggcccagtcggggagcccaatatggaggcttagacggtgaccttcttaggtgcggccttagcggactcgagataggacttggaggccagagctgtggccttgcgtgtggcaacagacttcttcttaggtgcaggatctatgggcttgtgagcgggctcggaggcggactgagccgtattctgggtgggcttctagggagcaggttccgttttaacaagagcaaacttaatcggagcgaacttgaaagagt

SEQ ID NO: 13516 - DNA, 181 bp, Glycine max
  Clone ID: jC-gmle01810069g08d1
atctgcaaaggatcaacactttttgaaatttatagcggaagaatttacagaaactctgggctaaaaatatagccacctatactacgactcaacccgaaattcataaacactataacgccaaactaaaacccactccaatccctcacttctgagccttggcctgtttcgatggaaatcaaac

SEQ ID NO: 13517 - DNA, 530 bp, Glycine max
  Clone ID: jC-gmle01810069g12d1
ctatccgcattcgaattcattttatttatatattaatattatattcagagggagtaaactgatattaaaagatactaattataagaatttgaaagtgaaattataaagttattaaatgattaatcaatttttttctacctgttcctgtaggaaaaagagttccatctgttctagaatagcttccttcaaaaggacttctgcttccccagtgaatgtcttggtagaagatatgatttctttgaattgagggttattcgtgtttaagtcagcacgtaactcaacaagaaatttccttacctgtccaatttctaatgaatcaagataaccattcgttccagtataaatagttatcatctgttcttccacggacagaggagctgattgagattgttaagcaactcgcgcaatcgttgacctcttgctaattgattctgagtagctttatcgagatcagaagctaattgcgcaaaagctcctaattctgcgaattgtgctaattacaattctaatttaccagctacttgtctcat

SEQ ID NO: 13518 - DNA, 331 bp, Glycine max
  Clone ID: jC-gmle01810069h02d1
ccgcccaaaaaaagggggccattttatttttaaaaaaaacaaaaaaggggggggcccaaaaacccaagaggccccccccccctttaaaaaaacccccccccaacaatccctccgcttttaaaaaaccctcatctttatttatccccccaacccactagggggggaatacacctcttttcctccccccccccccccccaaaaaaaaaaaaaaaatctccctaaaaatttacactccaaaacaccgggtctcaaaacctttaattatcccccaaaaccaccaaaaggggggggacaaacccccctttataacgggggggaaaaaccttttttt

SEQ ID NO: 13519 - DNA, 627 bp, Glycine max
  Clone ID: jC-gmle01810069h03d1
tcttttttttttttttttttaaataacatcaaccaaagagatggtatcatccaatcctttaagtagtccatagtcatacaccaataacgatacacacaacacaaacccataaatgtaggaagtcgggcgcaactcagagaacacaaatatctgtttcccacatgcgtcctacactacactgctgcagtaactatcccggaggaaacttgtgaacgaagttgccccgggcaactgcaccaagttacctcgatcttttacagccagtgaaaaaaaaattctttatctgatcaaacatgacatggatacaaaaagaggaagcaagtttgggcccaatatcagcgttggctcgttttttgagtccttatctggaataaccaaccacaaacacccttctcattcaaaatggttcactcaccaatcaccatactatggtatgagtgctactttctctttaggctaagacacggaccaatgattcatacttcctttattgcgcttgatacactgaacacttgcgtctttgcttacacaatccaactcagaaagggcttcagaagacaactttactcagtatttcacacgtaacacctatatatgttgctgagcacaaacttcttgacatccacg

SEQ ID NO: 13520 - DNA, 174 bp, Glycine max
  Clone ID: jC-gmle01810069h04d1
gaaaaggcaagatacatcatttttgtttcaagtcatcctgatacttgcatatctgagtagctgtgtgccaatacaatgaagataaaccccgatgtgttatttcgttcagtcacgaccgctctccaagtttgacgttttcgtcaatcgacctagcattcctttcaataggaaatg

SEQ ID NO: 13521 - DNA, 546 bp, Glycine max
  unsure at all n locations
  Clone ID: jC-gmle01810069h05d1
naattgagtgctaattctcgatnacnggttgnaaggtcagctcctaagctcactagcgctcggcacgctcctatcttttttgctgtgatctgactagtctattagatttagataaaccgaaccgatgcgtaggggggtagttgttttttaattcatttatacgatgaaccggtttataaatttgttaaattggaaccgttctaaaaaactaacgagtcgcacactaagcatagcaatactataaatatgaaatgattaattttatttttaagtggattcactctaataaatattgagcatttttggagaactaaaaatcgggtaatttttcattttttgcttcctaaaaaaaaatgtagcacatttaagataaaatatagcacatttaatacaaagaagaatatatgtttttttatttagaaaatatccgaacttagatccctaaaaccccatcaatagttcgaactgtttagcaacaataatcgattttcgctcgaatggtttgtagaggaactctatcttctttgatccatttaacacgtgcaa

SEQ ID NO: 13522 - DNA, 163 bp, Glycine max
  Clone ID: jC-gmle01810069h07d1
aaatgcacaaaaacaacactttttaaaataaatagcagaggaagtcacctcaatcttggggtcaaattttttacatctgaaccacgatacaacccaaaagacttaaacagtaaaaagtctatttacaggccactcaaatccctcactggagagacttggcctt

SEQ ID NO: 13523 - DNA, 501 bp, Glycine max
  unsure at all n locations
  Clone ID: jC-gmle01810069h08d1
ggtggatcgtatcgagctctttaannttagnggccaactcctagccggctgccgccctttttttgtttttttttcatcacaaatttttctctattcatgttacacttgagactgagactaggggatttagatgaaatttttataaaaaaacaatatatttacatccctcctgatttgaatgtcatattataccttgtatgaacataaaacagtgataaataattcaaccacccaatttgtaatctgtaccatttaccaattcccctaccgtttgtataatttaaaacctttttcaattttatgtgtggccaaatccattgtacgtatcccaataaaatgaaagcctatttatgtctttacccaaacaatccctttcttattacttgatagctaaagtctttgtatttccgttctacctacaacacataacataggaagtgcgttcctttacagtactgactatatcacctttaaattttgaccaaaaattgacagatccat

SEQ ID NO: 13524 - DNA, 352 bp, Glycine max
  Clone ID: jC-gmle01810069h09d1
aaaaaaacaaacccaaaatcatcccgggaatcctaaaaaaattccaaaaaacaaaaaaggtccccccccaaaaaattccacgccggcgcccccctattcttaaaaaaaaaaaaagattatccccccaggccccaaaaaaaacccagaaaaaaggacctcccccccggggggatgcctcatacaaatcaaaagaaaatttttctcttccaccaagacattgcccccaaaaatattctccccccaaaaaaaaagccccccctaacccaaaacaaaatgttttacccccccctcttataaacgcgagagggcccccccttaaaaagcctccccccaaccccccccccctataaaa

SEQ ID NO: 13525 - DNA, 451 bp, Glycine max
  Clone ID: jC-gmle01810069h10d1
gaatggaagaaggcttttctttaaattgaattgatggggcggaaaacgggagtgtaaagatttccaatcatacacaatcttgcaacaacaaaaagaattttcaaaaaaaaagactttctttttttactttgtttacccaaaacctaagcaaaatgtaaaaacagacgacacttttttttagactctataaatccaaacgctgatcacaatcaaaagcaatggcgttatttatgaaagctccataagacttcaaacgaccaaaagccggcgactccattgatgttctctgcaaacatgaatgtactcttgaatagcaaggggcagcagactgagccaatttgcggtacttgagagcatagaacatctcgaggttacgtttgctatcacggcgttcaagattggtcacgtgcttgcagaggccatacacaccaatgagtgtaaagagcctgtc

SEQ ID NO: 13526 - DNA, 454 bp, Glycine max
  Clone ID: jC-gmle01810069h11d1
accgaaaactgatatttttttatcattcaagttttgcttccactgcgtgggtatactaaataccagaaactgtggatccaaaattacaacacaacacaagacataactctggattatcccaaccactcatactagttatatcctcgagttttattcattcattcattccatataatgatataaattacagggaaatacaaacaaagacgcacatgagaaattaaacagaagcagcaagaagagaatgaataaaattcaaggcacaatcttataagccttggtcttgtctatccaacttatgaaccaattcttggagttcctgaatcccaaaaacccatgttccttggccttgttcatgctatccaacattccctcccctgagaaaataagatccacataccacccaatagcaacctcgtcaagcttggtaggcataaactgatttcactcacaa

SEQ ID NO: 13527 - DNA, 538 bp, Glycine max
  Clone ID: jC-gmle01810069h12d1
agagacaaaagcgtaggtttattagaaaaccatctcaaaaccgtgcatcacttcaagttcagagatttacaatacccattagcaggccaaatatatatgacatttttggaacaaccccattttcaagcattgatacaatacagagtgaagaaaagggaaaagaaaaaagaaaaaattaaggggattgatcatgtgatcatgatcatgtggcggagtctaaaaagaccttggctttgccacaaaggtggaatgcttgagtatgtgcaagctaaattgccctcctttctcactagtgtcaatctgtgactggtcagggggaggcaagagctcaaagttctggaccaaacgtcccaaagtgatgccaagaattggcaatgcaagaatgagtccagggcagcttcttctgccaacaccaaagggaaggtacctaaagtcattgacattggcttcaacaagcgactcctcctagaaaaacctctcaggccggaactactctggcttcttacagtgtgcatggttgatggccagccaccatgca

SEQ ID NO: 13528 - DNA, 487 bp, Glycine max
  Clone ID: jC-gmle01810070a01a1
agatggctgaccattacacatctgttatattggttgacggttgaccaacgcgagggaatcttaaatgaagcatgctcacttgcccgtcactgcggtatatgaaagctcattgctttatatgaggacattcacatttccattgatggagacactgagatcgcattcactgagaatgctgatcagcgtatagaagcactcggatggtatgcaatgcgggtgaagaatggccatactggatatgatgagactcgtgctgccattaaagaagccttggctgccagagacacacccactttgatgaaagcaaccactaccattggatcctggtctccaaacaaggctaattcctacagggtacatgggagtgcattacgtactagctaagctgatgctacatggaagaatctagcatggccatactagcctttacatgtgccacaagacgtcgagaagcattggaggcggcatacacctgatggtgctaaac

SEQ ID NO: 13529 - DNA, 130 bp, Glycine max
  Clone ID: jC-gmle01810070a01d1
tttattttttttattttgcattgtacgtgatccctcttacagccattttccagcgcaggggattctatgttattcgtgctaaagtgatatctaagaaaacaagcagcgttgccggtcccctatcccacaa

SEQ ID NO: 13530 - DNA, 359 bp, Glycine max
  unsure at all n locations
  Clone ID: jC-gmle01810070a02a1
gtgaaagatatcgatcattggctgagagtggtctgtatgatcgtttctcctctgagggtttcatgggtgttgtgcgtgcatcagtgtatggttccaggaacatgctagatcagcatctacacatgacgatggacgtagataacatgagttatgaggaactacttgcacttggtgagaggattggctatgtgaacacaggaatctctgaggattcgcttaacaaatgcttgacggatacaatatattgttcatgtgatcatatccaagaccaacgaaactgcataagatgtctggaagagtacaacaccatggtcgatggtggaacacttatnacatgtgggcatgactaccatgtgagc

SEQ ID NO: 13531 - DNA, 453 bp, Glycine max
  Clone ID: jC-gmle01810070a02d1
caaggcttgcgttattgagatcgaagccggaaacaaagggatggacataatgcaatattcctgttccaacatttccaaaagcaatatgtttcctcaattttgagggatgttcaaatataaacacaaaatgagattaattttatactagagcagttatttatccttcgtatcctcaggcaaagcagatacttagcagataggacataatttccttaaagataaccattttttaatgcagttcacatggtagtcatgcccacatgttttaagtgttccaacattgtccatgttcttgtactcttacagacatattacgcagtttcctttgtcttgactttgctcaaatgaacaatatattgtttccgtcaaacatttgtaaagcgaatcctcatagattcctgtgttcacttagccaatccttttaccaagtgcaagtcgttcctcataactcat

SEQ ID NO: 13532 - DNA, 322 bp, Glycine max
  Clone ID: jC-gmle01810070a03a1
ctaatattatcgcagaatttatagctggtcaattaaagaatagagtggttataagcatttgcaacttttacaatagcaatgatcataaacaccctaatattattgcagaatttatagctggacaattaaagaatagagtttcgtttcgtaaagcaatgaaaaaagctattgaattaactgaacaggcgggtacaaaaggagttcaagtacaaattgcaggacgtatcgacggaaaagaaattgcacgtgttgaatggatcagagaaggtagagttcctctacaaaccattcgagcgaaaatcgattattgttgctatacagt

SEQ ID NO: 13533 - DNA, 481 bp, Glycine max
  Clone ID: jC-gmle01810070a03d1
catcttaaagacctctttccttgggttctaatttattaccctgaagtaatgaattgagttcgtataggcattttggatgatgctattgaaatagcctgtcttgctatattttctggcaccccacccatttcataaagttttttcccaggtttaacgacagctacccaatattagggagaacctttttctgaacccatacgtgtattcagtaggtcttactgcaaccgggttgtgtggaaatatgcgtacacatattggtccaccttggcgaacatttcgggacattgcccgccgtcccgcttctatttgtctagatgttatccacgctggctcaagtgcttgaagagcatatcttccgaagcgaatatgattccctcgataggatattcctttcattcttcctctatgttgaatacgaaatctggttctttggggactaagcatagcgatactatcaatatgaaatgatgcatttcatttt

SEQ ID NO: 13534 - DNA, 362 bp, Glycine max
  Clone ID: jC-gmle01810070a04a1
atattttttggttgcaacttggtgttgttttaaaatatggtatacgcaggaacaacgcaggagggcttggcttgagacaaaacagtcaatctggttgttaagttgcccgttgcttaccttgtgaaccataaggtttgctttagatgccaccaccgctgaggaacactcaagcataagatctataactcttttgaaggagatatttactgcatgccgcactatgaccaactggaaaaaagaactcatttttttgacaaatgcttcgaagggacacctattattgctccaccagagaaaacctgggaagttaatcctgtaccagccaaagtctcaagtgtgtttggtggaactagatataaatg

SEQ ID NO: 13535 - DNA, 304 bp, Glycine max
  Clone ID: jC-gmle01810070a04d1
ccttcggacattatacagggccaggggttcttgtattggaaaggattaatgcgatcacgagctcctatccatagagcatcactggattctgtatcggtgtcgaaagccttttaacaaacggatgatgcaggggacaccaccacttcccagaacttagaataacacaaggccacacctcaccctggaaaaattgggcccagacgtaacgggggaattgcatattttgactaagcctatggggctgctttcagtcaaaacaagagacatagcccaactgctgctgtcgatcatgctgaaattgagg

SEQ ID NO: 13536 - DNA, 240 bp, Glycine max
  Clone ID: jC-gmle01810070a05a1
gcgacttcttccgtgttgatccacagaaacatgagggactaagttatgtgggaattcgcattgcactttgtatattccaagcacatgacatggatgaggtggctcctttagccgcccactacgccaccggtgagctcaagttctcagcggagtatacgattatcatctgaaaggccgaccataccataattgatggattgctcaatgaccctctgccgaaggggacattctcaccctaac

SEQ ID NO: 13537 - DNA, 346 bp, Glycine max
  Clone ID: jC-gmle01810070a06a1
cagcgtaaaaattaggcttcagattcctgtcttccagcggacggtattctgattccagggagtgaaaacgttccatgctctatactctcccaaacgcaaatcacggttgaagtttacatcaaatggaccgcggcgcggagatttctcatgaaagacttcgccgtccttgttgggagttcccttgacaacatttaatatggtaggagccccaaaagccttccgagattagtatgctataagtacagcctcgttctatcttctcttcaacacatactgaatttcttcttacactcaatatctctctctcttggtctgtaattctcacacaaaaccaataaaccatgac

SEQ ID NO: 13538 - DNA, 428 bp, Glycine max
  Clone ID: jC-gmle01810070a07a1
ggacaaataaagctataatgtgtagaggggttaccaccctcaccttctgccaaaccaaacccacccttttctgtcttcaagctactatcgataaatcagtttaaattttggtggggtagtaataattgtaccatatcgaggtaccttaaaaaggatctggggtttgcatatgttacttgcaaatctctcgactactttggcttggctttctgaattttggtttttcagtgctgagagctgaacaagaagatggggggtggaaatgaagaggcactcaagcagctgccgaccctgatggaaaatgtggatgatgagcacctgaagaatacattccatattatgcaccagggttatcaaacggaaacgtgaataccgtttctcaaagctagggactggagctgccccaaagtccataaaatgttaattga

SEQ ID NO: 13539 - DNA, 426 bp, Glycine max
  Clone ID: jC-gmle01810070a07d1
acctagacagccatatgaattgtggcatggcgccatcttttctacattgaacatatatcatatgcttatcatctcaaggtggttgtagaaattcgattaaggtctgcctgaagaattttgcatctagttgatgcaaacattacaatattaaatctaataaccgggtataagtatgacctacacgtataaccctccttttccaaaagggaccataaagtaatcaacaaataaaagtggctctggagaggccaaaaacagttactagctttagttgcatagctttcaatggccattaactgtaagaccagttagtgagttggtaaaaccatacttctgattctccaatttgtggaactcattttctatggacttggctattttggcatcatcagggtctggctgtggtatgtctacacagaaggaccc

SEQ ID NO: 13540 - DNA, 503 bp, Glycine max
  Clone ID: jC-gmle01810070a08a1
ggacaaataaagctataatttttagaggggttaccaccctcaccttctgccaaaccaaacccacccttttctgtcttcaagctactatcgataaatcagtttaaatttttgtggggtagtaataattgtaccatattgaggtaccttaaaaaggatctggggtttgcatattttacttgcaaatctctcagctactttggcttggctttctgaattttggtttttcagtgctgagagctgaacaagaagatggggggtggaaatcaagaggcagtcaagcagctgcagaccctgatggaaaatgtggatgatgagcagctgaagaatacattccagattatgcaccagggttatcaaacggaaacgttaatacggtttctcaaagctagggactggagtgttgccaaagcccataaaatgttaattgattgtatgaactggagggcggaaaatgagattgacaatgttttaaggaagcctatccctacggatttgtacaaagc

SEQ ID NO: 13541 - DNA, 435 bp, Glycine max
  Clone ID: jC-gmle01810070a08d1
acctagacagccatatgaattgtagcatggcgccatcttttctacattgaacatatatcatatgcttatcatctcaaggtggttgtagaaattcgattaaggtctgcctgaagaattttgcatctagttgatgcaaacattacaatattaaatctaataaccgggtataagtatgacctacaagtttaaccctccttttccaaaagggaccataacgtcatctacaaataaaagtggctcaggagaggccaaaaacagatactagctttagtagcatagctttcaatggccattaactgtaagaccagttagtgagttggtaaaaccattcttctgattctccaatttgtggaactcattttctatggtcttggctattttggcatcatcagggtctggctctggtatgtatacacagaacgacccttgtctgat

SEQ ID NO: 13542 - DNA, 498 bp, Glycine max
  Clone ID: jC-gmle01810070a09a1
taaaagtaaaattctacatgctcttcttctttttcttcttcaacattcaactattgggttgcgcgtaaagaacaggaaacagtttagtccggtaaccagaaatgaacgccctcccttcatcttcctcttccaccttcactttcttaactcagtccaagaaccccaatcatctcttcaagttgacacataaagtacccattttacccctacactcaccttctccatgttgctccctcagtgactcgtcctcctcgtcgaccacggtgctggacaaaaatgccctttcacccgaacagaattcccgcattgcagtttcgccggatgactcgagcttcgaggaagccctcgtgattcgccggccggagacggatttttccgccgaatactccggcgaggaggaggaagaagagaaggagacaatagaagaagaagatgacccgaaggcttcggcgatcgacgaggggctcgcgagatttgcgaagatgatgccgatgtttg

SEQ ID NO: 13543 - DNA, 270 bp, Glycine max
  Clone ID: jC-gmle01810070a09d1
ccgccagggatttatttcaatgtagttactattcattaggggagtgttttttatcatgccaggtccatctcagagcaggtacacctctcatgccacggtcatactcttcaaaactactcttacaagacaccaatgtgtttatatatagctggagaccccacactctagacctgataacggtgagactcgcacttgagaaatggcataagatgctccacaccgtatactcgtatgagacgtcctgatattcacagaaaaaaataacgggtc

SEQ ID NO: 13544 - DNA, 492 bp, Glycine max
  Clone ID: jC-gmle01810070a10a1
gaaaggaataccaagattaccaccacatagcaatgggcggtatactttctgcgcttcttggcggcgacgcggcggcggcggcgtcttcgccggagagttctacttctagagtctcctccttccactcgtcgccgcgctggcagctctacttcaacgagatcaaagataccgataagctcgttgtgatagatttctcggcgtcgtggtgcggtccttgcaaattcatagagccagcgattcacgccatggccgacaagttcaacgacgttgacttcgtcaagatcgacgtcgacgaattacctgtgattttcgcttcctaattcttcttaattgactccaatttttgtttccgcgaataattctgaactttttatattctgttttggattatttttttttgggaataggatgtggcgcaggagtttcaggtgcaggcgatgccgactttcgtgttgtggaagaaagggaaggaagtccacaaggttgtgggcg

SEQ ID NO: 13545 - DNA, 463 bp, Glycine max
  Clone ID: jC-gmle01810070a10d1
aatcaggcaatgggtttaaattttataacatcatcatcaacacaagccttataggcataaactctggtttttatttttattttcccttgaaacgaaagatacatacacacatacctacataggtttggtttgaatagctaaaagattactattatacctgctttcacgattgaaaaagttgcttaatctttttctcgagctattcctttttggctcccacaaccctttaaacttcctttccttccttccacaacacgaacgtgggcatcggctccaccttaaactccttcgccacaccctttaaagataaaaccctcacacaaaaattttttaagaaaaattgatcaatcattaaggcctttttgtttgcagaaaaagaaggcctatctaagaagaacaagaagagagaattgcagttaaataatctgatgagagcgatgcttttacaaggtattttaattca

SEQ ID NO: 13546 - DNA, 421 bp, Glycine max
  Clone ID: jC-gmle01810070a11a1
tgcgtggttcttgaatctggaactggaagtggatcgttgactacttcgcttgcaagggcagttgctccttcaggacacgtctatacgtacatgataacaaagctaatatctgccctgtgcccttgctgtttccttcgctaccgtgccaggtgttgagggccttgtgcgctgagattagctggttgggtacgccttcttcttccttcttcacactggggttgatctatgtaacgagacctggttggatgatgagatcaagtcatggctagctgttgctgcctaatacatggctgatgttatacgcattgtctaaagcattgtctggccacaaggatgaggccttcttttttggtgacgctgctgctctggcttaaaggtagtcttcttcacgagtgaccaacgtggatgttcagaaggctgc

SEQ ID NO: 13547 - DNA, 554 bp, Glycine max
  unsure at all n locations
  Clone ID: jC-gmle01810070a11d1
tttgggcnnaaggagtcatctcgtacggcacncaataagtnnaatgccggggaggacaagtctactaggcggcggtcgcccttttttttttttttttttttttttttttttcaataatgatgacagagaactgtaaccacgttcgttgaaccaatgcatgtaagttaagaagcttgatccctctaaatcttgggaaattagatgaagaagcacaaaatattgatcgctgattactaatctgcaaaaaagaggcgggctttgcttcatggaccaaggtatgaataataggcatgctgttttggaacaaacaaaaataacctatggcatgaggttcaaaccgaaaggagattcacaaatgtgatggacatgatagcactcttcatgagagtgatttaactcttgcaaatgtcaaatagcctgtgtgacctcgagcttcaccacaaggtctagccctgacagaagaaatagatggactgctgctgcttagtacatagcttccatcagagcattgtctcctcttgctaggaagagaaccattgccatccccacataag

SEQ ID NO: 13548 - DNA, 504 bp, Glycine max
  Clone ID: jC-gmle01810070a12a1
agagcatcatggttaggctatggtgctcttctctcttaatgacaatcttattccaacaactcatcagattgtgcatttcttggagtgtgcaaaccccaacacccccattgccaatcctccctctcccaacatattcccagttgcaatggcaacaaagggagatcataatgttcttgcattttggtgtgaacacattcactgacagagaatggggcactggccaggaaaacccagcaatcttcaatccaacagggctcaacaccacccagtgggccactgtggcagcagatgcaggagtttcattaatgatattaactgcaaaacaccatgatggcttttgcctatggccttccaagtacactgaccattctgtcattagcagcccctggcaaggtggcaagggtgatgttgttcaagactttgtcaatgcagccactgcacaaggaattgatgtagggatctacctttcaccttgggatagacatgaccctagatatggcaatg

SEQ ID NO: 13549 - DNA, 502 bp, Glycine max
  Clone ID: jC-gmle01810070a12d1
aatggaaaacagcatatccaatatttatttagttcctcgttgcgataaaacaatgaacacattggatgtagaaattaaaagtaaatttatttttttgttctttactgatagaacaatactactatttcaatattcttcttaaggctatttattttattgcagttatgctcctttaccaaaacttacttaactcttcaggttggagtaaactttgagtgccagaaaggatcataatgcaagccaatggaagaaataagaggcactcctcttgcctttctgattctgatcctcaccacacgagcgtgcacctcacccccattaagcctatgaagcctcttgtaacccactgttgtggctttgatgatcaatttaccatccacatagatttcatgccgtttgatcctttgaccaagaccaattgcctcttgtattctaatcacattgaatctgaatttcccttccttggcccatatttcaatccaatggtccttttcaccatcat

SEQ ID NO: 13550 - DNA, 540 bp, Glycine max
  Clone ID: jC-gmle01810070b01a1
ggagtatctgttatactttttccagcgtttagatcccctgcaagatcttgatcgaattttgggaagggtaacaactgaatttgaagaaagttgggctgttggaaaggtacagggatgggaaaatgacaatcaggaaaatggacatgtacttgctgagcatgctaccattgatcttgattattatagtacagttgaagagctgatggaagtcggtcctgaaaggttaaaggaggcactggctgcgttggggctgaagactggtggtactgttcagcaacgtgcagagaggctcttcctcacaaagcacacacctcttgaaaagttggacaagaagcattttgctaagggtgcacgtggtgtacaaaagaatggggttgctgcagtttcacaagaagatggaaattctaaagaaattgcattgatggaagccaaaatgacagaactttgtgatttgttagaggagacatttgctcgaacaaaagacaatgttgtaaagatgcaagccctaacatatgatgaaatggaagcagagcgcgagga

SEQ ID NO: 13551 - DNA, 379 bp, Glycine max
  Clone ID: jC-gmle01810070b01d1
ctcactacacaggccgtgcagcacattttgtttgtttacttatcaacaccgcataagcgatggggcatttgataaggatgggactctcccaaaggacggagaggcgatccctcttaaagagcgtgaccttgttggttgggaatggtgtactgccacggcaaggagattgagctcggctgtacctttggtgctctctgcccttggggagcctcacctcaacatctgcaagctcgtgctgcgctaggcaaacatagactgatcttgatcgacccgaagagggcatttcatctctttcataatacaaagaggacactgttagaagagatgtacaagacttgtgtaggagaagttgcataggaatattgaaggatgtcgtgct

SEQ ID NO: 13552 - DNA, 542 bp, Glycine max
  unsure at all n locations
  Clone ID: jC-gmle01810070b02a1
agtgccagagagagaaagacgtgtgaagtgtgagtgaagaagctcttgatgttttctcttgcaacctctgaatctgtaggcttcagttgtgctatttaacagtgtagggcactgcgtgtttacgaaataataagtttgtataattactgtaattaatatcagtatgggtgaggaagaaccagcgaatgaagtttccaagactgattcaaatggaaagagcttgcaggagaaaactttggatgaaactactgagaaaaaggacttggaaactgatggaggaaaagtcttggagaacaatggaatcaaagagaatattgtaaaagaaattgaagataagaaagctgatggtgtggaaaaggtagaagaggacaagaaaattgttgttgtgaaagaagcaaaagaggataagaaagaagatggtgtgaaagaagctaaagaggataagatagaagaaggggtggaagaagtaaaaaaggataacaaagaagatggagtggaagaagcaaaagaggatacgaaagaatatggngttgaagaagtaa

SEQ ID NO: 13553 - DNA, 459 bp, Glycine max
  Clone ID: jC-gmle01810070b02d1
accttcaattgtttccttaaccttggtgccttcatccattttatcagtctcagatatatgatcatctttcttatcctcttctatttctttcaactcatcaccttttttatctgctactacttgtttcacaccatcaattgccttatcctacttgacttctttcacatcatcaacttccttatcctctatgacttctttcacaccatcaacttccttatcctcttctacttcttccaccctatcttgtttcttatcctcattgactgcttccaccccatcttttttatcctcctttacttgttcaaccccatattcttacgtatactcttttgcttcttccactccatcttctttgctatcctttgctacttattccaccccttcttctatctgatcctgtttagcttgtttcaccccatcttatttgttatactctttcgcttctctcacaacaccaat

SEQ ID NO: 13554 - DNA, 514 bp, Glycine max
  Clone ID: jC-gmle01810070b03a1
cagaacagttgaagttccctcctttacttttggagtcgaaacgtttggtagaacagtggcatgcacagcgtcgccgatgacggttcaggcgggtcgggttcggaccctgaaagaaggttctcgcggagaatcgggtttgggtccggtcgtgtactggatgttcagagaccaacgtgtgacagacaattgggctctgatccacgctgttgctgaggccaacaaagccaacgttcccgttgccgttgttttcaatctcttccacacctttcttggcgccaaatcccgtcatttagggttcatgctcaggggcttgcgccaattgtgccaccgtatgcaacactctcttcaaatcccctttctcttgttccagggagaggcagaggagacagtgccaaagtttcttagagaatgtggagcttcacttttggtgacggatttctcacctttgcgggaagtacggaggtgtaaagaggagatatgcaagagggtaagcgattcggttgctgtgcatgaa

SEQ ID NO: 13555 - DNA, 494 bp, Glycine max
  Clone ID: jC-gmle01810070b03d1
tttatttttttttttccagtgaaggatttaaacgccgaactcaaaactcaggggaggggacacgattgttcctggcttcctgcttgaaatatcatccgccaaacaatggcaactgtgcttaaaggaaactgatcaataagactctctaatacattcttctaaccacactctattattgatcaaaatttattgaacatgacaatcctattgagcactcctacctactcactattggatgaagccatctcactctttgcaattccccatacatgttaaccaataataaaatgtgttaaaaaaagtctcttagaagaggctttgttagcacttctaactaaatccataacttgcctagaaacataaaagcatatatgcttcaatgttcaggatcacaactgcgaactactttgtgcttttgcgatagtacgctttcagccgtcctctttttgagctcaccatctaatctattgacctatgcaatgcctttatccaca

SEQ ID NO: 13556 - DNA, 531 bp, Glycine max
  Clone ID: jC-gmle01810070b04a1
cttggagaatgctcttggtaaatttgatgatgggccattcttgcttggccaattcaggttggtggatattgcttatattccatttgatgaaagattccaaattgtctttgctgaggggttcaaacatgacatcacagaaggaacgcctaaacttgcaacatggtttgaggagttgaataagctaaatgcttataccgagactagagtcgatcctgaggagatcgttgatcttttcaagaaacgcttcctgcctcaacagtgaacgttgtattgctgcaggcttcctctaaaatgtagactctgcccatatagcgtcctttcattcacgggatgggatgcatctgcagacaaatgtcggttgtgtttatctgccagagttgcaggatagtttgaagtcataatcacgttcatttctcagcttgtttgtttgatgtcataataatgtttatgtgccagtttgtgatcactgatcaatatgatataatgaccaatatggtattattatcctattcgaactatgttatatcacgt

SEQ ID NO: 13557 - DNA, 391 bp, Glycine max
  Clone ID: jC-gmle01810070b04d1
attgattgattgttattcttttttttttatttatggttttgtatattatttgtttttttgcttttctgtttgaaatttattcgccaaacaaaggcaacccggcttaaatgaaaaataccactaagactctctaaaacattcttctaaacacactctattatggaataaaaataattgaaaataacaatttattttctaacttctaacttctaacaatgaggagaaagaatctcactctttgaaagaacccaaattcccacaccataataaaaagtgcaaaaaaaaagatctcaaaaagtgctgggagagcacctctaactaaatacataatatgcctagaaacataaaagcatatgtccttcaagctgcaggaccacaactgctaacaact

SEQ ID NO: 13558 - DNA, 321 bp, Glycine max
  Clone ID: jC-gmle01810070b05a1
ccttcgagatttctcacacgcttacaaccactttctatctctttatacaccaacataactcgcaggtgggtctcattatatttaactatacctctttcaccaattctaaagcgcaaatgtaaacttatctcaatcatcaatcaatcttttactacctgtacctgtaataaaaagagctccatctgttcttaaactccttatttcaaaaggacttctgctcgcacagagaatggattgttagacaatatgattcttttcaataaaagactattcgtgtgtgagaactacgttactcaacaaaaaatcttccttacctgtcca

SEQ ID NO: 13559 - DNA, 379 bp, Glycine max
  unsure at all n locations
  Clone ID: jC-gmle01810070b05d1
nagcggaactatacctgatcgcatcccaaaanttanaatgaaagggccnnacccgagnaggagncagcggccgncctttttttttttttttaaattcttctttttttctctaaacaccgcctcatcaaggactgggtttattactaaaactcaaaccatactcaccttaaaaacaataacctatacaacatactttctctcacacgagttcaatacatcattttaaaaacatactcactgccgcattttacccatacattcctatcgcaacccaatatgagacacttatacttccatctaatacattttctaactctttataaaccgtaatccactcagcaaccaccaccaatgctaacgacaatattcatagtggatt

SEQ ID NO: 13560 - DNA, 337 bp, Glycine max
  unsure at all n locations
  Clone ID: jC-gmle01810070b06d1
agcggagtagtcaaatgatngtatnccaanaattnnaatggacaagccgcacacgagnagtaggccgccctctccctttttttttttttttacactcttcattttacccacaaagcttagcccatctgagtggggggttaaagaacaaccccccaacgagccctatcccactatttaaaacgtaaccactctaatgtaaaccatacgagtgcaattgaacacctaacaacataataacctaccgcacataaacgagccatacccagcgaacctgcctggtacactctcaacaaacaaacttaacccccaagaaccctctatacaaccgatacccctt

SEQ ID NO: 13561 - DNA, 467 bp, Glycine max
  Clone ID: jC-gmle01810070b07a1
caagaagattctagtagtggagaaactaaaaggccattaaaaaatttagacaatgaaattgctcagataacaaagttgaagtcaacaccccatcaacaattagtccaagttggaactggaaggccagaattgccagtttctcctgtgaagatgctggcaggtcgagagtctaattactcggacggggaaggttttcttcagccgatcgttgtcatcttttgagcagatatttgcctgtaaatggtccctggcttattgaccaaatgtctagtagggcttatgtctcccagttttcagctgatggctctctttttattgctgggttccagggaagtcacataagaatatacaacgtggacagaggttggaaagttcagacgaacattctagctaaaaatttgagatggacaatcactgatacatctctttcacctgatcaacgctatctagtttatgccagtatgtca

SEQ ID NO: 13562 - DNA, 341 bp, Glycine max
  Clone ID: jC-gmle01810070b07d1
ttcgtttttttttttttttttttggctcaatataaaataatttattataggcccagcgtactaatgaatcaattccaatctcaatttacatggctatttatgtaccaagattttgaggccgaacatgtcatgccttattatgttaaaacatcctatacaacttcattaacaacagggtatggagctcccaatatcatcttcatagcttgacttttgactgacatatcataggtaatgtttatcagaatgtcttgtacataccctcttcttagttgacgagcctggagtatgaccactcccagcaaattcccattttacaacatctccatgccaagaagagc

SEQ ID NO: 13563 - DNA, 497 bp, Glycine max
  unsure at all n locations
  Clone ID: jC-gmle01810070b08a1
aatcaacaaaagaagagtagagcgagagtggaatagaacaaagaagatgagcggcgccagcagcactataaggctatcgccgatggtgagcgtgtccccgaattgcaattgctcatcgatgatggtgatgaagaagacgacgacggcggtggctcctttgtggatgaaaagcaagagcgctaggggtggtattaggtgcgaggtggctattaatgcggtggatgagtcgacgacgtcaccggagtcgaagattggagcgcgtgtgaaggtgaaggcgggtgtaaaggtgtaccacgtccccaaagtagccgagcttgacctcacgggtctggaaggcgagatcaagcagtatgttggcctctggaacggtaagcgaatctccgccaatcttccttacgaggttcagtttctcaccgacatcccagctcgtggtcctgtcaagttttttgcccacctcaaggaagatgaattcgactatctntagtcaatcacccact

SEQ ID NO: 13564 - DNA, 446 bp, Glycine max
  Clone ID: jC-gmle01810070b08d1
aacctggagtctgctgtgacgaccgaccagacaattccacagctcaatctcctaggccgcgctcgcccttttttttttttttttccacttataaacaaaaatgatacaggagatcaaccaaaggatggcctaactatacaaatacattcgtgtaagctgttagtgatctgaatttagaataactaagaatttaattaaaacagttatagcataagaattttttacgctaatatccaaacataaattggcaaatatggtaccatattggcttgccggaatttaaatactttcaaagtcatttattcggggggggttttttaccgaagggaaaattttttcacccaccaaatattgaaaattaacctttcgttggggggggtcaaaaaattaaagtggacggaactttacgagttccgagaatatttggaattttttgggacttttcc

SEQ ID NO: 13565 - DNA, 378 bp, Glycine max
  Clone ID: jC-gmle01810070b09a1
aagtctttgagaactaagaaggagaattaaatggcttcctcaatgatctcttccccagctgccaccactgacaaccgtgccggtgccgccatgggtgcttcattcactggcctcaagcccatggctggctatcccaccagaaagaccagcagcgacattacctacattgctagcaacggtggaagagtgcattgcttgctagtgtggccacctgggggcctgaagaagtatgtgactctttcctacctgccggaccttgatgatgctcaactggcaaaggctgttgaatacctgattacgatgggccggattccgtgctcggcattcgagatggagcgctgcttccagcaccgcgagcacaccagggaacctggatac

SEQ ID NO: 13566 - DNA, 342 bp, Glycine max
  Clone ID: jC-gmle01810070b09d1
gaaacaaagcaacacaacacagtagctgattcattagttctcatccattaatttccattgaagtccgaaaacagaaaccaaaaatacaggatgatgaaatctcaaaaagcaaaaacaaatgggaatgtagtttaagtacaaacaaacaaagtggggtggcggctacaaatgctttgcaaatttttcacacttagaagcctgggggcttgtaggcgatgaagctgatgcactgcacttggcgaacgttgtcgaatccgatgatacggatgaagccgttggggtatgcagtcttagcctcttgaagctccttcaacacctgagaagcattagtgcaaccaaaca

SEQ ID NO: 13567 - DNA, 487 bp, Glycine max
  Clone ID: jC-gmle01810070b10a1
agctaaaatgggacttgggactctgccactgaccccttcttacagcggtttctcttcaaactcaggacttatacatgacaccaccaatcacagaagggtcaatagaagcatgaaattcagagttttagcaaaacaagagaagcgagaagagaagaaaaagcaatctttgttcagcagtgtgactgaagctcttgatttttctcaagtgagatccgctgaggatgctcagcttatagaagaggctagagaagccacaaaatcaggagaaagaatgagtagggaacagtatggagctcttagaaggaaaattggtggtacatacaaggattttttcaaatcttacgttgaagtggacggcgcatatgttgaagagggctgggttgacaaaacatgcaaggtgtgcaagaaggacactaagggagaggcaaggcaagtggacaagtgtggaagatatgttcatgtagcatgtctagagaacgccaacaca

SEQ ID NO: 13568 - DNA, 269 bp, Glycine max
  Clone ID: jC-gmle01810070b10d1
ttttttttttttttttttttttttttttttttatttatttttttttttttcatggggtggtttattttttgtaatccactattttcagttggaccaccggggaaacaacaaaaaatccctgctggtgaacacaaaaaaaacacccaccggtgtttttgtgggggaagatcggacaaccaaaaaggaggtgggggggtcaaacgctcttgaaaaaatggagttttcccccccccatgtcatgcccgagatgaggaaaaggcctttttatt

SEQ ID NO: 13569 - DNA, 496 bp, Glycine max
  Clone ID: jC-gmle01810070b11a1
gtcatggctaaaatgggtttctattttggacactaatgactatcatttattcagtgaatatgacatgaactctgtcgaggaacaattggagggagagaattcagtggatcctggtgaactctcatgggaaaatcactcttattcatatctcactaaagaaagcaccacccttttgagcaattcttcatctttggaagagatcaacactggctttgatatgacaagtctcaaacaagatgcttctccacagaaaccgaagtcttgcattctgtcttttgaggattccactttagtgccaattaatcccaagaaaacatgccaaatatatgatcatggtgaacattcaaaggagacacaagaaaagccacacaatagaaaacccctcaagaggggtagacgcttttctcagacacttgatcacatattggctgaaagaaaaaggagagagaatatcagcagaatgttcatagctctttcagcacttattccagacttg

SEQ ID NO: 13570 - DNA, 346 bp, Glycine max
  Clone ID: jC-gmle01810070b11d1
aaaagaaaaggggggttggttttaatttcaacaaacggagatacttatattttggatcgcatcccatatcgattcctttgtaactacctcagattgagggtttcagagacaaaacaaattacccttttactactgactgtgcccccatttttggtgtccgaacctttctcaaacagttgtgggagagaaaaaaacaggctgttaacaggtgaactcaacatatgctctggcctttttcaagggtggaatcattgctgaaagagctctgaacaatccgctgatagcctctctccatcagctttcatcccagctgggaacaactgaccgtaaaaagcgactacccctc

SEQ ID NO: 13571 - DNA, 500 bp, Glycine max
  Clone ID: jC-gmle01810070b12a1
ggaaatgatggcaattgggtttatgtttgttgttggctccttcacttcctgctatgggacaacaggtttttctttgtgacctaaaaaccttttcaaaaggctttcctgatggctaatgaaacaaaagacttccacatatttaaactgtgaaattcaggtgctttctctcggtcagcagttaacaacaatgcaggcgcaaaaacagctgtgtcaaatgtagagatgtctgagacagtcatggtgacactcctttttctcatgccattgtttcaatacacgcctaatgtcgtgctgggcgcaatcatagtcacagcagtaattggcctcatcgatctccccgctgcttgtaacatttggaagatcgacaaattcgattatgctgcgatgatgactgctttcttaagtgttcttttcatctctgaccaaggacgccttgctcttgctgttggattatcaactttgaagatactcttgcatattacgagaccgaaaacagtgat

SEQ ID NO: 13572 - DNA, 317 bp, Glycine max
  Clone ID: jC-gmle01810070b12d1
gcagacttattttatcaaggatgtgacacaatcgcgtgtgccccttctgtcatggttgatgattggcctttcattgctgaagaaagtgaagctacagcctctccaactgtcaagaaaaggttatctgctcttatgaaatcattagcttcatctgcttttataagcttttctatgacctcagcaagaggattgaccaacacaagctcaacacctttcttttgcagtgttgctttcaactccttgaaaagtgagattccacttggagtaacagccctcacaggtgaaaacttcaaagagatactcttttttttcatgat

SEQ ID NO: 13573 - DNA, 614 bp, Glycine max
  Clone ID: jC-gmle01810070c01a1
gccgggaacagatgtgaacggttcctgtttactttattgttcgccttagcaacattacctgcttgtgacaccgtatcataggataggaccactcctaacacgtctttggctttgtaattaattcctttctttatattcttcccttgcctgagacttccacattattttccttcttctcataaagaaagtggggtggcagaccctgcgagaaatatgaaagacgggccacttttgaaatataccatggagccacaattaggatccactttgagaaaaagagattctacaggaagtgccgattgttctaagccttcaaagcatgtcattgagacagctgcgccctttgaatctgacaaagatgctgcgtccaagttaggaggaagaattgattggaaatctcgccgaacccagagtctggtggaggagagaagcaagctcgtagaagactttagaaaggaagaaactgcagaggaattggaaaacactcagaagcttatagaagaactcacaactagcttacaaaagatagagtaagatgagcttctagcataagaagatgctgaacgtgtgattctcaaaactgaagagatggagcacgacattgtaagtgaagc

SEQ ID NO: 13574 - DNA, 391 bp, Glycine max
  unsure at all n locations
  Clone ID: jC-gmle01810070c01d1
cgtggtaccaaagtacgcagagcnaccccgaccgtaaatgttcacggactcgaccagctcactagtgctcgggcgacctctatctcttcattcactcttttttgtttctgaaccaaaccaaaacatatggggggggaccttatacattactaagctggcatgacattatgcagcaccactaaaacagggtaccgaaccacggaacatctaattataatggcgctttttgctgccactgaacagccattgatgagcttaaacaatgctatacaaacactactcctgcattggcacatactagagcaccagtcccagatgagctaaaatagatacacgctcacttcttcacactcagagagcctatcatcacaagccttataaatacagacta

SEQ ID NO: 13575 - DNA, 574 bp, Glycine max
  unsure at all n locations
  Clone ID: jC-gmle01810070c02a1
gccgtaaacagatgtgaacggttccttcctccttcattgttcgcctcatcaacattacctccttcttccaccgtatcataggataggaccactcctaacacgtttttgcctttttaattaattcctttctttttattcttcccttccctgagtcttccacattattttccttcttctcatcaagaaattttggtggcagaccctgtgagaaatattaaagacgggccactttcaaaatataccatggagccacaattagaatcccctttgggaagaaaagattctacaggaagtgccgattcttctaagccttcaaagcatgtcattgagacagctgcgccctttgaatctgtcaaagatgctgtgtccaagtttggaggaagaattgattggaaatctcgtcgaacccagagtctggtggaggagagaagcaagctcgtagaagactttagaaaggaagaaactgcagaggaattggaaaacactaagaagcttatagaagaactcanaactagcttagaaaagatagaaaaagatgagcttcaagcaaaagaagaggctgacgtgtgattct

SEQ ID NO: 13576 - DNA, 463 bp, Glycine max
  Clone ID: jC-gmle01810070c02d1
gaggctgattcagcttcagtgttattggaaggaacttttccctttgggcttgatgaatcatgtgcaggctcagttggatcagaagtttgttcattcaattcagtagccttctcttgttgcttttgttcagccctccatgttcttaattcatgttctacagctaactttccttcattggccttttcggaattcccagttgcaattttcagagattctcttcttacagacaactcctcattcagttcttctaacttctccaggcttcttaattcagactcccttgctatctgaatctgagaagtagcagcttcgatcctcgcattggcttgctcctctgccttataggctctcctgctgagctcatgatattcttctagtgtgagtgtcaccattgaggaagagtccttgtcatttttgttgcctttagctgattcactcttctccatgctgtgattgcatctct

SEQ ID NO: 13577 - DNA, 353 bp, Glycine max
  Clone ID: jC-gmle01810070c03a1
cttctttatacggatggcagcaccattggcatgtcttgttgggagtggtttatctatacagagtaataaattaactcttggcaaggacgtcaatggaagatatctcttctcatatcataggctttcagcacagagtaaggagtcaaagacaatatgcataaaggcatccttggatcaaaggaagcatgaagggagaagaggatttctgaaattgttgaatgtgggagttggcttacctgtattattaggaggtgggaaagcgtatgctgatgaacaaagaccttccttcttcagaatgtcttaattcaaaattcttgagtatttgggatagggtagaggtaaaaaaggggatc

SEQ ID NO: 13578 - DNA, 412 bp, Glycine max
  Clone ID: jC-gmle01810070c03d1
aaaaagaagccagctgggatcttttgtcattgctaaaattaaaaggcaggggttttttacaaattttttacaatttgaaaaaaattcagtttggggggagctacactacattgcaggggcatttaggctattaaaacaacaactggggagggcgttgaaggagggccccttttttcaacagggatttaaacaaactcggacaggagagcccggaatttatttccaaactttgtgttcttctccaatggaacttccacaattttgtcaattgcctcacgggtgctccttatttggcccaatgctatttcatatgcttcatctgagagccttttgaccgccgcttggatgtcttgcgcaagcttttatgacattgagtttcttgccatcattctcatgataacatcactttggg

SEQ ID NO: 13579 - DNA, 64 bp, Glycine max
  Clone ID: jC-gmle01810070c04a1
aaaaaaaaaaaaaaaaaaaaaatataatttttaaaaaaaaaaaaaaaaaaaaaaaggggccggt

SEQ ID NO: 13580 - DNA, 490 bp, Glycine max
  Clone ID: jC-gmle01810070c04d1
gtcgcccttttttttttttttttaccttttcaatggtacatcattgtaaatatcagcatggggatcatccaacagaatatcaaaattttcccagataaactagttattggagtaacttaatcattctactcgtcatcttcatcgctgtcttcataatcaaaatctgattcatcacttcttggttgcgtcagtgaattcatgtcaaatgatggttccatttccatctcttccatgtcaatagtgtcatagtccattcgttgctcaaatttctcattagaacaattaagcatccatgacagagaacactttaaccctttcttgacaaccatcttatgcctaggttttatagttgactccaaaccgtaagtgaagaatgcagggaaagtaactaagtcttccaaaggccttttcataaccatttggaagtaatcaaagctaagtttcataatgtcaatgtttaaagcaagtaattgagggcatccaacaacca

SEQ ID NO: 13581 - DNA, 481 bp, Glycine max
  Clone ID: jC-gmle01810070c05a1
gggaggaaagtgaagtccacatagttgactttcacattggccagggaacccagtgggtgagcctgattcaagctcttgctcgccggcctgtaagccctccgaagatccgaatatcaggggtagatgactcctattcggcctatgccaggagaggagggcttgatattgatgggaaaaggttatccggacttgcacagtcatgtcatgtaccctttgagtacaatgctgaaagagtacctgctactgaggtgcaacttgaagaccttgaacttcgcccttatgaagcatgggcagtgaactttgccattagtctgcaccatgtgccagatgaaagtgtgaacagtcacaatcatcgcgaccgattgttgagattagctaagcaactgtctcctaaggtggtgactctggttgagcaagaatttaccaccaacaatgcgccgttcttgcagcgcttcggtgagacaatgaactactacttggc

SEQ ID NO: 13582 - DNA, 516 bp, Glycine max
  Clone ID: jC-gmle01810070c05d1
caaattagaatatacccatattcaattaaattcaagtagcatggagattcgtgtataaagttaccagaagagtaaacaatataaggaacagtgagagggtttgtaggataattgctagtgctgcagtggtactggtgaatatgaagactctgacccaacccagtttaggagaaatccaattaagcttataaaacggaactgtagtaagagctaagaaatagaagcttcatactcattgtgttgctatagatttcatcttacatgctttgcagttatagattggcatcactctgacctttggtaagcattacatgttctaaaatacacctcatagaaaattgcaggatatatagtttttcttgatattacttgcattgctgacataaagactaaggaagctctcttacagaacagtagtttgactatgaagcgaggagaaatcgtctgatgacgttaaggatgatacataacctaactagaagcctggagtaacataaatgaactgctataggattt

SEQ ID NO: 13583 - DNA, 250 bp, Glycine max
  Clone ID: jC-gmle01810070c07a1
ctttagctcaactcgttcaataaactgtttatatgtgcacctgaccacacacaaccgcatgcggccgcctgaggctttcaactaacctcgtaccaagtttagttcattactgagaacgcgcattctgcaactggggtgggacgttgtcatacctcaacagactgaggcttggatatcctccttctatatacaaaaaccacagaacgactacgtggtacggactgatcctatggatagtgaaagataagat

SEQ ID NO: 13584 - DNA, 269 bp, Glycine max
  unsure at all n locations
  Clone ID: jC-gmle01810070c07d1
aacccctgggcatgatngtcgcttagacgtacgcggtccataattagattccaggatcgacgatgctcactaggccgcggtcgccctttttttttttttttttcattttttaacattgttgttacaataaatactcctggggggtgggtaacggtacaacttcattggaatctgctgatctcgatttgaatcagcgctcgctcagattttcatgtaagcacttgtagactaacagctctattttggcataaccatataaaaattgggga

SEQ ID NO: 13585 - DNA, 492 bp, Glycine max
  Clone ID: jC-gmle01810070c08a1
ccacattcattttaatcctaattctgctctttttgatcattcgatttttctcctcaagatgcagatattcgtaaaaactttgaccggcaagaccatcacccttgaagtggaatcctccgacaccattgacaccgtaaaagctaatattcaatacaaggaagggatcctacctgaccaccagagacttatctttgcgggtaaacaacttgaggatggtcgaacccttgtcgattacaacatccaaaaggaatcaaccctccatcttgtgcttcggctgatgggtgtcatgccaatcttcgtcaagactttgaccgtgaagaccatcacccttgaggtggaatccttgaacaccattgataatgttaaggccaagatccaggacaaagagggcatccccccagatcagcagaggctgatttttgccggtaaacaacttgaggatggaagaacccttgctgattacacattcagaaggaatccacccttcacttg

SEQ ID NO: 13586 - DNA, 287 bp, Glycine max
  Clone ID: jC-gmle01810070c08d1
cttgatatcatcctggggattggcaacgggacaaatactttggccttagctgtttgggatctgaatctaaactccctaagattttaataaaaaccgttgtacaataacaccttttttctctagataaccatacacaaattgttaactttaaaagcaatagggtgttaaagaaaacctttgactcccccggccttaaataccaaacagggttattggcctgatgtgaaaaagcccccaccaaccgaatgtgattcttgggcattttatctgtttcattcattcaacca

SEQ ID NO: 13587 - DNA, 502 bp, Glycine max
  unsure at all n locations
  Clone ID: jC-gmle01810070c09d1
cccatccaacaaaaatcataaaagttaaaattcaataaaaaagcatcaaataagttttaaacagataaatggatgaaagcaactacacatttagtccacttcctcaatcttggggccagcaccacttcctcggctgccccagcaccagcaccacccatgtcaggaccagcaccaccttggtacatcttggcaatgataggattgcagatgctttccaattccttcattttgtcctcaaattcatctgcttctgcgagctggttgctgtctagccactggatagcttgctcaattgcgtcctcaatcttcttcttgtcagtaggatcaagtttctcaccaattttgtcatccttcacagngttcctcatgttgtatgcatagttttccaaagcattcttggcctcaaccttctttttgtgctcttcatcctcagatttgtacttctcagcctcttgaaccatcttctcgatatcttcctttgacagtctacccttgtcattgg

SEQ ID NO: 13588 - DNA, 251 bp, Glycine max
  Clone ID: jC-gmle01810070c10a1
aagaaatataatgttgtttactcactccagttgagttcaatgtcctctcaccgttttgagcacttaaaaggggagtgctttgtaaggtcgatgttactatagctgtcactttttttctctacagttccataatgcaacaacggggagagccgttcatcttctttaacaaaaaaaagaaagaaaaaaatacaactaaactaaataaaacaaccacattacacaggaaagagcttattataaaaaaaataagg

SEQ ID NO: 13589 - DNA, 170 bp, Glycine max
  Clone ID: jC-gmle01810070c10d1
ggaaaaaaaacgggtttccccggggttgctttatggaactggaaaaaaaaaaagggcccgtttttgtaacatcgcccttacaaaggcctccccttttaagggctcaaaagggggggggggccttgaacccaccggggggggggaaaccactttttttttttttttgggcc

SEQ ID NO: 13590 - DNA, 499 bp, Glycine max
  Clone ID: jC-gmle01810070c11a1
cgttcccattcctctctccctaacctcaccggcagcgccttcacggtcatcgccgccgacaccccccctcccttcttaatggcctcaatcccagtcgcgtgttccacacaccccaggctccaagcctcacccttattccaatcccacgcgcgctcccgcagcgcgtccttctggagggttcagcagaggggttcgatgggtggtggtggtgccgcgtcgagtttcgcctgctccacttctcagttccgcggcggattcgggttccggttccaccggagacaggggaagttctcgttgctctctttcggcggtgacgacgacggaagcgccgttggcggcgaagcgagagaaagagacttgtctcagcttctctccgcattgcttcccgttgttgttgctgccaccgccgttgccgctctcgctaaaccctccacttttacttgggtatcaaaagagttatatgctcctgcacttggtgggattatgttgtctattggaa

SEQ ID NO: 13591 - DNA, 497 bp, Glycine max
  Clone ID: jC-gmle01810070c11d1
aattggtaaatgatctatgacatagtttgagtctatgtacagaagtgtactgatttgcagctaggtaacaaatgatagtatctatgcatctataccccccgttactatgtaacttttttctctggataatgttacaatgttactaatgaaacctgtttcttgctgatttgtatgtgactaacctatacacttgaatttttcctattaatctaccttccctagccatttctaattgttaccattaaaagatcaaatttatcaagtttccaccctccaactgatgctaaaaaataagcctcaatgacacgcatcagaaacaaaaaagttaagttttaacagcagaattggttctgagaggaggtaatggcaacaggtttctaattacaaagccacttccccaaaaagaggcaagacagagacccattatagccatagcaatgacagaacatgcaggaggaactgcctgactactatccaaaaattgcgttgcaaggagt

SEQ ID NO: 13592 - DNA, 495 bp, Glycine max
  Clone ID: jC-gmle01810070c12a1
caaaaacaaagaaaaaaaaaatcccttagccaacacaaccatcatggccacctctgctattcagcaatcagcattcactggtcaaactgctctgaagcagctcaatgagttcgtccgcaagaccggtggcgccggcaaaggtcgcactaacatgcgccgcaccgtcaagagtgctcctcagagcatttggtatggccctgaccgtcccaagtacttgggtccattctcggagcagattccatcatacctgaccggagaattccctggtgactacggatgggacactgctggattatcagctgacccggaaaccttcgccaggaaccgggagctggaggtgattcacagcagatgggcaatgcttggtgcccttggctgcaccttcccagagatccttgagaagaatggtgtcaaattcggcgaggccgtgtggttcaaggccggtgcacagatcttctcagagggaggccttgactacttggcaacccaaacctg

SEQ ID NO: 13593 - DNA, 420 bp, Glycine max
  Clone ID: jC-gmle01810070c12d1
gaactagttaacttgaattccaaacgtaagagttgatattttctggggacccaaatttctaatatataaaaatataatggttctcatacagatttttctgctacacaggtgtagttacattagtgaaaatggagttaaacacaagggaactgcaaaagggagcaaaagattgcattgcatgtaggcatcctcattgtccagggacaaagttagtggcataagcccaagcattgttggcaacaggatcagcaacgtggtcttaaaggttctgaatagggcccttgccagtgacaatagcctgaacaaagaaaccaaacatggagaacatagccaagcgaccgttcttgagttccttgaccttcaactcagcgaatgcatcagggtcatcagccagaccaagagggtcaaaagcaccaccag

SEQ ID NO: 13594 - DNA, 465 bp, Glycine max
  unsure at all n locations
  Clone ID: jC-gmle01810070d01a1
acgcgtcaaagctancagagacactcagacgtgttatgcgcggcacccttacctcagaattcaattcgagattctaatgtcctaaaaaaactcttatctatgcctatgtctgtgtctctgtcaaccgagcctgcgttcaattctctcacaatggctgaatcctgcctcctatctctcccttccctcttctacgccaaaaacaaaaccctttctctctcaattcccactaatcctctcaacctgcaattcccatgctcaaactcttcgctttttcccctcaccaccaagactacgcgccactcttctctcctcacattcgtggctcagacatctggttgggccaaagaaggggaggaggaagaagccgcgtgggagaaccaaagcgacactgcgtggggaactgaagaaggtggcgatgatatagaagatggcggcgaaggcggtttcgctgaagaagaagctgaa

SEQ ID NO: 13595 - DNA, 472 bp, Glycine max
  Clone ID: jC-gmle01810070d01d1
agacaatatctatattttcgtgcggcattggcaaacataatggttaaaaaaatcaagactttcttcaaaatccctagaaaaggaatagtaacttaaatcattttcatctggacacaaaattaataacattacaacttgcaaatctaatctgaaaccagctcccaaagaagatacaaaaaacgccactgtatacttagccattaaaaggaaactcaatcagccggacttggaagatcactcaagttaccactcaaaacgagctaggtttaggcctttgggctgcaacattcactctgattgcccttccatccaaactctgaccatcaagggcagcaattgcatcattcatatcactctcactggacatcgtgacaaagccaaaaccacgtgatcgaccagtctctctgtcatagaccacccgagcatgcctaaccttaccatgttcactgaaaatttgcttcagccgagaatt

SEQ ID NO: 13596 - DNA, 556 bp, Glycine max
  Clone ID: jC-gmle01810070d02a1
attctaatgtcctaaaaaaactcttatctatgcctatgtctgtgtctctgtcaaccgtgcctgcgttcaattctctcacaatggctgaatcctgcctcctatctctcccttccctcttctacgccaaaaacaaaaccctttctctctcaattcccactaatcctctcaacctgcaattcccatgctcaaactcttcgctttttcccctcaccaccaagactacgcgccactcttctctcctcacattcgtggctcagacatctggttgggccaaagaaggggaggaggaagaagccgcgtgggagaaccaaggcgacactgcgtggggaactgaagaaggtggcgatgatatagaagatggcggcgaagggggtttcgctgaagaagaagctgaagaagttaagatcttcgttgggaacctgcctttcgacttcgacagcgagaaattggcctcgcttttcgaacaggctggcaccgttgaggttgctgaggttatatataatagggccactgaccggagtcgcgggttcggatttgttaccatgagtacaatcga

SEQ ID NO: 13597 - DNA, 467 bp, Glycine max
  Clone ID: jC-gmle01810070d02d1
aagctaaaagacaatatctatattttcgtgcaacattagcaaacaaaatggttaaaaaaatcaagactttcttcaaaatccctagaaaaggaatagtaacttaaatcattttcatctggacacaaaattaataacattacaacttgcaaatctaatctgaaaccagctcccaaagaagatacaaaaaacgccactgtatacttagccattaaaaggaaactcaatcagccggacttggaagatcactcaagttaccactcaaaacgagctaggtttaggcctttgggctgcaacattcactctgattgccctcccatccaaactctgaccatcaagggcagcaattgcatcattcatatcagtctcactggacatcgtgacaaagccaaaaccacgtgatcgaccagtctctctgtcatagaccacccgagcatcctcaaccttaccatgttcactgaaaatttgct

SEQ ID NO: 13598 - DNA, 177 bp, Glycine max
  Clone ID: jC-gmle01810070d03a1
tgaaaaaaaaaaaaaacaaaaaaaaatataatataaaaaaaaaataaaaaaaaaaaacaggcgacgtggccttatagtggaaaggaatacatcgattacaaacataaacgcttaaagccaaacatgcgttctttggggggctcggtctcaaggacgccgttgctcccccgaaatttt

SEQ ID NO: 13599 - DNA, 116 bp, Glycine max
  Clone ID: jC-gmle01810070d03d1
tgcgtggttcttgaatctggaactgttagtggatcgtcgactacttcgcttgcaagggcggttgctccttcaggacacgtctatacgtacatgataacaaagctactatctgcccc

SEQ ID NO: 13600 - DNA, 189 bp, Glycine max
  Clone ID: jC-gmle01810070d04a1
ataaaatatacagacggaaacatatttgtttaaaaatagaagaaagtgaccattctgggccgggttaatttaataattctaggcaaggacagtaaatgcttagacatattttcttaaatcacaagctttaatcgggggggtaatgaactaagactgtttgcatacaggaatctttttgccacccggctc

SEQ ID NO: 13601 - DNA, 132 bp, Glycine max
  unsure at all n locations
  Clone ID: jC-gmle01810070d04d1
naacatgcaactatgaccagatgatagcacgcgaccaagtataattcccacgaccacactctcactaggccgcccttttttttttttttttttttttttttttttcttttttttttttttattttttttttt

SEQ ID NO: 13602 - DNA, 462 bp, Glycine max
  unsure at all n locations
  Clone ID: jC-gmle01810070d05a1
tgggccgtatgnactatagtaaactcgattgatatttactgctcccttacctaggcatggaattcgggtgtagcaaaaaaagaaaaacaagagaagatttgttttaaggggctctcgacgtcttctgtggcgggggatgaatctgtaagctccagacgcgctacttaacagtgtaccagcactgcgtatatacaaaataataagagcgtagtaattactgtgatcaatatctagtctctgtgaggaagaaccatccaatgacatttccacgactgattcaaatggaaagagctagcaggaaaaaactgtggatgaaactactgacaaaaatgacttgaaaactgatggacgaaaagtcctgtataacaatggaaacaaagagaatgcctgctaaataaattgaacaacacaacgctcttggagaggcaaatggagaataggacaccaaaattgttgttgtta

SEQ ID NO: 13603 - DNA, 344 bp, Glycine max
  unsure at all n locations
  Clone ID: jC-gmle01810070d05d1
naaggccctgctctctagataccaacgcgtccgtattagttcccggacccacactagtactagtccgccgtcgcccttttttttttttttttaccttttttatttttcatgccggaaaaaacaccacacggagcacggtgctcccactattaaaattttccctgataacctcaaaattgcagtaactgccccattctattcaacatctttatctggcgaaatcctagtcaaaacccaactcaaccctttttgatcccatccccctatccatcgcaggagatcgctccattagaacctcttccatctccctttcgaacaaaaaaacccgttgtttaaatatttcc

SEQ ID NO: 13604 - DNA, 462 bp, Glycine max
  Clone ID: jC-gmle01810070d06a1
caccgctcccaggaagtgaccaattatgcttcacaggaggacgaacagcttgtctttccttattgaatacttttgattgatccatagcattggctgatctttcaatagaatttccactcgaaccaacagaaagcttaggaacgagaaaactagccattgcaccaaatgcacttggagtggctacagaacctttctcattgtctgcaccagtttgtccaaaaactgcttcaatatggtaaacagtctttgatatgttatcaatatcccccacaatgtacaaggtagcatttgcagggaaataccaacgctcatgaaacttccttattttatctgcatcccacttctttatctgttcttctaagccaatgggaaaccttgtgctgagcttattttcagaatgcagatgctgtaacaactgggcatcaactcgatactctattgtattcatcatttgaagctctg

SEQ ID NO: 13605 - DNA, 600 bp, Glycine max
  unsure at all n locations
  Clone ID: jC-gmle01810070d06d1
tcgcttgtaaactatacaaatggaaaggagaggatgcggaagtgaaggaaaaatctgaaaatcgagaggctgcgtctgtttctgtgtctcttctctgtgtggggtggcggtgtctataaccaccgtattaccctctctctctctctctcgatttggattgttctttctgttctgttctgttctgttctgcggttgaggctaaggagttatttagttacttactatgcccatgcccatggctatggctgcttcgacttcaacctcgctctccgtcgttggaagtaacctcgccttcccgcgccatcctcctgccacatcctcctctgctcgttttcgcactcgattgcgcaacaaccgttttttcctatcttcttctctcccaagtgatagaaggaggcttaaggctgtttgtggcggcggattgggattgcgaaggaacaactcccgcggcggcctcgctttcgtcgttggtgaaccctcgtttttgttgccgcacaaagctgtgcctcttgctgtctcgcgaggaaacgccgttccaatctttcaacatttgtcccttgagcttttctcgatanatcctgtttctgcctatctaacaac

SEQ ID NO: 13606 - DNA, 467 bp, Glycine max
  unsure at all n locations
  Clone ID: jC-gmle01810070d07a1
ccaaattcattttaatcctaattctgcttttcttgagcattcgatttttctcctcaagatgcagatattcgaaaaaactttgaccggcaagaccatcacccttgaggtggaatcctccgacaccattgacaacgtaaaagctaagattcaagacaaggaagggatcccacctgaccagcatagacttatctttgcgggtaaacaacttgaggatggtcgcacccttgccgattacaacatccaaaaggaatcaaccctccatctcgtgcttcgcctcaggggtggcatgcaaatctttgtcaagactttgaccgggaagaccatcacccttgaggtggaatcctcggacaccattgataatgttaaggccaagatccaggacatagagggcatccccccacatcagcagaggctgatttttgcctgtagacaactngacgatggaagaacccttgctgattacaaca

SEQ ID NO: 13607 - DNA, 184 bp, Glycine max
  Clone ID: jC-gmle01810070d07d1
ttcgtcctttttttttattaattcatttttttttttggcaatttacttgtatatttctgggtgtgagaactgccaccaacatacatttgaacacttaaaataaaactccctgattgccagaacacttgatacatatccccccttacatccaccccaggggccaccggctaaagaattggggaac

SEQ ID NO: 13608 - DNA, 496 bp, Glycine max
  Clone ID: jC-gmle01810070d08a1
agccaaaggaatgggaggaacagtaaagaaggcttatgaacttttggaaaacacaccaaatgctcacatgctgcaacaattttcaaaccctgccaatactcaggtgcattttgaaacaacaggtcctgagatatgggaggatacaaatggacaagttgacatatttgttatgggaataggtagtggaggcacagtctctggggttggacaatatcttaaatccaaaaatcctaatgttaagatatatggagtggagccaagtgaaagcaatgtgctgaatggtggtaaacctggtcctcatcatataactggcaatggggttggattcaaaccagacatattggacctggatgttatggaaaaagttcttgaagttagcagcgaagatgcagttaacatggctagggtgttggcattgaaggaaggactcatggtagggatatcatctggagctaacacagttgcagcactcagattggctcagctgcctgagaac

SEQ ID NO: 13609 - DNA, 511 bp, Glycine max
  Clone ID: jC-gmle01810070d08d1
cgattaaaaatgaaaaataaagaacaatacaaaacattaacacagctcttattgtaagctgtatcaaaaccttttcccaattaacacagctttgtttgacaatttttgctatggccgaactgtaagatgatgttaacaatttttgctacaacaggattgtaataactaggttgctccatgtaatgtaactccacaacaaagcttatgcatggaattaatcaactgctactggctgcatgttttcagcttcttgacgaagctcttggaacagaacagatgataggtatcgttcaccgaagcttggatgaacagtcacaataagtttgcctttgttctcaggcagctgagccaatctgagtgctgcaactgtgttagctccagatgatatccctaccatgagtccttccttcaatgccaacaccctagccatgttaactgcatcttcgctgctaacttcaagaactttttccataacatccaggtccaatatgtctggtttgatccaacccca

SEQ ID NO: 13610 - DNA, 467 bp, Glycine max
  Clone ID: jC-gmle01810070d11a1
ttttggccttttgaagcttccgaggtggcaaagatgaactgatcccaaaatatatgactcaagttttacaattcaagccgacatgaatgctgtgataccatgctctattggcaatgtttcaattattcctgtattcatctattcaacaaggatgaataacactgtaacaagattcaacttgtgaaggagcactgtaaaacctggatcatcatattggagatttttattaccttcatttgttgccagcggagcgtttccacaaaacagaggaatacgctcttttcataagaaatcttgcacctacatatcaaccacagaaacagatgtgacagtggaggaaccaaatactgttgctgatgaagattctggcgaaattacttcaaatgaagatggaattagtgaagattcatcttctaagtctgatgccaaccctgatccagctaaaggtagacgttcaagacctgcag

SEQ ID NO: 13611 - DNA, 405 bp, Glycine max
  unsure at all n locations
  Clone ID: jC-gmle01810070d11d1
gttcactataacctcgggaacatcttcagtaacaagatactctgcttgagggcatgcagccacttgcatggctatatcatcgacaagctctttaaaaatttcacctcgtgagacaaaatctgactcacagtttacttctaccaaaacacctatcctgctgtcatggatgtaagaacctatccttccttcagcagtgaccctgcttgctttcttgtctgcactcgataagcctttttttctaaggcactcttgtgctctaataaagaccccaccggtctctgatagtgcttagttgcaatccatcattccagctcctgtatcttgccgacgttgcttcacatgagctggagatatacctgctttacttaagccttctcctgaagtagcgccagtttgngcatcaga

SEQ ID NO: 13612 - DNA, 327 bp, Glycine max
  Clone ID: jC-gmle01810070d12a1
acacacttataactaacaaggaaattctaatggcaccctcaacgatttctaacccgggggcgggctttgttgaccgtgccgtgccctccatgattgctacaatcactggcctgaggatcatggctggcttccccaccagaaagaccaacaaggacacttaccttcattgattgcaacggcggaagagtgcactgcatgcacgtgtggccaccagttggcaagaagaagtgcgagaatctttcctacctgacagaccttgaagatgcacaatgggcaaaggaagctgaataccttgttagagaagggatggatattaacgctaggaat

SEQ ID NO: 13613 - DNA, 477 bp, Glycine max
  Clone ID: jC-gmle01810070d12d1
gttctgaaaaaaaaataaaggtgggagccaatcactcagacacggtctttacagaatgtggttctcatcagagagattacagccgctctccaatgtagagagacccaacaattgcctcaaatacatcacgttagttagtgaccactcatttgtgggtacgctttgaaccctctaaggaccacttgatggcctgacaacaggataaccattgacaccacatgccatatttgaggcatggggagggcatgcataactaccatcctgtgggtctctcatgcctaagtacaacacatgggaaccggccacgtgccattggttacgaatcaacccgtcaacctgcccagtgacgccaggcacactactcatcggttgaatatgatccctcagcgaatcataatggccaccagacaagtcataccctgcttggaatctatggccatgatgggtactttgggatcgctcaaacctgcaagaact

SEQ ID NO: 13614 - DNA, 498 bp, Glycine max
  Clone ID: jC-gmle01810070e01a1
atttggaaacatgtgaagtctgtactggtactggagcaaagataggctccaagatgagagtatgttcaacttgtggtgggagaggtcaagtgatgaggactgaacaaacaccttttgggttgttctcacaggtttcagtatgtcccaactgtggaggggatggtgaagtcatatctgaatattgccgtaaatgcaatggtgaaggacgaatacgggttaataaaaatattaaagttaaagttcctcctggtgttagctcaggcagtattctaagagttacaggggagggtgacgctggaccaagagggggccctccaggagatctgtacgtatatcttgatgtgcaagtgatacctggaattcaaagagatgacattaatctcgtctcaataatatcaatcagttatctagatgctatactgggggctgttgtgaaggtaaagacagttgaaggcatttcagaactacaagtacctgctggtacccaacctggagatg

SEQ ID NO: 13615 - DNA, 480 bp, Glycine max
  Clone ID: jC-gmle01810070e01d1
aggtaattcattcactcgtgtagaagagcttagacttgctaccagatatacactagctttctcttagtgcaacctgctcatggagtacaatttgagatccttgaacaagttattctgtgtaaattgactggtgccaaaatttacaaatcaaaaacaaataaaagaatctgcatcactacttatttgatttcgctgggtagctaaaaattcagttaaagcatttcaagaaaatgtctgcattagtccctttccttccagtaactgttggaatcatgagaactctaacccacattaggtaaactacatcttgaagattctgctccacccaacaaccccataggactagagattatctttaaaccactttaaagctccatttgccacagatccagcaaagtccttcaatttattccatacatcattttcatcttctgatttttcagtttttttcttcgactgttgatgttgtactttcatcct

SEQ ID NO: 13616 - DNA, 484 bp, Glycine max
  Clone ID: jC-gmle01810070e02a1
gctgcacacaaggagcgttctggatttgagggtccctggacctctaatcctcttattttcgacaactcatacttcacggagttgttgagtggtgagaaggaaggtctccttcagctaccttctgacaaggctcttttgtctgaccctgtattccgccctctcgttgataaatatgcagcggacgaagatgccttctttgctgattacgctgaggctcaccaaaagctttccgagcttgggtttgctgatgcctaagcaacgtttaggggattgttgaagaggcatggtgcccataatatttctctaaaaaattgtatggtcatggtttttaatgccaatgtgggttccccagattttagatagcttttgaatgtattttgctggacgtgacgatgattgggaagttgggttgttgtttttatttgtggttgatacttttgataaataacattgttcagcgataatgatagtgatctttcggacc

SEQ ID NO: 13617 - DNA, 345 bp, Glycine max
  Clone ID: jC-gmle01810070e02d1
agggcccaaagagcactttcattctccctggacaatggtttttaaccaaattttaatcccacaagagataccgcagcccatctttctaaatgtttcaacgtacgggaaaaatcattgaaaaggtttctaaaatttggggaacccgcattggttttaaaaaccatggccattccattttttagagaaatattatgggggccaagcctttttaacaatctcctaaacgtggcttaggcattagcaaacccaagctcggaaagatttaggggaacctcaactaaattagtaaaaaagggcttttcgtccgtggtgtttttatcaacgagggggctgtatataaggcct

SEQ ID NO: 13618 - DNA, 386 bp, Glycine max
  Clone ID: jC-gmle01810070e05a1
agacactagtcaccttgtccttgctttttttgtgcaggtggcggtgacatgacttgcgtccgccaaccattaagatgagaacccccacaatcccacgtctgagtatgcaccagcaaatgccacttatttcatttccgcgtctgttgcaccaccccctactaatggtgaaaaggaggatgaaattggtggacaccaccctgacagcaactcacgcgcaagccctatctcaaactatactactgcgtgtcactttcgacgcgattactgaattaacatgcactcattgacagactagattaagacgcctactgacaatgtcatatctacagctgaacgtttatgatcaaacagcgatgctgctgtcaacattcatgatagaactgttt

SEQ ID NO: 13619 - DNA, 358 bp, Glycine max
  Clone ID: jC-gmle01810070e05d1
aaacttgcacgttggcctgcgtagcgcaacccgaccggaacccgtgccgacgagctcactacttcgtcggccgccctctttcttttttttttgataaaattacttgtctttactcgtgacgtaatcatcacttgggtgcggagagacaaacaaccctacgttttgtggcgtgaatacaaacaatttcttctactgaaaccctcgctgctctttgatctatgttccgattcaaccttcgaatcagatttctctggtgccacagaccctcatagcctcctaaactggtgcccctccattattcagctgcctcacactgcattcgttagcgggaaaagatcttaatccccttgtaagaaaa

SEQ ID NO: 13620 - DNA, 527 bp, Glycine max
  unsure at all n locations
  Clone ID: jC-gmle01810070e06a1
gtcccattggtaattcccgaagtgaaccctgaagcaatgcaaaacatcaaagccgggactggaaagggcgcactcattgctaaccctaattgctccaccattatatgcttgatggctgctacccctcttcatcgacgtgccaaggtgttacgtatggttgttagtacctatcacgctgctagtggtgcgggtgctgctgcaatggaagagcttcagctgcaaactcgtgaggtgttggaaggaaaaccgcccacttgtaaaatatttaaccgacagtatgcttttaatctattctcgcataatgcgtctgttctttcaaatggatataatgaagaagaaatgaaaatggtcaaggagaccaggaaaatctggaataataaggacgttaaagtaactgccacatgcatacgagttcctgtcatgcgagctcatgctgagagtgtgaatcttcaatttgaaacaccccttgatgaggacactgcaagagatattctgaagaatgctccangtgtagtggttattgatga

SEQ ID NO: 13621 - DNA, 500 bp, Glycine max
  Clone ID: jC-gmle01810070e06d1
tcttccttttttttttttttttttttttaagggaaaaataaagggacatcatagaaaactggggaacaaattctttattcaaaagatgaaacattgggggattctcctttgccataaccaaccattgttattcccggagatagggattacagcaactaaccacaaaaccttaaaaaaaccgtttcccgctcgtgtgctaccacataggtgaaaagagcctcgtactttgtcacaaacgaaatggattacctggtacaacttgaaaacccaaatctggtaaaaaagacgcctctgctttagggtccacattctttaaaaaccagattttattaccacatcttatcgcttgggatcgcttttactgcagctcccttgaaaaatcgaggcccacatacacagatgaacaacccttggtcaccatcctgtgataggaacgggcgaatcctaccggcagcaacatcatgcttgtttgctacttacaacggggtacgaaaatgatt

SEQ ID NO: 13622 - DNA, 513 bp, Glycine max
  Clone ID: jC-gmle01810070e07a1
gcctccaagtgtgacagctattgcagctgctacagtagctgctgcaactgcatggcgggctgcccatggactgcttcctttatgtggtccactccatacagcttttgcctgtcctcctgcatcagcaactacagcttcatcaatgattattgatgaatcaccacataaaacagagcgaggagagattaaaccacaaaatcctcctctgcaagatcagataccggatccagaacactcggaagctcaacattcagctcctaagtcaccagctgtttcttcatccaaatctgaggataggggagacgccaatttagatacttcaccaaaggctactaatcatgagatgaaccaagcaatttctgagaaccccgattccaacaaaatgaagggcagaaaacctgtagaccgttcctcatgtggttccaacacaacctctatcagtgaagagactgagttactagagaaggatgagaaagaaaaggaagagcccagaacacctgatgcgaacgtttt

SEQ ID NO: 13623 - DNA, 118 bp, Glycine max
  Clone ID: jC-gmle01810070e07d1
cgtccgcccttttttttgttttttttgaagcatcatttattacttaaatgatcaaatgctcaaacggggcttaatgtttcttgactaagtctattttagcggagtttttaactgcggt

SEQ ID NO: 13624 - DNA, 499 bp, Glycine max
  Clone ID: jC-gmle01810070e08a1
atggccttgggcaccagcgccttgatcggaaggaaggatgtcgtctcacccccaaccggcaaaacaaccaaatcatgtactccgctacaattccttttcaagagaagcatcttaaatgctcacaattcacaagctgctctagctgcccttatcttttcctgcgcgagcctctctgtgaccccacaagcccttgccgctgataacgtcacccctccccctgtaattgaagcccaacagagccaattaaacccctccaactcatcctcccctttctcacagaacctactcctcacagctccaaagccacaagcctcctccgacctccccgaaggcaccaactggcgctacagcgagttcttgaacgccgtcaagaagggtaaagtcgagcgagtcaggttcagcaaagacggttccgccctccagctaaccgccattgacggccgtcgcgccttcgttattgtccccaatgacccggacctcatcgacatcctcgccatga

SEQ ID NO: 13625 - DNA, 463 bp, Glycine max
  unsure at all n locations
  Clone ID: jC-gmle01810070e08d1
aagggacgttgagatatgatgncgnancncgtccggaatagtttccaggagcgtactgctcggtggccgccctttttttttttttttaattgttttttctccttgattttgataaaataattattgattctgacagggtacaagtcagagcgtattttatagtacaaacataattctgtgacttgcgtgtatgattatgcaacatataattgggcttttccatcaatgaatagactcatgaactcttcaccatccacagtttctttttctatgacaagttgagcacgcttgtgaaggatatcaatgtgagttgagataatatgtgttgccctagaatatgctctctgtaccagttccctcactttcgcatacactacattcgcagttgccatggagttatccttttgcgatgacatatgttgacccaagaatggatttacaccaggtccaccaatggcaactt

SEQ ID NO: 13626 - DNA, 498 bp, Glycine max
  Clone ID: jC-gmle01810070e09a1
cagccttgaacttgaactatcgtgttttcttggctttctctgttcaggatcaacatggatattgtatcacgagctttgctatttccgttggctatacttgtgctcatattaagcacaccttgctcaggtgcttttgggaagagtggaactaatgtgaaaacagctatttttctgtcccccaagtttgaacttggaccaggatcggtagccaataaatatgattatgacgctgattttccaagaggtcatatagcacttaagagtttcaatgctgaagtagttgatgaagcagggaaccctgtgcctcttcatgaaacttatctccaccactgggttgttgtaagatactatcaacctaaatatgtgacgacacacacaaactatgatggacataggatacttcacaactctgaccatatatttgtgaggaacagcggcttatgccagagagatactctaagacaatactatggccttggatctgaaacacgaggaaca

SEQ ID NO: 13627 - DNA, 531 bp, Glycine max
  Clone ID: jC-gmle01810070e09d1
acaatcaattttgatatatatagtattacatatcagcacaggataataagcaagactggtttaagacaaacattacaaaccctcaccaatacaaataattgataatcacattactacaatccttaaacttgaaaatatgctctttgccggttcttgcgtgtgttgtcctattgctgccgaatatgagaagtatatgttccatcgatatgtatttctgtatttcttttaaccgtgatacatactgtgataccatcgatatgacactcaacttatatttgcatctcacaacttatctatcaatgaattatactatttatattcataaaaaatgaagaacgagaagaatatctgaagtgttggtgtggaagctgttctgccaccaataggtagaaaagccccattactccagtgtggccacggctgctgctgtagttagactctagagttatagtttcaccatcaattatctttacagaacctggttgaggataacatgtgctcattcctacaatgtagtctacttcgtttcct

SEQ ID NO: 13628 - DNA, 499 bp, Glycine max
  Clone ID: jC-gmle01810070e10a1
tttaaacctaattctcatttcttcatcgttcgattcttctcctcctaaagatgcagatcttcgtgaaaactttgaccggtaagaccatcacccttgaggtggagtcctccgacaccatcgataacgtgaaagctaagattcaagacaaggaagggatcccacctgaccagcagagacttatctttgcgggtaaacagcttgaggatggtcgaacccttgccgactacaacatccaaaaggaatccactctccacctcgtgcttcgcctcaggggtggcatgcaaatctttgtcaagactttgactggcaagaccatcaccctcgaggtcgaatcctcggacaccattgataatgtcaaggccaagatccaggacaaggagggtatccctccagatcagcagaggttgatatttgctggtaaacaacttgaggatggaagaacccttgctgattacaatattcagaaggagtctaccttacacttggttcttcgtttaag

SEQ ID NO: 13629 - DNA, 522 bp, Glycine max
  Clone ID: jC-gmle01810070e10d1
aaatagaatcttaattttcttaagattggttaatcaaatattaaacaactaactaactgtgaaacgatattgatatttaaaataaaaacataaacaacatactttcgctgaaacgagttcaatacatcattttaaaacataataaacagcagcacttaaaccagagatgcaaagcacaagttcaagggagacactgaacaaacagataagacatatgagaacacttcataaaagggattccccttagcaaccaccacgaaggcgaaggacaagatgcaaagtggattccttctgaatattgtaatctgccaaggtacgaccatcttccaattgcttcccagcaaaaatgagcctctgctgatctggagggataccttccttgtcctgaatcttagctttcacattgtcaatagtatcagagctttccacctccaaggtaatggtcttccctgtcagagtcttcacaaatatctgcataccttcacgaagcctcaacaccaaatgcagagtggactccttctg

SEQ ID NO: 13630 - DNA, 496 bp, Glycine max
  Clone ID: jC-gmle01810070e11a1
acctaacttcttttctctctggggttctttctccatttccattggctttcaaaagtcaccaacacaattctcccttcagagtttcaatggctgtttcaacaagtttccctggtgcaaagttggaggctttgttgctgaaatgtggctcctccaatgctgccactgccactgccaccaccaccacccatttgtcatgtttttgcaaaaccagaaagacacttgttcagagtcagagagggcctattcgctgtgaggcttcttctgcttctgatgttgtggctgatgccactaagaaagctgctagtgtctctgctcttgaacagcttaagacctctgcagctgataggtatacaaaggaaaggagcagcgtcatggttattggactgagtgtgcatagtacgcctgtggaaatgcgtgaaaagcttgccataccagaagcagaatggcctcgagccattgcggagctttgtagtctgaatcacattgaggaagcagc

SEQ ID NO: 13631 - DNA, 210 bp, Glycine max
  Clone ID: jC-gmle01810070e11d1
atccttgggtttggttaacaggacaaatactttggccttagatttttccgaacagaaacaaaactccccgaaattttatttcaatccgttgtacaataacaccttttttttctgataaaaaaaaacaaattgtcaactatagaagcaatcgtggtttgaaaaaaaccttggtaccctccggccttaaattccaaacaggattttggccca

SEQ ID NO: 13632 - DNA, 492 bp, Glycine max
  unsure at all n locations
  Clone ID: jC-gmle01810070e12a1
gaattttaaaaatgaccctactgtcaaaattcctcaggtttacaaacaattttctggtcaacgtgtgctggtaatggaatggattgatggtatcaggtgcaccaatccacaggccatcaaagaagccggtattgatgttgatggatttttaacaattggagttagtgctgccctacgacaattgttggaatttggattatttcatggagaccctcaccctggaaatatttttgccatgcgtgatgggagaattgcatatgtggactttggcaatgttgctgttctcagtcagcaaaataaacagattttaattgatgctgttgtccatgctgtgaatgaagactatgctgagatggctaatgattttaccagattaggcttcctgtccccagggacggatgtgactcctataattcctgctttggaagcgatttggcagaactctgctggaaaaggactgtcaaattttaattntcgtagtgtcactggaaa

SEQ ID NO: 13633 - DNA, 440 bp, Glycine max
  unsure at all n locations
  Clone ID: jC-gmle01810070e12d1
ccacttataaacaaaaatgatacaggagatcaaccaaaggattttctaactttacaaatacattcgtgtaagctgttagtgatctgaattttgaataactaagaatttaattaaaacagttatagtataagagttttttacactaatatccaatcataaattgtcaaatataataacattattggcttacagaaattaaattactttaaaagtcatctatacggngatttttattagttgatgtgaaaatttttacaccaacagaatatgaaaattaaacataagatagattttattcaataaataaagttgaaggaagctcaacgactacgtgaattttttggaattttttggacttttccccgtgaaattacaacttgatatttactgagcaaaataacgtttcctacacagatgtagcactgattttctacacaaat

SEQ ID NO: 13634 - DNA, 509 bp, Glycine max
  Clone ID: jC-gmle01810070f01a1
taatattcagtttttccttttctccatttttctctcttccgctttttccttttctccattttctgtcttccactatctgcttcccttgaccttgaactttattcttctgcaagctttgcatccattcattcacggcagacatgagatttattatggtatcagagctttatcatttcctctccgctgccactattgatcaacctctccgttcattgccgtcgccgtcctctgtcatgagacaccgattctggtcaacacctaccttcgttcaatccttattcatcttctcatatttccctttttcattttttgattacattttcctaaattttttttctccaaaacacaaaacttaacattttccctttcctttgatttctggcctatttgagccgcgattcgtgaaaccaccactaccaatcaattcctctccgcatccgcgacaaaacccctaaacatttgtcgccgccgccacgctggtgatttccgatcaccgtgctttatcacac

SEQ ID NO: 13635 - DNA, 442 bp, Glycine max
  Clone ID: jC-gmle01810070f01d1
aaaaaaaaaaggcaatgatattgggagtccctggggatcacttttatctacttacaaaataacaggcccgacctatataaatgggcctaaactatttataattttacacacagtgtcctttttaaaaaacaaaaggtacggctacactaccatttttttcccaaaaatataatccaggggactttacttgggccataagggtatcatactcaggctaaccttcctgggttttttttttaagcggggaaaccttaagattaagctcttcctctgccttttcatattgcaaacattctttcaagagttttttctgcacttccatcaagtttataattcttgggtctaccgcctggcctgtaggagatgcacttgtaagtacattttgatcaaatgcagcaactgtaacaatttcttgcattgcttgccttttcatcttatgaag

SEQ ID NO: 13636 - DNA, 482 bp, Glycine max
  Clone ID: jC-gmle01810070f02a1
gacgactggggcacaattttgttggaacggaacagattctattgggtcttattggcgaaggaaccggcattgctgctaaggttctgaagtcaatgggaattaatcttaaagatgctcgggttgaagtggagaaaattattggaaggggtagtggatttgttgccgttgagattccgtttactccccgggcaaagcgtgttttggaattctcactggaggaagctcgccaacttggtcataattatattggatctgagcacttgcttcttggtctccttcgagagggtgagggtgtagcagcacgtgttcttgaaaatttgggtgctgatccaaacaatattcgtgctcaggttatccgcatggttggtgagggtgctgacagtgttggtgctactgttggccctggaagtagtaataacaataagatgccaactttggaggagtatggcacgaatttgaccaagctagcggaagagggaaaa

SEQ ID NO: 13637 - DNA, 476 bp, Glycine max
  Clone ID: jC-gmle01810070f02d1
aacagaaataatgtcattttttcattccacccaaaccttgctgtgttcattatgttatgggcaaacgtggctgaggccatcagcattcaattaaaagcttgatgtctattggcaacttaaacaaactattgctatgttttcttttaacaaataaaagagagaaaaaaatacaactcaactaactaagacaaccacgttacacaggaagagcttcttctaatgaatctggggcaccactactaccgttgagcacaatcacattaccatcggagtcagcatcaactataactgagtcaccctctttaatctctctagcaagcatcttctcagccatgctgtcctccaaaagtcgcattatagctcttcttagaggcctagccccataactcggattatatccttcgtcaaccaccctctccctaaatctttctgttactgagagatcaatttccttggctttcagtctatcaaacacc

SEQ ID NO: 13638 - DNA, 589 bp, Glycine max
  unsure at all n locations
  Clone ID: jC-gmle01810070f03a1
agttggaattggaccttatgtggaggtagctttctaccacaaaccttcaaaaacactattggtgacagatgctgttatttttgtcccaagacagccacctgagtgtataagcaaagaatccttattagcatcagcaaaaaatggcttggctgttaaacttcttagtaaaggaaaggaggtacctgacgagccagtagttgacgacaaaaggaaccgacaaaaaggatgggaaagaatggttctacagatcttgtttcttggtccatcaaaccttttagaacctaatgcaagctttgaacagatgtcacaaaagttgattgtttcacctattgtgaagactctggtcttcagtaaagttcctgagaaggttagagagtgggttgatagcatttcgcgagattggaggttcaagagaataatccctgctcactttgctgctccaataagtgcaagtaggtctgatttcagggctgcatttgcatttttggatgagtntttgggggaaagtaatgctgcatggccttcactttcccttctcttctcatcaatcatgggaaaggcagccagctatttttcttccgatgacatg

SEQ ID NO: 13639 - DNA, 399 bp, Glycine max
  Clone ID: jC-gmle01810070f03d1
ccttggttccgcaacatgtatatgtagggcaatgttaaacaacatttacattttacttaagaatctagctgcttaagtaacaaaataatacttatctcacatttgaaaagttaacatgtattgggaaggccaaagggggatgcacctttgatgtgaccttttcctgcctgaaacaggtttttttacataaccaacggacaccaaaaactggtcaagggatgatagggacctcatgttatccgggggaaaatagctgggtgactttcccatgatcgacgagaagagaagggaaagtgaaggccattcagctttactttcccccaaaaacttatccaaaaatgcaaatgccaccctgaaatcagacctacttgcacttattggtgcaactaagggagcagg

SEQ ID NO: 13640 - DNA, 413 bp, Glycine max
  Clone ID: jC-gmle01810070f04a1
gggtaaataatgtagaactgaacatgggtttctctttctctctctctgtctgcttcttcactttctctcgattcaatcgaaaaaaatcatggccagaaaattcttcgtcggcggcaactgggaatgcaatgggaccactgaggaggtgaacaaaaaagggactactttaaatgaatctgaagtccctgcagaagatggtgtaaaaggtgtatgtgagccctacttttgggatccttactttagcacaaagtctgctgccccctgatttccatgactcggaccaaaacatgccggcttcgcaaaggtggggcttatactggagaggccagtgctgagatgctaggccactgggcaatatctcgggaccttattggtcactctgaacggaggcatgcttcgtatgaatcaaatga

SEQ ID NO: 13641 - DNA, 478 bp, Glycine max
  Clone ID: jC-gmle01810070f04d1
tcttcctttttttttacagtcaagttcaacattttttacccaccaaatgttatggtagggacagtatttttgcaatcagaaatttaatcaaaatccaatcgatcgcctatggatgagatcactggaaagcatgtttattcaggtactaaacagagtacaatacattgtccacaaagcacagatccaaaactcaaaaacagctatttccgaagcagcttgaaaggcaacattatcagttcctaactacgaatgtcaattcttcttcacagcagcagcgtttatgatgtccacaaattccgcctcgagggaggcaccaccaaccaaaaatccatgaacatcgggctgcgccgccaataatttgcagtttcctccatttacagagtctccatagataattcttacagatgcagccctcttcagcactcacattgccatgaacccatttccttaaatcagcatgaacctcttgagcctgagc

SEQ ID NO: 13642 - DNA, 518 bp, Glycine max
  Clone ID: jC-gmle01810070f05a1
gttctgtaataaagatggaattgagaaacaaccatcaattataacccccaaagaaccagatttcgtaaacaacatagaggaagaatgaaaggaatatcctatcgagggaatcatatttgcttcggaagatatgctcttcaagcacttgagccagcttggataacatctagacaaatagaagcgggacggcgggcaatgtcacgaaatgttcgccgaggtggacaaatatgggtacgcatatttccagacaaaccggttacagtaagacctactgaaacacgtatgggttcaggaaaaggttctcccgaatattgggtagctgtcgttaaacctgggaaaatactttatgaaatgggtggggtaccagaaaatatagcaagaaaggctatttcaatagcatcatccaaaatgcctatacgaactcaattcattatttcagggtaataaattagaaccaaaggaaagaggtctttaagatgaaaacaaaaaatgcaaatgtaggttcctttctttgaaca

SEQ ID NO: 13643 - DNA, 389 bp, Glycine max
  Clone ID: jC-gmle01810070f05d1
acgttctattatatatatatctatctatattctatatatagatgtattggttaggttatcaagtattaatctgaaataaataagaattgctgcttctaatacttataataattactacaaattctaataattactacaaaagggatatatgttagataaaatagattaattaatctatttcacaaaaaaataatgtctccatagcacagatacgtcttataatacctcgggtgctaatgaaactattttagtgaaatataactgtctcaattcccgggcgattgcacaaaagattcgagttccttttggatttccttcttgatcaatgacaactgctgcattatcatcatactgaataattataccgttgctacgtttgagttctttac

SEQ ID NO: 13644 - DNA, 492 bp, Glycine max
  Clone ID: jC-gmle01810070f06a1
gaaaaaccctgacctaaaaaggatagattattatgtatcgattgaatcaatgactattcatgattccataattgaatcaattacatactggatccaagctaaaggaatgttatggtaaaacttcgtttgaaacgatgtggtaaaaagcaacgtgcgacttgaaagacatgattagattagctgtggattcttacatccgccattttttctagtatatagaaatgaacatgctcttgactcgacatcgtttgttctgttccactagaacttattgttttggggacgggaaagcagttgatgatgtaagttgatgatgtaaatagtacatgatggagctcgagtttattcatttatcaggggcaagtatctaaggttagtaaaaattaataagttagaaaaacttcgtaagtttatttttgatagaaaaatagaaaggatccaatttgagcaaggttcacaaaaatggttggaattagtaaaactgttttgatc

SEQ ID NO: 13645 - DNA, 579 bp, Glycine max
  unsure at all n locations
  Clone ID: jC-gmle01810070f06d1
ctttgtcggggaggcgatagctgctacgcaacgcgaataattnccgggccgacgagcacaagtctactaggccgccctttttttttttttttaatggaatttcgtttgttgattcgagctaagttccataaaaacaccagccctttttaaaatgtcctgaacagttcctgtaggttgagcgcctcgttcaaggaaatatagaataacaggaatatttaaataggtttgattctttattggatcataaaaacccactttccgaagatctcttccctctctttgagatcgaacatcgattgcaacgattctataaacggctcattgggatagagatagataaataatgcaccccccccctagaaacgtataagaagttttatcctggtacggctcgagaaaataaaaaattataatgtatgtagaaaattatgatgtcaaatacgatcaataagatcatcagatgaattaaactatgacttaagtatttttatttcgtatgatctttttgaaaaaaacactcctcatattgataactacataactcaaattggataattatcaaataactaaaaagagaac

SEQ ID NO: 13646 - DNA, 509 bp, Glycine max
  Clone ID: jC-gmle01810070f07a1
gagcagcagcagcagcagcagcagattgtttgagaatgggtgaagtgccggctgtgatgcaggcgacgcagggggaacagagcaacaatgcctccgctgttcattgggagcgctttctgcctcggatggtgcttcgggtcttgcttgtcgaagctgatgattctactcgacagatcattgctgcacttctccgtaaatgcggttacaaagtgatgtcttctcatgattcagtaagcatggtgtttaaatgcatgttaaaaggtgcagctgattttcttataaaacctgttcgcaagaatgagctaagaaacttgtggcagcatgtatggagaaggcacgccataagcaggcctcctcaaaatttaacactgccggagattgaacttggttttgctgcagaaaaccatgctgcaagcaatgactctagtggttctgtggcttctacaccaaaagatgatgaatgcagtgagaaaacaagtgaggctcatgatatattgcagctgaagagc

SEQ ID NO: 13647 - DNA, 486 bp, Glycine max
  Clone ID: jC-gmle01810070f07d1
tcgcccttttttttttttttttttttgtttaacgatggcaaaccaaagatgcttgccgcgagatgtatatatatatttaaaaggtttttggatctttcaagacagacgcatactgcctataccacgatggccctatattagtattcaatcaagaaaacaaatactgttggtaaaatcaaagcttcaaatcaatcctactaaataataacaatcctacattctaggagacagcctatgttagccaccagaagaaaatactcacgatgctgaaaaaaaacataatttctccagacgaacttgagcctacagttaatccctgacaagagaggcccatcacctttggaagccagactggcctttaatgatgatgggaacaaaacaatttgaggaacctccacccacatttgctactgggcgatcagagcgttctaggcgaacaaattgccctttgacgcgagggcgctgttatgccaatttcttccggct

SEQ ID NO: 13648 - DNA, 506 bp, Glycine max
  Clone ID: jC-gmle01810070f08a1
ccctcacagcgtcacccagtcggcattgtgcaggagcatttctctcccgtcggagcaacttcagagattcaatgctagttgtttggactttgaaaatatgaaagtaataagcttttccggtggcataacaaaaccctgtttttttattgcccaaacagaaatgcctattctaacatttgctcattgtaagctgagtgctaccctagctcttaggaggatggggtccattacgagacttcaatattctgttgctgataggacattcacttctggttccgtggatttgccggcttccaaaacggactctggtcgagtggaatcgaggcggggaggcggctcatcctcggtatatagccgtcctagtttatcagaaatgaagaaggagaaggcagcaataagggaaaaggtttatgagttcttgagggcaattggcattgttcctgatgagcttgatggtcttgaactccctgtgactgttgatgttatgagggagcgcgttgattttc

SEQ ID NO: 13649 - DNA, 448 bp, Glycine max
  Clone ID: jC-gmle01810070f08d1
ccaatggtacatcattgtaaatatcagcataaagatcatccaacagaatatcaaaattttcccagataaactagttattggagtaacttaatcattctactcgtcatcttcatcgctgtcttcataatcaaaatctgattcatcacttcttggttgcgtcagtgaattcatgtcaaatgatggttccatttccatctcttccatgtcaatagtgtcatagtccattcgttgctcaaatttctcattagaacaattaagcatccatgacagagaacacttcaaccctttcttgacaaccatcttatgcctaggttttatagttgactccaaaccgtaagtgaagaatgcagggaaagtaactaagtcttccaaggccttttataaccatttggaagtaatcaaagctaagtttcataatgtcaatgtttaaagcaagtaattgagggca

SEQ ID NO: 13650 - DNA, 496 bp, Glycine max
  Clone ID: jC-gmle01810070f09a1
cagactccaacttgaactatcgtgatttcttggctctctctgttcaagataaacatgggtatggtatcactagcttcgctattaccattggctatactggggctcatattaagcacaccttgctcaggtgcttttgggaacagtggaactaatgtagaaaacacttatcactcgtgaccccaagtttgaactatggaccatggtcggtggtcaatcaatatgagtctgacgctgatattccgagaggtcatatcgcatttaagagagccaaatggtgaagtatgcagatgaatgcgcggaacctctgcgtgtcttcatgatacttatctacgccactgggttgttgtccgatgctatcgacctagatatgagacgacacacacaagctatgatggacataggacactggacaacttctggccatatatcagcgaggaacagcaggttatgccagtgagatacatctggacaatgctatggccttggatctgaaaca

SEQ ID NO: 13651 - DNA, 324 bp, Glycine max
  Clone ID: jC-gmle01810070f09d1
cattggcgtgggcgtagtcgctgcacgcacccaaccaaaataagtgcccacgagcatcacgtctactaggccgcggccgcccttttttttcttttggaaagagatacgatgcggtagtgaaagaaaaacctgaaaggcgagaggctgaatctggatctgtgtcagatctatgtgtggggcggcggcgtatataaccaccggattaccctatctctatctctctccatctggatagtaatctctgtgccggactgtgctgatgtgcggctgaggctaacgaattatatagatacttactatgcccatgcccatggctatggctgc

SEQ ID NO: 13652 - DNA, 496 bp, Glycine max
  Clone ID: jC-gmle01810070f10a1
aagagctacaaaatataataataatatatatatatatatatatatatatatatatatatatgtttttttttccttctcttcctgcttaggactttaagtaattatatatataattatatttttatatatattatatatactctaaagttggaagctttttattcttatgtatgatggttgtgttgtgtgagttctcaagggaagcaaagtcctatctttcacacctttcagtctcaaccgtgggaagaagaatctagggtttaacagcaccaccccaagtccatcaaggtctgtgctttggtgcttcttttatcatttttgttttggtttgatttttctttctcactgggaaagtgggtcgattttttctttttgtcggaaggaggatatgctgccacttgagagggaccctcagtttgttctgattccaaggttgatccttgttgccaaaaaacattgctttttttcttcatgagttggaattttgagactttaa

SEQ ID NO: 13653 - DNA, 466 bp, Glycine max
  Clone ID: jC-gmle01810070f10d1
caaaggcattttcattcagtgtagaaaaccttgagatgtttataacaggcttaagaaagatgaaatagttcttacgaattgaaactagctaattttacagactttgttcatttaatcagggatcctcatcctcaccctctaaataaaacggctggttcgccaaactatccaaaagacaaaatctgcgccaacaatatccatcatccctgtttgttggcatcacttaaaatatgtacagcagcgtctcaagccaatcacagagaggttttgacaaattgaatgatgggcttgatctggttaacctctccacatagctcatgcatttgcagattgtgttggtaacttggggcggttatgtccgccttcatagggaacaattagcatgggaggctctttcaagcacctttcaacatgctttcttggaggacaccctctgatgctgctgcacttattatatcccctaggg

SEQ ID NO: 13654 - DNA, 473 bp, Glycine max
  Clone ID: jC-gmle01810070f11a1
gaataataaaaatgaccctactggcaaaatttctaaggttaacaaacaatattctggacaacgtgtgctggtaatggaatggattgatggtatcaggtgcaccaatccacaggccatcaaagaagcctgtattgatgttgatggatttttaacaatcggagttagtgctggcctacaacaatagttggaatttggattattgcatggagaccctcaccctggaaatatttttgccatgcgtgatgggagaattgcatatgtggactttggcaatgttgctgttctcagtcagcaaaataaacagattttaattgatgctgatgtccatgctgtgaatgatgactatgctgcgatggctaatgattttaccagattaagcttactgtccgcagggacggatgtgactcctataattcctgctttggaagcgatatgacacaactctgctggaaaaggactgtcacattttaatt

SEQ ID NO: 13655 - DNA, 528 bp, Glycine max
  Clone ID: jC-gmle01810070f11d1
ccacttataaacaaaaatgatacaggagatcaaccaaaggattttctaactttacaaatacattcgcgtaagctgttagtgatctgaattttgaataactaagaatttaattaaaacagttgtagtataagagttttttacactaatatccaatcataaattgtcaaatataataacattatgggcttacagaaattaaattactttaaaagtcatctatacggtgatttttattagttgatgtgaaaatttttacaccaacagaatatgaaaattaaacataagatagattttattcaataaataaagttgaaggaagctcaacgactacgtgaattttttggaattttttggacttttccccgtgaaattacaacttgatatttactgagcagaataacgtttcctacacaggatgtagcactgatttcctacacaaatgtttcgttcacatgcattcaaaaatttcactatagagaagataaagaatggagagaaaatatagcacatgtgtaaagtctactcatc

SEQ ID NO: 13656 - DNA, 484 bp, Glycine max
  Clone ID: jC-gmle01810070f12a1
acctaactaatatgatctctggggttctttctccattgccatcggcctacaaaagggaccaacacagttgtccctgcagagtatcgatggctgcatcaacacgattccctggtgcatagatggaggctgtgttgctgaaatgtgactcctacaatgctgacactgccactgccaacaacaccacccatatgtcatgttattgcaaaaccacacatacacttgttcatagtcagaccagggcctattcgatgagaggctacttctgcttttgacgatgtggctgatgccactaagaaagctgctagtgtctctgctcttgaacagcttcatacctctgcagatgacaaggctacaaaggataggagcagcgccatggttatcggactgagcgcgcatactgctcctgctgaaatgcgtgaagagcttgccataccataagcaaaatgtgctcgagccatagcggaacattgtaatctgaatcaca

SEQ ID NO: 13657 - DNA, 346 bp, Glycine max
  Clone ID: jC-gmle01810070f12d1
gattcttgatattatcctttggattatttaacaggacaaaaactttggccttagctgtttgggatctgaatcaagactccccgagattttatttaagacagttgtactataacagcttttttcctgatatccaatcacaaattgtcaaatttaatggcattctggtgttgaagaaaaccttggactcccccggccttatattccagagatggttattggctcgatgtgacaatgaccccaccaacagattgtgaatcttggggattttatcggttccattcattcaaccaaagatggcgggagctcttacgcctgcgtgaaataaaaggaatgggttggactaatg

SEQ ID NO: 13658 - DNA, 485 bp, Glycine max
  Clone ID: jC-gmle01810070g01a1
cacaccctctctgcaagaacccgttttttacttttccagcttcgtatattcggattctcgggagtgaaaaagttccatgcgctattctattccaagtgcaaatcacggttgaagttaacaagaaaaggagcgcggtgcggagatttctcaagaaagacatggccgaccttcttgggagttcccttgattacaattcatatggaaggagccccaaaagccttacgagattagtatgctataagttcagcctcgttctttcttctcttcaacacaaactcaatttcttcttacactcaatttctctctctcttcttctttaattctcacacaaaaccaagaaaccatgaaatccgacagagagaaggagagaaaccatgaaatccgacagagagaaggagaaagagaaagagaatgatcactgcatcagttctcatatgcagacccttcatcgccgtcttctgcacgccttaaaccttggcaccaga

SEQ ID NO: 13659 - DNA, 475 bp, Glycine max
  Clone ID: jC-gmle01810070g01d1
ctcaaagcgataatagcatccagattttatagtatgaatttgaatcaagcatcgtttcacaagaagagcaattgcctttatccctttgctttctatgatacatctttgatactctggtaaacttgaaagacaagtcaacccaattaagttaataaccagttgaagtttatcaaatgatccataactttctacggatgatgtataatccagagtatgtattaaattaaacttttcaagcatgacaagccttttgcattcagtacatctaataataagaatctagcctgcgaggagatagaattacgtggagaatgaatcatcacgagaacagcccttgatactggttcgccttgaaaaggatcagcaatatccttttgacatattcggcaccatttttcaagtgtatccacaaaactcaagttccatgagtatgagggtttaaattttctccacagtgaatagtaagccacccaag

SEQ ID NO: 13660 - DNA, 469 bp, Glycine max
  Clone ID: jC-gmle01810070g02a1
cacaccctctctgcaagaacccgtttttcacttttccagcttcgtatattcggattctcgggagtgaaaaagttccatgcgctattctattccaagtgcaaatcacggttgaagttaacaagaaaaggagcgcggtgcggagatttctcaagaaagacatggccgaccttcttgggagttcccttgattacaattcatatggaaggagccccaaaagccttacgagattagtatgctataagttcagcctcgttctttcttctcttcaacacaaactcaatttcttcttacactcaatttctctctctcttcttctttaattctcacacaaaaccaagaaaccatgaaatccgacagagagaaggagagaaaccatgaaatccgacagagagaaggagaaagagaaagagaatgatcactgcatcagttctcatatgcagacccttcatcgtcgtcttctccacgcctt

SEQ ID NO: 13661 - DNA, 467 bp, Glycine max
  Clone ID: jC-gmle01810070g02d1
ctcaaagcgataatagcatccagattttatagtatgaatttgaatcaagcatcgtttcacaagaagagcaattgcctttatccctttgctttctatgatacatctttgatactctggtaaacttgaaagacaagtcaacccaattaagttaataaccagttgaagtttatcaaatgatccataactttctacggatgatgtataatccagagtatgtattaaattaaacttttcaagcatgacaagccttttgcattcagtacatctaataataagaatctagcctgcgaggagatagaattacgtggagaatgaatcatcacgagaacagcccttgatactggttcgccttgaaaaggatcagcaatatccttttgacatattcggcaccatttttcaagtgtatccacaaaactcaagttccatgagtatgagggtttaaattttctccacagtgaatagtaagc

SEQ ID NO: 13662 - DNA, 386 bp, Glycine max
  unsure at all n locations
  Clone ID: jC-gmle01810070g03a1
ttgggaatgattcctagtagacnagcaataattgcttatgacacctcactggctggggatcgccctttgtggctttttatttactccaactgggccttttttgctgctctcgctcctatgtcatgcgggttagggttcactcacgaagaaaacctcctcatcctcagtgaccatgacctcatccactattaggcataaaaatgctacgttactgtttaaggatacgctcgtgggtgagtacactgcatgaacctagatccgaagagcgctagatccggtcccgcgctcttaggaagaaggccccactgctaagcttacgctggttcactccactgctgaaaaggcttccggtgagccttaccgagtttagggtttcccgcctctta

SEQ ID NO: 13663 - DNA, 393 bp, Glycine max
  Clone ID: jC-gmle01810070g03d1
ggattgttatattagttatcaattttaagtaagtgggggctaggttatgaaagttttgcaacataaagtaagaaagcccgaaaaatgaatgttgctaacttaagcgtgtgaattatcgatgcataaatagctcgacgttatcttgaacatattatattgagtgtagaggctaccttcaagagcgatggcagatggagctatctctttaagcctaatattgaaggcttccttgtttatgacaccatcgaagatgactgtgtttctcttgttacctctctggttgaatatgatcgttgggaatccatatacattaacgggttcaactttcttggcatggagagtccattttggcgatgactatgaacttacgggtagtgtacttctaaccgagtt

SEQ ID NO: 13664 - DNA, 370 bp, Glycine max
  unsure at all n locations
  Clone ID: jC-gmle01810070g04a1
atgaaatggaattcaccgaggccgagagtaacatgaacgatcttgttgctgagtatcagcagtaccaggatgctactgctgacgaggacgagtatgaggaggaggaagaggaagaagagattgctgcttaaggcgcctctcttatttgtcaaaaattgtttcaaatatcgatatggttggctttgaacgagtggtgtaagtttaaattgtggtgcagtcaaattagattgactcgttaatgtgtatgcttatcgttgattgttgacattgtataaactgggttttgttgacaatgcttatgttcttgagagatcaagtcatggatgtttgtaatagttnaaaaaaaaaaaaaaataaatactaaaaccaa

SEQ ID NO: 13665 - DNA, 335 bp, Glycine max
  Clone ID: jC-gmle01810070g04d1
cggggctgggttttttaagaacatttgccttgtcaacacaacccacttaatacaatgccaacaatccacgattaggaaaccccaaaacgccccaatatagttggaccgcaccacaatttaaacttacaccagtcgctccgagccaaccatgctccagaaaaaaatcatacttgacacccaggaggggcggccttaaacgaaaaaatttccttcctcttgcaacaccttatactatgccacgataccggtggagccctgggactgctgatcctcaacaactagaaccttcatgttaccctgggccgcggcgaagttcatattattccgaaccgcac

SEQ ID NO: 13666 - DNA, 550 bp, Glycine max
  unsure at all n locations
  Clone ID: jC-gmle01810070g05a1
tttacttgaaagctgccaagaattacttggaaaaaggttctgattatgctaagaacgaaatccagcgcctacagcgcatacttgacaaggtaatattctctttcagtcgaagcaaaccttgaaagttttactcactcgtgaaataattatgaatattctttttttgtggtaaatttcaattatttggttgtaaagtgagattaagaattgaatgcataatcgtgctactcacttgcctatgttgattgattgattgatgcaggccattagtcctgccaaggccgacgagttaactctaaagaaaaatatcttgtcgacatatgcggcttgactttttggtgcatcattaaccatctctcatggaagctcgtgatcaatcgcagctcctgatgattgattgactttgatatcgaaaatgctgggagatattcaacgtggatacttgtagtgcttaatntgagtctgtactattgaccttatctagcatgggcgctttgggttaaaaattccgacttacgattctctcccattgtagctactgagcgtttag

SEQ ID NO: 13667 - DNA, 566 bp, Glycine max
  Clone ID: jC-gmle01810070g05d1
aaaccgctcaggtagactacaatggggagaagaatcgtaagttcggaatttttaaccccaaaagcgccatgcaagataaggtcaatagtacagactcaaattaagcactacaagtatccacgttgaatatctcccagcattttcgatatcaaagtcaaacaatcatcaggagctgcgattgatcacgagcttccatgagagatggttaatgatgcaccaaaaagtcaagccgcatatgtcgacaagatatttttctttagagttaactcgtcggccttggcaggactaatggactgcatcaatcaatcaatcaacataggcaagtgagtagcacgattatgcattcaattcttaatctcactttacaaccaaataattgaaatttaccacaaaaaaagaatattcataattatttcacgagtgagtaaaactttcaaggtttgcttcgactgaaagagaatattaccttgtcaagtatgcgctgtaggcgctggatttcgttcttagcatagtcagaacctttttccaagtaattcttggcagctttcaaagtaactcgagccgaa

SEQ ID NO: 13668 - DNA, 489 bp, Glycine max
  unsure at all n locations
  Clone ID: jC-gmle01810070g06a1
tgctcgaggctttgcatctctggaaccgngcgggcgttcaattctctcacaatggctgaatcctgcctcctatctctcccttccctcttctacgccaaaaacaaaaccctttctctatcaattcccactaatcctctcaacctgcaattcccatgctcaaactcttcgctttttcccctcaccaccaagactacgcgccactcttctctcctcacattcgtggctcagacatctggttgggccaaagaaggggaggaggaagaagccgcgtgggagaaccaaggcgacactgcgtggggaactgaagaaggtggcgatgatatataagatggcggcgaagggggtttcgctgaagaagaagctgaagaagttaagatcttcgttgggaacctgcctttcgacttcgacagcgagaaattggtcttgcttttaaacaggctggcaccgttgaggttgctgaggttatatataatagggccactgaccgga

SEQ ID NO: 13669 - DNA, 386 bp, Glycine max
  unsure at all n locations
  Clone ID: jC-gmle01810070g06d1
gaantcctcnnaggagtgacgacctaaagttggagctacttcggggcgcttttttttttatggaacaaattcattttcctttatgaacgagtcaagatccatatctggatcagaccaccggccttggatttacaacgacttagtccagacgaccaggtcaccttagaaagaacccctaatattgacttgacggtctctgggggagcacgattgatatggctcaagggaaaatataggaggacggcatgcaggagactgcagcctctgacattcctttgactttgtccattcttttaactagcttttttaacattagaaaaggcttgtactttttcagccatcattagtcatctactggcatgcgttgacctgtattagagggagat

SEQ ID NO: 13670 - DNA, 503 bp, Glycine max
  unsure at all n locations
  Clone ID: jC-gmle01810070g07a1
ctcaaagacacaggccgtggggcacaaattgtgagttcaattatcagcacggctaaacaatgtaatcttgacaaggatgtgacactcccaaatgagggtgaggagatccctcttaaagagcgtgaccttgtggttggaaaggtgtattccaagatcatggagattgagtctcgtctgttaccttgtgggcttcatgtcattggtgagcctccctcagccttggaagctgttgctacactggtcaacattgctgctcttgatcgtcctgaagatggtatttcttctcttccatcaatattagctgacactgtaggaagagatatagaagatgtgtatagaggaagtaacaaaggaatattgaaggatgtggagcttcttaggcaaataaccgaggcatcacgtggagcaatcactgcctttgtgnagcgtactaccaataatatgggccaagttgttgatgtagctgataagcttagctcaatccttggatttggcataaacga

SEQ ID NO: 13671 - DNA, 500 bp, Glycine max
  Clone ID: jC-gmle01810070g07d1
tcgtccttttttttttattaccaaattcttttcattcaagaaaataatctaagaaatcaattatgaacttaaacctttatttgttcgcaggggttgaaattcagaactgcacaaacgagacttgatctcaaaaaatgagaaaaggaaaacaaaatcacatttgaaggatgctgctcttctcttcactgttgtatgttcttttcaagaatagctattaaattcagcgatcaatgccttcaattttgtcttccacttctgaatacaactgcctgagcttttcaatattatcttctgaagtttcccaataaccacgtccattggcttccaagaatgtctgcactagtttcctgaaggagtttggattagtgttcatgagcttgttcagcatttgctcatcctgaatgaaagttgtgttggcttcttcatacacccaattgtcaacttggccagaagttgcactccatcccactgtattggtgagtctcttctcgatctcgcgt

SEQ ID NO: 13672 - DNA, 510 bp, Glycine max
  Clone ID: jC-gmle01810070g08a1
tttaatcgttcccttcattcactcccctttcactttttcccttccaacaacacaaattttttgttcatttcatactaattgtcattaattttgagacccaaaaacatggacagccaacgaagtcctcttcttagttgggctttctactgccacggcaagtcgatggaggagctgaagcagtctctgatgtacactacccttgagctggaacaaacaagagcaactgtccaagaagagctaagaaaaagagacgatcagcttctcaccctaaaggagcttctcaacaaagtcataagagaaagagatgaagctcaagagaaatgccagagactagtgttggagaaaatggtttttcagcaccaaaccgcacctgcttctggagtttccagcattgaggacgagccaagaaggggaattaatgactcctccaacaatggcctctcttcatcagattgtgaagaaagcattgtttcctctccagttatggagcatttgccaccacaacagcaa

SEQ ID NO: 13673 - DNA, 313 bp, Glycine max
  Clone ID: jC-gmle01810070g08d1
gaacacctaacctttaaaacatattataaatgaaaaactagaaaggataataaataaagctgactcagtaacaatagtagtagttgtcagtggagtacaatcctttggaacttgttctgtgtgggggaatcagtgccctcacagaaaacccttttcctactgactctcccacagttcgaggtgaaggaatcttgatgaggaagttgtggttgtggtggtgaaggaatggtgacaggtggaatctcaaaggactcaagagggggtggagggtgtctccattgaggaggtggtcctgcaagaagcagtgtctgca

SEQ ID NO: 13674 - DNA, 500 bp, Glycine max
  Clone ID: jC-gmle01810070g09a1
agaatgcctctttctatggggggaggagctggtgcaaagaatgctattctcatgaatatgccaaatgctgttctttcaatgtggagatattttgttggagatctcgtctttgaagtttctaagatgacttctccctacattaaatgtacagtctctttcttcatagcatttggaaatttggctgatgacaccatcaattttgaggcttttccccacaagctggtgcagtttggagagattcaggaaaaagttgtattgaaattttcacaagaggaatttcttacagcttggtcaactcaggtgcgtcctgcaacaactctgttggctgatgggtgtccatatttgtatgctatggtgcatgatagttcagtgtctacaataccaggtgattttgtcattggtgttaagttgacaaccataaacaatatgtgtgcatatgggctcaatcctggtatttcaggttctcgtcttttgggcaccattcctcagtctatttcaca

SEQ ID NO: 13675 - DNA, 311 bp, Glycine max
  Clone ID: jC-gmle01810070g09d1
aaaataacacacacttgacacgtcattacgacaattaaaagaggggtggaaattttcaaatagacagagcatactcaacaagagggtcatgtctaatttcctttattgaattaaacaaacgaacaaacgaaagaaaacacaaattccagatcatgcagaggattccgcattttcagaagatctggcagtagcctggggaacaaaaaaagctggcataagaattttacccgcaatttcaaaatcttgagaaattcccaagagaatatcaaaaactggaaaatgtttgggattggcaataaggaaacttaagg

SEQ ID NO: 13676 - DNA, 502 bp, Glycine max
  Clone ID: jC-gmle01810070g10a1
gccctgcaaattctgaaaatagtgatcactatggagatgcttttggaaccaacaaacaatcagaagacaaacatttacctaatgctattttgcccctcctgcgctattgccagtatgaaagctctgaatcttcctgcaggttcatgtctctggagcttaattgttttattaagaaataagttttgttttacttctgttttcaaggctcgccttgtgaagaccgaaattttaggagtgatgttgatgataatgagacagaagaagcatctttctccggccaagaggatttaaacgacttaaatgatattcttgaatgggccaaggaaaataaccacggaccactacaaattgtaagcgagttttaccgtttaagttgccctgccaggggctcatcacttacatttcatcctttggagcacttgcatcccttggaatatcacagatcagctgagacagttctacgtcttgctggttcaacagttgatttgaaaacgtcaagtac

SEQ ID NO: 13677 - DNA, 473 bp, Glycine max
  Clone ID: jC-gmle01810070g10d1
ccggataacagtcttaggagcataagattaatcatcttttagttttgttgcatggaagaaaaaaattacataaaatgaaacccttgtaactcttttagctaggcttgaatacaacattcaaatatgtatttacaggtaccgcagacccacaaagcctaaaaaaaaggtgcccggggatcgttttgggggcacagactggattggataaagggagaaaattttaaacccaatttaggaaaattatacaacactgaacttgcgttcaagcttgaagcaaaacaatatatattaccataatgttttgcatggcaaccctattccttttgtaagaaagaaagaacaaggtctgtatgtacagaaaaaagctgtgtatccacgaaaagcttcataaaaggctgatcacgatatgggaacgactcaatgaaactctccttcagaagcaatgataccttatcatcattggattgtacatt

SEQ ID NO: 13678 - DNA, 496 bp, Glycine max
  Clone ID: jC-gmle01810070g11a1
cccttcacaagattctcacaaacaactcttgagaaagaaagaatggctgccaacacattgatgagttctgccatctcagccttcccatctctcctttcctcctcaaaatccagatttgccgcagcagttcctctttccagctttgttgtcaccaatgcctcttcttctcgcttttccatgagtgctgactggatgcctggccagcctagacccccctaccttgatggttcagcacctggtgactttggattcgaccctcttcgtcttggtgaagtaccagagaatcttgagaggttcaaagagtcagaactcattcactgcagatgggccatgcttgctgttccagggattttggttccagaggcattgggcttaggcaactgggtaaaggctcaggaatgggctgcagttcctggtggccaagcaacctacctaggcaacccagttccatggggcaccctacccaccattctggccattgaattccttgctattt

SEQ ID NO: 13679 - DNA, 449 bp, Glycine max
  Clone ID: jC-gmle01810070g11d1
gcttcattcctttttttcataccaactagttgccagagtgatctaggagtttgaattcaaagtttaattacagcacagcgataccaacgtagcaagatcgatccgattcattacaaattgttacacggagttatacaggtagctattgaaacaaatatatattttttttcaaggcaaaatcgattgtggaataatgacgtttccaatgttgttgtgccatgggtcagccaagtgagcagccaagatctccaaaggtccagtgccgggataagctgattgttgaacacagaatcccacaaatgccaacaaagcaagacgtgcatttttaatttctttgactttgtattcgtggaatgttttagggtccttagagtatcccaaaggatcaaaagcaccaccagggtattttttcttttcagggtccttctccatgctcctttggtgctcca

SEQ ID NO: 13680 - DNA, 493 bp, Glycine max
  Clone ID: jC-gmle01810070g12a1
agactttacttgcgaaggctgtggctggggaagctgatgtgccatttataagttgttctgctagtgagttcgtagaattgtatgttggcatgggtgcctctcgtgtaagagatctatttgcaagggctaaaagggaagctccgtccataatctttattgatgagatagatgctgtggctaaaagtcgtgatggcaaatttcgcattgtcagcaatgatgaacgagagcaaaccttgaatcagttgctcactgagatggatgggtttgatagcaattcttcagtgattgttcttggagctactaatcggtcagatgtcttggatcctgcacttcgccggccaggaagatttgatcgtgtagttatggtagaagcacctgatagaattggaagagaagccatcctaaaagttcatgtttccaagaaggaacttcctttagccaaggatgttgacctcagaggcattgcttgtatgaccactggatttactggagc

SEQ ID NO: 13681 - DNA, 413 bp, Glycine max
  Clone ID: jC-gmle01810070g12d1
ccttgtatatttcagaaaatgaaactgtacacaaacatacatttgcagaaatcacatgtaacataaatgattgtcagtaaaacaaattcatatacgagcatgcatgtagtaaaggtgccaccagttaaagaattgtgaaacatgtgaagaggtattgatgtgtatatttgaatcttcccatctcccatggatttggacatttggtggagtgaattataacacaaataacaggctggctacttgttaaaaatgatgccaaaattcaccttacagggatgtacaaagttgtaaaggtgaattcatgctatttgagatataacttcactggcttcggagcaatggtgtcaattcataccccaatttacagtccacatagctagcataataaacagctatcaactgtcaggaacctg

SEQ ID NO: 13682 - DNA, 299 bp, Glycine max
  Clone ID: jC-gmle01810070h01a1
ctctatctcaactcgttcagttatttgtttatatgtgcacctgaccctacacaacggcatggggccgcctgaatctttcaactgacctcttaccaagtttagtacattactgaatacgtgcattctgcaactgcgtcgggacgaatggataacatcaaagactgaggcttgactactctccttctatatacaatagccacagagcgactaggtcatacggactgatcctatggctgtgaaagtgaagcttttctccgtcccaaaggaccagactatttattcgaactgcatccttgacc

SEQ ID NO: 13683 - DNA, 185 bp, Glycine max
  Clone ID: jC-gmle01810070h01d1
cagtgagaagcaacacgacggggggtgtataaatatacaatgctaaagccgatgtctatacttgcgacaaaattattcaaaccatgttcaagatgtgttggacctgatggaactaaacgcctcaacactgcttttaactagtccccgagatttaactgaggaccgcaatctttactatacataca

SEQ ID NO: 13684 - DNA, 428 bp, Glycine max
  Clone ID: jC-gmle01810070h02a1
tcatgttcagttcttgctttactccattattctttcttgcgcttttgtccttttctccatttggtgtcgttccactatatgcttcccttgaccttgaactttattcttctgcaggctttgcatccattcatacacggccgacatgagatttattacggtatcagagctgtatcattgcctctccgctgcgcactatcgatcaacctgttcgttcatagccgtcgccatgctctgtcatgagacaccgattctggtcaacacctaccttcggacaatccttattgatcttatagagctcactgtcatatttatcgaccacataaccctaaatgctttttctacaaagcacaaaacacaacatttgcccttatctttgatctctgggctattggagccgcgattcgtgaaaccaccactaccaatcaatt

SEQ ID NO: 13685 - DNA, 312 bp, Glycine max
  Clone ID: jC-gmle01810070h02d1
cattcaaaaaaaaaggcaggactggtgacagttcctggagataatttttatcaacgaagaaaataaagggcccaacctatacaaatgggccgaacctatttataagcaagccccctgagtccttgctataaaacaagcggctcagtaccacttccatctatttcccagaacccaaagacacgggacttcacttcggccttaggggaaagaaacttaggcttatcatcatgagtgtggtttctgaccggagaaaccccaggattaaggtcttgctctgcttcccaatattaaaaacaactgttcaagaatgga

SEQ ID NO: 13686 - DNA, 448 bp, Glycine max
  Clone ID: jC-gmle01810070h03a1
cctctacgtacttcttgctggttttttacccttccaggatgacaacctggtggccttgtacaagaaaatttaccgcggtgacttcaagtgtccgccgtggttctcctccgaggcgcggaggctcatcaccaagctcctcgaccccaacccgaacacgcgaatcacaatttcaaaaatcatggactcgtcgtggttcaagaaacccgtgccgaagaacttgatgggaaagaaaagagaggaattggatctggaggagaagattaaacagcatgagcaggaggtttctactacgatgaatgcttttcacatcatttcgctctcggaggggttcgatttgtcgccgttgttcgaggaaaagacgagagaagagaaagagttacggtttgcgaccacgcgccccgcgagcagcgtgatttcgagattggaagatttggcgaaggctgtgaag

SEQ ID NO: 13687 - DNA, 443 bp, Glycine max
  Clone ID: jC-gmle01810070h03d1
aaaacaaaattaaacgcggccatgaatgacccatgagccacaccaatcaatttgcaaacatattcacaatcacgccaacatagcaacaacataacccacgagcacaacaacacgcagtacatgtgcctgaatcatcatcgacaacaactgcttgatggccatttcggttcattactggattcgccttttcaacaattcccctttgtggggaaaagacgacacaccccagaggccaaaacataacaaagaagcaagcaaatgactaaaatatctcagtcctgaaacaagaattaacaaaaacaactacaaaggaacgacaattcgcatgggagtcttggttgttcttcaagcgagtgtaggattctctgcaggagaagtcctccacacgatatctttaagagctggacgaagctccttggtacagaactgggtatactccaagg

SEQ ID NO: 13688 - DNA, 375 bp, Glycine max
  Clone ID: jC-gmle01810070h04a1
actttacgtacttattgctggtttggtacccttacaggatgactatctgtaggccctgtacaggataatttacctgggagactagaagtgcacttcggggctttcctccgaggcgcggaggctcatcaccaagctcctagccccatccagaacacgcgacttacaattacaaacataatggactttgtgtggttggagataccctggccctagagcttgttgggaaataagagagaggaatatgtgctggaggagaatattattctagatgcgcaggagggacctacttcgatgaatgcttttcacgacatttcattcttggatgggttcgatgggtcgctcgtgttccaggagaagaagagaggagagaaacag

SEQ ID NO: 13689 - DNA, 387 bp, Glycine max
  Clone ID: jC-gmle01810070h04d1
aaaacaaaatttaacgcgggctggaatgacccatgagccacaccaatcaatttgcaaacatatttgcattaacgccaacatatcttcaacataacccacgaacacaacagcccgcaccacatgttcctgagtcataaacgacaacacctccatgatgggcatatcggcacattgctgcattccccttttgaaaaaatcccctttgtgggtaaaagactacactccccacaggccaaaacataacaaagaaaccggcaagttactaaaatatttgagacctggaacaagaattaacaaaaacaacttcttaggaacgacaattagcatgggacccttggttgctcttcaaacaagggtaggattctctgctggagaagtcctccacac

SEQ ID NO: 13690 - DNA, 181 bp, Glycine max
  Clone ID: jC-gmle01810070h05a1
gtacagctccatcacaatcaccactgtccggatcaaggcttaacctgtctcagagggaaaggcaccgcactcggtgcttggggtccccacccgctgggacttgatcataggaatctttggctggacacagaaatgatactctgtgggtgttactgagaatgtgcccaaagaatctccttta

SEQ ID NO: 13691 - DNA, 367 bp, Glycine max
  Clone ID: jC-gmle01810070h05d1
aatcggaacataaactttatagtattcatttgaacagctaggcgtggatctcgtcactcaccacctcctatggggactacgaaaaccagcgggctccatcgaattggcgactgcgctagcttagactccaccggaccacatagctgcggacgccccaagaagggctttccattgccttccatataccagagttgccacagctacttacgcggcgggcacagctaatagggcatttttcccagctacaaaagctttgacatcgggtgtacatgccttgcaatgaataacatgccataaagatgcgttggcgaaaattggggtatgcatcgtaccaatgcccaccttggttggagaacaagctgattgt

SEQ ID NO: 13692 - DNA, 454 bp, Glycine max
  Clone ID: jC-gmle01810070h06a1
ctatcatggcggtggtctgattacgctgcagggtgactatgatgcatccctaacctccctctaactctgttcgccggcacgcccgcaggactgatcatgctatctactaccacatcagcatatagcctgaccacaatgcccagacccaagtcatccctgcctatatacaacctcttctcgatcaatttgccattctctagcaaccccctcattccttgcctccctcgcgagccactgaccaccacatacacctattacccaatatggcccacgtacatgtcaggccctatcgttacccgcactaccagataaaggaaatcgaggaccatgtcgattcgatgcttcaacaagggctaattcaacccagtaccagtccattctcgtcgccggtactctatatgaagaagaacgatggctcgtggcgcttctgcggtgactaccatgccctgaatgc

SEQ ID NO: 13693 - DNA, 340 bp, Glycine max
  Clone ID: jC-gmle01810070h06d1
ctcagaaaataggaagtttttattcatgtactgctaggttaattggcatagatatttatacttgtggtcctagcaatataaggaatattgcttactggggaatctacgaacgtttgggttgtatcccagtacctgcctaacctaaagcgggaaataacacagggtaactgcccatgtgaccattcaaatgtattgcttgaaggtatacggtctgtttactgccctatggggtgttacttgtcatagcaccgatattgacctgatctcttgcttgtgcattgaggtctttgagctggtgatggctagtgatgaatcattgcacggaccatggggaagcgca

SEQ ID NO: 13694 - DNA, 507 bp, Glycine max
  unsure at all n locations
  Clone ID: jC-gmle01810070h07a1
tttaatcgttcccttcattcactcccctttcactttttcccttccaacaacacaaattttttgttcatttcatactaattgtcattaattttgagacccaaaaacatggacagccaacgaagtcctcttcttagttgggctttctactgccacggcaagtcgatggaggagctgaagcagtctctgatgtacactacccttgagctggaacaaacaagagcaactgtccaagaagagctaagaaaaagagacgatcagcttctcaccctaaaggagcttctcaacaaagtcataagagaaagagatgaagctcaagagaaatgccagagactagtgttggagaaaatggtttttcagcaccaaaccgcacctgcttctggagtttccagcattgaggacgagccaagaaggggaattaatgactcctncaacaatggcctctcttcatcagattgtgaagaaagcattgtttcctctccagttatggagcatttgccaacacaacaa

SEQ ID NO: 13695 - DNA, 475 bp, Glycine max
  Clone ID: jC-gmle01810070h07d1
gaacacctaacctttaaaacatattataaatgaaaaactaaaaggataataaataaagctgactcagtaacaatagtagtagttgtcagtggagtacaatcctttggaacttgttctgtgtgggggaatcagtgccctcacagaaaacccttttcctactgactctcccacagttcgaggtgaaggaatcttgatgaggaagttgtggttgtggtggtgaaggaatggtgacaggtggaatctcaaaggactcaagagggggtggagggtgtctccattgaggaagtggtcctgcaagaagcagtgtctgcagcaaaggaccagctttcatcactgcttgcaaaagcttacccttttctggcaacggtttatctggtgagattagctcaatcattgactctggcaactgttgctgttgtggtggcaaatgctccataactggagaggaaacaatgctttcttcacaatctgatga

SEQ ID NO: 13696 - DNA, 505 bp, Glycine max
  Clone ID: jC-gmle01810070h08a1
catagccaccaaataattgcactcttttctctctccactctccaccaacacaaaagcacttgcaaactagttttgttttgggaacatcatcacattacattagattggtggtaatggcagcgtcactacaagcagcagctactttcatgcaacccaccaagttgagcaggagcaacactttgcagcaaaagtctactcagtccatttccaaggcttttggtttggaacctgttggagctaaaaaggtcacatgctcccttcaggctgatcttaaggacttggctcacaagtgtgttgatgctaccaaaattgcaggattcgcccttgccacctctgccctcgttgtctctggggcaagtgctgaaggtgttccaaagaggctaaccttcgacgaaatccagagcaagacctacttggaagtgaaggggacaggaacagcaaaccagtgcccaacaattgatggtggattggactcatttgccttcaagccggggaaatacaatgc

SEQ ID NO: 13697 - DNA, 262 bp, Glycine max
  Clone ID: jC-gmle01810070h08d1
aattaatatgaattgttgtttatgaggccccaaaaaaccaccacacaccctaataataacttcaaaatgcaaaaacgttggagggggggggctaataaaaaaaaccccaaaaaacttttgtatccgtaaaaaaaagcctgcttaaaataacatggctgccaacgaacctatggtaccgaaaaaaaaatgggccaacaccccggcgaaagaaaaaaaaattcgagtgccttaaggatttccttcaaaatcaccgaaagttgca

SEQ ID NO: 13698 - DNA, 499 bp, Glycine max
  Clone ID: jC-gmle01810070h09a1
gccctgcaaattctgaaaatagtgatcactatggagatgcttttggaaccaacaaacaatcagaagacaaacatttacctaatgctattttgcccctcctgcgctattgccagtatgaaagctctgaatcttcctgcaggttcatgtctctggagcttaattgttttattaagaaataagttttgttttacttctgttttcaaggctcgccttgtgaagaccgaaattttaggagtgatgttgatgataatgagacagaagaagcatctttctccggccaagaggatttaaacgacttaaatgatattcttgaatgggccaaggaaaataaccacggaccactacaaattgtaagcgagttttaccgtttaagttgccctgccaggggctcatcacttacatttcatcctttggagcacttgcatcccttggaatatcacagatcagctgagacagttctacgtcttgctggttcaacagttgatttgaaaacgtcaag

SEQ ID NO: 13699 - DNA, 464 bp, Glycine max
  Clone ID: jC-gmle01810070h09d1
ccggataacagtcttaggagcataagattaatcatctcttagttttgttgcatggaagaaaaaaattacatagaatgaaacccttgtaactcttttagctaggcttgaatacaacattcaaatatgtatttacaggtaccgcagacgcacaaagcctaagaaaaaggtgcccggggatcgttttgggggcagagactggattggataaagggagaaaattttaaacccaatttaggaaaattatacaacactgaacttgcgttcaagcttgaagcaaaacaatatatattaccataatgttttgcatggcaaccctattccttttgtaagaaagaaagaacaaggtctgtatgtacagaaaaaagctgtgtatccacgaaaagcttcataaaaggctgatcacgatatgggaacgactcaatgaaactctccttcaaaagcaatgataccttatcatcattgga

SEQ ID NO: 13700 - DNA, 496 bp, Glycine max
  Clone ID: jC-gmle01810070h10a1
gccctgcaaattctgaaaatagtgatcactatggagatgcttttggaaccaacaaacaatcagaagacaaacatttacctaatgctattttgcccctcctgcgctattgccagtatgaaagctctgaatcttcctgcaggttcatgtctctggagcttaattgttttattaagaaataagttttgttttacttctgttttcaaggctcgccttgtgaagaccgaaattttaggagtgatgttgatgataatgagacagaagaagcatctttctccggccaagaggatttaaacgacttaaatgatattcttgaatgggccaaggaaaataaccacggaccactacaaattgtaagcgagttttaccgtttaagttgccctgccaggggctcatcacttacatttcatcctttggagcacttgcatcccttggaatatcacagatcagctgagacagttctacgtcttgctggttcaacagttgatttgaaaacgtc

SEQ ID NO: 13701 - DNA, 461 bp, Glycine max
  unsure at all n locations
  Clone ID: jC-gmle01810070h10d1
ccggataacagtcttaggagcataagattaatcatcttttagttttgttgcatggaagaaaaaaattacatagaatgaaacccttgtaactcttttagctaggcttgaatacaacattcaaatatgtatttacaggtaccgcagacgcacaaagcctaaaaaaaaggtgcccggggatcgttttgggggcagagactggattggataaagggagaaaattttaaacccaatttaggaaaattatacaacactgaacttgcgttcaagcttgaagcaaaacaatatatattaccataatgttttgcatggcaaccctattccttttgtaagaaagaaagaacaaggtctgtatgtacagaaaaaagctgtgtatccacgaaaagcttcataaaaggcntgatcacgatatgggaacgactcaatgaaactctccttcagaagcaatgataccttatcatcat

SEQ ID NO: 13702 - DNA, 505 bp, Glycine max
  Clone ID: jC-gmle01810070h11a1
cttggagaatgctcttggtaaatttgatgatgggccattcttgcttggccaattcagtttggtggatattgcttatattccatttgttgaaagattccaaattgtctttgctgaggtgttcaaacatgacatcacagaaggaaggcctaaacttgcaacatggtttgaggagttgaataagctaaatgcttataccgagactagagtcgatcctcaggagatcgttgatcttttcaagaaacgcttcctgcctcaacagtgaacgttgtattgctgcaggcttcctctaaaatgtagactctgcccatatagcgtcctttcattcacgggatgggatgcatctgcagtcaaatgtcggttgtgtttatctgccagagttgcaggatagtttgaagtcataatcacgttcatttttcagcttgtttgtttgatgtcataataatgtttatgtaccagactgtgatcactgatcaatatgatataatgaccaatatggtattattat

SEQ ID NO: 13703 - DNA, 63 bp, Glycine max
  Clone ID: jC-gmle01810070h11d1
cgccagcctcgtctcatcactatatagctgactcgcaaccgggccccccctcgagaccaactg

SEQ ID NO: 13704 - DNA, 491 bp, Glycine max
  Clone ID: jC-gmle01810070h12a1
ccgctggtggatgaaagttggcgagtcaaatttgagcgagtgagagaggatggtttctccaggctgcaaggtctttgggtccttcgggaaattgtacttccgatcataatgaagctgttgacagcattgtgtgtaccctacgttttggccaaaggtgtatttccagtgcttgggtatcccttggtaataaattctgccgtctatcggtttgcatggttgggatgcctctctttcagttttgtgtgcttctgtgccaagagattccatgtctggttcacaaatctccataattcaatacgcgatgaccggtatctgattggccggaggttgcataactttggagaacatgctgagaaagcaaatgtagcagaaacttctacaggggagcaggaagctattttactaggtacaggtttaaaccaacaagatcacgaagcagatgttggactacggttgaggcacgtaaatcaacaggtgggctgaattgtatt

SEQ ID NO: 13705 - DNA, 358 bp, Glycine max
  Clone ID: jC-gmle01810070h12d1
cacaaagaatttctttgaaaaaaaaatgcgctaggaacagggttattttcctcctattagctaaattttaaacgacacgcacaaaatgtttaacgttaactataagcacaggtgtgtcatgacgaggtattataactaacccaacacaagtgtagagtatacatcagtgattcatgaaccatgtcagcacgaggcttcacaacctacacagtggccttcctccctgaaaatacaattcagcccacctgttgatttacgtgcctcaaccggagtccaacatctgcttcgtgatcttgttggtttaaacctgtacctagtaaaatagcttcctgctcccctgtagaaagttctgctacat

SEQ ID NO: 13706 - DNA, 517 bp, Glycine max
  Clone ID: jC-gmle01810071a01a1
cagaaactgagccagaaactactaacactacctaccaccaccactcctctcctccgtttgagcagtgacggcgctgcttcctctgttcactcttctgtttcctccgtcaactccgttaacagcagcagttaccgttccaccagcagcatccgcgagatcgatctgatcccctccgacgccgtctacgacctccgctgcatcgccgagcgcatgctctcctccggctacctccgcgagtgcatccaggtctacggcagcgttcgaaaatcctccgtcgacgcgagcttccgcaagctccacatcgaaaagctcagcatcggagacgttcagcgcctcgagtgggagcagctcgagaacaaaatcagacgctggataaaagccgccaaggtctgcgtcagaactctcttcgcgagcgagaagaagctctgcgagcaaatcttcgacggcgtcggaactttcatcgacgacgcttgcttcatggagaccggtgaaggtcccgcgattcagctcttcaact

SEQ ID NO: 13707 - DNA, 77 bp, Glycine max
  Clone ID: jC-gmle01810071a01d1
gcctaattgggaatgctggcatttttcacttttggaatatcaaatcaacatgcagaaaagtttgcataacattacat

SEQ ID NO: 13708 - DNA, 520 bp, Glycine max
  Clone ID: jC-gmle01810071a02d1
aagctaatgaaatagccagaatatcgggcaaatccaaataatgctgcattgtcacatagtctacataacctgggaaactaacagcaatcaaatatgttcgccatttggaattggaatttgaatacaaatacagtgcatcaataatataaccctatgtacacagccaatatctgactgaaatttgatacagaatagtatcaatttgtatcataataaaatggcacagagaaatttatgtgaaggtaaaggggaagtgtatcagctggtgttttaattcttcgtctttcatttacttcatcattggctccttcctgcacgttcacatttcctttatctgcttaagcactgctgaccttgttcttacgcccaaaggtccaatggggtttagccggagtacgcctcaatgccttcactccgaatgggttgttcttgctcttgagacaagttccagcataagtgttgcagatgggatagtcgttagggcaacaactgtagtggtcatcacagcaagtagcaccct

SEQ ID NO: 13709 - DNA, 494 bp, Glycine max
  unsure at all n locations
  Clone ID: jC-gmle01810071a03a1
cttaccactgtgatgaaacacaaatcnattcataaaggacttgcgtctcatcacaggggggagtcttctcaacaaagtattgacactactccgcaacacaaattctttctgaatagatttggttgtttccatgacagtacaccatgccaatgagttcaggtggaaaaactgtagataccattcatggacttcagaaatcagaacatacacttacaattttgacaaaatgctggtgtaatttcaattgttgaactgctgctactcgtattcagtaatcacttgccaatgaaatgtgtatcctattacatcactataaaattcgtcttgtattgttgtgtacactgagcattgttggaaaatcttacttttataaatagtacttataaggaaaacactgaaaagaatagataccatattaatcaaatgaaattgcacgagaccaacatgcttacttagattacatatgagaagagaccattattaaattcatggct

SEQ ID NO: 13710 - DNA, 603 bp, Glycine max
  unsure at all n locations
  Clone ID: jC-gmle01810071a03d1
gaagcaataatttgaaatatgttattggaaatatcagaaactgaattctttgatcgaattgtatccatgccaacaacatgaaatgaaaatagaaatatgttgtacattgaaataaactaaagtggtaatgcatattgttgtgctgcgtatgttaatcatcttccatcaccgaagtcaattaattcaatatctctcaagctgtcatatccagtattttgttggccactactatcaccattttcatgagtgctatatgccccatgaagcaagtactgagtctcctcaaaattttggcctgcattggtccttggttgtttctccattagtcgtattccttccaactccattgccacttccttcataccaggcctttcctcccctctaagtctcaagcacttggccgcaagaatagcaacttccatgatctcctgtttattttcttcatcataaataccaatttgaagaacatcaaacaagcgatcctctttcaagcaacatagaaagtgaactgtaagacttcgttnatcttctggcttgtcaaaagagaaaggtttctcccctgttagcagtntcacaagcaccaccccaaagctataaacatca

SEQ ID NO: 13711 - DNA, 611 bp, Glycine max
  unsure at all n locations
  Clone ID: jC-gmle01810071a04a1
atgcgataataccttagtgacttcaggangaatagngggaaggangcaagctgggaattaggctagaggaaaaaaaaaagaaaaaaaaaaaaaaaataagttaaaagaaaagaaaaagaaaaaaagaagaggaattaaaaaaaaagaaaaaaaggaacccccagaaaaagaaaaaaagataaaaagaaaaaaaatagaaggaaaaaaaataaagaaaagaaaaaaagaatataaaaaaaaaaagaaaaaataaaaaaaaattagtaaaagaaagatagaaagataaaagaaagaaaaagaaaaaaaaaaaaaaataaaaaaaaagagatagaaggtaaaaaaagagaataaaaaaaaaaagagataaaaaataaagaaaaaaaaatagataaaaataaaagatgaagaagaagtaaaatagaaagaaaagatgaataactgtatagaaagaaaaaaaaaaaaagaataggaagtaaagtaaaaataaaaaaataaaaagaaatataaaagaaaaaataaaagataaaagaaaatgaataaaaaaaaaaaataataagagaaaaagaggagaaaggtaaaaaaataagatagtaaaaaaaaaataataaaaa

SEQ ID NO: 13712 - DNA, 543 bp, Glycine max
  Clone ID: jC-gmle01810071a04d1
gaattgcagattatctttgtataacagcaagaatctagaatctaccagcacaaaatcaaaccaagtcatcaatggaaacctaatgagagtagcagtagttagcaatgtacactgctacggagaactatctacctatcatcacattctaccaaatattttacatgggtttgtgttatcacatataatgccttaaagcagtagtgcaacagttccaacagacgcgagaaaaggaccccatactgcatccatagggatcataggtggtcttgagaatgcttcctttacaaaccaacagctaaatctggatgcgggaaaaaaaccaactagccaagcattgcatcactatctaatcttaaatatctgagatctgacagaaagaattcaggtttttggtgaccctgcatcagacccagaggctgaggaactatcactatcagaatcacttgacgaagagcctgaatcactgctggagctgcttgaactactggtcttactcccattatccactggaatttgtccttgctcggcaaggatgggggacat

SEQ ID NO: 13713 - DNA, 466 bp, Glycine max
  unsure at all n locations
  Clone ID: jC-gmle01810071a05a1
gtctaagatcatgtcagcacctacataatantatttctcttctctcttcaccctttagggagttttgcttcaccactccaacgctgacgcccccaccgtttatagttactccccttcatatttaccatccgggagctactgtaccgaagcgacgcagtttccgtcgagcaatctttttgcggcggcgggagatggaatatgggataacggagctgcgtgtgggaggcaatacctagtgaggtgtataagtgcggagcaacctatgacttgcattccagaccagagtattcagattaaaattgttgattacgctgccactgccgtgtcgccggcttccgacggcggcaccaccatggttctttccgataaggctttcgggactatagctaacatgtctgccaccttgatcaacatagagctccaacaagcgtgataaatccggtaattaattgctacattcccgtct

SEQ ID NO: 13714 - DNA, 347 bp, Glycine max
  Clone ID: jC-gmle01810071a05d1
acacattcaaaatatttatatataattttaaaaaaagcaggggaatggaagtgcacaccctcattccttgatagaatatgtatatattcactcatacatgttatatagcgacattaccatagaacatacatgcatagttactataaaaatataaacaagctgcctggctcagaaatccaactggaaaatagggagtgcaaagtccaaagttgtcaactcaaacgcaacccactgaaactgtattccaaagaggaccttctaatgctgagtttctctttcttgatttggacaagaagagggtaaacacaccatgagaaacttatataatgatccctattcatgccttc

SEQ ID NO: 13715 - DNA, 291 bp, Glycine max
  Clone ID: jC-gmle01810071a06a1
gagaaactaaacacacagacacacctaataattaatcgaaacaacaaggcaatcacaggggggtaattaaaaaagtgaatatttaagttccccccgaacgtataggggatcagcattaatttgcatataaattacattatgtaaaaaaccaaaattctgtatatgaaccttaattacaatgcaaaacaaaaataagttacagaacatcgagtaagtattggactatattaatattaatcttaaatgagactaaatttttaaaaattgaattataataataaataaatatat

SEQ ID NO: 13716 - DNA, 437 bp, Glycine max
  Clone ID: jC-gmle01810071a06d1
attatataccatatcaatcaatatatgggcggggttcatgaatttcacccaccccaaaatttattattggctgcagataatgttaaactttgtaaattctctcctcagacaccgtctgaacgaacaatttccttctttttcacatgataccttaacacaaggcaaagagtaaaaatggtttgctgctggtaatggtaatcatcaaatcaaaaaaaggcgctctcctctattcatatactttgcattcctcatcaacagggtttgtctcgcaaaattcctccaatgggtctccactccctgctttagctgcccctggccacttgcttgctactaggtgtgccaaaaccaccaccctttggctgtaaccccattcattgtcataccaagcaaccaccttaaccatgtcatctcccatgaccatagtcaaggaggagtca

SEQ ID NO: 13717 - DNA, 537 bp, Glycine max
  Clone ID: jC-gmle01810071a07a1
gcgagacgagccgtttctaattaatgatatttgtcaagcggaagtgcagtgatgtatggagctgaggcatcctaacagaccggaaatacccgcacggttccaggccgaaccgggcggcgggaaccggttactggaaggcaaccggggcggataagcccattggccaccccaaaccggttgggataaaaaaagctttggtgttttacgcagggaaagctccgaaaggggacaagagcaattggatcatgcacgagtatcgtctcgccgatgtagatcgctccgttcgcaaaaagaacagcctaagggtacatacatacatgaatgatgatgcatgccctttctagttcaagattattaggataggataattgcatgaaattacgactttgccctcaagttgaagctgaggatgataatcatttcccatgcatattgcaaaatctatggccgtaatatcttaaatgttatcttaccgcgcagaaccttcaccagttgaagacttagccatcgcattaaacacattattgatgtggaaag

SEQ ID NO: 13718 - DNA, 544 bp, Glycine max
  unsure at all n locations
  Clone ID: jC-gmle01810071a07d1
gtttaaaaaaaagannaatggggggcatcnnctgatncgnaanctattaagaanatattcgacgagctcactactcactaggccgcccttcgccctttttttttttattttttttggttttaatcatccttttatatttccaaaaaagggggagacaataaatacatgactttacaaaccgctgtgtaacttaaccccctatgctaccttcctcaccttatggcggtaaattagtgtaacaaagaaatggttcactcaatcccatgtttgggcaaacttaacacctttggacttctgttttgctgcctgaaaggccagcatcttttgatacttccgtgcctctttttcaacctgatattgcaaaaacccaaacaaagaaacgaatttacaagctccctggaaaacatgcaatactgtttaatgttaaccttaaacatcctatggatttaactaacagaagcaaaccttggacatgttacatttggctttaactatacgagctttggtatgaaactaattctaacgttcaagctctctttcccta

SEQ ID NO: 13719 - DNA, 172 bp, Glycine max
  unsure at all n locations
  Clone ID: jC-gmle01810071a08a1
ggaaaaaaagacgaaacaataacacgaggattaacaaaaaattaanggcgagnaaccaagcnaggaannaggctcgaggacaaaaaaacaaaaacaaaacaactattttctaacaaaaaaaaaaacaaaaaaaaggagcgaaaaaaaaaaaaaaaaaacaaaaacaaccacc

SEQ ID NO: 13720 - DNA, 494 bp, Glycine max
  Clone ID: jC-gmle01810071a08d1
aaattatagttgagtcaattaattaaaggcattggtccaaaataataatttcgtacaaggttttaaaaaacagtggtggtgaccgtgatttaggctgcagcatcaagtttttttaactgtctgctataatttttgagattgcatcgaccacatttatctgcgatttgccatgatttcaacaaacgtgactaactgcaatgcgactgtatttaaaactttgaatcttcatacaatttagcattgcttatataattaactaagattaatttgtcatctctctcggtgttgcgggctatataaagatcaaggttgaataatgaaaattttgttacaagaggatttccaaactcttatcaaaagaagattttccgacatgcataaacgcagttcataggttcatatatatatatttttataaatatcatatggtgatgaaggtggctaggccttttcattgcagatacacacgacctctaagcatggcccctatagct

SEQ ID NO: 13721 - DNA, 520 bp, Glycine max
  Clone ID: jC-gmle01810071a09d1
gaatggtgatattcaaactttaaaaccattcaagggggcggcggcgcatatctacatttgctaaacaaaagagatctacataaataaaaaaagaaaaacaattgcatacatcactacactactgctttgaatccaaagaagatccgccctcatcatccaaaaaggcaccaccacctgaatcgttggaatttttcactgcttccaaattcccatagttttcacatagctccgaatagactccactgtctaccttggataccccagacagtgatactaatcccatagcagcaatgctgtttgcaatagcattaatatctctggttccagtggaaagaccacgacttccagccacaaagatattgttttgatattcgtctggattagataaaattgcaagcagagtgtccctcataatctgttggttaccctggcttgaaccactaagtagcaatcttagagtctctcttgcacgcttcaccacagcattagattcaggaatcaatggcttaacaggtttgga

SEQ ID NO: 13722 - DNA, 116 bp, Glycine max
  unsure at all n locations
  Clone ID: jC-gmle01810071a10a1
atgtaatgttatgcaaacttttctgcatgnttatttgatattccaaaagtgaaaaatgcgggcattaccaattaggcaaaaaaaaaaaaccccaaaaaaaaaaaaaaaaaataatg

SEQ ID NO: 13723 - DNA, 526 bp, Glycine max
  unsure at all n locations
  Clone ID: jC-gmle01810071a11a1
ctcgtacgacaacgcccacgccgccancttctcgcagcgacgaggagctgatgtccatgtgcgagcagtggctagtaaagcacggcaaggcgcacaacgcgctcggagagaaggagaagaggttccagatcttcaaggacaacctgcgattcatcgacgaccacaactcccaagaggaccgaacctacaagctcggactgaaccggttcgcggatctcaccaacgaggagtacagggccaagtacttgggaaccaagatcgatcccaaccggaggctcggcaagaccccgagcaaccgatacgcgccacgtgtcggcgacaaactacctgaatcggttgattggaggaaggaaggtgctgttcctccagtcaaagaccaaggaggctgtgggagctgttgggcattctcagcaatcggtgcagtggaaggaataaataagatagtgacaggtgaactgatttcgttatcagaacaagaattggtggattgcgatacacgatataacgaaggatgcaatggaggact

SEQ ID NO: 13724 - DNA, 440 bp, Glycine max
  unsure at all n locations
  Clone ID: jC-gmle01810071a11d1
gccggcccttttttttttatttttaaatatttgattgtacgatanatttaaatttcaagggcgtgcacgagggttaatgagtgacagccaaatgagaaccgaattcatgagacatattagatacgagtattagcattcagcttattacaaacaaacataatccacaatggacagtcttgtgtttctccacattcaacggagatatccagaatattatgtaccacgaatgactgcatagtacgtataaactaacagtataaatgacatcaaattgtgttatattgccccattcttatcgcgtcaggcacacgcacgagagcttttggcatattaggacagtgactcttcttcattagacagaccactttctnctaatgcaactccacactggtgaatgcatgtcgcacgaagcgtttcacgcgtgcccgagcatcgttcca

SEQ ID NO: 13725 - DNA, 511 bp, Glycine max
  unsure at all n locations
  Clone ID: jC-gmle01810071a12a1
tatgaatttgnagcaacggtaccttttttattatttgcataatgaaggccaattaggcgatgtgtgttggaaaacacgtctaaggatcgcaacagaggcagctggagctctgtcatatctacactcagaggcctccatacccatcatccatagagatgtcaagactgctaacatcctcttggatgatgcttgcactgccaaagtttctgattttggtgcttcaagattgattccacttgatcaaactgaattagccacaatagtgcaaggaaccatcgggtatttagacccagagtacatgcaaacaagccaattgactgaaaaaagtgatgtttatagctttggggtggtgcttgtggaactgctaacaggggagaaacctttctcttttgacaagccagaagataaacgaagtcttacagttcactttctatgttgcttgaaagaggatcgcttgttcgatgttcttcaaatttggatttatgatgaagacaataaacaggagatcatg

SEQ ID NO: 13726 - DNA, 450 bp, Glycine max
  Clone ID: jC-gmle01810071a12d1
ggatgcaaattttgggggaactggattattaaggtcaaattgtaattgatgtgactcaggttctataaattaacagtaatttggcttccagggaataaagaaaaatgccttaagtcttatatagagagatgtattggacatttaagagtggagaagagcataaagatgattgctttacagagttggcgccctctcaacggagccagcaatcacagggagcactttgattccaaaagggtcactgggatgttttgctaagttcttaactggaccttatccagtgacatatgcttggaagttgaaaccaagcattgcaaacatagctagcctaccattcttaatgtccttcacctttataagcgccactgggactggattctttgctagacccaatgggccgaatggaccaccccgctgaagcttgtcttccaaggcccggccgataataat

SEQ ID NO: 13727 - DNA, 380 bp, Glycine max
  Clone ID: jC-gmle01810071b01d1
aaaaaaaaaaaaatatgctgaccatttggaattggaagttgaacacaaatacagagcatcaataatataaccctatggacacagacaatatctgactgaaaggtggtacataatagggataaatgagaattataatataatgggaaagagacacttatgtgaaggttaaggggaagtgtatgacctggtgtttaaattatttgactatcatttacgtaattatggagatgattcctggtcgaagacattctctttatctgcttaagaactgatgacctttgtcttacgcccaaaggatcaatggggattagccggagaaagcctaaatgactttaatcagaatgggttgttctagctcttgaaagaagatccaaaataaa

SEQ ID NO: 13728 - DNA, 367 bp, Glycine max
  Clone ID: jC-gmle01810071b02a1
cggaaaaattaggcttcagattccgggctaaaattggacggacggctgaatgcaaatgaggcgaaatttttattatagtttatacaaatgcccccataatatttttttacccttaatatgaagtacttaaacaaatgaaataaaaatgatatatatctcttttttatgatttgtaaaaataatataatctttattcatataatatggataaaaaataacaaattaaaactttattattaaaaaaaaaaaaaaaaagggcggtataaaactatatgagatatataacctgtgaattaattctagaccataacatgcaagtgaatacagatttacatataatgagaataataaagctaggagtaataat

SEQ ID NO: 13729 - DNA, 364 bp, Glycine max
  Clone ID: jC-gmle01810071b02d1
gactctatatttcattaaatgggactatgtgtgatacgatcatagtctacataaacagttttatttacatacttaagatgcggaggtcaattgttatagcaattccactaccactactaagcatggaaaattgcctattatttacacagactatatttagctactttaaaacccagggaaagcttcttttgactcatatgaaatcggcacacaccactgaaacctaaggctaatgtgaagctgttactacggtgtctgacatgtgcgatcatgatctacttaagaactgccaaggtcctgaacccgcaccaatccttaatatgctaaaacatggcctaacatccatttacacggaaaaggccac

SEQ ID NO: 13730 - DNA, 313 bp, Glycine max
  unsure at all n locations
  Clone ID: jC-gmle01810071b03a1
agcctaaaagtangactatatatggangatancagaagaacaagctcggaattggttcgagcggaaaaataggcttagatccgggataatttgggcggagggtaaatgaaaagaggagaattttaaatagtatagacaattgcccccataacatatattatctgtatatatgttgttgttttcaagagaaaatatacaggaaatgattctatttgtaaagaatgtataaataattcattgtctatacaaataatatggataaaaaataataaagacagtatgtatatataaaaaaaataatagaaagggtggt

SEQ ID NO: 13731 - DNA, 339 bp, Glycine max
  Clone ID: jC-gmle01810071b03d1
atgcaactggattctacaatatcattagttccttgggctttgaaacactccgatgaaataaaattcaccgttgtgactccttccacaggcagttatcattttactcctgtaaaaagtggttcttatagaaccacttttcaaattgtatggttcaacccctcattctgatagattgaagggggtatatccaaaatttgaaatgatttaatcagtaggctgtaacagaagtaaattacatgtccttttcctacaaaagttcacatgaactcactacagaagatgttagtgactggacaatttggctagggtgagtgttaatactttgccaccattcaagat

SEQ ID NO: 13732 - DNA, 651 bp, Glycine max
  unsure at all n locations
  Clone ID: jC-gmle01810071b04a1
atgcctagagactanagaactatntcgtaggangaatantngcgaggaccncagcggggaatncggttcgaggtctaagatcatgtcagcacctacacaatantattcctgttctctcttcacccttttcagaggtttttttcaccactccaacgctgacgcccccaccgattttcgttactccccttcatatttaccattcgggtgctacggaaccgaagcgactcagtttccgtcgagcaatatttttgcggcggcgggagatggaatatgggataacggagctgcgtgtgggaggcaatacctagagaggtgtataagtgcggagcaacctaagacttgcattccagaccagagtattcagattaaaattgttgattacgctgccactgccgtgtcgccggcttccgccggaggcaccaccatggttctttccgataaggcttacgggactatagctaacatgtctgccaccttgatcaacatagagctccaacaagtgtgattaatttggtaataattgctacattccgtcttcgagagtgaagttgccctatcttcagtatgaatggtgaaagatttgtattcgcgtctggagcttggaaaataaattattggtgttataattttgaaaaagcgtgtgagtgcaaa

SEQ ID NO: 13733 - DNA, 406 bp, Glycine max
  Clone ID: jC-gmle01810071b04d1
ttttttttttttttttttctttttttttttttttttttattatttttttttttttggtaagggttggaaaaagaaaaatacattaatttggcttgggttccacgcaattattcacattcttctgagaacattggaattaaaagaacctctccaaacacagaattgaaaaatctctaaattccacaaagtgaacgttttttttacgcaaacttgccggggacaaaaatgggggtgtaaccccaagcaattttgtttcctttgcccacaaggggataaataaagtttttcaatgggaccttaacgggtgcaaagggctgaaaaagggaccgcaaatatttggacaagggccaagatcccgtgttgagttcctttcccataaactcaagcaagccccttgggtaattat

SEQ ID NO: 13734 - DNA, 404 bp, Glycine max
  Clone ID: jC-gmle01810071b05d1
attaaataccatatcaatcaatatatgggcggtgttcatgaatttcagtcacgccaaaatttattattggctgcagataatgttaaacttttgaaaatctttcctcagacaccgtctgaacgaacaatttccttctttttcacatgatacgttaacacaaggcaaagagtaaaaatggtttgctgctggtaatggtaatcatcaaatcagaaaaaggcgctctcctctattcatatactttgcattcctcatcaacagggtttgtctcgcacaattcctccaatgggtctccactccctgctttagctgcccctggccacttgcttgctactaggtgtgccaaatccaccaccctttggctgaaaccccattcattgtcttaccaagcaaccaccttaaccatg

SEQ ID NO: 13735 - DNA, 448 bp, Glycine max
  Clone ID: jC-gmle01810071b06a1
cgcaggaaataaccttctatttgaatgaatgcttcatagaaagaaaaaatggtgtgtggggggcattcttgaaaagagagaagattcccccccccgtgcctaaacctaatgattcaaagaaaaacttaaagatgatgggacaaggaaacaccatattcaaatggtcatatcaatcctattatcaaaaattatgaaatataagattatcaagaaacgagacacgggcgggaaaggggagtagagaccactcaataaatgaaatagctactaaaggcttcgctctctttttagatatgagataactatgcaatatgagttatggagtgataaatatgacgagttttttttcaaaaagaaaatgcgaaggaaaaatactgaagtcatagtttaatcgatctgatgaatctattgatcaatttgacattcataattatatacatacattata

SEQ ID NO: 13736 - DNA, 466 bp, Glycine max
  Clone ID: jC-gmle01810071b06d1
ttcgtccttttttttttttttttttttttttttttttttttttttttttttttttgtttttgggaaaaaaaaaaaaaaaactttgcttgcccttgccattaaacttagtggtaaatcccccccaagaccctttaattttatctatttatttttcacccaacatccgaacttttccccaaaaaaatagaaaaagctttttttaaactggtccattggcccccccattttttaccgcccagcttttttttttgctttccccaaaaaaatagggtgtcttgaaccatccggggatttgaaccccccaagaaaatcgggaagagttggattgccggctaaaatgccctccagttttttgaacctttttttggggaatgattttttgaagagacctttaaagggcccaaggggcccaatgggtcaaagtcttcaaaagagaacgggcccctgggaccgaagtccttggggc

SEQ ID NO: 13737 - DNA, 398 bp, Glycine max
  unsure at all n locations
  Clone ID: jC-gmle01810071b07a1
attgaagatggaaattgtaacagaaggtgataaaataagcaagaaaagaaaggatggtgcggtggatggaggaaaaaggattctaaacctcaagcatcaaagaagattgctccaccgagaagttctctctgcgtagaagaaaaggtgagtgatttattgggggattctccttcaagaaatcagagtaagccaggaagacattctgttgagatagctgtgaggggtgatgagtcacggaggagaaaagatgccaaagcttcttctgcatatcctgatagcagaagtcgtcaaaaggatggaaatcgcgaaaatgaatataagaaagggttgagacctattctctggctttccccttactttccactanaaactgaagaactcttgccattgcttgacat

SEQ ID NO: 13738 - DNA, 523 bp, Glycine max
  Clone ID: jC-gmle01810071b07d1
aaacaaatcaaataataacactaccaacataatcttgactgcaaagggcaaaccatttcaatgttatacatagacatcatgtcttctcgactttggggtcataaatcgaatttgatattacccacaacttattaatgttagcttttggatacctatcacagccttgaaggagactggtaccagccccacggttcatcagagatatattgggtcacttgcttcacactcaagtaattatcaagtccccattctcctaattcacgaccaaaaccactgcgtttaatgcctccccatggggcttgagtgaagcatggttgagagcaattaatccacacaattccagccttaaaagccttagtaatgcgctcacatctttctagatcatttgatattacagcagaacccaagccatatacagtgtcatttgctagatcaatagcttcttcctcagtgctaaatgtttttacacagagaactggtccaaatacttcttctctccaaatttgctgggggtagttacatc

SEQ ID NO: 13739 - DNA, 556 bp, Glycine max
  unsure at all n locations
  Clone ID: jC-gmle01810071b08a1
tcgagaaggggtttcgtcacgatacaccactctcttcttacgtcgaaatggcccgcttcttacttcctctggccgagcgagccttctcgactccgtcttcctcggccgccgacgatcggcacacggcatgcgcttcgtgcaggttctatttgaacgagagaaggaacagcttctttggttcatctagcacgctcaataccaaatatggaaaggacggtgcctggtgttgagccaatcctctacnatatanntatggcttgcagtcttgtgccagctgtaaatacgcagcttgctctaaatgctgaagcttgcacccaaccagaagtaaaggggtatngggatttggctgctactctgttctctctgttgctggnggattcccgaccagctcacactggtttcaagtttcttgggagtnggtgaattaaagaagaaaatgtgaattgtatgggatggatcatagaagctgtagaaacaagcccgaaaggatcaatttcctctaaaatcaacctgtatttggagtacttgtggtggagcttgtttcaccctgaaatgg

SEQ ID NO: 13740 - DNA, 392 bp, Glycine max
  Clone ID: jC-gmle01810071b08d1
aagcggccactttacctcggaattatgcaggaagacagtccaatatgaaaaaaatagaagaatcatctcaaactgggcatttattctttgcacctaagacattgagaattctaagaatgttacacgcatgtcccataacaacttgtaggacttggatcaccacacccttgaggaacagaaatatttacttgccaaggttgctttgcctccaattcaagatgggaagaaagttcccctgtaaatagcatcctcgtgagcatttccaagtgcagcctcgttcaagtacttgtcagccaataggactctattgacattatcttggtcttggacaagcttgttaccatacgtcaagagcttctacagagtgatcttgggctgctaaaaggttggag

SEQ ID NO: 13741 - DNA, 506 bp, Glycine max
  unsure at all n locations
  Clone ID: jC-gmle01810071b09a1
cgtttggtcaagcttgtgtgttctgnatgtggggagcaaaggctttcttcatgtccttgctctgatgagatggcctcttcgcaccgcaactcatgcactgttgaggtggggagtgttgggagggtctcattcctcattgagaatgagaataacaatgagagtaccccagtggttcttcagcgtttgaatcacaataacaaggccaaggaggataataataatgacgaggatgaggttgtggtgctgaggaggagcagcagcagctgtgttgagatcaagaggcatcatcatggtggtggtgggttttggagaattgggaagctttttcggaagaaaaaggatcagaagggttgtcgcagaagtgttgttgggtttgacgagaggaatagagagatgtgggtggtggatcatcaagggggggtgtctaggtcaaggtcactatgcagcttcaggggtggagggctatttggatctgaggatggtggtgattcagtgttgtcaggtgc

SEQ ID NO: 13742 - DNA, 525 bp, Glycine max
  Clone ID: jC-gmle01810071b09d1
gaaggtacgaagtgtatatagttttttttttttggggaatgttacaaaacaataaacaaaatctccatttcatactcaatatatgaatgatacatgaccaaaataaaactataaatcagacagaacccggtggcgcattgaattagtatctccattacagttatggacattgcatccaaacccaatataaagatcagagtattacgcatcccaggaagtaaaatcctactacaatttagcaccgagatgtcctaaaccgcattacatgagcacaaattcgagatgtcctaaaccgcattacatgagcacaaattcgagttgtcttggaagaggaccaagaaataaaagctagataatgttcacccctgcatccagaattaccaatccgcaagactcccaaaggcattaagccttattggcaatgatgttggaaagccagtccagaccttcgtaaaggccctcccagaggttgcacaggtgctctgaatgtaccagtggcgctgtctgagagagtgtagacccaac

SEQ ID NO: 13743 - DNA, 518 bp, Glycine max
  Clone ID: jC-gmle01810071b10d1
aaacgcgtaactaaaatacttttttgttgtattccttttttaattgctactgagtttatacaaccatacacagcttgaaattctatagtctctgaccaacaactacaatggtccaagaaaaaaaaaaatcgtcacctactccctccaccaacccgggattttctcatttccattggtttattgttgaattgataacttatttcgtccacaatagagcctctaaattttcatcaggtaataataacgcgactacaacaaagggtaatgtggatcgtccaaaagaatggcattcaagaaaatgctgcttccacctctatttttaactatcttttacctatattggcaaatcttctagcaacaccaaatagaagatactttgtcaccagtcccctatcaagactacaagcaagagcaacagcaccaccaatgactagcatcttgggtatgttcacgccctgtggtttctctggagcaaccacactttcattctctgctgaattgtcatcgcccacgatcga

SEQ ID NO: 13744 - DNA, 356 bp, Glycine max
  Clone ID: jC-gmle01810071b11a1
gtttccatgaataaaacacaaaactccgtgaaaggacgatgaactctctctactgggggaccaaagttattataaggactgtaacccccacagctcactctaaaagaagaacacaagccaaacaatggtgatggacaaccagctattcatttatgaataaatctcctaaatagaccgactttactagcttggactgtaacacaacacagagattaccaactatgaaatctgggtcaaaaacatagtatccattaattatgcgaatcgaggacaataccagaccgcgactaatttaaagacgccacattaggtttaaaaactaacagaatcggtcgataaaatgaaggaatgggatt

SEQ ID NO: 13745 - DNA, 466 bp, Glycine max
  Clone ID: jC-gmle01810071b11d1
gaaaaatgaatattttataacaagaggatttccaactcttgttaaaagaagattttccgacatgcataaacgcagttcatagtttcatatatatctttataaatatcatatggtgatgaagggggctaggcctcttcattgcagatacacacgacctctaagcatggcccctatagcttccaatggagaatggtggccacatctttaacctaacaaagaagaaaaatgcagtggtgaaagaccataaaaatattacacgttccttgaacaaaacggattgaacttcaatttggaatagagggtgatatgtggagaaatctccatatccacttttattattaggaaattcagcacatgcatgcattataacaagagcaattaattacagagtacattttagataggagaatacttagggaaccaagatgaggtcattgataatggttgatgttcatacggagaaaga

SEQ ID NO: 13746 - DNA, 339 bp, Glycine max
  Clone ID: jC-gmle01810071b12a1
atcttgaatggtggcaaagtattaacattcaccctagccaaattgtccagtcactaacatgttctgtagtgagttcatgtgaacttttgcaggaaaaggacatgtaatttacttctgttacagcctactgattaaatcatttcaaattttggatatacccccttcaatctatcagaatgaggggttgaaccatacaatttgaaaagtggttctataagaaccactttttacaggagtaaaatgataactgcctgtggaaggagtcacaacggtgaattttatttcatcggagtgtttaaaagacaaaggaactaatgatattgtagaatccagttgcat

SEQ ID NO: 13747 - DNA, 483 bp, Glycine max
  Clone ID: jC-gmle01810071b12d1
aagaaagaaaacaaacgcacatcaatagtagctgcacgttcttttgtgcgcagatttatttgtataaatatattaatatatttatacgtataaatataataatattaagttaatgaattagacaaaatattattgtacacaaataacgaatttatccagtttttggtttagaagtatacatcatgaaagtctgaaagtaaaaagtggaaactacacgatgaagtcatgcttacgtgtaccacacgcagaaaactgaaaaagtcggtatagcttttgttggctatgtcaaaactctatactcattactacaatcaagaaaaaatgagggcgaaaaaaactcgccgttcaaactgtgcacttaacttcaaagccggagaggggacgactataccgacgaggacgatacagcactggatgaggttccaaaaaagaagaggttaacgaggcaatttttaatatcctcaggggtaaaacgtacgtact

SEQ ID NO: 13748 - DNA, 576 bp, Glycine max
  Clone ID: jC-gmle01810071c01a1
gtgaggttttacaaggaggaagaaaagatagatccccgagcatgcaaaaaagcttgcctcgctggcatatctgtatgtgaatgatgcattcccccctgctcacagggcacatgcatcaacagagggtgttactaaatacttgaagccatctgttgctggttttcttttgcaaaaggaacttgattaccttgttggggcagtatcaaaccccaaaaggccatttgctgccattgttggtggttccaaagtctcatctaaaattggagtgattgagtcacttttagaaaaagttgacatccttcttcttggtggaggaatgatcttcacattttacaaggcacaaggtctttcagtgggttcatcccttgtagaagaagataagttggatcttgctacatcactacttgcaaaagccaaggaaaagggggtgtctctcttgttaccaagtgatgtggtgattgcagacaaatttgctcctgatgctaatagcaaggtcgtgccagcatctgccatccctgatggctggatgggattgtatattgtccaaattcttgtaaatattcagtgaagcattgg

SEQ ID NO: 13749 - DNA, 590 bp, Glycine max
  unsure at all n locations
  Clone ID: jC-gmle01810071c01d1
tcgcgatctagaactagctcatattcagtgtattcatttcatcaatcactttgtctttctcatcataaccaccaaaacgccaaccatgaatccagatcgtttcagatacatgcaagccctaatgtttatgatgttgcaggttgtttgtgctgaagaggaaataatgtgcattgagagggagagggaagcactcctccaattcaaagctgcccttgtggatgactatggcatgctatcatcttggaccactgctgattgctgccagtgggaagggattcgctgcaccaacctcaccggccatgttctaatgctcgaccttcacggtcagcttaattattattcatatggaattgcctcgcgacgttatatcagaggagagatccacaagtcgttgatggagttgcaacaattaaactatttaaacctcggttcgaattattttcaaggcagaggaatcncagagtttctttggttctcttagcaacctgagacaccttgatctgtcaaattctgantttggcggaaaaattccaactcagttaggctctctttctcatttgaaatacttaaatcttgctgggaaatatatc

SEQ ID NO: 13750 - DNA, 391 bp, Glycine max
  unsure at all n locations
  Clone ID: jC-gmle01810071c02a1
ntgcgtagaagctagaagatatatggaggaatatngcgagancaagctcggaattggtcgagaaaaaataaaaaaaaataaaaataaataattaataggaaaaaaaataattaagtgaggaataaaatataaaaaaaaattaaaaccaccttaaatatataaaattaatatatgtttataatagaaatatataaatattaaataatataagataaatataataaataaaaaatataaaattttaatatataatattaatataaaaaaaaataattaataaaaaatattttattataatatttattaataatgaaaaaaaataaattaaaaataataagaatattaaattagatatattaaaaaatatatataataataaaaaaaataaaaa

SEQ ID NO: 13751 - DNA, 437 bp, Glycine max
  Clone ID: jC-gmle01810071c02d1
ggaaacccaaaaagggggcccacccccccgcatttttttttttccaaaattattaaaaaaatggcttttttgaagcaaggggaaaaataataaaatttttgtctttggctaaaagccctaaatttttggaggcttattttaccccttggttttttttccggcctttaatttttaaaaatttacctggggttaaattggcctttggttagggttttacaaaaacaatattttttttttttttagggttgaatgccccactttttgtaaatttttgttttatttaaattcttttccctgggcaaaagggccttttttttcactgtgttgcgaaaaaaaaaaccccgctttttttggggtaaaagtttatttcccggttcctaactttaaaatggggttcccatttgggttttttgaaaaaattttcgggggagggtttt

SEQ ID NO: 13752 - DNA, 473 bp, Glycine max
  unsure at all n locations
  Clone ID: jC-gmle01810071c03a1
agccgtattgaccttanagnattcgtgcangnattanngngagnanctaagcggggaanncgtttcgagggggctgcatctccgaccaccactgaaattanttcgagctcgaaaaggctaatgaaggaggaggttatttcgcttatactactcttccactcccacagataaccctattgcataatcgcgctccttcctctataggagttcttcaacttcattggcttccctactcatttcgacgatgacttcgatttcggaggcggatttggcggaaggcattcaggtaataagaggtcgtctcccgattacgacgacgaggattatgacaacgatccttttgcaccgaagaaggctataacaaaagctgaagaagcttctggtgtaacaacaggaatgatcttgtcacttcgtgagagtctccagaacttgaaggatacacttgcaacatgccaaaatgaacttgaggctgc

SEQ ID NO: 13753 - DNA, 452 bp, Glycine max
  Clone ID: jC-gmle01810071c03d1
aacacaccctaattgggctttattgataatcataatgataacatataatcatccctctcatgatacgttgcacctaattttgaaataattcgaccgtacaaaacagaaattaccaaagcgagaggacaagacaaaacagaaaactaagaacacatacaccaacatagttttataaaactataacttaagaaaacgccatttattaattaattaattatctcccttctagtaaattaagtgacgattgggcacaacgacgtcgtccagcatccacaggtcatccatgttgtcccactcagcacccatgttgtccaaccctagaaaccgttcaagttgtttcaggtcgagttcatctcctccgccgtggaaagcggcagaaggcggcaatccggtggatccagtggtggattgtgagctgctgctttgttcggtggtggtgtcagggctgaggc

SEQ ID NO: 13754 - DNA, 382 bp, Glycine max
  Clone ID: jC-gmle01810071c04d1
gggaagaaaaatgacaggttttaaaggggaagtcggattattaccaacgtagaagatatacgctgttgtcttaatggttgcaaaggtggagcctacactagttcacaattttaagtgaaaatttccctcacaagccaatccaaacttggttatgagaggtccaaaatgggaaatgatgggggggcaaacagaattgttacaagttcatacagggccaaaatgggtggacttgctggtgttgcatataagacaattaaaggggatattatgaccaatgggaacttatccgttaactggacaaagaaaatcagggacttccgaagataaacatgaaaactttttggtttgaggggattaccacgattaccatgaaattggttgg

SEQ ID NO: 13755 - DNA, 469 bp, Glycine max
  Clone ID: jC-gmle01810071c05d1
agaaccacttaatttttgctaattagctaattatccattaaacacgggcagagcaatccgaaaggaaaaaaaagagaaaaaacatagccaactccgttccgcatgatataaaagtttaatcaacctgctccattttgctgccctcagcatcagcttaaggcttctcctacagtgggggcatatcaacattagcttcagctgcatcctcgtggatgctcagtccaagcttcaacattctgtggatcctgtttccaaaagtgttgggttcgtcaaggctgaaaccagatgtgagaagagcagtctctaacagcaacagaacaaggtccttcacggatttgccgttcttgtgagaatccgcacgctatctgagctcctacataaatggggtctcaggggtgatctacattgtcttcttgcttgacatgtatactgccatgctgttgacccttaaggcttgagctttcatgat

SEQ ID NO: 13756 - DNA, 406 bp, Glycine max
  Clone ID: jC-gmle01810071c06a1
gctaaatcatagtacggaggagtgacaaatacttacagaatccaaagctttttttttctggggcttcttcttcttggtaacgccatgtctgcgacccaccaagagcagccactggtagagaactcggtcatagaataagacgagctcgaagaaacagcttatgattcggcagacaagatagtggtggttggagcctacgagtacgatgacgatgagaattgggggagagcgccccaaatctcgcggaagaagctatggctgtacaccggcccgggctttctgaggagcatagagttcctggaccatggaaacatagagggggaccttcaggcgggtgccattgcatggtactcattgtcgcggcttgagatgcgggccacaagaatgggcctgctgatccagctcc

SEQ ID NO: 13757 - DNA, 505 bp, Glycine max
  Clone ID: jC-gmle01810071c06d1
gcagaaattggagaattttctattaactttcctagtaaaacggcggtgacttttcaatatacattcataaaccctggccccaatatcactaaacaaatgatcctattcttaaaacgacctaaatttatcatctctatcattccatttacataaaacgttgatataaaaaaataataacaaattatattgaaaatggaggcaattttcatcaattacccaacttaaattgatatgttgaggtcaatcctaggtttcttcatggaaggaataggaacaagagagttacacctaggacacttagggttgttcttcatgatcattacatatgataagcaaccagggcaccctgcagccataggtgatgatgaaacattcagcctctcttcacattcatcttcttgaattgtggtttccctaatcgacgacgacgaggaggaatacgaaggcgacgacaccgagagaggtgacttcaaaatgaggttcttttcctgacaaaggctctttc

SEQ ID NO: 13758 - DNA, 520 bp, Glycine max
  Clone ID: jC-gmle01810071c07a1
gctagaaagaaactctcaagcaatacctagatccaatgaagctgctctcttattctagggacttgggactatccttagcgcaatagtctccgggatagttgagagggacataaatgcttggaagataaagcgtaacaaggatgtcattctcattgttctaactgtgagtatcaacatatcgggcaatatgattttgatttacataattaaatagcaagattatagataatgcacaaactattttatatgatcattcgaaatcacaaattatcatgtataataaatatattgatgtttataataattatttcaaaaattataacaatagtaattcctaattaattgtgggtgtaaaactattgtacttgtatgacagttaaactcatataaaaaggcatatcaatactgcaataaaaatacatatgctgatagaatatatgtaacgctatactacaggcactagatggtggagtgattcgccctaatattcaagtatggttcactcgcatgaagggtccac

SEQ ID NO: 13759 - DNA, 334 bp, Glycine max
  Clone ID: jC-gmle01810071c07d1
ccaccccaaaaaagaaagctttttttacaaaaaaaaccttttttcatcaggggaaccacgaaatcccaaaaataaagattttttttttaaaaaaccctaaaaaaaccacagagaaagcgaatatatttttttataaaacacacacaaatttttataaccctatatccccaaaaaaccacaacagggtcttaggggagaaattataaccaaatgatttgaaaaaaacccctttataaggccataaaattgaaaatttccccccacaggacctttggggtcacacccaagaaaataattgttgtctaaaacggggccaactttcaggaattttttt

SEQ ID NO: 13760 - DNA, 69 bp, Glycine max
  Clone ID: jC-gmle01810071c08a1
ggataaataaaaaaaaaaagaaaatagttgttaaaaaggaggaagggaagataaaagggggggagtaat

SEQ ID NO: 13761 - DNA, 524 bp, Glycine max
  Clone ID: jC-gmle01810071c08d1
aatgcaaacttgatttatattggttcggtcacgccttatgtctacattcagtcctcaaacaacccacttgagattttccactatctttataaaaatcttttttacaacttctgaacacccaaggaatcactttcctttgtgttcaggaaacttacaattcaagagacaatcaatctcttgattacaacttactttctgagatgaacaaaaaaatttctcttctttagagtggataatacaatttgaagttcctagatgaactctcaatagatttgcaagtgtgtgcctaagagttgttaagagagcatttgacaatgaagttttcttggaataactctcttactttttgaaatcagacacacatatatataggcccttcgtgtctttctaaaatggattgaagagatgtgtcttttaaaaagttttttctgaatttttcactggtaattgatacaggtttttgatattcattacaagtatcatttgaaggatcatgacttttcaaattgattctcagagtttca

SEQ ID NO: 13762 - DNA, 517 bp, Glycine max
  unsure at all n locations
  Clone ID: jC-gmle01810071c09a1
agactggaagccggttggatttctgcattatgaaccctggcttaatatggnctctagcaatgctacggtgcctgctttcggatcctccacagtgcctcatttgcagttaggacattcctatgaacccagtggttggtcttattgtttgccctgctttccacagggatttgctcctgctctgaacttcaatgctgagggaaaccctcctgctgaccatgtaaaaacttttggggacaaaattggtccctatggtgaatccagttcccttcagaaacaaattcttgttattgatcagacgggtggtcaaacaactattgtttatagctccaggtttggcagtcctggagagtgccttgcttcttggcattcaaaactgcatggtgctaactatttgagggggaacgaaccttttttcagaagaggtttgaatttgaatttgaacttgaatatgactgagccaactttggctgataaagagatgggaatccgggaactagcattgaaagtgagatgcatg

SEQ ID NO: 13763 - DNA, 499 bp, Glycine max
  unsure at all n locations
  Clone ID: jC-gmle01810071c09d1
aaaacaatgagtattctcatctaaggaaataaagcaaatgacataatgcgtaaagcaacgttcatatcacacgggcaaaacaattagtatcccatccaacaaaaatcataaaagttaaaattcaataaaaaagcatcaaataagttttaaacagataaatggatgaaagcaactacacatttagtccacttcctcaatcttggggccagcaccacttccaccagaaggagcagcataatcatcctcgggtgccccagcaccagcaccacccatgtcaggaccagcaccaccttggtacatcttggcaatgataggattgcagatgctttccaattccttcattttgtcctcaaattcatctgcttctgcgagctggttgctgtctagccactggatagcttgctcaattgcgtcctcaatcttcttctgtcagtaggatcaagtttctcaccaattttgtcatccttcacagngttcctcatgttggatgcataggttt

SEQ ID NO: 13764 - DNA, 529 bp, Glycine max
  unsure at all n locations
  Clone ID: jC-gmle01810071c10a1
gttctagatccgcgagcggccgcccnttttttttttttttattgatataatacatgatgagttatatttcatttcaatagcacaacactaattaaactagtctttttcaaattatcaaaacatggtataagtatctcaattgacagtgaaaaaatctaaagcaatcataacttccaactaattgccttttccaagcattaacaagcttagacattggagttttccgatccaagagggctagtgtcttcaaggtactgaaaaaaaaaaaaagggaagaaaagaaagaaaatataatcagaatgtcagttttcaaaatgtgtaacagaaattaaataaaattcttatacatgtaaaaaagaaatttctagaaaatgaagtaatcagaataatatcatcaagttaacgatagagtaaaatctcaatagtttataagaaaaacatttataataataatagtgatcattgatgttttaggcttattatacatcaataattatgcattaaatgattatacagtaacaacataatt

SEQ ID NO: 13765 - DNA, 439 bp, Glycine max
  Clone ID: jC-gmle01810071c10d1
atacaatggggttacatgaatcaaattcattttttcacattattgggacagataggcctaaaatacattcctaaaataaaatagccgccgcaattatacgaattacttttttttgtttcctggggggggatgaaacttaagagccggggattatcatcattatcacatatgatgaagcaattttcaagaggggcaagaactgtttgaataggaataagagtttatgtccaacgggaaatgaaaatagttgtcatttgaacacactatgctggggcagcagcttgttcttcaacaacctgtgatgctggcaaaagggtgcaaatcaggttggggtcaccgtacacattataaacacgtcctgtggtaggccaaaactttgaagcacggacccaaggagctgggaaggctgcatattccctggagtatgggtttgtccatg

SEQ ID NO: 13766 - DNA, 373 bp, Glycine max
  Clone ID: jC-gmle01810071c11a1
aaggaaggtatttaatccccagacaagttcctattgatccccaggcaagatccattgagggccacgcaagatccattgatccccaggcacgatcctttgatccccaggcaagatccattggtccccaggcaagatcctttggctgcagtaaatatgactgattgggctgctaataatgctcgcatagcagggccttcccaatctcacttaaatactggagattttattggtcatcattggtttcctgctgatcatcaagttcggggtggtggctggaatggatctgatgggggtggtctttcaaattaaagtcttggcccttgagcaagctttggacaaagtttatttagtattcttgcagagtgggacccat

SEQ ID NO: 13767 - DNA, 421 bp, Glycine max
  Clone ID: jC-gmle01810071c11d1
ggagatgctttcatcccattgaatatcaacatagggaagggtaaagctatcaacagaacacctgcactcataatcaagcctttgcaccaaccacttcacctttggcaccttgtccatgccaagtcccgcaggtcgaccggcctacacttggtaatcgcaagcgaacttgaccgattgcgtgcgcttcacatggtactcaccggctatttgatgcacttctgccactggacgtacacgacttgggtgaacttgacatcgtgcgagtcggtggcgagcagaccggtagcagagctgttggagctggtcaggcggacctgggagttgatgttgagcatgcctgcggcaccgcagggcgaccagacaatccaagttgagtttgactactcgtgcttgaggcactcaccggtgactgggccaacga

SEQ ID NO: 13768 - DNA, 524 bp, Glycine max
  unsure at all n locations
  Clone ID: jC-gmle01810071c12a1
gattaatgggtttgcacgagaccatgntgctgcaaatatagaactctctttgggatctgaagaagaagaagttctgaagaagcatgtgtggaggtgctatcatctcagacttcattggtgtgaagcgtggccgcaacctcgccgcgcaggaactgtggtccgagcttgaccctttctctgacctccttggcttcgataccaccaccaccaccaccaaccaaccaccccttccagacaaaaaagtggtgtcatcatgtgagaagaagaagaagaaaagtgtgagtgcagaaaagaagagtggtgggcgagctcggaagaacgtgtacagaggaatcaggcaaaggccgtggggcaagtgggccgcggaaataagggacccacataagggcgtccgcgtctggctcggcaccttccccaccgtcgaggaagccgtccgagcctacgacgacgccgtcaagcgcattcgcggcgacaaggccaagctcaactttccgggcaccgttccgtcacccttcaaaaacaac

SEQ ID NO: 13769 - DNA, 491 bp, Glycine max
  Clone ID: jC-gmle01810071d01a1
gagtttgagagctttgtgaaactatacctagttgttagtcatggatggactttgcggggggggattatgatgaagcaactgttaagagcccccaagaggcgcatcaagacatgttgaattggtttatcaagcacgtcaagtgaaaattgttttcaccaccagaagatgcctgtcattgatttgcagttaatttttttagtagcaaataaatattacttattattgaaaagggccaatttcatgtacaagatgtgtccaaagcggcccaaccaccatgatacaaaaattataatatcccaccagaatatcactagcatttctcttataataacaatactacaactgcctaagaaaaagatacagcatagacaaaagctgcactatgcggcttaactcctagccttcatgttattggtgtgacgtatccattgccaccgaatttactaatgattaattctcgttgaaaaatctgatgatgatcacttttaatg

SEQ ID NO: 13770 - DNA, 414 bp, Glycine max
  Clone ID: jC-gmle01810071d01d1
tttattttttttttttttttttttttttgtttttattttattatttatctttttttttgtaaactaaaaaagggggccccgcccctgaattttttttttttcaaaaacttttaaaaaatgttgtttttgatgctgcgggaagaatgagctgaagtggaacttgtgtacattgcgaggaatatggaagcttttcttaaccacttgggtgcttttgtggcatgacaatatgtatgttttcacctggggccgagttggccgtggtctaggggtaaggaaaacatgtctttctcttatcgggggtggaatgccgctcgttcttgagatcttggttaattataaattttattgcatggacaaacggcgtttttttttaagagagatgcacacaaaattgcctgagtaatatcgggtaaa

SEQ ID NO: 13771 - DNA, 596 bp, Glycine max
  unsure at all n locations
  Clone ID: jC-gmle01810071d02a1
gtggctgcatctccgttcaccactganctcatacgagctcgaaaaggttaatgaaggagcgggtcattgcgcttctactactcttccactcccacagataaccctattgcataatcgcgctccttcctctctagggtttcttcaacttcatggcttcccctactcatttcgacgatgacttcgatttcggaggcggatttggcggaaggcattcaggtaataagaggtcgtctcccgattacgacgacgaggattatgacaacgatccttttgcaccgaagaaggctataacaaaagctgaagaagcttctggtgtaacaacaggaatgatcttgtcacttcgtgagagtctccagaactgtaaggatacacttgcaacatgccaaaatgaacttgaggctgcaaaatcagagattcagagttggcattctacacttaaaaatcagccatccatacttgccgggatcactccagagcccaagatgttgattaattatctgcaggcccttgaatcctctgaagagtctttaagagagcagcttgaaaaggcaaaagaaaaggaagctgcattcattgtaacaattgcaaaacgagaa

SEQ ID NO: 13772 - DNA, 301 bp, Glycine max
  Clone ID: jC-gmle01810071d02d1
cttcttcgggaaggcgcaccatttaaaattgaaggaaaaaaagcaaattttttctctggccaaagataacataatccccttaacaaataattgtttttcccaagacattttaaacactatttttcccatttgtaattggcatcccatctattggtcaaacttaaaacatagaccaaccgttgattttcccaaggggtctgataaaaagctgcccttctatggacgctgggttcaaagaagtttaaacttttcaagcatgcttggagacctggaagaacaaatcatctccactttattgaaa

SEQ ID NO: 13773 - DNA, 450 bp, Glycine max
  Clone ID: jC-gmle01810071d03d1
ggggaagataaatggcagcttttaaaggagaagcgggatgattcccaagttgaagatataacctgttggcttaatggttgccaagttggagccttcactagttcacaatcttaagtgataattttcctcacaagccaatccaaactaggatatgagaagtacaaaatgagaaatgatgggagggcaaacagaattgtaacaagtacataccgggccaaaatggctgcacttgctgggcttgcatataagacaatttaaaggaattttttgaccaatgggaacttacccgtcaactggacaaagaagatcagtgacttccgaagataaacatgaaatctttctgtattgaggggattacccgtattaccatgattttggttggaactccaagtgtctggatggggaactacccccctccgaaggtttccatgggttacttggcttcccatg

SEQ ID NO: 13774 - DNA, 62 bp, Glycine max
  Clone ID: jC-gmle01810071d04d1
tcgccctttttttttttttttttcatgaaccaaaatgattatctaattgtctagcgggcggg

SEQ ID NO: 13775 - DNA, 464 bp, Glycine max
  unsure at all n locations
  Clone ID: jC-gmle01810071d05d1
agaccgtaacgtcgcattcgtagcgaaccaanaattaactgtcgacagctcactctcgtcggccgcccttcgtctttttttttttgttacagattcccttcctaccattaattcaactaatgggcaaaggctaatagttttctgtggccaatcatcatggcaacaaaccaaattaatacagccgacattagtggctcaaaatgacattggtcgtgtcaaataaagaggcgtggacccaaaaacacaattgatgacctctatttatatttgacaagaaggaaactatgcaaggttccatacgaacgaagtttgcacgaactgctgacacataactcggagatgcctatcaacccgtctgtgtacaaagctggaggacttgctctaattctgtcattgccgggggtgttttctatgcatgcaagaggcgaggaccgaccaaatgcagatcctatctaaaaggtaac

SEQ ID NO: 13776 - DNA, 499 bp, Glycine max
  unsure at all n locations
  Clone ID: jC-gmle01810071d06a1
atgctagaggactttgacgtaatcagagcngaaattttgcgaanaggcaggcgcggaanacggctcgagtgccttctaatgccaatncgagccgggaataantaaacatcaatgaatcctgagctttttgggggggtttgagatggatgaggatgatgacccccgaaaactatgtgatctttctctctttttaaggatcaaagggaaattagattaattgcgatgaagatgatcacagaggaaaagggtgtgaagcctgttctactaaaatttggtttggcttaggctctttcatttgctggatttatctactcacgcctcagaaccagaagaatcaagcccttcaagtcacgcaaggggtgttctttcggggcagcattaagatcttgcaacgactattccgagggaaattttctatgttttgaagaaacatgcatcaacaaggtgaaaagagataaatatcccatttttctttttcctgacagtacacaaaatggaa

SEQ ID NO: 13777 - DNA, 447 bp, Glycine max
  Clone ID: jC-gmle01810071d06d1
gttacaaattcatacaactttattaattcaactcatccttcaatgtaagtggttcctctgacaatcatatgcaagaacaatctaatcttccttattggggctaaagtgatatttcaaaaaacaagtcatgtatctgtgacccaaagccacatgtggaaaccacaagatctatatgagataaaagaaactcaactaatctatttactaaagttctttggcagctgcaataacagataccttggtgataccaaacttcttgtatatttttacagctggagcacttgctccaaagcgaacaatgcctatggactttactttgcttccaacaatctggtgccaaccaaatgttgatcctgcctcaatgctaactctatctgatactgaaccaggatgaacactcttcatgtattcatctgactgctcatcgaaaagctcccagctaacaaa

SEQ ID NO: 13778 - DNA, 438 bp, Glycine max
  Clone ID: jC-gmle01810071d07a1
cttataaattgatatgcttgaaaaatattaattgtcactgaattgctagcgaaaaagggctcccagccttgtacatttaattataagcaaacgaatcacaaatcagggcattaattgcgggctaagactgacaatgctctacaattagtacaagttattcaacacacacataatgtttactcagctagctactgttacaaggcattttgtcaaggctaacaaggtctgtaaactgcagatatcaagtgaagaagctatagaaactgctaagcttcttgctttaaaagaaggtttgttggtatggcaatgataatttgtggctcttagtgatttcacagtagtttctatttgtcagttattcctgtgaaatccaaactcaatacttctctaatcccaaatatttaaaatatcagttttcatgctgattatataattact

SEQ ID NO: 13779 - DNA, 378 bp, Glycine max
  Clone ID: jC-gmle01810071d07d1
ttcgtccttttttttttatgtaataatgcattctgggggtaaaaaggtatgagcaggccttgggtctaaaataacatgcttaaacaacccacttgaaaatgttcacactaaacaataaaagaaactattttttactcttctaacgcgccccaggcatcaacttactgtctgtcatagagactatctatatacaatacccttccttcattgaatacgcttaactttccgcgaagcacaacaaaatttgttttctgttaaagggattgtgcacagagattcctctacattaacaatggatgtattagcaactgaggacctacaaggagggagaaaatcaggtgtcaatgcaaaagagtttgcattgctttcttacttttt

SEQ ID NO: 13780 - DNA, 538 bp, Glycine max
  unsure at all n locations
  Clone ID: jC-gmle01810071d08a1
atgcttacatgtctatagacttctaaananttanngaaaaaaccnaagctgaattcgttcagactggaagccgttggtatttctgagttataaccctgctttaatatggacctggggtgctatggtgcctgctttcggatcctcccagtgcctcatttgcagttaggacattcctatgaacccagtggttggtcttattgtttgccctgctttacacagggatttgctcctgctctgaacttcaatgctgagggaaaccctcctgctgaccatgtaaaaactttgggggacaaaattggtccctatggtgaatccagttcccttcagaaacaaattcttgttattgatcagacgggtggtcaaacaactattgcttatagcttcaggtttggcagtcctggagagtgctttgcttcttggcattcaaaactgcttggtgctaactatttgagggggaacgaaccttctttaaaagaagtttgaatttgaatttgaactgaatatgactgaaccaactttggctgataaagtaaatggg

SEQ ID NO: 13781 - DNA, 499 bp, Glycine max
  unsure at all n locations
  Clone ID: jC-gmle01810071d08d1
gtataacagtatgatatataggacgggccgggccacaaagatagaaccacttactaaaggcgatctctattgatgagcaccactggaaggcaatgtgcactgcttccgggaactatttacctatggacacattttacctgatatttaccatggctttgtgttatgacaataaacgcctttaccctgaaaagtaacggttacgacatacgcaagaaagggaccccatactgcatccatgaggatcagtcggggtctagagaatgcttcctttacaaaccaacagctaagtctggatgccggaaaaacaccatctatgcaagcattgtactcctatgtaatctttacaatatcgaatctgaccaaaagaatacatggtttctttgacactgcatgagacacancggctgaggaactatcactatcaaaatcacttgtcaaagagcctggatcactggtgtagctgcttgaactactggctttactgccattatccactgga

SEQ ID NO: 13782 - DNA, 420 bp, Glycine max
  Clone ID: jC-gmle01810071d09a1
caacccctaatgccaagggcttgttgatcctctttcagaaatgttacatatttagagcctggggagagctcggatattgaaacaaatcctggttctaagataagtgttaaggctacagcaggaccagttcttggacctccatggcaacgtccagagaatgggtatattgttacatccccacaaggccaattgtctctctactacgaaccccactgtgtatataatcaaagtttcactgagaaggaaagggcagatattgtgataacaccagtcataaagcagcttttgcccaattttaccttggtttcgggacaagaagatgcagtgaaacttgcaaagctgctttaagccaagttcattgtgccaatgaaaaatggagacctagatagcaaagggctttttgccagcttaattagtggt

SEQ ID NO: 13783 - DNA, 412 bp, Glycine max
  Clone ID: jC-gmle01810071d09d1
aaacaattggggttacatgaatcaaattcattttttcacattattgggacaaataggcctaaaatacattcctaaaagaaaatggcagctgcaattataccaattccttttttttgattcctggggggggatgaaacttaagagcaggggattttcatcattatcacatatgatgaagcaatattcaagaggggcaccaactgtttgaataggaataaaagtttatgtccaacgggaaatgaaaatagttgccatttgaacacactgtgctggggcaaaaaattgtttttcaacaccctgtgatgctgtcaaaagggtgcaaatcaggatgcggccaccggacacattattaacacgtcctgtgggtaggacacaacttttgagcaccgatcccaagaactgggaagggtcc

SEQ ID NO: 13784 - DNA, 473 bp, Glycine max
  Clone ID: jC-gmle01810071d10a1
aaggaaggtatttaatccccagacaagatcctttgatccccaggcaagatccattgatgcgcacgctagatccattgatccccaggcatgatcctttgatccccaggcaagatccattggtccccaggcaagatcctttggctgcagtaaatatgactgattgggctgctaataatgctcgcatagcatggccttcccaatctcacttaaatactggagattttattggtcatcattggtttgctgctgatcatcaagttcgtggtggtggctggaatggatctgatggtggtggtctttcaaatcaaagtcttggccctggagcaagctctgatcagagtttatttagtattctgtcagagtgtgaccaattgcattcaggtagcctttatgattcagttagaaatactgaccagtttcttgcacccagaacttatggattagttgatgcaggtgcaccaagggtgaacacg

SEQ ID NO: 13785 - DNA, 521 bp, Glycine max
  Clone ID: jC-gmle01810071d10d1
caatgaaaacaaccaagttaaaaactggggggcaagactgtatcccagaccatatataacataattgataatccttatggacatcaaacagaaaatcccctgaaaacgaggtctcttgagtttcacacaaaggataccctataaaaacctatatatagtcctatactgcattagctacaagataaataaactccacatatgctttaagcaggttggttttcttgctgtggattccatcaccaacatcacgatcacaattcttgtagctttatttacataaaaagggatatgaaggtgttcagaagactcctgccatggaaggcaggtcgtcgaagctccaaaggttcatagggtttccagcagcatcctgagatgcatcttcactgagcaaagacgccaatgcagcatcagcccaggcttcatcaagaaaagaaggggtctcaaagaacttcagctgggattcaatgtctgcaagctcctcaaaaagagtttttgcagaatcatttgcacagatgccatat

SEQ ID NO: 13786 - DNA, 479 bp, Glycine max
  Clone ID: jC-gmle01810071d11a1
gtcaggaatcccggctttaggtggttggtttttctagagttgttgcaacatggggtctgactatagttctcacttacttgaactatagggccctgaccattgtgggatgggttgctgtttgtttgggggttttctcactccttccttttgtggttatgggatttttggcgattccagacctaaagccttcaagatggacagtgacaaacccgaatgatattaactggaatttgtatctgaatactctattttggaatctcaactattgggattccataagtactcttgctggagaagtggaaaatccgaagaaaactcttccgaaggctttgttttatgctgtgatcctagtagttctagggtacttctttcctcttctaattggtactgggtgctgttcctgtcaaccgtgagttgtggacggatggatacctttcggatattgctttgatataggaggagcatggtgagatggtggc

SEQ ID NO: 13787 - DNA, 414 bp, Glycine max
  Clone ID: jC-gmle01810071d11d1
agatgtcaaatgtatggaggtgtgttactttaaatatattacccccccacaccaaggaacaaaatgtccacataatatataaaggttaaataggtatttgacttttggtaaccaaaaaaatttgttatataacatataatacattcaatggaacttgaaactggtcaaaatgttgttgcccacggggtcagccaaattatctagggggttttgttatttgccaacacctttgacaagagcttgaacaaaataacccaagattgccaacatagacaaccttccattcttcacttacttgacctttaaacccttcaaggacttatcatacttaccaaaacctagtgggttgaaaaaaggcctttatggaaaaactgtgttaccagaacctccaatacccttccatagccctaagaa

SEQ ID NO: 13788 - DNA, 522 bp, Glycine max
  unsure at all n locations
  Clone ID: jC-gmle01810071d12a1
gttattggtaacttaactgggttggaatcntataattaacttttggctggtgtgcatgtgtgtaatgaggtgctttgattagcttctacatgtgtgtttcaccgtttcctgagttgattcaaaggggaagctttagtgtttatcactaggtggtgacttttgatgctaaatgtaaaaatgtctctctagttgagttatgctatgacagctatgcagttgagttggtgcatataagagtgggcagctagttaaacatgttattcgtatttgattactgattgttcactggattgagatatctttatttatattctgtcaactatagtactgtattgtgcatgcttcatgatcatacctctagattggaatggttaatacatccaccaattcctacattattattcttgatgttgagaattctctacgaaacagtggttggaatattcttaggactggaggggacttcttcaaacaaaacttattaaatgctatgatgtatctgagattgtttgctaatgtctt

SEQ ID NO: 13789 - DNA, 504 bp, Glycine max
  unsure at all n locations
  Clone ID: jC-gmle01810071d12d1
tgaaccaaaaaaagggaagcatgctgtattcgattcnagnntgaatgaanaatacacgcagctacctgctcagtggccgccctttttttttttttttttttttttttttttttttttgaagtcaaatgatattatctggtggacaggtgatttcttacagcgccccaccaaggaacaaaatgtccacatgattttaaaaggttaaaaggtttttgagttttgttaactctaaagaatctgttaaataacatataattcattctttggaacttgagactggttaagatgttgttgtgcccggggttagccaaatgatctaggatggtttggtttgggcccaacacctgtgacgagagctttatcaacatttcccaaaattgccaactttaccaacctttcttttttaattttcttgagctataaatccttctagggcttttcatttttaccaaaacctaatgggttgtacaaaggttcttctggataaacttgctcaccagaacc

SEQ ID NO: 13790 - DNA, 562 bp, Glycine max
  unsure at all n locations
  Clone ID: jC-gmle01810071e01a1
tgccacattggcgtttttgatgccgtaagcttgaggctcagatgtcgnattgcaccaggaatatgcttgtcaccggcagctttaagccccagtcaaggtgtgtatcctcttgtggttgctgcccatcctctagaacctaatcagtttgctggtgggctgacggatggatctgtcaaagtgatagaaccgaacgaatcagagggtaagtggggaacctccccacctatggacaatggaatattgaatggtagggcaggatcatcatctacaacaagcaaccacactgctgatcaggctcaaagataagatcaaatgtattttactagttattttcatctgtaattgtatcagcttagatgtttagatttcgatacaccaatatgtctcatcaatatcatgtcagcttggacataaaatggtaaatgcttagacgtagaatcgtgtataccttgatttattctagttaataactcaattttattgcttatatttatgttgtaatgtccctgtatcttgcttacaagtgtatgtcaattttccttgcccttgcggtacttccgat

SEQ ID NO: 13791 - DNA, 456 bp, Glycine max
  Clone ID: jC-gmle01810071e01d1
cccttacgcttcgaattgataacttcttatggtacattgagaaattcttacaacttaacttcaaccttgatctaaattacaacctgtgtcgaaaaatttgtgctaagctaagtaaataatttaaactataggacaaatccacaaagaaggcaaacatctgtttccaaacacaaatgctgagctgttttcttatgaccgctgattgttaggctctccaatatctactataggtgatgctgctgctgccactatgtctgtaggttcattgttggcaactgagaaagaaaattcagaaaccaaggccaaatggtcgcttcccactttctattgatcaaggaaaataccggttagattcggaaaaattacgtttagacatttgaatccaaggtgaaaaggtgcattgtacacaatgtagttggacaaaatgatcctagagaagtgctaagatcaattact

SEQ ID NO: 13792 - DNA, 175 bp, Glycine max
  Clone ID: jC-gmle01810071e02a1
ataaaataaagataaaaatgttaataattgttgtggaaaaaactgaaggaaaaggtgtggttctttgttatgaatacaaaataatcccccattgattatataatgtgacaaaacaactttatgtacaaatttatattggccaaataattttaattatgtttatatattgggtgaa

SEQ ID NO: 13793 - DNA, 557 bp, Glycine max
  unsure at all n locations
  Clone ID: jC-gmle01810071e02d1
aaatagtgcaaagtagcaaagacatgctatcttaattcttataactgataattaaagcggggcgcatcaatacaatacaatacaatatgtaactatgaactatcaatatatgatcgttatttatgtctgtgatacacacaattcaggccatgatattcttacgtgatttacagcaacttctaacttatttaatacatcataccaacccaactaggagcaattttcattatacaatgacacttatctttaaactctgaagcatgacaaggtggtagtcaccagggaccatattcttatgcaatttatgccacaactggataagacgcacaagttgcaacaccacacatgttcttccccaattccattttgaagtagccattctcaccccaactttctccccatgaattttttatgagccaatatgggacgccattttcaactccataccccacagcaaggacggcatggttcacatcctgngaagtgctaccgcaaatgtactagtgtaaactccattctcgtagaaatggaacccatcaccacctgaaggccacact

SEQ ID NO: 13794 - DNA, 369 bp, Glycine max
  Clone ID: jC-gmle01810071e03d1
aaaagctaacaaatacaaacgggatttattgggatagggcaacgagttgcattcatggggttatgggtacccccaaccataatattgcaagaaaaggattagttttttcaggtaatccaaaaacacatccttatcgtactttttgcacgtttgcaactttaacaattattttggggttggcaacaacattaaatatttggcctcctgctgagatgaaaagctattttttggcctaaagaacgggcagcctgagacccgtatgatatccagacactggggatctcatgggtgacccgggggtcagataaagcatcaacccatcggggagcaaatttattttgcctgtcaggggcccaagaccgggatttt

SEQ ID NO: 13795 - DNA, 119 bp, Glycine max
  Clone ID: jC-gmle01810071e04a1
ggaaaaaaaaaaaaaaaaaaaaaaaataaattaaagaagaagggaggaaaaaaaaagaagcggaaaaaaaaaaaagaaaagaaaaagacccccaaaaaaaaagaaaaaaaaaaaagaaa

SEQ ID NO: 13796 - DNA, 512 bp, Glycine max
  Clone ID: jC-gmle01810071e04d1
acagacatctgattcttcctttatatatatatatttaattttttgggtacaactttttctactaattagttacaagaacgtactcctcattatcgttatttaactaaaaaatattctttgtagttgtagcctatgcattgactatgaagttggtataaattgttgatcaccctccttgttcgtaatcgtacctgcatgtttcttcactgtcactgaggtggggaaagaaggaattcaccattggacaatcgtaattcagatcagcaggctttgcaaatttatgccactcctgatcaatcagcatttcattcgtgaatccaaaccgtcttagttcctcttctccatgatgcatcagtaagctatacctttcaccaaaacccttttacataacaagcatatttccgttgcccatgttgttgagaccctcgaactgttgaaccgaccatttgtaccacctcatgagaaaaactcgaaatgttataccgtgagacacaatgaccaaggtcatgtct

SEQ ID NO: 13797 - DNA, 658 bp, Glycine max
  unsure at all n locations
  Clone ID: jC-gmle01810071e05a1
tgcctagaagttttagtnaccagtgaggangtanggggaagacccgaangctgaattcgtctcgagggggatcttaatgttccagctggtcatagacattccgtgctaaaattggaagaggggggggcaacaccaaccgagggatgtatcctgcccatttaggagtggttgctagttataaaggccagggaagaatagctgactatggttatcgaaatccaaagtgggtcgagggagaactgctccaacttaatggcaagggcatgggaccatacatgaaaggtgcagatcttggtttcctttatgtcgtgcctgagcaaagttttctcgtcttgttccaccggttgaaactacccgagagagccatggttgatggtaccctaatcctgtctaatttacttatcatctgatgcgaggaagaacatgaaggattctgatactagcgtgttgagattactgttaccttttttttttgagtggtagttttacccaacaggcaggcacttgatatattattagcccttctatgagttcattttttgctcgtaccttttaccaatctctttgatatctgtcatcttgagtatataaaatgggctgaccaacaaaatagtgtgataggaactctgaaggaccataaggatctttttgtgaaaaa

SEQ ID NO: 13798 - DNA, 502 bp, Glycine max
  Clone ID: jC-gmle01810071e05d1
tttgttttttttttttttttttttaataaaaacataacaattttatacagaacaggttcaattatttacaagcaaaagaattgtgttagcgagcactttattacatcaaagcatttacaagcagcctctaggcttggcttttttttccttgtcgccgtcacttttttacatggttgataaacagagagacttcataaatatttattgaaagcagaaaaagaaaatgacactaataacaagtcagaaaccaaagcaccctcctcatccacatggctacttgctggtgacaacccctgaccctggcccttattattaaaaggagaagacagtttcagtttctggatggtgcttgtgctgcggcttagtctgctgatgggaccaataagcgtgggccactagaaccctgtccaaaagttcttggggaacaggttcacccctcctttgttgaggggatattcttgccgtgtgcaccagtgttgtccatttatccttcaaatccaca

SEQ ID NO: 13799 - DNA, 458 bp, Glycine max
  Clone ID: jC-gmle01810071e06d1
gatcaaaccaaatccttagcacagccacgttatattacagagagttggcatgcacaattgcaccataagtgcaagaggctgtctaaatgccatacatacagagagaggcaatgtgtccgtgcttgtgcctccccaaagttttaatttattattattattagattgggccagaggatcctcgtgaagtatgtcttagcaggagaatacataagcttaaggtttctcccaatcatgagatatatacattatgatatgatacaagattaagctggaacagcttcctgcactttgccgttgcttgagagtactaagctatcatagtaatcaaccagcaccttccatccaccagggcacataaatccatcaggaggactttctttgttccttgccagtgtgcgcatctttgcgcctgatatgaacaggaagtcctgaggccttgaagggtcaaagaatgccat

SEQ ID NO: 13800 - DNA, 411 bp, Glycine max
  unsure at all n locations
  Clone ID: jC-gmle01810071e07a1
gacaanaaaaggcatgattttgtttttngactttcanaaatttttagggaaanaaccaagcnaggaaanaagctcgagagcgaaaacggaaaacgnaacaaaatttttgatacaaagcaagaaaagaaaggacgggggggcggatggaggaaaaaggagccaaaaccccccccaagacagaagacagccacaccgagaagagcaaaccgacaaaaacaaaaggagagagaacnaacgggggagccacccacaagaaaccagagcaagccaagaagacaaccaagagagaaagcagagaggggagaagacgcaacgaagagaaaagaggccaaagccccacccgcaaaaccggacagcacaagccgacaaaaggacggacaacgaaaaaagaaaaaaaaaagggaagagacc

SEQ ID NO: 13801 - DNA, 522 bp, Glycine max
  Clone ID: jC-gmle01810071e07d1
ttcgttcttttttttaattgggacatgaggttgcttaaaaatatttctttattatgtggcacatttagagtagacttaaattttactagactgcataaggtacgtcaaactactcataatataatactaggctactttcagcagcacatacaactagattgcatgtaggatgccatgctacatgtatcagattggagcttaagttacaagaaaagtcagctctactagactatgaatcagtgtgagcatgctgttcaattttacgaggtattaggttgcttatagaacgccttctaactcgagacttatcttggtgaataaccttgctgtgagaatctcctctaattattagaatgatctcttactttctttcagaacccggggagaatatcctcacgacattgttataagaaccatgtgcaaaatggcgtccatgaccactaaagcaacactagaatttgacaaatatgcaggcattattatataactctggcaactaaagacgcatatgctcgtgaattt

SEQ ID NO: 13802 - DNA, 531 bp, Glycine max
  Clone ID: jC-gmle01810071e08a1
agggtttctgtccgatacacactctctcatcgttgaaatggccgcttcttcttcctctggcgacgagccttctcgctccgtcttcctcggcgccgacgtcggcaccggcagcgctcgtgcaggtctatttgacgaggaaggaaagcttcttggttcatctagcagctcaatacaaatatggaaagacggtgcctgtgttgagcaatcctctacagatatatggcttgcagtttgcgcagctgtaaaagcagcttgctctaaagctgaagttgcaccaacagaagtaaagggtatgggattagctgctacttgttctcttgttgctgcggattccgacagctcacctgtttcagtttcttggagtggagattcaagaagaaatgtgattgtatggatggatcatagagctgtagaacaagccgaaaggatcaattcctctaaatcacctgtattggagtactgtggtggagctcgttcacctgaaatggagccaccaaagcttctatgggttaaagaatatttgcatgaatc

SEQ ID NO: 13803 - DNA, 487 bp, Glycine max
  Clone ID: jC-gmle01810071e08d1
agtcaaatatctatatttattattcatggtgtagcaatacactttttagatgagtgagggcactgtcatgtggagagaattcctgtgtacttactggatcaagtaaagaagtttgtctcacttcaaggaagtgacaaagatatgaatacaacatcaagttttcgacaagagattatgaaatgagagactgaggaagaactttatatgggttgagtatgtgattggggtccagcaaattcttgattgaagccatcacttgtacagtttcatgtgatttgctgtagaaaatttcgttggctttcattagtcccaggccatgctccgcgctaatgctacctcggtgcttagatgtccattcatatacataaggttcaatatgtgacaaaatcttgtcatcgtaatgagaagtagaaatgtttaaatgcaaattaccatcttcaaggtgaccatatcctattacattagctgtgttacctagtctagagcg

SEQ ID NO: 13804 - DNA, 494 bp, Glycine max
  Clone ID: jC-gmle01810071e09a1
ggatattggaggccttgagaatgtcatgcgtgagctgcaagagactgttcaatatgcggtggagcacctagaaaaatttgagaagttccctatgtcaccattaaaaggggttctcttctatggtcctccaggatgtggaaaaactttgttggccaaagcaattgctaatgaatgtcaagctaacttcatcagtgtaaggggcccagaattgctcactatgtggtttggtgaaagtgaagccaatgttcgagaaatttttgacatggccaaacaatcagctccacgtgtcctcttctttgatgagcttgattccattgctactcaggtctatttttgtacttcgcatccatgcaggccaggttgaattaaattatgtggctgggttgaaaggaattgtatgattttgttgccaaatctgtagatgatttaaggagataatgtacacggtgtttttctatgtcaaaaaaaaaaaaaaaaaagggcggccgccgact

SEQ ID NO: 13805 - DNA, 362 bp, Glycine max
  Clone ID: jC-gmle01810071e09d1
aattattatcaattatcattatctacagggcagggcttggaaagggaaaaaaattaaccgactcactcctctcacacaccacacctacatactagttgaaggactcttattaaatacgtcactcaaaacattaaatttaaactttccatattaccaccgagtatataaaattccatcagacaagctgatttcttgaacataatacattcagcccgaaagctgatgcaaatattcagctacagctgtaaacgttcaaaaccttagatggacgttacacatgtccaaggggctcaaacacgacatactattagtggccatggtcctgaaactcccactgagtgtcatataaaggacaaacttga

SEQ ID NO: 13806 - DNA, 501 bp, Glycine max
  Clone ID: jC-gmle01810071e10a1
ggcgaaaggcattggacgagaatcttattgggcgctaactaaattggttcgggagggaaagagaagagaagagagtgatggccccaacagcttctcttggctcatgctttcatccaccaacgccaacgcgtcccttgttcttcgtcccaacctaacctgcttaaattcatgctcctgttgcttcccaaatcaatggcatacccgagcagaaacatcccccaaatcaaacgccattgggtcgaagcttatgatcaatcgctcgcgtctaaagaaagattcagcgtggcgtcgtacaacatactgggggacagaaatgcttatcaacactcggatttatacgtaaacgttccttctcgatacatcaactggggccgtcgcaagagggttatctgtgatgaactctctggatgggaccctgatattatctgcacacaagaggtgggacagtatttcgaactctcagacattatggttaaagcaggatatgcaggatcttataag

SEQ ID NO: 13807 - DNA, 314 bp, Glycine max
  Clone ID: jC-gmle01810071e10d1
aatattcttgacgctcattgaaccttttatatctgcaaagaaatatgtaaaggtcatcaagcaggcatagcaaaaacgcctaaaatttctgatgtccgaaaaataatttaaaacaaagaaaatcccatagataaaactctaccgacccatctcacagagaaaaccattctctgcaaaattgagtactacccccaaaaaagcacgagccaactaatttttaccctctacaaaaaaaaaataaaaaatacaatgagcgtcactaccatctaaataaatttttccaacttccttgatgttttagcattaggtggccg

SEQ ID NO: 13808 - DNA, 514 bp, Glycine max
  unsure at all n locations
  Clone ID: jC-gmle01810071e11a1
ggattccgaacagagagtagaaaatttgtgcggttgacacagtggtgtggtgcgcggtggcggtgctactgtgcgccgcggcgggcgcgtcgtgggtggaggaggcggcgaacccgatacgaatggtggcgggggtggaggcggaggtggttcgggtgatagggcagtgccggcgcgcgctgaagtttgctaggttcatgagcaggttcgggaagagttaccgaagcgaggaagagatgagggagaggtacgagatattctcgcaaacctcaggttcatccgctcccacaacaagaaccgcttgccctacactctctctgttaatcattttgctgattggacttgggaggagttcaaaagacacagactaggcgctgcccaaaattgctctgccactcttaacggcaaccacaagctcactgatgctgntcttcctcccacgaaagactggaggaaagaaggaatagtgagtgatgtttaagatcaaggcagctgcggatcatgctggacattc

SEQ ID NO: 13809 - DNA, 52 bp, Glycine max
  Clone ID: jC-gmle01810071e11d1
ggggtaatccaatttaatttatttcacataccccattatattattttttttt

SEQ ID NO: 13810 - DNA, 520 bp, Glycine max
  Clone ID: jC-gmle01810071e12a1
cattctcatcctcttctttctctctttatcattgccatggatccctacaagcaccgggcatccagcgccttcaattctcccttctggactacaaattctggtgctcctatttggaacaacaactcctctttaaccgttggagctagaggtccaattctgctggaggattatcatcttgtggagaagcttgcaaattttgatagggaacgtatcccagaacgtgttgtccatgccaggggcgctagtgcaaagggtttctttgaggtcacccatgacatttctcacctgacatgtgcagatttccttcgagcccctggagttcagacgcctgtaattgttcgtttctcaactgtcattcatgagcgtggtagccctgaaaccttgagggaccctcgaggttttgccgtgaagttttacaccagagagggtaactttgaccttgttggaaacaaccttcccgtcttctttgtacgtgatggcatgaagtttccagatatggttcatgctcttaaacccaatc

SEQ ID NO: 13811 - DNA, 403 bp, Glycine max
  Clone ID: jC-gmle01810071e12d1
tttttttttttttttttttttatttttttttttttttttctaatattatatattttttgttttggagcacataatataaaaatatttaaaaaccccccaggaaataataaaaaaaatggcccctccaaaaggtatttttaaaaaattttccccccccagaaaaaatttaaacattatttttcacccctcttaaaacaacctccttttaaacaaaaaaaatttttctgacggctccacccaataagaggtttttaaaccctcatgaaacaaattttttttcttttcaaagggggggaatgaaaaagttccaaaaacaaattatattcccttcccactgatttaaatactttcaaaaaaaaaatcgctctttaaaaagaaccggcttttccttgttctgccattg

SEQ ID NO: 13812 - DNA, 589 bp, Glycine max
  unsure at all n locations
  Clone ID: jC-gmle01810071f01a1
gcttttaggacctttgagcaagtnagtgaggagctttgtgttgatatcaaggaaggggggcttaacagcaaggtcacagtgccctccatcccggaagccatgtctaagctcctaaaacctgaccctgagctggccaacttgatccacaacaagtgcatggggcttagcaactggtatggcctaataccagagcttttccccaatgttaagtatgttcatgggatcatgactgggtcaatggaaccttatttgagaaagttgaggcattatgctggagagttgcctttgttgacttctgactatggatcttctgaagggtggataggaacaaatgtgaaaccaacagtaccacctgaattggccacctacactgtgctttctcaaattggctactttgaattcatccctttgagagagctagaggaaattaagggagatgctagttttctttgtatggagcctaagcctgtggggctcactgaggtgaaagttggtgaggagtatgagaatgtcatcactaatccagcaggcttgtaccggtaccgacttggtgatgtggttaaggttatggggttccataattcaactc

SEQ ID NO: 13813 - DNA, 593 bp, Glycine max
  Clone ID: jC-gmle01810071f02a1
cactgctgcaccctcaccctccattattctttcttcttctctctcttttgtgttttggggaaaagagaagaagtgaggaaccgaagaacgaagaaaagaaaaagaaacaaaaatggctgaatcaaaattattggaccgtggaagttggaagaaacgcgattatctgatcaagcttctcctaatcggcgactcttccgttggaaaatcctgcttgcttctcagattcgttgttgtggatcgggacttagcagtgagacaatctcggagaatggacaccattggattgggcttgatatttcagcatcaattcctatttattttgaatttttatatatttgttgctaattctatttatttttgttaaatgtataagatgttgcggtggagcgagaggttgagggtgaccttttacttggtgacatgggtcagggtctaggaatttgtcctggagttttggatggagccattagtatatctgctgttcaggtctcaatacggaaaagattgaaaagtgcatgggagatccagacgccgataccgataatcctgttttgaaagaagagcaagatgcccaagtactgtcttttataatt

SEQ ID NO: 13814 - DNA, 481 bp, Glycine max
  Clone ID: jC-gmle01810071f02d1
agaacattattacatgcattattttattattgagatcacagaagtccatctagtagttatatatggctcctagtcttggcacaaagacaaagatcgttcttcttgcgttgggtgagtcctggcaatacttgaacatcaatgtcttcctttatcatcccttgcggcaattcccaatcaaaggaatgaagaagattagcaagaacaagttctaatatcacaactgccataggtaaacctgggcaacttctgcgacctgatccaaaaggaattagttggaaatcttgtccacgaaaatctacgtcgctatccaagaatctttcgggaataaactcttgaggatttttccaagattcgggatctctatgaataacccaagcattcacgtataatattgtcttagctggaattcgatagccatgtataaagcactcttcatttgattctcttggtacaagtagggtggctggtgggtacaatctaa

SEQ ID NO: 13815 - DNA, 594 bp, Glycine max
  Clone ID: jC-gmle01810071f03a1
gtggatttgagttcatgccttcttcatcacccacctattacgccaacctccacaaccgggccgctgatgtgttgaccgttgaccagattaccccagtgtgaggagcttgggattcttgttgacagagatgatcagggcactctgcttcagattttcaccaagcctgttggggacaggttcttcattttctgcttcttttttttttgtttttttaatccctgctaaacaactttattataactctcacattctattagcctagccttgatgacttttaatttacgttaaactgtgctttttattctcctactttgttagttttttttttttatataaaattttaatttttcaattataactttcaataattaacaaatgatgtacagtatagtgttatgtcagaatggatgtacttgatgtagcagttcatcagagtgtttccctctacaaattgtacttttgtccctttcctgacataaagtttacgactttgaaaaaattgatagataaaagtgcaatttatttatcttccgctttgaactgattgaaagtgtaaaagttagatcaacaatttgacagtgtttgtgtgttgga

SEQ ID NO: 13816 - DNA, 421 bp, Glycine max
  Clone ID: jC-gmle01810071f03d1
gtctccaaaacgcctctacgatttagggggccgtgctaacgccgtgcaatgcaaaaccttatacgactcgctcataccagcagaacagcgtttaagcaaccgtcgttctcggggttgttcgtaatttgagcatatcgaccccacacgaccttttcacccgcagtaacaagtcccaactcagacacattgacctcaataatcggacccttggtcagcacacccaactgtgtgtacagcgggttctgcgggttctttttcacactgataattggcaactgcaccgtaacgcttaactcaggatgcgtcacattcgccttcttgtacctcaatcccatgggcctaatgaagcgctcgtatttcaccggtcgccttgtgaatacaggtccaacaaacgtgggcttggtaattatgcgcttccagc

SEQ ID NO: 13817 - DNA, 578 bp, Glycine max
  Clone ID: jC-gmle01810071f04a1
tgtcgctgtcatcaggggttcctaagtgatgaagaagtgcagagccagttaaagatgcgaactgtgttgggttctttggatgctttgccccaatctcttcccatcaagttaattcctttaattttctcttttcatcccgcttctttgatttgattctcgtaatcatcgaatgtttttctttaacccttagattagatcctttttattttgagttggataaaattataatatttttttcatttattttgggtggtaataagtaataactaatactaactagtaaagtagtaattggtgtgtgtgatttttgttaatttgattttggattatggaatctgatacggctatgttttgggattttatggtaagcgatgcaggaggggattgtcgagtcattttgatggaaaatcaaaatcgttctcagatctatctcaaatgagtaatttgagtaatctgaaagagttgcataagcaagagagttctttcaacaagagaagaaggggtttgattgcatccaaagggttcagaagatcatctttctattcctggttcaccccacatccatgcctcttttgcct

SEQ ID NO: 13818 - DNA, 458 bp, Glycine max
  Clone ID: jC-gmle01810071f04d1
aattccgcgatcgaccatgctcgtaggccgcccttcgtttttttttttttttttttttttttaattgaatccattatttatatataacgggaaaggactatatacacatacaatgtattctagtttagtcccctaaaacacgagcaagttattctggggtgtcgaaccccaacttcttcaaattcggctggactgcaaattgaatcataggtggtgggccacaagtcaatgccaaggtatcaggagatgcatttggaatatgctccgtcaggatacttttagtgatgaatcccacactgtattcccacccttctcttatgctttcttgtatcacgtaccacaccttgaacctatgatacttcttagcccactcatgaagctgtttcttcagcaatatatcatcctcggttgggttcgcgtaaaccacatgcatgttggtgcagaactttggatccttt

SEQ ID NO: 13819 - DNA, 540 bp, Glycine max
  Clone ID: jC-gmle01810071f05a1
tgtcgctgtcatcaggggttccgatgatggaggaagaagtgcagagccagttaaagatacgaactgggttgggttctttggatgctttggaagaatctcttcccatcaagttaattcctttaattttctcttttcatcccgcttctttgatttgattctcgtaatcatcgaatgtttttctttaacccttagattagatcctttttattttgagttggataaaattataatatttttttcatttattttgggtggtaataagtaataactaatactaactagtaaagtagtaattggtgtgtgtgatttttgttaatttgattttggattatggaatctgatacgggtatgttttgggattttatggtaagcgatgcaggaggggattgtcgagtcattttgatggaaaatcaaaatcgttctcagatctatctcaaatgagtaatttgagtaatctgaaggagttgcaaaagcaagagagtcctttcaacaagagaagaagggttttgattgcatccaagtggtccagaagatcatctt

SEQ ID NO: 13820 - DNA, 558 bp, Glycine max
  unsure at all n locations
  Clone ID: jC-gmle01810071f05d1
atgacagggcgtcgaatcgatccgacccanaattactgtcacagctactgtcggggcgccttgtctttttaaccaaactttatttttaaaagaacaactaaatataggaagggttagatgtagaacggagtacccctttacagtataaaacgcagtgatacactggcactttctcacaattatttcatcaaacactacttatctttaagccacacactactgttatggaacatcaacagtattatcatcatattattatttccatgaatcctgaatctagcttccacacaaagtcattactgctgggcgcactgaaccctttgtgcaccaccaggcatgtcatcatcctcatcatatgcctactgagcttgctgctgattcctcctagtctccttcttcatgtggacatcatggagtgtagctttctcacatacatgcagctccatgcctgtcaattgtgaagaacgcttttgttgccaaacagcctccaaggccttaacttgatcatggtttagaggataaggaaactccacttgaagtgaatgaaaagttttccct

SEQ ID NO: 13821 - DNA, 540 bp, Glycine max
  Clone ID: jC-gmle01810071f06a1
cggagccttggtgtatgccacgataaataatcggctggtatagctgaattctatgaggaggattacaaaaataagggtgtcaatatcatcccaggaactgttgctgctggattcacttctaattctgatggagaggttaaagaagtcacactaaaggatggcagggtcctggaagctgatattgttgtcgttggtgttggaggaaggcctcacacagccttagtcaaagggcaggttgaagaggagaatggtggaatcaagaccgatgctttcttcaaaactaatctttccgatgtatatgctgttggtgatgttgctactttccctttgaaattatacggtgaattgagaagagttgaacatgttgatcattctcgcaaatcagctgaacaggctgtgaaggccatcaaggcagctgaggaaggaagaacagttgaggagtatgattaccttccatacttctattcccgttcatttgatctgtcttggcaattctatggcgacaatgtctgcgacacagtactattcggagaccacaat

SEQ ID NO: 13822 - DNA, 515 bp, Glycine max
  Clone ID: jC-gmle01810071f06d1
aactatgatactatattgatatttaattcttttggcgaaacgagctcaatacatcatattaaaacataaaaagcagcacctaaaccagaacagcaaacaagttcaagggagaaattgaacataacagacatgacatacaagaacacttgaaaaaagacacgcttaaaacaagaacacttgaaaaaaaacacgcttaaaaaccaccgcgaaggcgaaggacgagatgcaaggtggattccttctgaatattgtaatctgccaaggtacgaccatcttccagttgcttcccagcaaaaataagcctctgctgatcaggtggaatgccctccttgtcctgaatctttgccttcacattatcaatggtatcagaactttcaacctccaaagttatggtttttccagtcaaagtcttaacaaagatttgcatgccaccacgaagccgcaacaccaagtgcagggtagattccttctggatgttatagtcagaagggttcttccatcttaagctgtttccc

SEQ ID NO: 13823 - DNA, 499 bp, Glycine max
  Clone ID: jC-gmle01810071f07a1
caagatcatcaccactgaaggtagaattgttggcataaaaaaagcacttgttttctacatgggcaaagcacccaaaggctccaaaaccaccttggatcatgcacgagtatcgccttctcgattcttcccgcaaacacaacctcggaaccgcaaagcttgatgattgggttctatgtcgtatctataagaagaactcaagttcacaaaaggttgaggctaattttttggctatggaatgcagcaatgggtcatcaccttcttcatcgtcccacgtggatgacatgctgggatcgttgccggagataaatgaccggtgcttcaccctgccacgagtgaactcactcagaacaatgcaccagcaggatgagaaattcgggtctccgaacatgggatccgggtttttctcggattgggttaactcgaccgatctcgattcgatttccgaattcgagtcgggttgccaaaccaaagaatggtgattatgattgcatgacttttt

SEQ ID NO: 13824 - DNA, 469 bp, Glycine max
  Clone ID: jC-gmle01810071f07d1
gaagtccatcctactattctctttaataatgaccaaaagctaagaattttggaggcaataatcaggaacaaacaaattttacagtgactcaatcctcaaaatcacaatggtcgtgttaaataaaaaggtgtggtaaaaaaaaaacaatttatgatatatatttatatttgtcgagaaggaaaaaatgaaaggtaccaaaggaacaaagctttcacgaactgcagttccagaatccaaatttgtatatgaacccctccgtgtacaatgcagtttgatctgctctcatcctgtaatggcagggtgtggcttctatacatgaatgtggagatgatggattatttgcatattttatatataaagtatgcgtcggctaccttctcgagctttcatgaaaagcccattcccccttccccattctaactgtcactatatgactgcctctgtgatacataaaagctgtcatcatctt

SEQ ID NO: 13825 - DNA, 470 bp, Glycine max
  Clone ID: jC-gmle01810071f08a1
tgcattattcaatggccaccacagtattctttccggaccatggtgagcaccttctggatgaggaagcaacctatgacgaccaagagcctaaagacattccccaacgctctttttggtctgaaaggtggacgaggtggacgtgtaacttgcatggcctcgtacaaggtgaagctcataaccccagaaggagaagtggagtttgaatgcccagatgatgttttcattgttgacaaggctgaagaagaaggcattgaacttccctactcgtgcagggctggttcttgcgtttcatgtgttgggaaaattgtgaaaggtgacgtggaccagtcagatggtagcttgcttgatgatgaacaaatagaaagtggatgggatctcacctgtgttgctctacctaggtcagacgttgacattgagacacgcaaggatggagagatcgaatgatcgatatatattataatgtaatcttg

SEQ ID NO: 13826 - DNA, 496 bp, Glycine max
  Clone ID: jC-gmle01810071f08d1
gaagtccaacctaccattctctttaataatgaccaaaagctaagaattttggaggcaataatcaggaacaaacaaattttacagtgactcaatcctcaaaatcacaatggtcgtgttaaataaaaaggtgtggtaaaaaaaaaacaatttatgatatatatttatatttgtcgagaaggaaaaaatgaaaggtaccaaaggaacaaagcttccacgaactgcagttccagaatccaaatttgtatatgaacccctccgtgtacaatgcagtttgatctgctctcatcctgtaatggcagggtgtggcttctatacatgaatgtggtgatgatggattatttgcatattttatatataaagtatccgtcggctaccttctcgagctttcatgaaaagcccattcccccttccccattctaactgtcactatatgactgcctctgtgatacaaaaaagctgtcatcatctttgctaaactgcgtagagacctatctta

SEQ ID NO: 13827 - DNA, 526 bp, Glycine max
  unsure at all n locations
  Clone ID: jC-gmle01810071f09a1
tgcattattcaatggccaccacagcatgnnctatccggaaccatggtgagcacctccggggtgaggaagcaacctatgacgaccaagagcctaaagacattccccaacgctctttttggtctgaaaggtggacgaggtggtcgtgtaacttgcatggcctcgtacaaggtgaagctcataaccccagaaggagaagtggagtttgaatgcccagatgatgttttcattgttgacaaggctgaggaagaaggcattgaacttccctactcgtgcagggctggttcttgcgtttcatgtgttgggaaaattgtgaaaggtgacgtggaccagtcagatggtagcttccttgatgatgaacaaatagaaagtggatgggttctcacctgtgttgctctacctaggtcagacgttgtcattgagacacacaaggatggagagatcgaatgatcgatatatatcataatgtaatcttgtccatgctcttctaatgccatctatctatgtcgtgttttgatattgttagagt

SEQ ID NO: 13828 - DNA, 416 bp, Glycine max
  Clone ID: jC-gmle01810071f09d1
ccgaccataactaggtttaaaaggaaaatcctcactatacaggcctgaatggcccgcccacaactctattcggagtcttttttttcttaccgctcataattctctaaattattacgctgccgcccaaggaagagtataccacccttttctttaggtcttcacgctaaaatcaaaggaggacaaaccgcctataaactcttttcacataaagatgctaatgcttccttttgcgataactccatcgattataaatgcgtatattatttacagctgtccacaatatgggagctttacaaaatatatatagggttatccacagcaaacgtgaacataatggcggcttcatccacatgtctacaatcattaaatgcctatacatcatgcctacccatgcaagaacaaaagcgtgaacctaa

SEQ ID NO: 13829 - DNA, 395 bp, Glycine max
  Clone ID: jC-gmle01810071f10d1
ccgaccataactaggtttaaaaggaaaatcctcactataaagtcctgaatggcccgcttacaacttttttcggagtcttttttttcttaccgctcataattctctaaattatttctctgcctcacaaggaagagtataccacccatttctttaggtcggcacgctacaatcaaaggatcacataccgcctataaactcttttacacataaagatgctaatgctttcttttccaataactaccatcgattataaatgcatatattatctagagctgtccacattatgggagttttacagaatatatatagtgtcatccacagcaacggtgtacatagtggtggctttagccacatgtatacaatcattaaatgcctctacatcatgtctacccata

SEQ ID NO: 13830 - DNA, 504 bp, Glycine max
  Clone ID: jC-gmle01810071f11a1
ctttttacttattacaccctatctttgttcttctctacattcttgttcaaataggggtagtctccaatggcttagttcatatataccctttaatatttctccttttaaaatgctttaatagaattcattatttttaattttctgctctctttaatttacttcacctaaccttactttctttaaaaattcaacatgacttttgaagttaagagtgattaaaactacttttttttttgtgaaaatagaggaactttgacaacatttaaccaaaagtatatgatctaaaatcacatttttaggataaccattcttagcattaacatggttaagttcaagtagatcaatattttatttttacatttttttacaaagagaaacacgttttatatcattagaatactccgaatctctaataaatgacattaattatatgctgcaataattttattgtctctagataaaaaagcaatatttctattatacatgcgaaaccaaaatgaataa

SEQ ID NO: 13831 - DNA, 180 bp, Glycine max
  Clone ID: jC-gmle01810071f11d1
ataattggggttggggtacttttaaaaacaaaattacacaatcccgttatactacccattaaaaaaaaaaaaaatatgcacaaaacaaaaactatactattaacaacctcccaccatgtacataaaacaaaactataaaaaaaaaaaaacaaattaacatctaaaagcacaaaatcaaca

SEQ ID NO: 13832 - DNA, 458 bp, Glycine max
  Clone ID: jC-gmle01810071f12a1
aagaagagctggaagcgcatgatcactaatccgacgtttgttggacctggattcacgaggcgaccggtgaaatacgagcgcttcattacgcccatgggattgaggtacaagaaggcgaatgtgacgcatcctgagttaagcgttacggtgcagttgccaattatcagtgtgaagaagaacccgcagaacccgctgtacacacagttgggtgtgctgaccaagggtacgattattgaggtcaatgtgtctgagttgggacttgttactgcgggtggaaaggtcgtgtggggtcgatatgctcaaattacgaacaaccccgagaacgacggttgcttgaacgctgttctgctggtatgagcgagtcgtatgaggttttgcattgcacggcgttagcatggacaaataaatcgtagaggcgttttggcgactccatatattttataatttatatttttaaa

SEQ ID NO: 13833 - DNA, 303 bp, Glycine max
  Clone ID: jC-gmle01810071f12d1
gttggacccgggcccttccaaatgtcattaatgaaggggcgccaccgaaagtaaaaacaaaagtgaccccaaccatggttccaaggtgccaacctcccgcaatggtacaaacatacacatgtcttgaatacaaaagcaaaaaactggcaaaaaaacaaaatcaagggtaacgagagttatcttcccagggaagagcactctaaattctcctataaagagggaaatttgtgccaactggaggcataaacaaggcctaaaagcctccccagggcatatcccgggaccggtaccttttatatgaca

SEQ ID NO: 13834 - DNA, 552 bp, Glycine max
  Clone ID: jC-gmle01810071g01a1
aaaaatgccagtgaagatgaaatcaataagtcctatagaaaggctgctatgaagaagggtgcatattagggaggagatcctgaaaagtccaaggagttaggtcaagcatatgaagttttaagtgatcctgagaagaaagacctgtatgaccagtatggtgaagatgcccttaaagaaggaatggggggaggaggctcgtttcataatccatttgatatatttgaatcattttttggtggagcaagctttggtggtggtggtagttcccgaggtagaagacagaagcatggtgaagatgtggtgcattctttaaaggttttcttggaggacgtctataacggcacaacaaagaaactatctctttctagaaacgtattctgctcaaaatgtaaagggaaaggttcaaaaagtggaacagctggtaggtgttttggatgccaaggcactggtatgaaaattacaagaaggcagattggactaggcatgattcaacaaatgcaacatgtctgtcctgactgcagaggatctggtgaggtcattaacgagagagat

SEQ ID NO: 13835 - DNA, 269 bp, Glycine max
  Clone ID: jC-gmle01810071g01d1
cacacttaacacatcatatcgggggttgggggaagtgcacaaatattgatatcacacactacatactttattatgaaggcttattttattttcctatttttgttatgcacacaccaacatatcaaatttaaacaccaattccaattcatgcataggattcagcatttacaaaaaaaatattagaaatctttcgtacaaaaaaaatcatcataacaaaattatctcctattaaaaaatcttataaattttcctatgacaatatcaacaat

SEQ ID NO: 13836 - DNA, 381 bp, Glycine max
  unsure at all n locations
  Clone ID: jC-gmle01810071g02a1
agccgaagaactangacagaccatgagagaaaattaggccacgacgagagcggggaacgcggcgagagctcgagccgaaaaaaaaaaaaaaaaataataaaaaaaaaaaaaaaaaaaaaaaaaagaagaagaaaaaaaaaaaaaaaaaaaaaaaaaacccccaaaaagaaaaaaaaggggggcccgccacacaaaaaaaaaaagagaaaacaggggggcagagaaaccaaacacgggggagaaagggaaaacaaaacaaacaaaagggaaagacgcaacaggcgaaaaaaaggaaaaaaagaggggaccaaagaaaaaaaaggggaacacaaaaaaccacgggagaaaagaaaaaagggggggaagaggggaaaaaaaaca

SEQ ID NO: 13837 - DNA, 609 bp, Glycine max
  unsure at all n locations
  Clone ID: jC-gmle01810071g02d1
aaagcaaaatatccctccagtcagaagctataggactaaccctcaaaatataaaaataacaaaagtttattttatcttttccaacaaaatcttctcaaccatctacaaaatgtgctggacctgttagtagcaaaccctcaatcctgcttctaacagtttctgaaatctaacggaagatctcattatctattatacatacataaatgcatcagttactccctcggactctgttatcagttacaccaaactacgagtcacagaaaataaacactgatagaaataaaaaaaaaactcttgactagtcaagcattcatcatttctcattgcacacccctagtgtcccactaacttgaacgtcttgcattggaaggatgtagtaggctgacgggataacaatctgaatctcggaacaaacagaaaacgaatctgaaacgttaattaaatcagatataacttgaaatatattacactttttaatcatataataatatggtctaccctatgatcagtaacctcaaatcaaactttacagtgtcgaaaactaatgcatcagaacaccttggacttgntactttgactaaaataacagaaacattaaccggaaaataa

SEQ ID NO: 13838 - DNA, 519 bp, Glycine max
  Clone ID: jC-gmle01810071g03a1
cggctcgagggacttctccagcctagtcccgcccagacaacggccgatgaagagccgggtgagcctgcagctgggtcaaacgatgcggcccccacgtcgtatggacaagtcgaacctgcagttgccggccctgcctcgtttccaccctgccaagtacccatccgcgtgctcgtcgctgtccggcacgccgagatcagaacagaacatgccttgcgggccggtgtcgccgggcttgcaacagcgggtctacaccgaagcacagcggagccggtatcagtaccagagagaggtaatgcatggattcattggacgcggtaccgagcccgcgagtgtgaggctcgcgccagttggttcgcccggtctgcctatgacgcccttgacgctagacgaaccggaggacgggtacatcggtgcgtctcacggatcatcacagctcgcgacgaatgagtcaaagggcgcagcagagtcggacaaccaggcatgactggccatgtacggatagcattagcgaccgaacat

SEQ ID NO: 13839 - DNA, 476 bp, Glycine max
  Clone ID: jC-gmle01810071g03d1
ttcgttttttttttttttttttttttttggacccaaaaatatatagattatagaatgcaattttaacagacttttacatgtgacatttggccaaaatacaaagaggattcttcttatactggacaagtcctggcaagacttcagtatcgatgtcttcctttttcatccctgctggcaattcccaatcaaataaataaagaagattagcaagtataagatccaatgaggcagttgccataagcatgcccgggcaacttatacgaccagcaccaaatggaattaactcaaaatcttgccctcgaaaatctatagggctgtataagaacctctcaggcaaaaattcttctgggtgttcccatatttcagggtctctttgaattgccaaagcattcacatatactaatgtcttggctgcgatttcataaccatctataatgcaattttcatttgtctcttttggcaaaggagtgggactg

SEQ ID NO: 13840 - DNA, 520 bp, Glycine max
  Clone ID: jC-gmle01810071g04a1
gagcaaggtcaaacctcaaccatagatacttactatcaagctcatggcatgggggcctttaccttactggaagtcggacccccttatatgaacgaccttctaacgccaccactgtaaacatgttaggcctttgaggacccaacagatccgaagttacttagggttatggcccaaggcgcagaggcacagaatccccttgacttgacccaggagcttttgaatggaccaacacaccatctccatgatgatgctcggcgaggctgaggagatcagagacatcgctcgtgaggttcttaagatctatggcgaatacagcctcactgactatatctggccattgaagcatctcaaggttggaaagtatgagaagaggatcgacgacttcttgaacaagttcgaccctgtcgtttaaagggacatcaagaagcgccttgagatcgtgaggaggaaaaaaaccggaaaggatgttgagggtgaggacaggggggtttttcttgacactctgcttgaatccgctgat

SEQ ID NO: 13841 - DNA, 432 bp, Glycine max
  Clone ID: jC-gmle01810071g04d1
gtgtatgtaaccatgtattaaagatcgaattacaaagggatttaacctcctccgcttccgtaagtctttccgaaaaccatcatctgaagttgatcgtatccagccaagactccagcttcagcgatagctcgaagaacgttggcacctgctcccttgaagagtgacttgtatccctccttggcaatgatctcctggaagcagtggtaagagctcttgtacttgacagcctcttcagaagtcatcatcatacgtcgtcgaatggtgtcgagaggataagaagcaagaccagctccgatagtgatggaccatccaagcaagaaagaagcatggaagttgtttgccaaatttccagtgaggagaacaggcttgagtgagtcataaagtccaaagtaaagtcctcgatagacgatgataccaacgcaagagatgttg

SEQ ID NO: 13842 - DNA, 561 bp, Glycine max
  Clone ID: jC-gmle01810071g05a1
aaaatgtacccttttgatcggcttcttaatcattctgtagcatagaattgagaacagagatagaatatatttcttaatacatcctcacggcattgtttctagtgccttttaagggaattcaagtagaaaatgaaacacaaaaaatgatatgttctcctaatatacacattgaacagatctttaaatatcttgcttgggttgaacttgaacatcccagttcccgctttaatacaatcattttgttatgtacaggactataggtatcatgtgcaatttaaacttattgttttgttaataaaaaccctttaaaattgcataatggagaattgaacttgattaatctgtattagtcttacattatgtattaggccaaagctatgtatcaccttcttaaggagtgacaataatttttcttttgtaactcctctactggtttttggttccctcaatttgaactcaacgtgaatgctatgtactaatagggaagaaaactgttcatcaaatgtttggaacaagagttgcgtgctggctggagacttcattgttgcacagtcatcatgg

SEQ ID NO: 13843 - DNA, 377 bp, Glycine max
  Clone ID: jC-gmle01810071g05d1
ggactaaatactacttgataatgcccatgaacatgatgaagggtacctaatgattcatacataactttgataggagcttgtcttgacaaacaacagcttagatctagttgccaccggtgccacaaaggactatcgcagcaccatccacatgtgcgataagcatcaaaagcatcacaagaatgacaaagaaagggatgttagtttttagaatacttatagcccttaaatatgatttttttattattaacattactataactttccgctatatcggggattgtacctatgtgaatcaatacctagaacattgccggaccctaaaatggaaagtcccctaagcctatattgagaaggtgcggaaatatgatgctcaatac

SEQ ID NO: 13844 - DNA, 401 bp, Glycine max
  unsure at all n locations
  Clone ID: jC-gmle01810071g06a1
tgctagttgcccttagtattgtgcganattngagncacgacgagagcggggaattcgtctcgagtaaatcataagaaggaggagagactaatactttcagaggccaaagcagtatatttcggggggttcttataatagctaacgccatggttgccccccaccaatagcaggcagtgttagaaaaatcggtcaaaaattaagacgagttcgaagaaacattttatgattcggcagagaagatagtggaggttgtagtctacaagtacgatgacgatgagaattgagggagagtgccaaaaatatcgtggaagaagctatggctgtacaacggcccgggttttttgaggagcatagagaatctggatcatggaaacttaaagggggaccttcaggcgggtgcc

SEQ ID NO: 13845 - DNA, 452 bp, Glycine max
  Clone ID: jC-gmle01810071g06d1
gtacttcttactactagttaatgctcataaatttcatgatgggtacgtaaagattcatagtgaacttcgataggaacttctcttgacgaaataatgcgttgatctagtcgccaccggagccacaaaggactatcgaagtttattcttttttgttgataagctccaattgcatcataggaattacaaaaaaagggttctttttttttcgtatacttatagttattatctcgaattctttcatttttaagatttctaaaattttcgcaattccgcggattatacctattggaataaatacctcgacgattcccgctcgctaatatgtaaagtccaataagcatatcttgagttggtaccgaaataggatccccaatagccggagacaggaggttcgtatgagaaaacataagtaaacgagcttttgcttgagcctctaagataaggcacatgaa

SEQ ID NO: 13846 - DNA, 517 bp, Glycine max
  Clone ID: jC-gmle01810071g07a1
tgcaaagataccttctcaacgtccttcatttcttacccaagaaaccagatattgcagctgtcagtgttccagatccccctgctaatgctgtgactgtggaacctaaagttgccactcaacaagaaactgcacaacctaaaccagtggcaaaacaaccactttctccttatatcgtttatgatgatttgaagccaccatcatctccttctccatctcagcctggtggtgggaaaccaacaaagatcagtgagacagtgccaaaaccaagtgcttcagatactccaagtagtgtgccaggagtagatggcatctctcagacaacatcgtcatctaaagtggagaagcctctttctccttatgtagcatatcctgacttaaagcctcccacatcaccatctcctaatgcaccaactgtatcagtttccacacctgctgcagctggggtgccggagatagacacaatatcaagcaatggaccggcccaactttcagcagcagatgaaccaaaggaagaaca

SEQ ID NO: 13847 - DNA, 256 bp, Glycine max
  Clone ID: jC-gmle01810071g07d1
gttagtcatatatttagacgggtgttggtaacttaaaccccatataattatataattaaaattttttaagacaaaattcccattacaaatatttagcttatgacaatgaaaacattttattttccacaaacagggttttttccaatacatacacccttaatttttcctttaaaaagtggtttaccccatagcttgcatttttcattttcactatattcagaaaaccaatagttgccacatgttaacaattcctttt

SEQ ID NO: 13848 - DNA, 53 bp, Glycine max
  Clone ID: jC-gmle01810071g08a1
gtaaaataaaaaataaaataagatttttatttttaaagaaaagaaaaataaat

SEQ ID NO: 13849 - DNA, 473 bp, Glycine max
  Clone ID: jC-gmle01810071g08d1
gattgccgagattcaaccatgtttgttatatattgagacataatcaatcaagtacaccactcacagcagaaggtttataagctgtaaaggtacatgtaaccataaacaaaaatagtctccaagactataaaaacattacattttagacaaattagtcttcttccacttcatcctccgtcaacacctactataactgctggtgttgctgctgcctaacatgtatcatattcactacatacatcttagtaggagtagcctttgacgaacaactccttcttggcttcctcggattcaccctcaccggtgtacttcccaagctgggcgagcgagttggacttggcacggaaaaggagtgcatcttgtgccgccttcacgttctctgggcggcctccccatgtcttaaggcagtgttttggagggctctggcatacgagaacgacacgtgccacgggtttggagattggttcatggca

SEQ ID NO: 13850 - DNA, 516 bp, Glycine max
  Clone ID: jC-gmle01810071g09a1
agcgaagcttgaattacaagaggttgttgatttcttgaagaatcccgataagtacaccgcgctgggcgcgaagattccgaaagggtgccttttggtgggcccaccgggaaccggaaagacccttctggcgagggctgtggcgggggaagctggggtgccgtttttctcgtgcgcggcttcggagttcgttgaactttttgtgggagttggtgcgtcgagggtgagagatttgtttgagaaggcgaaggggaaggcgccgtgcattgttttcattgatgagattgacgccgttgggaggcagagaggggcggggctcggaggtgggaatgacgagagggaacagactattaaccagcttttgacggagatggatggcttttctggcaattctggtgttattgttttggctgccactaacagaccggatgttcttgattcggcgttgttgaggcctggccggttcgacaggcaagttactgtggatagacctgatgttgccggcagagttaaaatttt

SEQ ID NO: 13851 - DNA, 401 bp, Glycine max
  Clone ID: jC-gmle01810071g09d1
ccccccaaaaaaaaaaaaccaaattccgggaattaacacccacaaattttaccctcccctcatttccccttgagcgggatcaaaaatacaaaatttgaccaaaaccccccctggaaaaaaaggggaaaaacccccctaaattttcccccctaattttctgtccaggaaaaaaaattctttatcccccctggagggcaaattttcacaaacctaaaaaaaaacttcgtctaaggtcactcaacgagaagttttttttgccccaaacccaccctttcaagcaaatgctttgtccaaccaccttgatttccccattttgcccaaaacaatgcttaacaaccattcccgttaaggcaacctttcccgctaacttttgttcaaattccccacataaaccagggccg

SEQ ID NO: 13852 - DNA, 552 bp, Glycine max
  Clone ID: jC-gmle01810071g10d1
ccaaaatatttaacactgggtttttactcattgcattaccggcagatgctataaatattatgttcgctggctaaatggaatttgccacgcttgatatccaaaaaagtttatactactacatcaaaatttctcctgtgaaagacagaatataaaaatctaaacttacgcttccccgcaaaagaataaaaaataacaaaacaaaaatgaaacatataatatgttgttaggggacacattgaatccatcttgaactcgaatcctccgtgggccttaaccaacatcaactgtttcttcattcacgactgaagtattcatccccacgtggtcgtcactgcagttatgatcccacaccgagcagagtgaaaacactcaactcccaaagacccttctcagcttcaccatctctttccaccccagttgccgccacgcccaccaccattggagaacctaccattcctgccgtgtgcacctctttcaccaacctgtagttcccaccacgaccaccattatcaccaaatctgcacctattgaatgtggctttttttgttgcaa

SEQ ID NO: 13853 - DNA, 515 bp, Glycine max
  unsure at all n locations
  Clone ID: jC-gmle01810071g11a1
atttccaccaaatcttgagggtccngttgttattacacccttgcacttggcggcatgcacatctggttctgagagtgtagttgactctctaacaagtgacccacaggaggtaagttttttctccctattctagtactatatgccttatggaagaaatgacacgtcagttgttgtcctaagtaacagaaggaaaaaaaaaaattgggttacacagacacaggttcctgtggtagttattgtgggtaaatatcacttgttcttttccttgatggcagtggtactggggattttctattttggacctcaagtaaatgcatatttctctagctgtgatgtgtctctactagtcctggccatgtatttgtgttgttttcttgtttttaaggaaagggggcaaggggagatggcatattgaaaactaaaatatataatagttgaattactgtgttgtttgcactttagcatacttcttaccctcaactgtatggttataattctcaacctttattccttga

SEQ ID NO: 13854 - DNA, 536 bp, Glycine max
  Clone ID: jC-gmle01810071g11d1
aaatctctaatatatgttttctcgaatattagaagcactaccatttaagataacaagttttagaactctcttctcattgtgaatcaaataagaaaataactattttttcctctcctaacaagtccctcttctcctcaagcaaacaaacagaatgtttatttaaaatctatctccttccctcattaaatttctttccccctccttggaaccaaacaaaacctgctaagtggtatagaaactgagaagagatattacaggaaatatagaagggatgtttaaaatttagaggatggagagttaggaggaaaataaggtgtaaaatgaaaagagcatccactggtatgtttcagtcagataaacccgcctttgactttagatgcgccttgaattccatgatgtcaccctcccatctggtcacagattgattagcacatacccatatctcatgagccacttgatttatgagcctaaaatcatggcttacaagcaccaagccaccatcccattcattcaatgcctcggccaacgagtcaatt

SEQ ID NO: 13855 - DNA, 483 bp, Glycine max
  Clone ID: jC-gmle01810071g12a1
aggtcacattgtcacaatgtggtcactaattgttcactgttgtgccttattcctccggtgttcttgctattcttcttccaataccgcacaaccttcaagaactcaaaccttccaccaggtcctagaggccttcccataatagggaatctccatcagctagatagctcgaatcttcatcttcagctatggaaactctcaaagaagtatggccctatattttcccttcaactaggtttaaggcccgccatagtgatttcctcatccaaagtggccaaagaggcacttaaaacccatgacgttgagtttagtggaagaccaaaattacttggccaacagaaactgtcctacaatggaaaagacatatcattttcaccaaatggtagttattggagagaaatgagaaaactttgtgttgtccatgtccttagctctagacgtgtctcgagcttttcctcaatataaattgtgaggttaagcagatga

SEQ ID NO: 13856 - DNA, 244 bp, Glycine max
  Clone ID: jC-gmle01810071h01a1
gaaaaggccagttaagaggaaattaataaatcctatgaaaaggctggtatgaacaaggggggagataaaggaagagatcctgaaaagccccccgattaatgtaatgtatttgaagttttaagatgattctgatgatatagaatctgttgaactgcatagtgaagaggcactgaaagaaggaatgagtggaggaggtacgttttataatccattagatgtatgtgaattaatttatggtggagca

SEQ ID NO: 13857 - DNA, 550 bp, Glycine max
  unsure at all n locations
  Clone ID: jC-gmle01810071h01d1
aaagcaaaatatccctccagtcagaagctataggactaaccctcaaaatataaaaataacaaaagtttattttatcttttccaacaaaatcttctcaaccatctacaaaatgtgctggacctgttagtagcaaaccctcaatcctgcttctaacagtttctgaaatctaacggaagatctcattatctattatacatacataaatgcatcagttactccctcggactctgttatcagttacaccaaactacgagtcacagaaaataaacactgatagaaataaaaaaaaaactcttgactagtcaagcattcatcatttctcattgcacacccctagtgtcccactaacttgaacgtcttgcattggaaggatgtagtaggctgacgggataacaatctgaatctcggaacaaacagaaaacgaatctgaaacgttaattaaatcagatataacttgaaatatattacactttntaatcatataataatatggtctaccctatgatcagtaacctcaaatcaaactttacagtgtcgaaaactaatgcat

SEQ ID NO: 13858 - DNA, 567 bp, Glycine max
  Clone ID: jC-gmle01810071h02a1
ctaactttttcttggctggttgttaataaactctcttttctctattggatcatagcggggtgcaccctcttcctcttagaattccttatactcacacaccaaaattctggtacaccatgatttttccaagattttgtacgaatctaaaaggtatggaattggaaaccctctacaccccttgttatatgccaaactcaaattggtttgtgcaagagagcctcagcacagagtggactagagaagataacaagaagtttgaaagtgcccttgctatatatgacaaggacaccccagatagatggttcaaggtggccgctatgatccctgggaagactgtgtttgatgtgatcaagcaatatagggaactggaagaagatgtgagtgaaatcgaagcagggcatgttccgattcccggctaccttgcatcttctttcacctttgagctggttgacaaccacaactatgatggatgcagaagaaggcttgcacctgtcagaggctctgatcaagagagaaagagaggagtcccatggactgaagaggaacacagacgttttctgatgggac

SEQ ID NO: 13859 - DNA, 536 bp, Glycine max
  unsure at all n locations
  Clone ID: jC-gmle01810071h02d1
cgcaatatctcacaagatgtgtatactttgcttcgtacagacgaatgtcgctcgcctttgctttgtttgccgttgtcttagctgctgtctccgatctgtgccatcgtcctcttcaactcctccatgacgccctcaaccactccaaccttttcaccttcatgtgcagaggacagactgtcctcccccacgttcaattgagctttgttgcctttcttcacccacttctcgagcccgcccagctcgctgaggcgccccagcaaacctctcagcttgtcctgcgtattgcaacccggaagctgctcgagcagctcgggctgttgattgggtccggccgccgagatgaacttggatatgaggaggggcggtgtaggaggatatgattcccgaggtgccgccgggctcattttctccctccatgtgcgataggtagacttccaatagtaacctagccagactgatggcttctgtgcaggagcatccatcggaacagctgtttgcccggtgcaggtggcanagtgcgttgtggatagtatgcc

SEQ ID NO: 13860 - DNA, 582 bp, Glycine max
  unsure at all n locations
  Clone ID: jC-gmle01810071h03a1
tgcgtaagttttnagtattcgtgagganaattangnnaggacnggagctgggattcgtatgagaggttgtaaggctgaagacagtaaataccataagtcgaaaagncggtggcttctgtgggagattgaggtgttcttcttctagaaaaccccaggttttacaaggaggaagaaaagaatgatcccgagcctgcaaaaaagcttgcctctctggcagatctgtttgtgaatgatgcatttggtactgctcacagggcacatgcattaacagagggtgttactaaatacctgaagccatctgttgctggtttttttttgcaaaaggaacttgattaccttgttggggcggtatcaagccccaaaaggccattttgttgccattgttggtggttccaaggtcttatttaaaattggagtgattgagtcacttttggaaaaaagtgacattcttctttttggaggaggaatgattcttaacattttacaatgcacatggtttttaagtgggttcattccttgtagaagaagataagttggttcttgctacaatacttattngcaaagcaaggaaaagggggtgtt

SEQ ID NO: 13861 - DNA, 441 bp, Glycine max
  Clone ID: jC-gmle01810071h03d1
ttgtttttttttttttttgtgtatgttaccatgtattaaagatcgaattacaaagggattgagcctcctccgctttcgtaagtctttccgaaaaccatcatttgaagtcggtcgtatccagccaagactccagctccagcgatagttcgaagaacgatggcacctgctgccttgaagagggactagactccctacttggcgaagatctcctggaagcaggggcaagagctctagtactgggccggctctccttacgtcataaggatacgccttataatggtggggtgaggataaaacacaagaacccgttcgagggcgagggaccattcgagcaagaaagaagcagggaggattgtttgacgcatttccagtgatgagaacaggcctcgaatgaatcatatagtgcaaagctgagtgctggatagacaatgataccaacgc

SEQ ID NO: 13862 - DNA, 394 bp, Glycine max
  Clone ID: jC-gmle01810071h04a1
ctcctgaagcacaagcaccagcaccaatgctcactagccccatttctccaccaagggggggaccagcacctggcccttcctctggatcacccacttacactgttggagagactgcaggctggattgttcctggcaacgcttccttttacccagcttgggcctctgccaaaaacttcaaggttggagacatcctaggtaagtcatcatcatctacacttattaactaaatcaagtcccacgtggtacaaattaaagtaaagactcgaaccatcattggtgtgtattgcagttttcaacttcccatcaaatgcacacaatgtataggaggtgacaaaggccaactacgattcttgcagctcaccctctcctatcgtcactattcaccactccatcg

SEQ ID NO: 13863 - DNA, 399 bp, Glycine max
  Clone ID: jC-gmle01810071h04d1
ttcgtcctttttttttttttttttttttttttttttttaatacaatttttttttttggcttgggtttttatattaattccttccttttttaataatcttttatttttctcgggcatttcgttttttttcttagcccccaaaacattgagaaccccaaaaatgtttaaagaacacccaataagaccttccaccacgggggtcgcacccaacaacacaatcaagccacttcctggcccttggggccccccccccttataaaaaaaggagcagggttcccatgcaagggggaccccccttcgggaaaaccaatgccccccccttcaccccttgtcacacaaagggactgcactgacagtatatgcttcccgaaccccccttttaccctccaacaaaaccttt

SEQ ID NO: 13864 - DNA, 517 bp, Glycine max
  unsure at all n locations
  Clone ID: jC-gmle01810071h05a1
ctcctgaagcacaagcaccagcaccaatangtcactagccccatttctccaccaaggtgggcaccagcacctggcccttcctctggatcacccacttacactgttggagagactgcaggctggattgttcctggcaacgcttccttttacccagcttgggcctctgccaaaaacttaaaggttggagacatcctaggtaagtcatcatcatctacacttattaactaaatcaagtcccacgtggtacagattaaagtaaagactcgaaccatcattggtgtgttttgcagttttcaactacccatcaaatgcacacaacgtagaggaggtgacaaaggccaactacgattcttgcagctcagcctctcctatcgacacttataccactccaccggccagagtcccccttagcaaatgcggtgaacattactacatatgtggaattccggggcacttgttgggaagacaaaagcttttcatcaacgttaccggcggcagaaccgccaccgcccccacc

SEQ ID NO: 13865 - DNA, 473 bp, Glycine max
  unsure at all n locations
  Clone ID: jC-gmle01810071h05d1
ggacttcttactactttataatgctcataaatttcatgaagggtacgtgaagattcatagcgaactttgataggaacttctcttgacgaaatactgcgattacctatttgccaccggagccacaaaggactatcgaagattattcttttttgctgataagcnccaattgcatcatacgaattacaaaaaaagggttctttttttttcgaatacttatagccattatctcgaattctttcatttttaagatttctaaagtttccgcaattccggggattatacctatttgaataaatacctcgacgatttgcgctcgttaatatgtaaagtccactaagcctatcttgagttggtgcggaaataggatccccaatagccggagacaggaggttcgtctgagaaaacataagtaaacgagcttctgcttgagcttctaaagatagaggcacatgaacagtcatttgatccccatc

SEQ ID NO: 13866 - DNA, 622 bp, Glycine max
  unsure at all n locations
  Clone ID: jC-gmle01810071h06a1
gagcgagtacgnctgagagtcgtttgangtcatggacaccccaagctcggattcgctcgagcgcaaagatacctttaacgtgctataaatttaccaagaaaccagatattgcggggggcatttacagatccccctgctaatgccccactgcgaacctaaagttgcactcacaagaaactggcaacctaaaccagggaaaacaaccactttctccttatatcggtatgatgatttgaagccaccatcatctccttctccatctcagcctggtggtgggaaaccaacaaagatcagtgagacagtgccaaaaccaagtgcttcagatactccaagtagtgtgccaggagtagatggcatctctcagacaacatcgtcatctaaagtggagaagcctctttctccttatgtagcatatcctgacttaaagcctcccacatcaccatctcctaatgcaccaactgtatcagtttccacacctgctgcagctggggtgccggagatagacacaatatcaagcaatggaccggtccaactttcagcagcagatgaaccaaaggaagaacatcttcctgaacccaagtcaagaccactatcaccttataccatgtgagctgcttctgac

SEQ ID NO: 13867 - DNA, 440 bp, Glycine max
  Clone ID: jC-gmle01810071h06d1
ttcgtctttttttttttttttaatttttttttaaaaaaaccaagcaagaagaattaaatgcgctcaaagatacaggatttcccatcgagcccggaaagaaaacttacagggcaactgcacaaccactaatttctatatcattaaaaataaaaattgcttatcgaaaaaattctcccccctcctctgatttacatcagcacaatgcaggatatattttgaaatatcctcccctcaggggcctacatgttacaaacaacagttgaatttacaaaactaaaaacttacaagcgtctgggtgtcatcattggattctaagattacaaattatggaactgccatgatgattgcttgtagccattccatcccccatcagggtccttccttttaagaacatcactgtttaagtgaaagatccgggcttgctcttcaagatgggcctg

SEQ ID NO: 13868 - DNA, 448 bp, Glycine max
  Clone ID: jC-gmle01810071h07a1
tgaagataaaagccttagcctttccttcatctccaaacacaaagacatcatcatccggggctgctttcgtctccactgtcggagctgccaccagagctcttttgaacctgaatggttctggagctggagcttcagctcccagttcagccttctttgggaccagcttgaagaaggttattgcctcaagggtccccaacagcaaggtttccggcggaagcttcaagattgttgctgtagaagagaagaaagagattgaagagacccatcagaccgacaaggacagatggaagggtcttgcctatgatatctcagacgaccaacatgacatcacaagaggaaagggtttggttgacttcctttttcaagctccacaggatgttggaacttactatgcagtcatgagctcctacgagtacctcagcactggacttctccagtacttggacaa

SEQ ID NO: 13869 - DNA, 340 bp, Glycine max
  Clone ID: jC-gmle01810071h07d1
atatattgggggagggtttatacagtacaaaacccaaaaagataaaaatgaaaatgtccaagacaaagaacccctcagaataaatattgctgtagacaatcaaaaccttacatgatagaaaaataaagtttcttttaaaacaaaatccctttatgcatcctataaaaaatgttttaaattctaactaacattaaacatattgccttcatgcgaaaaggaaagattggccttgggctaacaaatttttttcactttaaaaggaaaaaccctatccactgcccttattaaggtagacaaagggggcataaaaatgcccaacccttgaaacaaaaaagtgccc

SEQ ID NO: 13870 - DNA, 360 bp, Glycine max
  Clone ID: jC-gmle01810071h08a1
atcctactcaacacctcgcccatgtcatcaatataacactgagagaggttgaatctgggggtgactcaaatttggtccaactattttaccccaaagtttttaagaaggttaaaagccatatttgaaaaacggtttaagcttcggaaaccaagatttatagaaaaggttgaggtccaagagtttaaacttggatcatgccctccaagtttgggtcttcaagggatgcgatggtcaacctatggtggtcagcgagttctaaaaacgagttttgattgggacacgagtgaaatgagcattttgatgcttgctaagctttccgatggaacagtcagaattgtgaataacagtgttcatattaat

SEQ ID NO: 13871 - DNA, 415 bp, Glycine max
  Clone ID: jC-gmle01810071h08d1
gggggcccaaaatcaatttaagggggccctttaactcaaaattttagggggagacactcccatttgaaaaaaattgtaaaatcatttcaaacttgggattttttttttgcccctaaaaaattgaaaattttaaaaatggtacacccaagtcccaaaaaaaattttagcacttggatcaacacaacctttaggaaaaaaaaaatttacttgccaaggttgttttgcccccaattaaaaaatggaaaaaaggtcccctggtaaaaacatccccgttggcatttccaagggccgccttgttcaaatacttggcaaccaaatgggcttttttgacatttttttgtttttggacaaacatgttaccatacgtaaagagctttttcaaaattattttgggctggtaaaggggggggggcca

SEQ ID NO: 13872 - DNA, 512 bp, Glycine max
  Clone ID: jC-gmle01810071h09a1
tccggacatgagagagagagagagattagtgaggtgtaagaaactggaaggagtaggtgttgttggcattctgacctaaagcttgtgtctttctgcttcgtttgtatcttctgctgcgtaaagaggatccctttctgattcttccgtaaatttcgtctctgaaactagggctaatacttcatctaccgatctctatattctggtttttccaagttcttggaaggaaaatgatgaagccatatgctcacagtggttgaatatagtacgtcagaagttcacacaagatatatatataattattattgggtaccacctgcagaatgtcattccgcagcatagttcgtgatgtaagggatagtttcgggagcttatctaggcgtagttttgatgtcagacttactgtgcatcataaaggaaaatctcaaggatcagtgcatgatttgcatgaccagcctctattaattcaaaatagccgcttggctagcttacccccagaattactatttgatatc

SEQ ID NO: 13873 - DNA, 497 bp, Glycine max
  Clone ID: jC-gmle01810071h10a1
atttccaccaaatcttgagggtctcttttgtattacacccttgcacttggcggcatgcacatctggttctgagagtgtagttgactctttaacaagtgacccacaggaggtaagttttttctccctattctagtactatatgccttatggaagaaatgacacgtcagttgttgtcctaagtaacagaaggaaaaaaaaaaattgggttacacagacacaggttcctgtggtagttattgtgggtaaatatcacttgttcttttccttgatggcagtggtactggggattttctattttggacctcaagtaaatgcatatttctctagctgtgatgtgtctctactagtcctggccatgtatttgtgttgttttcttgtttttaaggaaagggggcaaggggagatggcatattgaaaactaaaatatataatagttgaattactgtgttgtttgcactttagcatactttttaccctcaactgatggttatatttct

SEQ ID NO: 13874 - DNA, 523 bp, Glycine max
  unsure at all n locations
  Clone ID: jC-gmle01810071h10d1
gaaaaagtgatagttgcacactgttttatttattgatttatacatgcaaaagtagtcaaaataattgacatacttgtctacatcaaaagttgacgaggaaaagtaaaacctgcgtagctagctagctgtcccatgtacacttttatttaaaaattgaaacataaaaaaatcttgaaacgaagcagctaatagaatccattatttatatataacaataaactactatatacacatacaatgtattctagtttagtcccctaaaacacgagcaagttattctgggtgtcgtagcccaacttctccaaattcggctggactgcaaattgaatncataggtggtggtccacaagtcaatgccaaggtatcaggagatgcatttggaatatgctccgtcaggatactttcagtgatgaatcccacactgtattcccacccttctcttatgctntcttgtatcacgtaccacaccttcaacctatcatacttcttagcccactcatcaagctcttccttcagcaatata

SEQ ID NO: 13875 - DNA, 432 bp, Glycine max
  Clone ID: jC-gmle01810071h11a1
aaagctttctctcgtagcagaatgactcatcggcccgccaaactcgtctccgaacgggccgtatttggctcgagccaaccaggcggtccgagcacgtgtatatacacggcgaacggcgaccaccgcgtcctcggcctcgaagcaatccggcggttctcgagtggctgcgagcaaggtggacgaaggcgacaacgacgagctgaccgaagtcgacacagagacagaggaggaagaggaggagcggattgaggacaaggcacacctgaagaagctaggtagcgccggcgggtcggaggagactctggcgagcacgccgtcgcaaacaggagcgagggcagcaaagaagcgcaagctggacacgaagaccccttccgcagatgacgtgaatccgaccctcagtcgaacgcgaactgggaccgttttcaaagccat

SEQ ID NO: 13876 - DNA, 503 bp, Glycine max
  Clone ID: jC-gmle01810071h11d1
gatcaaaccaaatccttagcacaaccacattatattacagagagttggcatgcacaattgcaccataagtgcaagaggctgtctaaatgccatacatacagagagaggcaatgtgtccgtgcttgtgcctccccaaagttttaatttattattattattagattgggccagaggatcctcgtgaagtatgtcttagcaggagaatacataagcttaaggtttctcccaatcatgagatatatacattatgatatgatacaagattaagctggaacagcttcctgcactttgccgttgcttgagagtactaagctatcatagtaatcaaccagcaccttccatccaccagggcacataaatccatcaggaggactttctttgttcctggcagtgtgcgcatctttgtgcctgatatgaacaggaagtcctgaggccttgaagggtcaaagaatgccattttaccctgagtcttgtcatatgcagcaaccctggaagaagaatgt

SEQ ID NO: 13877 - DNA, 421 bp, Glycine max
  unsure at all n locations
  Clone ID: jC-gmle01810071h12a1
gggcgaggagctangnagtantcataaaaanttaagggcacaacagaagcnngaattcgtctcgaggctctacaaggataaggaacaaattgctctatcacacgaaggagaacaancagggggctttttgatcgaacgaggaacgggtggcccctctgccacaggattcaagactgacgtagatggcatagagcgagtgaatatttctcattcagaaacatgatgagatgaacaagaatgggtcattgactaccccttacaaggggataaccgagcgtttctctcgagtcattgctgaggagggaatcaactcgctgtggagaggaaatattgccaacggtttttgatacttccccaaataagctattaaaattcctttcaaagaacaattcaagcgaaagttccgaaattctaaagctaa

SEQ ID NO: 13878 - DNA, 526 bp, Glycine max
  Clone ID: jC-gmle01810071h12d1
cacccgttacaactctacatttaaaaataaaggtttattaaagttacactgtattatagacgtaaagaaactacaaatttttacactaaaaacagtttctcttttatacatactctctgttgtcatttgtcaacactacaaaaaatgaaaaagtaaggtagaatctttaatcattcacaaatatggagcaggctgcagagggcattctgtattctaagataatacatatgaaagatgttacatatataggctattcaaacagtggctggtactggagttgaaggagcaacacggttttcagctggaatttcaacaaactcagacaatatagcacggaattcatctccgctcagagtctccttctccagaaggacttccacaatcttgtcaatggcctcacggttgttccttatatgctccagtgcaatttcatatgcttcatctgagatcctcttgatggcagcatcaatgtcttctgcaagcctctctgacattgagttccttgccatcattctcatgatgacat

SEQ ID NO: 13879 - DNA, 391 bp, Glycine max
  Clone ID: jC-gmle01810072a01a1
caacaataaggataacagtactgtcgataacggtgatgttagggctaaggataatagcggtaacgcctctgttcagccggtgccggaggatgggaattcagcccgtccgcaagttaattcgatgttggatacggtttcagatgactcctccagcttgaaccgtcctcaagatgaaccttttagtgttccaggcgtgggagagcggtcgccgggaccggagaattgtgtcaggatcagtttggcttcgcggtctaagcaggagaagcgggagctgaggaggaggcttcagggtgagcttaatagggttaggagtttggtgaataggattgaggagaagttgggggtgcttggtgggtatggtaattctgatatgatggtggatcgtgggatt

SEQ ID NO: 13880 - DNA, 563 bp, Glycine max
  Clone ID: jC-gmle01810072a01d1
cgaacggggtctgagtcgatgcggagcaactggaaggaagggactgctttcttattcccactcctcacatcgagaaggaactgttgaagcaaataaagacgcatccatcccctcaaaccatatataaatggattaaagataacatctctcccaaacttcatgtagataaaggattcgcgaacatcttaatgactagcttcttacacgacattactagtgaagtaaacccccccagcgatgaaacagattcatcctctgcgtccttccaaagaacagtgagagcaggaaaaacaactactactatctttcaagccactaatgcagaaattccttcatgagcacagtgatctacaagtcagtgccctgtatgctctccaggtgcactgctataacagcaacttaccaaaaggcatgttacttcgcttttttgcgcacttctatgacatggaaattattgaagaagaagctctcttggcttggaaagaagatatgacgcaagagttttcgggaagaggctaagcttttgttcaggtgaatcagtggctaacctggttagaaactgc

SEQ ID NO: 13881 - DNA, 347 bp, Glycine max
  unsure at all n locations
  Clone ID: jC-gmle01810072a02a1
gaaggcatgaatagggatcattattnatgnttctcatggtgtgtttaccctcttcttgggcaaatcaagaaagagaaactcagcattacccggtcctctttggaatacagtttcagtgggttgcgtttgagttgacaactttggactttgcactccctattttccagttggatttctgagccaggcagcttgtttatatttttatagtaactatgcatgtatgttctatggtaatgtcgctatataacatgtatgagtgaatatatacatattctatcaaggaatgagggtgtgcacttccattcccttgctttttttaaaattatatataaatattttgaatgtgt

SEQ ID NO: 13882 - DNA, 458 bp, Glycine max
  Clone ID: jC-gmle01810072a02d1
ccaggtggcggaccgttttattgattttataagagcccctgacccacatcaaaccaaaattcaagacagcaactttactacaacatccaatagtttccctgcccattttatattgctaaaaaggttgcaatcaaacaacaaacactggtataaaaaaaagggagacattgagaatccaacaatttatcataaaaccaagtttatgacctttaaagccccacttagttcaattttaacaataggttcaaggcaaatttttggtaacttttccaaaacctggtgaccggggactaggggttagcattaacttgatctccttcccgggtgggctgaggctgctttcccctctcaattcagatactccagggctgggaatcctccttgctaactgagggctattggctggccttatatctcctgtagaagggggagttgaacttgttgttttggggctttga

SEQ ID NO: 13883 - DNA, 458 bp, Glycine max
  unsure at all n locations
  Clone ID: jC-gmle01810072a03a1
atggcatgatcgatctagtagactatctnaaaantttagngcnacgnacaacagctcggaatacgtatcgagggagaccaaaggcttttggatgcttcactcacttgacttgagaagagccagggctgcaggggtgaacattgtaccaaccagcactggagcccccaaggctgtgtctttagtgttgccacagatgaagggcaagcttaatggaatagcgctccgtgtgcctacacccaatgtttcagttgttgaccttgatgtgaatgttgagaagaagggtcttactgttgaagatgtgaatgcagcatttagaaaggcagctgagggtccacatgaaaggtgtgttggacgtgtgtgatgatccacttgtgtctattgactaccgctgctctgaagatttccttactattgactcctccttgactatggttatgggagatgacatggataaaggg

SEQ ID NO: 13884 - DNA, 410 bp, Glycine max
  Clone ID: jC-gmle01810072a03d1
ggaaggaaggtgccaataaaaaccttgtttccaattttttaattaacaaaatatctttcattgaaaaacaggggtttaattcccccactgatttattttcaaacactttggtcctagccgagacattttttacctcgggttctttttttttgaaaagaggtttattttaccagggcaaattttaggttatgttggttaaaaaacaaaattctgtgaagggggaacaatctcccctaataaaaaacaatggtgagaattttcaggcaagggggaatgttcaaatacctgcaaaccgccccctacttgctggtggaggggaaacttttgtttcaaacaaaaatttggggtaggggtttaacattccgcattgggggattaaactgatcacttaaatttggcgaagggggggg

SEQ ID NO: 13885 - DNA, 530 bp, Glycine max
  unsure at all n locations
  Clone ID: jC-gmle01810072a04d1
aggacgtggcgctagccgagatcaggatngctganaggcannaattaaccgagtcgacgagctcactgctcggtggccggccttcgttcttttttttggaaatccttgttgaaagatatatttattggttacatttacataagaagtgagatttgaacacgaggtcttctgaaacatagaagaggtaaaagtgtgttcaacatggagggactaatttaagagattagacacttgatgcgtattaagctagctggttaaatatcatgaagtcacacacatgtacttcgggaaataaaaatacggagccacacaagatacaatggaagacagaccaaccgaaacggctgatttcatatacaacaatttgtcgaagaacagcttcattccattgccattacgcacatgctggaaaacataactctggcgcaatagataagcatgcgcttactgtattaaacgtggactcccagcagctactgagcgatgcagccgtatctacagagaaacaagagatctctacgggggttggg

SEQ ID NO: 13886 - DNA, 336 bp, Glycine max
  Clone ID: jC-gmle01810072a05d1
gtccaaaacaaatatcttgttttttgaggggctaaacccaatattaaaaaaaatccccaaatacttttaaaaaattgaaaatctcaataaacattgatatgaagaaaactttgcaaatttaaccataaaacccatctatataataacaagtttttaattaaccccaaataaaaaaggggtataaaaatttattttataatagcttctagccattttcttttgacctaaaataaacatatttcactaagaatttgtatggacaattttgtaatttgtgcccaacacttttataacaaaactagcttccttaatttttggaaccaaaattaggaggtt

SEQ ID NO: 13887 - DNA, 415 bp, Glycine max
  Clone ID: jC-gmle01810072a06d1
ccctgttccaatctaattgcatttttaccaaccctgacaatacaacaaactcaaaactcaagaacttaaaataataaataaatgagtgaaaaaatgttgccagtgtgacaaataaattaaaacttgccttcatacaaatttcttctatctatctatattatctagggaaagaatgaaatcctaataataacaaaaattatttgaacaccgggcagacacaatattaacttctgttgagcaagcaccgggtcaattataaggaaaatttggtccttagggcttcctcagggcagatgctgcacccattacaattgccaggacaaggccaagaccagcaccaacagatgcccccacagcagcagaattcaatgaatttgccttagcttgagcatctctacttgcctcgatcgacatt

SEQ ID NO: 13888 - DNA, 256 bp, Glycine max
  Clone ID: jC-gmle01810072a07d1
tttttttttttttttttttttttttttttttttttttttttttattttttgtttttgggattttcctcataaaaatttaacaaaaaaacaatttcccaaaacaatatccccccaccaaaacaataaaaaaaaaaaaaaaaccaaggggaacaacccctacacaaaaacaaaacaaaaaacctcaaccccacacaaaacacaccccaaccaaaaaaaaaaaaaaacaaaacaaaaaccacaaaaaagtccgaacaac

SEQ ID NO: 13889 - DNA, 595 bp, Glycine max
  Clone ID: jC-gmle01810072a08d1
aacgtaaaattttatcttattagagaactcaaaacatgtgaacatgtactagtgtactactgatataaagcaaacaaacgactaaactgcacagttggagcaagcttaacaagtgaacaacactgtatagacagctgttttaagtattacagtccaagggagttgaagtgttaactgagcagattggtaagaaaatcaatctctcctcttctttttcttctcattcctctcagccgaattcttcaacataataacaagaatccggacaaaaactgcaaccaaatcggtaaacaaggtcaaggcatgctttacatagtccagatcgcccaagtgtgccctctcaactatttcttgggtgtctactacaatgtaacctacaaacaccaaaagcccaaagtacaacttaaacttaaagagagctgttgaacctccaagatggaaaaagcaaagtgcaaccagagaaggatggacaatccagaaaaaaccaagccaccaaggtacaggtactccctacgcctagcaaccaaagctgttctgaaaacatgcaaagccaagatgtttccacaatgccctaaaataggcttgatcgatttga

SEQ ID NO: 13890 - DNA, 524 bp, Glycine max
  Clone ID: jC-gmle01810072a10d1
gggaagtatttcttacataacaaattccttaatgattcacaggcaactggacattaagactaatccttaaacaagtattcaaaactgcacatcagtacttacacataaaatagacactgctatgaatctatcaaatataagaagagtaaagatgcagactttataagttcaaacaaaagaagcatttcctgaaaaaaacctgacacacatactatttgttatttacaactccaagaaagcttaattctgtgaggcagtggcctgaaggagaccatcccgaatttgcacggcaatgtctttaactgccccaggaccgtgaggtatgaacacagacgaggaccttgacgatgctcctatctctttcatggtgtcaaagtattgagtcaccagcaccatgtccatgacatctttagctgatgtcccgggcacgttctcagagaaagcaagcacgctgtccctcagtccatccacaatggcctgacgttggcgagcgataccgagtcctgacagatatttggattctg

SEQ ID NO: 13891 - DNA, 450 bp, Glycine max
  Clone ID: jC-gmle01810072a11d1
gactatggtttatttatttaatttatataatccaattacggggataattgcaaattattaaggggtgcacttgggcaacaccctgagaatatagaataacttaattttaaataatttatataatccagttacaaggatttataatacagcagtactgaatttaatcacttcaaaattaagttatgctatattctcaaggtgtctaggtaagactttccatcaagtttacgagcaaataggttcttcaaaaactcctttaattcgattcttttgaaccgtgctggtgttttttcagtgatcaagcttattgcaggacctatcaccccatcatgttttgatgtgtggaatgttgcaattgaaatcctttcttttgcagagttcaccattgcacgatgctcaacacttcggtatattccattacttataatctcgagcatgtccccaatgttt

SEQ ID NO: 13892 - DNA, 500 bp, Glycine max
  Clone ID: jC-gmle01810072a12d1
ggaaaaccttttcaatactatgtaagatctttattggctaatagcttctatatatatatatatataaataacaacatcaaagattgaacatatggccttaaataatgggaaaaaatggttcaggcttgatacttattttttcaagcaccaggcagggataatagaagaacaatttgagcaacactcgataagagtgtggacttataaaatgccataacccagaagcgagagacactgcaaacgattttgatgccactgaatccagaacttaatgccaattccatgaattcatgttgggttctctcttttcctcctgagttttgagtcatcattaagagggcagcttggaaaccactcttagcaggaactgtgctctcgggcaaaatgggaagaattaagtccacaacattcactttttcatcactaggaatagctttatgacaattgttcagcaacgttaaactttggtcattactccaatcgtgaaagatccactgaaa

SEQ ID NO: 13893 - DNA, 460 bp, Glycine max
  Clone ID: jC-gmle01810072b01a1
ggcagaaagcaagctcatcctaagattataaatggagcagcctcctccatggctggtcttccccatccttggctggcaaggccgccaagctgggcccatcagcccccgaagtcgggagggtcagcatgaggaagaccgtcaccaagcaggcctcctccggaagcccatggtacggcccagaccgcgtcaagtacttgggcccattctctggcgagcccccgtcctacctcactggcgagatcccaggcgactacggctgggacactgctgggctttcggccgacccagaaaccttcgccagaaaccgcgagctcgaagtgatccactccaggtgggccatgctcggggccttgggctgcgtcttccccgaactgttgtcccgcaacggggacaaagttggagaagcttggtggttcaaggccgggtcccaaaatttcagcgagggtgggctggactactt

SEQ ID NO: 13894 - DNA, 276 bp, Glycine max
  Clone ID: jC-gmle01810072b01d1
ttctttcttttttttttttttctatattttttttttcacaccccataaaaaaaaagtgaaatgggtatattttacaactgttaaacctcttacaaaaatcccaacattccacacacaaaaaataaattaagcaccccatattaccttttaacaaaaaaacccacaaaactccacgataacaaatatctgaacaaaaaaaaagttgtaaacggacactaatgcttatttctttactaaataaagttaaaatactttttatcaaaaaattctaaattg

SEQ ID NO: 13895 - DNA, 451 bp, Glycine max
  Clone ID: jC-gmle01810072b02a1
ggagaccagaggctttggatgctcataccgtgacttgagaagagccagggctgcaggactgaacattgtcccaaccagcactggagccgccaaggctgtgtctctagtgttgccacagctgaagggcaagcttaatggaatagcgctccgtgtgcctacacccaatgtttcagttgttgaccttgttgtgaatgttgagaagaagggtcttactgctgaagatgtgaatgcagcattcagaaaggcagctgagggtccactgaaaggtgtgttggacgtgtgtgatgttccacttgtgtctatcgacttccgctgctctgatgtttcctctactattgactcctccttgactatggtcatgggagatgacatggttaaggtggttgcttggtatgacaatgaatggggttacagccaaagggtggtggatttggcacacctagtagcaagc

SEQ ID NO: 13896 - DNA, 470 bp, Glycine max
  Clone ID: jC-gmle01810072b02d1
aaaccaaatccttcttagcacaaccacattcattatattacagagagttggcatgcacaattgcaccataagtgcaagaggctgtctaatgccatacatacagagagaggcaatgtatctgtgcctgtgcctacccagagttttaattattattattattattaaattgggccaggagtatgtatcttagcaggagaatacataaagcttaaggtttctcccaatcatgagatatacattataatacaagattaagctggaacagcttccggcactttgccattgcttgagagtactaagctatcatagtattcaaccagtaccttccaaccaccagggcacataaatccatcaggagggctttctttgttccttgccagtgcgcgcatctttgagcctgatatgaacaggaagtcctgaggccttgaagggtcaaagaatgccattttaccctgagtcttgtcatatgc

SEQ ID NO: 13897 - DNA, 506 bp, Glycine max
  Clone ID: jC-gmle01810072b03a1
aaacaagtagcagaaatagtatcaaaattgtctgttgaagaagctaaatttcgtgatatacaggataggaaggtggagttgcagcaagcacttgtcaaaatggtacaaggaggcagtgcagatggtatccttcaggtccgtgctgaacgcatacagtcggatcttgaggagttatttaaggctctggctgaacggtgcaagaaacatgggatagatgtgaagtcaattacaatggttcagcttcctgctggttggcaacctggaattccagagggagcagctctttgggatgaagagtgggataaatttgaggatgaaggatttgctaatgatctcacttttgcatcttcaaaaccgaatcctgcatttattgatggagaacaaaatttatctgatgataattctgttcatggttcacctgtgaatgcaaatgggaagcaagaaaattctgctaatggtgattatacagttgaggatgaatcctatgcacacagtgaagatgactt

SEQ ID NO: 13898 - DNA, 558 bp, Glycine max
  Clone ID: jC-gmle01810072b03d1
ggaaatccttgttgaaatatatatttattggttacatttacataagaggtgagatatgaacacgaggtcttctgaaaaacagaagaggtaaaagtgtgttcaacatggagggactaataaaagagattagacacttgatgcgtattaagctagctttttaaatatcatgatgtcacaaaaatgtaattcaagaaataaatctacgtagtttacacaagatacaatcgtagacagaccaaccgtaacggctgatttcatatccaacaatttggcgaagtcgaacttcattccatttccatcacgtacatgctggagaacatagctctggtgcaatagataagcatgtgcttcctgtattaaatgtgtactcccagcaactactgtgcgatgcagccgtatcgagagagaaacaggagatctctacaggggttggtgccttgtctgtacgataaagatgtcttttccaacaagagattcttccacatcctgtgggcaaccaaatctttttccaggaaaaacccaactgcacaaagacgttgaccaagttgttcaccgaaa

SEQ ID NO: 13899 - DNA, 526 bp, Glycine max
  Clone ID: jC-gmle01810072b04d1
ggaaatccttggtgaaagatatatttattggttacatttacataagaaatgagatatgaacacgaggtcttctgaaaaacagaagaggtaaaagtgtgttcaacatggagggactaataaaagagattagacacttgatgcgtattaagctagctttttaaatatcatgatgtcacaaaaatgtaattcaagaaataaatctacgtagtttacacaagatacaatcgtagacagaccaaccgtaacggctgatttcatatccaacaatttgtcgaagtcgaacttcattccatttccatcacgtacatgctggagaacatagctctggtgcaatagataagcatgtgcttcctgtattaaatgtgtactcccagcaactacggtgcgatgcagccgtatcgagagagaaacaggagatctctacaggggttggggccttgtctgtacgataaagatgtctttttcaacaagacatccttccacatcctgtgggcaaccaaactttctctccaggaaaaacccaact

SEQ ID NO: 13900 - DNA, 592 bp, Glycine max
  unsure at all n locations
  Clone ID: jC-gmle01810072b05d1
gaactgataatggaaacacttttattaagacttcaaatcacagcattcaagataatacaatacgcaacactttttagaaagccttataactataaactataaaagctttgcccagatgaaattacactgcaggcaaatttttcattcacctttagcttagttatcttcattgtcgcccaaattattctttgtcacatctttgtattagccctggatggcaacaccaaggggagcagcatccataggtattatcttctcaatttctacacccttgttgttctggttttcataggctgaaatgtgcactccaagtgctgctctaccagagggatcaaggttgttagaccaagcagcatcccactcaacagctttggctgtgctacatgcaacacttgctcctccaggaacagtgagcctagctgagttctgagggaagaacctctcaaagatcattctgtagtaatatgcttccttggtttttggggtgttgtgggggtaaatgttaccagcattaagcatcattttttcagtcacatgtnttgcagcatgggcctttaggccatcaatccaactatagccaactccatcactg

SEQ ID NO: 13901 - DNA, 592 bp, Glycine max
  Clone ID: jC-gmle01810072b06d1
ggatattcaaacgaagccctatttcttgtcaaccagggcctctgaaaatttttaagtgcatagcatattttaactgtcatggtaaattattattacctacttcactgttccaaagaacaatctgattatgttttacagcacggaaaggagcgcagataagcaaagaaatggatttgtattatatactgtacatgatgctccacatccatgcaaaggagaaattttttccatcaagttgcctgcaataattctctgatatcgtacccttgaagctgcagaaaagtaagaaataatataactcctgagttccaaaaagaatggatagtgatgggagtgagaaggttgtgagtttgagcatatgaaaaccccaaagcagtccctagaacaaacaattggggaaattctccaggagtgagatgtgcaagggcaaaaacagcagcactaatgacaacagcaactggcgtaggaacccacttagtgagggaagtcataaaaaatccccgaaaacagtctcctaaggagtggagcagaacacctgtgatgcccaccagcaagcagtgctgagatttgagatcctattaacggaagcagc

SEQ ID NO: 13902 - DNA, 537 bp, Glycine max
  Clone ID: jC-gmle01810072b07d1
aataaattattttttttaaagactaatttaatattagaatggggtataaacaaaattctgcatcactcatgcagagtcaaaatatcaatgaaaagcaacaaatccaaaccaaaacatgtttagagaaacagcttggaaggttctgaagctgccacaaattattagactaaccatgggactctaattattcattctaaggggggcccaagtttggatgaaatccagagctataaatgctacactgacttaccgtggcatattaaaaatgggggaaagctcactcctcctatctcactttgaactaatgtaccgatttttggtggaaaacttaaaaagcatataatgcttgtaaggcttttcttgggtcacaattgatgaagggaaattaggatgatttactgaatcagggaatgcttgagactccaaacatagtcctgcatgagcattgtacacatatccaccttttcccttaaatccttgatatatgtaccagtgtaaaattgcaaaccaggagcatttgtgacaactccacactct

SEQ ID NO: 13903 - DNA, 496 bp, Glycine max
  unsure at all n locations
  Clone ID: jC-gmle01810072b08d1
aacatgcatcttaaaagaaatatttttttaattctttaattaatgtctaaagacattaattaacatttcccttataatataagaaatctctagccattgaaactttttagcttataaaaaaataaaagaaaaaattaaaggaaattttcacacataagaactagttgaattgacctactaggctccactccagccttgaacaaatcaatcatcacctcaaaaccattgccattcatgtaaaactatcatcatctatcaaatattaattgccacaagtcaaattccctctacaatctcttgaagcctcatgcagaaactgtcaacataagatgactccaaatctttgttaagcagcaactctctgatcctagcatgattagccctaacccttttgctggtttcattctcacaatccatcacaatgctcacagctttacacacactctccttggtgtacattccatcctcatcacccttctncacttccacaccaacc

SEQ ID NO: 13904 - DNA, 289 bp, Glycine max
  Clone ID: jC-gmle01810072b09d1
ttttttttttttttttttttaatttttttttacttttctaattctttatttatttacaggttttgggaaacaaccaaaaaagcttattcaacatttcccagcaaaaccccacattaaacacattagatttatacgcccaaaaccctaaaaaataaccaatgggtccagtttaaatccttaaaaaaaaaaaactaacaaaccccaaaaggtattggcaaaatggatacccccttggaacaaaaaactggcccaaaaaatatttcctggccaccttaggccattggtggac

SEQ ID NO: 13905 - DNA, 321 bp, Glycine max
  unsure at all n locations
  Clone ID: jC-gmle01810072b10d1
agaganacgaggaatactattgcanttctgaggacaatatgaggtcgatgcactcactcgtaagctcgcaacctttctcgagccttaatatccaagttttttttacttttcaaattccttaatgatttacgggctactgagacactaacactaatccttaaacaagatttcaaaactgcacatcactacttacacataaaatatacactgctatgaatctatcaaatataagaagagtcaagattcaaactttataagttcaaacaaaacaagcccctcctgagaaaaaacctaacccacatcctatttgttaaatacaac

SEQ ID NO: 13906 - DNA, 552 bp, Glycine max
  Clone ID: jC-gmle01810072b11d1
ggaaaaccttcacaatacgaggtaagatctttattggctaatatcttttatatatatatatatataaataacaacaacaaagattgaacatatgtccttagataattggtaaataatgttcgagcatgatactattttttcaagcaacaagcaaggataatagaagaacaatttgagcaacactcgataagtgtgtttacttataaaattccataacccagaagccagagacactgcaaacgattttgatgccactgaatccagaacttaatgccaattccatgaattcatgttgggttctctcttttcctcctgagttttgagtcatcattaagaggtcagcttggaaaccactcttagcagtaactgtgctctcgggcaaaatgggaagaattaagtccacaacaatcacttttccatcactaggaatagctttatgacaattcttcaacaacttcaagcattgttcatcactccaatcgtgaagtatccactgaaaaaattggtatagaaaagccgtcacataatttaagatgtataagaaatttgacg

SEQ ID NO: 13907 - DNA, 511 bp, Glycine max
  Clone ID: jC-gmle01810072b12d1
tttttttttttttttggaaaaccttcacaatacgttgtaagatctttattggctaatagcttttatatatatatatatataaataacaacaacaaagattgaacatatgtccttagataattggtaaataatgttcgagcatgatactattttttcaagcaacaagcaaggataatagaagaacaatttgagcaacactcgataagtgtgtttacttataaaattccataacccagaagccagagacactgcaaacgattttgatgccactgaatccagaacttaatgccaattccatgaattcatgtggggttctctcttttcctcctgagttttgagtcatcattaagaggtcagcttggaaaccactcttagcagtaactgtgctctcgggcaaaatgggaagaattaagtccacaacaatcacttttccattactaggaatagctttatgacaattcttcaacaactttaagctttgttcatcactccaatcgtgaagtttccactg

SEQ ID NO: 13908 - DNA, 494 bp, Glycine max
  unsure at all n locations
  Clone ID: jC-gmle01810072c01a1
gttattgtaactaactgggtggatcntcaataactttggctgggtgcatggtgtaatgagggctttgattagcttctacatgtggttaccgtttcctgagttgattcaaaggggaagctttagtgtttatcactaggtggtgacttttgatgctaaatgtaaaaatgtctctctagttgagttatgctatgacagctatgcagttgagttggtgcatataagagtgggcagctagttaaacatgttattcgtatttgattactgattgttcactggattgagatatctttatttatattctgtcaactatagtactgtattgtgcatgcttcatgatcatacctctagattggaatggttaatacatccaccaattcctacattattattcttgatgttgagatttctctacgaaacagtggttggaaaattttatgactggaggggacttcttcaaaacaaaacttattaaatgctatgatgtatctgagatt

SEQ ID NO: 13909 - DNA, 554 bp, Glycine max
  Clone ID: jC-gmle01810072c01d1
aaaatatctttagctgtattcaattaccaagttctcattggatcattggccacaaaaacaaaagcgccacacaattattgaaaatactatctttcaagcaaaattcgcaaaataataatttgaaccaacaccgatgcaaaatcctattagagcaaaaatacatcgatgcaaggaccaaataacagcattacaacattcacgggcaaaaccacaaacaaaactaacagaaattaaatctaaagtagcattgttcacaagagaaaataaattcgactaagttcaaagtaaaataattcatgaaacaaatttaaagcttgtcttcaaactcggagagaggagtcatctgttccttcaagcccttcctcttgcgaatgtcagtgacaagctgtgcagcttgtgatccagcctccaatgggtcagaagacatcatgtcccagtgatcaaaaacacattgtgggaaggcctggcctgatgttgcagccctcaatgtgctcgagaaaccaaaggactcgatgacagggaggtatgccttgaagttgtatagtggggaacct

SEQ ID NO: 13910 - DNA, 455 bp, Glycine max
  unsure at all n locations
  Clone ID: jC-gmle01810072c02a1
gttaaggaaagtttgacaacctaagctaggttgancaaggatgttagggtgacaagggtagaatgttgtagtctatgaccgtgttgccgactaccatgctgtctggtgactggagaataccgttggactgcaaacatggaaaggatcatgaaagctcaagccctaagggacaacatcatggcaggatacatgtcaagcaagaagacaatggagatcaaccctgagaacccaattatggaggagctcacgaagcgtgcggatgctgacaagaacgacaaattcgtgaaggaccttgttctgttgctgttcgagactgctcttctcacttctggtttcagacttgacgaacccaacacttttggaaacaggatccacagaatgttgaaacttggactgagcattcgccaggatgcagttgaagctgatgctgatatccccccactggaggaggaggc

SEQ ID NO: 13911 - DNA, 496 bp, Glycine max
  Clone ID: jC-gmle01810072c02d1
agcagattccattgagagggcaaataaatgcttcacatggtcattatgactcttcttttttctagggcgacactttcaacacacatcggcggccaggggatgaggaacaaaatacatgcagcagagcctggccaaaattctgtaaggctccactcctttcaaaacccacatcccacaggtttgggttttaaaaaagaaaggaaaaaaaggtacttaaaaaacctatatttcatttttatagacgaaacagctcggcctcaagccctgcaagcgttatgaggccggcacaaagctacaatacgcaggcttctggacataggggcagcaatgggggaaatatttgtacagagggttttctcacataaaatagcttagtgctttttttactcttgaaccaccttcaccggatagttcgttccattgttgaagctcggtcatatttatggattcagatgaaacacttgcacataccttgtgatgagcatatttgaaatct

SEQ ID NO: 13912 - DNA, 311 bp, Glycine max
  unsure at all n locations
  Clone ID: jC-gmle01810072c03a1
ctctttctctctctctctctctatctatttantttattttgctctctctaaaatcctgggggagaacgtgcacagcaatggctacagaggccagctctctgattagggtgatgggtggcggctacaaggaggagcagcatcggactgtggggaatgagtcacacggtgagaaatcaacggctctcattactcgggacttgctcggtgggtcctcgattgaatcacaggaattggacctcgatttgcaggttcctagtggctgggagaagagactcgaccttcaggtttgttcaaatttcttttttctttcc

SEQ ID NO: 13913 - DNA, 626 bp, Glycine max
  unsure at all n locations
  Clone ID: jC-gmle01810072c03d1
gtnaaaaaaaggaaaggagacttaggcgatgcnaanctnattaccggtacgacagctactactcggggccgcccttttttttttttttttgaaatgaatgtaagtattaaacaatactttcttttttggaccaattgggaattagtcttcctctaatttagtatatcactaaaattgcaatatatcatgtatctcattttcatacatacaaaatagaaatccacatttttcttttcctttttaatatcctctctggcacgatattgctacatctgttagcaaatatggaatacaactcaatgtgaaatggttgggagccagttttaaaatgatcccattatctatgctcttggccactgtggactcactacctcaagtgtgctaaagattaatcgcattctgctagcaacaactgacggtttctcagcctgacccatcacagccggctgttctaactgaagagtctttacaggaagccaagccattcccttcataaaatatgcatttgctataagggcacaaaagcctttccactgaagtctaacttcatctgacactggaggtgtagatgaccatctaacaatagttggttggggtgtacacaacatggtgatgaatataatgct

SEQ ID NO: 13914 - DNA, 499 bp, Glycine max
  Clone ID: jC-gmle01810072c04d1
cattagttcttatccattaatttccattgaagtccgaaaacagaaaccaaaaatacaggatgatgaaatctcaaaaagcaaaaacaaatgggaatgtagtttaagtacaaacaaacaaagtggggtggcggctacaaatgctttgcaaatttttcacacttagaagcctgggggcttgtaggcgatgaagctgatgcactgcacttggcgaacgttgtcgaatccgatgatacggatgaagccgttggggtatgcagtcttagcctcttgaagctccttcaacacctgagaagcatcagtgcaaccaaacataggcagcttccacatggtccagtagcgtccatcgtagtatcctggtgacctgttgtgctcacggtacacgaaaccgtgctccaactcgaattccaagcaaggaatctatcccttcctaagaaggtattctacttcctttgccaattgtgcataatcaaggtctggcaggtgggaaagagtctcaaac

SEQ ID NO: 13915 - DNA, 64 bp, Glycine max
  unsure at all n locations
  Clone ID: jC-gmle01810072c05d1
gggaagtgcatgccccntgtgctatntgnagnnctctctggaannaataaccgggaaacgacct

SEQ ID NO: 13916 - DNA, 346 bp, Glycine max
  Clone ID: jC-gmle01810072c06d1
cattggacacagatacatgcgtgaagcggggtggctacatgtggaaaaattatactgttcgtttggcaaaattgcggatttcgcgccactttttagttcgcctggttcaggccgaacgctaagatgtggtctttcatcagcgacaggttgtagggcgtcacgtaaagatcagtgtctaccagggcgacaaagtctgttccattcacaatgatgttgatggcctcgaagaggaagccctcggggtggacagaaattcccgtgttttcgcctgtgacagtgacaggcgagtacttgactttgagctgctagatgaaagcggtgaacgcgggggtggtgccgttgatca

SEQ ID NO: 13917 - DNA, 420 bp, Glycine max
  Clone ID: jC-gmle01810072c07d1
gctggaatcaattgtttattcaaatgtacaacgcaagaaaaagaaaaagaaatccatgaattgtaaattaatttatttaattaattatttctttacttttccaactttttttaatagcccacgattttcaggcggctaatataatataaccactacgcaacaacgcgggactacagaaaaagggtccacccgcgttatcctgtgatgccgccgcaccggatcgcgctggtcgccggaatattcctccgccggaaaactgccgagcacttcggcaactcgccgagatcggcgaagagcgactcgtcctcttttttcatcggcaccgccacgttatttacctcgccgcagatcgggctctctaggacgccggtggacgctacgtcatcgaaccagcctaagtggtggtggtggtggctgaaa

SEQ ID NO: 13918 - DNA, 420 bp, Glycine max
  Clone ID: jC-gmle01810072c08d1
gctgcaatcaattgtttattcaaatgtacaacgcaagaaaaagaaaaagaaatccatgaattgtaaattaatttatttaattaattatttctttacttttccaactttttttaatagcccacgattttcaggcggctaatataatataaccactacgcaacaacgcgggactacagaaaaagggtccacccgcgttatcctgtgatgccgccgcaccggatcgcgctggtcgccggaatattcctccgccggaaaactgccgagcactccggcaactcgccgagatcggcgaagagcgactcgtccttttctttcatcggcaccgccacgttatctacctcgccgcagatcgggctttttaggacgccggtggacgctacgttatcgaaccaacctaagtggtggtggtggtggctgaaa

SEQ ID NO: 13919 - DNA, 313 bp, Glycine max
  Clone ID: jC-gmle01810072c09d1
agcaatatatgcaagccaatgcgagtcaattaccatgattgatgtctcaaaatgacaaatcatattactagtatgtagactggacacaagcccacgattccacctccccatcaaacaaaatttgggcttcatatgtttaaagggatactaaatgtacatttacactttttgatcaatctaaatgtatttactagcacctgttatctacacacctcaacagaagaacatggaactcctgacattcctatgcaacattggaagctcaagggtgggaatgtttccctctgaagcaggacttaaacctgtttttgtt

SEQ ID NO: 13920 - DNA, 445 bp, Glycine max
  Clone ID: jC-gmle01810072c10d1
aacaaattagattcatgatttgcgattaatcttgtatacctgtatatatatatgtacatacacaataaactcaactttataatggaagccacaatccttaactttagtactgcagctgttttatgataaatagcttttgtaacattaagaaatggagtctgtaactgcctaaattcagtgtaacaggctgatgtactttcatgatatacaccatatgttcaaagattgctagaataatgcatcgtattcacctgcaggcttagtcacttgatcagcctttcatttcaccaagaaatttctatagaagcaggcatctactgcgagctttaatggcagaaaatgtgccatttacttcatccaaaagtttaaggaaacatatgattcatgttcaagcaaccacctccacagtggaactgacccttccttactgtaggggaaactcctt

SEQ ID NO: 13921 - DNA, 447 bp, Glycine max
  Clone ID: jC-gmle01810072c11d1
agatcgcaagacgctattcattgcattccgatgaccatttatgaggttataccgcctcaccactcagctctcaatcttactttaggcccttttgatgcccttttttcctttttaatgtatctcacaccatcagggctgagggcagtgataaatttcaaattccctcccttccactctgtatttctctcgaactcaagcgtcttaagcattaaaccacaacatttcccctcatgtaataatatcgtcttcaatcttcatctaagctatgtctttcacctaccacattccatgatgttttacccttattgaagtattaatcttacatgaaagagagttgctgccattattatcacatcagtgatatttctttcttcagtaattgatgcctaccgttaaacaatttatacaattacatattcaacaatggaaaggatatttcatccacta

SEQ ID NO: 13922 - DNA, 379 bp, Glycine max
  Clone ID: jC-gmle01810072c12d1
gaagtaactgttaatctctttagtttgggttgaacaccctcgtcaagaagggccaaaatcgcttcgcaagttacaagacatcacttgacatcaaaaaataaaatacaagacatctcaacataaagtaattcaagcttgtattatacaaccgcatttaaagacagttttgtaaagaataataataaaaaagacaaaattagtaaagccgacctctgctatctatgccttactatacctacaagttttttgtcagtccgttatcccggcaccattatccacataaacctcgcccattcctgaaatttcttcctcctcactgtcttcatcaccactgacctcttcattatcttggcgtaagctagccatgtgctcagcaagc

SEQ ID NO: 13923 - DNA, 413 bp, Glycine max
  Clone ID: jC-gmle01810072d02a1
gttttggttagtttcattattgtagttcctaaactaaggctaagccatggcaggggatccttttgcatctatctcaggccctccccgcacgtgctgtgtaccttcatggctcttcttcttctgaccgtgtctcactctccttcccatcattctctggcctcaagtcacattctacatgcaaagcagcagcagccacgtcctcgcgtagaaggggtgcttgtccatccaccaacgttgttcgagccgctgcggttgagacactcgaccaaaccaccgaggtttctctggtggagaaatccgtcaacaccattcggtttttggccattgatgcagttgaaaaggccaactctggacaccctgttctccccatggggcgtgctacagtgggacacattttctacgatgagattatg

SEQ ID NO: 13924 - DNA, 420 bp, Glycine max
  Clone ID: jC-gmle01810072d03a1
gtttaggtttagttgcattaaaacgtagtcattaaacttaaggcttaagccatggcaggggcatactttgtgcatatatctcaggccattctcgcacgtgctgtgtaccttcatggctcatctacatgggacagagtattactcttctttccatcattatctggccataagtgacattctacatgcaaagcagcagctgccacgatctcacgtaaaaggggtgctggtccatccaccaacggtgtacaagccgctgcggctgagacacttgatcaaaccaccgaggattctatggaggagaaatacgtcaacaccatttggcttgtggacattgatgcatgtgataaggccaacagtggtcaccctgttgtaccaatggggtgtgctacaatggggcacattgtctacgaagagataatg

SEQ ID NO: 13925 - DNA, 450 bp, Glycine max
  Clone ID: jC-gmle01810072d03d1
aaaaaaatacctgtgtcataatatatatatcgggggcaaggcacggttttagaccttttaatgcagtcttaagaacctagcgttcgttacaaccaaggtgcaaactgagaaataaaactacagtttagaggagagcaatgaaaatcactctactctaacacacagttttatctaggccccgaaaggaagccttgtgctttgcgggggcaagtggcatggcccttttccgaatctgtctcacagcaaatgcacggggtatataattttgaccaccaaactcgcctccaggggaatcagaactacagggcttatttactggactgtgaccccaagaaagttttttctggctggtggccaattgcgtgggcattggatgcgcgaatagtttcctcagcattcttactgaaaggaaattgttcaaatccacaccctctacccactggaatgggg

SEQ ID NO: 13926 - DNA, 517 bp, Glycine max
  Clone ID: jC-gmle01810072d04d1
atagatacacgtcgtcattaatattaaacagtactgttggcatcataaattctttcggaataattatacaaaagtgaccagtgaaaacccgatctgccagttgcccactgaataaaaacacacatcatattactatgggatgtcatacatgcattgtaatgagtggatattccaaagcaattggtccctttatccctccttaatccttatgccggaaatggcaccatcccttgcaaatgagtatagcttcttcagaaatagaataatccaaaggtagttgcagtatttatttgtcaaactataaaagtaaggacccttattcccaatcctagaagggtcccgatttgatttacaaaggtgggacaagatatgtatatacaagttcaaccatgtaacataatgaaacaataatcatactttggactttactaatgcacattacagggagatattatacactgaaacccttttgcagagaacttcaaggattggaaggaatactgacacaagcttgtgc

SEQ ID NO: 13927 - DNA, 464 bp, Glycine max
  Clone ID: jC-gmle01810072d05d1
cagaggacacagatacatgcgtgaagctaggtagctacatgtggaagaattatactgtttgtgtggcagaattgcggatttcgcgccacttcttagttcgcctggtacaggccgaacgcgaagatgtggtcgttcagcagcgacaggttgtagggcgtcacgtaaagatcagtgtcgaccagggcgacaaagtctgttccattcacgatgttgttgatgtcctcgaagaggaagccctcggggtggacagtagttcccgtgttctcgccagtgacagtgacaggcgagtacgtgacgttgagctgcgagatgaaagcggcgaacgcgggggtggtgccgttgatcaatccgccgatcgaggtgttgtacagaccatcgtacgagacagtctcttcgggagccgaccagctgagctgcagctcatctcccggcttggaaagcgtcctgcggttgtgggtgatggc

SEQ ID NO: 13928 - DNA, 469 bp, Glycine max
  Clone ID: jC-gmle01810072d06d1
cagaggacacagatacatgcgtgaagctaggtagctacatgtggaagaattatactgtttgtgtggcagaattgcggatttcgcgccacttcttagttcgcctggtacaggccgaacgcgaagatgtggtcgttcagcagcgacaggttgtagggcgtcacgtaaagatcagtgtcgaccagggcgacaaagtctgttccattcacgatgttgttgatgtcctcgaagaggaagccctcggggtggacagtagttcccgtgttctcgccagtgacagtgacaggcgagtacgtgacgttgagctgcgagatgaaagcggcgaacgcgggggtggtgccgttgatcaatccgccgatcgaggtgttgtacagaccatcgtacgagacagtctctccgggagccgaccagctgagctgcagctcatctcccggcttggagagcgtcgtgctggtgtgggtgatggccgcct

SEQ ID NO: 13929 - DNA, 396 bp, Glycine max
  Clone ID: jC-gmle01810072d07d1
ctggtatgtaataagaacaactacttggtgctcattttaattccctcctttagcctttctacagaataaacagagtcaaagttcatgttgttgaagggaccattgactattcacttatggagcaacctggtcttggagctcccaagagtgagctcaagatcatctgttccaaaagaagcttcatggatcctctctcctttccaggcattcactaaacctgatgagctgcttccaaaggcaaattcatttgaaactgcttcagccatttggaatgtcataagtgtattcggagcctgcagctacggctggagaacatgttccacttgcccctggtgtcgaccacattcgggaaccgctgccaaccatagcatcttccttgaggccaaaagggttgga

SEQ ID NO: 13930 - DNA, 536 bp, Glycine max
  Clone ID: jC-gmle01810072d08d1
gaatatatccaaaaggaagttatatatttcaacaaatagtaaataaccatatagttctgtaacgttgttcagatagtcgtaaataccgaaaggaaacattgtctggtaatgctaggtaattgaattacaacatagaagtactttagcatagacgacacataataatttcaccaacaaacaattctaaaataagctactaaactaccatcttcaattggagtcactatcatcccaagccaactatttttttattatcaactctcatacttttttataaggcctaaagtagaaacatatctcatctccaacactgaaggcattgtctctcaaatattggtaccaaggttcagcaacacattgtaggcctttttgagcatcgtgcatggtactaaaatctgacagcccaagtctttcccaataattcatcaaaatagggagggaaaacctttgatctcatcgccacttgcaatctactcttggcgacattgatcgatcgttttgccaaagattttgatacatgttgcatcccaaaaatg

SEQ ID NO: 13931 - DNA, 402 bp, Glycine max
  Clone ID: jC-gmle01810072d10d1
ggttgaaaatacaaagcattggcgggcaaactaattgcaaaaccagacgtcattacaatttacatatcattttgtaagacattttggaagccttcaaaagtctctgccactcaactagaagggagaagttctttttctccaaatcatcaacacatttctgcaagatgaaaatttgaacatgagcatgtttagctctgtccagttcctcctcatattcctttttcttacaatttgcatcttcttgtagaatatgaatttgtaattccttttcagccaattcattttcattcaatttcaaaactctggaattctcttccctctcagaatataaggaaactagtagctcttctaccttttgaagtgcagactcccttttttctttttgttccaaaagcttcaatt

SEQ ID NO: 13932 - DNA, 338 bp, Glycine max
  Clone ID: jC-gmle01810072d11d1
gaagtaacttttaatatttttacgctgggatgaacaccctgggggcgaggcttcaaaatcgcttaaaaagttacaagacattacttgacatcaaaagataaaatacaagacattttagcataaagtaattcaagctaggaatatacaaccgcatttaatgacagttttgtgaacaataatatttatttttacacacttagtaaagccgcactctgctatctatgccttgctatacctacaggttatttgtcagttcgttatcccggcaccatgattgacataaacctttcgcattactgggtcgagtgtctcctcactgaattaataaccactgacct

SEQ ID NO: 13933 - DNA, 461 bp, Glycine max
  Clone ID: jC-gmle01810072d12d1
atgagttggcattttaaactttaaaaacatctgcataatcacacgggttaagggaagctacacaataagatcattgcttcactctcacatcataacccccaaatatatttattaggtaataacacactcaacagccaatattaataacataacataaaaaccaaaagtacttatatctccctcacttcatcttaaacctcatcctcactccagcagcattttagaatatacctgggaaatatactgccatcacaccctttaacaaatgattggttcacatctgcaccacctactccaaactcttcatagctcctctcaccacagcagtaacctttgatgtccaacgcaaacttgttaaatttttcgccatgcatgtgaatgagcaaaacaacaaaaaactctgctgggaccaaagcatgctaaaactctttccacaagatcacctagtgccatctcatcat

SEQ ID NO: 13934 - DNA, 513 bp, Glycine max
  unsure at all n locations
  Clone ID: jC-gmle01810072e01a1
atccaccaattcctgggcatggccgttcntcctttctcatactcaagatctcccactggatctctaccatcatctcaacaaataaggcctaaaacaaaaccaaattccaagacaaacacatgctctctaatccactgctgccacagccaaacagaaccaatcgaactaaatggccaagccagatttcgagagaagaaccctgccactgcagttgcatcccccgtggttgttccaccaaggcctcgaaggataatccttgttaggcatggagagagtgaaggaaacgtggatgagagcgtgtacacaagaatacctgatccaaagatatccctcactgagaaaggaaaggtccaagcagaggaatgtggcaacaggataaagcaaatgatagaaaatgaccatgaccaacattggcaggtttacttctacgtctctccatatagaaggacacttcaaaccttgcagcacctcgctcgttcttttcaacgctctaaaatcgctggcttcagagaa

SEQ ID NO: 13935 - DNA, 242 bp, Glycine max
  Clone ID: jC-gmle01810072e01d1
cttcttcctttttttttaaaaagtatttttttcttttcattaaagagaaaaaaagagggggatggggatggttaatcagtgttaattttatcacacggctaaagcccgaaaaacccctgaatatgaatctttttacacaaggtcttacaattttctcccagacttaaagaacctaaccttgttttataatataaacctggatagatttaacaatcaacttgaaaaaaactcctttctaactt

SEQ ID NO: 13936 - DNA, 367 bp, Glycine max
  Clone ID: jC-gmle01810072e02a1
ggagattcaaggcttaatttgtttcttttttctcaattaattttcccaagagaaggtgcaaccgaattgtagaggaaaatgaccaaattgtttctgtcatggaaaactagtgtttttttttttttttttttctgatgttagttcacttcggattctccgacaattcgccgatctaacttcgcccggttaaaactgcgacctgtgaacagaaggaggctttcaaattgtggctggtgaggtcaagcaacaagagtgctcatttatttgatcatgggtcttggattactggttttttgtgcttgatccatttattttggcatggttcctaagatatggtcttgcaaaaaaggtttgagtaccggtttta

SEQ ID NO: 13937 - DNA, 464 bp, Glycine max
  Clone ID: jC-gmle01810072e02d1
atagttagcgccatttaacatgaaattggggccgcagtaactcaacaagacccacgttgcccaacagatatggttaaataaggctattctgaagcaaaaagactttcatagccgggctatagacgtacgcatagagtgggtgattatggggaaggacttatcgcacaaaagggtggcgaaggaattcttggctccatttgtcgagtataggatatctctaactgctgaataactgcgaccgtgctgtttcctgaaaaatggggatccagaatgctatgaacacagaacctctactataccgccccaaacaactgtcctgcaagaaacttcttgtcctctagctcattctaaataggctgaagagccgcctatgactatacatcagtctccgcacgctctttatcaacaaccgtgaaaacagatttctaaacaggacccacaatgtgagcatatatgaatttgga

SEQ ID NO: 13938 - DNA, 494 bp, Glycine max
  unsure at all n locations
  Clone ID: jC-gmle01810072e03a1
atgcatactagtcaatagattatctaaaattanngngagaacaaacngaaangtttaagaaacaaaagagaaatagatcaaaatactgttaagaactaaattctgatggggggatttaaggggttttgaacaagcccccgtaatatggacaaggaggctgtgcttattgtatctttaagttcgtgctgaacgcatacagttggatctcgaggattatttaaggctctggcttgaacggtgcaagaaacatgggatagatgtgaagtcaattacaatggttcaatttcctgttggttggcaacctggaatatcagagggagcatgttttttgggattaagagtgggataaaattgatgatgaaggatttgataatgatctacttttgcatcttaaaaacgaattctgattttatgttggagaacataatttaattgtagataattttgttcatggttaactgtgaatgcaaatgggaacaagaaaattttgtaat

SEQ ID NO: 13939 - DNA, 160 bp, Glycine max
  Clone ID: jC-gmle01810072e04d1
tttcgtcttattttttttttttattttttttttttataccagattaatttactacttggacaaggggaattaactattaaagaaacaacaccccacagaaaagattacaaacacaatgctaaaggggcaccaaaaaaacatctaggagcattcattacaa

SEQ ID NO: 13940 - DNA, 507 bp, Glycine max
  Clone ID: jC-gmle01810072e05d1
atatagggatttgcgggcaatctattattttaaagaataaagtaaataatcaggtcctgttcatcttttccacatgatactgggtcctagaatcctaacaacaaaataacagaaggatggcacgattcctttcagaaacacaagtgccgtcctcctagcacgatactgatacatacaactgtcaaacacagcaattatggtgaattcatgatgtgttttaacctccaatgaaatgaaataacagaaatattttaagttcatagactgccaaaatttctctatcaaaaaatgatatcattcatgtagtgattaagaactgaaaactaactagagcctcacctaaacatttttgtttaattgctctttcactacggtaacattttgtctcatatattaccttgcagtctagcactgcgaggtaaaataactatctaagacataagcttggctttgtgctaactgctaagcatataaagtaggcataaagctacaaaatgtccaatcatg

SEQ ID NO: 13941 - DNA, 469 bp, Glycine max
  Clone ID: jC-gmle01810072e06d1
aaagttaacacattactgtgcaaataacatggtggggaatctgttttcatgtctaacacgttttgctggaatcgagtatgggcattttaaaaccatgggttatgtacttgtattcgcagaatttaatgataacactaaggttaggtagatttgagctcttttcatcaaaatactagtgtacatgtacttgttttcaactctatttacaactaactagttgaagtttctttggagggacctgcttaatcgattttcgcatgcacgtaatccacgaattcaaaattcttttggagttggattatggcaaaagctatggctgcgctgacaactgcgagtccagccataagtacacgcaactggaaatttgatgggatccctgatgttgcacaaaacacaacttgtggccccacttaggactttttgccttgtttggaattcctcatatgctgcttttcttgatgaacacttc

SEQ ID NO: 13942 - DNA, 407 bp, Glycine max
  Clone ID: jC-gmle01810072e07d1
atgttcagttttacatatttcatcttcaggatcggaacgcggggatatctgtggacgggtactataaagggagcttgtagacaactgtgtcgataccgcgcatgtctttcttcaccaaaagttgtacaataacgggttccaaaggggaggggaccaaaactgtcacaggcggaaaggggaaaccgccctcggaaatataacctaggccaacccacggccttccttgctcttcaatgatcgattgggcgtgcaagccctctttccggatgcggcgcgcctggcggaagaaggccaaagtctttgctcgttacctgacatatggatcttgtaacgggggtttaggcgtcagacttcagagacatgacatgctgctgtgtcaacggacaaaaagaggagttctgaagaag

SEQ ID NO: 13943 - DNA, 525 bp, Glycine max
  Clone ID: jC-gmle01810072e08d1
acaaaaataatttcaagttgtcattaatattaaacaataatggtggcatcataaattcttccggaataattatacaaaagtgaccagggaaaacccgatctgccagttgcccactgaataaaaacacacatcatattactatgtgttgtcatacatgcattggaatgagtggatattccaaagcaattggtccctttatccctccttaatccttatgccggaaatggcaccatcccttgcaaattgtaattgcttcttcagaaatagaattatacaaaggtagttgcaatatctatttgccaaactataaatgtaaagacccttcttcccaatcctagtagtgtcccaattgaatttacaaaggtgggacaagatatgtatatacaagtacaaccatgtaacataatgaaacaataatcatactttggtctttactagtgcacattacagggagttattatgcactgaaacctccttgcagagaacttcagcgattggaaggaatactgacacaagcttgtgctg

SEQ ID NO: 13944 - DNA, 418 bp, Glycine max
  Clone ID: jC-gmle01810072e09d1
ggagggaatgtgcatgttactagcatttctctttatccatatagcaatacagtaaccctgctgctgatgaatttgatgaccataacacagtgacaaataagatcataagatgcaatgatttttgatatacaggacaataaaagaagcaatgcattaaagctgaaagtagagtgtatgttcatcttcaaaggagtgtaaaagagggtaatatatattttacagaatttccgaaagagcagaaaaaaggaagtaaagacaagaatgacttgtgactcaaatcctggaagggatcataggaatagtgtcctgtaagtatgcactggcagcagcaactccactttcaagctttacaggatagcccacatctttcagtatcatctccacaccagctagacatcccaacagttgcaactcattc

SEQ ID NO: 13945 - DNA, 403 bp, Glycine max
  Clone ID: jC-gmle01810072e10d1
ggagggaatgtgcatgtttctagcatttctctttatccatatacaatacagtaaccctgctgctgatgaatttgatgaccataacacagtgacaaataagatcataagatgcaatgatttttgatatacaggacaataaaagaagcaatgcattaaagctgaaagtagagtgtatgttcatcttcaaaggagtgtaaaagagggtaatatatattttacagaatttccgaaagagcagaaaaaaggaagtaaagacaagaatgacttgtgactcaaatcctggaagggatcataggaatagtgtcctgtaagtatgcactggcagcagcaactccacttccaagctttacaggatagcccacaattttcagtatcatctccacaccagctagacatcccaaca

SEQ ID NO: 13946 - DNA, 395 bp, Glycine max
  unsure at all n locations
  Clone ID: jC-gmle01810072e11d1
ccaagcttacctttgggatatagggtaaaatttgttaatatcactggctacatatatttttattctatctaaatcctataacaggttccttgtatataatccctcccctctttggtttgaactttaagacctttgacctcaccaagttggatgggggccccaatcccatattnnnnctttttgcatctaacaagagataaactaggacattaaaaagtccttttgcgctaaatgtaaaaactttatcctattaacctctaaatcccatgacgcagacgcaaactagcctacctcccacatgactgactccaataaccggttgcaataataaatgctttttccttcaaaaaattcacctaagattcgctctagatcttcagcagggtatttgatgt

SEQ ID NO: 13947 - DNA, 468 bp, Glycine max
  unsure at all n locations
  Clone ID: jC-gmle01810072f01a1
aaaccattctaccttctccaaaaccatcnctctctcatgttcgaagaaaacatacacggtctcttcaaactctaattttcttttccttccatttaatttcctcaatggcggcttccgtcgaccagcgtccgtaccccggcctccacaatggcgtcgttcggcccctcaaaccaggcccggatatcccgcgtcccaagaagctaccccagccgccgccgccactctcggattcctcaagcgacgaagaagaagacaccaccttgaacttgaaggacctgattcgcaagggaacaacggaagttgaatcctccattttcgacccgcgcgacgatggaacctctgaccactggatccaacggaactcttcccttgtccgtttaacgggaaagcacccgtttaactcggagccaccccttcctcgcctcatgcaccacggcttcatcaccccggtccccctccactacgttc

SEQ ID NO: 13948 - DNA, 470 bp, Glycine max
  Clone ID: jC-gmle01810072f01d1
agaaaggacggttttcttttgtttcaataacgtaattggatagtccagggtcatgacacgttaagattttgaatgtcaatttgtagcgttctaagttttttctcaacatttgacaattcttcttgaatctctactagcctgttaagtctattctgcgcttcatcttggtaaggtttgctaaggactttcacaaaggtatccaaattttctatggcttcagtcaaatccttcttcatggcctcttcaagttcatatgccaaggtatctgcttttcttttcaccttatctatcaccttctgcctacgagctggaaaagttgatatagctagatacccgccagcagaacaaatgccaagagcttgaagatcgtccaaggtggtttgcagcacagatgtcagtagcgaagcagataaaccagccacacctagttgaccaaaagtccccaaaatcatttcccgtactttttgctt

SEQ ID NO: 13949 - DNA, 504 bp, Glycine max
  Clone ID: jC-gmle01810072f02a1
cttggaacttccaagaagctctccctttctagaaatgttatatgctccaagtgcagggggaagggttctaagtctggtgcttcgatcaccccgtgctggttgtcaaggaactggtatgaaggtttctataagacatcttggcccatccatgattcagcagatgcagcatgcctgcaatgaatgtaagggtactggagaaactatcaatgacagagatcgctgcccacagtgcaagggagagaaggttgtgcaggagaagaaagtccttgaagttattgtagaaaaggggatgcagaatgggcagaagataacattccctggcgaagctgatgaagcgccggacacaattactggggatatcgtctttgtccttcagcagaaggaacatcccaaattcaaaagataggctgaagatctttttgtagagcacactttgtcccttaccgaggccttgtgtggcttccaatttgtgctgactcacttggatagccgtcagctttttat

SEQ ID NO: 13950 - DNA, 387 bp, Glycine max
  Clone ID: jC-gmle01810072f02d1
ttcgttttttttttttttttttgctctatagattgtagcaatgtaattcattatagacttatgggaatgatccattcatctaaaaatgtaacaccaaacatcaaaaacatggcaccaaggtagcatgggtagactgtcatatatactgtatataaacacttcttccagatctgggagcaatgataaatagctgacaccatcatgtataaatgttatggcaaccattaattacaatgataaaacagatttaacacggagcaaatgaagaaacatctgccatactaaagatagttaatagatttagctgatgtaaccctagagaagaggtgggttttgttttgcctgctgccggaccctcctcttgtactctgctgcaggctggatgaa

SEQ ID NO: 13951 - DNA, 501 bp, Glycine max
  Clone ID: jC-gmle01810072f03a1
cccaaattcattttaatcctaatttcttatttcttgatcattcgatttttctcctcaggaggcagatattcgtaaaaactttgaccggcccgaccatcacccttgaggtggaatcctccgacaccattgacaacgtaaaagctaagattcaagacaaggaagggatcccacctgaccagcagagacttatctttgcgggtaaacaacttgaggatggtcgcacccttgccgattacaacatccaaaaggaatcaaccctccatctcgtgcttcgcctcaggggtggcatgcaaatctttgtcaagactttgaccgggaagaccatcacccttgaggtggaatcctcggacaccattgataatgttaaggccaagatccaggacaaagagggcatccccccagatcagcagaggctgatttttgccggtaaacaacttgaggatggaagaacccttgctgattacaacattcagaaggaatccacccttcacttggtgcttc

SEQ ID NO: 13952 - DNA, 401 bp, Glycine max
  Clone ID: jC-gmle01810072f03d1
aggtgttgggatatttttcagaaattttgaacgagcaccacaaggaagtgaagacaataatgattcgggactcaaattttggaagggatcatatgaatagagatctgtaattatgcactggcatgagcaacttcattttcaagcttcacaggataacccacagtgtttgagtgtcatatctacaccagctagacatcctaaccctagcaacgcattcaagtggtcaatatgtccaattctgaaaaccttgccagcaaatttggtcattccacgatctaacctcagattgaatctcttacatgcgcttctaactattaaggactatcaatgaaggcaggaacagaaacaaaaattacagcgtcaccgtaccactcttctttttgggtgcaacacttcaaaac

SEQ ID NO: 13953 - DNA, 601 bp, Glycine max
  Clone ID: jC-gmle01810072f05d1
gctattaaaatattgcaagatatattccatcgttctggcatatttttggttatctgttgttattgacaacatgaataaatttcttacaagaagggggaaacaaatatttggtataatcttctgttgaatttctaaaaaatatagaataaagaagcatagttcaaaaaagaaccaaaaaaaaggaagattggaattaggcaaaactcatactgttgaggcacttgtgtgaagttggactaaggaagcataaaatccaccactgatgttaatgagcttttcatgcttccctttctccactataactccattttttacaacagcaatcacatctgcattttttattgtagatagacgatgtgccacaaccacagtagttctgttcaccatgactttgtccaacgcatcttgaacaactctttctgactcagcatctaatgcacttgttgcctcatctagtagcaatatctttggacttttaattatggcacgagcaattgctacccgttgcttctgcccaccagataattgggttcctctctctcccactatagtatcataaccctgttgtaagccactaatgaatttatgtgcattggccatt

SEQ ID NO: 13954 - DNA, 527 bp, Glycine max
  Clone ID: jC-gmle01810072f07d1
acaaaaataaatacaagttgtcattaatattaaacaataattttggcatcataaattcttccggaataattatacaaaagtgaccagggaaaacccgatctgccagttgcccactgaataaaaacacacatcatattactatgtgttgtcatacatgcattgtaatgagtggatattccaaagcaattggtccctttatccctccttaatccttatgccgtaaatggcaccatcccttgtaaattgtaattgcttcttcagaaatagaattatacaaaggtagttgcaatatctatttgccaaactataaatgtaaagacccttcttcccaatcctagtagtgtcccaattgtatttacaaaggtgggacaagatatgtatatacaagtacaaccatgtaacataatgtaacaataatcatactttggtctttactagtgcacattacagggagttattatgcactgaaacccctttgcagagaactccagggattggaaggaatactgacacaagcttgtgctgaa

SEQ ID NO: 13955 - DNA, 485 bp, Glycine max
  Clone ID: jC-gmle01810072f09d1
catcacaagtttcataacatccaaattagagaccagtcatcttaacacaattccaacagaacattagacgatcaaaattcaattgaatcgccagatgtgataacaaacaaatagcacaattataaaagaaaaaaacttgggtgaatcaggaaaactgtctatatagcttccagagcttgcaggacatcagccttcaaatcctcaaaatcttcaactccaaagctgaagcgaaccaggttgtcataaatcttgtacttggccctttctgactgaggaagatcccagtaagacaaaatagcaggttgatccacaatgctctcacagccaccaaacgaggccgcaatatatgggattttcaatgaatcaataaattttattgtggtatgtagatctccatcaatctcaaaactgacaacaccaccgaaaccagtcatctgcctcttggcaagctcatgttcagggtgactcggcaagcctggatagta

SEQ ID NO: 13956 - DNA, 478 bp, Glycine max
  Clone ID: jC-gmle01810072f10d1
ctcattgcagtggtagacaaatgccggtgtaacaattttgaaacaatgaaaagcattatctgacaagtatatttggatggcgaccaccaaaccagtaagttgacacatgaatcattctttcctttatatctacaaagtgaaaagaagaaatatatgtacaaaggttaagctttttatggaccccctccaagggggtccactgattttgtgaagggccacacagtacatattgtgaaattaattaaaaagcctcaagaaatgtcttcttttctgctattcaaatttgtatcaactgtggaatgagcttcaaaaggaaagacaacttctgctgtgaaaattgaggctttgagtttccctgcaccttcccacaacccttaaccaaaccctctcctttaccaccctttgttggctttatcatatacgcaactgcctcagttattttttgaaccaaatccacaatttccccatcgattcccat

SEQ ID NO: 13957 - DNA, 371 bp, Glycine max
  Clone ID: jC-gmle01810072f11d1
attgccaagctgacctctgctaacatggtgacatatcattggtctcactagtaacatatatttttaagatttcactaaggctaacacagagggattgaataaaaacccaatcctgtctgcttcgtactgtatcacctgtgacatgccacaacaggacgggggcaccactcccattttaaatttatatcccttctgatgaagatagcctgaccctttaaacagtccttttgtcctaaaggtgtattctgaacacaattaacctctaaagaccacggagggagagggttaaggtgtctacctgccacatgaacgctgaaacttaccgcctgttataacaaacccttttgctttcaaaaaatcaacctaagaac

SEQ ID NO: 13958 - DNA, 414 bp, Glycine max
  Clone ID: jC-gmle01810072f12d1
aaatgactgattttttgcagttccatattatcttcaacctagggacaactgaaataaaaagtttaaatattgcaaaaacccaatcaactggtctttggatcaggcattggaaagaagccaacacttgcacctcttggcggttcaaaacccaagaacttgtgcacatttgttctgatgctgatggaacacaagaagtgcagaataggcagggaacaatcagaggggccattaccctgcaaccctacatgggtcatctttataataagcccaaaaggtctgaagggcaatttggaaacaaccttgccttctaagagttgaattaccatcccaaagaccaccaagagaaccagagcctccacacccccagacttgaacttgaagagagactggttacggctagattctttgaggctt

SEQ ID NO: 13959 - DNA, 365 bp, Glycine max
  unsure at all n locations
  Clone ID: jC-gmle01810072g01a1
gctcttctttggctaaggtatcatncttgtctcatcccactaaggagaacaatctcgcggacttcttcatcgatctcggtatgggtggcccctctgccgctgtatcgaagactgccgctgctcccatcgagcgagtcaagcttctcattcagaatcaggatgagatgatcaagtctggtcgattgactaccccttacaagggtatcaccgagtgtttctctcgagtcattgctgaggagggattcaactcgttgtggagaggaaatcttgccaacgtttttcgatacttccccactcaagctctcaacttcgttttcaaggatcagttcaagcgaatgtccggatattcccaggctaaggatgga

SEQ ID NO: 13960 - DNA, 509 bp, Glycine max
  Clone ID: jC-gmle01810072g01d1
aggacaaaaggtaaaggttccaaattcaatttaagtggacactttaacggaaaattatagaggaagacagtccaatatgaaaaatatagtaaaatcatctcaaacttggcatcttctctttgcacctaagacattgagaattctaagaatgttacacgcaagtcccatcacaacttctagcacttggatcagcacaaccttcaggaacagaaatatttacttgccaagtttgctttgcctccaattcaagattggaagaaagttcccctgttaatagcatcctcgttagcatttccaagtgcagcctcgttcaagtacttgtcagccaattggactctcttgacattctcttgttcttggacaagcatgttaccatacgtcaagagcttctccagagtcatcttgggctgctcaaaggttggaggtccattctatgagttcacaaagcttttcccaatgccgtcaacaccaacaccagaaatccactttctcacttcggcatcatatac

SEQ ID NO: 13961 - DNA, 274 bp, Glycine max
  Clone ID: jC-gmle01810072g02a1
gtggaggatacggatcgctctgttggtgatttaggagcaacagtttcagcacacaggtggggactgcccggccaaatatcagtagaacccctgcagacattggtaatacaggggtgtaatctgaagacagaccgattgtagcatacggatcgctaatagtaaaagtgcaagaaaaaaaaaccattgcttggaaagtacttgacgaagaaaagcagggacagacagtattgatgaatagagcggcgactctgcatagattaggtatacaggcatt

SEQ ID NO: 13962 - DNA, 593 bp, Glycine max
  unsure at all n locations
  Clone ID: jC-gmle01810072g02d1
aggacaaaaggaaaaggttccaaattcaatttaagtggacactttaacgcaaaattatagaggaagacagtccaatatgaaaaatatagtaaaatcatctcaaacttggcatcttctctttgcacctaagacattgagaattctaagaatgttacacgcaagtcccatcacaacttctagcacttggatcagcacaaccttcaggaacagaaatatttacttgccaagtttgctttgcctccaattcaagattggaagaaagttcccctgttaatagcatcctcgttagcattttcaagtgcagcctcgttcaagtacttgtcagccaattggactctcttgacattctcttgttcttggacaagcatgttaccatacgtcaagagcttctccagagtcatcttgggctgctcaaaggttggaggtccatcttttgagttcacaagcttcttcccaatgccgtcaacaccaacaccagaaatccactttctcacttcgncatcatatactctggccctcagtgcaccaaagaaatcaatggattggccacggaggtgtcaacaatctgacaacgtcctgttcaggaattgatc

SEQ ID NO: 13963 - DNA, 293 bp, Glycine max
  Clone ID: jC-gmle01810072g03a1
gttgattattcgtcgttctgcattgatttggtccacactttcattacatagggggggattgccccgcgaaatagcaatagaacccccccagacatttctaattcgtggtctaattctaaaacattttgcttcaaacatatgaattgctaagagtaaaatccgggacaaagaaccgattgtatgggaaaaacttcaagatgttatgcagggacattccgcattgctgaatacagcgccgactctgcatagattaggtatacaggcatttcaacccattttagtggaggggcgtg

SEQ ID NO: 13964 - DNA, 580 bp, Glycine max
  unsure at all n locations
  Clone ID: jC-gmle01810072g03d1
aggccggggatctgtattgatctcaaagcanaatnacggaacaccagctcactgctcagtggccgcccttcgtcctttttttttttttttttttttttttttgtaaaaacacaggatctgaattggtgatggttaatgagtgctctgattcaacaagcttaaacaacacagataacctgtttccaacacctttttacaaaagattttactttatttgaagaaacatgaaaaaaaaaattttgtttggatttggggaaggggcttggaaaaaaagtttaatggcacaaaatccctttttaacattaacacctgtaaaaaattacacctatcctagtagaaatacacatgacacaggaaaccattttttattaatcctcataaaacgagtttacctgctaaaagcatcttttatgaaaaacaatgtactttacctccttatgggatgcaatacagacggggatcctttaattaatctaatagatggggctttagatcctttggtgaatacttaatggtacttccccaaaagcctttcctttaactgaatcctaaacttttcccaaaccagcgggttgcaaga

SEQ ID NO: 13965 - DNA, 447 bp, Glycine max
  Clone ID: jC-gmle01810072g04d1
gaaaaaacacaggatctgaatttatgatagctaatgagtgtactgtttcaacaagtataaacaacacagataacctgtatcagacactatatacaaaagatattacagtattcgaagaaacatgaaaaaaaaaatcttgtttggatttggggaaggggcttggaagaagagtcgaatgtcacaaaatcccattctaacattaacacctgtaaaatataacacctatccaagtagaaatacacatgacacaggaaaccattttctagtaatccttataaaatgagttcacctgctaaaagcatcttttatgaaatactatgtacttttcctccttatgtgatgcaatacagccggggatccttcaaataaatctaatagatagggctctagaaactctggggtatacttaatggacttccccacatgcctttcctctaactgaatcct

SEQ ID NO: 13966 - DNA, 409 bp, Glycine max
  Clone ID: jC-gmle01810072g05d1
ataattaaggttttataataatatcaatgggccaaagttagcagaaataatccaccgcatacaggtggctaagggcatgcttagttaaccatttaaaaatacttttggtacacccaagacaccaagccttttggaaacaagattctaggaccctttaaatccaagccatgtttagcgggtaatctgccacaaaattagtctccagcaaactcttgcaccaataccagagtaacaatgagagggaggacaacttacattgaggatactgcgagcttttaacaaataaactctacaaaatgcacagatccaaagtgaggactgatgtaattcctatgctgcgacaatgaatatggcttcatttatgggcatcgcatatatatttgcaactgttaattttgaacagaaaaat

SEQ ID NO: 13967 - DNA, 556 bp, Glycine max
  Clone ID: jC-gmle01810072g06d1
ataataaagtttttataataatatcaattgaccaaattagcagaaataatccaccgcatacaggtggctaagggcatgcttagttaaccatttaaaaatacttttggtacacccaagacaccaagcctcttggaaacaagattctaggaccctttaaatccaagccatgtttagcgggtaatctgccacaaaattagtctccagcaaactcttgcaccaataccagagtaacaatgagagggaggacaacttacattgaggatactgcgagctttcaacaaataaactctacaaaatgcacagttccaaagtgaggactgatgtaattcctatgctgcgacaatgaatatggcttcatttatgggcatcgcatatatatttgcaactgttaattttgaacagaaaaattctaagccaattatatcctcatttcctcatggatgtgctaataaactattagatttcgttaattctttgaactccatgtaatgttgtttggatacgaattgttgaaaccaaattggcattgccaatctgagtttttttgttaaaacaa

SEQ ID NO: 13968 - DNA, 518 bp, Glycine max
  Clone ID: jC-gmle01810072g07d1
aaaccagattaagtaactacttgtacaaagtagagtaacttttaaggaaacagtaccccaaagtctatgattacgtacacaatgtaaaagggtcacaaatagaagttttaggtgcatacaatacaaaacaatataatacaaaattttacatcttcaaagccacaaacctgggctgttggttcactaaaactttcacacagcctccttgtgacttattcctaagccctattaccacaaggatgttcaacaattctcagtgcatcagcactgcagcctcttgcacaagaggctgtgtaacatgcacaaaatgctcagcttccctctccacctcttcccaacacttgtgtgcactcttcccttctttcatcttcttcacaaaccccacaaacttcctccagttatttggttcaaacaaatgcggattcattctcaggtatgtgaaggcacacatctctctatcaccagactcaccatcaacatccaattgtgatgcccttatgatctgctcatgtgcatac

SEQ ID NO: 13969 - DNA, 476 bp, Glycine max
  Clone ID: jC-gmle01810072g08d1
gggggattccgatattcggacgcatcaacttgttatgaaatcacattgatagcctttactcgggtcctagctcgtctaagagctagatttgcctcaattggttggctcttgccttccgccttattcaaattagcttctgctatttcaagagtttgctgggctttttggggatcaatggcactacccttttccgcatcatttactaaaacagggatctcattattggttattttagcaaaaccgcccatcagagccatcgttaaccattggtctttaagaagacgtattctcaaaatacctatatctacggctgtggcaataggcgcatgatttgggaatactccaatttgtccgctattagtagataaaatgatttccttcacttccgaatcccaaacaattcgattgggggtcagtacacaaagatttaaagtcatttcttcaaattgctctccatttctaagttcgtagctttc

SEQ ID NO: 13970 - DNA, 376 bp, Glycine max
  Clone ID: jC-gmle01810072g09d1
atagctcttaagggggatctacaggtatcaactatatataacccgctattcctgaaaacccctaaacaccactgaaagaactacctggacactccgcaaaacatcttgcaaccttgaaccaccccttgtatccagtttgaaccgtgaaaaagaacagactcgcatcttttacaattgctctaaatatggggggcttgacaccttcatctacatcacctgtccttgtggacacagacagaaaatctttcgggctttcatcaattacagggggtgccaaatctaaaaaattcgtcgggttcaccgcagttggatcaaaaccaccctaagggtgcaattctcccaaaaaggccagctttcataataaataatccacctt

SEQ ID NO: 13971 - DNA, 379 bp, Glycine max
  Clone ID: jC-gmle01810072g10d1
attgttcttgagggagatttacgcatatcatatatatataaccaagtgtgcccgaagacctttaagaaacactgaaaaaacttgctgcacactccgcaaaaatttttggtaccgagaacaacctcttgtaaccagcttgatccttgccaatgaacaccaccccatcttttgcaattgctaaaattgtgtggggcctgacaactataatctacatgacctgtctttgtccacccagacagaaaatagttccgccttccataaatcacaggtggtggggggaataaaaagattgccgtcgccaccgtagttggagcaaaaccaccctctgcttgtgctgttccaaaaaagggccgttcccctacttcggaatccaacttag

SEQ ID NO: 13972 - DNA, 434 bp, Glycine max
  unsure at all n locations
  Clone ID: jC-gmle01810072g11d1
gtnnnctttatagantcnagagatggactgcatgtatntatgtagaccatttnnggggtcgaccagctcagtcctcggcggccgccctttttttttttttttaatatttattgttttcccttttcatttcttagaatgtaatcgaggcctggggttattatacacgactaaccctcttggaagctgccaatagaccaactgaaagagttgtcacaaacaagcacatttgtgttcatctccattctccaacatctgttgtgttatgatattgagttacaaatgcctgtcgcagaaaacctcatacataaagagattgatcactatatacatcatattggatcttgtattgaataagagcgcatggatgagcaacctttcttgcatgccctactactttcatgctgtagtttttagcatcacaaaattttacactg

SEQ ID NO: 13973 - DNA, 64 bp, Glycine max
  unsure at all n locations
  Clone ID: jC-gmle01810072g12d1
tgtctctaaagttnnnnagacgatttcattatcgatacagtaggacnaatgttcggggtcgacc

SEQ ID NO: 13974 - DNA, 490 bp, Glycine max
  Clone ID: jC-gmle01810072h01a1
gcgcaaagagttaaacaaactttacatcgttacaaagaacttcaagacattatagctggccttggcttggacgaattatccgaagaagatcgcttaaccgtagcaagagcacgaaaaattgagcgtttcttatcacaaccttttttcgtagcagaagtttttaccggttcgccggggaaatatgttagtctagcagaaacaattagagggtttaaattgattctttctggagaattagatggtcttcctgaacaagccttttatttggtaggtaatatcgatgaagctactgcgaaagctacgaacttagaaatggagagcaatttgaagaaatgactttaaatctttgtgtactgacccccaatcgaattgtttgggattcggaagtgaaggaaatcattttatctactaatagcggacaaattggagtattaccaaatcatgcgcctattgccacagccgtagatataggtattttgagaatacgtct

SEQ ID NO: 13975 - DNA, 224 bp, Glycine max
  Clone ID: jC-gmle01810072h02a1
gttattattcgggtcgctctgttagtgattttagtgcatcactttcattacatagggggggattgtccagcgaaatagcaatagaacccccccagacatttataattcgtggtgtaattctaaaacattttgcttggtacatatgaattgataaaagtaaaagtttgtgaaaaaaaaccgtattgttgggaagtacttcaagaagttatgcagggacatcccct

SEQ ID NO: 13976 - DNA, 389 bp, Glycine max
  Clone ID: jC-gmle01810072h02d1
gctcgaatcaaatgtttatggaaatgttcaacgcaagaaaaagaaaaagaaatccatgaattgtaaattaatttatttaattaattattgctttacttttccaactttttttaatagcccacgattttcaggcggctaatataatataaccactacgcaacaacgcgggactacaaaaaaagggtccacccgcgttatcctgtgatgccgccgcaccggatctcgctggacgccggaatattcctccgccggaaaactgctgagcacttcggcaactttccgagatcggagaaaagcgactcgtccttttatttaattggcaccgccacgttatttaccttgccgcagatagggctttttaagaccccgggggacgcttcgttattcaa

SEQ ID NO: 13977 - DNA, 512 bp, Glycine max
  Clone ID: jC-gmle01810072h03a1
tgctattatggtgcccaagaacagtggttatgttcaggtgcgactggtcttgatgctgaatacgtggaagagaattcaggtacaaaagaggtttgtgaccaagttgcaggagcaggacagatagtgcacacagatttacctagctttccttcacgagaaatggatcagtgttcaggtcataaggattcaaaattgactgccatggaatcagaggaagcagaggaatgcacctctaccactggagatacctcttctgcgtctgttgctggtgtctcagaagtggacacaaaagttgaatttgatttaaatgaagggttcaatgcagatgatgggaaatgtagtgagatgcctgggtctacacctgctgcaagattggtcagtcctgttccattttctgcttcatccatgtcttttggtattctctcgatcacagtagctgctgctgcaaagagcccctttgtggcacctgaagattatttgaaagtaaaaaggagcttggttggaagggatct

SEQ ID NO: 13978 - DNA, 226 bp, Glycine max
  Clone ID: jC-gmle01810072h04d1
acgaggcaaaacacatgatcggaacgagcgctatatatagaaggtacatgcttaactcccaaaaaccacccaatatccctgatacaaactctcccttcacaattaacttacctcaatcatccaaactctaaaaacaaattcctcgtgcaaaatgagggcctgtgatttcaaataaaatctaaactcctaaagtacctttcaaataataccacatttccaaaatcac

SEQ ID NO: 13979 - DNA, 362 bp, Glycine max
  Clone ID: jC-gmle01810072h05d1
acacatgtcactgggaaatataaattaggagctagagaaggctatatttagattgtatactacagccccttaagccagaggtaattagaaaaaccattcacaaggtctgctcattattcacttgtccaaacagcaattatgcaggatggtaattgcacctctctaaagtaaaatgcctttctactttctcgtggcacttggaagatcaatcaaaacttaaaaggcttagcctaagattggttttctgttattgcctgaaaggctgaaagagacacaatcttggaacttacttataggccactggaacggttggcatactctagaactaatgccccaaaaagagaaggccttaggagcaagtt

SEQ ID NO: 13980 - DNA, 575 bp, Glycine max
  unsure at all n locations
  Clone ID: jC-gmle01810072h06d1
aattgtacacttggcactgtgttatataaattaggacctaagaaaggctatattttgtttgtatactagagctacttaagccagaggtaattagaaaaaccattcacaaggtttgctcattcttcacttgtccaaacagcaattatgcaggatggtaattgcacctctctaaagtaaaatgcctttctcctttctcgtggcacttggaagatcaatcaaaacttaaaaggcttagcctaagtttggttttctgttattgtctgaatggctgagagagacacatgcatggaactttcttataggccactggaacggttggcatactcttgaactaatgccccaaagagagatggcctttggagcaagttggctggtgaatcaaattctttggcccgccctgcatctacaactagaactctatcacagnccattactgttggtattctatgagcaatgctgatgatggtacgagctgcaaagtcctctctgatgaacttctgaataacagcaatcggttgggaatcaacagaagctgttgccttattcataaacaacagcctgttttgcttaagcat

SEQ ID NO: 13981 - DNA, 524 bp, Glycine max
  unsure at all n locations
  Clone ID: jC-gmle01810072h08d1
atactaccctcagaaaatgcagaagaaaaagaaacagaaaaaaaaaaaaaagaaacatcaattatcattttttattttactgctttcaagatcccagaaaggaagaatggggggaaagaatatactgcagacttgtattgatacaataatggaatatattatgttcttgtactttgcaggaagctgcaaatatattaaatgatgagaatgcgcgcttgctttgcccttcaatgactataaaagtaccccaaaagtagcacaagtgtagatttgcttgaaattcttgaaatgacaaaaagttcaaggctctctcatccctatattaggaccaaaagaatctttttgtgttttttctttaacaatgtgtcatcagcatgcacaagcttatgcaatccgttgaaggatatatgccaccatatcttcaagggcttaacgaaatacactcttgggtaggctttggagactttgaatgcaagatcggctttctcttttgctactcttgtgctctntcaatgcccccacac

SEQ ID NO: 13982 - DNA, 443 bp, Glycine max
  Clone ID: jC-gmle01810072h09d1
aacatagatagcacttaagggggatttacacatagcagatatatataaccagctattattgaagatttttaagcaacactgaaagaacttgctgcactctccacaaaactttttgctcccttgaaccacctcttgtctccagcttgagccttgcaaatgaacagttttccatcttttacaggtgctctaattatgtggggcttgccaccttcatctccatcagcagtccttggcaacacagacagaaaatagttcggcttcccatcaatcacaggtgttgccgtctctaagatgttagccgtggccaccgcatttggatcaaaaccaccctcggcttgtgtttcgccgaagaaggcctgttttcctagtaaataatccaccttagagaggaactcttcgggtgaaccatagtcagtgatagacttcttatcagtcggagtgat

SEQ ID NO: 13983 - DNA, 493 bp, Glycine max
  Clone ID: jC-gmle01810072h11d1
aacagtcaaatttgatttttaattgataaaattttgttttactgaaatatgtggtgaaacataatcagtaattaataaaataggtatgttgggttctaatttcataattggctgtcactctaggagaatttgatctcccacactgtaacccttaccctctgttgcgaaaagaatgctttcaacaaatgcaagagaaagcctctcactctcggtaacacttgattgtttgatcaacgcacgcgagcaggattaagattattaaactactattgttcgatacatttgaatggaatgagagaccatttctaaatatcatgattaaccacatatactgccttgaaattaagtaatattcaaacccttttttttgaggggcatttccgtatgctacaattgaaaaaaagcacccaaaagaacttcagcacactttcttgggctccactcggtatttgtgaccatgtttttcaacaccagatactttaagtaaaaactt

SEQ ID NO: 13984 - DNA, 433 bp, Glycine max
  Clone ID: jC-gmle01810072h12d1
aacagtcaattttgattttttattgataaaattttgttttacggaaatatgttgtgaaacataatcagtaattaataaaataggtatgttgggttctaatttcataattggctgtcactctaggagaaattgatctcccacactgttacccttaccctctgttgcgaaaagaatgctttcaacaaatgcaagagaaagcctctcactctcgttaacacttgatagtttgatcaacgcacgcgagcaggattaagattattaaactactattggtcgatacattcgaatggaatgagagacgagttcgaaatattatgattaaccacatatactgacttgaaattaagtaatattcaaacgctatttttcgaggtgcatttccgtatgctacaatttaaaaaaaacacccaaaaaaacttcaccacactttctt

SEQ ID NO: 13985 - DNA, 341 bp, Glycine max
  Clone ID: jC-gmle01810073a01a1
tggctgcgttcgttccttggtgtttttggaatttctctctctgactatgctgtgtgggtttccgaggaccgcgcgaaacacgtaaatccccttcaaacacaacacaaaaacgcagtgtttccaccatctctatctgtatctctatatataccctcacaaccaaacaatccccattccctctctaaccctatctaatctgtcttctcttacattcctttctccaccacacattcaattttaaacctctgggcgtggctagcttcaacctttaacattaacatggccattccctacccccattttatcgccaccgagaaagccgtcatggacgccggacttct

SEQ ID NO: 13986 - DNA, 495 bp, Glycine max
  Clone ID: jC-gmle01810073a01d1
gaaaaattgatttagatagatagattcaatatgttaaacactgggtgtcaaatgaacaacaaattgtgcggacaaccgattcaacgccacacaacaggcattgcatgagattaatactcatctctccattttgctttctgcttgctcaaactaaatccccccgcccctaaaaaaaacaaaacaaaactaccggagaacttataaactttctccaacaactgtattgaataacaaaaggatttaatcaaaatccccctttacccctggattaaaaccttttttactactacaccatacaaatgggttagatagaacttagaaaccccatgttaaccttggccaataaacctaccttcattctcctaaccaccaacaacaactacttgttcttgaccgacaacccgagctcccctgcaacaataacaggggtagtcatataaagaaacatgccatgctccacaaccccagcaagctgcaaaatagcttaagtagcag

SEQ ID NO: 13987 - DNA, 500 bp, Glycine max
  Clone ID: jC-gmle01810073a02a1
atcagaagacaggttcaaaccggatcaaaaaaacttgttacgatggtttcttccgacaaggatccacgagaggaagtccttcaagcatggtacatggatgatagtgatgaagatcaaagactcccccaccacaaagaacccaaggagtttgtctcgttggaccaacttgctgaacttggagtccttagctggaaattagatgctgataaccatgaaaatgatccagagctgaaaaagattcgtgaagagcgtggctacacctacatggatgtttgtgaggtctgcccagaaaagttgccaaattatgagcagaaaatcaaaagcttctttgaagaacatcttcacactgatgaggagatccgcttttgtgctgctggaagtgggtattttgatgttagggattgcaatgatgcttggattcgagtgtgggtcaagaaaggaggaatgatcatcttacctgctggaatttatcttcgctttacactagatgagagcaacta

SEQ ID NO: 13988 - DNA, 495 bp, Glycine max
  Clone ID: jC-gmle01810073a02d1
aattgaatcttattaataagaataaagatagtacttgatagcatggttttacaaatcaactaaatatatgacatagcttaaaatgtactataacttaaatgaatatgtagttataatattatggctatctttcaaagggtcacctacacagaaacacaggcgtgggtaaaaggcttaaagggtcatctacacaaaaaccataacataaaaagctgggaccctttatttaaaggcaccattattttcatttgttcaaaccttactttagcaacacaaagtctcagtcccacgtactacgattaggcggaaccagatcttacgcggcggcatcaacagcatggttgccaacatccttttccacaaaatccttgacatattgttgtcttgcagggagatggtcatttggacgattgtgtggagttcaaactggctcaccaacaaaaaaacgcaaagccttaatgtagctgctctcatctagtgtaaagcgatgataaa

SEQ ID NO: 13989 - DNA, 504 bp, Glycine max
  Clone ID: jC-gmle01810073a03a1
gtaaggaggggcatgcgtcgaacagcttacgtcatgcacctctaagctgattgtgagcggatacatcgtcctggttgatgcaaaacttgcccacctgggatggattggcgtagggaaggtgtccccgcagtcatttgcggccctcaagcacagagaccttctattcactcatcggcatttctactgttatcggtcttggaacggtggcgccgtgcatcgcccgaccttggaccagctagagaacggagtcaagtgaagacccgtcctttgcgtcctttcactctacgaggacagttctggaacgagacgccgctggtcaaggaaaattgcgttgattgcattgtatgagttacgtcaccgtttcttcgtctttgtgaagtcgattcagcgcgcgagactcatcaccagtgacgtcgccggcgttttgatctgtccgtgcagctataccgggagatggcgcagactgagagtgcaacatgctttaagagatgcttggcagagctc

SEQ ID NO: 13990 - DNA, 551 bp, Glycine max
  Clone ID: jC-gmle01810073a03d1
ggcgaccttcttggacttcttcttcttcttcttgccgctcttgtctttcggcgctgccgaagtggaggcgacggtgggctcttcctggtcgatggcctcctctcgcttcttgtcctttttgccggccgacgtggacagtttgacgattcctcgcttttcccgtcgactgtcggagttgatgtatcgaaggacctcagagagcggcaagttgcccatgctgctgggagttgcctgcgtgggaagaagacgggtggtggtggccgcaggcgcaggctcaggtcgtctcggcgcggtcttcgggagcatcgcgttgatttgattcagctccttctgcttcgcgacggccgacgcggtgaatcgggtcagccacaaacgggattccttcgtcctggtgtcgttctcgcccacggttgcgctcagcatggcgtaattcctcttctgctgttgcattgccttcttgaaagtcaatgatttactgttggccatggcgaggtgatgcaatgttacagccgtcaccgggctgtcgccgaaaatagcttcgtttgatttga

SEQ ID NO: 13991 - DNA, 589 bp, Glycine max
  unsure at all n locations
  Clone ID: jC-gmle01810073a04a1
ggcccagttctcacagttacgacttattcaatgcttgagcatgtgaataagttgctggagataccaggatcaaagttgctattcgggggtagtcctctagagaaccattcaattccacctatttatggtgctattaaaccaacagctgtctatgttcctctcgaagaaattatgaaggataagaattttgagcttgtaacaaaagaaatatttggaccatttcaggttatcacggactatcaaaacagtcagctagcagttgtattggatgctttggaaagaatgcataaccatttaacagctgctgtagtttcaaatgatcctttgtttttacaggaagtcattggcaaatcagtaaatggtactacttatgctggtttaagagcaaggacgaccggagctccacagaatcactggtttggacccgctggtgatgctagaggtgcaggaattggaacaccagaggctataaaacttgtatggtccggccacagagaaataatctatgantttgggcctgtgccaaagaattgggaagttcctccttctacttgagaaaagtcctatttatgataggaacaacgaaatt

SEQ ID NO: 13992 - DNA, 475 bp, Glycine max
  Clone ID: jC-gmle01810073a04d1
agataagatttttttttttacagcattagatatgaattatttattctacactgttcggcatcaatacaatttgattccttttatcatgtcagcacctcaaccgatgatgatctcaccaattatatttcagcaataaaaaaaaagcctaataaaatatttttttttcataaatttattctaaaatctaaaaatgtcatggaggggctgtggcatatcctacatgcaaatatgcttcctcttacattcttactcatcgcttctatcataaataggacacaccctcctaatttcgttgttcctatcataaataggacttttctcaagtagaaggaggaacttcccaattctttggcacaggcccaaaatcatagattatttctctgtggcaagaccatacaagttttatagcctctggtgttccaattcctgcacctttagcatcaccagcgggtccaaaccagtgattctgtggagc

SEQ ID NO: 13993 - DNA, 551 bp, Glycine max
  Clone ID: jC-gmle01810073a05a1
ctcatacaaaggttgctgtaggagataagattgcagtagtgctaagtgctaacacctgcagtgaacaatggcctctgcatcagcatctctgctcaagtcttcacttgttcttgacaagtctgagtgggtgaagggacaaacccttcgccaaccttctgcatcagttgtgagatgcaaccccaccaccccatcaggcctcaccatcagagctggttcctatgctgatgagctcgttaagaccgcgaaaacagtggcttcaccagggaggggtattttggccatggatgagtccaatgctacctgtgggaagcgtttggcttcaattgggctagagaacactgaagctaaccgccaggcataccgtaccctcctcgtgacagttccaggccttggtcagtacatctctggtgccattctctttgaggaaacactctaccaatccacaactgatggcaggaagattgttgacgtgctgcttgagcaaaacattgttccttgtattaaagtcgacaagggtttggtgccccttgcaggttccacgacgagtcatg

SEQ ID NO: 13994 - DNA, 513 bp, Glycine max
  Clone ID: jC-gmle01810073a05d1
gccgagcttaaaccattttgttatatattgagacataatcaagtacacaactcatagcaaaaggtttattaagctgtaaaggtgcatttaaccataaacaaaaatagtctccaagactataaaaacattacattttagacaaattagtcttccacttcatcgtccgtcaacacctactgtaactgctggtgttgctgcctaacaagtatcatattcactgcaaacatcttagtaggagtagcttttgacgaacaactccttcttggcttcctcggattcaccctcaccagtgtacttcccaagctgagcgagtgagttggacttggcacggaatgcgagtgcatcttgtgctgccttcacgttctctgggcggcctccccatgtcttcaaggcagtgttttggagggctctggcatacgagaatgacacgtgccacgggtttggagattggttcatggcattcaaattgagggtagcttcaacctcagactgtccaccagacaaaaacataat

SEQ ID NO: 13995 - DNA, 489 bp, Glycine max
  Clone ID: jC-gmle01810073a06a1
tagtctggaagcactccactccattatgctgtatgtggtggaaatcaacaatgctgtcaactgttgattgccgagggtgccaatctgactgctgagaatgcaaatggatggacccccttgatggttgctccttcagggcctagagactggcttgaggacatcttaaaaacacctccagaagaccccttacaagttcttccttctccatatatatctcttccacttatgagcattgtgagaatcgctaggataagtgtgtcagtcctatcctcttatcaattcaaccaatttcttcctatcagggcgtgtgtaatatatttggtgctatcttctttgctcctcattgggagaaccaattgaaaatttatgcttttctagaaattagcaatagtttattttcataagcacaaatcttttcattaatttgagcagacttgcctgacttcaaatcaactagcagatggcatttgtcttatcatgctttgaatg

SEQ ID NO: 13996 - DNA, 371 bp, Glycine max
  Clone ID: jC-gmle01810073a06d1
ggttaaaaaacttatttagtgcattttaccattaaacaataataacccgtccaagacctcaagcacgaacaaaaaaaaaaaaatgaggggggcatttaatcaaccaacaacaaaaagagggcgatctttagggaagaaacacaaacataaaaacccaagggaaaaaaaaacaaagaaatgtctaaggaaaaataccgctgaaagaactccacagggaaaagccaacaaaccaaggtgactacttctttttcggagcaaaaaaaggccccaaatgagggagaaacaaactcaggcccaatggtccacagaacgtcctttaagagcttctaggcattattacggacgaacctgtcccccaaaaacaacagggg

SEQ ID NO: 13997 - DNA, 378 bp, Glycine max
  Clone ID: jC-gmle01810073a07a1
cttccaatttcaatttctcgtcgtccctcatcatggctcgtctcgcgatcgctgtcgccggcgtgctcctcgtggccctctccgcctccaccgcgacggcgcgtccctgcaggaccttcataatctcctcctactcgttccgcaaccctaactccaacaccttcgccaccatcaccgagatccgatccttcacccctctctacatcaccgacaaacccaccggcaaaccctcctcctcctacgacctcttcttcccccacgcgactcacctccctgagcccgagcgcgtgaacccacgcgctcccctagggttcgcctccgcgtacgatttctccttcctccgcgaccgcaccaaggacatcctcagcgtcgccctcg

SEQ ID NO: 13998 - DNA, 535 bp, Glycine max
  Clone ID: jC-gmle01810073a07d1
ggagaaccaaaaaacgccaatcccttaaattaaaaagggaaccttaacgccgatccgggggccaaggggggcccctttggcactttcccttttcaaatccccctttaaaatttttaaccacccacataaaaaaccctccgggggcggggggaacatttttttaccgggcccttgggcggggccggagcgggggaaacaacaccggggggctcggggggaggaaatttggggggccccacttttgggggggtctgaactcccttttcccgggggggaaaatcctcaaaaggcgggggggggggggcccccggaaaaaacgccccccccgggggtctggggggggggggggaggggcccccacccccccccaaagggggggggggggcgcccttggggttgtctttgggggggccgggggggagggaaaaactcccccggggggggacaccttggggggggggggggcccccccccggcctaggggagggggcgcgggggggaaaaaaaggcccgttggggggggtgtcccggggtt

SEQ ID NO: 13999 - DNA, 520 bp, Glycine max
  unsure at all n locations
  Clone ID: jC-gmle01810073a08a1
cttccaatttcaattgctcgtcggccctcatcatggctcgtctcgcgatcgctgtcaccgccgtgctcgtggtggccctctccgcctccaccgcgacggcgcgtccctgcgggaccttcataatctactgctactcgttccgcatccctaactccaacaccttcgccaccatcaccgagatccgatccttcacccctctctacatcaccgacaaacccaccggcaaaccctcctcctcctacgacctcttcttcccccacgcgactcacctccctgagcccgagcgcgtgaacccacgcgctcctctagggttcggcttcgcgtacgatttctcctccctacgcgaccgcaccaaggacatgctcagcgtcgccctcgtcctgctattcggagacggctgcggcgccctcaccgccgtcaccatgtacactcgaatgggccgtcttctccacgcaccaccccaccgncgacttcgacgacttctccttcgacgaagacgagatcgagagccccaagaagc

SEQ ID NO: 14000 - DNA, 224 bp, Glycine max
  Clone ID: jC-gmle01810073a08d1
gtgatggaaccaaaaaccccgactccctcttattaaaaaggtaacctaaacccgccaacaggggccaagtttgccccatttgaaactttctcttttgaattcgccttggattatttttaacaacccccttgaaaaacccttcgggttcgggggacaacttttacaacccagccctttgccggcgcccggggggggggaacaacatcggggggcccggggggagg

SEQ ID NO: 14001 - DNA, 491 bp, Glycine max
  Clone ID: jC-gmle01810073a09a1
ctctattctcttctgcatcaccatttcatcactgatagaacaacacaacacatcaaacgagcctctcgggttccaatgtgaagagagccaacatggctacaatcgctgccaggattctcggttccaactcaaggccagcggtcgcgctccgccgcttgcggtggccggcgtactcctccgcctccgcggtggtggcggagccggagaccacggaggtgaaggactacgccgattaccgccgctccctgtacggacagatcacgcacaaggcgctcctcgtcgacgccgttggcacgctcgttctcccctcgcagcccatggctcagatatatagaaagattggagagaagtatggagtggcgtattcggaagatgagatactgctcagatatagaagagcgtatggtcagccttggggaaaatctcgtctcagatatgttaatgatgggaggcccttttggcaatacatagttagttattctactggctgc

SEQ ID NO: 14002 - DNA, 484 bp, Glycine max
  Clone ID: jC-gmle01810073a09d1
caagggaaaagataaaagctcggacctacaactattaatagtttttacaggctcacatcttcttcatacatatatacatacattgcaaaaaggagcagaacatgtacagccttaaagctaaagcctaaaggactctatacacgcataacatcaaacttattgtaaagaaatcatctttcaaacctgaaccccaatcctgtgtgctacctccttaaaggagtgaacatggtttccccaaagccaagcattacagccagcatccctggcaccccatatatcatttctgcggtcatccccaacatgaacagcatcctcaggttttacatccaataattcacatgctttgagaaatatagttggatttggtttttccgccgcaacctcagatgacactgctactgcatcaaaccaattgacacaatttaatgcccgcaggagaggtcttaatttagtgtcaaagtttgacacaacagctaatttcaca

SEQ ID NO: 14003 - DNA, 635 bp, Glycine max
  unsure at all n locations
  Clone ID: jC-gmle01810073a10a1
tgtnnnnannnnggagggggagccagtcnacagatnctgtangaccnnctcatngcacttgtacgctaagctcgcgaatntcggcttcgagagattgagacaggctccccacttaagaagaattgcatagtgtataatggtcggggtgaaagaatatctgaacgtgttgagagtatcacgtgttagaggcattttgtctttgagtggcggcgaaatggctggaatgatctatctacaacgttgtttcacgatgccatgtatnatgtcttcagaacaaccaaccatacctttcaatggttcttatctctgagctggtggaaagcaagtgtatcttgttaccacagttgttatgctagagaaacaangttcttggagaagtgaatgctgagcttcttgacacccaagtgaatcctgctgtgtgggaaattagtggacacatggttttaaagaggaggaaggattatgatgaggcgtctgaaggcaatgcttggaggcttcttgctgaggtgtccctttctcaagagaggtttcaagaagtcaatgatctttgttttgaagccattggctgtggtgaattggaggatgtcaatgttcacagtgtcaaaagagaagttgatgcagtcagcacaagcgaa

SEQ ID NO: 14004 - DNA, 459 bp, Glycine max
  Clone ID: jC-gmle01810073a10d1
aacaaggacaaacagttaccgggatttattatttctcgcagcatgaaagccacaatagacagtcaagtcaagcattatgatacatcagaccccaaaataccaacaacactactcagctgagcagttattatatcgtactttcacatgaaagtgtcataaaggcagataaaagcatatacattcaacacacacgaccataaggctcaagcacaaggcaatagtatgacttaaacggggacacatttcagcaattattcttaaaacactgcagattttctgaatttgttcaaaatacaagagccttgttactgtagaaccacacattcttgtgaaccagccaccaccaccacagtagggtgttcgcctgtgctgactgcatcaactttttttttggcactttgaacattgacatcctccaatttaccacagcccaagggtgcaaaaacaagaacattgact

SEQ ID NO: 14005 - DNA, 457 bp, Glycine max
  Clone ID: jC-gmle01810073a11a1
ctttgatgaaaacaaattcaattttactaaagtcgggcaagaagaggtcctcttgcaatttgaagctagcgaggatggacaagtccacttctttccaaatgctccagttgatgttgacaattctcccagctttgttgccatcaatgtcaatactattgagtatgggcatgtcttgctgattcctcgcatatttgagtgtatgcctcataggattgaccgagagagcttcctccttgcactttagatggcagtggaggccgataatccttattttcgattgggtgacaacagcttgggtgcttttgcaactatcaaccatcttcacttacaggcttattatttggctctgcccttcccagttgagaaggcccccactaagagaattgcaagtgttaatggtgggtgtgagatatctgaactgttgacgtattcggatcgtggcttttgttttgacggc

SEQ ID NO: 14006 - DNA, 453 bp, Glycine max
  Clone ID: jC-gmle01810073a11d1
ctcgcagcatgaaagccacgatggacagtcaagtcaagcattatgatacatcagaccccaaaataccaacaacactactcagctgagcaggtattatatcgtactttcacatgaaagtggcataaaggcagataaaagcatatacattcaacacacacgaccataaagctcaagcacaaggcaatagtatgacttaaacggtgacacatttcagcaattattcttaaaacactgcagattttctgaatttgttcaaaatacaagagccttgttactgtagaaccacacattcttgtgaaccagccaccaccaccacagtagggtgttcgcttgtgctgactgcgtcaactttttttttgacactttgaacattgacatcctccaattcaccacagccaatggctttaaaaacaagagcattgacttcttgaaacctctctcgagaaagggaca

SEQ ID NO: 14007 - DNA, 469 bp, Glycine max
  Clone ID: jC-gmle01810073a12a1
gtccaatggagacccatcattaccaccttcactttcagtgctgccacggttccaagatttctgagccaccctcttcctcttccaccttcttcatggcgaccccttcttctagccagacccttttccccttctctcgtctgttgctcctccaacaagcgttgggactccaacgccgaaacctttcgcccccgaaatttcacccccaacgatgtcagaaagggacaagaacaagaacaagaactaaaagaagggttcgggaagaagagaaggtggtggtctgatgaagatagagaatttgaggataaagaagaagaagtagtagaagaaacttctagtgggattttggaagatgccattgacagtgtctggtttctccagattttcaaatcctatggggggacgctgcctgtcatactcatgtcatgggtgatatctagtggcccaaaagctttcctcatggcagtaattc

SEQ ID NO: 14008 - DNA, 506 bp, Glycine max
  Clone ID: jC-gmle01810073a12d1
gctgatgttgatgaacttaattcatcatctaattttatcaatactactcatgtatgttgacaaacaacataaaataactgcttggtttcttttcatcagaggaagatgtaaagaatcacttccaactcatccaagctcaagttatttggtaaagactattacagcatctttgtccatgtgcccaaaaatgggaaaatagcaaaaagcactcgcaacagcagtggtgtgtcactttttctttgtctcctactcaacctaccaccttccatcggcgtccttcgtgatccatccatgccacgggaagactttgtcgctggtcttgacctctccaagtcattccatccaccaaaactcggtgctgcttctcggctgcctgtatcaactgaacctttatcctcaactacccatgattggtacccctttttgcgtttctgtttttcttctgggtcttcctaactctggtgtaatttctaaacggggtttccttctcaatctgtacttgcgtt

SEQ ID NO: 14009 - DNA, 424 bp, Glycine max
  Clone ID: jC-gmle01810073b01a1
gcagacttaacagcagcacacagcgggttactgtctgttcaagctaccatctctctctctgtttcttagtgcctccttgccaggtgctgccactctctctttctctctcttcatccttctgttgggttggttgtggagcgttgtgatctggtgtgcacgtgccgacattctttaccctcgccacagatctgaagtgttcaagcttggatcctgtgcttctggccgtaaatatggcccaagaaactttcctattcacactcgaatcagtgagcgaggggcgccctgacaagctctgtgaccagatctccgatgctgtgctcgatgcatgcttggagcatgaccctgacagcgaggttgcctgtgaaacctgcaccaagaccaacatggtgatggttttcggagagatcacaaccaaggccaacgt

SEQ ID NO: 14010 - DNA, 356 bp, Glycine max
  Clone ID: jC-gmle01810073b01d1
cgtattattgaatactctctataatttgggaggattacgtgtttctagcataaatcttgagagaacatttttttttgttccatcatataaaagatatatgttttgtaagaacacgtacaagttcccaaaggaaagggggacattcataaaaaaatgcagaaaaaaaaaaaacagacttgtgtacgaggggcggaaacatagagaaaattctcccaattagataataagaagccagttgttttgcacaagccccttgctaagagtgctggaaccccttttaactaaccaggtaccttctcccccatgagtggcttgaccacttcccatgtgaagtcaggggcaattctggcaaagtg

SEQ ID NO: 14011 - DNA, 469 bp, Glycine max
  Clone ID: jC-gmle01810073b02a1
gcaaacttaacaacagttcagagcgggttactgcctgttcaagctaccgggtctctctctgtttcttagtgcctccttgccaggtgctgccactctctctttctctctcttcatccttctgttgggttggttgtggagcgttgttttctggtgtgcacgtgccgtcattttttaccctcgccacagatctgaagagttcaagtttggatcttgtgcttctggacgttaaaatggcccaagaaactttcctattcacatccgaaccagtgaacgaggggcaccctgacaagctctgtgaccagatctccgatgctgagctcgacgcatgcttggagcatgaccccgacagcaagggtgcctgtgaaacctgcaccaagaccaacatggtgatggttttcggagagaacacaaccaaggcccacgtggactatgagaagagtgtgcgtgacacatgcccgaacattggttt

SEQ ID NO: 14012 - DNA, 465 bp, Glycine max
  Clone ID: jC-gmle01810073b02d1
aatattaatggatactctctataatttggggtgattacgtatttctagcataaaacttgagagaacatttttttttgttccatcatataaaaaatatatggactgaaagaacacattcatcttctcaaaaaaaagggggacattcataaaaactttcagaaaaaaaaaaaacagaattgcttacgagggaaggaaacatagagaacatttcacctatttgataatcagaagcctgtagtagtgcaaaaacccctttccaagagtgcagaaaccccttttaattaaccacgaaccttctcccccttgagtgacttcaccacttcccatgtgaagtcagggacatctctgtcaaaaagtccatatgccaaactctttaagaacctgccgattccacccctctcgaaacaaggttgacggaaagcatgcccagcctgaaaaaaaactttcttcacaatgcttagattt

SEQ ID NO: 14013 - DNA, 532 bp, Glycine max
  Clone ID: jC-gmle01810073b03a1
ggcccagttctcacagttacgactgtttcaatgcttgagcatgtgaataagttgcttgagataccaggatcaaagttgctattcgggggtagtcctctagagaaccattcaattccacctatttatggtgctattaaaccaacagctgtctatgttcctctcgaagaaattatgaaggataagaattttgagcttgtaacaaaagaaatatttggaccatttcaggttatcacggactatcaaaacagtcagctagcagttgtattggatgctttggaaagaatgcataaccatttaacagctgctgtagtttcaaatgatcctttgtttttacaggaagtcattggcaaatcagtaaatggtactacttatgctggtttaagagcaaggacgaccggagctccacagaatcactggtttggacccgctggtgatgctagaggtgcaggaatttggacaccagaggctataaaacttgtatggtcttgccacagagaaataatctatgattttgggcctgtgccaaagaatt

SEQ ID NO: 14014 - DNA, 402 bp, Glycine max
  Clone ID: jC-gmle01810073b03d1
agataagatttttttttttacagcattagatatgaattatttattctacactgttcggcatcaatacaatttgattccttttatcatgtcagcacctcaaccgatgatgatctcaccaattatatgtcagcaataaaaaaaaagcctaataaaatatttttttttcataaatttattctaaaatctaaaaatgtcatggaggggctgtggcatatcctacatgcaaatatgcttcctcttacattcttactcatcggttctatcataaataggacacaccctcctaatttcggtgctcctatcataaataggacttttctcaagtagaaggaggaacttcccaattctttggcacaggcccaaaaacatagattatttctctggggcaagaccatacaagtt

SEQ ID NO: 14015 - DNA, 510 bp, Glycine max
  Clone ID: jC-gmle01810073b04a1
ggcccagttctcacagttacgactgattcaatgcttgagcatgtgaataagttgcttgagataccaggatcaaagttgctattcgggggtagtcctctagagaaccattcaattccacctatttatggtgctattaaaccaacagctgtctatgttcctctcgaagaaattatgaaggataagaattttgagcttgtaacaaaagaaatatttggaccatttcaggttatcacggactatcaaaacagtcagctagcagttgtattggatgctttggaaagaatgcataaccatttaacagctgctgtagtttcaaatgatcctttgtttttacaggaagtcattggcaaatcagtaaatggtactacttatgctggtttaagagcaaggacgaccggagctccacagaatcactggtttggacccgctggtgatgctagaggtgcaggaattggaacaccagaggctataaaacttgtatggtcttgccacagagaaataatctatgat

SEQ ID NO: 14016 - DNA, 521 bp, Glycine max
  Clone ID: jC-gmle01810073b04d1
agataagatttttttttttacagcattagatatgaattatgtattctacactgttcggcatcaatacaatttgattccttttatcatgtcagcacctcaaccgatgatgatctcaccaattatatttcagcaataaaaaaaaagcctaataaaatatttttttttcataaatttattctaaaatctaaaaatgtcatggaggggctgtggcatatcctacatgcaaatatgcttcctcttacattcttactcatcgcttctatcataaataggacacaccctcctaatttcgttgttcctatcataaataggacttttctcaagtagaaggaggaacttcccaattctttggcacaggcccaaaatcatagattatttctctgtggcaagaccatacaagttttatagcctctggtgttccaattcctgcacctctagcatcaccagcgggtccaaaccagtgattctgtggagctccggtcgtccttgctcttaaaccagcataagtagtaccatttact

SEQ ID NO: 14017 - DNA, 275 bp, Glycine max
  Clone ID: jC-gmle01810073b05a1
cttatacaaacgatactgtatgatattggatggcgtggaaactaacagttctcaccggtgatgaacaatgggctttgcattactacctctgataatgcaattgcttggacccgactagtgtgtgcgcgtgaagggacaagccattggcctgccgtctgcgttatgtgagatacgcaacacctccacactagtacgtcttactcattatagactgcatcctattcttcagacactgtttgagaccgtacgtaacttggccacacctatgctgggat

SEQ ID NO: 14018 - DNA, 440 bp, Glycine max
  Clone ID: jC-gmle01810073b05d1
gttatatattgagacataaggaatttcacaatttcatagctaaaggttattaagctgtaaaggtgcatttaaccatgaacaaaaatagtttccaagactataaaaacattacatattagacaaattagtcttccactttatcgtccgtcaacacctactagaactgctggtgttgctgcctaacaagtatcatattcactgcaaacatcttaggaagagtagctttagacaaacaactccttcttggcttcctgggattcaccctcaccaatgtactttccaagctgagcgagtgagccggactaggaacggaatgcgagtgcattttgtgctgtcttcacgttctctgggcggcctacccatatatataagggcaaagtttcggaaggctctggcttaccacaatgacacgtgccacgggttttgagattggttcatgg

SEQ ID NO: 14019 - DNA, 466 bp, Glycine max
  Clone ID: jC-gmle01810073b06a1
ctcatacgaacgttactgcatgagatattatggcttttaaactaacaactcacacctccggggaacaagggcctctgcatcaccatctctgataatgtcatcacttggtccccacaagagcgagtgggtgaaaggacaaacacattggcagccgtcaacatcaacagtgagacgcaacaccaccaccccatcccgcctgaccatcatagctggctcctatgcttaagagctcataaagaccctgaaaacagcggctataccagggctgggaatagcggccataaatgagtccaatgctacctgtcggaagctgatacgcttctatatggctagagaacactgaagctaaccaacagacataccgtgccctcctcgtgacagctacagaactatgacaatacatacctggcgccactctatatggtgaaacactctatcaattcacaactgatggcaggaagattgt

SEQ ID NO: 14020 - DNA, 444 bp, Glycine max
  Clone ID: jC-gmle01810073b06d1
gttatatattgagacataaggaagtacacaactcatagcaaaaggtttattaagctgtaaaggtgcatttaaccataaacaaaaatagtctccaagactataaaaacattacattttagacaaattagtcttccacttcatcgtccgtcaacacctactgtaactgctggtgttgctgcctaacaagtatcatattcactgcaaacatcttagtaggagtagcttttgacgaacaactccttcttggcttcctcggattcaccctcaccagtgtacttcccaagctgagcgagtgagttggacttggcacggaatgcgagtgcattttgtgctgccttcacgttctttgggcggcctccccatgttttcaaggcagtgttttggagggctctggcatacgagaatgacacgtgccacgggtttggagattgggtcatggcattc

SEQ ID NO: 14021 - DNA, 439 bp, Glycine max
  unsure at all n locations
  Clone ID: jC-gmle01810073b07a1
ctagcctaaccccttcttaaagcaaccctctttgttacttcctcttgttggtaaagggcgattaacacaataaacctttacagcaatatcacatcaacttgtcatcttataattgaactgtatgtaaaaaaaaaatttcagaagaggttgcgtaccctactttcttgtcatggaggtggagaatcagacgcaaagaagatatcgaaagctacgcacttggttcaatagcaagcaaagggaagataggccatctttattcagtttgaacgaaatacaagatggagcacaacatgagagtgatgactatgagggcaatctctccctgcggncattggaattagatccatgcatttcaacagataaactaaggggtctttgttggtacttggaatgttgctggaagatctcctgtaagaagtttgactgatgacttggatga

SEQ ID NO: 14022 - DNA, 537 bp, Glycine max
  Clone ID: jC-gmle01810073b07d1
gatcaatgatatttgtataattcacaaaatttatattgtaaattttttcttagttggacttagacctttcaacaatagacctaacatccaccttgattatcaacaccaattgtatttaccatgccttgtcatctaacaataaccttccaaatcctgctatccaaaaaaatgtggggttttaggaaaagcaattatgtgtcatttttgtgatgaccatgacctggctgaaaatttgtgtcacccctttaaacgaaagttttatttgctagtgttagcagccttgtacattcttggttaacgacgataataaggaagattttccgtcttcatctcctttgttcatcccattcttgggattcaacattgttggggggatattatgcaaccccataagttctctgttagatgatttaatttcaatctgtgtaaagaaaagtgctgaaacggggcgatgatcagagaacttgctttcactccgaaaatagtgaagttgctccactcctttaccataccatagaattctatcacaccatgctg

SEQ ID NO: 14023 - DNA, 480 bp, Glycine max
  Clone ID: jC-gmle01810073b08a1
ctagcctaaccccttcttaaagcaaccctctttgttacttcctcttgttggtaaagggcgattaacacaataaacctttacagcaatatcacatcaacttgtcatcttataattgaactgtatgtaaaaaaaaaatttcagaagaggttacgtaccctcctttcttgtcatggaggtggagaatcacaagcaaagaagatatcaaaagctacgcaattggttcaatagcaagcaaaaggaagataggccatcttcattcagtttgaacgaaatacaagatggagcagaagatgagagtgatgactatgagggcaatctctccctgcggtcattggaattagatccatgcattctaacaaataaactaagggtctttgttggtacttggaatgttgctggaagatctcctgtaggaagtttggctgctgacttggatgagacggtgaatctcaagaatgctgcacatgtatatgttctggg

SEQ ID NO: 14024 - DNA, 381 bp, Glycine max
  Clone ID: jC-gmle01810073b08d1
gatcaatgatatttgtataattcacaaaatttatattgtgaattttttcttagttggacttagacctttcaacaatagacctaacatccaccttgattatcaacaccaattgtatttaccatgccttgtcatctaacaataaccttccaaatcctgctatccaaaaaaatgtggggttttaggaaaagcaattatgtgtcatttttgtgatgaccatgacctggctgaaaatttgtgtcacccctttaaacgaaagttttatttgctagtgttagcagccttgtacattcttggttaacgacgataataaggaagattttccgtcttcatctcctttgttcatcccattcttgggattcaacattgttggggggatattat

SEQ ID NO: 14025 - DNA, 528 bp, Glycine max
  Clone ID: jC-gmle01810073b09a1
ggtgaaaaagggggagttcttattccttttagacgcttcattgatcggcgatttctgatacatggcggagcatcacgaacacgaggaagtgaagggtgagtccttgttggagaagatttctgggaagatccacgaccactattcctcgtcttcgtgggattccgacaacgacaaaaccagcgccactgattccttcaagtctaatgttttcaggcttttcggcagagaaaagcccattcatcatgttcttggcggtggaaaaccggctgatgtttttctatggagaaacaagaagatatccgcatcgacactcggagttgcgaccgctatatgggttctgtttgaattgcttgagtaccacctcctgactttggtttgccacttcctgatccttgctctggcggggttgttcttgtggtccaatgcattcactttcatcaacaagagtccaccaaagatcctacatgtgcacatttcagaggaacctgttgtaaaattcgcctctgctattagaattgagatcaatcg

SEQ ID NO: 14026 - DNA, 433 bp, Glycine max
  Clone ID: jC-gmle01810073b09d1
acttcacaattacaagtcatccataagcagcatggaggatgtcttgagaggtacatataaagccagaagaaaaatatataagatacttttctttcacagtgtctctagtaaaaggaccctaaaaaaataaaatatgacatcatagggttcctgaaaccccactacaacatatttggcagaatctattgcccacttcaatctttctttttatcatttcacaggtcctctgggtattttgctcaataccttcccataaaacactgcatattgcttcttaatctcggaaattgctttctcaccaaaagaggcgacatgatcttcatatttctcataaagcacaggcacagtgtgaagcaaaacaaaagctttgttgaacaaggtcaagaagttggcccaacaaccccgaatagagaaaacccatgatccagcaatc

SEQ ID NO: 14027 - DNA, 472 bp, Glycine max
  unsure at all n locations
  Clone ID: jC-gmle01810073b10a1
naatggtatgattcaatttctgagacgcttggcgcttgtgctcacctcgtaatttcggtattgggttcatgcgcaaacacaaactcaaacacacacactttttcttctatcttctcccaatttgagttgagattctgagagtaacaatcaaagtttggaaaaaaaaaaagttttgagggaagaaaagaccaatatgctgggtgtggccactcttactttgggttcatccaccacaatggtggctcagaaccatgctcaacaacatgccaccactcttgcctcagccaatggaaacagaaggcacagtgtttccaacaggactcactccttgcctatgagtttggtgtctcccaccaaccaaagtttcacctttctctcttcctttaaagaaccaacacatgcacgccccttcaccactgctngtgcatctgttgattctgaccagcttgattcatttgatcctcccaccaag

SEQ ID NO: 14028 - DNA, 87 bp, Glycine max
  Clone ID: jC-gmle01810073b10d1
agggcgagatacgatcacatacggagaacggggagccggatcccccctcgaggaccgacgtgacttagatcagcggcgctaccttat

SEQ ID NO: 14029 - DNA, 509 bp, Glycine max
  Clone ID: jC-gmle01810073b11a1
ggtgaatccctggctcaagttttgtggttgattggtgtggaaccagtggctgatacctttggcagggtaaaccgggtggaacctgtaagtcttgaagagcttggaaggcctaggattgatgttgatgttaattgctcacgagtgtttagagaccttttcatcaatcagatgaatcttctggatagagcagtgaagatggttgctgaattagatgaaccagcagagcaaaactatgtaaaaaagcatgcatcaaaacaagctcaagcccttggagttgaagttcgagaggcagcaacaaggatcttctccaatgcttctggcttctactgctcagacataaacttggctgcggagaattcttcatggaatgatgagaagcagctccaagacatgtatcttagcagaaagtcttttgcttttgattctgatgcccctggtgctggcatgactgacaaaagataagtcttcgagatggctctgagcacagtagatgccacattacaaaattt

SEQ ID NO: 14030 - DNA, 418 bp, Glycine max
  Clone ID: jC-gmle01810073b11d1
gttgaagaagaaaattatgaacttgcacctttttttggttaccggggttggtgttcaaaactggacaaaggatacttgtttttcaaaaatgggaaaagggaaacagaaatcgcatttaaggggtgctcttcttttcactggggtgggctcttttcaataaaagcttttaacttcagggatcaatgccgttaattttgggttccacttttgaatacaactgcctgggcttttgaatttttttttctgaaatttcccaataaccacgtccattgggttccaaaaatgtttgcaccggtttcctgaaggagtttggattaccgctcacgagcttgttcaggctttgtctatcttgaaatgaaaaatgggttggcctttttaacccccccggtataaacttggcccgaagtgccactccccc

SEQ ID NO: 14031 - DNA, 487 bp, Glycine max
  Clone ID: jC-gmle01810073b12a1
ggtgaatccctggctcaagttttgtggttgattggtgtggaaccagtggctgatacctttggcagggtaaaccgggtggaacctgtaagtcttgaagagcttggaaggcctaggattgatgttgctgttaattgctcatgagtgtttagagaccttttcatcaatcagatgaatcttctggatagagcagtgaagatggttgctgaattacatgaaccagcagagcaaaactatgtaaaatagcatgcatcagaacaagctcaagcccttggagttgaagatcgagaggcagcaacaaggatcttctccagtgcttctggcttctactcctcaaacataaacttggctgtagagaattcttcatggaatgatgagaagcagctccaagacatgtatcttagcagagagtcttttgcttttgattctgatgcccctggtgctggcatgactgacaaaagataagtcttcgagatggctctgagcacag

SEQ ID NO: 14032 - DNA, 375 bp, Glycine max
  Clone ID: jC-gmle01810073b12d1
aagaaaacgattatgaacttgaacctttatttgttcaccggggttggggttaaaaactgcccaaaggagacttgatcttaaaaaatgagaaagggaaaacaaaactcacatttaaagggggctcttttcttcactggtgggggctcttttcaaaaatagctattaactttagcgaacaatgcctttaattttgtcttccacttctgaaaacaaatggctgagcttttaaatattatcttttgaagtttcccaaaaaccacgttcattggtttccaagaatgtctgccccaattttcttaaggagtttggattaccgctcatgaacttggtcaacatttgcccatcttgaaagaaagatgggttgggttttttata

SEQ ID NO: 14033 - DNA, 400 bp, Glycine max
  Clone ID: jC-gmle01810073c01a1
gttgattgacattgtgaggatggatttcttattttgtactgaaaatgggaacaccaaggatgagctgagttacctacagatgagagtctgcttactcagataaaggatgggtttgctgagggtaaggaccttgttgtgtcagttatgtctgcaatgggtgaggagcagatttgtgcactgaaggatattgggccaaagaactagcctcaattgctggtagtttgctgttttcatttatgcaaaagttatatttttttgtatgatcttgttaaaccccggagttatggagactctaagtcagactatttttatcaactgtgtttatggatgtgacagaaactgtttaacatttctctggttcgatggtgtctagatatttttttgataaaaatccactatc

SEQ ID NO: 14034 - DNA, 382 bp, Glycine max
  unsure at all n locations
  Clone ID: jC-gmle01810073c01d1
gggccaaaagggggacctcnccagactcgaaccactgaaaataacggggcacccctactgtcgggggcgccggggaattcctgtaaaaggttagtggtttattggagagaaccataaacggccttaaggcagagaaaagcaaacggacctgtacatccgtaaacacaggaggaaaactagtgctgctgagagtattcattcctgaggggttaaacacgatcatacaaataatattaacttttgcgtaaatgaaaacagcatgcttcctgcattagaggctccttcttaggcccactatccttcagagcacgcatcagatcctgacccatcgcttacattactgacacaacaggggccttacccgcaccaaacccatgcttta

SEQ ID NO: 14035 - DNA, 362 bp, Glycine max
  Clone ID: jC-gmle01810073c02a1
gtgccgggactgcatcgaacatttgatatgcacctctagctcaattcgtgggcctgcgctgtgttgctatcggtgctgtcgagattgggttgttattaatgccttcgtaaaccgagaccttagtgccctactttcttactcaaagggtccaatgatgtaatatctgaaggctgtggaggactttgaattagtaaacaagcacgcaatatgagaaatattgtggtaaagatccgttcttacatgagtttttagtccttttcggttcaaaagggaaatacattattggtgcagaattaataacctgaacttaagggtacgtcactgtggtgaaaaggtttgtcctccctggttttgcatgatgg

SEQ ID NO: 14036 - DNA, 383 bp, Glycine max
  Clone ID: jC-gmle01810073c02d1
gaaaaaactagggcggagtaatgcactatgcatgtaattcattaatttgattaccactgctcaaaaaccctcgttttaggctatttaaaagtgcaagggacataccttcacttttaaatgagggagctagcttaacctttgagcatttgttcacacacacaaaccaaaacaaaaagagaaacattccaaaatttgccattattttggctttaggacctggatgtaaagttcaggcccataaatttacataattaaatcgccccacccttttccttttctcactcaaattttatttttaaaacttgtatatacactaatgttaaagatgataccactgaaagtgctctttctaaaccacctgaaatgaaacgttcgatgttaaa

SEQ ID NO: 14037 - DNA, 530 bp, Glycine max
  Clone ID: jC-gmle01810073c03a1
cggctcgagtatttccgcagctcaattgtttgaaacttgaagaactaccaaagctgagaagcttctataaaggaagtttattaagtttcccatcattggaggaattgtcagtagtgtggtgcgagtggatggaaacattatgtccaggtacccttaaagcagacaagttggttcaacttcaacttaacagggacttatatgaacttgaggagtcatcagatgctatcaaattggaatgacctgaactctaccatgcgggaggcatttagggaaaagttatggcactctccacactacaagagatatgttgacctcaaagatagcccactacaagagatatggcttaggcttcactcactgcatatccccccacacttctgcttcacttacttagacaccttgattgtggacggctgccattttttatcagatgcggtgttacccttctctttacttcctttattgcctaaattgaaaatattgaaagttcgaaactggtgatttgtgaaaatcatatttgatgtgacaac

SEQ ID NO: 14038 - DNA, 506 bp, Glycine max
  Clone ID: jC-gmle01810073c03d1
cggtaggcaccaggccacttaattcgttgatctcctctaaccattttctttctggtgaatcaatctcctctaactctaatattggagtcattgcccttgccagaaatgcctatcggatttgcatggcagagttcagatcagtttccaatgggatatgatctctccattcgaatatcacttctaacagcttgtctgttttgactgtacctgcacacaaactttccatcctcttgcaatactttactgtgaattcctccaaggacgggaaacttaaactccctttgtagaaccttctcagctttcctaaatatttaagtttcaaacaattgagctgcttaaatattatctcattctcatctgattcatccccttcctctgttgaagacactatctcttcaattgaatcacacctttttatcttcactgttttgagttgacccaaacttcttgctgttgaggatgtgaacaaatatagcagactcttgcaactttctactttcaaatat

SEQ ID NO: 14039 - DNA, 288 bp, Glycine max
  Clone ID: jC-gmle01810073c04a1
tctaactgtgttgggaagaggaacaaaagggatttctttatttttatctgcctgggaactttgacttcttccctttctggtgccgttgcagttcaaagaatttggacatctacaccagcattactggcaggagaaacatggatccattatgcgttagtaaaacatccagggttaattgtgtttttggtgatggatgctgttgttttttttgcagcttcgacattaacgcttacacaggctttcatgatagctcgaaatgtgaccacaaatgaactagcgaattcctcc

SEQ ID NO: 14040 - DNA, 559 bp, Glycine max
  Clone ID: jC-gmle01810073c04d1
gttccaatcctttaaatgcatttcctcctaaagtaatgggtatcccaccaaacaattgcacaactggcacatgagtgtatcaaaataatttgtattctctgataaaagaaaaatgttttatttctttgtgctctgtaataaaatgtacatgtgtcagagaatgaaatcctagctgaaaatgactatcatctacatatctacgaattggaactatgtgataatataacaaaggatgcatggacacagcctgggagaatgttctaagttgccacctgctgtaatggaggccaagcaatctcatcatcatttgtatagccgagaaaaaggaagtcagcacaattcttccaacaaccgtggttatatgggtttctgaaccgcccatcaggaccacgaaggtaatcataacgggaggaatttgctagttcatttgtggtcacatttcgagctatcatggaagcctgtgttagcgttaatgtcgtagctgcaaaaaaaacaacagcattcatcaccaaaaacacaactaaacctggatgttttactaacgcataatggatccatg

SEQ ID NO: 14041 - DNA, 612 bp, Glycine max
  unsure at all n locations
  Clone ID: jC-gmle01810073c05a1
aaaaaaaaaaactcagatagaagagagagaaagggaagaaagagaaagaacaaagaaggggaaaaataactgataactgagataacaataccatagatatagagagatagttccgagctccaattcccagaaaataaaaattaaaactttgcttcgctttttctcttcattgtttttcttcctcttctacccctttgatctcatgcaatctcccctcatggatccctttgatttgattcgcaaaggggtttaattgcttgagatctcgtaaaggttttggctttcgtaatggaagggtttggctgaagctatctggaatatttgtgttacatttttggaggtccatctatgttttagtcattttgtccatattcttgtcaataatgagcttatccaagaaaggttcccaaacagacacaaaactgagctccttaaacaaagcaacctatttgaatccaaatgcagcagagtttgttccatttgccctcagatcatcgccatctggaagcaccagctcggtagatgcagcagcgaggtttactactgctggatctcttgggaaagcagtnttagatcgatcagaatcatccatttcaaataattccgatgatg

SEQ ID NO: 14042 - DNA, 552 bp, Glycine max
  Clone ID: jC-gmle01810073c05d1
ggcttggccattgccattacttcccatatacagatacaagaatgactacaatgtctgtgttcatgatggattttttttttactgtcagaaacttgtatacctcctcggctcaatatatcacaacacgaagcaggcctggctgcggttccgtgaaatcaaggccttcttcttcaagtagataacgctgtacagctatcgggagtcttgcgggagtgcgggagccccgagtatggtgaccagtgccaacacagatgtaaacctgcaaacgctgctcagcggctctggccgtgcttcttagcacactcagttcgtgtttcagcacgtgaatcgcttcacttacgtgcagaccgtgtaggtctatcattctctggtgccctcttccattctctggagcaacgggattcctctggcggtaaatagattcttgagcttttccatgagctgctttcatatgcatgttgtgcagttgccccttaacacttagctcctttgcagggccttgttccaataaggaggcttgtcggcctgctaaaatatgcttaccaagcgtgc

SEQ ID NO: 14043 - DNA, 496 bp, Glycine max
  Clone ID: jC-gmle01810073c06a1
atttgacaggttcatcatcataacctttaatgaaaataaatggctgaggcaagcattggcagcaaaagcagcagatggtctttacagggaatgacagctctcgtcaccggtggatccaaaggaatcggatatgctatcgtggaggagttggcacagcttggagccactgtgcacacttgcgctcggaacgaagctgaactcaatgaatccttaaatgaatggaacacaaaaggatacagagtaactggttccgtctgtgacgcggcgtctcgtgcaaaaagacaagacctcatagctagagtctccaatgagtttaatggcaaactcaatatccttgtaaacaacgtgggaacaaacgtaccgaaacatacccttgatgttacggaggaagacttctcatttctgataaatacaaatcttgaatatgcttaccacctaagccagcttgcacatcctcttctgaaagcattagaggctgcaaacatcatttttatat

SEQ ID NO: 14044 - DNA, 555 bp, Glycine max
  Clone ID: jC-gmle01810073c06d1
gaaaataaaataatactttattattaaaattaaaattgattacatgatgattggatcgtggacatacaaatttattcccaacaaattccccctcccaaatgatatagattgaaccaagggactttcagctatttattctcaatactaatataaaaactagcaacgtatgcatcagaccttgctcttaacatagtttatataaaaatgctaacaacacattatcttatacactcttttcaatacattttttttattgcttgaaattttttagatatcacaaaaatatatgggtcctagatcttattttcatgattttgtaattttttattatttgtaacttatggtagaatatgtgtcaagagaagtgtgttagagagtgtgttggtagtacttctctaatttatatagagaccattcactgttaatccaccatcaacacaaatggtctgtcctgttatgtaagaggctgcaggtaagcagaggaatgccaccaatgaagacacttcctctgcttctccaatccgtccaaggggggtttgcgaaatgaaagcatta

SEQ ID NO: 14045 - DNA, 501 bp, Glycine max
  Clone ID: jC-gmle01810073c07d1
ggggtcccaaatttctaatatataaaagtataatggttctcatacagatttttctgctacacaggtgtagttacattagtgaaaatggagttaaacacaagggaactgcaaaagggagcaaaagattgcattgcatgtaggcatcctcattgtccagggacaaagttagtggcataagcccaagcattgttggcaacaggatcagcaacgtggtcgtaaaggttctgaatagggcccttgccagtgacaatagcctgaacaaagaaaccaaacatggagaacatagccaagcgaccgttcttgagtttcttgaccttcaactaagcgaatgcatcatggtcatcagccagaccaagagggtcaaaagctccaccagggtagattgggtcaagtccttcaccaagtggtcctccaccaactctgtaaccttcaacaaaccccatgagcacaacctgaacagcccaaatagcaaggatgctctgagcatggatcaggtttggg

SEQ ID NO: 14046 - DNA, 347 bp, Glycine max
  Clone ID: jC-gmle01810073c08a1
aaaacactcataacacaaagcacaaatctttgcttatactcgagttaaaaaaaggcagcagcttcttccatggctctctcattcccatccttgactggcaaggtcgggaagctgggcccatcagcccaagacgcgggaacggtgagcatgatgaagaccgtcaccaagcacgactactaacgaagcctaagggacgggccaaacccagtcaaggacttgggcccattctatggcgagaccgcgtgctacctaaccggcgtgttcccaggccactacagctgggacactgctgggcttaacacataccctgatacctgcgacaagaaccgtgaactcgaattgaacca

SEQ ID NO: 14047 - DNA, 460 bp, Glycine max
  Clone ID: jC-gmle01810073c08d1
gtaaaatgcaagtaacattaagttggattcggatacgcaagataattcacattatctgaagtacttcaccaaacacaaatctaaaaactctcaaaagtcatttcgttctttgacgctcactttccggggacgaagttggtggcataggcccaggcgttgttgttgacagggtcagcaaggtgatcggcgaggttctccaatggaccctttccggtgacaatggcctgaacaaagaagccaaacatagagaacatggccaatcgtccgttcttgagttccttcaccttaagctcagcaaaagcctctgggtcatcagcaaggcccaatgggtcgaagctgccacctgggtagattgggtcagtgaccttaccgagggggccaccagcaatactgtaaccttcaacggccccattaggataacttgtgtggcccagatggcgaggatgctctgggcgtggat

SEQ ID NO: 14048 - DNA, 441 bp, Glycine max
  Clone ID: jC-gmle01810073c09a1
gcaattgacgttaaaagctttagccttttctacaactacaaacacaaagacatcatcatccagggctgcctccgtctccactgtcggagctgtcaacagagctcttttgaacctgaatggttcttgagctggagcttcagctcccaggtcagtcttctttgggaccagcttgaagaaggttattgcctcatgggtccgcaacagcatggatttccgtggaagcttcaagattgttgctgtccaatagaagaaagagattgaagagacccattacacctacaaagacagatggaagggtcttgcctatgatctctcacactaccaacatgacatcacaagaggaaagggctaggatgactctcttttacaagctccacacgatgctggaactgactatgcagccatgagctcctacgagtacctgagcactggactttgaca

SEQ ID NO: 14049 - DNA, 341 bp, Glycine max
  Clone ID: jC-gmle01810073c09d1
gggttaaaaggggcccctgtgactaaaaaatatagaggaagacgggcccatattaataatatatggagattattttaaacttagaattttttttttgcccctaatacattgggaatgctaaaaatgtttcacgcctggttcatttcaacttttaacacttggattatgacaccaaccttcaagaacaaaaatttttttttgccaagttttttttgcctccgatttaagaatgggagaaaggccccccctgaataacatccttttttgcatttccaaaaacagccccgttaaaggtcttgtaaaccaattgggcttttttgaaaatcttttgtttttggaca

SEQ ID NO: 14050 - DNA, 474 bp, Glycine max
  Clone ID: jC-gmle01810073c10a1
cttggtaacttcatcagtttctttcttttttcaacagtgtcaaatatcaccaagaaaaatggtcacaaggggtggattttgaacaatctgaatgagtctcatcttgactactactatgcattttttgcaatattaaacttcctcaacctcatcttcttcgcgtatgttactaggtactatgtatatagggttgaagtttcagattccatagacaagcttgcaaaagaactgaaggaaaagaccgtgtccaacgttgtgaatccaaaagactagttgattggggtatctaacgggagaaagaggattaagaccgtgaaaagtttcaaaactactctatgtacaaatttggatggccaaagaactagatatgtgtgtgtctgtggggggtgtgtgcctgttaactctggagtggctttggtcattggaagtcactttagaagagaacctaatcaagttattataggtattgggggg

SEQ ID NO: 14051 - DNA, 558 bp, Glycine max
  Clone ID: jC-gmle01810073c10d1
atattaaaaaagcaattttattggaggaatgaagatgaaaatctaacctgatagattttgtcttcaacctttattttacaatttcttgactaaagaaaagcttaaatggcccgaaaattaagatctagaaagaaaaacttcaaacatattacattcctttttccaatcttgtgtttttttcaagatgcaagtgacatttctcgaaggttacaaaggtaaggaaaaatgatcacatgcttctaaaacgacccccaataactataataacttgattaggttctcttctgaagtgacttccaatgaccaaaaccactccaaagttaacacgcacacaccccccacagacacacacatatttagttctttggccatccaaatttgtacataaagtagttttgaaacttttcacgggcttaatcctctttctccccttagataccccaatcaactagtcttttggattcacaacgttggacacggtcttttccttcaattcttttgcaagcttgtctatggaatctgaaactttaacccttatacatagtacctaataacata

SEQ ID NO: 14052 - DNA, 380 bp, Glycine max
  Clone ID: jC-gmle01810073c11a1
gggaacgatgtgaccaagttttttgtatcagtggctttgcattcatccatgcgaactctgtggctgatataatagctgttgaggccgtgccggtagaccgaattgatgtgaatctagtccagaggggtctccaagagttcactcagaaactgaactcagccacaactgatttggagaaagctgaagctcagattggggttgatgtccatagcgctctcaactctgctctttcaggctaataataagtactcgagtgttgagtcttgccttttgtatttgattatttccccccactgtgcggcattgatttgtctcggtgtaatcaaagttgctaaaagaatatattcatcctgaatctctgtgtagaaagtggacttgat

SEQ ID NO: 14053 - DNA, 270 bp, Glycine max
  Clone ID: jC-gmle01810073c11d1
aaaaaacaagggcttggccaacatccttgagctaaattgaagctgttgaaatattattttatcaagcccactttcaacacaaaaattcaggatgaaaatttttttttagcaactttgattacaccgaaacaaataaatgccacacaggggggggaaataaacaaatacaaaaggcaagactcaacactacagttcttattatttccctgaaagagcagagttgagagcgctttggacaataaccccaatctgggctttagctttttccaa

SEQ ID NO: 14054 - DNA, 389 bp, Glycine max
  Clone ID: jC-gmle01810073c12a1
cttccttcttccttctaatttttgttctttctcttgtcacttctcacacaccacgtatctgggtttttttttactttcccctcaaaaccaaaatcaatggaaggatcatgatccggtgtggttacagtgtacggccatggtgcaatcaccgagaccaagaactaccccttctacgttaaagtgggcctggcccagatgcttcgcggcggcgttatcatggaccttatcaacacagaacaggcccttatcgtggaggaagccggatcctgctccgacatgggccttgagcgagtgcccgacgacatacgcgctcagtgcagctttgacctgatgagcgacccgcacctcatcaaagacatactgcggtccggcaccattcccgacatggc

SEQ ID NO: 14055 - DNA, 415 bp, Glycine max
  Clone ID: jC-gmle01810073c12d1
gcccaaagagtcatctatccattttttgttttttttgggtttcctaaacccaactaacgcggttcaaaacacaaaaaaaaacaaaaaaacctacccttattttaggaaacaactaaaaacactagcaaacccataatttaaattgaaacgccccataacaacaaatcattcatattcattcaaagcgattggcgaaccctttaaccttgccattggtgaaattgataccaaccatggtttcccccaaaccacaactaacctttgccaaaaccttggggtaactgaaccgagtgactgcctgaacaattgccctcgcacgcttcgggggatcgccggtcttgaagaccccggaaccaaccaagaccccgtctcatccaaactgcataatgagcgcggggtcggcgggggtggcaac

SEQ ID NO: 14056 - DNA, 377 bp, Glycine max
  Clone ID: jC-gmle01810073d01a1
ccggaagatccgagtccttttccgtttaatggatcaatctccggagcggggttcaacataacaaccaccatgatcggtgccggaatcatgtccattccggcgaccatgaaggttttaggcatagttccggggttggtggtgatcgtgttggtggcactgataacagatgtgactgtggagtttatgctaaggtacacaagttccggtaaatcctccacttacgcgggcatgatggccgagtcctttggctccataggatccctcgcagttaagatttgcgtcatcataaccaatttgggggttcttatcatctatttcattattcttggagacgtgctctgtggaaatgagtcgaacggtatcacacacttgggtat

SEQ ID NO: 14057 - DNA, 405 bp, Glycine max
  Clone ID: jC-gmle01810073d01d1
ctctattctcttctgcatcaccatttcatcactgatagaacaacacaacacatcaaacgagcctctcgggttccaatgtgaagagagccaacatggctacaatcgctgccaggattctcggttccaactcaaggccagcggtcgcgctccgccgcttgcggtggccggcgtactcctccgcctccgaggtggtggcggagccggagaccacggaggtgaaggactacgcctattaccgccgctccctgtaccgacagatcacgcacaaagtgctgcatgtgaaacacggggcacggctcgccctcacctcgcagacaatcgatcagatatgtagggagactgcagacaagtatggagtggcgtattcagacgatgagattctgttcaaatattgaagagtcgtat

SEQ ID NO: 14058 - DNA, 370 bp, Glycine max
  Clone ID: jC-gmle01810073d02a1
ccggaagatccgagtccttttcctttaaatggatcaatctccggagcggggttcaggattcatccaccatgatcggcgccggaatcatgtccattccggggaccatgatggttttaggcatatgtccggggttgatggtgatcgttctggcggcactgattgcagatgtgactgcggtgtgtatgctaatgtacacaagttccggcttatactacactttcaccgacatgatggacacactctttggcattataatatccctggctgcataaattagcgccatcataaccaatttagggggggcttatcatctatctcactagtcttggggacgcgctctgaggatatgatttaaacgcctttacacact

SEQ ID NO: 14059 - DNA, 243 bp, Glycine max
  Clone ID: jC-gmle01810073d03a1
ctagttctagatcgcgagcggccgccctttttttttttttttaaacatagcaagcagatcaaatttctattactaccacgaaattaatgatcagattgcatgtttttaaaagatacgatgattccagtatgctgtgggttatcataccattagattgccaaaaaaaagaaaagaaattgataacaaatgtcaaacatcgacttaggttttccattggcttgatatgtctcaatagatcttcgt

SEQ ID NO: 14060 - DNA, 243 bp, Glycine max
  Clone ID: jC-gmle01810073d03d1
acgaagatcttttgatttatatcaagccaatggaaaacctaagtcggtgtttgacatttgttatctatttcttttcttttttttggcaatctaatggtatgataacccacagcatactggaatcatcgtatcttttaaaaacatgcaatctgatcattaatttcgtggtagtaatagaaatttgatctgcttgctatgtttaaaaaaaaaaaaaaagggcggccgctcgcgatctagaactag

SEQ ID NO: 14061 - DNA, 243 bp, Glycine max
  Clone ID: jC-gmle01810073d04a1
ctagttctagatcgcgagcggccgccctttttttttttttttaaacatagcaagcagatcaaatttctattactaccacgaaattaatgatcagattgcatgtttttaaaagatacgatgattccagtatgctgtgggttatcataccattagattgccaaaaaaaagaaaagaaatagataacaaatgtcaaacatcgacttaggttttccattggcttgatatgtctcaatagatcttcgt

SEQ ID NO: 14062 - DNA, 247 bp, Glycine max
  Clone ID: jC-gmle01810073d04d1
acgaagatctattgatttatatcaagccaatggaaaacctaagtcggtgtttgacatttgttatctatttcttttcttttttttggcaatctaatggtatgataacccacagcatactggaatcatcgtatcttttaaaaacatgcaatctgatcattaatttcgtggtagtaatagaaatttgatctgcttgctatgtttaaaaaaaaaaaaaaagggcggccgttcgcgatctataactagctta

SEQ ID NO: 14063 - DNA, 469 bp, Glycine max
  Clone ID: jC-gmle01810073d05a1
attgaatatgccttctcccgcccaattgaagcccttattttgctcttggaataactggacaaaacttgcaggtagctgttctttgaagagaaaagatagtgacacaacagtagagagacgagattattgctctgccgctggtcagtcaccaccaccagcgtggccaggaacagctattgccgagccttctgatttcaagacatgggatgggcaaaaacctatttctgtcttaggatctacgggttcaattggaactcagacactgagtataggggctgaggtcccagaaagatttaaagttgtgagccttgctgctgggtctaatattactcttcttgctgaccagattaaaacattcaagcctgaagttgttggtcttagaaatgagtctataattgatgaactcaaagaggctttggctgatgtggatcacacacccgacatcatgcctggagagcaaggagtgatt

SEQ ID NO: 14064 - DNA, 479 bp, Glycine max
  Clone ID: jC-gmle01810073d05d1
cttaagctataacttttattgaaacccttttaggagtacatatactttatatagctacccctttacattttacaagattgatgaaccaacaaatacatttacaaaatatgctagcaggtgccaacaattcaccacagtcccaacttataaaatatgtcagaaatatgggattcaaacacttgaagctttttgcagactaacagcatattgccgagcccattggtcatagcgaataatttttttgagtgacggagatgctacataattccttttgatgttcctgacaagggagtcccacaaccttgaatatatccagataactaatattttcttcaacaaacatttctacagctttttcattggctgcactaagaactcctgtcatggtgccttcagcacgttccgtagcatagcaaagatgtaccgatggaaacttctttgtatgcggtgcataaaatgttagagaaccatacttgcta

SEQ ID NO: 14065 - DNA, 500 bp, Glycine max
  Clone ID: jC-gmle01810073d06a1
ggtgaatgtgccttctcccgcccaagtgaagcccttatttttctcttcaaataactgcacagaacttgcaggtagcttttctttgaagagaaaagatagtgacacaacagtagagagacgagaatattgctctgtcgctgctcaagcaccaccaccagtgtggccaggaacagctattcccgagccttctgattacaagacatgggatgggcaaaaacctatttctgtcttaggatctacgggctgaattggaactcagacactgagtatagaggctgagttcccagagagatttaaagatgtgagccttgctgctggctctaacattactcttcttgctgaccacagtaaaacattgaagcctgaagttggtggtcttagaaatgagtctttaattgatgaactcaaagaggctttggctgatgtggatcacaaactcaaaatcatgcctggagagcaatgagtcattgaggccgctcgtcaccctgatgccaccactg

SEQ ID NO: 14066 - DNA, 512 bp, Glycine max
  Clone ID: jC-gmle01810073d06d1
ctgaagctagaacttttattgaaacccttttaggagtacatatactttatatagctacccctttacattttacaagattgatgaaccaacaaatacatttacaaaatatgctagcagttgccaacaattcaccacagccccaacttctaaaatatgtcagaaatatgggattcaaacacttgaagctttttgcagactagcagcatattgtcgagcccattggtcatagtgaataatttcttcgagtgacggagatgctactaattccttttgatgttcctgacaagttagttccacaaccttgaatatatccagataactaatcttttcttcaacaaacatttctacagctttctcatttgctgcactaagaactcctgtcatggtgcctccagcacgtcccgcagcatagcaaagattcaccgatggaaacttcttgtcatccggtgcataaaatgttagagaaccatacttgctaagatcaagacgaggccaagttacttcagagcaat

SEQ ID NO: 14067 - DNA, 468 bp, Glycine max
  unsure at all n locations
  Clone ID: jC-gmle01810073d07a1
ggantcaaaaggaaggttgacgaacgaatctgtaaacgctaggcgctcgtcccagctcggaatttgctctagtgctctcttatttctaaatccacagagttacatttttcttcacggatgacacggcaaggacttgtggagagggacgctcaaccttcttctgctttggattaggggttcggcgactcctacgatgaccatgcggacccagatgtgagcatcgggacgagacgttaacgggtcttgagcacaagcacatcaagttacgtctcaaactgccagaatgccaccgctacatacaatatcgagagggttacgtccctgcagcagaatacgaggcgctgctgcggacgctgctctggagcgactgacgaggaacgaggcaacctccgccgaagcggaagtcgactggtagccttgccgacggagaaaattggaactcaagcgaagtcgtggcgtgctctatat

SEQ ID NO: 14068 - DNA, 169 bp, Glycine max
  Clone ID: jC-gmle01810073d07d1
gcaggaaacagtaccaaggattgggttacgggacatttttaacattatttgtagaggttgaccaaacactattataaaaattgttaaaagatattacgctctttgacgcttattttcccggaacaaattgggaggcctaagactgtgccacgctggtgccatggcaact

SEQ ID NO: 14069 - DNA, 532 bp, Glycine max
  unsure at all n locations
  Clone ID: jC-gmle01810073d08a1
tganatnaaanagaaggggagacagtgccggatttcggannacanctnanacactctatccgcacgctccgaagctggctagagaaatcacgagtgacacaatccatacagttaagctctttctatattcaaaaacaggcaaccgcattattgcgctggatctctcataacatcatcacacgtcatggccaggcccttattttgcacacaggaaccatctatatgctaacgctgagaccgacgaagaccggacccggatcttcttcctacgacgccaccacaaatcacacagcacttccgtcaggtaccaaactccaatcagtggcgatccccgccgtctacctgacactggagctacgacgccactaccgatgtgacactggacctctttcacgccacccagataatttaccgagacaccgacagcttcaacacatccaatcaccttgaggccttcctgaagtgtcttgctgcgtcttcctgcacttactacaccgcagtcatgctcagttaggagaacccgtacggtata

SEQ ID NO: 14070 - DNA, 468 bp, Glycine max
  Clone ID: jC-gmle01810073d08d1
gtaaattgcaagaaacattaagttggattcggatacgcaagataattcacattatctgaagtacttcaccaaacacaaatctaaaaactctcaaaagtcatttcgttctttgacgctcactttccggggacgaagttggtggcataggcccaggcgttgttgttgacagggtcagcaaggtgatcggcgaggttctccaatggaccctttccggtgacaatggcctgaacaaagaagccaaacatagagaacatggccaatcgtccgttcttgagttccttcaccttaagctcagcaaaagcctctgggtcatcagcaaggcccaatgggtcgaagctgccacctgggtagattgggtcagtgaccttaccgagggggccaccagacatacggtaaccttaacggcacccattaagataacttgtgtggcccaaatggcgaggatgctctgggcgtggatcaggcttg

SEQ ID NO: 14071 - DNA, 527 bp, Glycine max
  unsure at all n locations
  Clone ID: jC-gmle01810073d09a1
caaagaaacacccaaaatggcatcctcagcctcgaccacgctgtcttctcccttcctgcgactagaattcccctcctcaaccaaacaacgctcttcaatctccatcagagcctcggtctccgagaaacccccgctaccggctgtgtgggtgacctccccggagcccagtgagcttacgatccgtaaaatacccggcgactgcgggttcccggtgatcgggcccttcaaggaccgacgagactatgtctacaagcaagggcgcgacgagttcttcaaggcccgcatgcaacagtaccaaacaacggccttgcgcccgacatgcgccctggccccttccttgcccccgacccagacgaaactgttcatctcgatgccaagaggtcccccgtcctcttcgacaactctgaggtcgagaaaagagaccgctaacatggaaccttgatgcctttcaccgaactcagcggcggataccgagtacantcttacctcgaccactacggacccaaacacgccctcctcaaacaact

SEQ ID NO: 14072 - DNA, 436 bp, Glycine max
  Clone ID: jC-gmle01810073d09d1
atgtaaaatgtaaccatacaataaacttataaagttatcacatactatcattctcgatgataaaaaaataataataataataatactatcatcatcctaaccggtcaaaaacaaaattaataacaaatattaattaattaattaattaattaattaactaactaactaaaagcttgctctctttagggaagtaatagtaacggaagaacccaagggagaagttcccacttgaatctcgaaggaatcatagcgaagaaagaactccacaacgaaaagcctcgaaaccaatgtgacgaagtcttttccggcgcattgcttgttcccaagtgctggagactcagtctcaggcccattggaccacagcacgtgcttgaggagcttatcgccttgctccccgacgaacctgtccccgacaaactcctcggccctctcgaag

SEQ ID NO: 14073 - DNA, 513 bp, Glycine max
  unsure at all n locations
  Clone ID: jC-gmle01810073d10a1
caaagaaacacccaaaatggcatccttagcctcgaccacgctgtcttctcccttcctgcgagtagaattcccctcctcaaccaaacaacgctcttcaatctccatcagagcctcggtctccgagaaacccccgctaccggctgtgtcggtgacctccccggagcccagcaagcttccgatccgcaaaatccccggcgactgcgggttcccggtgatcggtcccttcaaggaccgccaagactatttctacaagcaagggcgcgacgagttcttcaagtcccgcatccaaaagtaccagtcaacggtcttccgcaccaacatgccccctggccccttcctcgcccccgacccaaacgtcggtcgttctcctcgatgccaaaaagttccccgtcctcttcgacaactctaaggtcgagataagagactgcttcactggaaccancatgccttccacccgactcaccggcggttaccgagtcctttcttacctcgaccgctccgaacccaaacacg

SEQ ID NO: 14074 - DNA, 459 bp, Glycine max
  Clone ID: jC-gmle01810073d10d1
atgtaaattgtaaccatacaataaacttataaattatcacatactatcattctcgatgataaaaaaataataataataataatactatcatcatcctaaccggtcaaaaacaaaattaataacaaatattaattaattaattaattaattaattaactaactaactaaaagcttgctctttttagggaagtaatagtaacggaagaacccaagggagaagttcccacttgaatctcgaaggaatcatagcgaagaaagaactccacaacgaaaagcctcgaaaccaaggtgacgaagtcttttccggcgcattgcttgttcccaagtgttggagactcagtctcaggcccattggaccacagcacgtgcttgaggagcttattcccttgctccccgacgaacctgtccccgacaaactcctgggccctctcgaagatcctaggatccttcgtcgcgaat

SEQ ID NO: 14075 - DNA, 456 bp, Glycine max
  Clone ID: jC-gmle01810073d11a1
gagtgatgacaaattgaagaagcactttcgtgagtcttaattaaagagattaaagagacacaccattcattcgctcactcatttcatttcaaacaatgtcaatcgctgcttcagcttcttcacatgcttgtatttcctcaatccccacatgcatcccctcttcctcttccaaattctcttcttcgctgacactttcttcactccaaagaggctcaaataagagatcgggatgcagagccatggttcaacaagccgttcagggtgcccctgctgcgtatgccaaagaaatggaacgcctttctgccaaagaatcgcttcttcttgcttttaaagatgcagggggttttgaggccttggtctccgggaagactactgaatggcaaaagattgatgtgaatgaaaggataactggtcttgagaggctcaattcaacacctttgcccaacacgtcaccct

SEQ ID NO: 14076 - DNA, 441 bp, Glycine max
  Clone ID: jC-gmle01810073d11d1
actgggggcaaagaattgtatcattttatttttctggaaccattggcactgacccaatcagttgtcagcccgggaaaatgaaaaacaataaaaaataaaggcccgagaatttttatagaatatctatatggatcacaggccgagacaatttgcattttatttcactattggggggtgcatgagtagcattatgcaatttttacatcaaagaaccactctgttgtgaaactaaaaatgaaatacaaggttttgtaagaatttgtcaggcttcaacccatattcacatttttaccctttggaaaaaccaaaaggagtcttcagtgagaaaaaaacaaaagctgtccacggctgagaggaacagaaatttgactcatcaccatgattaagggggggcaaaattcacttcccatttcctagctttcatactctggacttgaatct

SEQ ID NO: 14077 - DNA, 409 bp, Glycine max
  Clone ID: jC-gmle01810073d12a1
gcgtgatgaccaataggctatcctcttttgtgcgtcttaagaaagaaatgaagagacgcggcattcattcgctcactcatgacattacaaacggaggcaatcactgctccaacttctgcacatgctcgaatcaacgtaatccccacatgcatggccctcttcctctttcagatactcttactcgatgacactagattcactccagagaggctcagatcagagatcggcatgcatagccagggatgagcatgccgtacagggtgcccaggttgcgtatgccaaacaaaaggaacgcctatctgacaaagaatcgcgacttattgctcacaatgaagcccggggtcttgaggccttcgcatgcgctaagactactgaatggccaaacattgaggtgaatgaaaggataact

SEQ ID NO: 14078 - DNA, 350 bp, Glycine max
  Clone ID: jC-gmle01810073d12d1
gaacaatgaatttatgttttacatgttaagcttcttaatggaggctgagggttagattatttttgttgtttatggagacatactttgttgaccaatctgttgtaaaccggggacgttcaagaaaattgaccattcaacgttaacaagattctatccacattttatctgcagcaacagctctgacagcatgagctgttgttgctcccactgccgccgaaaaagtaacatacaacggtttttacctcacaaaacggttatcgttttgaatagaggatgtcataccgggctttacgataaattgtcgggatgaaaggaatgttcattttatagctgcttgtaaaaaccgggag

SEQ ID NO: 14079 - DNA, 350 bp, Glycine max
  Clone ID: jC-gmle01810073e01a1
atccagaggtaactgtccttgatccttcggatgcaatccaacatttacacaatcggggatccatgctgcaagatgtgttggatctgaacttatctgattgtcatggcaaggttggtgttccacgtcagctagttatcacaaaagagaaagacccctctagtatcccttatgaagtcactaaggctgggatgaagttgccattagttgcaaaaccgctagttgttgatggcactgcaaagtcacatgaactatttcttgcttatgatgaaattctctctttcagcggttgaacctccactggttctacaggagtttgtcaatcatggtggtcttctctttaagatttacat

SEQ ID NO: 14080 - DNA, 507 bp, Glycine max
  Clone ID: jC-gmle01810073e01d1
caagacgtgcattgatttggatatgagcatggtgtataacttacaataaaggccttttcgctcattattgagagggagaaattagacagaccctatttctacctttttgaacatttttgtggcttcattgaaattccatactaatttgcataaatttttaagaaagccaccaacaagaacatccctgttcaatgcatctactaacctgctctagtttaggcagcaagtttcttattactacatttactctccactaggctaagtacaaaatctgtaaatacgtgctcatagcctggcatttttccatatccaggaaagtagctgatgtcgatgacgtaaaacacattcttggttccatatatctccaatcatatctatgttgaacaagtggagtcccaatctatgacggagctaccttgccagcctatccaatagaggtcctggtggatgtttagcgattttaggatctatatcagcatcatctgccaaagcggctgcacatgaaac

SEQ ID NO: 14081 - DNA, 241 bp, Glycine max
  Clone ID: jC-gmle01810073e02a1
gagcctagctgctggctctaatatttctcttatcgcataccagattagaggattcaggcctgaaggaggcagacttaaaaatgactctttaacagacgaactcagataggctttgggtgaggtggatcacaaaccctaaatcatacctggagcgcttggattcattgctgccgctcgacaccctgaggccaccactgtagttacacgcatagtcggttgtgcaggattaaagtccacagtt

SEQ ID NO: 14082 - DNA, 483 bp, Glycine max
  Clone ID: jC-gmle01810073e02d1
tttttttttttttttttttttttttttttattttttgcttaatttatttttttttgggttttttttttcccaaacaacaaccttatttgaacccctttttggaagccataatctttacaagcccccccttttcctttttcaacaattggggaaccccaaaatacctttacaataaatggttaaatttgaaaacaatgcccccaaaccccaatttataaaaaaaggcaaaaaattggcatcccaacattggaagttttttttaaaaaaacaacaaatattggagcccatcggtcctagaaaataatttcttccatggtcagaaaaaatcatattttcctttggaagtcccctgaccagatatcccccccccctaaaacttttccagaaacctaaactttggtcaaaaaaaaatttttcaacgggtttttcttggcgaccctcaaaactccctgtaaggggcccccaagggggtccgggaatatt

SEQ ID NO: 14083 - DNA, 522 bp, Glycine max
  Clone ID: jC-gmle01810073e03a1
gcgcaaaattttccaacttttggcttaactggtttatgggttgaagtctggttcaggatttgtgggggaagagaagagcactcacaccatatccattatcaatggacttggccgcgaagcttcaccacttagacctgaccggcgtggtcattttggacgcccgaaagccctccgcactccgccaccttccgccacgcgttctcagcagaacaaacaccaacaccaatttgatttacacgaaccggttctcgggcccaccgaggcccaattccgcttcctcaacgggcctgtccatgataaccggcgaggacgatatcgagtctcttttctccgagacgaactcggaggaggagcggcgcgtgaggaagcaacctagcattggggcgtcggggatttcctccggggtgaagctcgaaaacgtggggaaagcctacaagggcgtgacggtgctgaaggacgtgagctgggaggtgaaaaagggggagaaagtgggcctggtcggcgtgaacggcgccgggaaga

SEQ ID NO: 14084 - DNA, 527 bp, Glycine max
  Clone ID: jC-gmle01810073e03d1
catatggtgtaatcatccttttatatttcggtaaatgagttagtgaatagatacatgattatacaaaggctgtgtagcttaacccaatatgctagctacatcaccttctggcggtaaattagtgtaacaatgaaatggttcactcaattccatctcttggcatttttcacgcctttggacttctgttttgctgcctgaaaggcctgcatcttttgtttcttccgtgcctctttctcagccttggacatcttagatttggctttcactttaggagctttgctatcaagctcagcctcgcgttcaagttctctttccctagcatcaaaattcttctctaaataataattcgaatcacctgcataatcctgtatggtgccatctttaatttctatcactctattaactatttgctttataaagtatcggtcatgagatactgtgataacagtgccctggtattcatttattgcgttctcgagcatttctttagaaagtatatccaaatgattggttggttcatccaacac

SEQ ID NO: 14085 - DNA, 348 bp, Glycine max
  Clone ID: jC-gmle01810073e04a1
accaatcttctctccactcccttcttttgtaaccgtctgaagtgcagcaatggcaggtggatttcattcgcagcatccatcggtagttcagaagttatctggacagtcttatcttgtgtccaggcttgctcctaatcactccagaaactgttctaccactggtagttacttcaatggaggtttgcagtcttcaggtttggttccagtcacggcacacgcgccggctgagaaaggggtgtctggatttttgttggatttcctgatgggcggagtgttcggccgctgtgtccaaaacagatgcggctccaatcgaacgagttaagttgctcatccaaaaccaggatgaaa

SEQ ID NO: 14086 - DNA, 543 bp, Glycine max
  unsure at all n locations
  Clone ID: jC-gmle01810073e04d1
agacggattactangtantgcaancanttnaggtaaaaccagctactagtcgcggccggcctttttttttttttttttgaacatttttacatttgcctcaattacttcaaccggggggcgtcaaactacacgattataaactccaccgcaagttataaccaactaaaatgcaagtaagctaaactatgatttgttattataaagcccctaccctacattcggggaaactacaaaaccactatttttcatccaaattattcaatgctaacggggaagcaacattattgactcaaatagccgacgacttgattatctgactattaaccttcaccaccagaaccgtctttgtttccgaacaagaccagctgtagattatcatagccagcgagcactccagaacctgcaacatcacgtaatatgtttgcaccggcacctttaaagagtgagttaatacccacctttgcgacactaatcttgacatcatttcaagagctataggctcttacagcttcatcagaagtcatcatcattctaccacgcaca

SEQ ID NO: 14087 - DNA, 527 bp, Glycine max
  Clone ID: jC-gmle01810073e05a1
tgtttgcgttgttgttgagttcagctttcaccaacagaaacagcagaaggaaggaaaaggtgactgcacagaggtatcgaataaagtcaaaagtcggaatggtttcactctgatcaaactgaggaatcgaggaaggaagggttaggattagggtaaggattgggaagccataggagaagagaacaagaggaagaagaggtcaattcaaaatgccggaagaggatttggtggacatcaaatttaggttgtacgatggttccgatatcggacccttcaggtactcctccgccgccaccgtcgatatgcttaagcaaaggattgtctccgattggcccaaaggtaaaactgtcgtgccaaagtcagctaatgaagtgaaattgattagctctggtaaaatcttggaaaacaataagactgttggtcaatgttaagaaccgtttggtgagactgcagggggtgttataataatgcatgttgttgacaaccatctctttcaaaaactaaagctgataagaaggtcgatgatt

SEQ ID NO: 14088 - DNA, 466 bp, Glycine max
  Clone ID: jC-gmle01810073e05d1
gcaaatgcttttgcttaacgacaacttgatgcacaacaggagcaatcaatggttacaatgtgtcatcaaccctgtagaccttgtaataaaagaatgacagcatcttcggaagtcaccattaacacaaacttttctataagtatataattgctcgtatacgtactttacacgggaatgttgaaataggggtttgttcaggcagatgatttctacagttcatgagtgattgatgtataaggatacgcatccaactcacttcacaatatggaacaagaacagacaaccttcttgggcgaatcatcgaccttcttatcagctttagtttttgatagagatggctgtacaacaacatgcattattataacaccccctgcagtctcaccaaacggtactttacattgaccaacagtcttattgttttccaagattttaccagagctaatcaatttaacttattagctgactt

SEQ ID NO: 14089 - DNA, 482 bp, Glycine max
  unsure at all n locations
  Clone ID: jC-gmle01810073e06a1
tgaaantnnnaagacagcatagatttcgatcggangacgctaggcgctcatcccacctccgaagtcggctcgagggttggagctctaactcgatcttcttcttttgttgttctgcgattgcgtttgttttttactctcacctggaaatgtcttgctgcggtggtaactgtggatgctgaagctcctgcacgcgcagcaacggctgctgatgctgcaacatgtacccagactctgagctacacgtggttaaccaccaccgacacctcggacatgggagtggcacctgagaaggctgaatttgacggtgctgaaatgggtgtgcccgctaaaaacgatggctgcgaatgtggaccaaactggttctgcaacccctgcacttgtacgtgaggtggcgcgagaccaagactgaaaccgacatagcccttaattacgaataatgataaactatttatgcgtagctaagaacttatgcttatgtctgt

SEQ ID NO: 14090 - DNA, 450 bp, Glycine max
  Clone ID: jC-gmle01810073e06d1
cccagtaatagtatttaaggttataagcagagattcataattcagattagccgaactttatacagaagcgaccaattaccaaacattaaaaaaaaaaaaaaagaagcaaccatgagcttaacacacccatcacaagtccaaaacacttgaacttgctgaagggcaagacatgaccactttattctaaggatgttggtttaacacaaaacaccagagggcacgaaaaccatcacagacataatacataagtttttagctacacattaatagtttatcattattcctaattaagggctatctctgcttgaagcttgctttcccaacacctaacttgcaagtgcaggggttgcaggagcagtttggcccacatttgcagccatcgttctcagggggcacacccatttcagcaccctcaaattgagccttaacaggtgccactcccatgaccaa

SEQ ID NO: 14091 - DNA, 493 bp, Glycine max
  unsure at all n locations
  Clone ID: jC-gmle01810073e07a1
gactattcctccggcacctcccttctcggctggggagacggttactacaagggcgaggaggacaaagacaaagtcaaaaccaaagcccccaaaacgaggtcgtccgcagagcaggaccatcgtaagaaggtcctccgcgaacttaattccttaatttccggcccttccgcttcagctgacgacattgacgaagaagtcaccgacaccgagtggttcttcctggtgtcgatgactcattccttcgtcaacggtagcgggctgccgggccaggctttttttaactcgagcccggtctgggtcgccgggcccgaaagactttccgaatcggactgcgaacgggcccgccaggggcagctcttcgggctccagactcttgtctgtataccgtccgcaactgcgtcgtcgagctcgcctccgcggaggtcatttttcagaactccgatctgataacaaggtgcgtgatttgttcaacttncacaacaacaacaacaac

SEQ ID NO: 14092 - DNA, 512 bp, Glycine max
  Clone ID: jC-gmle01810073e07d1
aacacaaaaaaaatccacttggacttcatcagagatattactatcccctggttgatcattcagcttcccaaatcaaattacctcaataaaattaatttagtccaagctaccaaaaaggactaaccaaaaataagaacactaatttacatagaaagctacagctactgctaccaataatagtacagaaggaactatcgtagttcatcgccaactttggatgatagtgccgacagaagctgttcctgcgtgtaaaacttgtttcccatgttcaccgtggcttgttggatcatcaaatcattcaccacagacacgctggcgtgatgcacttccaagtcaagatctttcaatgctgccatcaacctggctgcaggggtggttcttcttgctgcattggattcttaccattgcatcccaaccaatgatcttcacctctaactccaaatcagcgagcttgcttggtggcttctttggttctacgctattagatggaggcggtcctggtggtggtggcg

SEQ ID NO: 14093 - DNA, 566 bp, Glycine max
  Clone ID: jC-gmle01810073e08a1
gttagtctagcagaaacaattagagggtttaaattgattctttctggagaattagatggtcttcctgaacaagccttttatttggtaggtaatatcgatgaagctactgcgaaagctactaacttagaaatggagagcactttgaagaaatgactttaaatctttgtgtactgacccccaatcgaattgtttgggattcggaagtgaaggaaatcattttatctactaatagcggacaaattggagtattaccaaatcatgcgcctattgccacagccgtagatataggtattttgagaatacgtcttcttaaagaccaatggttaacgatggctctgatgggcggttttgctagaataaacaataatgagagcactggtttagtaaatgatgcggaaaagggtagtgacattgatccacaagaagcacagcacactcttgaaatagcagaagcttatttgaataacgccggaggcaagagacaaacaaatgaggcaaatctagctcttatacgagctaggacacgagtagaggctatcaatgtgatttcataacaagttgatgcg

SEQ ID NO: 14094 - DNA, 444 bp, Glycine max
  Clone ID: jC-gmle01810073e09a1
gtgctgcattcgcgaattgaacctcaatttcagtttctaatatttggctcactgtcttggcggtccagagaactgcatagagagagatggcctctgtgacatttgctgctgtgttaaatgggttgggatctatcttcttgcgtggacgcaacaggagccggaccctgctggccactgctgttggcggcaaagttggtgctgctgctgttactgttagaacctagaacacatattgcggccgctgctgctgctccactgaattcatgtctccctggtgtccgaggggggggacctctcgtagacccacaatcgcttgacgcctcactaccacgggactgtggctctcacccactatgacttggtaaggacccagcattcctcaaatgctagacacaacctcaacttattcatgcacgatgggcaatgcctgcacttcttagaatc

SEQ ID NO: 14095 - DNA, 347 bp, Glycine max
  Clone ID: jC-gmle01810073e09d1
gatcatagattttgcatctgtcatgaaataacacaaacgggacaaaggttgatttgctactgtctagcctctcaattcaattatcttcatgaaatgaagagatatcacgccgacagcaccatgggggggtttcccttgcccagcctaaaaggaaaaaatctgcgcggcccacataacaatcctggcatgctttatataaaacaattgcaatcattctcagcttctaggcatccggaatgtaaactccattctttatagtgcccgcctctctaaaagggaaaaagaatttggctcttgagtatatttgcacaccagtggaattggttaatatttgaaacttatttgac

SEQ ID NO: 14096 - DNA, 416 bp, Glycine max
  Clone ID: jC-gmle01810073e10a1
cgctcggccccaggggaagtaatgttgttctcgccagcaagtatggctcgtcgaaaattgtggacgacggcgtcactgtcgctaaagaggttgacatggtggatcccgatgagaatattgctgccaagatagtgagacaagcagttgccaagacacactactggattgttgatggaaccacgacctttgttgttcttgctcaagctcttatagcggaaggtgtaaagggtgatgcatgtggggccagccctgtgctcatcacacatggcatagagaagacagcgaaagctcttgtatgtcagcttaaacagaggccaggcgaagatgaatatagagagttggcttatgtgctagcacacaccgcacgggacacttgcgaagaacgaaatttgattgctgactcattgagcagagct

SEQ ID NO: 14097 - DNA, 311 bp, Glycine max
  Clone ID: jC-gmle01810073e10d1
ggttgtgggcctctcttttctctctgtctaaccaacaaaaaatattttttttactttaaaacaaaaaaggggggaaaggcttctccaccttttcattccacacccaatcaactccctctgccccatccctaaatggccccccaaacttttgttttttccggcgaaaaaaaaaattcttttttttcttcatccacccgggtttgttttctttcaaaccccactcctccaatcgcccctggggttaccccccagaatggccccaccctcctttttcctcccccccccccctagctcgccataaaaagggcttt

SEQ ID NO: 14098 - DNA, 462 bp, Glycine max
  Clone ID: jC-gmle01810073e11a1
agaaaatcttcgaggtgttcatgctcattttactgttgaatgcaaagaacttttttacagagatttacctgagctggatgattctattgctgataagcttctccctggatgcaccacagtggagcaggtcaaagacttgttgttacagaaatgccaagaggtggagcaaacagctagagaacaagccactgataatgctatcttagatcaggtttctaagattgtacaagttgatatacctcaatccttgtttgaggaacaaggaaggcagctttatggagccaacctattagaaatacaggcaaaaatgaaactaaatgagcagcagctggcgactctgtcaagttcaaaggctgcgaacgaatttcttgagcatcagaaggaaaatataacaatatttgataaaacagagtctggcagatggtgatatatataggcgtgaaaatctgccgtttgctactg

SEQ ID NO: 14099 - DNA, 477 bp, Glycine max
  Clone ID: jC-gmle01810073e11d1
gtaatgattaatatattggtgtttttcaatactgttttttgttagagttatctactattaatttatcatcaaagtctcaatatacaaacttgtaatgcattattctattcttaatattctttcttcaaaattcaatcaagaaattttctcacaacttacatccgctgaaacaaaacacattcaaatgaacatgcaatttcattttcctgatttgttttggctagtgctcatccctcatttagttatatactgaacctctgcatgttctctcaaccattcaagcactttagctccttctagtatttcttgaacctgtcccttcacccgttcctcatcatattcttggttttgacgtttgaattcagcaatggaattctcaacctctttgacaaggtcctcagtagcaaactgcagattttcacgcctatatatatcaccaactgccagactctgttttatcaaatttgttatattttc

SEQ ID NO: 14100 - DNA, 538 bp, Glycine max
  unsure at all n locations
  Clone ID: jC-gmle01810073e12a1
cacccacacacgcgcgcagacgcagagtgagtgggtaaagcaaaatcatgaagtgttgttcctccctgcacttgctctcttcttcttcttcttagttatcattccttccttccttcctttcgatttccgcattcattcaatggcacttacaatactctctctgctcccaccctccactcctccctgcttctgcggcaccctccatctccgctcccacaacagcttcctttccatccattctccttcttcttcttctccctttccttccttctcctcaatttcaattcccaaccactctcccacgcgccgccgctttcacactgtcttcgccgcttcctccgactactattccactctcggaatccccaaatccgccaccggcaaggaaatcaaagccgcctatcgaaggttagctcgccagtaccatcctgacgtgaataaggagcccggngcaactganaagttcacagagattagtgctgcctatgaggtgctatcagatgataaaaagagggccttatatgatcaatatggcgag

SEQ ID NO: 14101 - DNA, 509 bp, Glycine max
  Clone ID: jC-gmle01810073e12d1
cactcaataactaaatttttaggtaattcattcactcgtgtagaagagcttagacttcctaccagatatacactagctttctcttagtgcaacctgctcatggagtacaatttgagatcctcgaacaagttattctgtgtaaattgactggtgccaaaatttacaaatcaaaaacaaataaaagaatctgcctcactacttatttgatttcgctgggtagctaaaaattcagttaaagcatttcaagaaaatgtctgcattagtccctttccttccagtaactgttggaatcatgagaactctaacccacattaggtaaactacatcttgaagattctgctccacccaacaaccccataggactagagattatctttaaaccactttaaagctccatttgccacagatccagcaaagcccttcaatttattccatacatcattttcatcttctgatttttcagttttttcttcgactgtcgatgttgtactttcatcctttggagcttt

SEQ ID NO: 14102 - DNA, 345 bp, Glycine max
  Clone ID: jC-gmle01810073f01a1
gagccttgctgctggctctaatatcactcgttttgctgaccagattagaacatttaagcctgaagctgacggacttataaacgattctttaattgaagaactcagagaggctttggctgatgcggatcacaaaccctaaatcattcctggagcgcttggaggcactgaggccgctcgataccctgacgccaccactgtagttacaggcatagtgggctgtgcatgattaaagccgacagttgcagcaattgtggcaggcaaagacatagcattggccaacaaagagacaatggttgcgggagccacctttgttcttcctttagcgcacaaacataacataaaaat

SEQ ID NO: 14103 - DNA, 368 bp, Glycine max
  Clone ID: jC-gmle01810073f01d1
aattaattgtttttttgtttgaggttttaccacactaaaaacaaatttgagcccttttggggaagcccaaattttaacataccctgggggcatcttaatccacaattgtggacccacaaaatgcgtttagaatagatgggaaaagtggcaaccaatgcacccaaaccccatgttattgaaaaaggaaaaaaattgggttgtaaaaagtgagagctttttttggaatgccaacaaatattgctgcctatggttcctagaaaataattcctgcggtggtgagagagacttattttttcttgggatgtttatgaaaagatagctccgccggcaaaaagtttcccagaaacctaaccttttttcataaaaac

SEQ ID NO: 14104 - DNA, 501 bp, Glycine max
  Clone ID: jC-gmle01810073f02a1
gtggcagcataaccagaaaaaggttccagaaattctggtaaggaacgaagcaaagcaaacgcagcgtttcgtttcgtgtcgctgctggttatggatggaatgtacggagtgccggcggagtacgccgacaaggctctcatgacgccggagaatctgattttcccgccggactaccaccacgacttcctcgccgccggccggattccgctgttcggatccgacgagttcttctcctcctccgccggaattcaccggcagcaggaagatgacgtggcagccaccactgtcatgaaggccaaaatcgcctctcaccctcactaccctcgcctgctccaagcttacatcgagtgtcagaaggttggggcgcctccggaaatcgcgcgcttgttggaggaaatccggcgagaaaatgacccgtgcaagagcgacgccgtttctttttcacgtgctttggagccgatcccgagcttgacgaattcatggaagcctactgcgacatgt

SEQ ID NO: 14105 - DNA, 537 bp, Glycine max
  unsure at all n locations
  Clone ID: jC-gmle01810073f02d1
aattcacaatgtcagtagttatttatcaagaatactattatgatcatttcccttttccttcatgggaaagtaataagcattttactgtcagtaatctgcttttaatttagaatttacaaaaaagaaaatacaagcaataattaatcgggatatacatttgaaaatatcatgtacatgcacctcattcattcatcagcaaggatccgtccgttaaaattttccatcatagaaaactgcatattctctgatggtttccaatgacgttttctttggttaataaaccaattgttaatttgcttctggtccagccctgttgacttagccagttcaatcttatcagcttccgtagggtaaggccatttgtagtgaacattccaccattgaagcaatgcttgtcttgcttcctttggaagcttacccttctttttcttctttgaaaactcgagtttcaaagtaccgatgtgactcccaaactttcgtanaagcctatccttgagcttacgatcttcaccctttaattggccatcttgagcatca

SEQ ID NO: 14106 - DNA, 617 bp, Glycine max
  Clone ID: jC-gmle01810073f03a1
gcccttttgatgttctaaaagccaatagagtgtatctcacagtttcagttctgtatacagtggtaaattttaaatttgctccattgaattctgtttttctctcgaactcaagtgtctaaagcattaaagcagaagtgttgcactcatggaataatattgtcttcaatcttcatctcagctatgtctttcagctaccaaagtccatgatgttgtacccttattgaagtattaatctgagaggaaagagagttgctgccattattatcagttcagtgatatttctttcttgagtatggttggctacggtaaaaagttgagagaattacagattcaagaatggaaaggatattacatcaactataagttaatgaagaagaaagtcaagagatatgtagaacaaatggaggttggagctcaaaatcgccacaatgttctcagagacttctcaatgctgctagacaatcagatagaaaaaattgttttatttctgcttgaacaacaaggagtacttgcacataggctgtcagatattggacaagaacaccatgctcttttccagcagccaaatagtataatcatctctgaactccaagaagcatatagagatgctggacgag

SEQ ID NO: 14107 - DNA, 444 bp, Glycine max
  Clone ID: jC-gmle01810073f03d1
aggagaaataaggtctatcttggaaaagaacaatcttccacaagggagatttgctcctacattatccatagaaacataatagtagatttcaaaaacatcatgctgtcaacctgatttaggtatcttctgacacgagctaatacagcatttttaactactactcaccgataagtgactagtttacacaatccactatatacacttcaggctaactgctattactctaataaagagagttgtatctgtagcaggtagcaataatggatgagatgcaaatgaggagtgcagggagtaaggtggtattcaggagtttactttcactgaaatacccagagattgttattgttccatctgcaattactcgagctagagttccagcttctgttgacagcaatcccccattgaaggttccacgtgaaagccttgatgacatcatttttgaca

SEQ ID NO: 14108 - DNA, 358 bp, Glycine max
  Clone ID: jC-gmle01810073f04a1
gcccttttgatgttctaaaagccattttagtgcatctcacagttccagttctgtatagagaggttaattttaaatttgctccattgaattctgtttttctctcgaactcaagcgtctaaagcatcaaagcagaagtgtcgcactcatggaataatattgtcttcaatcttcatctcagctatgtctttcatctaccaaagtccatgatgctgtacccttattgaagtattaatctgagaggaaagagagttgctgccattattatcagttcagtgatatttctttcttgaatatggttggctactgcaaaaagttgagagaattacagattcaagaatggaaaggatattacatcaac

SEQ ID NO: 14109 - DNA, 208 bp, Glycine max
  Clone ID: jC-gmle01810073f04d1
gccttctttcttttttttttaggaaatttaaggtttatctgggaaaaaaacaaacctggggatgggacaatttatactacattaaccctcaaatcattataatacatataaaaatcctttggctgaaaacccgaatcatgtatattctgacaccaactgacacagggtttttatccacgacataacactcaaacttgattggaaataa

SEQ ID NO: 14110 - DNA, 539 bp, Glycine max
  Clone ID: jC-gmle01810073f05a1
cttcatctaaacataaatatcacttttccctgctagattctcgctagtacaatcataggttagtaatccgtcccatgatgttttgtttttttctttttgttctggggtctgtgtctttcgttagatgttctggtatttgctaagtgtgttcctttagctgatgtgtgtatttttgtggtgagttcagaatccgagtttttgtgggttgcattgttgtgagaagatgagaagagttggtggtgatgttttgaacgtggatttggctgctgcagtgaacaacctcttcaatcttcctgaaactatggagaagttcatgtttccttcttctcgtgctcatgatcaccaccatgaaaccagaggggtctctagcatcattccagtggacattttggacactccccaagagtatacattctttatggatgttcctggtctctccaagtctgaaattaaggtacatacgtgatgtctcactccaatatttttttcttccccccattaatgttatggtgcattggcatgtgtgtatttgttttgga

SEQ ID NO: 14111 - DNA, 426 bp, Glycine max
  Clone ID: jC-gmle01810073f05d1
aaattgtcattaatcaaatttcatattcaaaagcggatacatactataaacactttttacattgccaattaatattagctgccaagccaacaacaaaagcaaactaaactaaaaaaatcatgggtgctcaagcaatggcaacttcaacagtttttgatttttggggaggaggatgcttctcaacaaccacagtgagaaccccattttcgcatttagctgtaatggctgacacattagcattctcaggcaaacgaaacttcctctgcaaattctgaggccctctcctctccaacctaagatacttgcacccttcatcctctccatcttgacgcttcctcttcccattgcttcttataacaaggtgtgttctaattttcaaccgtcacctacaaaacaaatacacacatgccaatgcaccataacatt

SEQ ID NO: 14112 - DNA, 513 bp, Glycine max
  Clone ID: jC-gmle01810073f06a1
ctttatctaaacataaaaaacactttcttttgctattttctcgctagtacaatcataggttggtaatcgcggcccatgatgttttgtttttttctttttgttctggggtctgtgtctttcgatagatgttctggtatttgctaagtgtgctcctttagctgaagtgtgtatttcagtggtgagttcataatcccagtttttgtgggttgcattgatgtgagaagatgacaagagttggtcgtgatgtttagaacgtggatttggctgatgaaacgaacaacctcttgaatcttcctgaaactatggcgaagtgaatgtttacttcttctcgcgctcatgatcaccatcatgaaaccagaggggtctctagcatcattccaccggacattatggacactgccaaggagtatacattctttatggatgctgctgggctctccaatctgaaattcacgtacatacgtgatgacttactccaatattttttcatcccttcattatgttatggacatt

SEQ ID NO: 14113 - DNA, 494 bp, Glycine max
  Clone ID: jC-gmle01810073f06d1
aaactgtcattaatcaaatttcatattcaaaagcgcatacatactataaacactttttacattgccaattaatattagctgccaagccaacaacaaaagcaaactaaactaaaaaaatcatgggtgctcaagcaatggcaacttcaacagtttttgatttttggggaggaggatgcttctcaacaaccacagtgagaaccccattttcgcatttagctgtaatggctgacacattagcattctcaggcaaacgaaacttcctctgcaaattctgaggccctctcctctccaacctaagatacttgcacccttcatcctctccatcttgacgcttcctcttcccattgcttcttataacaagtgtgttctcatcttcaaccgtcacctacaaaacaaatacacacatgccaatgcaccataacattaatggaggggaagaaaagaatattggagtgagacatcacgtttgtacctgaatttcagacttggagaga

SEQ ID NO: 14114 - DNA, 378 bp, Glycine max
  Clone ID: jC-gmle01810073f07a1
gtttctcgagcaaaaacaattcgagggtttaaattttttctttctggaaaactagatgaggggtctgagcaagccttttattcggtatgaaatatcgaagcagcaactgcgaaagctgcaaacttataaggaggagagccatacgaggaaatcacctcaaagctttgggtgcgtgacccccaagtcaatagctagcgactagtgagggacggacaatgttgtagtctctcgtggccgacaaattggagtataacaaaggcatgcgcctattgccacgaccgggaatataggtaatgcgataatggatcttcttaaagaccaatggttaacgctggctgtgacgggcggttcggcagacgaaaacgatgatcacatcac

SEQ ID NO: 14115 - DNA, 530 bp, Glycine max
  Clone ID: jC-gmle01810073f08a1
ggtagactagcgaaaacaattagagggtttaaattgtttctttctggagaatgagatggtcttactgggcaagccttttattaggtaggtaatatcgatgaagctactgcgaacgctacgaacttagaaatggcgagcgattcgaagaaatgactttaaatgtttgtgtactgacccccaatcgaattgtttgggattcggaagtgaaggaaatcattctatctactaatagcggagcaaattggagtgttaccacatcatgcgcctattgccacagccgtagatataggtattttgagaatacttcttcttaaacaccaatggttaacgatggctctgatgggcgggtttgctagaatgaacagtaatgagatcactgtcttagtcaatgatgcgggaaagggtagtgacattgatccacaagaagcacagctgactcttgacatagcgggagcttattagtataaggcgggaggctagagacatactaatgaggcaaatctagctcttagacgagcgatgacacgagt

SEQ ID NO: 14116 - DNA, 465 bp, Glycine max
  unsure at all n locations
  Clone ID: jC-gmle01810073f09a1
gatttaanagaaaggagccgttcgagtacggagaacgctaaagcctcatgcccacctcggaagctgggtcgagtggttctggatcgctagcgtgcaccaagattcttactggggacacgactaggatcttaaaagacggaggcgccagctacttgagctaaggattagggattatggcgactctctctaagagcaagctgaaccctgtcctggatagggccgatagtgtgatgggactatatgacaacaacatagaggtcccacttcagttgactgaattcgaccgctacaaagaaaatcccgaggattacttggacgcgcaaaagtacgaagcgctgttgcatacccttgacaacagcgactgctgaggcactacgtgatctgcttctgtgtggagagccggacttatagccatgccctcagtgaaaattgcatcaacaagctgaggccgtggcgcgcgctata

SEQ ID NO: 14117 - DNA, 230 bp, Glycine max
  Clone ID: jC-gmle01810073f09d1
cggaaacttcatttattttctttctcacattttacaatattgtttgagcccacaaaccccttaactaactcccctagcggttgccaacaatccaccacagccccaacttgtaaaaaaaacccaaggggggaaaaaaaaaggcggaaccccccccccgacaaccaaaatattgctctaacccatggaaaaacgcgaataacccccccgggtgacggagatgccacaaatcc

SEQ ID NO: 14118 - DNA, 459 bp, Glycine max
  unsure at all n locations
  Clone ID: jC-gmle01810073f10a1
tagttctagatcgcgagcggtaacgaatatccgcacggaggagacgacgaggatctgagaagaaggaggcgcgagctacttcggcttcggattagggatttggcgactcgtacgaggagcatgcggaaccggatcttggattgggccgagattctgatgggcctcgaggacaattccatcgagttccgcctccagctgccagaatccgaccgctacgtcggaaatcccgaggattacgtcgacgcggcagagtacgaggcgctgctgcagacgctggcggagagcgacgggggaggcaggaggggagcgccgccggcgtcgaaggccgcgctggaagccttgccgacggtgaaaattgcgtcngaaagcgaagccgtggcgtgcgctatatgtaaagatttgctcggtgttggagacgcggcgaagaggttgccgtgcgggcattcgtatcatggagat

SEQ ID NO: 14119 - DNA, 421 bp, Glycine max
  Clone ID: jC-gmle01810073f10d1
gcaaaaccattgaatcttggacacacaagggtaatcctaacaaatgccggcaccccggtgatgtatattgaaccaggggacaaaaaacgattcaagccccatcctggggacccaaatccacgggggagataaaaaaacgcgctcttaacacaccccatataaaaaggcttcctacacatcgtgggatacactatattcgaaccatggctacgattgttggaaactctccaggggtgacaaaaacttttgggggggagatgatctttccgggattctgttaggggagattacatgcccctaaagcttgcaaacgggggaggacacctgtgttttggtgcccccacccattacttccctaaattagatacccaccgcggactgttaatccagcagcaataccaatgggctggcccgttacgta

SEQ ID NO: 14120 - DNA, 482 bp, Glycine max
  Clone ID: jC-gmle01810073f11a1
ctctctcccatgccatcgtccctcccttcacccgcgtcgccggaatccggtgccgcgttaaccgcgccggagactcggcgtactcaccgctgaactcggggtcgtcgtcttcgtcgttcagcgaccgcccccccacggagatggcgccgctcttccccggctgcgactacaaccactggctcatcgtcatggagaatcccggtggtgagggcgccaacaagcagcagatgatcgattgctacatccaaaccctagccaaggttctcggcagtgaggaggaagctaagaagaagatttacaatgtttcctgtgagaggtactttggattcggctgcgagattgatgaagaaacttctaataagctcgaagggttgcctggtgatatgtttgagctgccggattcgcatgttgatcctgagaacacggactatgggtgctgaattatctgtgaatggagagatcgtccagagatcacctgaaga

SEQ ID NO: 14121 - DNA, 401 bp, Glycine max
  Clone ID: jC-gmle01810073f11d1
agaaccaaatcatctatggcaactttgttggggaaaaaatgacgtgaaaagagtccaacattatgtttatagtaaaaatgataacgaagaggtgtccatctgatacagccatagaagtttgacaacaaacatttgagttaccccaccggaaatatatggaatgtctccaaaggcaagactaaaatagtgcatgtaacaaagtacttccatagtgtatgtacatcacatccctctccctatctcaaattggtccttcactgcatgttttctctgcgccggacataccttgttctatcattgtatcggggtctgtcctgatgcctttgtggctgtggttccacccttctctgtctttcaggtgatctctggacgatctctccattcacaaataatttagcacc

SEQ ID NO: 14122 - DNA, 540 bp, Glycine max
  unsure at all n locations
  Clone ID: jC-gmle01810073f12a1
ctctctcccatgccatcgtccctccctccacccgcgtcgccggaatccggtgccgcgttaaccgcgccggagactcggcgtactcaccgctgaactcggggtcgtcgtcttcgtcgttcagcgaccgcccccccacggagatggcgccgctcttccccggctgcgactacaaccactggctcatcgtcatggagaatcccggtggtgagggcgccaacaagcagcagatgatcgattgctacatccaaaccctagccaaggttctcggcagtgaggaggaagctaagaagaagatttacaatgtttcctgtgagaggtactttggattcggctgcgagattgatgaagaaacttctaataagctcgaagggttgcctggtgttctgtttgtgctgccggattcgtatgttgatcctgagaacaaggactatggtgctgaattatttgtgaatggagnagatcgtccagagatcacctgaaagacagagaangggtggaaccacagccacanaggcatcaggacagaccacgatacaatga

SEQ ID NO: 14123 - DNA, 375 bp, Glycine max
  Clone ID: jC-gmle01810073f12d1
agaaccaaatcacctatggcaactttgttggggaaaaaatgacgtgaaaagagtccaacattatgtttatagtaaaaatgataacgaagaggtgtccatctgatacagccatagaagtttgacaacaaacatttgagttaccccaccggaaatatatggaatgtctccaaaggcaagactaaaatagtgcatgtaacaaagtacttccatagtgtatgtacatcacatccctctccctatctcaaattggtccttcactgcatgttttctctgcgccggacataccttgttctatcattgtatcgtggtctgtcctgatgcctttgtggctgtggttccacccttctctgtctttcaggtgatctctggacgatc

SEQ ID NO: 14124 - DNA, 546 bp, Glycine max
  Clone ID: jC-gmle01810073g01a1
gcaacaaatactcttccctacacttttcagaaaaaaaatggttcaacaagaaatccgaaggggtccctggacagaacaggaggactacaaattagtgtattttgttaacatgtttggagatcgtagatgggactttatagcaaaggtatcaggtttgaaggtggagggagactgtaaataggtatgaatatttggacatgctaagttatacatgaagcacccctttaaccacctcactttgttgtaggtttgaatagaacaggtaagagttgcaggttacggtgggttaattacctccaccccgatctcaaacgagggaagctcacaccccaagaagaacacctcgtcatggaccttcattccaaatggggaaataggtttgagaaccatgcagaaataattaaactataagctacctacctttcaatcatcatcactcataattttaaattattttttcctaccatacagtactataagtattaattaggtctttggcttatggttttttttttttatatagaatgggatataaaagatttttat

SEQ ID NO: 14125 - DNA, 537 bp, Glycine max
  unsure at all n locations
  Clone ID: jC-gmle01810073g01d1
tggggcannnanagaaagggatcagtanncntagtcgnannncacctgaannaattaccggggcgacgacgctactaggcggcggccgccctgtgtttttttttttgtttttttggggtttttttttttttgggcagaacataacgggtttcggtatgggatgtttttttaaagtataaaccacaaacacattttgccttagactacgggaacctttgagatccatatctggtggggaccactagggaggcccatgcgcgaaagctcaaagaaactattctggacggggtaacacttaaccctttttattgggacagagggcccacacttaagaacaaaatattggctatttttttaaggccaaaagaaaaaaagaatttcctgattacccacttaaaaacgcgttcccttgttcatagataggaaaatatcggccactaagtggagggaataacatattataacttttttcttaatccatcacccaaaagggtggagaagaaaagtgtggctgaacccatgagggtgggaaaggca

SEQ ID NO: 14126 - DNA, 145 bp, Glycine max
  unsure at all n locations
  Clone ID: jC-gmle01810073g02a1
aaaccaaaagaacatatttattcatctccgaggacnattaggaggttaaaccgaaacatccgtcagctatcaattttactctaacaaactaaaacattttctatcactttttaaaaaaaaaaactttttacaagaaatttttaaa

SEQ ID NO: 14127 - DNA, 543 bp, Glycine max
  Clone ID: jC-gmle01810073g03a1
ctttttgctttgcctttgaatgtgttgttgttctcttttctcttggtggggtgtctgttgtgctgcgatgatatttgtcttggatttggtctcttagtacgtggcatagttatcatagattcttgtggcaggtgcttctttcagatatcaaaagcttcaagcacttgttttgtttcaatccagaacctgaagcttgtttataaaaaaaaaagggaggagcacaactgcaatttgcaagcaagatgtggcaaagaagccacaagtcatcagaggagaggaagctggagcttaggcttggtccacctggtgaagagtctctcaatgaaagcatcagaaaatgcaacagagaaagacgtagaaatgaatcaccactcactcttggttgcttctcaactcagaaaatttttacttctgacacgccaggtccaggtggagctatgttgccctctgcatggccttccacatcctatcatcaccaagaccaggctaaagctaaagcttcatcatttctacagctccaatcaagttcgcaaaacatgattc

SEQ ID NO: 14128 - DNA, 411 bp, Glycine max
  Clone ID: jC-gmle01810073g03d1
aaaataacaaattctagtacattcattcattacagacattacttataaattgtacattgctgtctaatcttcaatgttgaaaggaaccacaatgtcgaatataaacactcttcggtcttcacatgtcaggatggaaaaaaacctcctatcgattaatgcttcattaataattgccgggtcaagggagaagctagtcttgcttactaccaagggtaaaagcacgaggattagaactcttcaacaccctcagactcttcactgttgacacaaacatgtgccacggtacatctccaacaagcatcctgactccttcgttaacctcataaacaagagtatattgcccacttccaaccaagagaacccgaattggatgtcgtgttactgatcccttgcttagaattccaccagcac

SEQ ID NO: 14129 - DNA, 543 bp, Glycine max
  Clone ID: jC-gmle01810073g04a1
gcgcagactaacaccctttccttcttcttcgttcggatcagattcttggaattctgaatcaaaattctcagaagaaggagatgtatagcaatttcaaagagcaagcaatagagtacgtgaaacaagcggtagatgaagacaataagggaaactatgcgaaagcgtttcagctttacatgaacgcgttggagtatttcaaaacgcatctcaagtacgagaagaaccctaagatcaaggaggccatcacgcagaaattcaccgagtatctccgccgggccgaggagatccgggcggtcctcgacgacgggcccagcggcccggcctccagcggggacgccgcggtcgccacacggcccaagacgaagcccaaggacggagggaaagacggagacggcgaggatcccgagcaggccaagctccgggccgggctcaactccgcgatcgttagggaaaagcccaacgtgaagtggaacgacgtcgcggggttagagagcgcgaagcaggcgctgcaagaagcggttatcttgcccgtgaagtttccgc

SEQ ID NO: 14130 - DNA, 576 bp, Glycine max
  Clone ID: jC-gmle01810073g04d1
aaccagattcacattttcacatcaaatttatttttctggttattgcatcagtctgttcttatacacaaattatgattagtaaaaatatgcatttcacttgatccaatagcactgtaaattacaaatcataacatgtttaagctagtgcagatgattgaagaaaaattccgtcagaattatccttcctctccgaactcctttgtgaatctttcatgaacatcaaggtcagacttgcttacggtgggtctttgtctagcaagtactttgtcaaaatctgttctcgatataggaggtgggaggatcttagaagcaagtcctttcgcagcaatatcctgcattgtagtttgcactgaaccctgttgctttggcccacatgggatccacataccctcaggattcctaaagaaaaacatggcatcttgggttttgcgaacaggttcaaataaaacatccttgacacagacagatatatctgaacctgaaaacccctttgtcttgcgagcccaatgttaaaatcacttttagccaagtatggggaggatttctaggggcaccttgacatgtgtggcgagcctt

SEQ ID NO: 14131 - DNA, 375 bp, Glycine max
  unsure at all n locations
  Clone ID: jC-gmle01810073g05a1
caacattttaagaagccctgggctcatgttcatgaacttgttanaaatcttgtagatgctggtgataaaattaagccaacagtgttgattggaacatcgggacaaggaagaacatttactaaagaggtgatggaggcagtggcttctattaacgagagacctattattctttgtctttccaaccctacgtcacagacagaatgcactgttgaagaagcttacaagtggagccagggacgtgccatttttgcaagagggagtccatttccttccgttgagtgtgaggggaaagcgatagtgcctggccaggctcaatatgcatacatatatcctggatttggtcttggattaataatgtctgagaccattatagtg

SEQ ID NO: 14132 - DNA, 448 bp, Glycine max
  Clone ID: jC-gmle01810073g05d1
atcattaaataattgacaataaaatgataaaacgaaaaggaaaaagaaaaataggctatttattatcgcttcaccggtagcttcggtaggatggggtatacatacagctctctgcaaacttcaccaaatctttaggttgaggaaggcgagtggccaagccaagctcataagccttagcagcaacattggcagctatgtgtgctgaaatctttcttatgttggtgaatggtgggtatatgagtcccttatcaaagttctcttggctcacttgtgcagccaaagcctcagaggcagccagaagcaggtcatcatgcactcgaatggtcccagacattattaaaccaagaccaaatccaggaaatatgtatgcattattggcctggccaggcacaaacactttcccctcatactcaacgggaggaaaagggctcccacttgcaaaaatggc

SEQ ID NO: 14133 - DNA, 418 bp, Glycine max
  unsure at all n locations
  Clone ID: jC-gmle01810073g06a1
agaccgcanggacttgagagcganancgatnaagggtaaacctagctccaatgcggtcgagggacaaaagaggaatccctggcataatttttgtttttgagtggtacagaatcaaacagcggtgcctagagcaaggtcaaccgggtggaacctaccatgaatgcaaggcacaacagccactaaatgggggcttcgagaattggtccagactgtcgagagacctttttatcaatcacatgacactcctacatagaacaaagaatatagtggtttacaaacatgcaccagcagaccataactatgcatttaagcatgcgtcagaacattctcaatcccttggagtttggggaacgtaggcagctatactgatctcataaacagcttcttgcttctactacttagacataaacttagcatg

SEQ ID NO: 14134 - DNA, 363 bp, Glycine max
  Clone ID: jC-gmle01810073g06d1
gataacagacacatagatggggggatgaatcggacatactacgggtggacatgatttataaatcaaacggatggtgatgccggtcggagtatacacacagacttgtgcacgctcacatacatcacttaggagtggatggcacaaggactatacgcgtgcataagcctgaatatttacttgggaacgtgagagggcacgaatgtttggtatgagaaccactggtggacgcactctggccttatatagagacgctggggtgaattgctctgacagtgacgccttcctcactggaaggaagaagcactgcactcggcaggtgcaccggtccattacgcgctgtccggcttgaatatatgtgtctgc

SEQ ID NO: 14135 - DNA, 588 bp, Glycine max
  unsure at all n locations
  Clone ID: jC-gmle01810073g07a1
atgaaatgaatcatttcatattgatagtattgctatgcttagtgtgcgactcgttagttttttagaacggttccaatttaacaaatttataaaccggttcatcgtataaatgaattaaaaaagaactaataaccaacgcatcgcttcggattatctagatctaaagaactagtcaaaacaaaaaaaaatataaaaaaagatatattatagcaactgaactattgtgaagcataaaagaacaaaaatcttatttagttgtaaagcaataaaaatatacagataaatgaagaggtgaaagaaagagagaaaaaaaatcaatgatatagaattctaatatgtaaaggtctatgggttatctcataaaaggtagtgtaataaagcatcaatctaaatcaattcatatctatttatatatgaattaatttataacgtaaacaaattaagagctctgaatcaataaaaactgagaatattgattcacgaanaaacaaatcaatattcgaaaaaaaaaaagattattaatttaagatatgagacaggctccattgtcgaattcaaacctaaccattaatcgagaagtgatgggaa

SEQ ID NO: 14136 - DNA, 521 bp, Glycine max
  Clone ID: jC-gmle01810073g07d1
acatatataactaaagaatcgggttttgttctattatttgttattttataatattctaatgaatctttattttcctttttattattagttattagaatattttttattattagaaagaataaatagaattggcaaaaataaaaaaaaaattcaataaaatcaaaattatcgcgggcgaatatttactcttttattatcaatcaaattcagatgtaatgtagggcacaactcctaaaaaaaggattgctttttggtttcttccgccatcccacctaatgaatcattaagatttgtttttaataaaatcttaagtatttgcaggtttcgtcgttcccatcacttctcgattaatggttaggtctgaattcgacaatggagcctttctcatatcttaaaattaataatctttttttttttcgaatattgatttgttttttcgtgaatcaatattctcagtttttattgattcagagctcttaatttgtttacgttttaaattaattcatatttaaatagatatg

SEQ ID NO: 14137 - DNA, 502 bp, Glycine max
  Clone ID: jC-gmle01810073g08a1
gctctcttggactcagttcagtttcactttcgatcctacaatggcgacagtcacgttttcgttttccggtaaaaccctaactctaccttatcaccccaaaaccccaatctccaactttaccccggtaacgaatcttcgcctccctccttctatcgcgacccgaacccgcaattgtaaccggattcgggcggcgctggatggggatttctcggcgaaaaggagcagcagcagcaacaacaacgaccagagggagacgataatgttacctggttgtgactacaaccattggctgattgtgatggagttttcaaaggaccctgcacccacccgtgaacagatgattgacacgtacctcgacactcttgccactgtcttgggaagcatggaggaagctaaaaagaacatgtatgcctttagcaccaccacttacactggatttcagtgcactgttgatgaagcaacctccgagaaattcacgggtttgcctggggttctttgggta

SEQ ID NO: 14138 - DNA, 471 bp, Glycine max
  Clone ID: jC-gmle01810073g08d1
ggttgcttaagataatgacaaaaggctgtatagggatattatctaaacttgtacagttcatatcaggcactttatgtgttaatattgtagctgccatgaaacttgcagaaaaagttatcacgaaaacaaactggttgcacgataagtagctctccaaattacacagacaaattaacctaacaattgtcccacatgttatactcatagtccaaaagcacatattcctcaagacgaattgtgaaaataccagtttgagcttgcaagaaacattgtatgcatctgatgagaattcaacccaagttcaatcttctatttgataaaatgaccatgagcatgatagagctgtgataaggagcaactttcacttggcattagttactatcagcaaaactgaaactcacctgcaaggctcatgtataggatgaatccgaggcagcgggctcttgtattggccttttgcggtcaggggga

SEQ ID NO: 14139 - DNA, 188 bp, Glycine max
  Clone ID: jC-gmle01810073g09a1
ctcgagccgaatcggctcgagctacaattattaaggtgaagataatttcggctctttacaagtaaagaatgaaattttcatatggtagatttagttgatcaatataattattgttttaatttaattccttgaattaatttaattattgttcttcgacactttattcagtatattattaatttttttag

SEQ ID NO: 14140 - DNA, 186 bp, Glycine max
  Clone ID: jC-gmle01810073g09d1
aaaataattaataatatactgaataaagtgtcgaagaacaataattaaattaattcaaggaattaaattaaaacaataattatattgatcaactaaatctaccatatgaaaatttcattctttacttgtaaagagccgaaattatcttcaccttaataattgtagctcgagccgattcggctcgag

SEQ ID NO: 14141 - DNA, 523 bp, Glycine max
  Clone ID: jC-gmle01810073g10a1
aaggattttgatatttggaacctaacttcactagcttaattgtttcttggttttaggaaatatgtggaggttctcaatagttctaaagctgattctgctattagcccaggatgtacaaagtctgaaattcctcagaaggtgttggaatctttgtttaatattcccaaaagcactgaacatgacaaagataccatgaattggagaaatgtagtaaagaaaatccagtctttgggacctgggttcaatgtttctccgcatgtcgcagaatctcaacaacatacgtgtggtacaaaatgacaattttttaaatacttttacttgtataggcttgccttaaacagccttaaacagtatttgttgattagtgcctttgagtacccattttattatgcaaaaatagctggctgatttttagtgattgcaaacacctttatgaatctggtgcatgctcatttcttcttctggtttacctttcatcatgatctgaaataggactgtcattggttctacagagtatgttggc

SEQ ID NO: 14142 - DNA, 480 bp, Glycine max
  Clone ID: jC-gmle01810073g10d1
ctgaaaataaaacctcatttttacattttaatgtatggaccccatcgggtccttatcccaacccggcaaagaatttcttactttttccaaaaaacccgatttaataaagctcccggaaccacgggatttaaacgaaccaagaagtccccagacttaactccgattacaaaaacggttgtgtaaagggaaaaatttttattaattgtttttctccagccttttaatttaaatgtgggtgacaagggtggggcccttacacatgcttaatcatatcagtcattgtttctgggggggacttaaaaaattttctcttttcatccgattaagaaaaaaagtcaggggcctggagcacttccctgcacataatggagtttttacgaagaagcttttagctggcgaaccaaaaggggggagcaccctttttgaaaaataaggccccgccaaatactcacaaaatttatgtttttgcccaaaaatttt

SEQ ID NO: 14143 - DNA, 562 bp, Glycine max
  unsure at all n locations
  Clone ID: jC-gmle01810073g11a1
tccttctccttctcttctctgcttctcttttcatctccgaaaacaatgaagctcattagcagcattaaccccaaaaatctcaaactcagtcccaaacgcttctttcgcaaaaaggaacgatctttagtctcacgctccgacccaccttcattcggatccggatcttcctccgacgactccaccacaaatcacaagccttccgccggtaaccaaactccgaccagcgtcctcccgggcgtctccggagactggtccgacgtcgccgccgtcgacgtgcggtgggacctcgcccaggccttccgcctcatcgaccgcgacaacgacgggcgtcgtcacgcgccaggacctcgaggccctcctcacgtgcctcggcgcgtcgccgtgccccgacgacgtggcggtcatgctcggcgaggtcgacggcgacggcatcaccgtagaaaggctcatgagctacgtcgggtcgggtctgaaacccgggtcggatcccgacgagctcaagaggcgtncgaggtgttcgaacagatcgcgacggaggatctcgccggagagctgcttaggg

SEQ ID NO: 14144 - DNA, 479 bp, Glycine max
  Clone ID: jC-gmle01810073g11d1
aaaaaaaattatgaagttgccttccttcttatatatatttgcacatcataagtcataacatgatcatgatcatcatctgacatcatcacaatcacaaccacgtcatcatcatcgctgctgctgcagctccatcatacgagaaaagtcctcgaagcagacgaacccgtccccatttctgtccacaccctctatcatgcgccggcactcctctaacgtgcaccgctcgtcgccgatggccttgaaaaccctaagcagctcctccgccgagatcctcccgtcgcgatccgtgtcgaacacctcgaacgcctccttgagctcgtccggatccgacccgggtttcagacccgacccgacgtagctcatgagcctttctacggtgatgccgtcgccgtcgacctcgccgagcatgaccgccacgtcgtcggggcacggcgacgcgccgaggcacgtgaggagggcctcgaggtcctggcgcgtga

SEQ ID NO: 14145 - DNA, 456 bp, Glycine max
  Clone ID: jC-gmle01810073g12a1
gccttctccttctcttctctgctactgttttcatctccgaaaacaatgaagctcattagcagcattaaccccaaaaatctcaaactcagtcccaaacgcttctttcgcaaaagggaacgatctttagtctcacgctccgacccaccttcattcggatccggatcttcctacgacgactccaccacaaatcacaagccttccgccggtaaccaaactccgaccagcgtcctcccgggcgtctccggagactggtccgacgtcgccgacgtcgacgtgcggtgggacctcgcccaggccttacgactcatcgaccgcgacaacgactgcgtcggcacgcgccaggacctcgaggccctcgtcacgtgcctcggcgcgtcgacgtgccccgacgacgtggcggtcatgctcggtgaggtcgacggcgacggcatcaccgtataaaggctcatgagctac

SEQ ID NO: 14146 - DNA, 435 bp, Glycine max
  Clone ID: jC-gmle01810073g12d1
ataaaaaaaattatgaagacgccttccttcttatatatatttgcacatcataagtcataacatgatcatgatcatcatctgacatcatcacaatcacaaccacgtcatcatcatcgctgctgctgcagctccatcatacgagaaaagttctcgaagcagacgaacccgtccccatttctgtccacaccctctattatgcgccggcactcctttaacgtgcaccgctcgtcgccgatggccttgaaaaccctaagcagcttctccgccgagatcctgccgtcgcgatccgtgtacaacacctcgaacgcctccttgagctcgtgcggatccgacccgggtttcagacccgacccgacgtagctcatgagcctttctacggtgatgccgttgacgtcgaccttgtcgagcatgaccgtcacgtagccggggcacggc

SEQ ID NO: 14147 - DNA, 543 bp, Glycine max
  Clone ID: jC-gmle01810073h01a1
ctgttctagaaatgcaaatgggaaatatcaggagagcaagagagttgtttgatgctgccacagttgctgacaagaggcatgttgctgcttggcatggatgggcaaatctagaattaaagcagggaaatctaaagaaggcaaggattctacttggtaaaggtcttcaatattgtggacagaatgagtacatataccaaacacttgcacggcttgaagctagagcaaatagatatctgcaggctcgatatttattcaatcaggccactaagtgtaatcctaatagttgtgctagttggcttagttgggcgcaaatggaggtggagcaggaaaactaccgtgctgctaggaaattgtttgagaaagcagtacaggctagtcctaaaaataggtatgcttggcatgtatggggcgtttttgaagctaacatgggcaacattgacatgggaagaaaacttttaaagataggtcataatctaaacccaagggatgctgttctacttcaatctcttgctttattagaataccaatactcaactgcaaacg

SEQ ID NO: 14148 - DNA, 516 bp, Glycine max
  Clone ID: jC-gmle01810073h01d1
cattaaaaaaatatttcttataatgccgtgttcaactcaaggcaattacacctctcatgccacggtcatactattcaaaacaatttttacaagacaccaatatgtatatatatagctgaagaccccacaccctaaactaaattactgtgtgacttgcacttcagcaatttcattaattgatcgtcgccatatccttctaggagacgtacttctcttcacagaataaaattttggttcttccaactgaatttctagattggacaaatctaatgttagcttttgcttaatgaaagcatccaaatcaaagtcactttttccatttgcatcatcatcatcctcgtcttcactagaagaatcaactctgtttttatttgttcccgcaatgttcctcaaagaatccagtggcatgttgtacgaatttgggttcagcttgaggattctctttaactgtcaatagccgggtctaaaatacctaggaatcccataacccatgaagcatcatctacaacttctgtg

SEQ ID NO: 14149 - DNA, 615 bp, Glycine max
  unsure at all n locations
  Clone ID: jC-gmle01810073h02a1
ctgttctagaaatgcaaatgggaattatcaggagagcaagagagttgtttgatgctggcacagttgctgacaagaggcatgttgctgcttggcatggatgggcaaatctagaattaaagcagggaaatctaaagaaggcaaggattctacttggtaaaggtcttcaatattgtggacagaatgagtacatataccaaacacttgcacggcttgaagctagagcaaatagatatctgcaggctcgatatttattcaatcaggccactaagtgtaatcctaatagttgtgctagttggcttagttgggcgcaaatggaggtggagcaggaaaactaccgtgctgctaggaaattgtttgagaaagcagtacaggctagtcctaaaaataggtatgcttggcatgtatggggncgttttgaagctaacatgggcaacattgacatgggaagaaaacttttaaagataggtcataatctaaacccaagggatgctgttctacttcaatctcttgctttattagaataccaatactcaactgcaaacgttgccccgggtttgttcaagagagcatttgattgaatccaagcaccagcctcgttggttgttggggttggat

SEQ ID NO: 14150 - DNA, 472 bp, Glycine max
  Clone ID: jC-gmle01810073h02d1
cattaaaaaaatatttgttataatgccgtgttcaactcaaggcaattacacctctcatgccacggtcatactattcaaaacaatttttacaagacaccaatatgtatatatatagctgaagaccccacaccctaaactaaattactgtgtgacttgcacttcagcaatttcattaattgatcgtcgccatatccttctaggagacgtacttctcttcacagaataaaattttggttcttccaactgaatttctagattggacaaatctaatgttagcttttgcttaatgaaagcatccaaatcaaagtcactttttccatttgcatcatcatcatcctcgtcttcactagaagaatcaactctgttttatttgttcccggaatgttcctcaaagaatccagtggattgttttacaaatttgggttcaccttgaggattctctttaaactgtcaatagccgggtctaaaatac

SEQ ID NO: 14151 - DNA, 314 bp, Glycine max
  Clone ID: jC-gmle01810073h03a1
gcgcatactgacaccttttcctttttctccaatggggacaaatttttgactggccggatcatatttacaactatagggagatgaattggggaacccaagcgcactatttattacacgggtgaccagctggtaagaactacatcattggaaactgtgctacagcctaaaagtttgacaagagcgcatgcgagtatcataaaacgcgtcttacgtgacagaagatccataagatcagagctgccattaatgcgtgatttggagtcattctacgtcagtcctatgagacacggtctgttctcaactacaggcacaga

SEQ ID NO: 14152 - DNA, 329 bp, Glycine max
  Clone ID: jC-gmle01810073h03d1
ataaccaacttctcatattccccaataacatatcacaaggaggggaacaggagaacgacattacacacaaagcacatttcattaatatgaggaatccactccaaccaaccccgctgtaaaactctgagtggaccctgccctacttccagctaaggatttggtaaaaccctcacagaagcaatctcagctctgaccatttcagggcgaatatacttaactcctatatgacatgctggctttcacgagggacaaaggctatcatgcctgaggaaaaaacatgcatccgtatcaacaggtggaaagatcgtatacacatgttcgtggataca

SEQ ID NO: 14153 - DNA, 324 bp, Glycine max
  Clone ID: jC-gmle01810073h04a1
gcgcatactaacaccctttccttttttttcaatgggaacaaatccttgggtggccggatcatatttaccacaatagggagatgaattgcagtaccaaagcacacgctatataacacgtgtgaccagcgggagaggactacaacattggaaactatgctaaagcctttcagctttacatcagcgcatgggaggattcaaaaacacgttttacgtgccagaagaaccctaagatcaaggatgccatcacaccgaagtttaccgcatatctacgccatgcctatgagatacgggcggttctcaactacaggcacagatgaccggtct

SEQ ID NO: 14154 - DNA, 541 bp, Glycine max
  unsure at all n locations
  Clone ID: jC-gmle01810073h05a1
gatgtaccagttcnagtctgagacgctaagccttacgtagctcgcaattcgctcagcaacattgaagaaccctgggctattttttgattctgtggaaatcttgtatacgctgaaataaggtaagccaacagtgttgattggaacatgaggacaatgaagaacatttactatataggtgattggggcaatgggtcttattaacgagagacctattattcttgctctttacaaccctacgatacagggagaatgctctgatgaacaagcttactagtggagccagcgacgtgccattatcgcaagtcggagcccatttactcccgactagtatgaggggaaagtgtatgtgcctggccaggaccaaaacgcatacatattatctggattctgtcttggcataataatgttgtgggaccattcaaatgcatgatgatctgcttgtggctgtctctgacgcttttgctgcacaagtgagccaatagaactttgtttagggactcatctacccaccatttaccaacataagagagatttcagcaca

SEQ ID NO: 14155 - DNA, 524 bp, Glycine max
  Clone ID: jC-gmle01810073h05d1
atcattaaataattgacaataaaatgagggaacgaataggaaaaagaaaaattggctatttattatcgatttaccggatgcttcggcaggatggggtatacatacaggtgtctgtaaactttaccaaatctttaggtagaggaaggcgagtggccaatccaagctcataagccttagtagcaacattggcagctatgtgtgctgaaatgtttcttatgttggcgaatggtgggtatatgagtcccttataaaagttctcttggctcactagtgcagccaaagcctcataggccgccagaagcaggtcatcatgcacttgaatggtcccagactttattaaaccgagaccaaatccaggaaatatgtatgcattataggcctggccaggcacaaacacttttccctcatactcaacgggaggaaatgggcttccacttgcaaaaatggcacgttcctggctccagttgtaagcttcttcagcagtgcattcttgctgtgacctatggttggaaagagaaagaata

SEQ ID NO: 14156 - DNA, 453 bp, Glycine max
  Clone ID: jC-gmle01810073h06a1
aaatgggaattgattccaatttctgtaaaactgctaaggcgctctatcctcacgctcgtaatctggctcgaggctggatcggcacttgttgatgactggtactgccttaaaaccatggtgaggacttttgagacacattgtggatccttgtctcaatacgggatgaaacacatgaggtcctttgcaaacatctgcaatgtaaggataaagaatgaacaaatggctgaggcttcagcacaagcttgtgtcagtattccttccaatccctggagttctctgcaaaggggtttcagtgcataataactccctgtaatgtgcactagtagagaccaaagtatgattattgttacattatgttacatggttgtacttgcatatacatatcttgtcccaccttatgaaatacaattgggacactactaggattgggaagaaagggtctttacatttata

SEQ ID NO: 14157 - DNA, 377 bp, Glycine max
  Clone ID: jC-gmle01810073h06d1
gattcctaatttttgcatattcattaccttatacccttaacttcagcgggccgggccgtacacaaaaaaaaaaacaaaaataggcggcacaaaagaagccgggggcaaaaaaaaaaaacaggcccagaaaacccccccccaaccccgcccccccaaaaaaaaaaccccccccaactgccccgggggggccaccccccccagcaagggggggggtaccccaaaacaggggggccccaaaacccccaaaaaacccacggcccaaaggggccccccccccggaggaaggggggcgccctccacgaaaaccaacacccccgggggggggggcaataaaaagcccccacaaaaaaaaaaaaaaccccccccccccaccccaa

SEQ ID NO: 14158 - DNA, 378 bp, Glycine max
  Clone ID: jC-gmle01810073h07a1
gcgaaatgggacatttcatagtgatagtatcgctcttcctagggcgccagtcacttgtttgttagacggggaccccttaactatacctataaaccggatcatcgcataattgaactatacccgagctactaacctacgcctcgcttctgataatctaaacctaaccagctattgcaaccagattcaggcgtcgctggagatgtattatctcggcgtgaactatcgtgaagcataacagaccagaccagataggtggctgtaaagcaatctgaatgtgcctacaaccgaagacgggaaggaaagaaagaaacaaaggtcccggcatccaactgtgaactgatgagggacacgggccatctcacagaaggcactgtgatg

SEQ ID NO: 14159 - DNA, 436 bp, Glycine max
  Clone ID: jC-gmle01810073h07d1
ggttgcacaaaaaaaagacaaaaggcgggatttgcataatatttagacatgttcagatcatataatgaactttaagtgtccatattgttactggcaagaaacatgctgaaaaagatttgacaaaaacaaactggttgcccgatatgaagctctccttctttcacatacaaattatcccggccgaagatccacatgttattcttaaagcccaaaaacacatattgctggggacaaatcgtgaaaaaacgagtgcgtgctggctagaaacatcgtccgcccttgaggagaattcaaaccaggttcaaactaatatttgagaaaatgaccgtgagcatgatacaaccactattaggagcagggttcagtcggcattagacactagagcctaaactgaaactcaacagcaaggatcatgtttatgatgaaatagaggcag

SEQ ID NO: 14160 - DNA, 493 bp, Glycine max
  Clone ID: jC-gmle01810073h08a1
caactgcaacaattttggataagcacctttaaccctttagagcagatcctgatagaagaagggctaatgcatttgattatggatcagggtttgtgaacccctcaagagttctggatcctggtcttgtatatgattcgaatccagaagattttgttgcgttcctttgttcacttggttatgatgagaggtcactccaccttgtcacaaaggacaacatcacatgtgatagggcattcaaaacaccatctgacctcaactatccatctattgcagtgccaaatcttgaagacaacttttcggtaactcgagttgtgactaatgttggaaaagcaagaagtatatataaagctgtagtggtgtctcctactggagttaatgttactgttgtgccaaatcggttagtcttcacaagaataggacagaagatcaagttcactgtgaattcaaagtggctgctccctcaaagggctatgcattcgggttcttgtatgga

SEQ ID NO: 14161 - DNA, 503 bp, Glycine max
  Clone ID: jC-gmle01810073h08d1
gtcatggcatcaaaatatcattgtattcagttctgtgtttgatatcccagactgccccaagcatataactataacgtaagtttggaagtgatcatttaggttgcatccggatttcactgagaatagttgttctagtcttagttacgatagggatctcacggctcctaagcatatatacataattacaagcattgttatctcaccaacccatgacttgctggtgcaaccttaacaactaaaggactcgtgacctgtgttcttccattcttccatgacaagaacccgaatgcatagccctttgagggagcagccactttgaaattcacagtgaacttgatcttctgtcctattcttgtgaagactaaccgatttggcacaacagtaacattaactccagtaggagacaccactacagctttatatatacttcttgcttttccaacattagtcacaactcgagttaccgaaaaggatgtcttcaagatttggcactgcaatagatg

SEQ ID NO: 14162 - DNA, 432 bp, Glycine max
  Clone ID: jC-gmle01810073h09a1
gagctcgagccgctcctttagcttcaggtgtgtaacggaagctggatatggtaaatcaggatggaattaagaacgaaaaaccaatgaggactactaaaccaaaatatcgtcagccaggaaaggacagcccaacttctatgaacaaagggaggtctgtacgtggggtttcagaaacagctgaaaagttgggcaatttgtctgtttccagtcgaagacaatcaatggggcaacctcgtcctcctccaccaatgaaggctggaggcaattggatttctgaatctggaaacttcatccttgggcccgcacagcagattccgactggaagaacttttgcaagaaaagttgcctgatgacaagtatgaatgagtaaaatgtgagtgatgatgattctataatgctcaatgatgtgattgtgaatgtatcctaatatca

SEQ ID NO: 14163 - DNA, 386 bp, Glycine max
  Clone ID: jC-gmle01810073h09d1
ggagggtaggagacattcacaatcacataattgaccattataaaatcatcatcactcacattttactcattcatacttgtcatcaggcaacttttcttgcaaaagttcttccagtcggaatttgctgtgcgggcccaaggatgaagtttccaaattcaaaaatccaattgcctccagcctttattggtggaggaggacaaagttgccccattgattgtcttcgactggaaacagacaaattgcccaacttttcagctgtttctgaaaccccacgtacagaccttcctttgttaatagaaaatgggctgccctttcctggctgacgatatttgggtttacaaatcctcattgggttttcggtcttaaacccatcctgttttaccata

SEQ ID NO: 14164 - DNA, 521 bp, Glycine max
  unsure at all n locations
  Clone ID: jC-gmle01810073h10a1
ggctcgagattctttgaacaatggcgtctctctctcacctcaacaagctcctctgcatgcccccgctcaactcttcaccctctatttcgccaccacgcagcagcgtcggaatttggaccaaacctgtcggaaggccgaggctactggtgcgtgtccgagcggtcacgagcgacgacgagtgggggccggagaaggaggaggcgtacggcggcggcgtagcggtggaggagaaaccgacgaagtcggagacggagacggagaagctgaagaaggccttggtggattcgttttatggcaccgatcgtggactgaaagcaacgagcgaaacgagagcggagaatcgttgaactcatcacacagctcgaggccaagaaccctaaccctgttcccaccgacgccttgactcttctcaacggaaaatggattctcgcgtatacatcctntgcaggtttattcccattgttgtcaagtggaacactaccattgggtcaggtagaggaaatatcccagaatattgactc

SEQ ID NO: 14165 - DNA, 333 bp, Glycine max
  Clone ID: jC-gmle01810073h10d1
ggtcgggtcaaaaaccatcacattaacaaccaaccaacattttgcaacacagcattaacaaactgtgctacacatgtttcttcaaaatcattggataaaattcagaccctttacttatttataaacataagcctgatattggcccccaaagaaaactaggttgttttgtttatcttggcaaaagaaagctttcttttttgataaaaacaaacacactggcaccatcgccccttgagatacccaatttttcatcgagggatgtggggaggaaccaggactgagcattggtgggggaaattgggatcttcagggaggcctacttgaaattgtttt

SEQ ID NO: 14166 - DNA, 471 bp, Glycine max
  Clone ID: jC-gmle01810073h11a1
tccttctccttctcttctctgcttctcttttcatctccgaaaacaatgaagctcattagcagcattaaccccaaaaatctcaaactcagtcccaaacgcttctttcgcaaaaaggaacgatctttagtctcacgctccgacccaccttcattcggatccggatcttcctccgacgactccaccacaaatcacaagccttccgccggtaaccaaactccgaccagcgtcctcccgggcgtctccggagactggtccgacgtcaccgccgtcgacgtgcggtgggacctcgcccaggccttccgcctcatcgaccgcgacaacgacggcgtcggcacgcgccaggacctcgaggccctcctcacgtgcctcggcgcgtacccgtgccccgacgacgtggcggtcatgctcggcgaggtcgacggcgacggcatcaccgtagaaaggctcatgagctacgtcgtgtcgggtctg

SEQ ID NO: 14167 - DNA, 479 bp, Glycine max
  Clone ID: jC-gmle01810073h11d1
aaaaaaaattatgaagttgccttccttcttatatatattgggacatcataagtcataacatgatcatgatcatcatctgacatcatcacaatcacaaccacgtcatcatcatcgctgctgctgcagctccatcatacgagaaaagtcctcgaagcagacgaacccgtccccatttctgtccacaccctctatcatgcgccggcactcctctaacgtgcaccgctcgtcgccgatggccttgaaaaccctaagcagctcctccgccgagatcctcccgtcgcgatccgtgtcgaacacctcgaacgcctccttgagctcgtccggatccgacccgggtttcagacccgacccgacgtagctcatgagcctttctacggtgatgccgtcgccgtcgacctcgccgagcatgaccgccacgtcgtcggggcacggcgacgcgccgaggcacgtgaggagggcctcgaggtcctggcgcgtga

SEQ ID NO: 14168 - DNA, 592 bp, Glycine max
  unsure at all n locations
  Clone ID: jC-gmle01810073h12a1
ccagaatttcatgcaccgtggttattttagtgacacttggctgaattcatgatatgctttggttgctactttttgatttaatttcgtatgattatttttctctctctttaaattaacattttaactgtactgactattgtttatggtgtttgcttattatattctgccaaaaaaatggtaacagttgtcttcactctaattatgagtaagaaagagatacgcaataatgtattgggtgtccaaacgttgtaacctgccttttctgacctttacagcatttattcctctttaactacatactatgtttctttctgttgagttggatctatatctattaactcaataaagctgaaataaacttgattgttggtgttgcaattagttgattatacagtgttaatgtctctgtgtattgtgattgagttcccagattatgttacagcatttattcctctttactacatactaaggaattgaagtgactactttgtctttatgaattactgatcaatgaaagaagtgtttgggaacaagaaattgtttccccacttcccatagtaatattccaacctcangaatcaatcttgcagct

SEQ ID NO: 14169 - DNA, 532 bp, Glycine max
  unsure at all n locations
  Clone ID: jC-gmle01810073h12d1
atgaagaaacagttatccaagatgttggatcactggcagaaaaaatctcattacataacgatttagagcatcccttatgtttatgtttacaagatttcaaattcattctgcttggttctttacagaatccattgatgtatattaccaaaatttaattcaaccagagtttagtttaatttatatacaccctataaaacagtcttacacaaacatccaataacaatttactttatcaccatattatatttatgaattcgatgacgtgataaaataatcaaatcttattggatatctgtgtaaaaaatgctttacattgataatatgtataaattaaactcatcagagaaactttgattcatctgattgctagagaaatcaatgctttccatttacttctattgcaggacttgtcttcctcctcctctcgcgaaagcttcggcatgaagacaagcttggaatgcaccactgcanagactttactaatttctctctaatggatgcacgatcctcactcatggtcctttcactacta

SEQ ID NO: 14170 - DNA, 569 bp, Glycine max
  Clone ID: jC-gmle01810075a01a1
gtcaaaacacttcaactttaggctttatctcaaaaaaatgggtggtttagctagcggtcttgctctaattgttatggtgggtctgcaaattcattatgcagcacttgctatattcacaagagccgctttgttagatggattgagtacgacggtctttgtagtgtacaggcaaggcatagccactttggctttggcgcctatgtttttctctcctaagcggagacaatcagtgaaagattccttgggattcaggagcttctttttgatgtttgtgaccgctcttgttggagtcacagcaaatcagaatgcatactttaaaggtttattttatgcatcctctactgcagctaccgctatgagtaatctgataccagcattaacgtttgtaattgcggcaattgcgggatttgagaaagttgacataagcttaagaagcacggccaagatattagggacagtttgttgcgtcgctggagccttaaccatggctttggtcaaaggacagaagctgttacacacagagttcctttcttttatacatcttactggcagtgaaagtgacgattggc

SEQ ID NO: 14171 - DNA, 538 bp, Glycine max
  Clone ID: jC-gmle01810075a01d1
gcagaggagtgtctcgtttatggtttatcatttcggagaaggtgaaggagaagaagaagaacaacaacaaccttcactcttctattattattattattattattattcaatttaatcatttaataataataataataattttgttcaccaattattattattctacatcagcatgggtaagggtcccttttccttccgccgctccgcctctcgccgccgacccaagaagaccgccgccccgcctcctcctccgtctgcgccgcagcctccctacgcggccggaatcgccacctcacccgacgacaacaacaaccgtctcattgctgccggcgccggcagcagcgccttgacgaaggcgaagaagaagaccggcggcgcccgcttgtggatgaggtttgaccggtcgggccggtcagaactggtggagttggagaagaacgccatcatccgccacgcagcgattcccgctagagacctgagaatcttgggccccgtcttctcccactgcttcaacatcctcgctagagagaaagcaatg

SEQ ID NO: 14172 - DNA, 574 bp, Glycine max
  unsure at all n locations
  Clone ID: jC-gmle01810075a02a1
caaaaagatatctgcagtctcgatattttttgagacaatgccatatcgattgaatgaaagtacaggatacatcgactatgaccagatggagaaatctgctacactcttcaggccaaaattaattgttgctggagctagcgcttatgcacgtctctatgattatgaacgtgtacgcaaggtttgcgataaacagaaagctatactattggcagatatggcacacatcagtggattggttgcagctggtgtcatcccatcaccttttgattatgctgatgtagttactaccacaactcacaagtcacttcgaggaccacgtggagctatgatattctacagaaaaggggttaaagaaattaacaaacaaggaaaagaggtattgtatgactacgaagacaaaatcaaccaagctgttttccctggactgcaaggtggccctcacaaccacactattactggtttagctgttgcgttgaagcaggccactactcccgaatatagagcatatcaagagncagttctcagcaacagctttaaaattgcacaggctctgagtgagagaagctatgagctt

SEQ ID NO: 14173 - DNA, 431 bp, Glycine max
  unsure at all n locations
  Clone ID: jC-gmle01810075a02d1
ttttttttattaataatctatttgatctaaaaaagagaaattnaaagcgggtttgtagttattctttttatacatttcaacataacctccatgattttcaggattcttacatataatggctttagacattgttacaaaaatttgtggttgacctctaccattgatcatgaaaactgatcttgttgaattgtttgccagtaacaccatgtgatgacctaatggaaaattttcttttctcaattcttgtgcttcatggttgctttatcaaaaccaatgggtggaaattgttttgcatactccttaacatcaaagcggagctttgctatctcctattgaaaggtacaatatgactcatttgtggccaaaaagtccttcaactttgttcctttgctctctcccttaatactcacagctttcttcactgctgcatt

SEQ ID NO: 14174 - DNA, 598 bp, Glycine max
  unsure at all n locations
  Clone ID: jC-gmle01810075a03a1
gttccacaccaaagggtcagaaattcaggattcctgagatttcaacatgccctccagcaccaaagaagccaagggttctctccaattgctctttgcgtaggtctccactctcattctttgcaccccctgacttggagcacttcttctttgtggcacttagagatgtctcggtttgattttgtgtgttaatagaagattaagaaagatacatgtgttatagtaataagatcataacactttagaagatggacttttgaagtggttttttagtatattattatgtacctctagcaaatcacagaggtatgtatgctttgagaactttagatgttggtgtgtgttcatcttaggaaaatagttactctttaatttctgctaattttaacaatttctagggtttgccagtcactaaatttagctggggtggctctccaactaaatttggattttaagcttacttttttttctcccttttcctcttatagaagacatgttctgacctttaagtgtgtgctgagtgcaaatgtaatgggtttggtttaaggtttgtgagtgttcaagctgcaactctacanagcttcagttgtcaattagagaa

SEQ ID NO: 14175 - DNA, 415 bp, Glycine max
  Clone ID: jC-gmle01810075a03d1
gagaacttatagtaaagactgactttatgtttgcaagttttcgaagatagtctaggccacctcttctgcaccgagcctttgcttgaatatttagtctcataaataatgaattgccgggtcaatttatgtgtggatccaaaaaaaaggggagtgactttaagttagatcttctttcagaattccgaagtatgggtaccatttaaatgcaacatagcactgacatttggggacttatcttacttaggctgagtaatgaatgatcttttgattaaatggataatacgtagctctatggcttgaataaatgacaggtcagtcttttgatctctcattatagatcttctatataagcttcttttcaatctcttcaagaatgggtggccgcctactaaagggctctaatgccccggaatta

SEQ ID NO: 14176 - DNA, 357 bp, Glycine max
  Clone ID: jC-gmle01810075a04a1
agttgataaaggggcattgtggattcattagatatacaatttgtgtttggattgagaatgaccactgaaaaggagatttctgatgatgaggacgaggaacagaagaaggttgatgagggtaaagttgaagatgtggtttatgataatgagaaggatgataagaaaaagaagaccagtgatggaggtgtcatcatgagtggtgattggtgaacaagcgccaatcctatactgatgacgaacgcctgggagatcacgctgaactagtgggctggtttctacatgagatttaccattgattgggaacagcatttggctgtgaagcacttgcttgtggagggtcatatggtgataaagggt

SEQ ID NO: 14177 - DNA, 409 bp, Glycine max
  unsure at all n locations
  Clone ID: jC-gmle01810075a04d1
agcccaaggtatgccctgatctganncangtaaggaagcgcccgcgctagaattagctcgaggactacgaaggaggagaagatttctaattcattaaggaggcatctcatgaggggtatggtgatacaaccaagcctattcggatgaggaaacctgatgagatcacaaaagaagactatgctgctttctacatgagtctcaccaatgattgggaagagcatatggctgttaagcacttttcatttgaggaacagctggagtttaaggctgtcctctttatccccaagagggcacctttcgacctttttgacactaagaacatgcctaacatcatctaactgtatgtcccgcgggtttaaatcatggacaactgcgaggagttgatgccagactatcttaactctggaaa

SEQ ID NO: 14178 - DNA, 563 bp, Glycine max
  Clone ID: jC-gmle01810075a05a1
tgaaaaaaagaaaagcgcctcttcgtccgaacctacatacttgcagcaccgccgtagctcgaattcggtcgggctgaaagtggcaattactcttttcttgggagcttctggtctgaggttactggggaggatggaactaccatgacttaattggtctggaagcctcactccattatgctgcatgtggtggaaatcaacaatgctgcaactgttgattgccaagggtgccaatctgactgctagaatgcaaatggatggacccccttgatggttgctcgttcgtggcgtagagactggcttgaggacatcttaaaaacaccttcagaagaccccttacaagttcttccttctccatatatatctcttccacttatgagcattgtgagaattgctagagaatgtggatggaggacaagtgatttagcaccatgcttagatccatgcgctgtttgtttggaaaggaaatgtatggccgctgtagaaggttgtgatcacgagttctgcacacaatgtgccatgtatctttgttctacaaactctaccttaacaaccacaacaggccc

SEQ ID NO: 14179 - DNA, 200 bp, Glycine max
  Clone ID: jC-gmle01810075a06a1
gtcagatgtgccctccacattctatgggcatcacgaagcaaatgactcgggtttcacattctacacgggatcatcaagctaccctcccacatatattgataccgttggatattggatgttcttgggctacgaaccatcactcatgagctttatatgcggaccattgaaagatgcctcaggcatgactattcatggggaac

SEQ ID NO: 14180 - DNA, 561 bp, Glycine max
  Clone ID: jC-gmle01810075a07a1
caaagacatcatcatccatggctgtttccgtctccactgtcggagctgtcaacagggctcttttgaacctgaatggttctggagctggagcttcagctcccagttcagccttctttgggaccagcttgaagaaggttattgcctcaagggtccccaacagcaaggtttccggtggaagcttcaagattgttgctgtagaagagaagaaagagattgaagagacccagcagaccgacaaggacagatggaagggtcttgcctatgatatctcagacgaccaacaagacatcacaagaggaaagggtttggttgactcccttttccaagctccacaggatgctggaactcactatgcagtcatgagctcctacgagtacctcagcactggacttcgccagtacttggacaacaaaatggatggattctacattgctccagcttttatggacaagcttgttgttcacatcttcaagaacttcatgaccctgcccaacatcaaggttcctctcattcttgtatctggggaggcaaggggacaggaaaatcttccaatgtgagctt

SEQ ID NO: 14181 - DNA, 344 bp, Glycine max
  Clone ID: jC-gmle01810075a08a1
gacagagcgagttgttgtaaagcttgccttgatgcaggcatggccacccacgcgggtctagcttctacaaggatccccactaacaccaagttcccatccaaggcttcacactctttcccaacccaatgcgcctaaaagagacttgaggtgacagaattctctgggctaagatccacttcatgtgtgacatatgctaacgatgctagagaatcttccttttttgatcttgtagcttcccaactcactcccaagaccaatggatcatcaactcctgtgaggggagagacagtggccaaattgaaagtggcaatcaatgggttcggacgcattggtaaaaacttcct

SEQ ID NO: 14182 - DNA, 360 bp, Glycine max
  Clone ID: jC-gmle01810075a09a1
cctctattaaaagatccataggattgaatgcgttgaagaagagtatcagatacgtattggcagaggcctcacagattttagattgagagaactaataagaaggagtttaatgggggcaaaagcattttggtattcccggcagacagcacaccggtgataacagaaaattggtgattaaaccaatagattccttgagtgatatttaatggccaactttccacataaaaaaataggctagggtatcctttatagttaggtctcgagggaagccctgagtccctgctctaagatgtgaagagcagatatggtatctgatgcagaatcagctgtgtttttcctatctaatgcaaggtgaatgtt

SEQ ID NO: 14183 - DNA, 337 bp, Glycine max
  Clone ID: jC-gmle01810075a10a1
gttatatattgagacagaatggggtacacaactcatagcaaaaggcttattacgctgtaaaggtgcatttaaccataaacaaaaatcgcctccaagactataaaaacattacattttaaacaaattagacgtccacttcatgatccgcaaacacctactgtaactgctggtgttgctgcctaacaagtatcatattccctgtacacattttaaaaggagtagcttttgacgaacaacttcttcttgggttgctcggattcacccttaccagagttcttgccaagctgagcaagtgacttggagttggcaccgaatgcaacatgcatcttgtgctggc

SEQ ID NO: 14184 - DNA, 493 bp, Glycine max
  Clone ID: jC-gmle01810075a11a1
ggtcaatactttcttttttaagacaaatgttttgagagcaaagttatcacagaaacctacgccagacagacctgcaacagcataaaaaacaaactacatttacatctcctagacatgaagctaaaaaaaattagaaattgccactaatcctataaatgcttatcatctccctctatctgtggctctcacggaaatttttaaatgcaacaaggagtagagggttgtacagagaacttgtcagtgtttgcactttagcactatagcctttgcttcacccgccttccatttacgtcgctgccatcaagtatcaattcattcctatgcttgcacaagaagtccgaatgctcagtaaatctagccacatactccaaaagctcagtgaaaacagatgggcaactttccttcaagtactcaaaaccatcagtttgcatcacagctctgagattttaaggccttgaacaaatttaagacagactggttttagttggaaaca

SEQ ID NO: 14185 - DNA, 534 bp, Glycine max
  unsure at all n locations
  Clone ID: jC-gmle01810075a12a1
acaaaacaaaatattttatatatctctttgactatgtacatgagcatgcatccaaaacagtgcaaaacccaattttatgatctctttgactatgtacatgagcatgcatccaaaacagtgcaaaacccaattttatgatctaatactctagtacaggcttcctacttgtttctctgaagggtacatctccactgagaacggagctaatgaacttctctgcctcctctattgtcatttcgcccataaatacactatacttccctctccgaggtttgtaggcaatcaacaaattatttgatgatttataatctgttttgtcaaatgcctttagaaatgatttttgcttcgcagcatctaagagaacatagaaaatggagtccctagagctgctggatccctgacttggtcgtcttgacaaagatttttgagagaccaaagagaggattgattctagcttttctctagctntagaagatctgaaggcaccaattatgcagactggagttttctcaccacatagagcctcaaagtttg

SEQ ID NO: 14186 - DNA, 609 bp, Glycine max
  unsure at all n locations
  Clone ID: jC-gmle01810075b01a1
aaaacaccttttttttttgccaaatttgttttactgcatgacccttccttccttatgccggtgtaaaaaaaaagtttgcttctttgtagtagtcacgattgaagttgattatattaattgtaatatttgtaagttgattttattgtaacgatttcaagaggcaaacgactattcctctattttcaaggatgaaatgaatgagaaaaatcaactgaaccctgcttctgcgttcctctgtgttttttggttggctcacataggaaaaggaatagatgccttttactgttttgaaacgcttttttctaaaaaaaacctttggtatgatatctctacattaatttaatagaaaaatattatagtatagcactaatcatgtaagtttaataatagattaagaaaaatgaaaaaccgtatgatgaaccanatcaaatggctgaaaattgattgatttggatttgatgatatattaaaaattgatcaaatttaatcattaatatttaatttatatttgatttagatgaatttgtctaaaacttaaccaaaccacattcagagcattcttagtgagagattgaggataatattttgtattgtgcacaacaatgttag

SEQ ID NO: 14187 - DNA, 537 bp, Glycine max
  Clone ID: jC-gmle01810075b01d1
cccacgagacctagtacaatatatagtaacacaataaatacaagagattctgcaaactgaaaaagggattcttactaaagcaaactcaaacaagaacaacttccactcatttggcatctaccgtagtaacacaagatcaaaagcagcttctctgatagaacacacgtacgtatgattcaacatctttcacaggagtggttcatttctaacagctagctattgcaacttaaaataattgcaatgcttctgcaaagtgctaactttttttcccccccttctttatggatatgacaatgtgatcagaatgaaacaataaccaatccattgaatttgaatctgattttgggtttggatcaataccaccattcttcatctcaggaaaggacaagaaataggccaaagcctgcaaaccaactactaattaagcgcttaaaactgcattagtggctggtttaagtgtgatgttaagaacatcagcttggttattaaagggtgttctttgtacgaagaagcatgccccaataacaatgtagcaca

SEQ ID NO: 14188 - DNA, 401 bp, Glycine max
  Clone ID: jC-gmle01810075b02a1
atttaaccagtgttgaatcatcaaatgccttaacttctgcacctccacatatgcatgacgaaatcactaggagttctggttccagtgcacttattgaatcaaatcgtactggacaaagtcgcatttccattttccaaagcctaattgatcgtgctcgaaggaccgtgcgaggatctgcagatgatataggatggcttcaacgtgatcctggaatgcctccggttgaagatggaacagagaggttcctggaaattctggacaacatcaagcatggtgttcacaagttaccaaattcggtggtttatttgttaattccaggtcttttcagtaatcatggtccactttactttgtcagtacaaaagtcagttttttcaaaaatgggtttggcctgtcttatcgc

SEQ ID NO: 14189 - DNA, 471 bp, Glycine max
  Clone ID: jC-gmle01810075b02d1
cctaaaaacccccaccaccaccactcaaaattctataaccaaaccaagcccatcatcatccaccaccaaaacgacgccgcagcagcgcgtggagctaaagagaaaaacaaactcatgggtccccgcactaatgctaaacgcattcgacgacatcatcaacaacttcatagaccctccactcaaaccctccatagaccctcgccacgtgttgtcacaaaacttcgcccccgtccacgagcttcctccgacggagtgtgaagtcattgaaggctctctcccaccgtccctcgacggcgcctacatccgaaacggccccaacccccagttcctcccgcgtgggccctaccacctcttcgacggcgacggcatgctccacgcgcttcgcatctgccatggcaaaaaacccacgctctgcagccgctacgttaaaacctacaaatacaccatggaaaacgacgccggtttccctct

SEQ ID NO: 14190 - DNA, 255 bp, Glycine max
  Clone ID: jC-gmle01810075b03a1
ggctgtactcgtaatggcttgccctttgaattttagaggatcacgcatgcatgggcggcagcgcctacgtcaccggcatctggtggagcgggttatgatacatgggcccttataatcagatgaagaggaacaactgcgcacaccttacacacaagactggaaatttaaatggaacgcatacatgatatagctcatccacgcctggatgaaccaatgtaacatcgggaagacattgccgaataccacaatacaaca

SEQ ID NO: 14191 - DNA, 528 bp, Glycine max
  Clone ID: jC-gmle01810075b03d1
cccaaattcattttaatcctaattttgcacttcttgatcattcgatttttctcctgaagatgcagatattcgtaaaaactttgaccggcaagaccatcacccttgaggtggaatcctccgacaccattgacaacgtaaaagctaagattcaagacaaggaagggatcccacctgaccagcagagacttatctttgcgggtaaacaacttgaggatggtcgcacccttgccgattacaacatccaaaaggaatcaaccctccatctcgtgcttcgcctcaggggtggcatgcaaatctttgtcaagactttgaccgggaagaccatcacccttgaggtggaatcctcggacaccattgataatgttaaggccaagatccaggacaaagagggcatccccccagatcagcagaggctgatttttgccggtaaacaacttgaggatggaagaacccttgctgattacaacattcagaaggaatccacccttcacttggtgcttcgtttgagaggtggtatgcagattttcg

SEQ ID NO: 14192 - DNA, 619 bp, Glycine max
  Clone ID: jC-gmle01810075b04a1
gttgaaagttaagaagtagcaaagatgtttccattcgggcacaagggtcaaaagataaaggggactatggtggttatgcagaagaatgtgttggatatcaacagcatcaccagtgttgacgggatcgtcggcaccggcttagacttcttaggcagtgcactcgatacagttacttttttagcctcctccatctccatccaacttattagtgctaccaaggctgatggtgggaaaggaaaagttggaaaggctacaaatttgagaggaaagataacattaccaaccataggagctaaggaagaagcatacgatgctcaatttgattgggacagtgacttcggaattcccggtgcattttatattaagaacttcatgcaaaacgagttctacctcaagtctttaattctcgaagacattccaaaccatggaaccattcacttcatatgtaactcctgggtttacaattcaaaacactacaagactgatcgcattttctttgccaacaatacatatcttccaagcgagacaccggctccacttgtcaagtacagagaagaagaaattgagaatgtaagaggggatggaaactgtgagcgcagggaatgggatagatctatga

SEQ ID NO: 14193 - DNA, 502 bp, Glycine max
  Clone ID: jC-gmle01810075b04d1
tattccttacgaccttctcggttctgccgactcggaagatgctgtgggacgggtctactgcgcctcaccatagcaggggaatggaccctctcgggaataaaggcgccacgcaattatggctctggccaccgaaggggccagttactttggaggccaccttgtggaccgtctgcttggaagaggccacatcttgatccaccataataatttcttcacgggacggaaatagcacatgcttcaccacagggggaaccctgactaaaagcacattccgcacgactatggttaacccatccttctggagggtgaccagatctaccactaggcttgccccgcttcccctgtccattacaagttcaaaaacgggtggaccatccagacaaaggtctggggcacgctcaacatagttgggatggcatacaggcatgtgcccgctttctgattagtggcccaatgaaggctacggtgaatcacttctacaccctaaggctgtgacctactg

SEQ ID NO: 14194 - DNA, 533 bp, Glycine max
  Clone ID: jC-gmle01810075b05a1
gaaatgcatagtcaactttgtgatggggctgatcctgaaattgaagatttaagaacaactctagatccaccaactgagcaagatgattctaatacaatctctctggcaattgatgatctttttgttgaagacaccatactgtacatgcttcaggatgttatatcaaagttagatgtcaacataagactctgcattagagatagcttgttccggttggctcaaagtgctatgcaaaggaattatgctagtgatacaagcagtacaaacaacagtagcagagaagaacttaaagttgctgcaagagaagaaagaagtagccaaaacagatatgctaggattgctgatgttgaaaccaagacaaatcccatcgatcgaactgtagctcatttgctctttcataggcctttggatttaactgggaattatcctgataagcttgagtcacctatttctgctaagatacaatatgaaagcaaagaagctaacctcgagaagtttcctatgggatgcttgccagatgaggacatgaaaag

SEQ ID NO: 14195 - DNA, 612 bp, Glycine max
  unsure at all n locations
  Clone ID: jC-gmle01810075b06a1
cttaattttctcacataatgaatatttgttacagatactaaactagaaaaggttttgagttggtctgatcgtcacaaaatcataggaggaattgctcgaggaattttatatttacatgaacattctagacttaaagttatacatcgtgatcttaaacctagcaatgtattgttggacgaaaatatgaatccaaaaatttcagattttggtcttgctagaattgttgaaatagatcaacaggaaggaagtacaaatagaattattggaacatagtaagttttcaatactcattcctatgattttcatcccttgtaagatatatttaagcttatttgtcactttttcggttttcccataattttgcagtggctatatgtctccagagtatgctatgtttggacaattttcagacaaatcagatgtttatagctttggagttatgattctcgagattattagtggaaaaaagaatataggctcctacgaaccacagtcgtgtgctgatggtcttctaaattntgtgagtgcaataatcttggaatttttattactatgctaatgtcaatanaatcaatataaagtggaaaatatatgattggccaaattacaaat

SEQ ID NO: 14196 - DNA, 477 bp, Glycine max
  unsure at all n locations
  Clone ID: jC-gmle01810075b07a1
accatctctgctgctatcacaaccttatcgatctcccgcgcaactcttgtgcaaaagcgggtctcatctcccgttcttggtttgccagcaatgggtaaggtgggaagagtgagttgctccatggaggaaaaaccttattctgtgaaggaaagcagctctagcatgttggggatgggggcatctctgatggcagctgccagcgctgcagccatgtcaggcccagccatggccttggtagatgagagactgagcactgaaggaaccggacttccctttggcctcagcaacaatcttcttggttggatccttttcggcgtctttggtcttatctggactccctattttgtctacacttccactcttgaagaggatgaagagtcaggactgtccctttaaatatcctgngttgtagggtgggtgatgatgaatgatggattgtataaattgcaatgagtccccctcatcttctgtgttgtt

SEQ ID NO: 14197 - DNA, 180 bp, Glycine max
  Clone ID: jC-gmle01810075b08a1
gctctggctcctctaagagcactgttggctttttcacgaacaccgctgtgatcagagagggggaggcgtttgctctcgagcacgaccaatgttctcagagagaacgaccccctaccgctccaaatccacgcgctggaacgtcgcctattgccgcgcgatctgtgctctacggattgcatc

SEQ ID NO: 14198 - DNA, 307 bp, Glycine max
  unsure at all n locations
  Clone ID: jC-gmle01810075b09a1
agggactggtctgacttcgtangccgagctatgacgtcgcaggcacaagcccggagtctagtcggagcccgccctcacttatttcctactcttttctctttttgttatgcgtgctcttgttgggctctggggggaattaattggcttttttcctatgaggggcatttggctaaacctttattttgggctatccattgtgcaagacaccaatttttcccttcttgcggttctaatctggaccctctacttttagttaagtgagtttgattatagtgatcctttgcccaacaggtcctttgtttgattc

SEQ ID NO: 14199 - DNA, 469 bp, Glycine max
  Clone ID: jC-gmle01810075b10a1
gaactgatataggaaacacttttattaagacttcaaatcacagcattcaagataatacaatacgcaacactttttagaaagccttataactataaactataaaagcttggcccagatgaaattacactgcaggcaaatttttcattcacctttagcttagttatcttcattgccgcccaaattattctttgtcacatctttgtattagccctggatggcaacaccaaggggagcagcatccataggtattatcttctcaatttctacacccttgctggtctggttttcataggctgaaatgtgcactccaagtgctgctctaccagagggatcaaggttgttagaccaagcagcatcccactcaacagctgtggctgtgctacatgcaacacttgctccttcaggaacagtgagcctagctgagttctgagggaagaacctctcaaagatcattctgtaagaatatgct

SEQ ID NO: 14200 - DNA, 449 bp, Glycine max
  Clone ID: jC-gmle01810075b11a1
attaaagaaacatgcggattataataagtcagtaaccatctttcgagaagctagaactggcatgtaaatctttacaactaggggttatataaccagcaaagaggtctgtcatgtcatgtgggacataaaaaatcaccacaataagtatgagaaaaatataccacccactacacttgttctcatcatcagcataaacaacctaggaccttcacacctgggtcaatgatgttgatgttgatgttgttgtaccagactctatctggtgaacctttaagtttgaagtgggcacagcacacagactataaatctcgggagatcgaaactcatcacagtctgtggagccattcttggggaaaaatgcgatcatagtattcatcatcctactcacagctgactcgaattctttctgggcgtgagccggataactattgccacaacttggagctaga

SEQ ID NO: 14201 - DNA, 519 bp, Glycine max
  Clone ID: jC-gmle01810075b12a1
tttattttttttttttttttttttcttattaatttttttaacttttttttttttgggctttattaatttctaattctttaacccaaattttcccaaccccaccaatctcataccaacaaaaccattcccttcaggtcaaccttccaaagggcctaatagcctcacccgaaaacaccaaactttccactgcgacagcaatcgcaagagcaatattcacaaccctcggaacctgcgacgccgctttcgccgttcaacaaatagccgacatagcagaaggcgacaaccgcggtctggcactgtagctgcccataattcctgcaatagggtgggctctgttaaccattctgcagccggcgctgaaccaactgaaccgcatgcgcatcaccaaaggcgtgatcattgggtaggggcttggcggattggctggcttgggggctagcccgcatgcatcggcggcggcggcttctgaagttgcggcgaaggctgaagctgcctcgaacgacaacaggggacagcttc

SEQ ID NO: 14202 - DNA, 587 bp, Glycine max
  unsure at all n locations
  Clone ID: jC-gmle01810075c01a1
gatcgtcccattccaattatttccccctcttcaaaattccaatagcataatcccccgtctctgtctctctccatatccaacaattttcaaaatattcttattctctctctctctcttcacatcagaattcacacccaatccacaccctgcctcactcccctccccacccaccaattttttcaatcaaagttccaatctttttccctccccatcaccaaaaatcttgttcctctccacctcctccatctgggtacatttcattatttaccttcttgttcctctcttcacgtgacatttctcactcttccctccacacccaccagttttttctttcaaaggtccaatctttctcaccccccatcaccaaaaaaactcgtttttctccctctcccccatctgggtgcatttcatcatccacctcttcattcctctctctccggcttcatattctggggatccgtgagagagggaaatgtgggatggtttcgtggctggcaaggatagtgtcggcgtgcttgagaccggtgcggcgatatgcgcgtatgagncaggatggtgatgtcgatgacgtgtccaccatcggcgac

SEQ ID NO: 14203 - DNA, 525 bp, Glycine max
  Clone ID: jC-gmle01810075c01d1
ttacaaggctctactctactgcttcaccttctgctctagaaaattcagtggtgatagcatgggttcggctactctctctgtagccaaaccagcccttcaggcaaatgggaaaggcttctctgaattctctggcctccgcagctcatcaggcttccttcccttttctagaaaatcttcagaggatttccattctgtcattgccttccagacctatgcagttggaagcagtggaggatacaagaagggtgtgacagaagcaaaactgaaggttgccataaacggatttggaaggattggaaggaacttcttgaggtgctggcacggtcgcaaagactcccctcttgatgtcattgccatcaacgacaccggtggcgtgaaacaagcctctcaccttctcaagtacgattcgatcctcggaaccttcgatgctgatgtcaagcctgttggcagcgacatcatctctgtcgatggaaaagaaatcaaagttgtctctgaccgcaaccctgccaacctttcttgggagga

SEQ ID NO: 14204 - DNA, 347 bp, Glycine max
  Clone ID: jC-gmle01810075c02d1
ccttaatgcatcttttcgatgccctgtcttgtccagatcttcatccaggatctcttttcttcgtcaatttcctttgttaacatagaaatttatcttaggttagtctttttcttccccaacctttcattagttttgtggtttatggcatcgaagccaaggaggcaaggatgatgccatacaagttttggcataggaaaaagtgtaacgtagtggaataaccgaggatggctttgacttgtaggataagatagtgttttttttttcttttttttcatatgggaatgatccaatgtaatttgtgttaaccttctcctataagaatagcatagcagtttgcttgttctttt

SEQ ID NO: 14205 - DNA, 409 bp, Glycine max
  unsure at all n locations
  Clone ID: jC-gmle01810075c03a1
aaacctgcgagtcgatactgtttcgagacnacatnaagttaccgcacgacctcgaattcgactcgagattgctacatagggctatatagcattaacatttgagtcttcattgcacaatgtcgggctcgggcataaacggatggagcctctcttccatctcctcagccaaaacctctctcaggaaggccacattacgcccttccgtcttcgcaacccttaacactccatcttctacttcctcttcatcttccttcccctctctcattcaagacaggcccgtttttgctgaccctgcccccattatcaccccaactgtgagagaggataaggcacaggaatactagaaagatcttgaacaacctcataaattgttgtgggagaagagcgaactcaaagcgacagctgttga

SEQ ID NO: 14206 - DNA, 522 bp, Glycine max
  Clone ID: jC-gmle01810075c03d1
caagaggaaagggtttggttgacttcctttttcaagctccacaggatgctggaactcactatgctgtcatgagctcctacgagtaccttagcactggacttcgccagtacttggacaacaacatggatggattttacattgctccagcttttatggacaaacttgttgttcacattaccaagaacttcatgaccctgcccaacatcaaggttcctctcattcttggtatctggggaggcaagggacaaggaaaatctttccaatgtgagcttgtctttgccaagatgggaatcaaccccatcatgatgagtgctggagagttggaaagtggaaatgcaggagagccatcaaaactgatcatgcagagataccgtgaagccgcacacttgatcaagaagggaaagatgtgtgctctcttcatcaacgatcttgatgcaggagctggtcgttttggtggaaccacccaatacactgtcaacaaccagatggtgaatgccaccctcatgaacattgctgataacc

SEQ ID NO: 14207 - DNA, 541 bp, Glycine max
  unsure at all n locations
  Clone ID: jC-gmle01810075c04a1
ggattggaaggaactacactactcaaatataagatcccaacccgtggccttcttggattgcggaattcaattttaactgcctcccgagggactgctattctcaacactgtttttgatagctatgggccttgggctggtgaaattagtactcgggatcaaggctcattggttgcttttgaggatggaacaagtacttcttatgcaatctctagttcacaggagaggggacagatgtttattggtcctggagtggatgtttataaaggtcaaattgttggcatccatcagcgacctggggacttgtccttgaatgtttgcaagaagaaagctgcaaccaacatacgttccaacaaggaacaaacagtgattcttgatacgccattggactatagtctggatgactgcattgaatacatccaagaagatgaactagtagaggtcacccncgcaagtatccgaatgtccaagaatccaaaaattacaaacangaaaacaaggtagactttcaccgtgaagctgtaacttgcaaatgcttnttgag

SEQ ID NO: 14208 - DNA, 529 bp, Glycine max
  unsure at all n locations
  Clone ID: jC-gmle01810075c04d1
gcatttgcagagagagagagagatttagagttaagacggntgtggggattcgatgggggccaccgttcactcgccgctagtcacttatgcttccgtcatatctctgcttacactctgtcctccgtttgtcatacttctatggtacaccatgactcttgctgacggatctgtttccgagacattccattatttaaggcagaatgggttgcagggttttgctacatatatggcccacccccactcccaccgcctgcaaaatcattgcagtctatgctgcatttgaggcagcacttcagcttcttcttcccgggaaaaccgtttacggccctatttctccaaccggccaccgacctgtctacaaggcaaatggtctgcaagcctattttgtcaccttgattacttattttgctctctggtggtatgggatattcaaccctacgattgtttatcatcatttgggagaaatttattcagctctcatcttcggcagctttctcttctgtgttttcttgtacatcaagggtcattt

SEQ ID NO: 14209 - DNA, 468 bp, Glycine max
  Clone ID: jC-gmle01810075c05a1
agcgaaagacgcaccgagaggactgtacgggcgagaagtcggtcaaggccaggtttccgatcaaggaggagctcgtcaatgactacctcagcggcaagatcacaatggacgcgacgttcaatgagctccgaaagaagggcaagaagagcgacaaagagatagatagcatgatcaggcttgcaaaggaggtccaggcgagcattctcaaccagaagctggagccggttgtgcgcactttctacaatcggacggctttccagcttccaggcgatgctcgtgtccgaatttcattcgacaccaacctgacgctggttagggaggacaattgggataacggcaagcggtccggcagcaactggcggcggatggacattgggattgactggccgttcgagcagttgccgaaggaggatctcgagcttttcccgtacggtgtgctcgaggttaagctgcagacgcagatggggc

SEQ ID NO: 14210 - DNA, 460 bp, Glycine max
  Clone ID: jC-gmle01810075c06a1
gtcatcctccaattagattagttaatgtttgcacacatcccttttcactccctcttcctgtcttaggttcaactctcttcttgtttcctccaccccctcttcttcttcacgctccaacagcgtttctttccccgccctctccaggaacataaggaaatcggtagaagatagaaagattaataaaaattctgctgtgaaagcagtgtatggtgatgaattttggacacctgcgaggagttcacctcaggatatttggtccataaggagtgatttgcaagtcccatcttccccttatttccctacctatgcacaaggacaagggccaccccccatggttgcggagcgttttcagagtgttataagtcagcttttccaatacaggaaaatccgctgtggtggagcagttgatgacgatatggcaaacatcatagttgctcagctcctgtacctcgccgctgtt

SEQ ID NO: 14211 - DNA, 537 bp, Glycine max
  Clone ID: jC-gmle01810075c07a1
cttcagtccaaagctgaatagcagttatgccccagatgctggagcagagaagttagcggactcaaagtcagctccagccagcccagctccaagtgatcaaattgctaaaccagctccttctaacagtggcatcagtgttcagtcagcaggtaaactttattcctacaaagaagtagccttagccccacctgggacaattgtgaaggtagtggctgaacagtcgccgaaaggaaatcctattcaactaaattctgaggtgagtgccatgatagttgcaacaaaggagactcaaaatatcatggcaacaacaaatgatgtggaagattattttcagaaatcaattgatgtgaaacagcaaagccctgtccatcaagaacaagaagaaaaggaaaccactgtggtgaaagataatacagaaacagtaaatagtaaggccaaagatgaggtttttgaagttaaactccaggaagctaacaatgttgccatactagagaagataactgaagttgcaaacatcacagtcgtggaggttgagga

SEQ ID NO: 14212 - DNA, 382 bp, Glycine max
  Clone ID: jC-gmle01810075c08a1
cgcactaactatgctttttttttctttaacaccaccatttattgctgcaagaagcggtcgatttagaactatcaccaactgccattctgaactgcgaaatgattgccagctatcgtattaaggaacgaacaatctaactggtttgaaccgtgtggagactagatgtaccaactcttgctgcacgatgatattgtaagataagcttgcctttattcatatgctacttcttcaataacgtgatatccatgccatgatcgctcgcgctaacggtacatttgtggtatcacatgacatcgtctcaccttgacatagtgcaagatttgccttagagcccctgtagatcagacacctgtaaattgttcgattcttaacttgtatttat

SEQ ID NO: 14213 - DNA, 303 bp, Glycine max
  Clone ID: jC-gmle01810075c09a1
gcgctggctccgcgaagagcagcgttggcttttcgacgaacaccgctggctccgagaggaggggcgctgggctcgcgagcgcgaccaactcctccgcgagatcgccgacctcaagctccaaatccaggcgctggagcgtcgcctcttgacgcgcgatttgtcctctccggcttccatctccgacgccgtcgccaatgtcacgttgctcttgcaggtgctcaaggacaagaatctggttctcgagagcggttcgagcctgcggaacacggaggaggtgaagcaattggaagaggtcctcgaaca

SEQ ID NO: 14214 - DNA, 381 bp, Glycine max
  Clone ID: jC-gmle01810075c10a1
accggactcggtggcatcaacagagaactgagtgagaatctcttctccatttctacgggaaaatagatctccccggaaaagatttgtaagtcaatcgcctttctttttattcaccaatcggaccaatcccctaacaggactctgtatatttagagggactagggtatttacttcaacgatactattgacccgtaccatgatggaagaagagtctggtaaaacatgcccttccatgggagtgaaaaaaaaccgttctactttaatatgacgttttgtcttaaaacctataactcctggatgctcaaaaaaggcctcttttgcaaaaaaggaatttatgcctacagccctatatttagtgattcccgagctttgcgaacggca

SEQ ID NO: 14215 - DNA, 436 bp, Glycine max
  Clone ID: jC-gmle01810075c11a1
ggagactgagaaaacagaactatacaaaatggaagatacactttctgcgttgaggtctttgatgctttctcagtctccaccgcttgatgccttagttgttccttctgaagattatcaccagagcgaatatgtgtccgcacgagacaagcgccgcgaattcgtttccggcttcactggaagtgccggcttggcacttataacaaagaatgaagcactgctgtggacggatggacgatattttttgcaggctgagcaagaacttagtgctcaggggaagctatccgattggtgaagaacccgcctgtgatatctggagggccgataatttggcaaaagaggcattcattgtggttgacccttggtgcatttcaattgatactgctcaaagatgggagcgtgcttttgccgaaaaacagcaaaagctggttccaacctc

SEQ ID NO: 14216 - DNA, 229 bp, Glycine max
  Clone ID: jC-gmle01810075c12a1
tttattttttttttttttttttttttttgattcactttttgtgttgggggcgaatgagttctagtatagtaaaccgttcgctaaatttatggacccttccgaataaaatcaacaaattgtttatttgattattaaagaaaaatttgggagggccgttctaggtatatacgaaagtgttggtttgtgactaataacaaaaattgttactctggaatttccggtttagcta

SEQ ID NO: 14217 - DNA, 600 bp, Glycine max
  Clone ID: jC-gmle01810075d01a1
gaaaattgtaagtacgcggacgaactgcgcaaggtaacgaacgtagctgagcaatgacaatgccactgccaacggtcgtttccccattttcttcttcctcaggcaccttcttatccacagttaccgcgcgctcttcactccctccaaaacgcaacgtctccccttccccttcccccttctccactctctctcgcagagacattgctctgctttccttcttctccctctccctctcagcaccatcctccgccatcgacattggcatctcaggaccgaaggattggctgaaagagcaaaaaaagaaggcctccaagtacctattggcccccgtcgatgcctcccgccaaatccttcgctctgcctatctcacgctcacggaaactgacgctgcttatacggatgaggatttggagaagatgcagcagctctttatatctgctgccagggattgcgtcccacaggaccggaattctttcgtcactctccaagccaacaccggagtagaggtgtgcacctttcgattgattgtgaagaatgcagcttcgttgcttggaaataaagatccctgtaaagtgaaagccgaagctttgctagataatc

SEQ ID NO: 14218 - DNA, 546 bp, Glycine max
  Clone ID: jC-gmle01810075d01d1
aaaaattccaacacaagttctatactaaagtgcagagagcatgagctagcatctatatatgctatgatagacttaaggaaagtgtgtctggtcattgtgttgtacatgcatacagatagtatgaggagcgcactggtatggatttttaccttgaacgtttgccttcacattttatttattcctggtggtgactcaaagccgcatccgcgtttcagagagaaaatcactgaggattacaatcgcggatttataagcattgactgtggagcaagtaacgattacttggacgaggaaacaagtacattttataagacagacacagatttcatagaaacgggagaaaacttgttggcgtcttcccaatttattgacataaatatccctggttttggaagacaactacgcacattgagaagcttccctgagggaaataggaactgttatactctgaagcccgagtataagcaaggtgaacagcaaagttatctgattcgggctatgttcggatatggaaactacgatggaaaaaatcatccccctacgttc

SEQ ID NO: 14219 - DNA, 388 bp, Glycine max
  Clone ID: jC-gmle01810075d02a1
gctcgttaagaccgcgaaaacagtgtctttttcagggaggggtattttggccatggatgagggcaatgctacctgtgggaagcgtttggcttcaattgggctagagaacactgaagctaaccgccaggcataccgtaccctcctcgtgacagttccaggccttggtcagtacatctctggtgccattctctttgaggaaacactctaccaatccacaactgatggcaggaagattgttgacgtgctgcttgagcaaaacattgttcctggtattaaagtcgacaagggtttggtgccccttgcaggttccaacgacgagtcatggtgccaaggtttggatggtctagcctctcgctcagctgcatactacgagcaaggtgcccgtttc

SEQ ID NO: 14220 - DNA, 542 bp, Glycine max
  Clone ID: jC-gmle01810075d02d1
cgcagttcccaaattcattttaattctaattttgcacttcttgatcattcgattggtctcctgaagatgcagatattcgtaaaaactttgaccggcaagaccatcacccttgaggtggaatcctccgacaccattgacaacgtaaaagctaagattcaagacaaggaagggatcccacctgaccagcagagacttatctttgcgggtaaacaacttgaggatggtcgcacccttgccgattacaacatccaaaaggaatcaaccctccatctcgtgcttcgcctcaggggtggcatgcaaatctttgtcaagactttgaccgggaagaccatcacccttgaggtggaatcctcggacaccattgataatgctaaggccaagatccaggacaaagagggcatccccccagatcagcagaggctgatttttgccggtaaacaacttgaggatggaagaacccttgctgattacaacattcagaaggaatccacccttcacttggtgcttcgtttgagaggcggcatgcagattttcgttaaaac

SEQ ID NO: 14221 - DNA, 381 bp, Glycine max
  Clone ID: jC-gmle01810075d03a1
tccaaaccctaggaaatttccccttcagacgaaaccctagatttcctctcacaaatctctctgagcttccccattctcgggattcggcgtccagatcacagatcccgttcaattttttttccgcatcccccgatcgggtttggattctgaagaaagttcaattccgcacaaattcgagacaattgctgctgtcgaggctcgcgttgcgcatgggtaagattctgagagaaaccgcgaggccgttctcgaattgttcgtcgtcgtcggcgtctccgttgtcggcgccgccggcaacgacgtcgtcgacgtcgttgacggacacggtgagggggtcgcaccggttcaagatcacggggtattcgctgtcgaaggggattggga

SEQ ID NO: 14222 - DNA, 495 bp, Glycine max
  Clone ID: jC-gmle01810075d03d1
cccaaattgagtttgagtttcagccatggtatctgtttctctgctcttattcctatctttctttgccttctttgcaccctctgaatctcacgacaaagtctcgttggaattgtactacgaaagcttatgcccctacagcgccaacttcatcgtgaatcacctcccaaaaatcttcaccccagatcttgccccaatcgttcacctcaaactcgttccttggggcaatgccaaactccgtgccaacgccacctttgactgccagcatgggccatatgagtgcttgctgaacacagttgaagcctgtgcaattcacatctggcctcaactcagcaaacattttcctttcatctactgtgttgaggatctggtgtttcagagtaagcgtgaggaatgggaatcttgttttgagaaactggatcttgattcggaacctattaatcagtgttataatagtgaacatggaaaacagttggagctacaatatgcagctgaaac

SEQ ID NO: 14223 - DNA, 575 bp, Glycine max
  Clone ID: jC-gmle01810075d04a1
ctaacaacgtccctatttccggtttcaaattccctccggcgacacattcggattccaatatgaggacccgtttatcctcgactcgggtcatcttcgtggcctcgctctgtttcctcgcaagcttcgaattattgcaagccaaaaccatcgacccctacaaggttcttggggttgataaaaatgcaagtcagcgggaaattcagaaggcttttcacaagctatctcttcagtatcaccctgacaagaacaaagccaagggtgcacaagagaagttttctcagatcaataatgcatatgaacttttatccgatgaagagaagagaaagaattatgacttgtatggagatgagaaaggaaaccctggatttcatggtggccatcctggaggtcaggatggatatacttattttacagggggtggtcctggacaaagccattttaacttcaaaccagggggggactggcagggtatgggtggtcagggaggatctaagtcattctccttttcttttggcagctcgggcaattccaatccctttggatttggcttggatgatctttttgcagttttttcg

SEQ ID NO: 14224 - DNA, 511 bp, Glycine max
  Clone ID: jC-gmle01810075d04d1
cgcgcatccgaatcccaccatgggtagccgttacaacaacaacaacaacgccaccggcgagacggctttcgtcgacgacaacgccatcgccgccgccgaatccagagtgcaacccaccgacgcgccgaaaaaacgttggggaggctgctggagccaatattggagtctcggatctcggcagagcagttgaagctgtaagcgaatcggccatgccgaccttggtccaaaagctgttgtttgaacaggttcaggtgatgctgctactgcagacgctccacatccttcaaccggcattgtaatgccgcacattgcccctccatgatctactgcatgttttgtccaatgcgatccacacatgaggtattcaatcaccacctggattacatccactctatgctcttgcggacaacgcttactcttctggcggggctgccaccatgttcaccattgggacatatgcctaagagaccgagttagcttctccactctgtttataagacttgacagctga

SEQ ID NO: 14225 - DNA, 517 bp, Glycine max
  Clone ID: jC-gmle01810075d05a1
gagaaaggtgaagaaatcggtggagggaatgaaaggggtgacagaggtggaggtggatagaaaggccagcaaggtaactgtttccggctatgtggaaccctcaaaggtggtttctcgcatcgctcaccggactggtaagagagcggagctatggccatacttgccgtacgacgtcgttgcgcacccttacgcgccaggtgtctacgacaggaaagcgccatctggctacgtgcgaaacgctgatgtagaccctcggctcaccaacctcgcacgtgccagctccactgaggtcaagtacaccaccgctttcagcgacgacaaccccgccgcatgtgtcgttatgtgattattcattttctctcttgtatcatagtagcaaagaaaaacatcaaatgttcacgtggggaacgcttttggcacaatggacatgtatcctttaaagtgatgttcggaaatttgatatcttaagatggtaattaattaatgattctgatttataaatctataacaaattaat

SEQ ID NO: 14226 - DNA, 526 bp, Glycine max
  unsure at all n locations
  Clone ID: jC-gmle01810075d06a1
atacactggattcctacttantgctagctcaatatgaaatanagggccaagacccagcggccgccaatgtgactgatatattcataattcctcttatttgtatgttacacgacgtacaaaattgagtgagaggggtggattcataaactattaccatatcgcccaatattctacactcttcttaacaatattaatagtatcatgaactaacccttattgcacgtctctataataatgaacgtattcgcatgcttctcgataaacagaaagctatactatcgtcagatatggcacacattattgtataggttgcatctggtgtcatcccatcaccttttgattatgctgatgtagttactaccacaaactacatgttacttcgagtaccactttgagctattatattctacagaaacggggctaaagaaattaacatacaaggaaaataagtattgtatgactaccaaaacaaaactaaccaaactgtttatccttgactgcaaggtggcccttcacaaccacacta

SEQ ID NO: 14227 - DNA, 545 bp, Glycine max
  Clone ID: jC-gmle01810075d07a1
tattagctacatggcagaacgggttgtaggaactggatcatttggaatcgttttccaggcaaaatgcttggaaactggggaggcagtggcaattaaaaaggttttacaagacagaagatacaagaatcgtgaactgcagttaatgcgtgtgatggatcatccaaatgtgatctctttgaagcattgtttcttttcaactacaagtacagatgaactttttctcaatttggtgatggagtatgttccagagtccatgtatagagtcttaaagcactatagcaatgctaatcaaagaatgccaatcatctacgtaaaactttatatgtaccagattttcagggggttggcttacatccacactggtcccaaagtttgccacagagatttgaagcctcaaaatatactggtggatcctcttacacaccaagtgaagctatgtgattttggaagtgcaaaagttctagtcgaaggtgaagctaatatatcatacatatgttcacgattctatcgagcaccagaacttatatttggggccacagagtata

SEQ ID NO: 14228 - DNA, 66 bp, Glycine max
  Clone ID: jC-gmle01810075d08a1
ccaaatgaaaagggtaatttaatttataggcctagtgttattaactaagaaaaaaagaaaaatata

SEQ ID NO: 14229 - DNA, 373 bp, Glycine max
  Clone ID: jC-gmle01810075d09a1
aacaccatactatgcctatgatttcggtgaatatgaaagaaaagttaccgctacatgtaccaagccttgtgggcgaggactgactttctatgaaactgctggaaaggaaaaacaaaaaagaaaaacactaattcccccttcaccaataactctcataaataatattacatccatcttcctccggcttttattgggctggttcttctcttgctaaaggattccaatcgattgggatactgttcaggatcaacttaagagataatctaagcatcaattgggagcggggcagagttataaacagatcagatgagaggcaaaagcataaatttgagctacttctatggaggctgctgatggttggagctaaacgcat

SEQ ID NO: 14230 - DNA, 544 bp, Glycine max
  Clone ID: jC-gmle01810075d10a1
gtatgctaatgctcaacgagaagtccaaagtatattactgatgatgcataattcaatataaaggcagtggagcaactgtgtaattgtacactgggcactgtgttatataaattaggacctaaaaaaggctatattttgtttgtatactagagctacttaagccagaggtaattagaaaaaccattcacaaggtttgctcattcttcacttgtccaaacagcaattatgcaggatggtaattgcacctctctaaagtaaaatgcctttctcctttctcgtggcacttggaagatcaatcaaaacttaaaaggcttagcctaagtttggttttctgttattgtctgaatggctgagagagacacatgcatggaactttcttataggccactggaacggttggcatactcttgaactaatgccccaaagagagatggcctttggagcaagttggctggtgaatcaaattctatggcccgccctgcatctacaactagaactctatcacagtccattactgttggtattctatgagcaatgcttatga

SEQ ID NO: 14231 - DNA, 488 bp, Glycine max
  Clone ID: jC-gmle01810075d11a1
ccttcatataaccatgtgtactatttagataggctacattagtacgtattaatttctcaattcatgttacagttttcgcaacaagggtgggatcaaaaggggaaaaaaataaaacaacatatttacagaaaatgagagccacttggatgcctctaaaagtagacatcccaaaagcccctaacaggattttgttggacctgtgatgatattgacaacgcacaaaattgaggtcttccttttcccatgaaaggtcctgtatgccaagtaaaaaagaaagcatagaggcagccttcatgaatgaaaaaaactgaagaaggctcggtgggaatctacgtcctgtacaagagaaacaaacttgggtaggttctgcatacatttaggttgaaatgtaatgcaatcatcaacaactattttggcctgcactgataatatcgactgaggtgtcaagactatgtaagtgtcaatctccccacaaagcatgagaaaga

SEQ ID NO: 14232 - DNA, 212 bp, Glycine max
  Clone ID: jC-gmle01810075d12a1
agaggacacagaccgagtaggtgttgatctttctttgatgcttgctccctcctcatccatggctaaattaattctagattatcctcttacgccatatttcctaaataaaattccccgattaaccatcgcgctacccacaaaatctaatcttcttgccatttttttctgagcatttagctgccgcttgctttagattgtttttcgacatcctc

SEQ ID NO: 14233 - DNA, 600 bp, Glycine max
  unsure at all n locations
  Clone ID: jC-gmle01810075e01a1
attaaatgcacatataatggtgttcaattattcgaaagagaatttccaaaaaaatggctaacagatggtattcagataaagatcttatttccttttcgtctcaaaccttggcacaaatctaagctacgatccaatgaaaagaaaaaggatctaatgaaaaaaaagaacttttgttttctaacagtttgggggatggaagtcgacttgcccttttctggttctccccaaaaaaatagattttcatcattttttgaccccatttttaaagaactaaaaaaaaaaacgaaacaatttcaatttttcacttttcgagttctaaaagttttaagtgaaaaattgaaattgtttctaactatcttaatagaaaaagcaaaaaggattagcaaaagtattatcgaaagtattcttaaaagtattctcaaaagtattctaagcctaacgaaaataaaacaatttttcaaattgctatntattaaatttaaattcaaaaagatagatgaattgagcgaaaatacaaaagaatcaacaatttataagaataatccaatgatttctgaacaaccatttcattcaatcgataaatcagtaaattgttctttg

SEQ ID NO: 14234 - DNA, 383 bp, Glycine max
  unsure at all n locations
  Clone ID: jC-gmle01810075e01d1
agggatcgtatctgatctcgganactaagttgaangttcgcgcgcgtcagctagctatctggctcgagatccacaccacagagtaaaactacttcctcttgaggagaatggtcctctgaatccggagccggggctctacccagcgactttgccagaaggggatatctggagtaactgaaagtgtcccaatctcatttaggagaacagtactatttgcgtgccactttctggattgattaaccatcttatggagcagaagggctgtaatttacttccttcatgtctctcgaataacattttttaattgggtctcaattttcctttaaaaatggtagacttacttgcttcttaaggtagcatccaagttgatgatgcaagctttc

SEQ ID NO: 14235 - DNA, 499 bp, Glycine max
  Clone ID: jC-gmle01810075e02a1
tgaggctattccatctgccccttatgatcctcttgttttaagacacgcctttgagcaggcagtcataaaaaggttgatgactgatgtgccttttggtgttctactctctggaggtttggactcttctttggttgcatccatcacttctcgttacttggccaacacaaaggctgctgagcagtggggatcaaagttacattcattctgtgtaggccttgagggctcaccagatttgaaggctgcaaaagaggttgctgactatctaggcactgtccaccatgagtttaccttcactgttcaggatggaatagatgccattgaagatgttatctaccatattgaaacatatgatgtgactacaattagagcaagcacacctatgtttctcatgtctcggaagattaaatcacttggtgtcaaatgggttatctcaggagaaggatctgatgagatctttggagggtatttgtacttccacaaggcacccaacaaggaggag

SEQ ID NO: 14236 - DNA, 597 bp, Glycine max
  Clone ID: jC-gmle01810075e02d1
cttttcttcttcaattcatatcatatcaattagatttgttttcagagtttgctagtgagataccatggacaactacaacagcaatgacttttggaaattcagtgaccagttgaggcttgaatctggtttggccaatctgtctctgaatgattattccatttggagcaacagctacagctccaagaggcctgatcagaggaggaactttgatgtcaagggcagtgatttcaacaactcatcaaagccttttgatgatgatttcaatgatggctggaagatcaccaattccaatggaccccttttctctatgcctcacaacaacaacactcacactcttgaagttggaggcttcaacaagggaggaatctattccaacaccaacaccacttccttcttatatcctaaccttaacaacaacactcttggaggcttcaacaagggaatctatttcaacaccacatcctcaccctatcttaaccttaacaacaacatacacaaccacctcaacaacaaccttaacagcaataatctcaagggctacaagacattttttaagggtgaagatcagtttcacacacccaaaagtgccagaaaaca

SEQ ID NO: 14237 - DNA, 412 bp, Glycine max
  unsure at all n locations
  Clone ID: jC-gmle01810075e03a1
agttagtgaatcaaggatggagcttttaaggtctgttataattggacctcaaggcgccccatgccatgatggtcttttctttttcgattgcctctttccttctacctaccctgcaggtccaccgaaagttcactaccattcaggtggcctaaggctaaatccaaatttatataattgtggaaaagtctgccttagtctcttgggcacttggcatggtagtaatagtgaaaattggataccagaaaaatcaaccatgctacaagtgttggtttcgatacaagctctaattctaaatgagaagcctttttttaatgagcctgngtatacgacaacatatcctggtgctgaggggcaaagaagatctaaggagtacaacgagagtacatttattttattcttaaagacaatgatg

SEQ ID NO: 14238 - DNA, 452 bp, Glycine max
  Clone ID: jC-gmle01810075e03d1
gaaaaacagataagtattgatgagttactgtttcaagttgttgttcccagcagcataaattgagaaaataagacactctctcatgagttctgtctggttgcatagcattggttggtagttgtctcaaaaatctcttcttgccctttggccataatcaaaagccaagacactgttcatacagctgctcaattatcaagccaaccttgctcggttccactgcagaatttcagtttattcttatctaggtagactccttataagtgcgcagaagttcaagtgtagagaatgagtcagcctaagattaaacgccgagttggtaaatacgaggtggggaggaccattggtgaaggtacatttgcaaaggtgaaatttgcaaggaactctgagacaggagagcccgtggctcttaaaattcttgacaaggagaaggtgctaaagcacaagatggctga

SEQ ID NO: 14239 - DNA, 584 bp, Glycine max
  Clone ID: jC-gmle01810075e04a1
ctgcaacacaacacacataacacgtaacaaagagaatgagagcgctaaattcgcacgtgctcctcgtagatcttcactcccaccatcacgtgcccacctcaaccctctcctacctcagaaactcccgcttcatatcatccctccgtcgacgctccccaagaaccggaatccgatgtacggcgtcgccggagattcgccgcccctccgatcgcttctacggctcctcgccgtcgacgtcgcgcccggaggacctcaacctcttcctggaactgctccctctgaagatgcgaagggaactctatcgccaccgcgaaatcggaggcctcatagagattgtcatggatttgggaagaaaacctctcgccaggttcccttccggtgattgggtcatctctgaacaacccatagcgcaagaggatttacgccatgccatttccaaggttggtgagttttctgatgacaacaggtcaggtattgataggtctttgcatcggataagcgcgattcggaatcggaaaatgcaaatcattgggcttacttgttcggtgggtcgagctgtgggtgcagtgctgaaatatacgtga

SEQ ID NO: 14240 - DNA, 491 bp, Glycine max
  Clone ID: jC-gmle01810075e04d1
cagcattctcaacacctcctcccttactcactcatcaatggcatcaacaatatcagcaatggccatgatcaacgccaaatgcgtcaacccaaagttccccaaccccaccaagctcgtaccatcaaaaccttcccttcaggtcaaccttccaaagggcctaatagcctcacccgaaaacaccaaactttccactgcgacagcaatcgcaggagcaatattcacaaccctcggaacctgcgacgccgctttcgccgttcaacaaatagccgacatagcagaaggcgacaaccgcggtctggcactgttgctgcccataattcctgcaatagggtgggttctgttcaacattctgcagccggcgctgaaccaactgaaccgcatgcgcagcaccaaaggcgtgatcattgggttggggcttggcggcttggctggcttggtggctgcgccgcatgcatcggcggcggcggcttctgaagtggcggcgatggctg

SEQ ID NO: 14241 - DNA, 591 bp, Glycine max
  Clone ID: jC-gmle01810075e05a1
ccaaaacaggaaaatcacatgctcttcataagagagtggaacagctctgcatcagggcaatcagatgggctgaattgaaaagaaaatcaaaggaagagaagaaactagcaattactgtcttcagtttccctccagacaaaggaaacgtgggaactgctgcctatctcaatgtcttcgcctccatatactcagttatgaaagaactaaaaaaagatggttataatgttgacggccttccagagactccagaagctttgattgaagatgtaattcatgacaaagaagctcaattcagcagcccaaatctgaatattgcttacaaaatgagtgtccgcgagtaccaaaatttgactccctatgccacagcactggaggagaattggggaaaaccccctggcaatctgaatgcagatggagagaatcttttggtatatgggaaacagtatggtaatgtcttataggtgttcagcctacatttggctatgagggggatccaatgaggctgcttttctccaaatctgccagccctcatcatggatttgcagcatattattcctttgttgagaaaatcttcaaagctgatgctgtact

SEQ ID NO: 14242 - DNA, 494 bp, Glycine max
  unsure at all n locations
  Clone ID: jC-gmle01810075e06a1
ctgcgcattcttttcgccgatccaatctgagtgagtgtgtgtcggcatggattcagcatttgcgagaacgagaacaagatccatgttcttcttagcttcactcctcttctacatattcgcagtcaccaccaccaccaccttcgcatccatccacatctacgaccatgaacctttcatagaactcggcaattcctacctcctcgccggcggcagcgaaggcatcgtcgcttcccaagccaattccatccacgacgatggccgttcctacattcggtaacctctccctccctctctctctctctctctctctcgcgattccagctgcgacagtgttcgattcgtctttaaactctttacattgcttcattttgacttaatgtggaacttaaaatgcanaactcgtggattacttatgcctgatttagctggattcgtgaactcctatgaagtaggagggaaaataaaatatggactcaatgggttaaaaatgagac

SEQ ID NO: 14243 - DNA, 534 bp, Glycine max
  Clone ID: jC-gmle01810075e07a1
cttgctaataattactcaaacaacaacaggtttggaattcaattacaacaaggagcaccctcatcttcatcttcatcttcatctttctatgcagctcctccttcttcccctcctcttagagtggcccttcctctgatcaacaagataagcctcaaaagtagtgagcagcaccaacaaaatgaaacctcctcaaatgttttagaggagaaagaagaggatgagaagaaagtggacaacaacaacaaacatcatgagagtggtgaagatgctgatgaagaaactgtgactgttgccctacacatagggcttcctagaatggatacttcctcttcttctgatctggggccaccaaaggtggtctcgacaacttgtatggaaattggtgaaaaggggaagtgaacatgatttctgaacactctttggatcatagattgaacaagggtcagtattggattcccaccccttctcagattctcattggtcctacacagttcccatgtcctgtgtgctctaaaacttcacagatacaataat

SEQ ID NO: 14244 - DNA, 498 bp, Glycine max
  Clone ID: jC-gmle01810075e08a1
tgcaattgaagttgaagtcttgcccttctctcttcaactccaaacacaagacatgatcatccatggctgcctccgtctccactgtcggagctgtcaacagagctcttttgaacctgaatgggtctggacctggggtttcagctcccagttcatccttctttgggagcagcttgaagaaggttattggctcaagggtccccaacacaaagatttcctctggaagcttcaagattgttgctgtagaagagaagaaagagattgaagagacccagcagaccgacaaggacagatggaagggtcttgcctatgatatctcagacgaccaacaggacatcacaagaggaaagggtttggttgactcccttttccaagctccacaggatgctggaactcactatgctgtcatgagctcctacgagtaccttagcactggacttcggcagtacttggacaacaacatggatggattttacattgctcccagctttatggacaaac

SEQ ID NO: 14245 - DNA, 454 bp, Glycine max
  Clone ID: jC-gmle01810075e09a1
caatcgtcaacatggctattgcctttgcatttttgggagctgcattgcgtggacggactagggatgcctatggccgaaagacggccaccctccatgccgatgttatctttaccgacagaacactaatgatggctgctgctccagacccttatgttgtcattctgggacgccttctggttgggtagggtgtgggcatagcttctgtcactgctcccgtttatattgcagaagcatcaccttccgaaataaggggttcattagtcaccacacatgtcctcatgataaccgaaagacagataattttctatcttgttaacctcgctattactggagttcctggttcttgccgatggaagcttggtgtttctggcgtgcctgctgatagtcagttcagtctcatgctctcactgcctgaatacgcaagatggcgtttcgcgaagaatacgaaaaatga

SEQ ID NO: 14246 - DNA, 543 bp, Glycine max
  Clone ID: jC-gmle01810075e11a1
agaaaaaatgtgaatgcataaagattataaatcaataccaaaagaaaaaagaaattagggaccaaaatctaataagaaaaacatggattaaaatgttatctaaaacctatatctcctaacggaaaataatggtacaaacagtttggatatacagacgactatttatttttctatcctgtgctaaaacgaacaaattctttttttttaacaagcgtcacaagtctccgtattcaaatttctcatagtatgttcacaatatgtggagaccatggtttttcctacttgtaacaaaaggtctgtgtccctttttaaccggttatgggcaaggagggatgcgatctaaaggcattgatttgtaaccatgagcttcaatcctctgataggtagtctttttccaattccatgtatttggcacatcattagttcacttcaacaatgataataccttggaagttgaaagtatccatctctaactaatccagatcgagaggatcaaaattagttcttgacagcgtctctgatgtgggggtaccgatgagccca

SEQ ID NO: 14247 - DNA, 307 bp, Glycine max
  Clone ID: jC-gmle01810075e12a1
gcgctggctccgcgaagagcagcgctggctccgcgacgaacaccgctggctccgtgaggagcagcgctgggctcgcgagcgcgaccaactcctccgcgagatcgccgacctcaagctccaaatccaggcgctggagcgtcgcctcttgacgcgcgatttgtcctctccggcttccatctccgacgccgtcgccaatgtcacgttgctcttgcaggtgctcaaggacaagaatctggttctcgagagcggttcgagcctgcggaacacggaggaggtgaagcaattggaagaggtcgtcgaacatgtg

SEQ ID NO: 14248 - DNA, 265 bp, Glycine max
  unsure at all n locations
  Clone ID: jC-gmle01810075f01a1
attcctgcacttgtacttgttctcaaacaanatagaagtaacgccctaaccctcggaattctactggggataaaaaactaacattcttaggttttttcttttatttgaacgaaaaaaaatgctgggggaagggttagaaaaagagtatctagaaccctcgacgtctccaagcttcaactgttactctacctatgaacctccaggtatagcttaaagcactattcaaaacgacgacgcgttgttttcggcctcataaaatgactac

SEQ ID NO: 14249 - DNA, 386 bp, Glycine max
  Clone ID: jC-gmle01810075f01d1
cgttgccattctcatcctcttctttctctctttaccattgccatggatccctacaagcaccggccatccagcgccttcaattctcccttctggactacaaattctggtgctcctatttggaacaacaactcctctttaaccgttggagctagaggtccaattctgctggaggattatcatcttgtggagaagcttgcaaattttgatagggaacgtatcccagaacgtgttgtccatgccaggggcgctagtgcaaagggtttctttgaggtcacccatgacatttctcacctgacatgtgcagatttccttcgagcccctggagttcagacgcctgtaattggtcgtttctcaactgtcattcatgagcgtggtagccctgaaac

SEQ ID NO: 14250 - DNA, 479 bp, Glycine max
  Clone ID: jC-gmle01810075f02a1
tgaaaagaaaaagttcgaaaacatgtatattctgacttaaaaggagaaatgcattggaggaccgatgtgtaccatgcattagaattgaaatgtagtaatggccatatcttaccggagacatgtcatttatggattatatcaggaaaataataccggtccggttgagtctctttttcaattcgaaaagatcaagaacaaatgaacattcattatctttctactggagaaagagactattgtaacctactagcaagtgaaaaagaggttagacatatagagatacgatataatccttctgataaaaaagaaagagggattgcacattatgcaatatttaatcaaatcatatatattgatcattgccattctacacatgctactgttttacatgatactacggatatattagcagagaggcggagaaatacattaattattccatttcaattccaatcgattcaagaacgagacagagagct

SEQ ID NO: 14251 - DNA, 539 bp, Glycine max
  Clone ID: jC-gmle01810075f02d1
cgcaaacacaaaaaaagacaagcgtttaatattgggaaagaaagaaaaaccgaggctttgctcaattccagtgaagaaagcgaaagatgggtcatcgtttcatccgcatgacgaataaagagtcgaaagatgttggatccagaagcacgagaatgggtagactcacataggaacgctggtgagtgaggaagagctgcatcttcaggcactttctatggcacttcaacagcatcaactgtctcacaggtttgaaggctccatgtctacgagaattggctcctccacaaggcacgctgtctctgaatctttttcagccaacaagctggttccagttgatctggagaacattaaaataaacaagtttgtcctaatccatggagaaggttttggagcatggtcttggtacaagacttgtgtccttctagaaaaagcagggctgcttcctgctgcttatatcttacaggctctggaatcgatcttacagacacccaccacgtcactacattggcagattattcaaaacctttaactgtttatct

SEQ ID NO: 14252 - DNA, 383 bp, Glycine max
  unsure at all n locations
  Clone ID: jC-gmle01810075f03a1
agaaacagcgtgctcctatctgatactcaaaaaccaggattaangttttcggcacgcttccgaatgctaggaattcgtttcgaggagagaccctcttgcacatttgagttttcctcctgggtttaggttttaccccacaggtgatgatcttttggttcagtacctttgccgcaatgtttttggccctcatttctctctttcaatcattgctgaaattgatttttacaagtttgttccatcccctcttccatttaaggccgcgtttggggggaaggagtgctatttttaaaggccaagattcaggatttacccttttgttttacgcccaaacagtcaacgtgatttctgttttttgtaaagacccctgatatcagacttttatt

SEQ ID NO: 14253 - DNA, 516 bp, Glycine max
  Clone ID: jC-gmle01810075f03d1
ggagactgagaaaacagaactatacaaaatggaagatacactttctgcgttgaggtctttgatgctttctcagtctccaccgcttgatgccttagttgttccttctgaagattatcaccagagcgaatatgtgtccgcacgagacaagcgccgcgaattcgtttccggcttcactggaagtgccggcttggcacttataacaaagaatgaagcactgctgtggacggatggacgatattttttgcaggctgagcaagaacttagtgctcaggggaagcttatccgattggggaaaaaccctgctgtgatatctggagggccgataatttgtcaaaagaggcattcattgtggttgacccttggtgcatttcaattgatactgctcaaagatgggagcgtgcttttgccgaaaaacagcaaaagctggttccaacctcaataaatttggcggatgaagtttggataaatcgcccacagccccagattaatgctggtatcggacatccactgaaattt

SEQ ID NO: 14254 - DNA, 170 bp, Glycine max
  Clone ID: jC-gmle01810075f04a1
ctatatacgaaattcttgattaataatttttttattttattattaatcaagaatttcgtatatagctagaacggccctcacaaattcttgattaataataaaataaaaaaattattggatttagttggaggggttcatagatttagggaatcgattactatactagtaat

SEQ ID NO: 14255 - DNA, 524 bp, Glycine max
  Clone ID: jC-gmle01810075f04d1
ggagactgagaaaacagaactatacaaaatggaagatacactttctgcgttgaggtctttgatgctttctcagtctccaccgcttgatgccttagttgttccttctgaagattatcaccagagcgaatatgtgtccgcacgagacaagcgccgcgaattcgtttccggcttcactggaagtgccggcttggcacttataacaaagaatgaagcactgctgtggacggatggacgatattttttgcaggctgagcaagaacttagtgctcagtggaagcttatgcgtattggtgaagatcctgctgtagatatctggatggccgataatttgccaaaagaggcatccattggggttgacccttggtgcatttcaattgatactgctcaaagatgggagcgtgcttttgccgaaaaacagcaaaagctggttccaacctcaaaaaatttggtggatgaagtttggataaatcgcccacagccacagattaatgctgttatcgtacatccactgaaatttgcaggtc

SEQ ID NO: 14256 - DNA, 621 bp, Glycine max
  unsure at all n locations
  Clone ID: jC-gmle01810075f05a1
ggagcctgctcgaaggtatatgaattctaaactaaggagttgttcttccgaaacatgtgaattccaggggacatatccagaactcaggaagcatgctaggtctgagcatccttctgttcgaccatcagaggtggatccctcgcgacaatgtgattggttaaggatggaacaagaaaggggtttgggagatctttttagctcaatccatgcaagttctggtgcagattacaatagagataccattttgactgggggtcttgctgacttgatgtcctcattcttgtatgaaatatttatctctattgaagatgttaaccgaatggctagtttgttgactaattcgagacacagagttccattatatgacagaaggtctggaacaacaaacagggtatcaaatgatacacagacaagtcaatcagctagatggagatccaatttaccttcagtgcatcaactggagagaattgccagagtagagtgagaagcaatnntccgtatttatcatcccgtgatcttgaggcagaggcaaatcgtacggctagatggagaaacaaattatcatctttaagaaacgcctcgcatgagcatcagtatagagacctcagtgcagaggtcaca

SEQ ID NO: 14257 - DNA, 233 bp, Glycine max
  unsure at all n locations
  Clone ID: jC-gmle01810075f06a1
tttatatttgttttttccatgatgtgtcattgaacagaaactgtagaagcctgtcgagacagtgaattgtaatagtggtaaaatgaaagaatgaatgggtatatatatgtgtgggagtatacagatatagatatagatatggtggtgcagctgnggagatttggcatattctggtttttgttcggcgcttgatgttattggttggtttgatggtaccatttgaatgatacata

SEQ ID NO: 14258 - DNA, 424 bp, Glycine max
  Clone ID: jC-gmle01810075f07a1
cacgacaccaccagcctcttccttttccgtcgcacttactctcattcatgaccatggccgacgacgcgcagcatgagcacaccttcgagagcgccgacgccggtgcctcgcagaccttccccatgcagtgctctgccctgaggaagaacggcttcgtcgtcatcaagaaccgtccctgcaagatcgtcgaaatgaccacctcgaagaccggcaagcacggtcacgccaaggtccacttggtcgccattgacatcttcacctccaagaagctcgaagaactgtgcccctccacccacaacatgaacgtccccaacgtccgccgccaggagtaccagctcctcgacgtgaccgacgacggtttcctttccttcatgtccgacgacggcaccacccaagacgacgtcaagctgcccgacggtgaagt

SEQ ID NO: 14259 - DNA, 387 bp, Glycine max
  Clone ID: jC-gmle01810075f08a1
agttcttctttcttttcttttctattttttttcttttttttaaaaaccaaatcaaacctaaattttttttccccaaaaacattttcccacttattaataatccccatcaccccaaatcccgccccctacccctaatttctttccccccctctccaccaaaactttaggacaaacaaccccccccctccttcttataccccacatcctccccacgctgccaatatttccatcttacccaacaacaacatccccccacacatttttttctttaccggcgacaaaaccttacccaaggccaacacattcacctgggtttccctctcatggaaaacaatttcccctccaaacacggcagacccaaaccaatcccccaacaactccatacat

SEQ ID NO: 14260 - DNA, 527 bp, Glycine max
  Clone ID: jC-gmle01810075f09a1
gattaagaaatttggtatttgaagccgttattacatatgcatctatacatttcaacataacgatcaagattttctggattcttacatataaaggcttttgacattgtttttaaaatatgttgtcgtcctctaccatggatcaggaaaactgatcttgttgaattgcttgccagtaagaccatgggatgacctaatggaaaattttcttttctcaattcttgtgcttcatggttgctttatcaaaaccaatggttggaaattgttttgcatactcctcaacatcaaggcggagctttgctatctccgattgaaaggtagaagatgactcaattgtggccaagaagtccttcagctttgttcctttgctctctcccttaatcttcacagctatcttcactgctgcatcaaaaaactctgctaccttgacaaaatcctcctcaacaaatcctctagaagtaagagcaggggttcccatcctgatgccaccaggaaccatggcagacacatcttcaggaacagtgttttta

SEQ ID NO: 14261 - DNA, 466 bp, Glycine max
  Clone ID: jC-gmle01810075f10a1
gcatacaaaaggaaagggtatgactttactttctctaattgacaactgaagctttgtagagttgcaagcttgaacactcacaaaccttaaaccaaacccattacatttgcactcagcacacacttaaaggtcagaacatgtcttctataagaggaaaagggagaaaaaaaagtaagcttaaaatccaaatttagttggagagccaccccagctaaatttagtgactggcaaaccctagaaattgttaaaattagcagaaattaaagagtaactattttcctaagatgaacacacaccaacatctaaagttctcaaagcatacatacctctgtgatttgctagaggtacataataatatactaaaaaaccacttcaaaagtccatcttctaaagtggtatgatcttattactataacacatggatctttcttaatcttctattaacacacaaaatcaaaccgagaca

SEQ ID NO: 14262 - DNA, 456 bp, Glycine max
  Clone ID: jC-gmle01810075f11a1
gtcgtatcaactctcgcaaagtgcaagggctatcgtataaccaaataccaacttctttccctcaaatttcttaagctgaccaacagcattctacttaatagcttaaaccatgtaaagaacctcggaccccttctttttaagcttttcatgggacgggggattttgaacggccttattgctttcaccacaaaggcagtacatgttatccgagcccttccttcatccagataacatgagtccttgaggcggggaacatcatcaccactctcggtggagggatccaccgagcactaccacttgatgagcatagttctgagaaccctctggacttccagggggcatagtcttatagaaggcttaataaacctcgttatgctcatccttgccttcacctattgggaagaacattatactgcacttatagaccgagttgtcaccgacgactgctaggatctt

SEQ ID NO: 14263 - DNA, 282 bp, Glycine max
  Clone ID: jC-gmle01810075f12a1
cacaaacttctgaggaagatgatgttataatttagtctctcaggctgaagaggaaattaccttccaaagataaggagcctgaacttgagaagaaacagaagttatcaaagaattctaaatctaaagatagcgtttttgctggcttgtgttcaacattgagccaagctgtgctacctagcaagaaaacatcaatcgacattcatacatgtgctccaacagatgggaggatgagctcaagcgaagataatcagggggatgtacaaaatatttctagaagcagca

SEQ ID NO: 14264 - DNA, 615 bp, Glycine max
  unsure at all n locations
  Clone ID: jC-gmle01810075g01a1
agggcatagtaagtcttcttcgattattgaagcgtataaacggtccaagtcggatgctcccgtgatatctatattgggtgccaaggtagaagttggtagaagagaatatattcctcaaactttatctttgccaaatggcaaggcaattgagcctgcaatggatcttccattgtcaggagcaggtagcattttaggaatgggccctacactaccctacaatcattcaactgcttttgggtataacagactgacatcagtgcctgctttgtctttttcatcagccatgtatggatcatctggtggcccaattccatacatggtagactcaagaggaactcctgttgtgcctcaggttgagggatcttcctcaactgtcctgtcatcttattctcaacctccatttatcgtgagcatgaccggtacacaacttggtttaaatggggttggatcttcacgtcccaactttgatttgaactctggcttcacaattgatggagggaacagagacatgttgactgcaagacaatttttcttcctgctcaagcagagccatggaggagcacgtgagaacccttncacaatcctcaagttccggagttagtgtgaaaagaaaga

SEQ ID NO: 14265 - DNA, 516 bp, Glycine max
  Clone ID: jC-gmle01810075g01d1
cccgacttggatagggaactatgctagtgactctacctaatcttattgtagaaattgtcaggatcaatgattagaccatgcaaactagaaatgctttttcttgtataaaggaagggattactcgatccatttccatatcgatcatgatatatataataattcgagcacccatttcaaacgcatatccaatttttgcacagcagggttatgaaaatccccgagaagcaaccggtcgtattgtctgtgccaattgccatttagctaataagcccgtggatattgaggttccacaagcggtacttcctgatactgtatttgaagcagttgttcgaattccttatgatatgcaagtgaaacaagttcttgctaataggaaaaagggagctctgaatgtgggggctgttcttattttaccggaaggttttgaattggcaccccccgatcgtatttcgcctgagattaaagagaagataggcaatctggtctttcaaaactatcgtcctacaaaataaaata

SEQ ID NO: 14266 - DNA, 382 bp, Glycine max
  Clone ID: jC-gmle01810075g02d1
ttacacacgtttgctgattttaattttacaccataaactccatctaatggggccggtggaacatagaagttgagaaccacaatctaataacaaaaacatggatcaaaatgctatctaaaacctatatctcctaacggaaaataatggtacaaacagtttggatatacagacgactatttatttttctatcctgagctaaaacgaacaaattctttttttttaacaagcgccacaagtctccgtattcaaatttctcatagcatgttcacaataagtggagaccatggtttttcctacttgtaacaaaaggtctgtgtccctttttaaccggctatgggcaaggagggatgcgatctaaaagcattgatttgtaaccatgagc

SEQ ID NO: 14267 - DNA, 342 bp, Glycine max
  Clone ID: jC-gmle01810075g03a1
tgagatgcaaatttttgttagatgatcatgaaatgcaacaaacaagcaacagagatctgggtcatggaaagaaagattggcatcttgagaaagccaatgcaattattgacataatgagtggagctttgtctttggtgtttcagataaatgaaacagatcgcatcaatattctaaaaatgtgcgacatactattctctcaattgtgccttagagttcctcctgctgcatctctgccctttggagatgatgtgcgacatggcagaaatttcaatcacgttaatttaagcaaaaggtttgatggtgataatcatgccaaacaagatacttttcactgggatggac

SEQ ID NO: 14268 - DNA, 569 bp, Glycine max
  unsure at all n locations
  Clone ID: jC-gmle01810075g03d1
tgatcatcataacgttctgttcccttaagttgaaaattgctgtgcaaaatgaatgtataatactggctattcagaaggggcaaaaatcagaaatcaaaagaggggacattctgtgagagcatcaaatagcatcgagtaattcatttggtttgcaatagctgacttgaaagttgacactgaagatgggagaaactacagaaaggtatgcagttgtgacaggtgcaaataaaggaattggattagagatagttagacaattagcttcagctggaatcaaggtggcgctcactgcaagaaatgaagagaggggtatccaagcactgcaaacactcaaggactcgggtctatctcaccttgtactgtttcatcaagttgatgtggctgatgcaacaagcgtagcttctctggcagatnttatcaaatctaaatttggaaaacttgatattctggataacaatgcagggattcttggaggctgtaataaagacactgattcattcacttcatttctcttgaagcgtggggcagcaccagaagatgggancaaggcaatcactcaatcatatgag

SEQ ID NO: 14269 - DNA, 337 bp, Glycine max
  Clone ID: jC-gmle01810075g04a1
atttctcaatctctgtgtttgcggttgaggattccgaacgagtgaccttgttcgtggctcgcaacgatgaacttatcatgggaaaagacaacgttcacatcaacattgtcgacattgcacatgtcgactctgccaagacaactaccactggtcacttgatctacaagcttgtaggtatagacacgcgtcagatagagaggatcgagaacgaggctgcccagacgaacaagaggtcattcaagtatgcctgagtgctcgacacgctcttagctgagcgtgacacaggaataaccattgatatcgctttgccgaagtgcgaaaccaccaagaactactg

SEQ ID NO: 14270 - DNA, 274 bp, Glycine max
  Clone ID: jC-gmle01810075g06a1
tctgactcgattttttcattcctttattgaaatcacgatttttcattttagtgtatgtgattaattctacggttttagttagatctgtaggtgaggtgtgtagctgtgataggagctaggtggttgagatttgagaaactctaggcgtgattataattaattttcgttattaggtttttttaatttgactagatctcagccttgagctgttcaaatagctatggtcatattcatgttttagctgttaatttaatatatagatagaaatccaagg

SEQ ID NO: 14271 - DNA, 316 bp, Glycine max
  Clone ID: jC-gmle01810075g07a1
attttacactaaactaggatgactttatttcaccaaagtttgaacttagaaagattgccagttggtagttttacgtgccttggtcttcattatacagtgcatgtgatggataacattggagagatgtgaagtcctgattaacagtgaatgtttgtagacatacatctatacttttagttattagtcatgtattttacaatggcatctgtctgactgaatattctacaagtgatgattttgcagcaatgatgaccctatatttggccatgcaagtcttgataattctaatgagcttttggtcctctaaagatgtgag

SEQ ID NO: 14272 - DNA, 450 bp, Glycine max
  unsure at all n locations
  Clone ID: jC-gmle01810075g08a1
aagggaagttgctgattagnatancgaggcggaangttcgccggcgtcgacctagcaatctagtctggaggcctgttcttcataatcaatagttccattgacaatgnttcaaccgacagatagcctattgtgaggtgtggggacacactgatgactaccattgaagtcttgggcactagcaatgtagcagtctgcacaggaggtgcattgaaaacaccaacaagggacttttatgtggggctgctaccgggggcatataagatacaaagacagattccttatagactccacgatcgttgtaatgaaaattgttgacagcccatgatcattactatgcgggagcttttgcgtcttaatgagatatcagggctgccgctgaccaggcttatctctgataccgcctttttttggatatgacagagggaggggcttataacattttccaaagca

SEQ ID NO: 14273 - DNA, 401 bp, Glycine max
  Clone ID: jC-gmle01810075g09a1
cctaaattatacgaaagttttgcttgaatatgttggtgtacagctatgttcgctctacagctacatatatgaatgtatattccaacacatatgaccttacacttttttatctacactgtaaaaaataaattgaatatctagattttgagagaaaaagaaaactatgtacaggctcaacagaaattaggaatgcttcattcatctttcattgccagctcatgcatgtttttgtgcccgatttccacatgtagagacaagagagcctcacagacctgaaacgcatctgcttcaaaaaggtcatcattcagcgatgaatataccatccatgcatgcgccaatgttagcttagggcgcaccacatcggatacgagaacttctgcatctcggcatgtgacaagccc

SEQ ID NO: 14274 - DNA, 403 bp, Glycine max
  Clone ID: jC-gmle01810075g10a1
accagttatacatgaatcatgactgacttatgccagagaaaatttttaccgattattccttgttacaaggatgatcatgtctcccctagccaactactatacaaactccttccagccgttgcgattcaaaaaaactggtccatatgtttggtccgagaaagacaactaaatcggaggactggggcccctcatcgcatctctggaacctattttgtcccaaatctgtagggcggactgagtcaacattaatgggaggaaccgggatgtgacgctgtgcacccactttgatgaggggggttgcttgagctctggacaagagtgcttttgctggtgcctctctgatgctaccattcgctgcaggaaaatgcagagcaactgtgccactacatggctgatctgatgc

SEQ ID NO: 14275 - DNA, 546 bp, Glycine max
  Clone ID: jC-gmle01810075g11a1
aaaaagttcaaacctgcatgattgcatttattattttggtttccattacacaaacatggtttattaatgacaaatacaagtacattcagccactccaaatacataacttaaacatacacaactgatgaaggaatcagattccttctatttcacatttatttaaagccagggacagtacttcagcaaccatagagcccttagatagagatactgttgggaattcctctgaaagtcaatccctcctcactagaaggatagagcaaagtgtaaggcattttagccggcccatagcggtttctcaatgtctcattattgttcttctctataagcttcttttcaatctcttcaagattctttccaaacctcttaaaggcctctaatggcccggcatcagaagtccagtagtcaccgccatctctctgcccaaggtagaactcatcagatgcgtgccttgataaaatttctataattgtaaggtcaatgagggtctctttcttgccaagtatagtcttcaaaaactccttctcagggttcttagctaacgca

SEQ ID NO: 14276 - DNA, 542 bp, Glycine max
  Clone ID: jC-gmle01810075g12a1
caatagtcagcatggctattgccggtgcaatcgtgggagcagcattgggtggttggattaatgatgcctatggtcgaaagaaggccaccctctttgccgatgttatctttaccgccggagcaataatcatggcttctgctccagatccttatgttctcattttgggacgccttctggttggtttgggtgtgggcatagcttctgtcactgctcccgtttatattgcagaagcatcaccttccgaaataaggggttcattagtcagcacaaatgtcctcatgataaccggtggacagtttctttcctatcttgttaacctcgcttttactggtgttcctggtacttggcgatggatgcttggtgtttctggtgtgcctgctgatgttcagtttgttctcatgctcttcctccctgaatccccaagatggctttttgtcaagaataggaaaaatgaagcccgtgatgtgctttctaagatctttgacgttgctcgcttagaaacgaagtcgatctcctcactgctcaatccgagcaagagcgcc

SEQ ID NO: 14277 - DNA, 523 bp, Glycine max
  Clone ID: jC-gmle01810075h01d1
ttgacaaggacagttattcagatcttgataccttaaatgctttcaaacatgaactgacattattagaaagggtgcgacatccgaatgtggtccagtttgttggagctgtcacccagaatatacctatgatgattgtgcgtgagtaccattctaagggtgacctggcaagctatcttcaaaagaaagggcgtgtgtctccatcaaaagttctacgctttgctcttgatattgccaggggcatgaactatcttcacgaatgcaaaccagatccggttattcactgtgatttaaagccaaaaaatattttgctggataatggagggcaattgaagatagctggatttggcactgtgagattttcgctaatctcacctgatgaagcaaagctggtacagccagagcctaacattgatctttcaagcttgtacgtggcaccggagatttacaaagatgaagtctttgatagaagtgtggatgcatattcttttggtctcattatatatgagatgatagagggtacaca

SEQ ID NO: 14278 - DNA, 470 bp, Glycine max
  Clone ID: jC-gmle01810075h02a1
atttgccttcaagcaagggaaatattatgttttgaagttctgccttgagccaactggattcagagtgaaggcagagggtgtggccaagaacgctccccctgagttccaaaacacaaagctcatgacacgtttgacctacactcttgatgagattgagggaccctttgaggtgtcttctgatggcactgtgaagtttgaggagaaagatggaattgactatgcggccgtcacagaccagctaccgggaggcgaacgtgttccgttcctcttcaccatcaagcagttggtggcatcagggaagccagacagctttagtggagagtttctggtcccatcataccgtggaagctctttcttggaccacaagggaagaggtgcctctacaggttatgacaatgcagttgctctgcctgctggtggaagaggagatgatgaggaacttgccaaggaaaacaacatgagtgcctcat

SEQ ID NO: 14279 - DNA, 446 bp, Glycine max
  unsure at all n locations
  Clone ID: jC-gmle01810075h02d1
naggattgcgntgattcnanncacgtgaggtaccgccgaagctcgaattcgctcgagagagctatatctgctgctatttcaacttatccgatgccatcctgaatggcctgggtgaggacaacatagcccccgccccttgcatctgttatattattctagtctcttcttttcccttttcttgctctcttccttagcccttttgctctctctacctatacagcaagactttgtttctttttgagtcaagatggcgtgtctcacctattggtttcgaaggctactaaaaaagacttgagatatcatttcttgaaactggtgtgtttgctgaccccggaggatttggcctgcgtgcatctgtccaaagaccaattggacgagattcttactccagcacagtgcactattgttgcatcactttctaatgaatatgttgactcttatgttct

SEQ ID NO: 14280 - DNA, 387 bp, Glycine max
  Clone ID: jC-gmle01810075h03a1
gatgggctcatcggtacccccacatcagagacgctgtcaagaactaattttgatcctctcgatctggattagttagagatggatactttcaacttccaaggtattatcattgttgaagtgaactaatgatgtgccaaatacatggaattggaaaaagactacctatcagaggattgaagctcatggttacaaatcaatgcctttagatcgcatccctccttgcccataaccggttaaaaagggacacagaccttttgttacaagtaggaaaaaccatggtctccacatattgtgaacatactatgagaaatttgaatacggagacttgtgacgcttgttaaaaaaaaagaattggttcgttttagcacaggataaaaaaataaatag

SEQ ID NO: 14281 - DNA, 533 bp, Glycine max
  Clone ID: jC-gmle01810075h04a1
cggctcgagggagtttccgaacaattactggcactccgttaagcagttggccgaaacatacccttccgtcattccttgcttcggtctccatccttggtttgttaaggaacggagtcccaattggtttcaaacgttgaaggaatattttgattccacaccctctgctgcagttggagagattggtgtggacaaaggatcacacggaaagaagattgatttttctgagcagattgaagtattgaggcagcagcttgaacttgcaaaagagttaaacaaaccagcatctgttcattgtgttcgtgcttttggtgatcttcttgagctaatgaagtttttggggccttttcctgccggtgtcattcttcattcttacctaggttctgcagagatggttcatgaattttccaagcttggtgcttatttttccttctcaggatttcttatgtcactaaaagcaagtaaaggcaaagaaaatgctgaagatggtccctcctgataggattttgttggagacagatgcacctgatgcacta

SEQ ID NO: 14282 - DNA, 379 bp, Glycine max
  Clone ID: jC-gmle01810075h06a1
caggactgcaaattgaaattacaagctataatgtcattccacaaatgtggggggaatgtgggagattccgttttgattcctctccctaaatgggtacttgaaattggagaatcggaccctgatatcttttacaccaaccgcaaaggtattaggaacaaggaatgtttatccctcggcgtggacaaccaacctttgtttcatggacgaactgccattgagttgtacaccgactacatgcaaagcttcagagataatatggaagattttcttgaatccgagctcatgatagacattgaagtaggacttggtccagcaggagaacttagatatccctcttatacaaaaaatctagggtgggaatttcctggtattggagaat

SEQ ID NO: 14283 - DNA, 542 bp, Glycine max
  unsure at all n locations
  Clone ID: jC-gmle01810075h07a1
tggctgttcaacccctgggaaatataagattgtcttggattcagatgatgccttggtcggtggcttcagtcggctcaatcacactgctgagtacttcacctcagaaggatggtatgatgaccgacctcgatcctttcttatctatgcaccttctagaacagcagtggtttatgcccttgcagatgatgttgaacctaccctagcagatgaagctgaacctgccctagcagatgaagctgaaccagagccagttgatccttgatgacaattttctgggatgctgaaatgttacaagtgcacaacggcatggatgcagtaaatccctaatcaaactagccaaccaacgtgtggtggattaaccgacactgaaacaacatagaagctgaattgaagtggaataaataaagcgctagttcatctttagttgagagcaggagactagcctcgaagtctgtacatgtgccttgctaggtaataagttgtgatatcacacccatctttctgtttctactttttaggattaacgtnctgacatgtttaag

SEQ ID NO: 14284 - DNA, 380 bp, Glycine max
  Clone ID: jC-gmle01810075h08a1
ccagtcaacaaggtatagtttaaaacttaaaaaagttaagcaaggaaaacccttgaaaagggagaagaaatgttcaagataaacaacaattagatgtggcaaaaatgtctaatgaagaagtggatttgtttaagcttcctttgggaccaatgaagcaaccagtcaagtttgttggctacaaatgaaccttgggatcattccaatcccgacaaatttttaaaatttgatggtccaactggggcaataaaccctttgatgggcaaataaggaactgtatcattcttgccgagcaactcgtgggttgtgatgacaacaaccacagtgatttcatcatggaaaaaacgcctaatcccctttggaatcttttgaaggccggtata

SEQ ID NO: 14285 - DNA, 421 bp, Glycine max
  Clone ID: jC-gmle01810075h11a1
ggaaaattaaccaagggggtgcattggttttttccaatcaaaaaccctttggggaaaaaataaaatcttggtccttaccggtaaaatatagactttacaaattgaacaaaaatcaggggaacttcatccctttaaacaacggggaggaccaaaatttttaatgaaaacgggtttcagccagctcctatactggcgggatttttggaagaaaatttgggacattacatcaaggggaatggtttactttttcggcacttttgccgccacccattaatgggttttgcgcttcagcacaccaccgggaactgggtaactcaaaaagcatttgcaaggtacagcttcccggggaaaggctaccctggtttcttgggtggaaattttggattcttggacatttggatacttgggggggggaccccta

SEQ ID NO: 14286 - DNA, 486 bp, Glycine max
  unsure at all n locations
  Clone ID: jC-gmle01810075h12a1
cccnnnaagtgaatcgntgatacgagnccgaggtngangtacgcgcccgtaagctcgggaactgtttgcgagtgaccacagtaggcacagccactttccaatttttttctccattttttccatcttgaagggataaactcgtcttcccaactcacagaggtttcaagaaatccttgcaaaactcaacactgtcatacccttatctttactccaccggtgctgcctatagaaaatcccgttttgcaagcaagagctcgtgaagcagctaatgaagttaaagcggtgactgactcaagctggaacaaccttgtcattgcatgtgagacccctgtgctggtagagataccgacaccatggagtgggccatgctggatgatagcacctgctatcgatgagccttccaacgaatctgctggagaagatgcgtgctttaagcttaacacagacgatcttccaaacatattagcactgtacgtgatctgaagc

SEQ ID NO: 14287 - DNA, 420 bp, Glycine max
  Clone ID: jC-gmle01810077a01d1
cccataaccatattacggggcattttttttattgagtgcaaaaatgaaaatcacatgggcatattttaggggcaacatacgctaaaactcatcgataaatgattagggaacaatattggggcatgtcttaatcagatcaagcatattattacattttggatttagtacggaatagggttgggtcaaagactttgagaaaaaatcttgttcttggcataaataggttggactgcaatatggggccaaaggcattaattagcttccttttcacttttggatttataccacccattgaaactatttgaacatatgcaggtggttttttgttaccctcaaaagatattggcactgaccccttcaatttgaccatcacaaactgtacaatattaggcacaacacaggctttaagtcacaataccc

SEQ ID NO: 14288 - DNA, 467 bp, Glycine max
  Clone ID: jC-gmle01810077a02d1
accataaccatattacggggcattctttttattgagtgcaaaaatgaaaatcacatgggcatattttaggggcaacatacgttaaaactcatctataaatgattagggaacaatattggggcatgtcataatcagaccaagcatattattacattttggatttagtacggaatagtgttgtgtcaaagactttgaaaaaaaatcttgttcttggtaaagaaaggttggactgcaatatggggccaatggtattaattagcttcctcttcacttttggatttataccacccattgaaactatctcagcatatgcagctgggtctttgttaccctcaaaagatattggcactgaccccttcaatatgaccatcacaaactgcacatttttagtcacaacacaggctttaagtcacaataccccatagaatggaagaccattaagcttaattgatattactaattctatc

SEQ ID NO: 14289 - DNA, 218 bp, Glycine max
  Clone ID: jC-gmle01810077a03d1
ggagtatcacgacaagtataatacataatttttccctttactctgtatcaccttgccgccgggcgattctattcccccatatttgaaagcagtcgcgcatccctctcaatacagctgagaaaccacaaccggctaaactcattttctatatatacttctcaattatttgttctttcgggaaagtatacatccacataagaatttggggcagccgcctt

SEQ ID NO: 14290 - DNA, 309 bp, Glycine max
  Clone ID: jC-gmle01810077a04d1
agcattgatttttcaataatgtatcattctaattacgcactgggaaacatatatctcaattaaaacatgccctacataagcctacttataaactaaatgagaacatggaagtttattccccaaaaaagtaaaaacatgcatattagaagccttattcggacataacaatacaaacgggaggggtggctaaactaaattcagttctttcttttctttgggggcatgaatgctcgctacttctaggcttactcattctctttatactgctcggcctcagaaccatccgcatcctctggtatacctgcctca

SEQ ID NO: 14291 - DNA, 500 bp, Glycine max
  Clone ID: jC-gmle01810077a05d1
gggggaaggggttaaaacaaaatttttttttttttttttttaaaaaaaaaaatttggggggggttttttttttcttaaaagccttttttgcccaaaattgggggctagggggggctttttttttttaacccccccccaggggaggccaaatggtgtttcaaaattttacccccttttttatttcaacccctccctcaaggggggggggtcctttggcaatttttttccaaaacaattaaattttccttttgggggggaaaggggtttttaaaaaaaaaagggtttttacagtcccccaaagccccaagggaaaaccccccttttttgtggggtaaaaaaaaaccccccaattttttttcccaaggttttttgggagaaaaaaaacagcttttttggggaaaccaaactctcttgttttttttttcgggggggcccttgtctccaaaaaaaaaaagcctgtgggcttttttttttttcaaaaattttggggccaaccaaat

SEQ ID NO: 14292 - DNA, 468 bp, Glycine max
  Clone ID: jC-gmle01810077a06d1
agagaaaaagtataatagagcctgtgcattatattattgaatcatattatgcgggcaatacatgtatcgaatggacaacatgctccctaagaacaaattccccaatggagtaaaagaagaaaaaaataatttcaacccctattctaagatatcataaaagtgcagctgaaatggatgctgccggggtttcttctagtcttctgctgttatgttagaattctatgtaattcaaaataatgcatttgaaaccccgtaaccatcacgatgagatttctgccatctccatgcaaccttcaaactctgttgaagatcagtgtgcttagcaacccaattcaattcacgtttgatctttgatgggtcactgtacacctcagcataatcgcctggacgacgcggaaggtagtccactttaatgtccacccctgtggcctttttacaagctttcacaaactccttcactgaactacc

SEQ ID NO: 14293 - DNA, 415 bp, Glycine max
  Clone ID: jC-gmle01810077a07d1
aaaatcttaatggatatgaaacattgaaaccaaatgagaaactatatctcagttattgactatttacacaacataatttcggtctaatttcacggaaaagcaggcagagcaaataaaagttgcagccactcatacatgcaagcaaaaggctgtcaacaaaggcaagagttttccaaaacttgcctcttgagatagtagaggcagccaaggcaatcaattaacaaaaggataatacagttatctcatgttcccaagacacaaatttttcctcatcatattcataggcatgcgacaattgatatacaaactgcagtatatgcccaatagtcctttctacaagcaagaactagaattattttcagcacttcctcaatcttcaatatctcaggcgtataggccattttgcttccatata

SEQ ID NO: 14294 - DNA, 534 bp, Glycine max
  Clone ID: jC-gmle01810077a08d1
aatgggaattcatccatctttgtcaatgaaaattgataaaaagagtataatacaaactagcactatatggctgtaaaatcagccatcaaatccaagcactccctctgccaatatagaaacattgaatctcattcattccaccatttctgtggcaatgtacagtctttaaccaggcagaccccaaattgaaatggaggttgcgtttcccatatggcatatagatggcaactgggccagtcaatctccaagcagatcaatctcttttagatagtcaatcctttgtctcttccgcaggaggttgtttgtttgtggtggttgtagttgttaatacttctcttggttccttgtctaaaattttctcgtttatctcaacattgttgaaatgagcagaaccttcattattttctgtctcagatgtagatgtagaattctgatttccctccaagtctttacttaatggattaccatttactactccagatatggagggatcagtatctgaagccaaagaccgagatttttcaacaactaaat

SEQ ID NO: 14295 - DNA, 542 bp, Glycine max
  Clone ID: jC-gmle01810077a09d1
gagaagtgtgtttttattaaaaatgtaatatgtagatacggaggcaacaaggagataagtggggaaacaagaggaaatatgtttcatggggaagtttgtgaggaagagaatgatatataagttacagagaagagaggaggaaaaaagctttatgaacattgtggataaaattcagatatctgcttgctcagaagttggtttcatagcagacacacactaagaggcatataactagaaatgacttttaaattttttcatccattgagatatcccactttttcgatcaaagcctggatatcagcaccgctactcccctcagttgcctcgacgatgttggggctgttcaatggcgtgacatctgaaagagggtagcttctgttattatggagttgactgattgcactgctttccactcccttcagtatgacacttttgtgtaggccaccaagaagtcctttcggaatctgtgtcaccgcattctccaacgaacaccaccatctttgacagttcaaaaccctattgaacatataggtatctgaggg

SEQ ID NO: 14296 - DNA, 449 bp, Glycine max
  Clone ID: jC-gmle01810077a10d1
accaaaacatttttttttcatattcttgaaatctgccaaggggggaaaactaaataacattaccaaccaaaacctataggtaaattaatcacgcacttataactgctttacccaaacaaaatattatccacgcataaattatacaacctttactaccataaaatgaactactgttgatcacattgcactttgtgattagatggctaataattatattcatcctatgccaaacgcagttgctgtcattgtttttgtctcatctcctacttaaagatgacatcatgcaaagtgtttttctttcaatcatccagcttcatatatgagacctgcttgctgctcttctgaggcaacacctttaccaatgactggtattggtccgaggaaagaaacccttagtcggggaaataaacatcaaattggatgtaaaggcgaccattcatgaatggcct

SEQ ID NO: 14297 - DNA, 387 bp, Glycine max
  Clone ID: jC-gmle01810077a11a1
ctcgagccgaatcggctcgagcaaaatgtttctttggaggtgtcactggaaaaattgtccaggttgtgtgttcagagttaaatattcctgttccagacgattttttgagatttgcggttgagcaaagtggaccagatgagcaattatcaatggggaggcccattattaattgagggtggaaggttctttttaacccttttccaccatattttcatgtataattttgaattatacctaaagccttggtgattatatacgggaatctttggagcctttttctgtgctcttcttgcacttgggatatctttgcgatacttactatgtaattatgtaccctcgaagtggcaattttaatagtcaaatttatcaaattcaatagtttctttt

SEQ ID NO: 14298 - DNA, 386 bp, Glycine max
  Clone ID: jC-gmle01810077a11d1
aaaagatactattgaatttgataaatttgactattgagattgcaacttcgagggtacataattacatagtaagtatcgcaaagatatcccaagtgcaagaagagcacagaaaaaggctccaaagattcccgtatataatcaccaaggctttaggtaaaattcaaaattatacatgaaaatatggtggaaaagggttaaaaagaaccttccaccctcaattaataatgggcctccccattgataattgctcatctggtccactttgctcaaccgcaaatctcaagaaatcgtctggaacaggaatatttaactctgaacacacaagttggacaatttttccagtgacacctccaaaggacattttgctcgagccgattcggctcgag

SEQ ID NO: 14299 - DNA, 558 bp, Glycine max
  Clone ID: jC-gmle01810077a12a1
atcttcatctccaacaagtgtttctgtttctcatggcatccaccactctatcccctacaaccccttctcagctatgctcaggaaagagtgggattttcagtccctcacaggcacttcttgtgaagccagtgaagaggcagatgatggggaagagcaagggaatgagaattgcatgccaagccaccagcattcctgctgatagagtccctgacatgggcaaaagacagctcatgaatctgcttcttcttggtgccatttcactcccctctgctggaatgcttattccctacacctacttttttgtccctccaggttcaggttcttcagctggtggtactgttgccaaggatgctgttggaaatgatgtaattgcagagaattggctcaaggcacatggacctggtgaccgaacccttgcacaaggattgaagggagatcctacctatcttgttgtggagaaagacagaacccttgcaacatatgcaatttatgccgtgtgcactcaccttggatgtgtcgtgccatggaatcaagcagagaacaagttcatctgccctt

SEQ ID NO: 14300 - DNA, 391 bp, Glycine max
  Clone ID: jC-gmle01810077a12d1
acacgggaaaaagggacccgttcaggttcctttccattttagcttcagttcacaaaaaatcaatttggttacaaaatatatttatgccttaatacaaaacaaaagggtggaatttcatgtttaaaaatacatgacaaccggggggcgggtttaaggggtttaagcccaccatggggcattacctgttttgaaatttgtttcaacccaaggaacaaacaccaccttcccattatttatatcacaatgggctaatgccaaaaacaagggagcagggcctctcacaactttttcttgggcattggactgaaaaccatggcaggggcagaagaacttgttctttggttgattccatgggaccacacatccaaggggggggcccacggcattaatt

SEQ ID NO: 14301 - DNA, 519 bp, Glycine max
  Clone ID: jC-gmle01810077b01d1
atgacaaacatttttcaccttttattcacaaacttattaagcagggggttcattatcgcatatccaacattgatacatcaccacaaatagatgctaatatatatgtgtacatcactgcctgaagaaatttgtcaatgattgaccgtccaactctttcgtgaagaaccttgacataaattcatggaacgtgaagttcctataaagagctggtttctatgttgatgttagctgtggtaatggtccaaaatgtttatccctatcactttgagtgaggaaaacagcaattgtaaactctaggctccgtggaataattggctgacacccgatgatgagcactcttgtatgttccattagaaattatctgatacacagaatgatgaatatgaaagagcttagatttaaattattttaaaatcaaaaccttaatgtagcatttcctattaagccttgttcagaagttcaaatttaacccaaattcttgtggcagataaaagggtcaaatagtatgtttagaaaata

SEQ ID NO: 14302 - DNA, 667 bp, Glycine max
  Clone ID: jC-gmle01810077b02d1
gtcaaacattttgcaccttttattcacaaacttattaagcataaaattcatcatcgcatatccaacattgatacatcaccagaaatagatgctaatatatatgtgtacatcactgcctgaagaaatttgtcaatgatttaccgtccaactctttcgtgaagaaccttgtcataaattcatggaacgtgaagttcctataaagagctggtttctctgttgatgttagctctggtaatggtccaaaatgtttctccctatcacttgggttgaggaaaacggcaatagagactcgtggctcgttagaataattggctaacacccgatgatgagcactcttgtatgtttcattagaaattatctgatacacaaaatgatgaatatgaaagatcttagatttaaattatattaaaatcaaaaactaaatgtaacaattcctataaaaccttgtagagaagttcaaatttaaccaaaattcttctggcagttaaatggttcaaatagtatgtttagaaaatatgttcagttggtgacaatatgacaattgataaacagttatgaactttatcagctaaggatattatacttaaattctaacaacgtacttctttaaataaaaagtgccccttgtccgtttacacttacaataattactacctttctctttttt

SEQ ID NO: 14303 - DNA, 227 bp, Glycine max
  Clone ID: jC-gmle01810077b03d1
gcgaaacaactgagccgaaacatgacatttttactccgccgacacaaccacttcaacaagggggggggggaacacatatccataagctcgcaaagatagcgaaacccatggctagtccagccgggagggccccgcacaagtagaacgcaaaagttccggaggcgatggactacgagacagacgagcaagaaaggaataaaggggaggggcacaaacacaaaaaccgg

SEQ ID NO: 14304 - DNA, 572 bp, Glycine max
  Clone ID: jC-gmle01810077b04d1
tttatttttttttttttttttttttttttttgagaaaaaaaattgttttttcttaattaaggcggtgaagagtgagaggtttactctctaaattatacattttaatttatactatatataattaaatgttatagatttttgcaatgtgcaaaataataataaaaaaaacgatttcctcttatacaacgattaacaaacatactatagaacgcgcaacatgttccttgctgaaaagataagttggggcagaaaatacaacctattcttcttcaccaaccgacatgttgcccatagtcgtgtcacctgaaccaaaaaaaccatagaaattcccatttgatgataggcaccgcacaatataaatgcaaagccagagtttgaacatcaatgcaagcctcaaactaaaacgagatgatttgtggctacttgcattatcactaacatatacccagagcttcattaacattttccacattgcagaaattcctgttgaacaacaatcctttatcattcaaacttgctaatacttgaacaaatcacaggaaaaaaaatcccgacattttctgggcttactg

SEQ ID NO: 14305 - DNA, 494 bp, Glycine max
  Clone ID: jC-gmle01810077b05d1
aaacggaaaaggagggttcatacttaatagagcgtgtacatttggatattttgcatagaaagattcaaaatactcctattattcggcgaaagtgaattcaacagaagcatagctttgagttttcaacgggagatccaatcacactagtaaacattaatttggtcatatgctagtccaaattctcaagagagaaatacaagaaaaaaaccccatgctgaataatccccgaaggttctgtgaacttcatatatcatataacatattcacgtgagaccaaaaaggttaattattgaaattaagtagagcctagtggttgaattttttgcccaaaaccgtggctctcagctcagcaacatcaatctctttgatgttctccggtttgtagtaaccagtgacagggtctgggacccacgaaaccttttcagcacctcctcctagtaccttgtcttcccctgacttgccgctgatggaggctgctcctcctcttgttgcgc

SEQ ID NO: 14306 - DNA, 421 bp, Glycine max
  Clone ID: jC-gmle01810077b06d1
aaacggaaaaggttttttcatactgaatagagcgtgtacatttggatgttttgcatagaaagattcaagatactggtatttttcggcgaaagtgaattcaacaaaagcatatctctgagtgtggaacgggagatccaatcacactagtgaacattaattgggtcatatgctcgcccaaattctccagagagaattgcatgaataaaaccccctgctgaataatccccgaaggtgctgtgaacttcatatattatataacatattggcgtgagaccaaaaagggtatttattgaaatttagtacaccctatcggaatgaattttttgcccaaagccgtggcttttatttcagcaacatcgatcccttagatgttctccggtgtgtaaaaaccaacgacagggtttgggacccacgaaaccta

SEQ ID NO: 14307 - DNA, 450 bp, Glycine max
  Clone ID: jC-gmle01810077b07d1
attcgcgatttttttgccaggataattcacactttaaaagtatgactatctttggtgacaaattacaatttatctagaatcttgtagaaattgctatcagagggaaggagaaacactttcaaagaaatagtgaattctcatatttcaagaatcaggatattgagtctctccaccttctagaagactttctgttttgatcaagtgaatcttgaatctcaggagaatcattctgattttctactagatgtgttgttcttccaagtttgctgagtttcttacacccactgctccatgcagaaatatgcttttgctttaccatcttaataaatttgatcctgcaagctagccatattatttatgaagccacattgttcttgggctttcacactctcaagcttaaacttcagtgtgatgatgttctttttagcaacagtccatccttcttggaat

SEQ ID NO: 14308 - DNA, 307 bp, Glycine max
  Clone ID: jC-gmle01810077b08d1
ggggggtaaaaaaaaaattttggcttaaaaaatttttccggaattattttacaaaagtgaccagtgaaaacccgattcttcaatttcccactgaataaaaacccccattattttcttttgtcttgtcatacattcattttaatgaggggatatttcaaagaaattggcccctttattcccttctttaatccttatgccgaaaaaggccccctcctttgaaaattgttatttttttttcaaaaattgatttttacacggggttttgtattttctttttcccaaactttaattgtaaaaaccttttttt

SEQ ID NO: 14309 - DNA, 558 bp, Glycine max
  Clone ID: jC-gmle01810077b09d1
aacgaatataaaataatattaattttatatgaatttgtgaggggtcaaattcatatgggaacaaacttagttccctaatatcttacaaaggatccatgatagttcattgcaagtatgtcatcatttaacctttactaaagaaactatttacaaaaacaacacttactatgaataaccaaagttgcataatgtcatttcaccagtagttccactagtatacattattgtatagatgagtcctcactaaggcttattgtgtcaacctaaaaatccttttctgtctcaatccctgtataattgctacttggcacttcattggagacatctttcttttcattttgcttgggtgaaggctattcttcacaactttctaaccatacttcttacatttgtaacaatcatcaagcacatctacatcatttcttgtttggaaacaaaaccgtggctctcttagcttcctcctcactttcatcttgatcttctccgaacctgcacttcaccatgtgttgttgccaccatcactagtatttccagtgcaattttcatcattgacagctt

SEQ ID NO: 14310 - DNA, 512 bp, Glycine max
  Clone ID: jC-gmle01810077b10d1
aacgaatattataataatattaattttatatgaatttgtggggggtcaaattcatatgggaacaaacttagttccctaatatcttacaaaggatccatgatagttcattgcaagtatgtcatcatttaacctttactaaagaaactatttacaaaaacaacacttactatgaataaccaaagttgcataatgtcatttcaccagtagttccactagtatacattattgtatagatgagtcctcactaaggcttattgtgtcaacctaaaaatccttttctgtctcaatccctgtataattgctacttggcacttcattggagtcatctttcttttcattttgcttgggtgaaggctattcttcacaactttctaaccatacttcttacatttgtaacaatcatcaagcacatctacatcatttcttgtttggaaacaaaaccgtggctctcttagcttcctcctcacttttatcttggtcttcttcgagcctgcactttaccatgtgttgtt

SEQ ID NO: 14311 - DNA, 380 bp, Glycine max
  Clone ID: jC-gmle01810077b11a1
atatgtaacccattttttaaacataaatatttgttgaactgaattgtctccgttaacccatggggaacctaatcctacaagcgctatggccaaaccctgttgctcacttgaccacaatctaatcgcttctactagcgaaaatgaagatgttctgcccatgaaaaatgtagaggatgctgatccgagagtgacggccacatataagctcatagacgcccttgatgatactctgaagaagctggcccacttacagtgtgatgtgaagtgcaaaactgatggtataggtctctgagccccccagttcataaataaagttgaaattatggggctcaaaccattagaatgtgcatggtgaacgataggagattgttcttcttaac

SEQ ID NO: 14312 - DNA, 396 bp, Glycine max
  Clone ID: jC-gmle01810077b11d1
gaatcaaaagcattcttcacttaatttccttggagtgactggatacacttttcagaccgataaataacgatggacgctaagaggaaggccaacaaataccaatgggggtaacccatttagaagcacgccccatgactaataataataaaaaggacccctctctaccagctggaactataattagccgcccaaagaaactgatccactaaactaagctaggagaaattaatattcatttctcattaaaatatgaggttgaccaaagcatttacaccactgttgtttggctatggtgttgttacccataaaagggtggagggaatcaatcaaccactaatgcttcattgtaacgcgcagcacttgtcaaaaaatctcctcaaaacgttccctaaactg

SEQ ID NO: 14313 - DNA, 601 bp, Glycine max
  Clone ID: jC-gmle01810077b12a1
atttcgaaccgctgcttcaaccattccttcttgctgaactggattctctccgtaaaccctgctggaaccgctcctccacgcgcaatggccaagccctgttcctcacctgcccaagacctagtcgcttctcctggcgattttgaatttgtgctgcctctgaaaattgtggagtatccggatccgagattgagggccaggaataagcgcatagttgccttcgatgatagtctgaagaagcttgtccacgaaatgtttgatgtaatgtacaaaactgatggtattggtctctcagcaccccaattaggaattaatgttcaacttatggtgttcaatccagtaggtgagcatggtgaaggagaggaaattgttcttgtaaacccaagagttagccaatactcaaagaaactgacactatttaatgaaggttgcctatctttccctggaatcaatgctgatgtaaagcgaccagaatctgtgaagattgatgcacgtgatatcaatggaacaaggttttcagtcaacttgtctgacctttctgcacgaatattccagcatgaatttgaccatctacaaagaattctttctttgagagaatgactga

SEQ ID NO: 14314 - DNA, 427 bp, Glycine max
  Clone ID: jC-gmle01810077b12d1
agcccctcaaaaaaggtggtccctttgggggaacatgaacaactgacaatagctttggtccaaaaaaaaggttttccaatggccctttataaacaattggacccggaatttatgcctcaatattttatgaaggtcaaaccaaaaatgggggggaagggggccttcagaattatgcccaaaattgaccttgaaaaaaattggttcccaaaaccaaaagggaccttttttctccggggggtttttattttttcaggggtgggggggccagacattcccttaaactttggttttagggcccggaactggccaaaaaaactataaagaacttttttaagcttttttttaaaaaaaaaaatatcttggggaagggcaaatttatggtggaaaattcgggccggaagggcaaaaaagttgactgaaaaccttt

SEQ ID NO: 14315 - DNA, 326 bp, Glycine max
  Clone ID: jC-gmle01810077c01d1
gggggaaccaacccaaaaaaaaatgtaaatttttttttgggggcaaaaaaacaggcccaatgggaaaatccctccctaaacaaaaaaatttttcgaaacaaattgtgctaaatttataaacaaaaacctttaaggctttattttaggaagcctggggagcgaaccaaaattttaattttgaacaacatatttctctttaccacctttttgaaccctttttgcaatttaaaaatacacgtggaaaccaattttaaggctcaccttgttaagacggcgtgaatggtttttttttttcttaacagcccccctcccctttttaggggtgg

SEQ ID NO: 14316 - DNA, 456 bp, Glycine max
  Clone ID: jC-gmle01810077c02d1
ctaaaaaactatccttggcaaaccttgttacaaccaaacgttaatcacgagtttaagggaacaaaacaggcacaaaggcaataattttgcctaaaagaaacaatttcacgatacaatttaagcttatttttctaacctcaaactttaatgcattatttttctaaattttgttacctaattaactacttaagtttcaagtacgattacccttttttaccattttgttccatttttgccattgaagcatacaagttgcaaccgaatttgatcattactatgttttcacggtatagatagctctatttttcatttaccgtcacactctaataatcagggatggcaaaaaagcggtatcctttagcacccctccatgcataatatgcaattcgagtctcataaaaacctgggagaaagctaaggaaccctagggctaaaaggccatatgcttgaaacttt

SEQ ID NO: 14317 - DNA, 105 bp, Glycine max
  Clone ID: jC-gmle01810077c03d1
atctaacttctgaacctgtatatgcgttatctttatccacaccacaatcacatctaaaaaggggagtcattaatactatccattagctcccattgaccaccacac

SEQ ID NO: 14318 - DNA, 594 bp, Glycine max
  unsure at all n locations
  Clone ID: jC-gmle01810077c04d1
tganncanaatgcccctgcttcatcgaanaccccgaatatttcgcgcgccgacccctcactaaacggcggccgccctcatctttttttttattttatgccttttttttttcttcgactcattcacttctttataggggggcgtttatattcttattcatagctttttacgatcctccaatccaaaagcccctccaaccacaaatgtttcccccccaaaatcccacaaattctcccacatagaaggcccaacccacaagggaggtagagaagcgccaaacccagcggcccgatttaaaaaaccgggggggtaaatatgctgtccacaaccatttatgaaataacgccttcctcaagcgcatatcattttccccgtgcacaacctgggacctataaaataaacaacgggcccccccaacattagatggggaacaaaattaacacaccccttttttctctgccgtggcgccgaaaaaacctctcccaaaaaaaccttggtgtaaaacacccccacttggtgctacacccaaaatgctgtcaccccccatcttaaaaaaacaaaaaacaactttttttttaaaaaaaaaaaaggcccc

SEQ ID NO: 14319 - DNA, 184 bp, Glycine max
  Clone ID: jC-gmle01810077c05d1
acctttaaattatataataaaaaataaaaattttttaaaacagaaaaaaaaaaaagaaaaaagggggaatataaaagaaaaataaaaaaaaagaaaacataagataaatataatagaacaaaaaacaaggaaaaaaaaaagaaaagaatatatgaaagtacaaaaaaagaagatagaatataag

SEQ ID NO: 14320 - DNA, 545 bp, Glycine max
  Clone ID: jC-gmle01810077c06d1
aaataaaatctgttaaacaaaggcatccaattctctgcttggagtcaactatgtgttctgcttacatacaattacatttctagtttggttccttattctaattgcagaaacaaaagaacagtaaaagctgcaggggaacaaagttacccaatttcaacatgggttggggcttatacataattacatcactaggtgaagggtaaaaagtaataatctccccctgtcaatatctagttattaaccatctaaactaactacgtgattacatattggtacaaatttccactataatcagtgagtaagaattatatctgttcctaataccatggccctagattttctgactacataatgaatacagtttgcatcatcatgtcatgttctcttgaaaaatttaccacctttctttcccatgcttacacccacatcagattcgaaaagatattttgtgtctggcctccatttcaactctttgagagtggaaaataaggttgcaagttcaggagagatatcactatcttctatgtttttacatgagtctactc

SEQ ID NO: 14321 - DNA, 537 bp, Glycine max
  Clone ID: jC-gmle01810077c07d1
atgggtaatattatttattcaataaatttgattgattgatgcgggttgattttctattacgataaattgaggaaacaatagccagtccgatagctgcttcagcagctgcaatagctataacaaaaattgaaaaaatatttccttttaattgtcgactatcaaaaaaatcagaaaaggttacgagatttatattaactgcattcagtataagttcaagacacataagggctctaaccatattccggctcgtgatcaacccatatatacctatagaaaataaataggcactcaaaacaagtgcatgctcgaatatcattgaccaactccttatcaatttttattcatttcgatatgaacaagaagaattcaacggatttgattgactaatattataagtctacaacaaaataaagtattcgcaataaaaaaaagattttatacagaaatattcgttttcattcacatagaattcaaccaaaataaatgtgaaaaaatctaaaacaaaaaaaaaattgaattttgggtttggttatatta

SEQ ID NO: 14322 - DNA, 548 bp, Glycine max
  Clone ID: jC-gmle01810077c08d1
gcaataaactatttcaatatttttttactattttattttaggagggatgaaaagagcagtaatggaattgaactcatcagttcaagaacttttcgtgtacaatgtaagggaaagtcctgatacgtacatattttctgatggttccatctttaaaaataaactgtgcctcaacgtatcaaaccataaagtcaataagccatatccatacaacaagcatagttacgaatttctgtgaacattattttctttctctcttctttggctgaaaggattatgtttattgttgtactatatagacgcagccattacagatcagtgtttgatttttggcttcttcacgatcatcacagtgcagtgagcatgatgagcacaatagtcactgacactacctaaaaccggcctttttatagccccataaccatgacttcccacaaccaacattgcagcacggtgcttatctacagcatcacaaagaacatttctaggatcacctttcaccacttttgctgcacatcattaacgattgttgatgcaagtttttaacggtt

SEQ ID NO: 14323 - DNA, 396 bp, Glycine max
  Clone ID: jC-gmle01810077c09d1
acatatgcacagactcctggtgtgtttcatccttgggcaattcttgattactttctgcaattaaaaatttttttcaacgtgaaacactgagagtatacactatgctaaacttttgaaaacacacactatacgttctctctatttgaaaataggagggacgcaacgtgagattcttactgcccttgtagacgcgaagcgctccccatgagaaatcactcatccaagcattggggaccatgaagtgctccagggaatggcacatgtcattggggggtgatgaagaacctgcactcctgttaaagactacaccgcacgccttggtggctgttaaccaccaaccctgggattcttaatgcgctatctgaaggccagcaaaattcgatgcgcacattgcca

SEQ ID NO: 14324 - DNA, 374 bp, Glycine max
  Clone ID: jC-gmle01810077c10a1
gataaaagggtgcaggaactgaagaagaaaatgaagaagtgaaccctctcaatcaaaccatacatatacaggaccgaagactaggtggggtccaaaactcatgtctatatacgattggaaacacaaccaccgacctaaaccttacaaggcatcattacgcgaggtgcacccaactcattgtgaactgtacggttcttgtctcactctaaagaagagccacttctggagaaacagacactcctactgtggatgccgaacttgcagaagataatacaggagcacagagcactaccgatgacagcacagtctgctctccatgtgctctggacaaacaacttaatacggaagcgcatgagactgctgctacctgtgca

SEQ ID NO: 14325 - DNA, 417 bp, Glycine max
  Clone ID: jC-gmle01810077c10d1
acatatcacatactacgggggggtttcatttcttgggcgattctctgattaccttcatgaaatttcaaattttttgcaatgggaaacacggcgattatacaatatgctaaacttttgcaaaccacctatagcattctcttcatttgataataggagggatgcaacgtcggtatcttactgcccttgtagatccaaacgctcctccatgagaaatcactcatccaggaattggggaccatgaagtgctccaaggaatggcacatctcattggtgggtgataataaacctggacccatgctaaagacgagccagcccgccttgagagctgttaccaaccaaccctgggtttcttaagccgctatcagaatcccatcaaacttccatgcgttcatacccaagagggttacttcattttgg

SEQ ID NO: 14326 - DNA, 368 bp, Glycine max
  Clone ID: jC-gmle01810077c11a1
acaattttcgttttttatctgaacaccatctttagagcctgcctcaaaacgtcccttaaagatcgaacttggccggggaaaacacggcggcttgtgaaagtgcctccatcaacaggagcagctgaacattctcccatccgccgtttctttatcctaatgatccttgtttattcctatacgctcgacggtatggtcctttactccgttatagacccatgacgagaaacgcatgccattgtgggagggcggctctctgttacttcttacctgcgttctgactgtaccccgcatgaccaaccgagcactgggcgctaactttaatcggccgccataaccagcgctgaatctctgcgagccattgtcagcaa

SEQ ID NO: 14327 - DNA, 466 bp, Glycine max
  Clone ID: jC-gmle01810077c11d1
tttatttttttttttacattgtcaatattaagacattatttaattacatcggaaccagagagtttcattacaaataacaaaatgaggcaaaaaaagcccaccatttctttcctaataaagctaaagctatagctatagccattgctctgacttattgctcatttttaaagccttgaaaaaaaaagtgcaaatactaaatactaaacacatgatacaaacacacacatgaaagaaaaaaacttagtagtaagcccaggtccaaaggacatgatcttcctcaggaaatccaaaattacaagaactttcaggtgggtcggagtaatccacatcttcttcaagtttgggaaagaggtacgaagggtagagactcttgctgaggttatcttcttcatcttgtgacatatctgattgatcaggctcaaacacataagaagaatcaccatgccctaacagcgcagagtgaact

SEQ ID NO: 14328 - DNA, 579 bp, Glycine max
  Clone ID: jC-gmle01810077c12a1
ggctcgagtacaaattctctgtgttgtgttgtgtacttgtgttaattgtgttgttgttgtaggaaatttaagtgaagagagaatgatgatgaagtctgctatgtgtgcattggtgcttgcggcactggttgtggttgaagtggggcccatggctgaggctgcggtgacttgcaacccaacacagttgactccttgtcttccggcaattaattcaggttctgcaccttcgagtgcttgttgccagaagctgaaggagcaaaagccatgcttctgtggctacctcaaaaaccctagcttgaagcagtatgttaactctcctaatgccaaaaaaaccgttagttcttgtggtattgcctatccaacttgttaagcacctcttatatatatatataaaatgtgtgaacaatatatatatattgattaaaaaatagtttaatttatatacacactttgatcctataaaaacatcttgacacaagcattcaatagaatttcaccactttatcatgacattttactataatgatgtggtataaaggaaatcctggtgaatattttgataagatgctttatctcatg

SEQ ID NO: 14329 - DNA, 559 bp, Glycine max
  Clone ID: jC-gmle01810077c12d1
agaacatcattatttctcaatttatgtggctctttaaccataattccctggatacaacatgtatactagtgtatacaccatattcaaagatagctaataaatacttgactgtataattaatatcacacaaacgtaaagtggcaatatatagtgtaaatatatataagcttaatttatacacagaaaccatgagtataaagcatctttatacaaaatattcaacaagaatttactttattaccacatcattatagtaaaatgtcatgataaagtggtgaaattctattgaatgcttgtgtcaagatgtttttataggatcaaagtgtgtatataaattaaactattttttaatcaatatatatatattgttcacacattttatatatatatataagaggtgcttaacaagttggataggcaataccacaagaactaacggtttttttggcattaggagagttaacatactgcttcaagctagggtttttgaggtagccacagaagcatggcttttgctcctttagcttttggcaacaagcactcgaaggtgcagaacctg

SEQ ID NO: 14330 - DNA, 433 bp, Glycine max
  Clone ID: jC-gmle01810077d01d1
caatagtggcgaattctctttttcgttagatgtctttacctaataaattttgtgtggcgtgaatttttttttcttcctattaaagaatggttcaaagttcttcatttgccctaactggttttaggggtttgcccaagcatttccatacctgattttttttttaaaaaaaaatgctcgtattgtattaacaataaaacaatttcctggagtcaataagttcgttcacttagcattgcttttcttgtgtgaggtaattattagggcctttttatattataccaagatttttaccctattgattccttaaagcattctggggtttgtgtttcctctgtaataacaaacctttgaaaggagaaagacagttttccaaaaggtggattttatttattgaaagaatgccatatggattcacccctgtcatttgagggtt

SEQ ID NO: 14331 - DNA, 533 bp, Glycine max
  Clone ID: jC-gmle01810077d02d1
actcgggggttatttttgattttgcaaattacacaatcacagccgtacatcacacgtgagctgggccttttccaacttaaaagcagaggataacattggcccatgacgcaacacatgcaccacctaataatcataattttacatctttacatacaaaatacaaagactttaaattaaaattaaaaaaaaaaagataaacagatcatcttgatgaaatgaaaccgaaacccagaaacattgttttgattttttttgttgttcccaacttgattaagcatgaacggtttgattgaatcacttggacttgaagggaatggccctgattacgacctggtggtagagtgctgcaagtgcagcaccaatgaaaggtcccacccagaagatccagtgatcattccaaccaaggtccttgttgaagatgatagcagcaccaaaactacgagcagggttgataccagtgccggtgatagggatggttgccaagtgaacccaaaacacccgcgacccaatatgcaaaggtgccaaaatgggga

SEQ ID NO: 14332 - DNA, 554 bp, Glycine max
  Clone ID: jC-gmle01810077d04d1
ggttaaattatttttttatcattatataattataaaatacagaggcgggttattctctcatgaaaggtggatcatcatgttccaaattaacctttcaagcaccatacctacccacccaatcaatattagtaaattgcaacaagaaagtttaaattaggcattacgtggaacatcataaaatccatccagggaagaaacttgacatctacacaacaaatctaacgcttcaaggagagagtccatagcagaaccgaaccagctaactaataaccgggtaacatttgatagccattctcacaaaaaacataggccactctaaaacactctttctagcctaaagatcacacaacagaaaaaccggatactcctaaggaggagcactatttctacaacttaatgctacattgcaggatgtagcataaactctctgaccgattttgtacaattcctcaaagatcacttctgtccagacctagatggtcgctgcaaaaacttgacggcacaatcgagagctgcagccgcccagtccattcctcgcccggcttcaagttcac

SEQ ID NO: 14333 - DNA, 459 bp, Glycine max
  Clone ID: jC-gmle01810077d05d1
gttacaatgagtgtgcctacaacaaatataaatggacaataaacgcaccatggtgcaatcccaaccactaattgagcacactcgcacgagcgagaatattctcaccaggacatgaacggtggaaacgcttgcataatgatctgatttacacgcaccacatgaacatgatgttgcagtatagcaccaccagataaacatatctagagagcgcgtgggtacattctaacctaacctgtacacgagggcgggaaatatcctgtacaaaggcacgctgacattctcccttaaatgaatgcgcggttacaccaaccgactcgcactccaatttacgagcagcaatgatcaaccacaaaccgtcattgcgcttgacaatccagatcggagtgttgtactgcgcaataaattgaccacgcccgtgctgggactcaggccagggagacctactcaggctcgcggtga

SEQ ID NO: 14334 - DNA, 499 bp, Glycine max
  Clone ID: jC-gmle01810077d06d1
aggtgcctccatcatatatattaggacaataaacggcccaaagtgctgtagcagaagcaatatgagttctttcgtacaaacgagtataatcacaaatgtgcatctaagatctatgaatatgagcaaagaactgcattttatgatgcacataaacagcatattggcatcttacactagcagtagtttctttctagggattgcgtgggttaatcctatactagttagtatacttgggaggcaactatgctgtacagtgcaatgtttaaaatatttctcatttggtatcttcattatcagattctatgcttcctttttcttccatggtgttttcatccatcatgaacctccagctatcgccttcctctatttcccattgttttttcagttcataaatagctttggatgctgcggcagcaatggctgggttgctatcttctgccagtctctgtaatgcccccatccctgcattttcaagagtccacatggatggtgctgctgc

SEQ ID NO: 14335 - DNA, 535 bp, Glycine max
  Clone ID: jC-gmle01810077d07d1
attgtggtataatacgctgaaatacctcaccctctgggttcacacacaaactactaccattactcaaagcccacctgatttctctattttcttccaactttataattgagcaagggcttcaaaggattcgtttcacactcataccttgtttattctacaaaccaaaacacaaagataacgtactaaataagtgataggtgatgctgatttccaattgtccacaacttatatagtagcatcaagtccaagttctatggccttgagtttcaatgatttcaagcaacgaatggcttcatcaagaagctcgattgggtccttgtcctttccaccaggaactatgcattgcaggatgctcagaacatcttgaatcttcttctttctcatctttttattgcctgacaaggaacccattccacctgaccctctactactactgttggcaccactagagcatcttgattcggcatcatcttcgacttcaaagggtctttttttttcattcagagaactagcagtgtccatgaactgcaagttg

SEQ ID NO: 14336 - DNA, 442 bp, Glycine max
  Clone ID: jC-gmle01810077d08d1
ggtgtaatcattcttttatatttccgtaaatgagttagggaatagatacatgattatacaaaggctgtgtagcttaacccaatatgctagctacatcaccttctggcggtaaattagtgtaacaatgaaatggttcactcaattccatctcttggcatttttcacgcctttggacttctgttttgctgcctgaaaggcctgcatcttttgtttcttccgtgcctctttctcagccttggacatcttagatttggctttcactttaggagctttgctatcaagctcagcctcgcgttcaagttctctttccctagcatcaaaattcttctctaaataataatcgtaatcacctgcataatcctgtatggtgccatctttaatttctatcactctattaactatttgctttataaagtatcggtcatgagatactgtgataaca

SEQ ID NO: 14337 - DNA, 384 bp, Glycine max
  Clone ID: jC-gmle01810077d09d1
gaacaatatgacatacacctgggaggtaagatacaagggcaatacatcataactttaagcaattaaaaagtttttttaactagaataaatgaaggtatacactattctacatttatgaaaaacacactatatgatcaagctaacatgatattgaagagacatatcggtgaatctaaatttaaccttgtaaaccgaacgcttccacatgaaaaataactcgtaaatgcattggggaccatctatggccctgagaatgacgcatttcatttgttggagatgaagaacctgccctacacattcaatattacattgcccatacgtggggacggttaaccactaaccctgggattcgtaaggcgctatcagtaggccagaaacattcga

SEQ ID NO: 14338 - DNA, 383 bp, Glycine max
  Clone ID: jC-gmle01810077d10a1
agcgcactgaatgggggtcgaggttttattttttttttaaaagaaagagcatttgaataaatgaacacgtttatctggccgcactaaacgcaccgtatccatgctgaagaaaacaacacggttctctatacaactataaacccaacccacacccttaaacttagaaggactcccttctcggttgcttccaaagaaacgttacgctccgcgggcttagccacacttttaggacgtagaactcagacattctgtgtcacacacgctcaggttgatgacctcgttataagaccacaaagctgaaagctaacacctcaatagtacaccacagtgcttaatgagaactcctataccgaggaaacagatctggctgatgataagactgc

SEQ ID NO: 14339 - DNA, 499 bp, Glycine max
  Clone ID: jC-gmle01810077d10d1
acatatcatgactacggtatatttcatctttgggagattcttgattacattctgaaatttcaaattttctgcaatgggagacacggcgataatacaatatgcaaaacttttgaaaacgacctatagcattctcttcatttgataataggaaggatgcaacgtcggtattttactgcccttgtagatgcaaaggctactccatgagaaatcactcatccaggagttggggaccatgaagtgctacaaggaatgtcacatctcattggtgggtgtcataaaattgagatccatgctaaagacgagccaacaagccttgataactgttaacaaccaagtttgggttccttaatccgttctctgaagccatccaaacttccatgcgtacattcccaagaagggtactacatttggtggccaaacaacagccaaggacttccaaaagaatgggattattacattgatcaatgggatgaggagaaaaagatagttgagagctttt

SEQ ID NO: 14340 - DNA, 344 bp, Glycine max
  Clone ID: jC-gmle01810077d11a1
ggctcgagtacaaattctttgtgttgagttgtgtacttgtgttaattgtgttgctgtagtaggaaatttaagtgaggagagaatgatgatgaagtctgctatgtgtgcattggtgcttgaggcactggttgtggttgaagtggggcccatggctgaggctgcagtgacttgcatcccaacacagttgactccttggattccggcatttaaatcatgttctgcaccttctagcgcttgtagcccgaagctggtggagcaaaatccatgcttttgcggctaccttaaaaaccctaacttgaaacagtatgttaactctcctaatgccatgattgccgttagttctt

SEQ ID NO: 14341 - DNA, 272 bp, Glycine max
  Clone ID: jC-gmle01810077d11d1
agaacatcataatttttaaatttatgtaggttttaaaccataattccctgcatacaacacgacaactagtgtatacaccatattcaaagatagctaataactacttgactgtttaataaatattacacacacgtaaaggggcgatatatagggcaaatatttataaacttaatttattcacaaaaaccatgggtgtcaaggatatttattcacaatatgaaacaagaattttcttttgttccccatcattatagtaaaatgccttgaaaaat

SEQ ID NO: 14342 - DNA, 559 bp, Glycine max
  Clone ID: jC-gmle01810077d12a1
atcatccgcagctgcttttattcgcaccttaaacagtgagccatggccgtcggaaagaacaggcgcatctccaaggggaagaagggtggcaagaagaaggcagctgatccctttgccaagaaggattggtatgacattaaggctccttctgtttttcaagtgaaaaatgttggcaaaaccctcgtctctcgtactcatggcaccaagattgcttctgaaggactcaagcatagagtgtttgaggtctccttggctgatcttcaaggggatgaggatcatgcattcaagaagattaggttgagagctgaagatgtgcaagggaagaatgttctgacaaatttctggggaatggatttcacaacagacaagctgaggtcattggtacgaaaatggcaaactcttattgaagcccatgtggatgtgaagacaactgataattacacattgaggatgttttgcattggatttaccaagagaagagctaaccaggtgaagagaacctgttatgcacaatcaagccagattagacagattcgtaagaagatgaaggagatcatga

SEQ ID NO: 14343 - DNA, 309 bp, Glycine max
  Clone ID: jC-gmle01810077e01d1
aatacggtacacatttttacacgacatgtttcgtgagctgcaaaatgagaaataaacttacactttaggctcaccgttggagggataaaaaaatgatatgcaaaaaccaaaggtagcctttatgttactgcatatttcaaacctcaagtctaagttttcccttccaaacgaattctctaacaaccttgctctacaccttgattgctgattgctccaaccctatttcgcttggcctacatggaacatctttcgtagggtttaaaacctgttccatgagtcataagctattcttgtacaagccatatggtt

SEQ ID NO: 14344 - DNA, 441 bp, Glycine max
  Clone ID: jC-gmle01810077e02d1
tttttttttttttttttttttttttttttaaattcccaactcgtattcaattcttattggcaaaactatccagttaaaatatttgttgtacacctccaaaccttcttcaaaaaaagaattctggaagcccttccagcacatccaaaattatgcattaatgaagtgctatacccatcgatgattaaattggacgggaattatgatgtaccacaaaatgtgtcaccattaaaatcaaaataacgagtcggagttttaagtaacttgggacagaacttaaaaaaaaaaactgggctaaacgagaggcgcatccttggtacattatggcgcttaacacttagcctgctttcaggcatatgcaaagtattagaatgttggttcagaacatccatccttggagcatgcaaagaccaagcgagtataattattcatgctgtacccaac

SEQ ID NO: 14345 - DNA, 174 bp, Glycine max
  Clone ID: jC-gmle01810077e03d1
gatattggcccactctttaaccaatctttttttctgaactgtattctaacctttaatcataggggaacctggactacaaacgcagaggtcaaaccctgttgcttacctgacgaagatctatacgcttttactggccaatattaatcttcactgccactgaaaaatggaaaggat

SEQ ID NO: 14346 - DNA, 506 bp, Glycine max
  Clone ID: jC-gmle01810077e04d1
caaggctcgcgtttttgatatcgaagccggaaacaaattcattgacgtgaagcagtattcctgttacaacatttccaaaatcaatatgtctcctcaattatgagggatgttcaaatataaacacaaaatgagattaattttatactagagtagttgtttatccttcgtatactgaggcaaagcagatactttgcagataggacataagttcctcaaagataaccattttttaatgcagctgacatggtggtcatgcccacatgttttaagtgttccaacatcgtccatgtacttgtactcttccagacatattacgcagtttccttcgtctagactttgctcaaatgaacaatatattgttaccgtcaaacatttgttaagcgaatcctcatagattcctgtgttcacatagccaattctttcaccaagtgcaagttgttcctcataactcatgttatctacgtccatgcttatgtttagatgctgatctagcatgttcctggaac

SEQ ID NO: 14347 - DNA, 426 bp, Glycine max
  Clone ID: jC-gmle01810077e06d1
ggacgaaggaacccaacaagggggttattcatattttttgggacataagcttcttattcacataacaccaatagttttccatttataagccgagattgacgatccaaattacatatttataagagaccaaccaaacacaaagcaaccaccgcttaaaacacccggaacaaatcctagaacatttgaatttgcaaaggggggccatgactactttattttaaaacttcaaacacaacacatacttattatttattgatacatgtattacagctatctttgcttgaaggttatgcatgttgatcttacttggaactgcatgggtctcaagtgcaatttgatccacagttgcaaccaccgttcttaggttgaacacccattttagcacccttgaattgggccttaaccggcccaacacccaaaactaga

SEQ ID NO: 14348 - DNA, 362 bp, Glycine max
  Clone ID: jC-gmle01810077e07d1
ggagggaaaacccaatttttgcctcaatcttgtctcaacataactgaatctcaccctccctttttttttttggataagtccatacatccatagggtttttttcattaattatcatgcaaaacagcctaatcacatttgccaaaataacataaaataaagtggaattggggaaaacatgaaaaaaaaaagaaaatgatgattttgatgatgaaaaaactcaatttggtttccttgctctacccatatatgtatatatattatggcagggtcaattcttaatcttttgcaactactggaatcttagccttgctggtttttacctgctcatataaatctcttttcttcaaaccaactttggtttg

SEQ ID NO: 14349 - DNA, 321 bp, Glycine max
  Clone ID: jC-gmle01810077e08d1
aaatataattgttcactggacctccaaatgatcaacgaagggggcccattatcaaaaatctagtcactgcctctccacctaggaatcttctctttgcaccaaaaacattggcactattctgaatgtaacacgcacgtgccatcacaactactcacactgggatcagtacaaccttcaagaacagaaatattaacttgccaagtgtgctttgcctccaattcaggaacggacgaacgcatccctgtacctagcatcctagttagcatttccaagtgctgccttccttaagtgcttgaacatcaacatggacatctcatgaca

SEQ ID NO: 14350 - DNA, 503 bp, Glycine max
  unsure at all n locations
  Clone ID: jC-gmle01810077e09d1
attaaaattgaccgcgatgattcgcaaattgcaactgggatcataatatataattacctggcctttacataaaggacaaatgattgggtcaacatacacagcttaaacccacttgagagaaattacaatttaacaaaagaatacaacattttctttttcactaaaaaacaaaaacaacaaccgggtatacacgaaaattcatcaaggaaacctcatcatcatcaccatgatctggtaattaaaactagattccgaaaccagccaaccttcccagaatcccttgtctgtaaggcaagaaggttctcttcttcatatcctcggactcttgtctcttcatggcgtagtgcaactcatgcgccgaaagcggttcctttcttgatctcgacgaatccgaggatctaaaactcgacgaccctttaacctcttcgntactattcttcttgtagtacttcttcaatgcatctttgcttgaacctctcccttcggaggcactacggaacaac

SEQ ID NO: 14351 - DNA, 426 bp, Glycine max
  unsure at all n locations
  Clone ID: jC-gmle01810077e10a1
ggggcnnaattggcncggatccgctgagaaaactntcgacgtattttgcgcgcgtacgtgctctctagattggggtcgagcctgatacttgatactggaaaaggaacttgtttttcttgaatagataagtactaagcgtgtcgaagtatgatgccacacctatggacccggtgcatctctatgaggaacaaatcatacatcaatgaatcgcttctagcgatatttcatagaggctgctcacactatctgatcttaaggtaccaaagaaaacctgaggtgcggtccatggtcaatatttctacactatgcaactttttcaggttagtggacagcgttggttcgctccatactcgctaccaggggacaaggaagcatgtgttatgcaacagtttacacacattgtgccattctgttggctaatgctat

SEQ ID NO: 14352 - DNA, 479 bp, Glycine max
  Clone ID: jC-gmle01810077e10d1
aaccaaccaagcgacaacgtggttacaatggggaaataacttccaaaagacattcgaaggggtgttgcgttaattcatttactataatacaaaggaagatcggcaaagagaatataggaggactgaaggagaaaaaaagtaacacctcagtcctccatttgtatttgacaatattgtataaggggcaactatgccagcagaagaaagaattattcagctttccctaaaaggtaaagcgaagataatctccattattcttcatagttcttgggttgtatcgatagttgtactcttccttcacattgaagagaacactgataaaactttttccaagtcaactttggctaccaaacatttaataattgttctcacgctcattaagtcatgctttagtaccaaaaaatgattgctggaacttggtttttgttggagtactatgcttaactgtagttgtgcttccaaaggcaaacttattaggc

SEQ ID NO: 14353 - DNA, 556 bp, Glycine max
  Clone ID: jC-gmle01810077e11a1
atttggaccaagagaagagaagcggtggtttaaataataaagtgaagaagaagaagaagtggcttgtttaaggaatggcttctctgctcctccctccaactccaactgctacttcttccacagttaaacacaacaaaatccaaacgaaactgaaaccaaacagcaatgctcatgcagctacatgtaatttcttcttatcatcgaattcaaacgcaaaccaccgtttcaactctgcaaagtgccatgcattgttggatgacgtggccaaagggttgttggagagcagcagcagcgttggcgtggaccagttccagagactgaccgaaggcttatcccacatgcagaggtgggagatcctcgtgtttggaggcttgacgtggatttacctgactgcaagaccaggtgttcttgttggtgccattgatgcgtaccttttggcacctttttcactgggtttggacaacttgtctggaatgaggaacttggagaggagtgactttgttgttggagacaagctcggtgaaggggcctttggtgttgtctattcgggtatttt

SEQ ID NO: 14354 - DNA, 458 bp, Glycine max
  Clone ID: jC-gmle01810077e11d1
actcaatatataatctcatcttggatgtgaggatgtaagtttcgtctaataagtgtcatagcaagcagctctacttagctgtatgtcctgtttcaaggcatagaacttaagcttaggtattacaagtgaggtcccaccaatcttcaagcattcacctcttgtagaaagaaaccataggagacaactgattaagctcttaaaaccacattgtgctcctgcttgagattgttgtcatataggttacacaaaagatgtaaatgtatactgcagggaaaatttttccttctgtaagctttgatgtcctcaggcttattgcttgcctgaaattgagtagaaaatctccccaatttaaacttggggaggaaaacccaaaaacaaaaaaaaatggaacaaaatcttataattgatggttgtcaattcacaaactatgcaggcttggtgtgggacacctttgaatt

SEQ ID NO: 14355 - DNA, 486 bp, Glycine max
  Clone ID: jC-gmle01810077e12a1
ggaccctgaaacctgtgctctcaatttttattggaggcatcctaccatatggggcagagatcatcgagctcgttattatcctgacatgaataaggctgaaccagctctattacatctatggcatccttctaatagtgcccgtgaacctaatgatcacctgcgccgagattaccattgtgcagtgctactcccaaccgtacagtgaggataacaaggggcggtgggaaccttatctcagtgctggatgctgtgcgctgaacctgttcctctactgagaactttactggaataccagatcggagataacagagctggagtcgcgcacccggtacttcagtttcatgacactcgaaacatatgccttctatgtgtggacgggaacaaaaagcatctatgcacgcttatgcgttgatactggatctactgcgaccgagaagagtgaccgatttgaagcacacatacgtggactaatgcagcgcgaagcaa

SEQ ID NO: 14356 - DNA, 336 bp, Glycine max
  Clone ID: jC-gmle01810077e12d1
gcacgcgttatgcacacatatatgaatcctgcagaagcgaccgcactaatatcggaaaaagcatgacacagaataacaacccatctactgccctaacaatacacaaaaacgggcactcaaaggtggcgcggggggaaagggctcaaaacctaagtggatgctactagttggagaactacacccaccgaacctaaaatgaaactaaccggacttttaactaacaggagatagctgacccaaagagtgttagggaacgagttgttgctgcatgcatatatatcgctttagatacatatatctagatcccgaggaaaagaggctcaagacgaattacaa

SEQ ID NO: 14357 - DNA, 338 bp, Glycine max
  Clone ID: jC-gmle01810077f03d1
atcattcccatctgctattacaacccctttttacaagcctccatcaaactggtctattaaacgggggaactttcaaggagaaaacatggcggttaaagaaagctccttatccaacatgcactaaatgacttcgcacccatcaacgctccttttagcctataagtgcatcttttttcctataccgccctttctctgcttctttgctccattattgatccttgatgagtcacgcatgaaatggtgggagtgtgtctaactgatccttcttgcgatcatgttacttcttccacaatgacgatgagtacatctacgaattctctaatcaaccctgtaataac

SEQ ID NO: 14358 - DNA, 390 bp, Glycine max
  Clone ID: jC-gmle01810077f04d1
aattggtcggggccggcccgaaacaaagcacttattccccggaaaaatttgaatgaaacaaaattaaccgcactcgttaatgacccatgagccacaccaattaatttgctaacatttttacaatctcccccacttagcaacaatatgacccatgagtccaacaacaagccatgaatggtcctgaatgataatggggaacaacgcctcgatggccatttcgggcgattactggattcgccttttaaacaattcccctttttgggtaaaagacgacacacccccgagggcaaaacattacaaagaagcgagccaataactaaaatattttagacctgaaacaagaattaacaaaatccactcccaaggaacgaccattttcgtgggagtctt

SEQ ID NO: 14359 - DNA, 204 bp, Glycine max
  Clone ID: jC-gmle01810077f05d1
attgtgacatcttttgattctcaaatttgggcacaccttcaatcaaaatggcgcagaacctagccaggacccaaaaaccattatcaaaaaccttatgcaaaactattatgccaaaacctcttaaacaaaattgttttcccctaacttgtccgtcacctcataccgcttccgcccaaagtagaaaacaaacaagtatcgccccca

SEQ ID NO: 14360 - DNA, 461 bp, Glycine max
  Clone ID: jC-gmle01810077f06d1
aattgaatcaacatttaatttccaaattggggcacacaatctaataaaactgtacagagcttaatttccacccaaaaataattttaaaaaaccggaagcaaaactattatgccaaaagctaattaaaatgagttttacaacataacaggggaatcacctaaaagcgtgtttcaccagaaataacagttcaaactgttgcccccctgtgaagaacgaacaccatatttgatcaagcaccaacaactcaatgggcgttagttatactactttctgcatttataactggattgaagtatggatgggccatggctttttttggaatacgacggtcttggggatcatagcgaaataacttgggaacaaagtcaacggccttagggccaggcaattgatgattttctactataatgaacatcccccatggcttgcggctatgcctctccataagtgctgcaagatga

SEQ ID NO: 14361 - DNA, 521 bp, Glycine max
  Clone ID: jC-gmle01810077f07d1
atattgagaaaatgttaggacagcactgtttggtaattccggggagagatcccagacaacaatcattctgggaggttccagagaaaatatacctagcagcaaaactttggatttatatatatatatatatatatatatatatattcaaggagagacacatctccccaatagtcttaagtttccaacaaaaacccaacaaaaagcacataaagcaataataatagggaagaaaaggaatggaagtccctttctgcctgctctcttcatagttgcagtgtctttacctgctgcagcaatgtttgtgtgcttgatcttcaacctgctgaagctagacattcgattcaatgctcggttcaccaaagcacttttagcagctgatgcaggagttgtaggtattgactcaacaaaggcccatagagcagaggagaagctacttgtagcaacatcttccacagtgctactttgattgttattgccttccgtgggaaagccaacagattcattacaacacctggggatga

SEQ ID NO: 14362 - DNA, 374 bp, Glycine max
  Clone ID: jC-gmle01810077f08d1
gcaacaaaggggggggcattaatagaaagttgatctgtacataattgctataaaactgattaggagcctctgttccagtataaaaccaaaagataagggggctcctattcatggaaaaatttggattcctaatttgctatacaaggatttacaaactttgtctacctcccgacaaaagaagcccactaagagcagctggagtttgacctctcacacttgataacccgggtattgttagagccacaaaaaccacatttgtgatacaacccggggaagcgtgaagtgcccttcccattacagtcatgggaaagtatgttctgacagcggtccttgtactttttaagaagcttcttaacagcccatagggccttaag

SEQ ID NO: 14363 - DNA, 475 bp, Glycine max
  Clone ID: jC-gmle01810077f09d1
agtcgaagaataagattatgagcaactgcgcacaggatatagttcatagagaatagagatcaaaggggtcgataacagagagaatatacagattctttttttgtgacatgaaaaatccttaggctagtagtaactgcgatagcatgacaagtatcaaaattacaattaagttggattcattcgacttccacgatctcatccaaagcatagttgtttgttgatacattggcatagttgactttgttgaatcgaaccacaacagggtagcgagtgttggggtcctgcacaacaataaaacaggaactgagtttgcataatgcatgggatggtagaaaattgagagggtatgcattaaagtgagtttaggggcactaacctgatcaacagcaaccactgaaccggtgcctttgtaccagtaagattccttcctaagaatcttcacctgttaattgtaaataagaattagaaactaccc

SEQ ID NO: 14364 - DNA, 202 bp, Glycine max
  Clone ID: jC-gmle01810077f10a1
ggagtatcaggacaagtttaattcaagatatagccctttactctgtatcaccttgtagcctgtcaattctattcccccatattgtaaagcagttgtgatttctatcaatacaagttttgaacaaaaccagctaaatacattatatatatatatatatatatatttttttttttttgaaaaaaaaaaagcataaaataaactg

SEQ ID NO: 14365 - DNA, 175 bp, Glycine max
  Clone ID: jC-gmle01810077f10d1
aaaaaaaaaaaaatatatatatatatatatatataatgtatttagctggttttgttcaaaacttgtattgatagaaatcacaactgctttacaatatgggggaatagaattgacaggctacaaggtgatacagagtaaagggctttatcttgaattaaacttgtcctgatactcc

SEQ ID NO: 14366 - DNA, 478 bp, Glycine max
  Clone ID: jC-gmle01810077f11a1
gtcacgtgcttctcttggtcaagactttttatttgtgcagattaggagcttgaaagcacttggacttcttaatacatggcttgtcaaatgggaactatgactctgaactggagattattaattacagagaatgaaagctctgaaaagtcatgtgtcaaccttgcaacttccagaatccacagttgttgctgtgagccaaattttaacgggctaactctaaaagcttgcatgaaatcttcaccttttgctgagagctgtttcctgtgaagaagagctgggtggaaaatagcttttgcattgaacacaggtggagtgtttggaaatggtgaccaacatagcttcaacgaagccagttccaatctcggtgggactcgattgggtaggatattgactggaggtggcaaacaacttctagaaaagctgaactcagctagaaagaacatccctttggaaggtattcctgctactttttggggtt

SEQ ID NO: 14367 - DNA, 461 bp, Glycine max
  Clone ID: jC-gmle01810077f11d1
aatgtaacagtttctccttcaccaagcacatgcggaatggtgcactgtgcagtgtgcacagagccataaagtcattaagcaatcgtcatatatactattcacatactacaattacatgtacaccactagtatagaactataaggtagcaatagaagaagactacggtcaaaattatggcttaacagagttttatgacatacaacaaaaaattaaaaagacaaaacacggacaagattttgcgggttcttagcttcccaacttaaaagcatctacaaagagacctaaacatatgccagctttccagtagttcaccagcacttgaaaagactgcaacctcccagtccttgcggtaggtagctttctatatattagcatgccaatcccctcaattgcagccaccacaacaccagcaaccagaacataccaattaccggtttgcccaaggattgtagctagtgca

SEQ ID NO: 14368 - DNA, 80 bp, Glycine max
  Clone ID: jC-gmle01810077f12a1
gctgactgcttctcttgttctcatcatttttcttttgtccataaaggccgagatcacagctgtgactcctattacatgca

SEQ ID NO: 14369 - DNA, 187 bp, Glycine max
  Clone ID: jC-gmle01810077f12d1
acaataaatttgcgggatggggcactactctctttacactagaacttatttttacaaggctatacatctgtaaacactatgcattctattattacgtgtgcacctcacctctaaaattgtaactatgctatagactaccatagctactgcctcaagtatttaaagaaaccattattagattaccgaa

SEQ ID NO: 14370 - DNA, 532 bp, Glycine max
  Clone ID: jC-gmle01810077g01d1
ggtatcaataacacctccatttcattgaatgagctgattagggaaatataagtagttcaatgtacaggaaaagaacctcatgcatgtacaagcttgacgataaagcacgcaatcctaagcttttaaaattgcaagataatcatcgattatagacatggcggaagatcggtatccagaaccaaagagattgtaatgatttaaatagtgatacagcatataaaggtctctcctctcctcaaagcctggttgcttaggcatcacctcaaaataagaattatagaatgatcctccaaagccagcacaccaagacattccaaattctgcttcactgtgtccataataacatgcagggtccaatatgacaggctctccatttttgtcagaactgatgtttccactccagaggtctccgtgtagtaagcatggttctatcactacattggcaaacaagggtgtcatgcttttcaccagtctctgtcctttgtcataaatagttctgtcaccatactggtctaatgccaacttcaactgg

SEQ ID NO: 14371 - DNA, 376 bp, Glycine max
  Clone ID: jC-gmle01810077g02d1
gatttcagaattcataaaaagaaaaggatttttattaaatgaacactttaatctcaccgccgtgtacacaccgttaccttggtggggtaccttactctttcctctctccgcttataaacatcaccaccaaccttaaattttcaaggattactttcacggtatgctaccagcttagtgacacactcttcagtgctagccacactcttgcggacgtgccactctctgatgaattcgtcactcaatcactggttgatgaacttagcataggaccaataaagtggaaagataacaccatcgaggacaacacatgcactattccttctcctacgaaaagcaactcaaacatgcagatgagaagaatgctggtgcctttgga

SEQ ID NO: 14372 - DNA, 391 bp, Glycine max
  Clone ID: jC-gmle01810077g03d1
aaaccataatataatataataattttaataataattaaataataaatttaaaactagggactaatcctaagttttaataaagtacctacaccaatactaaatctacaattaaaacaaataagctaaagtgattatcatcacgaccataccacacctaattaaaggcaggggccgtgggaaagcgaaatgattatcatcacaaccataccacacctagttaaaggcaggggttgtggaatttacttaaaactatgtcataatcgtgaataccaaacacacctaattaaaggcatgtatactgtgtagcaagtttgcaaatgatttcgggttaaaaattgcaatggttccctattcaggttgctaacttgagggcgggcgatgctgctccagc

SEQ ID NO: 14373 - DNA, 511 bp, Glycine max
  Clone ID: jC-gmle01810077g05d1
ggttcaagcttttctgtcataccaacgagttgccagagtatgagtttgaattcgaagtttaattacaacacagagattccaacgttgcaacccgattcgttacaaaatgttacatggaattatacaggtagctattgaaacaaatatttgatttttttttttcaaggcaaaatcgattggggaataatgatgtttccaatgttgttgtgccatgggtcagccaagtgagcagccaagttctccaaaggtccagtgccgggataagctgattgttgaacacagaatcccacaaaagccaacaaagcaagacgtccattcttaagttctttgactttgtattcatggaatgttttagggtccttagagtatcccaaaggatcaaaagcaccaccagggtatttctttttttctgggtccttctccatgcttctttggggctccacaaaggaaattgcaaggaattcaatggccaaaatggtgggtagggtgccccatggaactggattgccta

SEQ ID NO: 14374 - DNA, 545 bp, Glycine max
  unsure at all n locations
  Clone ID: jC-gmle01810077g06d1
gaaagagcaaaattcttatataatataacaattaataataataaatataaataatatatatttgtattgtattatacacaattgaaaaaaaaggtctaaacgtaatttgatctccatggatatcatttccctctttaggttgtgaaacgatggatgttccatttcttcatgggcccaaatcccgagttctaataaattcattgagcagttctaaacgtactaaagacttcaaaaacgagcaaaagctaaagactaattactgatcaaaagaagaagaagaagaaagtctgggagagcattttctttcctttgtagctgatgaaagaacaaacgagaaagagaaagaaagaaattaaaaatataataaaaatgctgcaaaagagagtgtagctgctagcccaggtaggtggtgactttagatcaaactcgcatcttcttattattttgntacttcatctcaatttgtttttttatcactgccggtattgcaaagaaaggtccagatcaaaaagcattgaaggttcccctactcctctctgatcccc

SEQ ID NO: 14375 - DNA, 550 bp, Glycine max
  Clone ID: jC-gmle01810077g07d1
aaagaaataaagtgtaaattagggactagcaaagaatgaacacgtctaaaccaaaagtgtacatgcatatatcatcccttcttctatgtagaggacactaataattttgtccaagggacaatggtggatttaataaagaaactaaaattaccaatggccattaaaatttaatgcatatttggtttttaattcaacttatgcacaaattccgagatcaaatcaatgatcttcaaaactcattttgcaaaagaaagggtgaggatccttttgcaaaactcattttgatgcaaatgtctgtttgtaataactatccaaacatgcacttaatcttccccttcctctctattccttaggacagctccaaagtgttttactagtatgtctaccacaacaggcaccaagtccttgcaaggcacacccttcttatacacttgagccagatgtgaatcacttccaattctccctccaaggaaaatatccacaccttcagtggccttaccattgtcatccctagccatgcaccccatgaaaccaatgtcagcaacttgaa

SEQ ID NO: 14376 - DNA, 548 bp, Glycine max
  Clone ID: jC-gmle01810077g08d1
aaagaaataaagtgtaaattagggactagcaaagaatgaacacgtctaaaccaaaagtgtacatgcatatatcatcccttcttctatgtagaggacactaataattttgtccaagggacaatggtggatttaataaagaaactaaaattaccaatggccattaaaatttaatgcatatttggtttttaattcaacttatgcacaaattccgagatcaaatcaatgatcttcaaaactcattttgcaaaagaaagggtgaggatccttttgcaaaactcattttgatgcaaatgtctgtttgtaataactatccaaacatgcacttaatcttccccttcctctctattccttaggacagctccaaagtgttttactagtatgtctaccacaacaggcaccaagtccttgcaaggcacacccttcttatacacttgagccagatgtgaatcacttccaattctccctccaaggaaaatatccacaccttcagtggccttaccattgtcatccctagccatgcaccccatgaaaccaatgtcagcaacttg

SEQ ID NO: 14377 - DNA, 325 bp, Glycine max
  Clone ID: jC-gmle01810077g09d1
aaaaaagccccttttatttaacccccaaaaatggaaatgggaaaaaaaaaatatttttcacccctcaacaaaaaaaggttcccttttaaaaaaaacggggccccaaaggggcccgaaaaaacaccttatcccaaatttgaattttaacccaggggcaaacccccctgaaacaaacttgggaggggctttttcacccaaacaaatttatgccccaaaacacaagggggggaaggggccaaaattttttattaatacttccaaggggccccatgtcctttttaaacaacccaaaaacgaaaacccgaaaggtctttttaaacccccc

SEQ ID NO: 14378 - DNA, 508 bp, Glycine max
  Clone ID: jC-gmle01810077g10a1
ctctaacttttgtttcttaccatgaaacttttagtgggtctggacaatgatttacagaaacatgggcgcgtacacctatgcctacgctccgaaagatggcgaaacccttggtttttacgtccgggcgaggcctgcatgcttataactcaaaagttctgcacgcgatgctctacgggatgaccttgcaggaaatgactaacggggaggagcacatttactttagcttgatcctggcgtgggttgccgtcgctcttagcttctggaacgctttccacaccggcactacacttcacgatggtcggatcggcggtgcactcatccggcaaggggtttatgcacgtctacatcttgtccgatattcactaacgcgcagtgtgaccgggtttgattcttatcaggcgacacgaattgatactagctggtgcgactgcttgcttgggtggaggtgcgtactatacatgatgcgcattttgcaccaaagatggtgctttatagaacaccctggggc

SEQ ID NO: 14379 - DNA, 552 bp, Glycine max
  Clone ID: jC-gmle01810077g10d1
attattacttttagatttggaggaatttgtttattccagggggattttttctttttgttttcaaaagagaacaggaccaatagagaggatacaaaatgttacaacagagatttcagattttatctaatgggtaacatctatctccctctttcgttccaatttccattacccctctttagggatcgagagttctttctttttgtacatcaaccaaaattattgcctaagaacattgattaaaaaaaaacagggaaaaaaacaggttcttagttattttcctcatatctacttgtgttgttccattcttcgatgataatatttacgaatcaaccctggtaattccaatacgcttcaccgaagcgtttctaaacccatcattcaccgcagcctgaaaacacattccattcttctgattgtgcaactccatataactgctcacctccttccttatcatgtcctgcatcaccgtcagaaactctgcgctaaaattaaacggcgccatccccgtcggagataccgagggcaccttgattattgggagcatagggatag

SEQ ID NO: 14380 - DNA, 476 bp, Glycine max
  Clone ID: jC-gmle01810077g11a1
gcaaataaggcggaggcaggagatatattttcagaatgtggaatgactgatattcacatcggggagacaatagctgatgacgtatctgggaaaccactaccttcaatctaggcggaagaaccaacagggaaaatgtctatttccataaacacttcacctttcgcagaccgcgagggaaagtatgcctctactatgaatgaaagggacaggctctatcgtgaacttgagcggaatctggctatgaaagatgaaaatggtgaaacagcctatacattcgttacaagtgagcttggaacttggcatatcaccatacttatataaaacatgcgacaagaaggatattaattcatggctgagccttccaaagttatcaacaagaacgcggactaaaaactgaggtaaccgtatgacattgcgacttgaggggcaccacaagagcacatgggagctgttgttgaacttcttggcgagagacg

SEQ ID NO: 14381 - DNA, 550 bp, Glycine max
  Clone ID: jC-gmle01810077g11d1
agtaaaaattttatctcgaaaacttacacacaccatcgggggaaaccttgaattttaaacattgtaattggaggtcgatataatatacaaccatgacagttctctcagtagtgctaggaaagttgggtcaagggataatgcagcaacaccatgcatgaagttactaacaaaatctgagccaacaaacaaaacagaaaacaaaacactctatgactcaagctgagcataccagatgccctggatcttgacatcctttggagcctttgctcccaaatcagtgtcagatggttgaacactctcgaacacaccgataacctcacccgtctcaggcttggtcttggtgacactcaaggtgattttgcccttggatgatgaggcacttttattggttttcttggcaagatcttccttaatttctttttcaccagcaggcaaagcaactgcattgtcataacctgtggacgcaccacttcccttggggtccaagaaagaactttcaccgttggatgggactagaaacttccactaaagctttttggctttcctgatg

SEQ ID NO: 14382 - DNA, 412 bp, Glycine max
  Clone ID: jC-gmle01810077g12a1
gcaaataatgcggaggcacgatatatattttctgtatgtggaattactgctattcacatcggggagacaattgctaataaagatatatgggaaaccactaccttctatctaggcggaacaaccaacagtgaaaatgtctatctccataaacacttcaccttttgtaagccttgagggaaagtttgtctctactatgaatttaagggacaggctctatcatgaacttgatcggaatcttgctatgaaagttgaaaatgatgaaacagcttatacatttgttgccattgagccaccaactttgcatattaccatacttatataaaacatgcgaagagaaggatcttaattcatggctgttccttccaaaggtatcaacatgatcgcagattaaaaactgttggaaccctatgac

SEQ ID NO: 14383 - DNA, 336 bp, Glycine max
  Clone ID: jC-gmle01810077g12d1
ggggaaatctttaattataaacatttgttattggaggtaaacataatatacaaccatgacaggtctttgagtaatgctaggaaagataggtcaagggataatgcaacaacaccatgcatgaagttactaacaaaattttaaccaacaaacaaaacaggaaacaaaacactttataaattaagctgagtataccaaatgccctggatcttgacatcctttggagcctttgctctcaaatcagtgtctgatggttgaacactcttgaacacacctaaaacctcacccacattatgcttggactaggagacactcagggcgatttttgccttggatgat

SEQ ID NO: 14384 - DNA, 590 bp, Glycine max
  Clone ID: jC-gmle01810077h01d1
aaatcaaagtacattttaataaattcatatatttttttggtttcactaaaggcaagctatcaatactaaaaaaaacaagaaggtttacaataaaactatttccccaatccaatcctaaaaataaagaaagactaccttatttgttctttctaaagaaacattatgaaccgtaagctcaaccatttttttaggtttaagattacagacattctgtatgaaagacgatcagtaaaataacatcattataaaccacaaaacttaaagctaagtacttaatataaccacaggtttaaatgagaaccactagacagtgttaacagttctttcggatggtttggatacttgatcgagttgaaggtcaccactgctgctagaaccagtccctttgtatttataccacttggcacacaatataaagtaaccgaaattaacgacttctagagcagttataatgtaataaaaataatccaatctccccttattgagatcctgaggtaaccaattcccagttgaagatttagctgtcgccctatggataatagaaatcagcaaacttctcaaataacttgatcccgcgaggccacagaaaa

SEQ ID NO: 14385 - DNA, 164 bp, Glycine max
  Clone ID: jC-gmle01810077h02d1
ttgatacgtgacactgggtatggaactttttttccttgacatgaacatttcgaacccgctgggaggttcttaatacaccatttgatctcttttcaactctctcttggaaatagaaattagcaatgacttagttccagcgatatattcatgaggctgcccaccct

SEQ ID NO: 14386 - DNA, 446 bp, Glycine max
  Clone ID: jC-gmle01810077h03d1
aatattatatttttttttttttatattcatacttttgtatttttggggggtttatttattcttgtggcacctttattcttatatgtccaattgttgacaacacacaacacataaaatcaccatcttttttaaagaagcatagtactgtttgcaccacacgcaaatactactacagtttcttgaatccccattaattaaacctattttaaacaagattatttcacatgaaacagtcaccaccgttgggctaacatttttatagaaggaggtcataggagcttgttgaatgaaaccagcttcagttaacatcaacttgaggaacctaaaacttgagattggcaaagcattggggcaaaagctttccatgcacccggccttgtgttaagagccaactgaatgaaccccgtttaagaaaacctcatctcctggaacctgtaactccacat

SEQ ID NO: 14387 - DNA, 396 bp, Glycine max
  Clone ID: jC-gmle01810077h04d1
atattccttaaatttctcaaatttataaatacccaccaacaaacccccccttttaaaaaaaaaaccccccaccccaaaaaaaccccaaaaaaggtgtaaataatttttcccccccccccaaaaaaaaaacattaaaaaaactctcaaaaaaaaaaaaacccccccccctatcaacacccccaaaaaaaagccccccaaaaaactctttctcaaaaaaaaaaaaaaaaaaaaaccccccccccccccaaaagccccttttttcccccaaaaacccggagacaacaaaattcccccccccccccccgaaacaaaaaaaccccaaaaaaacccccccccccaaaaaaaccccctttttttgtggcaaccccccccctctaaggggaaaaaggggggccc

SEQ ID NO: 14388 - DNA, 545 bp, Glycine max
  unsure at all n locations
  Clone ID: jC-gmle01810077h05d1
gaaagagcaaaatacatatataatataacaattaataataataaatataaataatatatatttgtattgtattatacacaattgaaaaaaaaggtctaaacgtaatttgatctccatggatatcatttccctctttaggttgagaaacgatggatgttccatttcttcatgggcccaaatcccgagttctaataaattcattgagcagttctaaacgtactaaagacttcaaaaacgagcaaaagctaaagactaattactgatcaaaagaagaagaagaagaaagtctgggagagcattttctttcctttgtagctgatgaaagaacaaacgagaaagagaatgaatgaaattaaaaatataataaaaatgctgcaaaagagagtgtagctgctagcccaggtaggtggtgactttagatcaaactcgcatcttcttcattattatggttcttcatctcaatctgnttttttatcactgccggtattgcaaagaagggtccagataaaaagcattgaaggtttccctacttctctttgatcccc

SEQ ID NO: 14389 - DNA, 366 bp, Glycine max
  Clone ID: jC-gmle01810077h06d1
agtgctattcaaaaagagcttagcttatagtgtaaaatacaacaaataaaaattttcggtcataaaacttacataatagtgtgttctactccgagaaattttctaagctagaattgggcaggtaattcttttctttccagaaccaatatttctatgaaataataatccagctcaccaaaattctacttacaggttgactaatataacacagtgaatacatacacgtttgcagcagccgcagatagatgcataataaatgctacttccgcctgaaaccatttgaacatctggcaccacgcactaacttgaagaaccttgagctgctgcgcactttcaacaaattccatgcatgcactgctagacatt

SEQ ID NO: 14390 - DNA, 503 bp, Glycine max
  Clone ID: jC-gmle01810077h07d1
aaagaaatatttttttaattagggactatcaatgaatgaggggggtctaaaccaaaagtgtacatgcatatatcatcccttcttctatgtagaggacactaataattttgtccaagggacaatggtggttttaataaagaaactaaaattaccaatggccattaaaatttaatgcatatttggtttttaattcaacttatgcacaaattccgagatcaaatcaatgatcttcaaaactcattttgcaaaagaaagggtgaggatccttttgcaaaactcattttgatgcaaatgtctgtttgtaataactatccaaacatgcacttaatcttccccttcctctctattccttaggacagctccaaagtgttttactagtatgtgtaccacaacaggcaccaagttcttgcaagggacacccttcttatacacttgagctagatgtgaatcacttccaattcttcctacaggaaaatatccacacctttaatggccttaccatt

SEQ ID NO: 14391 - DNA, 460 bp, Glycine max
  Clone ID: jC-gmle01810077h08d1
acatatatattatattaattatgtactctcctttaaggagggggatattggaaaaacgcatcctaatatgttcatctcgtcttttgaactaaaaaaacgtgaagatgggatcatattacagtgtaaattacgttacccaatcatctttattcgatggatgatatatttatttgcaagtaagggatgtaatattaacaataaacagaactggccacaggctaacattattatttacaagaaccaaaacttgaggggggacatttccaaactaactcaaactataaaagctatctttgctaaatagaccgacactgccttggacttaatatggccactgctgtcacataacacctaaattagacaggacatgatcaagcaattgcacccatgaacactcttagtacatttttgacataatctacatatacactggtgcgcccattgcattaccaagagttag

SEQ ID NO: 14392 - DNA, 414 bp, Glycine max
  unsure at all n locations
  Clone ID: jC-gmle01810077h09d1
attcattaatttctattgaagttcgggggcagaaaccaaaaatacaggatgatgaaatctcaaaaagcaaaaacaaatgggaatgtagtttaagtacaaacaaacaaagtggggtggcggctacaaatgctttgcaaatttttcacacttagaagcctgggggcttgtaggcgaagaagctgatgcactgcacttggcgaacnttgtcgaattcgatgatacggatgaagccgttggggtatgcagttttagcctcttgaagctcctttaacacctgagaagcattagtgcaaccaaacataggcagcttccacatggtccagtagcgtccatagtaatatcctggtgacctgttgtgctcacgggacacgaaaccgtgcttcaactcgaattacaagcaaggaatccatccct

SEQ ID NO: 14393 - DNA, 516 bp, Glycine max
  unsure at all n locations
  Clone ID: jC-gmle01810077h10a1
tggggnnnnaatgccnttgagtcgatctgtacaacttctgacgtatttatgcgcgcgtacgagctcactaaattggggtcgagctctaacttctgatttcttacatgctttttttttttcgacgacacattcacatttcaaattggcgggctttgtatactatccattagctcccaatgatcacgaagccctgggcttcaccgacggggatggcgccgcccaataataacgcatattttctgtcggtgatgcaggaaatgataatgaaggacgcgaggagttatattgagtttcacagttagcggaatgtgatgagaaaacatgctgcacttaatgaggagattaagaacgccttcgtgaaagatataacaatctgccgggtcgcaactgaagtcttatgaattgagaacggaacatcacaacaagagattgtgaacagaattaaaaaccacgggggttccctgctcataactcaacaaagctattaggcaataaaaccgggtgatgtacagcgag

SEQ ID NO: 14394 - DNA, 427 bp, Glycine max
  Clone ID: jC-gmle01810077h10d1
attccaaggtgattttttctttttgttttcaaaagagaacaggaccaatagagaggatacaaaaagttacaacagagatttcagattttatctaatgggtaacatctatctccctctttcgttccaatttccattcagcctctttagggatcgagagatctgtcttgctgtacattaaccaaaattattgcctaagaacattgattaaaaaaaaacagggaaaaaaacaggttcttagttattttcctcatctctacttgagttgttccattcttcgatgataatatttacgaatcaaccctggtaattccaatacgcttcaccgaagcgtttctaaacccatcattcaccgcagcctgaaaacacattccattcttatgattgtgcaactccatataacttctgacctgcttccttatcatttcct

SEQ ID NO: 14395 - DNA, 593 bp, Glycine max
  Clone ID: jC-gmle01810077h11a1
gggacaggaacagcaaaccagtgcccattttttgatggtggattggactcatttgccttcaagccggggaaatacaatgccaagaagttgtgccttgagccaactttattcacagtgaaggccgagggtgtggccaagaatgctccccttgagttccaaaacacaaagctcatgacacgtttgacctacactctggatgagattgagggaccctttgaggtgtcttctgatggcactgtcaagtttgaggagaaggatggcattgactacgccgtcgtgacagttcagctaccgggaggcgaacgtgtgccctttctcttcaccatcaagcagttggtggcatcagggaagccagatagctttagtggggagtttctagtcccatcctaccagggaagctctctcttggaccccaagggaagaggtgcttccacaagttatgacaatgcagttgctttgcctgctggtggaagaggagatgaagaataactttgccaggaaaacaatttaagtgcctcatcatccaagggcaaaatcaccttgagtgttaccaatacaagcctgagacgggtgatgttatcggtgtgttcgag

SEQ ID NO: 14396 - DNA, 533 bp, Glycine max
  Clone ID: jC-gmle01810077h11d1
agtaaaaaattgagctcgaaaactcacacacaccatcaatgtaaaccttgaattttaaacattgtaattggaggtcgatataatatacaaccatgacagtactctcagtagtgctaggaaagttgggtcaagggataatgcagcaacaccatgcatgaagttactaacaaaatctgagccaacaaacaaaacagaaaacaaaacactctatgactcaagctgagcataccagatgccctggatcttgacatcctttggagcctttgctcccaaatcagtgtcagatggttgaacactctcgaacacaccgataacctcacccgtctcaggcttggtcttggtgacactcaaggtgattttgcccttggatgatgaggcacttttattgttttccttggcaagttcttccttatcttctcttccaccagcaggcaaagcaactgcattgtcataacctgtggaagcacctctttccttggggtccaagaaagagcttccacggtaggatgggactagaaactccccactaaagc

SEQ ID NO: 14397 - DNA, 500 bp, Glycine max
  Clone ID: jC-gmle01810077h12a1
gggacaggaacagtataccactgcccattttttgatggtggattggactcatttgccttggagccggtgaaatacaatgccaagaagtcgtgccttgagccaacttcattcacagtgtaggccgaaggtgtggacaagaatggtcccattgagttccaaaacacaaagctcatgacacgtttgagctacactctggatgagattgagggaccctttgaggcgtcttatgatggcactgtcatgtttgaggagaaggatggtattgactacgccgtcgtgacaattgagcaaccggaaggccaacgtgtgccctttctattcaccatcaagcacttggaggcatgacggaagccaaatcgctttagaggggagacactattcccattctaccgggtgagctctgtgttggaccccacgggaagatgtgcttccacagggtatgacaatgcatttacttttcctgctgggggaacagggtatgaagaataacttgccgagga

SEQ ID NO: 14398 - DNA, 445 bp, Glycine max
  Clone ID: jC-gmle01810077h12d1
agtaaaaattttagctcaaaaactcacacacaccatcaggggaaaccttgaattataaacattgtaattggagggcaatctaatatacaaccatgacaggactctgagtagtgctaggaaagctgggtcaagggataatgcagtaacaccatgcatgaagttactaacaaaatttgagccggcaaacaaaacagagaacattacactctatgactcaagctgagcataccagatgccctggatcttgacatcctttggagcctttgctcccaaatcagtgtcagatggttgaacactcttgaacacacctttaacctcacccgcatcaggcttgggcttggagacactcaaggcgattttggccttggatgatgaggcacttatattggtttccttggcagagatttacttatcttctcttgcaccagcaggcaaagcaactgca

SEQ ID NO: 14399 - DNA, 581 bp, Glycine max
  Clone ID: jC-gmle01810078a01a1
gatctaaatagattgttctactcaacaatatctacgctaaattcatcatcgtgagtgatgtttctgtttcttctgaaaaaggtatcacacataaatctagagaagtgttgacccattctcatctgcaactacaaacactctctgtccttgacagacagctgttccaaacccaacatcattcacctgctcccaccattccatttcctctttctttctcccacctctctcatatcttcagatccatcactctctttgcagaaaaaaaaggctttgatatttggaaatgtctgaagtgagaaacaaagtggatttcatccagttgcttggacctgacatgtcaatcaagattctcacccatttggatgacccttgtgatcttattcgggtttcttctgtttccagttcttggcaccgatttgttattgaacatggcctctgcaagcaactttgcttgaaaatgtttcctgaaatatctggtgttgctcatataattgagcttgacaacattattgaaccactaagcaacactcttggcagttatgtaagttgggagtctcataagagaaatcatagagtctatg

SEQ ID NO: 14400 - DNA, 525 bp, Glycine max
  Clone ID: jC-gmle01810078a01d1
cattgatcttctttatcaactacaacaggaccagtaccaagcggtgcacccaagagaaattgctcccaacgtctcacacccctctgcattatgcttgaggttatggtccgcaggcgtgacggattactcgagttgcttctcggtgatgatgttggagaagacatataacaatctgtttgagggcagtatttcaaggtacactttcctgaccaatgatgaattttgacatcaaattccggaaaaagcagtcgtcccataacttgaacatgagagatgcatatatagaataattcatccatttcttgcttttgaactctacccaacagctcaactagcagtacacctccaatgcacagaacaggttcaggtagcttgaatttttgcaagcggttttcttgaagcattggaaattcaggtgatgtatatgtccatatgaattgattattgcccaagacgtgattagcagccatgttgtccacaggactctctaattccattgggtgtttcgaatggcccattctgatc

SEQ ID NO: 14401 - DNA, 557 bp, Glycine max
  Clone ID: jC-gmle01810078a02a1
gatctaaatagattgttctactcaacaatatctacgctaaattcatcatcgtgatgatgtttctgtttcttctgaaaaaggtatcacacataaatctagagaagtgttgacccattctcatctgcaactacaaacactctctgtccttgacagacagctgttccaaacccaacatcattcacctgctcccaccattccatttcctctttctttctcccacctctctcatatcttcagatccatcactctctttgcagaaaaaaaaggctttgatatttggaaatgtctgaagtgagaaacaaagtggatttcatccagttgcttggacctgacatgtcaatcaagattctcacccatttggatgacccttgtgatcttattcgggtttcttctgtttccagttcttggcaccgatttgttattgaacatggcctctgcaagcaactttgcttgaaaatgtttcctgaaatatctgtgttgctcatataattgagcttgacaacattattgaaccactaagcaacactcttggcagttatgtaagttgggagtctcat

SEQ ID NO: 14402 - DNA, 411 bp, Glycine max
  Clone ID: jC-gmle01810078a02d1
cattgatcttcattatcaactacaacaggaccagtaccaagcggtgcacccaagagaaattgctcccaacgtctcacacccctctgcattatgcttgaggttatggtccgcaggcgtgacggattactcgagttgcttctcggtgatgatgttggagaagacatataacaatctgtttgagggcagtatttcaaggtacactttcctgaccaatgatgaattttgacatcaaattccggaaaaagcagtcgtcccataacttgaacatgagagatgcatatatagaataattcatccatttcttgcttttgaactctacccaacagctcaactaggcagacacctccaatgcacaaaacaagtcaaggagctttgaatttttgcaagcggttttcttgaagcattggaaat

SEQ ID NO: 14403 - DNA, 589 bp, Glycine max
  Clone ID: jC-gmle01810078a03a1
aagtagttgagaactaagaaggagaagcaaatggcttcctcaatgatctcttgcccagctgttaccactgtcaaccgtgccggtgccggcatggttgctccattcactggcctcaagtccatggctggcttccccaccagaaagaccaacaatgacattacctccattgctagcaacggtggaagagtgcaatgcatgcaggtgtggccaccagttggcaagaagaagtttgagactctttcctacctgccagaccttgatgatgcacaattggcaaaggaagtagaataccttcttaggaagggatggattccttgcttggaattcgagttggagcacggtttcgtgtaccgtgagcacaacaggtcaccaggatactacgatggacgctactggaccatgtggaagctgcctatgtttggttgcactgatgcttctcaggtgttgaaggagcttcaagaggctaagactgcataccccaacggcttcatccgtatcatcggattcgacaacgttcgccaagtgcagtgcatcagcttcatcgcctacaagcccccaggcttctaagtgtgaaaaatttgcaaagcat

SEQ ID NO: 14404 - DNA, 447 bp, Glycine max
  Clone ID: jC-gmle01810078a03d1
attcattagttttcatccattaatttccattgaagtccgaagacagaaaccaaaaatacaggatgatgaaatctcaaaaagcaaaaacaaatgggaatgtagtttaagtacaaacaaacaaagtggggtggcggctacaaatgctttgcaaatttttcacacttagaagcctgggggcttgtaggcgatgaagctgatgcactgcacttggcgaacgttgtcgaatccgatgatacggatgaagccgttggggtatgcagtcttagcctcttgaagctccttcaacacctgagaagcatcagtgcaaccaaacataggcagcttccacatggtccagtagcgtccatcgtagtatcctggtgacctgttgtgctcacggtacacgaaaccgtgctccaactcgaattccaagcaaggaatccatcccttcctaagaaggtattctac

SEQ ID NO: 14405 - DNA, 417 bp, Glycine max
  Clone ID: jC-gmle01810078a04a1
ctcccaaatgtttatgtattaataatttatctaatggcccgcaatgaacattatgcagagctcgggttgtttgtcttaaacaagattctggagtcctctaaagaagttgcactacaactactagagtctggccgccagaatgcccaaactaggaagcttggtctggatatgctaagacaacttggtttacatcatgattatgttttactgcttgtgcaggatggatactaccttgaagccttacgatatgcacggaagttcagggtggattcgatccggccatcattgttcttagaagcagcatttgttttcaatgactcccaacattttgctgcggttctaagatttcttaacagatttccttcctgggcttaaaaacacctcaaaccattatagaaactgctgcatactgaatga

SEQ ID NO: 14406 - DNA, 62 bp, Glycine max
  unsure at all n locations
  Clone ID: jC-gmle01810078a04d1
cctttcaaaactcagattacaccgactccgaaaaccaaccagaannatttcccttgtctacc

SEQ ID NO: 14407 - DNA, 361 bp, Glycine max
  Clone ID: jC-gmle01810078a05a1
atcgaagatgccatcgagagtgcttttctttggttggatggaaaccagctagcggaggctgacgagttcgaagacaagatgaaggagcttgagagcatttgcaacccaatcattgccaaaatgtaccagggtgcaggtgctcccgacatggctggaggcatggatgaagatgttcctccatctggatccggtggtgctggccccaagatcgaggaagttgattaaattgtttcattatttagatgggatgggcttgtgttggatctattccggtttttttcctttatttttattggtctaaaatatgggccattattttgggtactaacaccaggtttggggattggtaattctttttttt

SEQ ID NO: 14408 - DNA, 70 bp, Glycine max
  unsure at all n locations
  Clone ID: jC-gmle01810078a05d1
tgggaannaacggcngnatgactactgcttttcctgaacccanccggaattaatttcccgggctcgacgc

SEQ ID NO: 14409 - DNA, 406 bp, Glycine max
  Clone ID: jC-gmle01810078a06a1
atcgaacatgccctcgctagtgctttttaggggcaggatcgaaaccagctagcgggggctgaccagtgcaaagacaagatgaaggagcttgatagcatttgcaacccaatcattgatacaatgtaccaaggtgcacgggctgccctcctgtctgtatgcatggatgaagattggtctgacatcgggaggcggtggagctacaccccactatgcacgaaccagattagatctgttaattttttagatggcctgggcctgagtggtacctatctcgcttccacttcctactttagataagaacgaatatattgtgccattattgaggatactaacaccagatcatgcggtagattattctcatctgggggtttagaatcagtctttccacattcatctggatagagac

SEQ ID NO: 14410 - DNA, 453 bp, Glycine max
  Clone ID: jC-gmle01810078a06d1
aaatagtgctttttaacaaagacatgctatcttaattttgggaactgataattaaagcggggcgcattcaatacaatacaatacaatttgtaactatgaacaatcaatatatgaccgtattttatttttgtgatacacacaatttaagccatgattttcttacgggatttacagcaactcttaacttatttaaaacatcataccaacccaactaggagcaatttttattatacaaagacaactatctttaaactctgaagcatgacaaggtggttgtaaccagggaccatattcttatgcaatttatgccacaactggataagacgcacaagttgcaacacccctcatgttcttccccaatcccattttgaagtaggcattataaccccaactttttccccatgaattttttatgagccaatatgggacgccattttcaactccataccccac

SEQ ID NO: 14411 - DNA, 108 bp, Glycine max
  Clone ID: jC-gmle01810078a07a1
gaataaaaaaatgtaaaaacctacttttttaataaaaaatataatatatgggcccgtcggagtagttttgagctcaccactcccaacgaatgacattcgcggaccggt

SEQ ID NO: 14412 - DNA, 404 bp, Glycine max
  Clone ID: jC-gmle01810078a07d1
aattaataatttttcaatcgcactttaattaacatgaacccggggttatggcttacgaacaattatgggcgaccaaataattattctatggcggaacgcatacacaaaataccggcccgatttcaaacacccaaaaacactgaaaaccctggggaaacccccaaataaaagatttggcaaaaactcccattttgcacactcgcgctatatcaaaaaggtcccaaccataattgattttcccaacttccgacacctaaacggataatggaccacccccctgaacatagcgtaactccactctggaggacgggatgcccccattaattaccatatttttcacacttgcctaagccctatgtttatcaatgtggcacacatgttttctatagacccgaaaggcttac

SEQ ID NO: 14413 - DNA, 466 bp, Glycine max
  Clone ID: jC-gmle01810078a08a1
agttgatcgttgaaatgataatttatttaacagagatacaagatatccatttttttttcagattggaatcttttaaagagatatatggaattatatgggtatttgcccctattttgattcttatattgggaattacgataagtgtactagcaattgtatggttagaaagggaaatatccgcagggatacaacaacgtattggacctgaatacacaggtccttttggagttcttcaagctctagcagacggaacaaaattacttttcaaagagaatcttattccatctagaggagatattcgtttattcagtataggaccatctatatcagtcatatcgattataataagctatttagtaattccttttggctataactttgttttatctgatctgaatattggtgtttttttatggattgctatttcgagtattgctcccattggacttcttatgtcaggatatgg

SEQ ID NO: 14414 - DNA, 520 bp, Glycine max
  unsure at all n locations
  Clone ID: jC-gmle01810078a08d1
gttcttatcctattcttttttgtgtaagtaaaataaaaggggacttccaaaaattaaaggattatttcgtttctgatagttatttatttaatcggtggatggaagtatactctggatcggaattctggggagtactgccttattttttctaccaacggaaagccccaattagtattctttttctattatacataaatataaatgttcttttggatatttttaaaaatatacgttactaatcctttgtgtattttggtgtttctaatcatccattcattttttattaatcccttatttatgttatttatgttaatatatatatgctaattcatacaaatgatattgaaaatttaatttaaaaagggttggtcttttacgcccgcttcaagacaggatgactaatcaaccaaccttgggaaaaacaacaacttctacctataatttaattcatttttttcacttaattcttatacatagaaaatgagactcaatatttttactgnncattaaaatcatcatc

SEQ ID NO: 14415 - DNA, 536 bp, Glycine max
  unsure at all n locations
  Clone ID: jC-gmle01810078a09a1
agcgttttgtttcccatcgtctttttttgctctccctctgtgcagacatggggggcttctcgtacttcaaggatttggtggggagggaagtaatcgtggagctgaagaacgatttggccatcaaaggaacattgcattctgttgatcagtacctcaacatcaagctcgaaaacactagcgtcgtcaatcaagaaaagtaccctcacatgctttctgtaagaaactgcttcatcagaggttcggtagtgagatatgtgcaattgcctccagaaggggtggacattgaattattgcacgatgccacaagaagagaagcccggggcggttagtgtcttcattttgtgatgtatcttatttatgagaattcggtgggcttacataaggtggatgttaaccttcctacttcagaaggaaactcttttcagatgttaaaggttatgtaactgtattggcttttccttttagttcttttggaagctntgtccacgtttaatgtgacaaaaatgatactggtggtactgcatttttttttcttt

SEQ ID NO: 14416 - DNA, 265 bp, Glycine max
  Clone ID: jC-gmle01810078a09d1
aaagaaaaagatttgcagttacaccagtatcatttttgtcacgggaaaactggacaaagcttccaaaagaactaaaaggaaaagccaatacagttacataacctttaacatctgaaaagagtttccttctgaagtaggaaggttaacatccaccttatgtaagcccaccgaattctcataaataagatacatcacaaaatgaagacactaaccgccccgggctttttttctttgggcatcgtgcaataattcaatgtccacccct

SEQ ID NO: 14417 - DNA, 535 bp, Glycine max
  Clone ID: jC-gmle01810078a10a1
agcgttttgtttcccatcgcttttttttgctctccctctgtgcagacatgggggggttctcgtacttcaaggatttggtggggagggaagtaatcgtggagctgaagaacgatttggccatcaaaggaacattgcattctgttgatcagtacctcaacatcaagctcgaaaacactagcgtcgtcaatcaagaaaagtaccctcacatgctttctgtaagaaactgcttcatcagaggttcggtagtgagatatgtgcaattgcctccagaaggggtggacattgaattattgcacgatgccacaagaagagaagcccggggcggttagtgtcttcattttgtgatgtatcttatttatgagaattcggtgggcttacataaggtggatgttaaccttcctacttcaaacggaaactcttttcagatgttaaaggttatgtaactggattggcttttccttttagttcttttcgaagctctggccaattttaatgtgacaaaaatgatactggtgtaactgcattttttttcttt

SEQ ID NO: 14418 - DNA, 480 bp, Glycine max
  unsure at all n locations
  Clone ID: jC-gmle01810078a10d1
aacccatcatcccttgagacnncnnnnntnnntncannnacnncntatnnnnntntanntctnggnntcnnnnncnncaannncttttttttttttcnncnccncaccaccatattaggttggacttatcttattaaacataccctcaatcatcccaatctctttccttccattcacataacccttaacatcttaaaacactttccatctcaacaaaaaatgctaacaaccaccttaactaaaccccccgaaaacacataaataagatacattacaaaaaaaatacactaaccacccaaacctaatattaatttaaaatctgacactaattcaataaccaccccttccgtacacaattgcacatataatcactacgcaaacctaatcattaagcaaactattacataaaacatttgaagttacctttcttgattgacaacactcgtgttctctagctttaagataaactacttaccaaca

SEQ ID NO: 14419 - DNA, 495 bp, Glycine max
  Clone ID: jC-gmle01810078a11a1
gcttgctcatcaagtccaagaaccatacctaccttttgcaatctcaattcaatggcgtcctctctcattgcgaagcgcttcctctcctcttccctcctctccaggtccctccttcgccccgccgcttccgcttcccaccgctctttcaacaccaacgccatgcgccagtatgacaaccgcgccgacgaccacagcaccgacatcgatcgtcactccgaacgctctttccctagcactgcgcgccgcgacgatatcttctcagatgtgttggatccattttttccgactcggagtttgagccaggttctgaacatgatggaccaggtcatggacaatccgttcctctccgcgtcgcgcgggatcggagctggcgctggagtgcgtcgcggatgggacgcgagggagacagaggatgctctgcatctgcgcgtggacatgcctgggctcggcaaggaagacgtgaagatctccggggagcagaacactctcattatc

SEQ ID NO: 14420 - DNA, 531 bp, Glycine max
  unsure at all n locations
  Clone ID: jC-gmle01810078a11d1
aggcgcatgtacttccttttgagncnnncnnnnnnntnnnttnnnnnnncnnnccnnnnnnnntntnnntnggntggtgtatnnnnnntnnntttttttttttttttttgnnntntntttntttttttttgggggtgggtgttttttttattttttttttttttttcctntttttttttttattctgttttattctactaactagattcatcaccacctaataaaagaaaactaaagagtagtgtcaatgcaaaatggccaaatcagcttgggttgttctactcaaccttaacactgatcacgtctttcctctcttcctccttcattttcggcacaaccaccttgaccacaccgttcttcatctcagctctgatctggtcaatcttgtagagcttgtccggcaagtcaatcctgctagtgtatcgacgagcgctctcttcttcatcgccttctttagcaccttcacctttgataatgagagtgttctgctccacagagatcttcacgtcttccttgccgagcccaggcatg

SEQ ID NO: 14421 - DNA, 534 bp, Glycine max
  Clone ID: jC-gmle01810078a12a1
gcttgctcatcaagtccaagaaccaacctaccttttgcaatctcaattcaatggcgtcctctctcattgcgaagcgcttcctctcctcttccctcctctccaggtccctccttcgccccgccgcttccgcttcccaccgctctttcaacaccaacgccatgcgccagtatgacaaccgcgccgacgaccacagcaccgacatcgatcgtcactccgaacgctctttccctagcactgcgcgccgcgacgatatcttctcagatgtgttggatccattttttccgactcggagtttgagccaggttctgaacatgatggaccaggtcatggacaatccgttcctctccgcgtcgcgcgggatcggagctggcgctggagtgcgtcgcggatgggacgcgagggagacagaggatgctctgcatctgcgcgtggacatgcctgtgctcggaaggaagacgtgaagatcttcgtggagcagaacactctcattatcaaagtgaaggtgctaaagaaggcgatgaagaagagagcgct

SEQ ID NO: 14422 - DNA, 549 bp, Glycine max
  Clone ID: jC-gmle01810078a12d1
ctaaacaacaagcttattcacaactctatataacaattattacagatacgtttgaagtttcaaaaccaaacacagcaacaatactattaagctgttatatctactaactagattcatcaccacctaataaaagaaaactaaagagtagtgtcgatgcaaaatggccaaatcagcttgggttgttctactcaaccttaacactgatcacgtctttcctctcttcctccttcattttcggcacaacgaccttgagcacaccgttcttcatctcagctctgatctggtcaatcttgtagagcttgtccggcaagtcaatcctgctagtgtagcgacgagcgctctcttcttcatcgccttctttagcaccttcacctttgataatgagagtgttctgctccacggagatcttcacgtcttccttgccgagcccaggcatgtccacgcgcagatgcagagcatcctctgtctccctcgcgttccatccgcgacgcactccagcgccagctccgatcccgcgcgacgcggagaggaacggatttgccatgacct

SEQ ID NO: 14423 - DNA, 536 bp, Glycine max
  Clone ID: jC-gmle01810078b01a1
gggacaggaacagcaaaccagtgtccaacaattgatggtggattggactcatttgccttcaagccggggaaatacaatgccaagaagttgtgccttgagccaacttcattcacagtgaaggccgagggtgtggccaagaatgctccccttgagttccaaaacacaaagctcatgacacgtttgacctacactctggatgagattgagggaccctttgaggtgtcttctgatggcactgtcaagtttgaggagaaggatggcattgactacgccgccgtgacagttcagctaccgggaggcgaacgtgtgccctttctcttcaccatcaagcagttggtggcatcagggaagccagatagctttagtggggagtttctagtcccatcctaccgtggaagctctttcttggaccccaaggaagaggtgcttccacaggttatgacaatgcagttgctttgcctgctggtggaagaggagatgaggaagaacttgccaaggaaaacaataaaagtgcctcatcatccagggcaaaatca

SEQ ID NO: 14424 - DNA, 519 bp, Glycine max
  Clone ID: jC-gmle01810078b01d1
agtaaaaaattgtatctcgaaaactcacacacaccatcaatttgaaccttgaattttaaacattgtaattggaggtcgatataatatacaaccatgacagtactctcagtagtgctaggaaagttgggtcaagggataatgcagcaacaccatgcatgaagttactaacaaaatctgagccaacaaacaaaacagaaaacaaaacactctatgactcaagctgagcataccagatgccctggatcttgacatcctttggagcctttgctcccaaatcagtgtcagatggttgaacactctcgaacacaccgataacctcacccgtctcaggcttggtcttggtgacactcaaggtgattttgcccttggatgatgaggcacttttattgttttccttggcaagttcttcctcatctcctcttccaccagcaggcaaagcaactgcattgtcataacctgtggaagcacctcttccttggggtccaagaaagactttcacggtaggatgggactagaaac

SEQ ID NO: 14425 - DNA, 448 bp, Glycine max
  Clone ID: jC-gmle01810078b02a1
gggacaggaacagcaaaccagtgtctaacaattgatggtggattggactcatttgccttcaagccggggaaatacaatgccaagaagttgtgccttgagccaactttattcacagtgaaggccgagggtgtggccaagaatgctccccttgagttccaaaacacaaagctcatgacacgtttgacctacactctggatgagattgagggactctttgaggtgtcttctgatggcactgttaagtttgaggagaaggatggcattgactacgccgccgtgacagttcagctaccgggaggcgaacgtgtgccctttctcttcaccatcaagcaggtggtggcatcagggaagccagatagctttagtggggagattctagtcccatactaccgagggagctctttcttggaccccaagggatggaggtgcttcacaagatatgacaatg

SEQ ID NO: 14426 - DNA, 500 bp, Glycine max
  Clone ID: jC-gmle01810078b02d1
agtaaaaaatttttctcgaaaactcacacacaccatcaattgggaccttgaattttaaacattgtaattggaggtcgatataatatacaaccatgacagtactctcaatagtgctaggaaagttgggtcaagggataatgcagcaacaccatgcatgaagttactaacaaaatctgagccaacaaacaaaacagaaaacaaaacactctatgactcaagctgagcataccagatgccctggatcttgacatcctttggagcctttgctcccaaatcagtgtcagatggttgaacactctcgaacacaccgataacctcacccgtctcaggcttggtcttggtgacactcaaggtgattttgcccttggatgatgaggcacttttattgttttccttggcaagttcttcctcatctcctcttccaccagcaggcaaagcaactgcattgtcataacctgtggaagcacctctttcctttgggtccaagaaagagcttccac

SEQ ID NO: 14427 - DNA, 559 bp, Glycine max
  unsure at all n locations
  Clone ID: jC-gmle01810078b03a1
gccaaccttctgctgcatcagttgtgagatgcaaccccaccaccccatcaggcctgaccatcagagctggttcctatgctgatgagctcgttaagaccgcgaaaacagtggcttcaccagggaggggtattttggccatggatgagtccaatgctacctgtgggaagcgtttggcttcaattgggctagagaacactgaagctaaccgccaggcataccgtaccctccttgtgacagttccaggacttggtcagtacatctctggtgccattctctttgaggaaactctctaccaatccacaactgatggcaggaagattgtcgacgtgctcctcgagcaaaacattgttcccggtattaaagtcgacaagggtttggtaccccttgctggttccaacgacgagtcatggtgccaaggtcttgatggtcttgcctctcgctcggctgcatactaccagcaaggtgcccgtttcgccaaatggcgtactgttgtgagcatccncaacggtccctctgctctggcagttaaggaagcttgcctgggtctggctcgctatgc

SEQ ID NO: 14428 - DNA, 221 bp, Glycine max
  Clone ID: jC-gmle01810078b03d1
ggcccaaaaaaaaccctgtttgtttttttttgggaaaaattaaaataaggccccccttcaaagggaaagggttttaatccgtaaagggccatggaaccataaaaaaaaaatgtgtccaagactttaaaaacatttctttttaaaaaaatttgttttttttcaatttatcctccggaaaaaccaaatataaagggggggggggggggggcccaacatgtttt

SEQ ID NO: 14429 - DNA, 517 bp, Glycine max
  Clone ID: jC-gmle01810078b04a1
atcgaacaactgatccgattcatgttttacctcctccgccgacacagtcacagcggcagacacagccgttgaattctatccctttgctcccaatgatgacggtgccctcggtttctccgacggggatggcgccggttaattttaacgcaaagtttctggcggggatgcaggaaatgataaggaaggaggtgaggagttatattgagctgcacaattagaagaatgggatgtgttctcaggctgcagtgaatgatgggatttggaacgcttcggtgaagcgtgttgcaatttgccaggccgattcggaaatattatcaatcgagaacgggacaacacaagtagagatgaggaaaaaaactaaaaacctgatgggttccctgccttttgttaatcaatgctcttaggcaataatcctgggtgatgtacagcgagacatatcttttgatccctaagaggctgaaggggaattggcaccaaagagggagattgatgttccccatagataaaatctgaaatc

SEQ ID NO: 14430 - DNA, 356 bp, Glycine max
  Clone ID: jC-gmle01810078b04d1
attattacaatttgatttggaggaatttgtttattccaagagtattttttctttttgttttcaaaagagaacaggaccaatagagaggatacaaaaagttacaacagagatttcagattttatctaatgggtaacatctatctccctctttcgttccaatttccattcagcctctttagggatcgagagttctgtcttgctttacattaaccaaaattattggcttagaacattgattaaaaaaaaacagggaaaaaaacaggttcttagtttttttcctcatctctacttgggttgttccattcttcgatgataatatttacgaatcaaccctggttatttcaatacgcttcacc

SEQ ID NO: 14431 - DNA, 465 bp, Glycine max
  Clone ID: jC-gmle01810078b05a1
gagactacttaggtgttcatccacttatacaagagggcctaagctatgttgggatgcacattccagttggtagagtccaagcagatgacatggatgagttggctcgtttagccgacgaatacgccaccggtgagctcaggctcacagtggagcagaacattataatcccaaatgtggacaataacaaaattgatggcttgctcaatgagcctctcttgaaggggagattctcacccgaaccttctctattgatgaagactctggtggcatgcactggtaatcaattttgtggacaagctataattgagacaaaggaaagggcattgaaagtgactgaggaagtggagaggcaagtggctgtgactaggcctgtgagaatgcattggactggctgccctaacacttgtggacaggttcaagttgctgacattggtttcatggggtgcatggctagggatgacaatg

SEQ ID NO: 14432 - DNA, 458 bp, Glycine max
  Clone ID: jC-gmle01810078b05d1
aaagaaataaattgtaaattagggactagcaaagaatgaacaggtgtaaaccaaaagtgtacatgcatatatcatcccttcttctatgtagaggacactaataattttgtccaagggacaatggtggatttaataaagaaactaaaattaccaatggccattaaaatttaatgcatatttggtttttaattcaacttatgcacaaattccgagatcaaatcaatgatcttcaaaactcattttgcaaaagaaagggtgaggatccttttgcaaaactcattttgatgcaaatgtctgtttgtaataactatccaaacatgcacttaatcttccccttcctctctattccttaggacagctccaaagtggtttactagtatgtttaccacaacaggcaccaagtccttgcaaggcacacccttcttatacacttgagccagaagtgaatcactttcaat

SEQ ID NO: 14433 - DNA, 487 bp, Glycine max
  Clone ID: jC-gmle01810078b06a1
gagactacttaggtgttcatccattttttcaagagggcctaagctatgttgggaggggcattccagttggtagagtccaagcagatgacatggatgagttggctcgtttagccgacgaatacgccaccggtgagctcaggctcacagtggagcagaacattataatcccaaatgtggacaataacaaaattgatggcttgctcaatgagcctctcttgaaggggagattctcacccgaaccttctctattgatgaagactctggtggcatgcactggtaatcaattttgtggacaagctataattgagacaaaggaaagggcattgaaagtgactgaggaagtggaaaggcaagtggctgtgactaggcctgtgagaatgcattggactggctggcctaacactttgggacaggttcaagttgctgacattggtttcatggggtgcatggcttgggatgacaatggttaggccactggaggtgtgga

SEQ ID NO: 14434 - DNA, 401 bp, Glycine max
  Clone ID: jC-gmle01810078b06d1
aaacaaataaattttcaacaatggactagcaaaaaatgaacaggggtaaaccaaaagtgaacatgcgtatatcatcccttcttctatgtagaggacacataataattattttcaaaaggacaaagggggtatttaataaagaaacttaaattaccaatggccatcaaaatttaatgcatatttggtttttaactcaacttatgcacaaattccgagatcaaatcaatgatctttaaaactcattctgcaaaaaaaagggtgaggatccttttgcaaaactcattttgatgcaaatgtctgtttgtaataaccatccaaacaagcacttaatattgcacttcctctttattccttaggacagctccaaagtgtttcactagtatgtataccacaacaggcac

SEQ ID NO: 14435 - DNA, 547 bp, Glycine max
  unsure at all n locations
  Clone ID: jC-gmle01810078b07a1
aattaatgctactactcatcactataacaactatcatgagatgagtagtactactgctgcaggatctgcaggctcagtcttttaccacaggtcaacacccccaatatcaatgccattggctgaccaccaaaccttgaacacaaggcagcagcaacaacaacaacaacaacaagagggagctggcaatgtttctctttcccctatgatcattgattctgttccagttgctcaccacctccatcatcaacaacaccatggtggcaagagtagtggtcctagtagtactagtactagtcctagcactgcagggaaaagactaaggctatttggggtcaacatggaatgtgcttcttcaacatcagaagaccccaaatgcttcagcttgttgtcctcatcttcaatggctaattccaattcacaaccaccacttcagcttttgagggaagatacactttcgtcatcatcggcaaggtttggggatcagagaggagtaggggaaccttcaatgcnttttgatctggacccttctttgcataccggcagtgat

SEQ ID NO: 14436 - DNA, 511 bp, Glycine max
  Clone ID: jC-gmle01810078b07d1
gaaagagcaaattacatatataatataacaattaataataatggatataaataatatatatttgcattgtattatacacaattgaaaaaaaaggtctaaacgtaatttgatctccatggatatcatttccctctttaggttgtgaaacgatggatgttccatttcttcatgggcccaaatcccgagttctaataaattcattgagcagttctaaacgtactaaagacttcaaaaacgagcaaaagctaaagactaattactgatcaaaagaagaagaagaagaaagtctgggagagcattttctttcctttgtagctgatgaaagaacaaaagagaaagagaaagaaagaaattaaaaatataataaaaatgctgcaaaagagagtgtagctgctaacccaagtaggtggtgactttagatcaaactcgtatcatcttcattatttagtttcttcatctcaatttggttttttatcactgccggtattgcaaagaagggtccagatcaaaa

SEQ ID NO: 14437 - DNA, 357 bp, Glycine max
  Clone ID: jC-gmle01810078b08a1
agctgccgaaatattaaatgtttattcccctgatctatatgttcgtcaaagggctgtgccaaatgcatatacattagctataagtggcaaacgacctttcgttgtcattcatactagccttgtggagctcctgacaaaagcagagttgcaggctgttttggctcatgagctgggtcacctaaaatgtgatcatggtgtgtggcttacatatgcaaatattctaacccttggagcctattctgtacctggtattggcggtatgatagctcagactttggaagagcagctgttccgctggcttcgagcagctgaattgacttgtgaatcgtgcagctctttttgttgctcaagacccta

SEQ ID NO: 14438 - DNA, 367 bp, Glycine max
  Clone ID: jC-gmle01810078b08d1
agtgctattcttatagagcttatcttatagtgtaaaatacagcgagataaaattttctgtcataaaacttacataagtagtgttttctactccgagaaattttctaagctagatttgtacagggaattcttttttttccataaccaatattcctatgaaactatcctccagctcaccaaaattctacttacaggccgactgatataacacactgacttcatacacgtttgcctcactcgccgattgatacataataaacgcgtcttgccgcttgaaccatttgaacatctgccaccccgcactaacttgtagaaccttgagctgcttttcactttcaacaaattccatgcatgcactgctagacatt

SEQ ID NO: 14439 - DNA, 80 bp, Glycine max
  Clone ID: jC-gmle01810078b09a1
atgaacaacttcattgccagtttttctagtactatttttgagggatgatgcagtatagatgaatccaacttcactgggtc

SEQ ID NO: 14440 - DNA, 80 bp, Glycine max
  Clone ID: jC-gmle01810078b09d1
gacacagagaatttggattcatctatattgcatcatccctcagggatagtactagtaaaactggcaatgaagttgttcat

SEQ ID NO: 14441 - DNA, 562 bp, Glycine max
  Clone ID: jC-gmle01810078b10a1
cctggatcagaagccctcattgtttaatttcaattccagatgtctgattataaaagttgtggtgacttcaagggttgcatttcctaaatttggaaccccatatgttttaaaaccacttgctcatgaagatgcaatgaccctattccgacaccatgctctcttggaaaaaagcagttcaagtattcctgacgaagaacttgtccaaaaggttgtgagatattgcaagggtttacccctcgccattaaagtgattggtagatcactcagtcatcggcctattgagatgtggcaaaagatggtggaggaattttcacaaggtcattctatacttgattccaatattgaattacttacatgcttccaaaaactcttgcatgtattggaagataatcccaacatcaaggagtgcttcatggacttagggttgtttcctgaagaccaaagaattcctctttctgttctcattgatatatgggcagtgttatatggatatgatgatgacggcatagaagcacggacatgataaataaattagactccatgaatctagttaatgtcttgg

SEQ ID NO: 14442 - DNA, 621 bp, Glycine max
  unsure at all n locations
  Clone ID: jC-gmle01810078b10d1
aagccccaatccagcttccctcgnangncnnncnnnnnnnttnnntgnnannnnncnnccnnnnnnnnnnnnntnnnggntngnnnnnnnnnnnnnntnnnnnnnnntttttttttttnntnnnnnnnnnnnttntnttttngggtggggttttttttttttntttttttttttttccctttnttttattttcatttttgacttcacccaacacataaaatcaccaacttctttcaattaccatagtactgtttccacgacatgcaaatactactacaccaacttgaatacacatttattatccctattttaaacaagattatttcacatgaaacacttactatcattggtctaacatttttatacaaagaggtcataggagcaaattgaatgaaaccagcttcacttaacatcaacttgaggaacctcaaacttcagatttagaaagcatagcttcaaatgctttccatgaagcacgacatgtcttaacagctaattcaatgaacccagtttaagttaacctcaactcgaggaacctctaacttcagatttggaaacattaacttcaatgcttcccatgaagcaactgtctcttcatacataccaccacttttaaattct

SEQ ID NO: 14443 - DNA, 467 bp, Glycine max
  Clone ID: jC-gmle01810078b11a1
gcttgctcatcaagtccaagttccttcctaccttttgcaatctcaattcagtggcggcctctctcattgcgaagcgcttcctctcctcttccctcctctccaggtccctccttcgccccgccgcttccgcttcccaccgctctttcaacaccaacgccatgcgccagtatgacaaccgcgccgtcgaccacagcaccgacatcgatcgtcactccgaacgctctttccctagcactgcgcgccgcgacgatatcttctcagatgtgttggatccattttttccgactcggagtttgagccaggttctgaacatgatggaccaggtcatggacaatccgttcctctccgcgtcccgcgggatcggagctggcgcttgagtgcgtcgcggatgggacccgagggagacagaggatgctctgcatctgcgcgtggacatgctctggctcggcaaggaagacctgaatatc

SEQ ID NO: 14444 - DNA, 560 bp, Glycine max
  unsure at all n locations
  Clone ID: jC-gmle01810078b12a1
ggatacagaccgtgactttttcattagtgcaaaagaagccaaggaatatgggctcatagatggagtcattatgaatcctctcaaagctctccagccattagaggctgcagcagaaggtaaagatcgggctagtgtttgagcataagattgttgcacttgaatttccaaggtataaaaagtcagtattagactgtaaaatgtttttggttgctgagtccaactgatttttttttacggatgttgatatctgtgtccatgtaccaaaaatgaggcgaaattgatactatttatttactgctttagagtttatactgacagaaggttctttaatggatcctgcatttgctttttccttctagcattctttntacaaatgggacaatagtgttaactgttgaaaaagaaatgtttgctttacacaaggtagtgaaaatggtacgaaccaacaatgattagttacatgtactcactgttttgtttaaataacgaaactataggccggatttcttggtaactttacgatactaatatcagatagtggtagcattgactttgaattt

SEQ ID NO: 14445 - DNA, 511 bp, Glycine max
  Clone ID: jC-gmle01810078b12d1
gagaaaattctgcacttcgataaaatcaaaagttcaaaaagtgtacaaaatttgattcacactatttgacacgatatattcctagttccaacaaataatatatcaataaatcactactagctaaaattcaaagtcaatgctaacactatctgatattagtatcgtaaagttaacaagaaatgcggcctatagtttcgttatttaaacaaaacagtgagtacatgtaactaatcattgttggttcgtaccattttcactaccttgtgtaaagcaaacatttctttttcaacagttaacactattgtcccatttgtaaaaagaatgctagaaggaaaaagcaaatgcaggatccattaaagaaccttctgtcagtataaactctaaagcagtaaataaatagtatcaatttcgcctcatttttggtacatggacacagatatcaacatccgtaaaaaaaaatcagttggactcagcaaccaaaaacattttacagtctaatactgacttttta

SEQ ID NO: 14446 - DNA, 154 bp, Glycine max
  Clone ID: jC-gmle01810078c01a1
ggtgaagttaatttcatctaccataagtatagactttgtcatttgaaagcacatgcaattaatttgtattattatttgattctttatatgaacaatgccggtcttcatcggtgaagttaatttcatctaccataagtatagactttgtcatttg

SEQ ID NO: 14447 - DNA, 164 bp, Glycine max
  Clone ID: jC-gmle01810078c01d1
gggggttcaaaagacaaagtcttttcttatgggggaagaaattaacttccccgatgaaaaccgggattgttcatttaaagaatcaaattattatcccaattaattggatgggctttcaaatgacaaagtttattcttatgggggatgaaattaacttcaccctt

SEQ ID NO: 14448 - DNA, 548 bp, Glycine max
  unsure at all n locations
  Clone ID: jC-gmle01810078c02a1
aattaatggcagctgcaagtattatcatctccatctcctctgcttcactctttgctccaacaacaacccaatgcctcctcaaacacaattacaaggaccatgatcatgttcatgttccatcatcatcatcatcatacttcacaacacacgctgctctcaagatatcaagaccaacaacaacaacgtttggaatcaccacaacaaccaccagggttaataatgttcctcctcgtaggtttagttgttcagcatcgtcatcttcttcctcttccactcttccctcagctcttctatttgactgtgatggagtccttgtggatactgagaaagatggtcaccgcatatctttcaaccaaaccttccaagagagagaactaggcgttacatgggatgtggacttgtacggngaattgctcaaaattggaggcggaaaagaaaggatgacagcgtactttaacaaggtcggttggcctgcgaatgccccaacagatgaacaagaaagaaaagattcatagcttcactccacaaacaaaagacaagactattta

SEQ ID NO: 14449 - DNA, 551 bp, Glycine max
  Clone ID: jC-gmle01810078c02d1
aacaacaaatgtattattctttattcaactcatggtgatatttggatcattgacttgaaagggtgggcttgtacacataagtcgaattggacactcataggaaatattgaaggagacttgcatcaaacaaaatcttaagagtgtcacttaacaaagagctagctcacgtattgcttctcaagaaggcttccgcagaaagccaaatcaaatctctcctcaggaggatcaccaatgcagtcaaagactgcatctgcatttaagaaatcttcatctgctgtatagccgctctttgttactatacacgtcattccagctgctttagcagctgctaggcctatggcactgtcctccaccacaacacatcttgaaggttcaacacccagagtgctggctgctaataggtagatagctggatcaggctttttacggggaaccacgtctccggcaaatatcttgattttttctgctctttcaggtcccagcaagaatgatactattgcagagaccgccttctcattggaagtgcttgaaactgcaacttggactccttg

SEQ ID NO: 14450 - DNA, 388 bp, Glycine max
  Clone ID: jC-gmle01810078c03a1
gagtgggagagcaaggagaaactataccctgacgttagtcatgcatggactgtgggctacatggatgatgaggaagcaactgatgcaagtgcaactgatgacacgtcacacatgttagacataggtgtatcactcactgcaagagaacattggttgctccaccacaagaggccaaggatcgatatgaccttgatggggctagttccaactcaatattgcttattattgacatgggccaatgtcatgtacaataagtgaacaaagcggcccaaccaccattatacaaaaaagatgatatcctaccagaatatcactgacatatctcttattataacaatgctacaactgtctaagagaaagattccgcatagacaaaagctgcactatg

SEQ ID NO: 14451 - DNA, 263 bp, Glycine max
  Clone ID: jC-gmle01810078c03d1
cattaaaggtgaccaccatcagatttttcagcgagaatgggtcattaccaaagtcggcggcaacggacactttacaccaataacctgaaggctcggaggcaagccgaatagtgcactctctgactatgctgggtccttctactaagccgctgttgcatggttgtcatcacagacacgctagggaggtacaggtgggcaataataaaagtggtttactgggggacgggcccgtttggacacatatctggcactaaagggagcct

SEQ ID NO: 14452 - DNA, 492 bp, Glycine max
  Clone ID: jC-gmle01810078c04a1
gagtttgagagctttgtgaaactatactctggtgttagtcatggatggactttgggggacaatgatgatgatgaagcaactgttaagagtgcaaaagaggcgcatcaagacatgttgaattggtttatcaagcacgtcaagtgaaaattgttttcaccaccagaagatgcctgtgattgatttgcagttaatttttttagtagcaaataaatattacttattattgaaaagggccaatttcatgtacaagatgtgtccaaagcggcccaaccaccatgatacaaaaattataatatcccaccagaatatcactagcatttctcttataataacaatactacaactgcctaagaaaaagatacagcatagacaaaagctgcactatgcggcttaactcctagccttcatgttattggtgagacgtatccattgccaccgaatttactaatgattaattctcgctgacaaatctgatgatgatcactcttaatg

SEQ ID NO: 14453 - DNA, 400 bp, Glycine max
  Clone ID: jC-gmle01810078c04d1
cattaaaagtgatcatcatcagatttttcaacgagaattgatcattagtaaattcggtggcaatggatacgtcacaccaataacatgaaggctaggagttaagccgcatagtgcagcttttgtctatgctggatctttttcttaggcagttgtagcattgttattataagagaaatgctagggatattctggtgggatattataatttttgtatcatgggggttgggccgctttggacacattttgtacatgaaattggcccttttcaataataagtaatatttatttgctactaaaaaaattaactggcaattaatgacaggcatcttctggtggtgaaaacaattttcacttgacgtgcttgattaaccaattcaacatgtcttgatgcgcctttttt

SEQ ID NO: 14454 - DNA, 353 bp, Glycine max
  Clone ID: jC-gmle01810078c05a1
tcttgacgtatggtaacatgcttgtccaagaacaagagaatgtcaagagagtccaattggctgacaagtacttgaacgaggctgcacttggaaatgctaacgaggatgctattaacaggggaactttcttccaatcttgaattggaggcaaagcaaacttggcaagtaaatatttctgttcctgaaggttgtgctgatccaagtgctagaagttgtgatgggacttgcgtgtaacattcttagaattctcaatgtcttaggtgcaaagagaagatgccaagtttgagatgattttactatatttttcatattggactgtcttcctctataattttgagttaaagtgtccactt

SEQ ID NO: 14455 - DNA, 353 bp, Glycine max
  Clone ID: jC-gmle01810078c05d1
aagtggacactttaactcaaaattatagaggaagacggtccaatatgaaaaatatagtaaaatcatctcaaacttggcatcttctctttgcacctaagacattgagaattctaagaatgttacacgcaagtcccatcacaacttctagcacttggatcagcacaaccttcaggaacagaaatatttacttgccaagtttgctttgcctccaattcaagattggaagaaagttcccctgttaatagcatcctcgttagcatttccaagtgcagcctcgttcaagtacttgtcagccaattggactctcttgacattctcttgttcttggacaagcatgttaccatacgtcaaga

SEQ ID NO: 14456 - DNA, 353 bp, Glycine max; identical to SEQ ID NO: 14454
  Clone ID: jC-gmle01810078c06a1

SEQ ID NO: 14457 - DNA, 353 bp, Glycine max
  Clone ID: jC-gmle01810078c06d1
aagtggacactttaactcaaaattatagaggaagacagtccaatatgaaaaatatagtaaaatcatctcaaacttggcatcttctctttgcacctaagacattgagaattctaagaatgttacacgcaagtcccatcacaacttctagcacttggatcagcacaaccttcaggaacagaaatatttacttgccaagtttgctttgcctccaattcaagattggaagaaagttcccctgttaatagcatcctcgttagcatttccaagtgcagcctcgttcaagtacttgtcagccaattggactctcttgacattctcttgttcttggacaagcatgttaccatacgtcaaga

SEQ ID NO: 14458 - DNA, 403 bp, Glycine max
  Clone ID: jC-gmle01810078c07a1
aggggatagttcgagccgatttattgttattgacctatattgagattactacgggtgagccaaataaagacggattctagagaaacatgctttttgtggaaaacaacatgtttaggatcgtgattgattttgactttgacaacgaccattgtcttatagccacagtgactactgggacatcgacaaatttgatttaaccgattggatctaccagcttcttgctaccatgccttggaactttatcatgggcaggatgatgatggagctttattaataaggtgagaccctataggacatctgagatgttttgggtaagactaatttgcatcaaaaaggaatacacgctattcacgttgcttatgctttcgggagcgatttgacgattgtgagagattcatacatg

SEQ ID NO: 14459 - DNA, 517 bp, Glycine max
  Clone ID: jC-gmle01810078c07d1
aaccaatcctttttgatctatatcaaaccactatttgtattgggtagaaattatatctgcccattttggaccacttccaacattaacaattttagtgatgaatgttaatcaacgaaaaaagaaaaacccctttttgagttatgatacattttttttagatactaagaaattatggtctaactgggaggactttatgcaaacccttcaaatcagatacagagagagtctgtagcttgcaatcagatgaaatgaactgagaattttcctccattgaaattctggcgattaagtgcaacagaacttgttccaacttttctccatcactccagccatgaatttcagccttaacaagcaaagggtctttgcatatcaaatcccacgctggaaagttctttcttggcatcatatagactctctcttttagcctcaagcttgggcaatagtcaccactaccatcaccaagatagatcatcctcttgttaccctcttgtgaaattgaatcttggattttatcaat

SEQ ID NO: 14460 - DNA, 446 bp, Glycine max
  Clone ID: jC-gmle01810078c08a1
caaaggttgctgtaggagatttttttgcagtagtgctaagtgctaacacctgcagggaacaatggcctctgcatcagcatctctgctcaagtcttcacttgctcttgacaagtctgagtgggtgaagggacaaacccttccccaaccttctgcatcagttgtgagatgcaaccccaccaccccatcaggcctcaccatcagagctggttcctatgctgatgagctcgttaagaccgcaaaaacagtggcttcaccagggaggggtattttggccatggatgattccaatgctacctgtgggaaagcgttggcttcaattgggctaaagaacactgaagctaaccgccaggcataccgtacccttctcgtgacagttccaggccttggtcagtacatctctggtgccattcttcttgaggaaacactctaccaatccacaactgatg

SEQ ID NO: 14461 - DNA, 514 bp, Glycine max
  Clone ID: jC-gmle01810078c08d1
gctatatattgagacataggggagtacacaactcatagcaaaaggtttattaagctgtaaaggtgcatttaaccataaacaaatatagtctccaagactataaaaacattacattttagacaaattagtcttccacttcatcgtccgtcaacacctactgtaactgctggtgttgctgcctaacaagtatcatattcactgcaaacatcttagtaagagtagcttttgacgaacaactccttcttggcttcctcggattcaccctcaccagtgtacttcccaagctgagcgagtgagttggacttggcacggaatgcgagtgcatcttgtgctgccttcacgttctctgggcggcctccccatgttttcaaggcaatgttttggagggctctggcatacgagaatgacacgtgccacgggtttggagattggttcatggcattcaaattgaaggtagcttcaacctcagactgtccaccagacaaaaacattattttcagggacagcaggggga

SEQ ID NO: 14462 - DNA, 449 bp, Glycine max
  Clone ID: jC-gmle01810078c09a1
gtaatttctgccagcctcaataatttcttgctctgcctctgccactctctgagtaggactacactgccatggctgcctcagtctccactgttggagctgtcaacggagctccactgagcttgaacagctctggagctggagcttcagttcccagttcagccttctttggcaccagcttgaagaaggttattgcctcaagggtccctaacgtcaagatttcttctggaagtttcaaaatcgctgccgcggaaaaagagattgatgagaaacaacagacagacaaggacagatggaaaggtcttgcctatgatgtttcagacgaccagccagacatcacaagagggaagggtttggttgattccctcttccaagctccacaagatactggaactcactatgcaatcatgaacttttatgagtaccttatcactggacttaaacaatacaac

SEQ ID NO: 14463 - DNA, 497 bp, Glycine max
  Clone ID: jC-gmle01810078c09d1
acaaaaaatttttttttattaactaaaacgaacaggtagcaggacatgaatatcgtgtcaaggaaaaaattaaatgtagaaaagcaacaaatgcgcaagcggaaagagaaagacatcaagactttaacattgcacacattgtaaaatgtagacaatgtaactcaaaattatacaggataacaatccaatatgaacaagataacttattttattatctcaactcttagcttctctccaagtggagaatgcttaggttctcagggtgtgtataagcaggttccatcatcacttcttgcagttgggtcgaagtttgaggcatttggatcagtacaaccttcaggaacgggaatgtttacttgctgagctgctttgccatagaaagatcctctgttgatggaatcttgattagcatcaccaagagcagcctcttttaagtacttgtctgccagttgtactctcttcacattctcttgttcttgacaagcatgttaccatac

SEQ ID NO: 14464 - DNA, 492 bp, Glycine max
  Clone ID: jC-gmle01810078c10a1
cttataaattgatatgcttgaaaatatagaagtgtcactgaattgctagcgaaaaagtcctcccagccttgtacatttaattataagcaaaagaatcacaaatcagggcattaattgcgggctaagactgacaatgctctacaattagtacaagttattcaacacacacataatgtttactcagctagctactgttacaaggcattttgtcaaggctaacaaggtctgtaaactgcagatatcaagtgaagaagctatagaaactgctaagcttcttgctttaaaagaaggtttgttggtatggcaatgataatttgtggctcttagtgatttcacagtagtttctatttgtcagttattcctgtgaaatccaaactcaatacttctctaatcccaaatatttaaattatcagttttcatgctgattatataattacttgtttttgcagatgggaatttcatcaggagccgcagctgcagctgccataaaat

SEQ ID NO: 14465 - DNA, 526 bp, Glycine max
  unsure at all n locations
  Clone ID: jC-gmle01810078c10d1
atgccattcatccacctgaagccccccnnnnnntnntnnngnnnacnctcnnnnntnnnnnnnnttantttgtnncttattttttantattttttttttcatnnntnattttnnnaccctttggggggggtctttatactatatcccacctttctttccccccccttccttctctttataaccaaccacatcttattatctccaccaaaacctccaaccacaccaccaccaccaccaccaccaaacctaaaaaagacatggccaccttccctcctaagaggtacaaccccagatcaaaaaaaataccccccccccaaccatggaaataccccctgaacaactacgactccaaaacacctatatcatcatccccaaaaacttctaaccccaaacttgaataatcacaaataccccccctccttccaaccattaaccctatatatttcgatccccacccacgatcaccattaaactcaccttatgccacccgtgaaccccctaaaaatgaatgctttacccccaaccc

SEQ ID NO: 14466 - DNA, 445 bp, Glycine max
  Clone ID: jC-gmle01810078c11a1
attccattctctctgtgtatttccttacctctcccttcaagatgcagatcttcgggaagaccctcaccggcaagaccatcacccttgaggtggaaagctctgacaccatcgacaacgtcaaggccaagatccaggacaaggaaggaatccccccggaccagcaacgtctcattttcgccggaaagcaacttgaggacggccgtacccttgctgactacaacattcagaaggagagtactcttcacctcgtcctccgtctccgtggtggcatgcagatcttcgttaagacactcaccggcaagaccataaccctagaggttgaaagctccgacaccatcgataacgtcaaggccaagatccaggacaaggagggtatccccccggaccagcaacgtctcatctttcccggaaagcagcttgaggacggccgcaccctcgccgacta

SEQ ID NO: 14467 - DNA, 545 bp, Glycine max
  unsure at all n locations
  Clone ID: jC-gmle01810078c12d1
gaaccacgaaattatagctaattagctaattatccattaaacactgtcagagcaatccgaaaggaaaaaaagagaaaaaacatagccaactccgttccgcatgatataaaagtttaatcaacctcctccattttgctgccctcagcatcagcttcagcctcctcctccagtgggggcatatcagcatcagcttcagctgcatcctcgtcgatgctcagtccaagcttcaacattctgtggatcctgtttccaaaagtgttgggttcgtcaaggctgaaaccagaagtgagaagagcagtctcgaacagcaacagaacaaggtccttcacggatttgtcgttcttgtcagcatccgcacgcttcctgagctcctccataattgggttctcagggttgatctccattgtcttcttgcttgacatgtatcctgccatgctgttgtcccttagggcttgagctttcatgatcctttccatgtttgcagtccaaccgtattcttcagtcaccagacagcatggtgnatcaacaacacggtcagagactac

SEQ ID NO: 14468 - DNA, 243 bp, Glycine max
  Clone ID: jC-gmle01810078d01a1
aattactgtcaaactttcttttatctatcaccatcacctctaatttacactgggggttacctttaacccatttcaatcttatgctcatttaaaacccccattatctttcttatcttccatcactaacatcataatatttgacaacactctctgctccgataacgtcctaatcattaacaaacatgtttggcattactacttctctcctcacattaaaagttgtccttcctctacaatcctaat

SEQ ID NO: 14469 - DNA, 503 bp, Glycine max
  unsure at all n locations
  Clone ID: jC-gmle01810078d02a1
gtcacgtgcttctcttggtcaagactttggacttgtgcagattaggagcttgaaagcactttaacttcttaatacatggcttgtcaaatgggaactatgactctgaactggagattatcaattacagagaatgaaagctctgaaaagtcatgtgtcaaccttgcaacttccagaatccacagctgttgctgtgagccaaattttaacgggctaactctaaaagcttgcatgaaatcttcaccttttgctcagagctgtttcctgggaagaagagctgggtggaaaatagcttttgcattgaacacaggtggagtgtctggaaatggtgaccaacaaagcttcaacgaagccagttccaatctcggtggtactcgattgggtaggatattgactgcaggtggcagacaacttctagaaaagctgaactcagctagaaagaacatccctttgaaagtattcctgctacttttgggtttctacacggcanatgcactagctacaat

SEQ ID NO: 14470 - DNA, 520 bp, Glycine max
  Clone ID: jC-gmle01810078d02d1
ctccttcaccaagcacatgcaaaggggtgcactgtgcagtgtgcacagagccataaagtcattaagcaatcgtcatatatactattcacatactacaattacatgtacaccactagtatagaactataaggtagcaatagaagaagactacggtcaaaattatggcttaacagagttttatgacatacaacaaaaaattaaaaagacaaaacaaggacaagattttgcgggttcttagcttcccaacttaaaagcatctacaaagagacctaaacatatgccagctttccagtagttcaccagcactagaaaagactgcaacctcccagtcctcgcggtaggtagctttctatatattagcatgccaatcccctcaattgcagccaccacaacaccagcaaccagaacatcccaatcaccggtttgcccaaggattgtagctagtgcatttgccgtgtagaaacccaaaagtagcaggaatactttcaaagggatgttctttctagctgagttcagcttt

SEQ ID NO: 14471 - DNA, 552 bp, Glycine max
  Clone ID: jC-gmle01810078d03a1
gcttaagatcacccaagagagattctaagacacacaacacagactcacacaaagagttacaagagaaatcatcatggcatcagcagcatctgggtttgtgttgtcacttaatgttgcagctgccaccacaaactcaagggtggtcatgttcaacaccaagaacaacacttctaggtttgttgtaaaggcttcagatgagcctgcagcggcggcacccgccaccgccacacccccagctgaagctgaagctaaaccaaagccaccacctattggccccaagagaggtgctaaggtgagctacccccaaaacccaattttttttgtagttgtagttgctcatgttgtgcaaaatagctatcaacatgtcctcttattttcattttctttcttgtcatcaaagatttatataattgatagtaaaaattggatttttttgcaaactaaacacaattattttctcaaactataaacgtgtctttgttttctatattgcatatacggctagctgtaatcagtgtatcaaagtagtttctttgttacaaatatatatag

SEQ ID NO: 14472 - DNA, 362 bp, Glycine max
  Clone ID: jC-gmle01810078d03d1
cgaagaataagattatgagcaactgcacggaggatatagttcatagagaatagagatcaaaggggtcgataacagagagaatatacagattctttttttgtgacatgaaaaatccttaggctagtagtaactgcgatagcatgacaagtatcaaaattacaattaagttggattcattcgacttccacgatctcatccaaagcatagttgtttgttgatacattggcatagttgactttgttgaatcgaaccacaacagggtagcgagtgttggggtcctgcacaacaataaaacaagaacttgagtttgcataatgcatgggatgggagaaaattgagagggtttgcattagagtgagttt

SEQ ID NO: 14473 - DNA, 175 bp, Glycine max
  Clone ID: jC-gmle01810078d04a1
ggagtatcaggacaagtttaattcaagataaagccctttactctgtatcaccttggaggctgtcaattctattcccccatattgtaaagcagttgtgatttctatcaatacaagttttgaacaaaaccagctaaatacattatatatatatatatatatatattttttttttttt

SEQ ID NO: 14474 - DNA, 174 bp, Glycine max
  Clone ID: jC-gmle01810078d04d1
aaaaaaaaaaaatatatatatatatatatgggtaatgtatttagctggttttgttcaaaacttgtattgatagaaatcacaactgctttacaatatgggggaatagaattgacaggctacaaggtgatacagagtaaagggctttatcttgaattaaacttgtcctgatactcc

SEQ ID NO: 14475 - DNA, 559 bp, Glycine max
  Clone ID: jC-gmle01810078d05a1
cacaagcaagcctcctccttcagattctgctcaaagatctttgcaagaaccccggcggtggcttttccgccggtttggtcgacgaaaccaacatttttgaatggagtgtgactataattggacctcccgatactctttagtaagttctcttcactaaatatctctttctttcacactaatttatgcgattttgatttgattattgggattttggattccccttgtttgtgcagtgatgatctcgttgcttctttgttctggggttttgggttcccccctaaaaatcacgtttttaattatacttatcggggggttcttcagagttttatgttatttttctttttgaacagatggggtggtttctttttctgccctgataccgtggaatcattaaggagtttcttttttatattttttgtgagtctttctggttgctttgtttaattctagagacgagattatagttgttgtacggaagcttgacaaaaagatacaggctatgttgtattttattcttttattgcggcttctgcaagaaatgatactgatttggttgttc

SEQ ID NO: 14476 - DNA, 462 bp, Glycine max
  Clone ID: jC-gmle01810078d05d1
aaggtcatgcaaatgaacatctaagggggcattttaactagaaaccaaacactgaccatgcacttataatacatttggtttttccaatacatatggcactatactggtttcaacagtgacaggtgaaccaatccacacattaagttgtatatccttctgttcacaaaaggaagatgagaatccaagctgtcaatcacaacatttcttgtgacttccgcacacatcggctaaccttcttcttgaattcatctctcctatctctccactccttcgcagcttcaacatttgcaggagattcatcattcggactagaaagcatcgatatgatacttaatactatactctgtactgtatgaacaggcgtccagcgctcacttgcaagcttcataaccatttgggtcgtcaccagtaggatgaataaattgatattcaaactcccccatcaggatacactgcatattg

SEQ ID NO: 14477 - DNA, 544 bp, Glycine max
  unsure at all n locations
  Clone ID: jC-gmle01810078d06a1
cacaagcaagcctcctccttcagatgcagctcaaagatctttgcaagaaccccggggatggcttttccgccggtttggtcgacgaaaccaacatttttgaatggagtgtgactataattggacctcccgatactctttagtaagttctcttcactaaatatctctttctttcacactaatttatgcgattttgatttgattattgggattttggattccccttgtttgtgcagagatgatctcgttgcttctttgttctggggttttgggttcccccctaaaaatcacgtttttaattatacttatcggggggttcttcagagctttatgttatttttctttttgaacagatggggtggtttctttttctgccctgataccgaggaatcattaaggtgtttcttttttatattttttgagagtctttctggttgcttgtttaattctagagacgagattataattgttgtacggaggcttgacgaaaagaatacagcctatgttntattttattcttttattgcggcttctgcaagacatgata

SEQ ID NO: 14478 - DNA, 430 bp, Glycine max
  Clone ID: jC-gmle01810078d06d1
ataaggtcatgcaaatgaacaactaaagggggaatttaactagtaaccaaacactgaccaagcacttataatacagatggttgttgcaagacaaatggcgctatactcggttcaacagttacaggtgaaccaatccacacattaagacgtatatccttctgttcacagaaggaatatgagagtccaagctgttaatcacaacatttcttgtgacttccgcacacatcggctaaccttcttcttgaattcatctctactatctctacactccttagaagcttcaacatttgcgggagattcatcattaggactagaaagcatcgatatgatacttaatactatactctctactgtgtgaacaggcgttcagcgctcacttgcaagctcataaccatttgggtcgtcaccaggaggatgaagaattgatatg

SEQ ID NO: 14479 - DNA, 583 bp, Glycine max
  unsure at all n locations
  Clone ID: jC-gmle01810078d07a1
ttccctttcccattcccattcctattcctcctttccctctcctctccgctcctccaatgccccccaaactttctccctccgccgcttcgccgccgcctctctcgcttgccctccaccgccgccgccgcccctcgacgccatggcccagaaaatcggaaagtccacgcgccgccccggtgcctcctccaaggcccgcgtctatgccgatgtcaacgtcgttcgccccaaggaatattgggactacgagtccctcaacgtccagtggggggagcaagatgattatgaggtggtgagaaaggtgggtagggggaaatacagtgaggtgttcgaaggtgttcactgcaccgacggtgagaaatgtgtcattaagatcctgaaacccgtgaagaagaagaagatcaagagggaaatcaaaatattacagaatctttgtggagggcctaatgttgtaaagttgcttgacattgttagagaccagcaatcgaagaccccaagtcttataattgaatatggcaataacactgatntaaagtgctctattctacattgtcagactacgacatacgatattatatttttgaac

SEQ ID NO: 14480 - DNA, 424 bp, Glycine max
  Clone ID: jC-gmle01810078d07d1
gaaaaggaatcaacatttcatttccaaaggttggcacacaatcaaataaaactgtaaacagctgaatttcccccccaaaattaatgttaaaaaaccgaaaacaaaccttttttccaaaaggctatttaaaaggagttttccaccaaaccagggaaatcccttaaaagcaattccaaccaaaattaccatttaaaactgtggccccctttgtaaaaccaacccccttttttaaacaggccccaccacctaagggggcccgagttctactactttctgaatttttaactggattgaagtatggatgggccatggtttttttccagtaggacgtccttggggaccatagcgaaaaaacttgccaacaaagtcaacggcctcaggaacagccaagagatgattttctacattaaagaacttcgcccat

SEQ ID NO: 14481 - DNA, 321 bp, Glycine max
  Clone ID: jC-gmle01810078d08a1
ctccctttcccattcccatttttttatctcctttccctctcctctccgctggtgggggtccccccaaactttctccctccgccgcttcgccgccgcctctctcgcttgccctccaccgccgccgacggccctcgacgccatggcccagaaaatcggaaagtccacgcgccgccccggtgcctcctacaaggcccgcgtctatgccgatgtcaacggcagtcgccccaaggaatattgggactactagtccctcaacgtccagtggggggagcaagatgattattacgtggcgagacaggtgggtagggggaaatacagtca

SEQ ID NO: 14482 - DNA, 380 bp, Glycine max
  Clone ID: jC-gmle01810078d08d1
attcattattttttttaaatgaatcaacattgaattcccaaggcggagaccacaaacacatgattctgaaaactccaaaatcaacacccaatagtaatgttacaaaaccccaaacaaacctattatgcgaacagctaataaaaatgatgttttacaactaaacaggggaatcacccaaaatcaagtcccacaacaattaacacttcacactgttacccccctggcaataacaaacaccatatattaacaagccccaacgccataatgggctctagttctactactttctgcatttataactggattgaaccatggatgggccatgtcttcttttgcaatacgacgctcttgttgaacatagcctattaacttggcaaaaa

SEQ ID NO: 14483 - DNA, 403 bp, Glycine max
  Clone ID: jC-gmle01810078d09a1
caaaaaccactggaactccacctttaagcgcaagtgctcttcaaccatgatcgacgacaacacccaaccgctgaaaagatccgtgagtgccggcgcggctattccagtctctactggactctacatgaacccgcccacaccgggtagtccctccggatccgatgtgagcgagtccagcttaccggttgcatcctcttcgcacgtgttccgtcccgtgcctagaactgtcaaggttctaccacccgtagaaaccacgtcgtcctccaatgaccctccaacttcactttctctatcactccccggtgttggtgttgttgactcatccgaagtctccaatcggacaactgagccgattcattttacaccgcccatgccacatcgggcgaatactatgcctttgctg

SEQ ID NO: 14484 - DNA, 539 bp, Glycine max
  unsure at all n locations
  Clone ID: jC-gmle01810078d09d1
cactgtacattaaccataattattgcctaaaaacattgatggaaagtaaaaaagaacagggaaaaaaacagattcttcttatttttttcccattaggaggagcaaatgaacattcttttctccgatgatactatttacgaatcaaccctgctaattccaatacgcttgacggaagcgttcctaaacccatcattcaccgcagcctgaaaacacatcccattctgattgtgcaactctatataactcctcacctccttccttatcatttcctgcatcaccgaccgaaactctgcgctaaaattaaacggcgccatcaccgtcgctgaaaccgacgtcatcattggcagcaaaggcatagtattcgaccgatgtggcattggcggtgtaaaatgaatcggctcagttgtccgattggagacttcggatgagtcaacaacaccaacaccgnggagtgatagagaaagtgaagttggagggtcattggaggacgacgtggtttctacgggtggtagaaccttgacagttctaggcacgggacg

SEQ ID NO: 14485 - DNA, 542 bp, Glycine max
  Clone ID: jC-gmle01810078d10a1
caaaaaccactggaactccacctttaagcgcaagtgctcttcaaccatgatcgacgacaacacccaaccgctgaaaagatccgtgagtgccggcgcggctattccagtctctactggactctacatgaacccgcccacaccgggtagtccctccggatccgatgtgagcgagtccagcttaccggttgcatcctcttcgcacgtgttccgtcccgtgcctagaactgtcaaggttctaccacccgtagaaaccacgtcgtcctccaatgaccctccaacttcactttctctatcactccccggtgttggtgttgttgactcatccgaagtctccaatcggacaactgagccgattcattttacaccgccaatgccacatcggtcgaatactatgcctttgctgccaatgatgacgtcggtttcagcgacggtgatggcgccgtttaattttagcgcagagtttcggtcggtgatgcaggaaatgataaggaaggaggtgaggagttatatagagttgcacaatcagaatgggatgtgttttc

SEQ ID NO: 14486 - DNA, 523 bp, Glycine max
  Clone ID: jC-gmle01810078d10d1
cactgtacattaaccataattattgcctaaaaacattgattgaagataaaaaagaacagggaaaaaaacagattcttcttatttttttcccattaggaggagcaaatgaacattcttttctccgatgatactatttacgaatcaaccctgctaattccaatacgcttgacggaagcgttcctaaacccatcattcaccgcagcctgaaaacacatcccattctgattgtgcaactctatataactcctcacctccttccttatcatttcctgcatcaccgaccgaaactctgcgctaaaattaaacggcgccatcaccgtcgctgaaaccgacgtcatcattggcagcaaaggcatagtattcgaccgatgtggcattggcggtgtaaaatgaatcggctcagttgtccgattggagacttcggatgagtcaacaacaccaacaccgtggagtgatagagaaagtgaagttggagggtcattggaggacgacgtggttttacgggtggtagaaccttgacagt

SEQ ID NO: 14487 - DNA, 317 bp, Glycine max
  Clone ID: jC-gmle01810078d11a1
gccaaaagttcgaagggtgtgtttttaaacagtggttccaaagcaggagacaatggaaaggcaggctcaggttctggaaatgatggtgtctcacaaagtgctgaaagtggttcagagggatcttcagatgctagtgatgagaatactgaccaacaggaatcagctacaaacaagaaagggagttttgaccaaatgcttgttgatggagccaatgcacggaagaattctgtgagcaccattcctcattcttcagtacctggaaatcccgctgtctcaatgtctccaactagtcttaatattggaatggacttgtggga

SEQ ID NO: 14488 - DNA, 593 bp, Glycine max
  unsure at all n locations
  Clone ID: jC-gmle01810078d11d1
naggggaattctacctccctgagncnnncnnnnnnnntnntggnnannnacnnnccngnnnnnnnnnnnntnggnggtnnnnntcnnnnnttnngngttttttttttttcngggttntntnttttttttggggggggtttttttttttntttttntttttcttcccttttttggttnttactatttaacctacatataaaaatctgcccaataaaagtgctgaaaaaaatatttcgctataatttgttttacaatactaaacgggcaaaacattaggggagtgacaattaaggcttaatggtaaaaatagtaaaccaaggaaaaaaattatatcctatgctcaatttcgccatcgataaaatttcagctgcaaattcctgtctttcgggagttgataatttttcgccgttgctttggcctgatcatcagaagctgtttcattcaagattagcaattgcttctgaaccacacattcgctctaactcttccttgatggaatcattttcagatgtaagcttcttgcattcttcagatactctctgaagctcttctctgagaattcgatgctcactttttagagactccaccctttt

SEQ ID NO: 14489 - DNA, 266 bp, Glycine max
  Clone ID: jC-gmle01810078d12a1
gccaaaagttcgaagggtgtgtctacaaacagtggttccaaagcaggagacaatggaaaggcaggctcaggttctggaaatgatggtgtctcacaaagtgctgaaagtggttcagagggatcttcagatgctagtgatgagaatactgaccaacaggaatcagctacaaacaagaaagggagttttgaccaaatgcttgttgatggagccaatgcacggaagaattctgtgagcaccattcctaattctttagtccctgaaaatcc

SEQ ID NO: 14490 - DNA, 520 bp, Glycine max
  Clone ID: jC-gmle01810078d12d1
gtgactggaacagtctcttcgatacaatctttattatcactgaattgcatgtaagtctcgataaataatgtaggccaaggttatttactatataacctacatataaaaatctgcccaataaaagtgttgaaaaaaatattttgctataatttgttttacaatactaaacgggcaaaacataaggggagtgacaattaagggttaatggtaaaaatagtaaaccaaggaaaaaaattatatcctatgctcaatttcgccattgataaaatttcagctgcaaattcgtgtcttttgggagttgataatttttcgccgttgctttggcatgataataagaagctgattcattcaagattagcaattgcttctgaaccacacattcgttctaactcttccttgatggaatcattttcagatgtaagtttcttgcattcttcagatactctctgaagctcttctctgagaattcgattctcacttctcagagactccaccctcttttgtaactcttcacactcag

SEQ ID NO: 14491 - DNA, 527 bp, Glycine max
  Clone ID: jC-gmle01810078e01a1
gttggtttctttgacagccccaaaattaggtgcaaagaagtttggtggtcctcaccactttctaggaggtagatttgtcccacctgctattgcagaaaaatataagcttatacttccaccatatcttggaacttccatgtgtgttcgaattggaaagcctccacgtattgatatctcagctctaagagagaactatatctctccagaatttcttgaagagcaggtggaggctgacccttttaatcagtttcataaatggtttaatgatgcattggctgctggtttgaaggaaccaaatgctatgtccttgtcaactgtagggaaggacggaaaaccctcatcaagaatggtattgctaaaaggcttggataaggaaggatttgtgtggtacacaaactatgaaagtcgaaaggcacgcgaattatctgaaaatccacgtgcatcacttcttttttactgggatggtttaaaccggcaggtacgggtggaagggcctgctcagaaagtctctgatgaggaatcagaac

SEQ ID NO: 14492 - DNA, 335 bp, Glycine max
  Clone ID: jC-gmle01810078e01d1
gggggaaacaataaatgcttttcttcataaacaagactattttccttccctttccaaaacaaaatcctctcatcacttcacttcctaacaaggatcctacccatcaaccttgcacatcctaaacccattgatctaaaagcaaaaataatgcaccctgcccttcactccaaatctcttccctccccaaaactcaaaaaaacgttcctttatcctaaaaccaccccattacataggcttcaggattaatcctacactcccagtatctctctcatccaaatatttgtactcctgaaaaaaaacactccaacacccaacctcctttctcctcatgctaa

SEQ ID NO: 14493 - DNA, 461 bp, Glycine max
  Clone ID: jC-gmle01810078e02a1
atcatatcttccactccacaaccttaaacttctctctctctctcttcctatgggggaatcccacaaacccctttctctattccatctaaagattcattctttctgcaatttcgatacacgggtcttcattaattcactaagattctgcgtaaataatcgttttcactgaattttctgttccgatggagctaatttcaggattaccggaggacgtagcccgagactgtttaattcgggtttcgtatcagcagttcccaacggtggcgtcggtgtgcaaactctggaaatcggagattcacgcgccggagttccgccgtcaacggcgtagcacaaagcacgcccagaagctcatagcgatggttcaagcacgcgtcgaactgggaaccggttcgaccaagcgactgacgaacccggtttacccgctcagcgtgttcgaaccggaaacgggtaactggagtgag

SEQ ID NO: 14494 - DNA, 496 bp, Glycine max
  Clone ID: jC-gmle01810078e02d1
cacaatgaggcaaaaatatttttcactcgggatattttcatcaattaaactctaatgtgtaagaaaagggctaatttacaaaacaaagactatatactctatgcttatgtaactgtatcatgtttatatggaaaaatcaaaaagccaatttcttaaatctccaaaacacaaccggtttggacatggcccctgaacccttctgggctctccagtttcctccaacagcaactcttcacatcgaacgcaaaagacacgtggacttcaccgtagccgctcgatccaatcaacaccagcgtcccatcaaacgccccaacgtacgccacgttgcgtatctcccccggcagggtcgccatcatctgccacgtgtccccacggagggccatcaggtccccgccgctgcacaagaacacccccttgttatcgccaccgtccacaaaagtcctcggacacgtggcgcaatccaagaaggcctccttcacttcgctccaactccgcg

SEQ ID NO: 14495 - DNA, 372 bp, Glycine max
  Clone ID: jC-gmle01810078e03a1
ggtcataagacctttgagcaattttggtaggagcttgctgataatatcaaggggggtgtccttaacatcgaggccacagtgtcctacattaaggaagccatgtttaaccttctaaaacctgaccctgaccttaccaactagatccacagcaagtgcatggggcttagcaactggtatggcctaataccagaactattccccagtgataagtatgaccatgggatcatgactgggtcaatggaaccttatttgagaaagatgatgcatttatgctagacagccgcctttgttgacttgtgactatagatcatctgaagggtggatctgaacaaatgtaaaaccaacagtatcacctgagatggccacatacac

SEQ ID NO: 14496 - DNA, 458 bp, Glycine max
  Clone ID: jC-gmle01810078e03d1
gggcaatgaaaattgacatacacttgggggcattattcattgacattacaacataaatataaacaataaaattgagttattaactaaaataaattaaggtatacacgattctacgtctaagcatttaccattttatgtccaagctgacatgatattgatgagacatattggtgaatcgaaatctaaacatctaagctgatacaattacagatgaaaataactagtaaaatacatttgatcttatctttgagcctgatcaacagtgtggttgcttgttgtagatgatgatcctgccctaccattcaatattccattgtccataggtggggaggttccccacttaccctctgattcgtttggttctataactttgacagatacatccgtcagcccaacagcaaactgattaggttctagaggatgggcagcaaccacaagaagatacacaccttgacttc

SEQ ID NO: 14497 - DNA, 535 bp, Glycine max
  Clone ID: jC-gmle01810078e04a1
atttgagtttggcacaggaaggatttcttgacactgcagctaagttacacagggaggcgagtttcacttccacatcgcaatttggagatgatgatgcatcttcaacgctttcttctaaaacatctttcatgcgaataaacacttctgatatgggaaattattcagcagaggatcgtgagtctgatggctcaaaatctcgagcatcacataatctcctcttagcatctcaaactagcacccctcgaattactccccctggatcccctcctagtatgtctgcattggtatccccaacaagaacatcatctaagcctgtgtcttcaaggcgccatgcaatttccttttcaacctcaagaggaatgtttgatgataggtcttcagtatggccacaaactggacgaacactcgtggatggaaaagagttttttcgccaagttaagaattcgtttatcttatgagccgtttggtgcatttttggccaatgcttacggactggacttttcataacaaactaaggaggaacactactgaaagc

SEQ ID NO: 14498 - DNA, 66 bp, Glycine max
  unsure at all n locations
  Clone ID: jC-gmle01810078e04d1
tgggaacnnaaagaccgnattctctgttcantagnaccgcnccggaattatttcccgaaacagacc

SEQ ID NO: 14499 - DNA, 500 bp, Glycine max
  Clone ID: jC-gmle01810078e05a1
gcataacttgcatagactattgattaagaaagctattgtcattgatttgctagctccaacaatgggttctagcagattatcattcattttagtacttgtgcttgtaaccttttcatccatgatcattgactcaagggttgcagaggcacgtaccctgccaaaatcagccttattgccttccaaagttgatatacctactgttgttcctcttccactggtggcaccactgccaaatttgcctgttactctccctccagtgcctgaactacctgcagtacctaaagtaccaattcctgaagtaatagttaataacgccaaaataatcccttgagtacctatgatctatccagtcactactacttattttgtcacttgctaaattaacttgttgttgccatcccagggtggttctggttctgttggggtttaatttctgtcattcaattacatgccttgttcagtttatatgttgcttcagtcagttgaacttcagcatatta

SEQ ID NO: 14500 - DNA, 550 bp, Glycine max
  Clone ID: jC-gmle01810078e05d1
cagaaattccttattttattgaactagaagataagttgatacggtacattacacaggtcacaataaataatatgctgaagttcaactgactgaagcaacatataaactgaacatagcatgtaattgaatgacagaaattaaaccccaacagaaccagaaccaccctgggatggcaacaacaagttaatttagcaagtgacaaaataagtagtagtgactggatagatcataggtactcaagggattattttggcgttattaactattacttcaggaattggtactttaggtactgcaggtagttcaggcactggagggagagtaacaggcaaatttggcagtggtgccaccagtggaagaggaacaacagtaggtatatcaactttggaaggcaataaggctgattttggcagggtacgtgcctctgcaacccttgagtcaatgatcatggatgaaaaggttacaagcacaagtactaaaatgaatgataatctgctagaacccattgttggagctagcatatcaatgacaatagcttttttaatcaata

SEQ ID NO: 14501 - DNA, 384 bp, Glycine max
  Clone ID: jC-gmle01810078e06a1
gtttattatagtaggtcataggcattccttgtagctatgtaccatgcaagaatagaaagcaaatttgaactcactatggccctctagcatagagctattcacaccatccccacatccataattgagtcctacttgtagctacgaaaaatagttgtgcaaagagtttacaatgttttaattatttcacacacatgctatttgtacatgtggtgttgatcttattaatcccctcactccaaaacaaaattctcgtgtgcttggttgaagttaaaaaaaaaaaaaaaaaaaaaaaaaaaaaaaaaaaaaaaaataaattaaaattcttaactttttgaacaatttaatacaaaaattaattacaaacccaaaattacccatcttccc

SEQ ID NO: 14502 - DNA, 250 bp, Glycine max
  Clone ID: jC-gmle01810078e06d1
cacacactattaattggggccctgaattttaaacattggaataggaggtctcatataatatacaaccattacaatactttcaataatgctaaaaaagttgggccaagggataatgcaacaacaccattccagaaattactaacaaaatctgatccaacaaacaaaacagaaaacaaaacactttatgactcaagctgagcataccatatgccctggatttttacattctttgtagcctttgctcccaaat

SEQ ID NO: 14503 - DNA, 575 bp, Glycine max
  unsure at all n locations
  Clone ID: jC-gmle01810078e07a1
aggatatcttcctcagagagtttgttttccaatgcttctgatgctttggacaagattaggttcctttccctcacggataaggacgttttgggagaaggtgataacaccaagcttgatattcagattaagttggacaaggaaaagaaaattctctcaattcgagacagaggtattggtatgacgaaggaggatttgataaagaatttggggacaatagcaaaatctggaacttctgcatttgttgagaagatgcaaacaagtggagatctcaatctgattgggcagtttggagtcggcttctactctgtttatctcgtggctgactatgtcgaagtcattagcaagaataatgatgataaacagtatgtatgggaatcaaaagctgatggagcatttgcaatttcagaagatacatggaatgaacctctanggcgtgtgactgagattagattacacctcaaggaagaggcttgggagtacttgcaggagtctaaactgaaagaattggtgaagagatactctgaatntattaacttccctatctatatttgggcaagcaagaagttgatgtggag

SEQ ID NO: 14504 - DNA, 499 bp, Glycine max
  Clone ID: jC-gmle01810078e07d1
gtcagtggacttttcacgatcctcatcagcaatcctacggatgatatcaagggctttcctaataagtttcttcttgattgtctttacactactatgttgctgaagcatttctcgcgatacattaagtggcaatgtgtcataatcaacaagacccatcaaaaagtttatgtacttaggcaacagttcattaaattcatctgaaatgaacacacgtctaacatacaacttcaggttggatttgtctgcgttataatagctctcgtataaatcttgaggtgccttaggtggttcaaacaggactgccttgaactcgacatcgccctcagcagtgaaatgacttcatgctaaaggtttctcatcactgaaatccttggcaagagagtggtagaatttggcgtattcttcttctgttacctcctttggattcctcagccatatagctttcacatcatttaaaagttcccattcataagttgtttccttcaccgtctttgtcttg

SEQ ID NO: 14505 - DNA, 442 bp, Glycine max
  Clone ID: jC-gmle01810078e08a1
gcttaattgtcaagttggaattttttcatactccatggaatggactggttgggggaatagattactgagttagggcaacgatattctgtgttgcgattatgctagttttgatgggttgattaccaagcaagttatgagcaagatggcagaaatgataaacagtctttgtggtggtgatgaaaaattgatgcgtgaaaggacacacctgctgttggcttgttgttcaagaatggcaatttgtaagaaagatgtttggagagttgaatgtggaatcccttctggatttccgctcacagctatttgtaatagcatttttaatgagatgctcattagatatagctattaaatattactgcgccaggctaaagctccaagtattgttttacaatacttcaaaaattttgtttctttgcgtgtgtatggcgatgataacttaattagt

SEQ ID NO: 14506 - DNA, 535 bp, Glycine max
  Clone ID: jC-gmle01810078e08d1
ctcactcattgcacatagtaatgcgctttgggtaagtgaataaaatattacatactagttcacaaatgcaaaaggacactcatcaaccagatatttgagactcttacagttctcaagaagtcgcgtcagcatacggttagtggcgttagaactcagaatttcattcttaacgccaaaaagaacagccagttaagctactggaaaaggatcaactctagtaagaaaaacaattttcttacctctcccaagtgctgtgcgaatccttttgttgatatctgaggagcgattgttaactgcataactaatccaagcagtggtgggtaaaccaccacgtccactaccacatgtaacatttacaacgacagcttctgaaggtaattgacttactggataaagacaattcacaaaaattggtatccaagaattcactggaaaatttccatcaaagaattattgtgtgttagccaacacaagcttatcatcaaaaacaatcttgtttggaaaagcattacctgctccttgtaaacccaacaaa

SEQ ID NO: 14507 - DNA, 441 bp, Glycine max
  Clone ID: jC-gmle01810078e09a1
caagatcatcaccactgaaggtagaaaagttggcataaaaaaagcacttgtgtgtacattggcaaagcacccaaaggctccaaaaccaattggatcatgcacgagtatcgccttctcgattcttcccgcaaacacaacctcggaaccgcaaagcttgatgattgggttctatgtcgtatctataagaagaactcaagttcacaaaaggttgaggctaattttttggctatggaatgcagcaatgggtcatcaccttcttcatcgtcccacgtggatgacatgctgggatcgttgccggagataaatgaccggtgcttcaccctgccacgagtgaactcactcagaacaatgcaccagcaggatgagaaattcgggtctccgaactgggatccgggtttttctcggattgggttaactcgaccgatctcgattcgatttccg

SEQ ID NO: 14508 - DNA, 576 bp, Glycine max
  Clone ID: jC-gmle01810078e09d1
cggccgctttttttttatagcaaatggtgtgacatatcttcattacatgttaatcagggggtctacaaggatgcatgggacactagccaaataaaaataccaatatctaaagttctaaactaaactttggaaaatagttgctatgtattaatgctttgaagtacaacgtgattcatgtttaggcaataatgtcttacaaagcaattacttttcagcatgcattgttgtggttgtggtgcaatcaccattgcgtcctttctcagtttcataatgtgtcaaccgtccttcatcttgttctagccgaaaagtatgaccaaaattgcaatttttcctttccaagcgggaatcaataacacaaaccataacaatggtcatagaattcaaattaaactaaaatccccaattatttacacaattacactttctgatccttcacttcactccctaaccccgaacccaacttgctgacccataataaacccaaacccgaatgggtcacctgagcccggtaacaatcgggtatctggattcggttgaaaatgccccggcccgtcgacccgtcgggtttcacaccac

SEQ ID NO: 14509 - DNA, 374 bp, Glycine max
  Clone ID: jC-gmle01810078e10a1
caagaccatgaccactgcatgtagtaaagacggcataaataaagcacttgtgatggtgcattggccaaacacccaagaggctacaaaaccaaatggatcatgcacgagtagtagtcacttctatatttgccggaacacaaacctagaaccgactagctgagaggatggggccctatagctgatatataagaagaactcaagggcacaaagggttgaagctaattttttggctgtggaatgcaacaatggaacattaccttcttcatcgacccacgttgatgacatgctgggatcgatgcctagagataaatgaccggtgcttcaccctgctacgagtgaactcactcaaaacaaagcaccagcacgatgagaaa

SEQ ID NO: 14510 - DNA, 471 bp, Glycine max
  Clone ID: jC-gmle01810078e10d1
atatcaaatggttttcatatcttcattacatgttaatcagggggggaacaaggatgcatgggacactagccaaataaaagtaccactatctaaagctctaaactaaacttttggagactagttgctgtgtattaatgctttaaagtacaccgggattcatggttatgcaataatgacttacaaagcttttacttttcaccatgcatagctgtggttgtggtgcaataaccatatgcgtcctttttcagatgcataatgtgttaaccagccttcatcttgttctatccaaattgtatgaccacaattgcattttttcctttccaagctggaagtaataacacaaaccatttcaatggttatagaattcaaattaaactaatatgctcaattatttacacaattacactttctgatacttcacttcactccctaacgccgaacccaacttgctgacccataataaacccaaac

SEQ ID NO: 14511 - DNA, 351 bp, Glycine max
  Clone ID: jC-gmle01810078e11a1
gccaaaagttcgaagggtgtttttttctacagtgcttccaaagcatgagacggtgcaaagtcaggctcaggttctggaaatcatcctgcctcacaacgtgctgaaagtggttcagagggatctccagatgctattgatgacaatactcaccaacaggaatcatctacaaacaagaaatggacttttgaccaaatgcttgttgatggagccaatgcacggaagaattctgtgagcaccattcctaattcttcattaccttgaaatcccgctcgctcaatgtctccaactagtcttaattttggaatggacttgagggactcatcttcttctggtgccgaagcttcttaaatg

SEQ ID NO: 14512 - DNA, 550 bp, Glycine max
  Clone ID: jC-gmle01810078e12a1
tgcattattcaatggccaccacagcatctctatccggaaccatggtgagcacctccggcatgaggaagcaacctatgacgaccaagagcctaaagacattccccaacgctctttttggtctgaaaggtggacgaggtggtcgtgtaacttgcatggcctcgtacaaggtgaagctcataaccccagaaggagaagtggagtttgaatgcccagatgatgttttcattgttgacaaggctgaggaagaaggcattgaacttccctactcgtgcagggctggttcttgcgtttcatgtgttgggaaaatggtgaaaggtgacgtggaccagtcagatggtagcttccttgatgatgaacaaatagaaagtggatgggttctcacctgtgttgctctacctaggtcagacgttgtcattgagacacacaaggatggagagatcgaatgatcgatatatatcataatgtaatcttggccattgctcttctaatgccatctatctatgtcgtgttttgattttgtagagtgatttgcattggctgttagctactg

SEQ ID NO: 14513 - DNA, 500 bp, Glycine max
  Clone ID: jC-gmle01810078e12d1
aaaagataaagaataactattattgtcttagacaacatgtgcataaacagtaagcattaccaaactaattaattaaagtgcaacaatttcacttgtttccacaaacatgacaaaagtaattaataaactcgcgatgatttcagctagctaactagccaatgccaaatcactctaacaaaatcaaaacacgacatagatagatggcattagaagagcaatggacaagattacattatgatatatatcgatcattcgatctctccatccttgtgtgtctcaatgacaacgtctgacctaggtagagcaacacaggtgagaacccatccactttctatttgttcatcatcaaggaagctaccatctgactggtccacgtcacctttcacaattttcccaacacatgaaacgcaagaaccagccctgcacgagtagggaagttcaatgccttcttcctcagccttgtcaacaatgaaaacatcatctgggcattcaaactccac

SEQ ID NO: 14514 - DNA, 144 bp, Glycine max
  Clone ID: jC-gmle01810078f01a1
ggctatatgcctactacactatatattgcagagtactatttttcgccgaggggggggagtgctacatataaacatgaatatattgatcatcagatgtgcattgattggttgggtgcacaaggcactggttaagctataccaaac

SEQ ID NO: 14515 - DNA, 97 bp, Glycine max
  Clone ID: jC-gmle01810078f01d1
atatacaatttcacacaatggacatacaaatgctctatctgggtaacaataaaacattgcatacaacgtgacaactacagtatgaccctcatcaaac

SEQ ID NO: 14516 - DNA, 509 bp, Glycine max
  Clone ID: jC-gmle01810078f02a1
gggagctctaggaactctaaagagttgcttgaacaacgagttacatttacgtactgtcagtgctaatattggcatgtttgggacgatgaaagaaaaaataactgattagtctttctattataaaatagagtataggcattatttttttcttctaaaaaaataaaattaagaaattttcatggtaaccattcgtgcagatgaaattagtaaaattatccgtgaacgcattgagcaatataatacggaagtaaaaattgtaaatacgggtaccgtacttcaagtaggcgacggtattgctcgtatttatggtcttgatgaagtaatggcgggtgaattagtggaatttgaagagggtactataggcattgctttgaatttggaatccaaaaatgttggtgttgtattaatgggtgatggtttgatgatacaagagggaagttcagtaaaagcaacaggaagaattgctcagataccttgtagtgaggcttatttgggtcgtgttataaatg

SEQ ID NO: 14517 - DNA, 529 bp, Glycine max
  unsure at all n locations
  Clone ID: jC-gmle01810078f03a1
gatttcagaattcaaaaaaagaattagaaaaagaaaaaatgaacacgttaatctgaccgccttctacaaaccgttaccttggtggggtcccttactctttcctctctccgcttcgaaacatcaccaccaaccttaaccttccgaggttccattccacggttgctaccaacttcttgtcacactctccggttcttgccacactctccgcacgtgccacttctgatgaagtagacacgcaaacagtggttgaggaacttgcagaggagaagaaagtggaagagaacaccaacgaggacaacacatccactttttcttctcctattgacaaagaacttaaaaaggttgctcagaagactgctgctacctttgcaccaagggcttccacggctacaaaaaaccctgcagtgcccggaacggttctgtacagtgtttttgaggttcaagggtatgtntcaatgtttgtggggggagctttgncttttaatctcatcttccttctgatgaactgacatttgnagataatgggaat

SEQ ID NO: 14518 - DNA, 348 bp, Glycine max
  Clone ID: jC-gmle01810078f03d1
acatatcatgactacggtggatttcatctttgggagattcttgattacattctgaaatttcaaattttctgcaatgggagacacggcgataatacaatatgcaaaacttttgaaaacgacctatagcattctcttcatttgataataggaaggatgcaacgtcggtatcttactgcccttgtaaatgcaaaggcttctccatgagaaatcactcatccaggagttggggaccatgaagtgctacaaggaatggcacatctcattggtgggtgccataaaattgggatccatgcgaaagacgagccaacaagccttgattactgttaacaaccaagttggggttcctta

SEQ ID NO: 14519 - DNA, 364 bp, Glycine max
  Clone ID: jC-gmle01810078f04a1
gatttcagaattcaaaaaaagatatattttatgaaaaaatgaacacgttaatctggccgccttctacaaaccgttaccttggtgcgctcccttactctttcctctctccgcttcgaatcatcaccaccaaccttaacctttctaggttccattccacggatgctaccaacttcttgacacactctccggttcttgccacactctctgcacgtgccacttctgataaagtatacacgcaaacagcggttgatgaacttgcacaggagactacagtaggagagaacaccaactaggtcaacacatccactttatcttctcctattgacaaagaacttaaaacaggtgctcataatacttgctgtta

SEQ ID NO: 14520 - DNA, 53 bp, Glycine max
  unsure at all n locations
  Clone ID: jC-gmle01810078f04d1
atgcannnnnnaatgccgaattcctatgatcactcgaanccgcccggaattat

SEQ ID NO: 14521 - DNA, 335 bp, Glycine max
  Clone ID: jC-gmle01810078f05a1
gtgtattttagttcgtgccttgtttttcttccacctatgaccccaacctccacaggcgtgccggtgatgtgtagtacggtcatcaaatttagcactgtgaggagcatgcgattcttgctgactgagaggatcagggcactctgatgcacattctcaccaagactgtaggggacaggatctctatacacagatgcttactggtgcggcttttgaagagctgagtaaacaactttattataactcgtcacattctatgagcctagccgaggtgactttaaatctacagtaaactgtgctgaatattctgctactatggtagatatttttttttatat

SEQ ID NO: 14522 - DNA, 339 bp, Glycine max
  Clone ID: jC-gmle01810078f05d1
gtattcacccaaactatcaaatgcaagagggctttccacaaaagattttgagaattcatctgcatacaagggaggtcactatacttgtaatcctttctataatagagattacacaccttatgccaaactgtttccttaccatatactccaccaaagtggctacttgagggcttaccaggtgtttacgccattctttaaactgccaaagattcctcacatggtccaaaggattcgaaaagcctcataaaactatcctcttccaaaatccacaatacctccccttttgcccactttcccgttgtttaccaacactaagaaacacttcccattgataatcct

SEQ ID NO: 14523 - DNA, 469 bp, Glycine max
  Clone ID: jC-gmle01810078f06a1
gcatatcttgcatagactattgatttactaagctcttgtcatcgatccgctagctccaacaatgggttctagcatatgatcattcattttagtacttgtgctagcaaccttttcatccatgatcattgactcaagggtcgcagaggcacataccctgccaaaatcagccttattgcctttcaaagttgatatacctactgttgttcctcttgcactggtggcaccactgccaaatttgcctgttactctccctccagtgcctgaactacctgcagtacctaaagtaccaattgctgaagttatagctaataacgccaaaataatcccttgagtacctatgatctatccagtcactactacttattttgtcacttgctaaattaacttgttggtgccatcccaaggtggttctggttctgttggggtttaattactgtcattcaattacatgctatgttcaggttatatg

SEQ ID NO: 14524 - DNA, 459 bp, Glycine max
  Clone ID: jC-gmle01810078f06d1
cagaaattccataatttattgaactaaaagataagttgatacggtacattacacaggtcacaatgaataatatgctgaagttcaactgactgaagcaacatataaactgaacatagcatgtaattgaatgacagaaattaaaccccatcagaaccagaaccaccctgggatggcaacaacaagttaatttagcaagtgacaaaataagtagtagtgactggatagatcataggtactcaagggattattttggcgttattaactattacttcaggaattggcactttagggactgcaggtagttcaggcactggagggagagtaacaggcaaatttggcagtggtgccaccagtggaagaggaacaacagtcggtatatcaactttggaaggcaataaggcttgattttggcagggtacgtgcctctgcaacccttgagtcaatgatcatggatgaaaa

SEQ ID NO: 14525 - DNA, 557 bp, Glycine max
  Clone ID: jC-gmle01810078f07a1
tacatgcagaacctgaatcagattttatgcttgcagtgcagtattttggtaactggacagtatttgcaacagttttcatggggttgtatgtgcttgttcacatttggttggctgcaccaagcacaattcaagggcttgagtttggtgggcttgacttgccagattcaattggtgaatttgttgtctgtgcagttttggttcttcaaggtgaatgcatgctgggtataatctcacgcttcataaaggccagagcacaaaagggtagtgatcatggaatcaaagcacaaggagatgggtggttgctaactgttgccttaattgaaggaagcagtttagcttctgttgattctagtgggttgtctgatccctatgtggtgtttacgtgcaatggaaaaacaagaactagttcaatcaagttccagaaatctaatcttacatggaatgaaatatttgagtttgatgcaatggatgatcctccttctgtgctggatgtggaagtttatgattttgatggaccttttgatgaaaagctgcatctttaggacatgctgaaatta

SEQ ID NO: 14526 - DNA, 439 bp, Glycine max
  Clone ID: jC-gmle01810078f07d1
aaaaaaaatttttttttttttttttatgggtattgaaacccccaaggggggaaaattacctgcctggggcgaaattatagcaaattatcctcctgggggtataaaaaagacccttgttaacctgggtcccacattgagggacccacttgactgaaaatgaacccccacccccccttggccaaattgggattttacacccgcccttgtatcaacacctttaccctttctaaaggttacgaaaattattggactccccattgatgaaaaaggtggaggaataaccaaacctggtctaaccccaccccaaagaaaaaaaaattttgcctttttctccaacaaatttgtaaaaaaacaaatctctcttcgctgaaaaaaaaagagcggccctgcaggggcgattttttttttaaaccccccccgaaaccgccaattaaaaatc

SEQ ID NO: 14527 - DNA, 445 bp, Glycine max
  Clone ID: jC-gmle01810078f08a1
ctggaggatctttacctcggaacatctaagaaactctctctttcacgaaacgtgctgcgttcaaaatgcaatgggaagggctcaaagtctggggcttcaatgacctgtgctggttgccagggtactggcatgaacgtgtgtattaggcaccttggtccttctatgattcagcagatgcagcatccttgcaatgagtgtaagggtactggaaagacattctatgacagagacaggtgccaacagtgcaaaggagagaaagttgttcaggagaagaaagtacttgaagttgttgtggagaagggaatgctgaatggacagaagattacattccctggtgaagctgatgaagcacctgatacagtcactggggatattggctttgccctacagcagaaagaacacccaaagttcaaacgataggccgatgacctttttgtagaacaca

SEQ ID NO: 14528 - DNA, 527 bp, Glycine max
  Clone ID: jC-gmle01810078f08d1
ataagaaaaattaaaatggtacttaagatgtcttttgcgagggaatttcttggacaataaattctacagtgtttgcttgtcaaaatcattttgatcaaacactaattatgtttagtcccgcacaagcgggtaaaaaatagcataatcgagatcatcaaatgacattacaggctctgattactgctgagcgcactgcactctttgagcaccaccatgcatatcctcatcctcctcatatgcctcctgctgagcttgatgcctcctccttatctcttcctccatgttcacatcatggagtgtggtctcctcacactcatccagctccatgtctgtcaactgcgatgtacgctttagtggcagagtatcctccaaagctttcacctgatcaagactcagggtatcaggaaattccactgataaatgaatgtaaagctttcccttcaggaagagcctctggtatgttggcattccctcatcatttattgccttgtatgaattaggcttaacaacctccccagggttagatt

SEQ ID NO: 14529 - DNA, 438 bp, Glycine max
  Clone ID: jC-gmle01810078f09a1
gggacatccataccaaagctgaattgtacgcctaaaatgttgctcccaacgtgaggaaaccatataccattactaaacaaagggagaagtggacagaggaagagcatcaaaagtgccttgaagctttgaaattgtatgcatgctggcgtggcgccaaattgaacagcatttacgaaccaaaactgctgttcgagatgaaaaaccatgctcagaagtgcttgtataaggggattataaatattcattccaaatttcaacaaaggattgttactggcaatatagaagacattaacatagaacttgattttgattgggccacaaacctttttcacctatcaataactaagagacaggatgctgaccatcttacaattattatcactcgaaatagagaggaatttgttcacgtatgcagtctcatgcaacacacactgtaat

SEQ ID NO: 14530 - DNA, 534 bp, Glycine max
  Clone ID: jC-gmle01810078f10a1
ataacacaagcctttgcaggccatcttggtgacctcgaactcgctgccatctccattgccaataatgtcgtcgttggcttcgacttcggcctcttgttgggtatggcaagcgctttagaaacgctatgcgggcaagcttttggagcgaagaagtactacatgttaggcgtttacatgcagcgttcatggatcgttcttttcatatgttgcatctttcttttgcctttgtacttgtttgcctcgccggtgttgaagttgttggggcagccggaggagttggcggagctatccggcgcggtgtcgatctggatgataccggtgcactttgcctttgcgtttcagttccctctgcagaggttcttgcagtgccagctgaagaccgcgcccatagcgtgggtgtctctggtggcgctcgtggtgcatgtgtttgtaagttggttgttcgtgttcaagcttcagtttggtgttgttggtgctgctgctactattaacttctcttggggggtcctcactctggggctttttggctacgtt

SEQ ID NO: 14531 - DNA, 566 bp, Glycine max
  unsure at all n locations
  Clone ID: jC-gmle01810078f10d1
aggccagtagtcactcgagacncccgnnnttntnnggnnacnnnctccnnnnnnnnngggcgggntnnnnntnnntnntntttttttttttggaaaaatggagaaaaaaattgggtggggtaatacttctatcatgaaacaatttcactgtcttaataatgacatatatcataattattttagtttcgttcaatatcaccgaagcctaaaacaaatatgcggattcctttggcatttaggttacaaagcgagtatcccttgattagttcaattcttgttttggatcagtccacttcgttaaatgcaattttgctctttcagcctctttgtcccagtcgcatcgaattgtaatgaggctcaatattaatgtctgagttgctgtgccaccaaaaatcatccctgcccagattcccataactccttgattgaagacccaacccatcaaaattccaagaggcaccccaataatatagtagcaacccaaatttatgtatgcaacatatgattgccaccctgatcccactgccacccccgagagaactggttgaacactgttgagcagaatt

SEQ ID NO: 14532 - DNA, 439 bp, Glycine max
  Clone ID: jC-gmle01810078f11a1
cggcttcaaccttgtagttattttctttcttcttttttagctatccctctggggggagaatctagatctcgttcttccttgatctacgttacgcttttagtgaccggatctgtatggatctgaaccagatctacacgcctatggtggttttggcctggtctttcatagatctgatgcatggaggctcagatctactgtacagaggtgtgcgattcatgttcgtctctcttttggaatctgtttcgtagaaagtcgtttggtcttccatgtcacatggttcttgaggtatttttttttgcagatactgtatataatcgatgagaagaacgcatatccagccgcttccgcttgttcgatcgctacagacgcttgtatcggattaattcatgattgattcattagcagcatgtcttcctccggctattgttgttggagatct

SEQ ID NO: 14533 - DNA, 590 bp, Glycine max
  unsure at all n locations
  Clone ID: jC-gmle01810078f11d1
agggaattcagtctcctgagncanccncnnnnttnntgggggggacagcccggttgtnntnntttggccttttacttctcacttttttttttttttttctaactctttgtaaacccatacggggggggaactttaattactcaaaaattattgcaaaaaactaattctgggtctaaaaaaactatatatatactgtataaagtgtggaagaacaataattaaattaattcaaggaattaaattaaaacaatcattatattgatcaactaaatctaccatatgaaaatttcattctttacttggaaagagccgaaattctctacaccttaataattgaagatgtagaagaataatcataatcttcctacatccacgttatttctacgaaaatgctttgcccaacacaatgatattgacacaccagaagctatgcggcgtcattacatttgatattccatttatcgactggagattcacaatgctaatgacctatttttgcattacaaacgttgtagcccgaaataggacttcttgcatgttgattattgtgcacaaagccggcaatacaaatgatccatcttatttggaga

SEQ ID NO: 14534 - DNA, 468 bp, Glycine max
  Clone ID: jC-gmle01810078f12a1
cggcttcaaccttgctgttatgctcttttttattatttagctatccctctcttgagagagctagatctcgttcttgcttgatctacgttacacttttagagaccggatctgtatggatctgaaccacatctacacgccgatggtggcttttgccttgtctttcatacatatgatgcatggaggctcatatctactgtacagaggtgtgcgattcatgttcccctctcttttggaatctgtttcaaagaaaggcgttggggctttcatgtcgcatggctcttgaagtatttttttgggcaaatactgttgctaatcgatgagaggaacgcacatccaggcggttcctgttgacccaacggtacagacgcttggatcggattattcatgattgattcatatgcggaatgccttcctccggctatagttgtcgcaaaattcggatgttgaaaaattagtgcatgatgtgaa

SEQ ID NO: 14535 - DNA, 620 bp, Glycine max
  unsure at all n locations
  Clone ID: jC-gmle01810078f12d1
tgcgaaggtgtccctcttagnccnncnnnnnnttnnttnnnanncccnccnnnntnnnttntttttngtctttttttttttttttttttntttttttttttttttttttttctctttttcttctttgggggtggcttctttctgtctttttttattatgcaataaactaattttggctcttaaaaaattaataattatactggatcaagtgtccacgaacactccttaaattaattcaaggaattcatttaaaccaataattatcttgatcaactaattctaccatatgaaaatttcattctttacttgtaaagagccaaaattatcttcaccttaataattggagatgtagaagaataatcagaaccttcctaaatccacgtaatttcttcgaaaatgctctgcccaacacaatgatattgccacaccacaagctatgcggcgacttccatttgatattccatttatcgcctggagatttacaatgctcatgacctatttctgcattacaaacgttgttgcccgaaattggactccttacaagtagataattgtgcacaaagcccgcaatacaaatgatccatcttattggagaaaagtacccgtgtccgccaatcaat

SEQ ID NO: 14536 - DNA, 415 bp, Glycine max
  Clone ID: jC-gmle01810078g01a1
acaaattggaaagatttgtaagggaaacagttgtagaaagcagtgtgcctggcgaggtggtagcaaaggttgaatgatgcatctctgatgtcaatgatgcaatgtatacattgtaatattgtattcgtgaattgacaaaatcagttttgttttggaggagggggagaaggggatgttgttcttgcatatacaaagctatgaaccagttgtttcttttcatgatgaaggaagtgacttaggtgggtgagttggagtgcattaatttatcaggaccaactgtggagtgagaagctgtaaaagttgagagattgagtgtattaattcatagggaaggctggatttgtaactacattaggttaaatacttgaaaagctatagaagaagaataaatcaaagtgtagggtattgatttggc

SEQ ID NO: 14537 - DNA, 289 bp, Glycine max
  Clone ID: jC-gmle01810078g01d1
gccaaatcaattccctacactttgatttattcttcttctataggttttcaagtatttaacctaatgtagttacaaatccagccttccctatgaattaatacactcaatctctcaacttttacagcttctcactccacagttgggtcctgataaataaatgcactccaacttacccacctaagtaactttctttaataataaaaaaaacaactgggtcataagctttgaatatgcaaaaacaaaatccctttttccccctcttccaaaacaaaaatggttttggcaattc

SEQ ID NO: 14538 - DNA, 567 bp, Glycine max
  unsure at all n locations
  Clone ID: jC-gmle01810078g02a1
tgaaacacaaccttgtgcagaaagcacttctgcccaacagggctggagacaggttgttgatgcattatgcaatgttgtgtcagcctcaccaacaaaagcagctacggcagttgtacttcaggcggagcgggaattgcagccctggattgccaaggatgatgatttaggtcagaagatgtggagaatcaatcagcggattgtgaaattgatcgtggaacttatgaggaatcatgagacttcagaatcattggtaattgtggcaagttcttcagatttactactgcgagccacagatgggatgctggttgatggagaagcttgcactttaccacagttggagctattggaagcaacagctagagcagttcagccagtgctcgagtttggagaatctggattggctgtggcagatggcctttcaaaccttttaaagtgtcgcctctcagctacaattagatgtctttctcatccaagtgcacatgtccgagctctgagtatatcagntctttcgtgacattntgcatacttnttcaatcagatgtagtcctaaaccctcgagattaaatg

SEQ ID NO: 14539 - DNA, 528 bp, Glycine max
  Clone ID: jC-gmle01810078g02d1
gaaaagaaaatcctgcctgatcatacattaatccaaacaatgggaaatgacttccattacaagctaaatcaacataagcataacacaaaatgagacaatatagaaaaggacctggttacagcgtttttcgttactgtacaagactgttctatcgagagcagactcacaagcaagttcagggtgaaacttagtttagctacagtacatacatgatacaaaatgagctttctataaacatactagaattatgactgcagctcttttcaacaggactagcagaattatgcttatttgcaaacccgttagttcaataagcatatcaataacttttttttttctatacgtctagtaaaaaattgtcacggactaagatggatgatttcatttcacatggaaatagtacagcctaactctttggcagcggtatcaagaaagttaatagacaatccgtttgaaagtcggctgtgagcttcccaagtcaagcatttttctatgtcagcttgccagtcaatgacatccaaattgaag

SEQ ID NO: 14540 - DNA, 400 bp, Glycine max
  unsure at all n locations
  Clone ID: jC-gmle01810078g03a1
gattccgcaacagagagtagaaaagatggcgcggttgatcacagtggtgtggtgcgcggtggcggtgctactgtgcgccgcggcgggcgcgtcgtgggtggaggaggcggcgaacccgatacgaatggtggcgggggtggaggcggaggtggttcgggtgatagggcagtgccggcgcgcgctgaagtttgctaggttcatgagcaggttcgggaagagttacccaacccaggaagagatgagggagaggtgcgagatattttttcaaaatcttaagttgattcggttcctcaacaagaaccganaagccgacaccctcttcttttaatatttttgttattggacttgggaggggggcaaagacacaaattaagcgctgtccaaaatggtttttactttt

SEQ ID NO: 14541 - DNA, 448 bp, Glycine max
  Clone ID: jC-gmle01810078g03d1
agtgcaaagtattaaagacatgctatcttaattcttataactgggaattaaagcggagcgcatcaatacaatacaatacaatatgtaactatgaactatcaatatatgatcgttatttatgtctgtgatacacacaattcaggccatgatattcttacgtgatttacagcaacttctaacttatttaatacatcataccaacccaactaggagcaattttcattatacaatgacacttatctttaaactctgaagcatgacaaggtggtagtcaccagggaccatattcttatgcaatttatgccacaactggataagacgcacaagttgcaacaccacacatgttcttccccaattccattttgaagtagccattctcaccccaactttctccccatgaattttttatgagccaatatgggacgccattttcaactccataccccac

SEQ ID NO: 14542 - DNA, 554 bp, Glycine max
  Clone ID: jC-gmle01810078g04a1
catagagggaaaaaaggtcataattcttgacatgggtctgcttgttgctggaacgagaataccgtggtgagtttgaggagaggttgaagaaactgatggaagagatcaaacaaagtgacgagataatacttttcatcgatgaagtgcacactttgattggagcaggagcagcagaaggggcaattgatgctgctaacatactaaagccagctcttgcaagaggtgaactacagtgtattggagccacaacattagacgagtacaggaagcacattgaaaaagatcctgctttggagagacgattccagccagttaaagtgccagagccaactgtagatgaaaccatacaaatactgaaaggacttagagagcggtatgaaattcaccacaagctccgctatactgatgaggctcttgtagctgctgcacagcttgcctaccagtatatcagtgatcgatttttgccagacaaagctatcgatttgattgatgaagctggttcacgagttctgctttaacatgcacagttacctgaagaagcaagagtacttgac

SEQ ID NO: 14543 - DNA, 561 bp, Glycine max
  Clone ID: jC-gmle01810078g04d1
cctatatcccttttttaaccccgctaccctttttctgaattggggttgctttataggcaaaaaacatgatgaggcctaccaggtattccattaaaaactttaggtacattgacaagtaaaacatactatgactatggtttaaacaaattaagtacatagtattagcaaattaaccgcattatacaggaagcgtctctggcaaggattcgggggctccgctgctaccattgagcacaatcacattaccatcagaatcaacatccactataacagagtcgccctccttgatctctctggcaagcatcttctcagccatgctgtcctccaaaagtcgcattatggctcttcttagaggtctagctccataactagggttataaccttcctccaccactctgtccctgaatctttctgtcacttgaagttcaatatctttcaccttcagtctatcaaacacctttttgagcattatgtcagcaatctccttcaccttcagttttgtgagctgcctgaagacaatcatttatccaatctattcacaattctgcctgaatattgttt

SEQ ID NO: 14544 - DNA, 531 bp, Glycine max
  Clone ID: jC-gmle01810078g05a1
cgcgtgttcaaaccttccctgtcatctatagtcgatgaaaatacaaaggttgctattgcattagtatcagatcctgtgtacgtggcagcaaaaaagatgcgggagttacatgtaaatgcagctgtgattgtgatggaaaacaagattaaggggatacttacttcaaaggacatccttatgcgcgtggtggctcaaaatctttccccagagtcggctcttctggaaaaggtgatgactccaaatccagaatgtgcatctctagagacaacaattcttgatgcactgcatatgatgcataatgggaagttcttacatcttcccgtggtggacagagatggaaatgctattgcttgtttggatgttttgcagataactcatgctgcaatttctctggttgaaagtagtcctggagcatctaatgatgcggcaaacacagttatgcaaaaattttgggactcagcttttgctctagagccgccgcctgaagattttgacacccatagtgaaacctctggacgggtgactttggat

SEQ ID NO: 14545 - DNA, 549 bp, Glycine max
  Clone ID: jC-gmle01810078g05d1
gatgaaagttgtttaatatatggaattacaagtaccttaattgagaagaacatggtgacacttcagtattgcatgccacgactatatctttggttctaattacatcagtgactcaaaaagaaaaagataattaaaaacggctgattagagagactccacatcatccacctattccgtgtccatcatttcctttgtcaacgagcatttgatttatgacgaaactctgggattcatagagtaagattatagcatgttttgttttcaagctggcaaacatattactgtctagagcgctttaagtacaccaatacgctaatgctcgttagaacaacaacacctgcaaaaataccagaacggagacgcaatgtactggttttctgtatagtggctgtaccaggttgcagttttgttggtttggttgaattgggaaactccaaatccaactttaaagccttcagtcctgcagacctagcatagctgacggcagccacaagatcgttatcagtcgcaataataattttatcaccatcatcgtccttatacagcatt

SEQ ID NO: 14546 - DNA, 391 bp, Glycine max
  Clone ID: jC-gmle01810078g06a1
agctacactaccaccactttgatttctattgaccaccatcaccctgtggacggttggggaactagcctacacattgacaccacctcgtccatgcactggacccttgacaccaatctctccagcttgagggggacacctaatacaattcaagggcatgcacttatgcctgcgactaaggctggctctactttctcctatggccactgcaaatcaacatgggaaagaagaggaattagaacatgattcaaatgctgatgatagaaaaaatctcccatatgtgtgccatagacaagaagcgagaagagatcaattggcgaacttgagcaggaattactccaagcactgcaagcattctattatgagggaaaggctatcatgtaagatgaagagt

SEQ ID NO: 14547 - DNA, 414 bp, Glycine max
  Clone ID: jC-gmle01810078g06d1
gcaaaaaaaactttttattctaggatagccacatccttggtggggaacaccctgataactcaactctataagttgaggcaactcaatgtatgctattcaaaacacatattacttacaaggatacaaagcccatatacttgcaagttggatggacacacataaattgacatgacaccaattgagtgtgatcttgattacatatcacttcaagaacatttaaggtagaacatcacaatatgctgaatgataaatgtgtcactctcacactaactgctattaatgatgttccattgctggaacaacacatatgattcttaggcatacctaaaaacaagcgttacttacttaccgtaacggaaacaaccttgaacttgaatcatattacattgcagtaccacagtgggagcatttgac

SEQ ID NO: 14548 - DNA, 576 bp, Glycine max
  unsure at all n locations
  Clone ID: jC-gmle01810078g07a1
caaacaacaacactctttctctctcttcaattcagcttcttcagcttcagcgaaagcctgttctaaccgtagatcgtgccttttcttttgtgcctgagaagccacttctctacttgcggttcttcttcttcttcttcttcaattttattcgattcgcttgctggaaaattctttgagtgagggagaggatgtctggtggcacacagaagagtctgagaaaagcacttggagcccttaaggacaccacaacagtctcgttggctaaggtcaacagtgattacaaggaattggacattgctatagttagagccacaaatcatgttgaacgtccggctaaggaaaaacatataagagctattttcagctatctcagctacaagacccagggctgatgttgcctattgtatccacgcacttgccaggcggttatcaaagacacataactgggcggttgctttgaaaactttaatgttattcaccgtgctctaaagggagtggatcctacatttcatgaagaactcatanattatgggagaagtagaagtcatatgctcaacatggctcatttaaagatga

SEQ ID NO: 14549 - DNA, 502 bp, Glycine max
  unsure at all n locations
  Clone ID: jC-gmle01810078g07d1
aaaccaaaatttttcatttattagacttgacgtgttttcatggaacaaattgtataacaatcacataatgaatatagttcccaccatatacaggaaatagcaactgagaacaatatagtccaatatatcaagaacaaattttctgctaaagcgttgaagtagtctcaactaggggcaaatgaaactaagtggtttgaatcagagctcattatcaatttaccttgtacataaaaaatcatataatcaaaaccctccctctgtgctaattattcaaaaagaatttcactctagctaactatggcacacacccaacgtatgatacaagtctattctttcttaatgtttcccaatctcggaatcgaaagcttagagtaatcagagtatccatttcttttttaccttgagcttattaaggatttgttttccacaggaaatgcctagatgagacctgtatatggatngtatgattgaacaggcatacctgagccatatggatggacag

SEQ ID NO: 14550 - DNA, 500 bp, Glycine max
  unsure at all n locations
  Clone ID: jC-gmle01810078g08a1
tccacttatcgtcaacacaacacattaaccaaaccaacaaacaacgatcgctcgcgttcatgcacagtgctgtggccactgaagtaaacgtaactaagtcatttcagttccgaactcactcactcgcatcgcatttttccgtcagatctcggcgagatcgctaaacgaagccgtttttcgctatgaaacgcgagtgccgccgctcgatctcggggtcttaagtttgcgatgcagccaaatttgtttccctttggaagcgtgctggggaatcctttcattttcaatggcgacggcgatttgagcgagggaggaggagggatcgagagctctagggttttcttcttgctcccgttcttcttgctctcccagggcggagcaatggatttgtccaaggtcggcgaaaaaatctagagctccgntaggtccgccagatctctcagattgctccctcccgtttctgaacgccccgagttccagctcgagctgctgctgcaactgct

SEQ ID NO: 14551 - DNA, 330 bp, Glycine max
  Clone ID: jC-gmle01810078g08d1
aaaaaaaaaaaacccccctttttaaaaaaaaaaaaagggggggggaaaaacaaaaaaaaaaaaaagggggggggaaaccaacaccctaatttccgggaaaaaaaaattttttgaaggaaaaaataatttcccaaaaacccctttttttaaaaggattttttaaaaaaccccccccccccaaatttgaaaaaaccccccttaataaaaaagggaaaaaccccccaaaataaacccccccttttacacgggccccccccaaaaaaatcaaaggcaaaaagggccaaaaaattttttttccccctgtttaacaacaaaaaaaaaaaattcccc

SEQ ID NO: 14552 - DNA, 550 bp, Glycine max
  Clone ID: jC-gmle01810078g09a1
aattctctctacagtaacaaggatatcttcctcagagagttgatttccaatgcttgtgatgctttggacaagattaggttcctctccctcacggataaggaggtgttgggagaaggtgataacaccaagcttgatattcagattaagttggacaaggaaaagaaaattctctcaattcgagacagaggtatcggtatgacgaaggaggatttgataaagaatttggggacaatagcgaaatctggaacttctgcatttgttgagaagatgcaaacaagtggagatctcaatctgattgggcagtttggagtcggcttctactctgtttatcttgtggccgactatgtcgaagttattagcaagaataacgatgataagcagtatgtatgggaatcaaaagctgatggagcattcgctatttcagaagatacatggaatgaaccacttggacgaggaactgagattagattacacctcaaggaagaagctggggaatacttggaggagtctaaactgaagaattggtgaagagatactctgaatttattaa

SEQ ID NO: 14553 - DNA, 614 bp, Glycine max
  unsure at all n locations
  Clone ID: jC-gmle01810078g09d1
aggggattacgcatgagacnctcnnnntnntnnnnnacnncnnnnnnnnnnnnnnngngggnnnnnnntnnnnnnnnnnttttttttcntnttnnnnttttnntttngggggggtntntttttttttntttntttttttttctcttttttttttttgttttcagactactatgttgttgaagcatttctcgtgatacattaagtggcaaagtgtcagaatcaacaagacccagcaaaaagtttaggtacttgggcaacagttcattaaattcatctgaaatgaacacacgtctaacatacaacttcaggttcgatttgtttgcgttataatagctctcatataaatcttgaggtgccttaggtggtacaaacaggactgccttgaactcaacatcaccctcagcagtgaaatgactccatgctaaaggtttctcatcactgaaatccttggcaagagagtggtagaatttggtgtattcttcttctgtaacctcttttggattcctcagccatatagctttcacatcatttaaaagttcccactcataagttgtttccttcactgtctttgncttaagctttttttcttcatcttcacttttatcagcatcttc

SEQ ID NO: 14554 - DNA, 411 bp, Glycine max
  Clone ID: jC-gmle01810078g10a1
aattctctctacagggacatggttatgtttctcacagagcagattgccaatgcgagtgatgctatatacaatattaggttcctctacgctccggatatcgtggagtggggagaaagagaaaccaccaagctagcttatcatattaagttgaacagagacaaaaaaattatctcaacacaagaccgccgctttagcgtgacaaaggaggattccataaataataaagggacgacatcgaaatcccgaacttgtgcatttgttgagaagatgcaaacaaacgcacaccttaatctgatgcgggacgggtggaagatgcgttgtactcatggctatctggcatgaccactatggccatggattatgtagaataacggcgataaacggcgtgtatgggaatcaagagctgaggga

SEQ ID NO: 14555 - DNA, 486 bp, Glycine max
  Clone ID: jC-gmle01810078g11a1
gttctttctctcgcaatcttcactacattcaccgagcatttgcattcacattgaatatggctgagactacacaatctaatgctgagttgttggagtggcctaagaaagataagcgccgcttcctgcatgttgtgtatcgtgttggtgatcttgatcgcaccattaagttttatactgaatgttttgggatgaagcttttgaggaaaagagatattccagaggagaaatatgccaatgcttttcttggatttggccctgaacaatcccattttgttgtggaattaacatacaattatggggtgacctcatatgatattggaactggatttggacattttgctatcgcaactccagatgtttacaaattggttgaagacatccgggctaagggtggaaatgtcaccagggagcctggtccaggtaagggtgggaaatctgttattgccttcgtgaaggatcctgatggttatgcttttgagctcattc

SEQ ID NO: 14556 - DNA, 492 bp, Glycine max
  Clone ID: jC-gmle01810078g11d1
attctccaacttttactaaatatattgaaatactgttggatgtcactgtagactgtctagaatctcaaccaaacaggcaaacacatcagagaaaccgtattgaacactactacttcactgataaatacaggagctgatcacttattcatacaatagcattagtactttaaattaaaaagccataactctttactccagctccttcagaaaatcttgattgtcaaccaaaacagttttccatccatcaggatctaagaaagcagtgatctttgtgttaaggccaggaattggtcctggttgccgagtaatcttccctccaagctcttgtgtgactatgttgacaacctcagcactcttgtatacatcatcagtaccaatagcaacctgtgcataagcatttcccttggtgtattcagtgacaccatagttatatgtcagctccacacagttgtctcatgttcctctgcatacccaagcatagctatagtatac

SEQ ID NO: 14557 - DNA, 518 bp, Glycine max
  Clone ID: jC-gmle01810078g12a1
gttctttctctcgcaatcttcactattttcaccgagcatttgcattcacattgaatgtggctgagactacacaatctaatgctgagttgttggaggggcctaaaaaagataagcgccgctttctgcattgtgtgtattcgtgttggtgatcttgatcgcaccataaagttttatactgaaggtttggggatgaagcttttgaggaaaagagatattccagaggagaaatatgccaatgcttttcttggatttggccctgaacaatcccattttgttgtggaattaacatacaattatggggtgacctcatatgatattggaactggatttggacattttgctatcgcaactccagatgtttacaaattggttgaagacatccgggctaagggtggaaatgtcaccagggagcctggtccagttaagggtgggaaatctgttattgccttcgtgaaggatcctgatggttatgcttttgagcttattcaaagacctttaacccctgaaccattgtgcca

SEQ ID NO: 14558 - DNA, 566 bp, Glycine max
  Clone ID: jC-gmle01810078g12d1
attctccaacttttactaaatatattgaaatactgtgggaggtcactgtagactgtctagaatctcaaccaaacaggcaaacacatcagagaaaccgtattgaacactactacttcactgataaatacaggagctgatcacttattcatacaatagcattagtactttaaattaaaaagccataactctttactccagctccttcagaaaatcttgattgtcaaccaaaacagttttccatccatcaggatctaagaaagcagtgatctttgtgttaaggccaggaattggtcctggttgccgagtaatcttccctccaagctcttgtgagactatgttgacaacctcagcactcttgtatacatcatcagtaccaatagcaacctgtgcataagcatttgccttggtgtattcagtgacaccatagttatatgtcagctccacacagttgtctcatgttcctctgcatacccaagcatagctatagtatacttgtattcaggtctatcagtcttcttaccaccctcaaacccaaagccttttcataaaacttaattgagcgctct

SEQ ID NO: 14559 - DNA, 608 bp, Glycine max
  Clone ID: jC-gmle01810078h01a1
gcaagtggagcacttgatccagatagagatgcatctggggatcttgttacttctgttaaaaggggtgtatgggcaatgattgctgtttttcttgcttattgcctactgcaagctccttctacggttcttattaggccacatcctgcaatttggcgcttggttcatggaatggctgttgtttaccttgttgccctcacatttttgctttttcagaagcgtgatgatgctcgacagtttatgaagtttcttcatcctgatcttggcgttgaacttccagaaagatcttatggcgctgactgtcgtatatatctgcctgaaaaccctgcaagcaggtttaagaatgtttatgagacactttttgatgaatttgttctagctcatgttattggatggtgggggaaggcaatattgattcgtaatcaaccccttctttgggtgttatccattggttttgagttggtggagtacacttttcgtcacatgttgccaaatttcaacgagtgctggtgggacagtattattcttgacatcttgatctgcaattggtttggaatatgggcaggaatgcatactgttagatattttgacaggaaaacatacaaatgggt

SEQ ID NO: 14560 - DNA, 514 bp, Glycine max
  Clone ID: jC-gmle01810078h01d1
gaattcaaaagcattcttcactcaatttccttgaggggactggatacacgtttcagaatgattcattccgatggaggcgaagaaattggccaatttataccaatggtggaaacctattcagaagcaagccccataaataataataataataagtacacctctctaccagctggaactataatttgccgcccaaagaaactgatccactaaactaagctaggagaaattaatattcatttataattaattatgaggttgatgatagtatttacaccatgtgtatggctatggtttgttacccataaaaatgaggaaggaatcaatcaaagaataatgcagcattgtaacttgcagcaattgtgaaattatcgcctctttttgttccctaaactgcgatggagttgccaagaccacaaaagcaaaaatgtaacaatggtcactccaacacccgaccagaatattaccagccatataggcattggttttggatacaagccgtgtcccaacttaatgc

SEQ ID NO: 14561 - DNA, 601 bp, Glycine max
  Clone ID: jC-gmle01810078h02a1
gcaagtggagcacttgatccatattgagatgcatctggggatcttgttacttggggtaaaaggggtgtatgggcaatgattgctgtttttcttgcttattgcctactgcaagctccttctacggttcttattaggccacatcctgcaatttggcgcttggttcatggaatggctgatgtttaccttgttgccctcacatttttgctttttcagaagcgtgatgatgctcgacagtttatgaagtttcttcatcctgatcttggcgttgaacttccagaaagatcttatggcgctgactgtcgtatatatctgcctgaaaaccctgcaagcaggtttaagaatgtttatgagacactttttgatgaatttgctctagctcatgttattggatggcgggggaaggcaatattgattcgtaatcaaccccttctttgggtgttatccattggttttgagttggtggagtacacttttcgtcacatgttgccaaatatcaacgagtgctggtgggacagtattattcttgacatcttgaactgcaattggtatgaatatgggcaggaatgcatactgttagatattttgacaggaaacatacaaa

SEQ ID NO: 14562 - DNA, 465 bp, Glycine max
  Clone ID: jC-gmle01810078h02d1
aaaagcatccttcactcaatttccttggggggactggatacacgtatcagaatgattcattcccatggaggcgaagaaattggccaatttataccaatggtggaaacctattcagaagcaagccccataaataataataataataagttcacctctctaccagctggaactataatttgccgcccaaagaaactgatccactaaactaagctaggagaaattaatatccatttataaataattatgaggttgatgatagtatttacaccatgtgtatggctatggtttgttacccataaaaatgaggaaggaatcaatcaaagaataactgcagcattgtaacttgcaacaattgtgaaattatcgcctttttttgttccctaaactgcgatggagttgccaagacctcaaaatcaaaaatgttacaatggtcactccaacaccccaccagaatattaccaccca

SEQ ID NO: 14563 - DNA, 429 bp, Glycine max
  Clone ID: jC-gmle01810078h03a1
ccacttgtcaaagtccttcattgttctttttcacttcatctgctccactttccgcactccaaagttccactgcacagagttgctcaagggcacacaccaacaacaggtgccagagacgagcttcaacagcagaaggatgagttttacctcaatcttggccttgctgtcaggaccctacgggaggacatgcccttcatcttcgtcaaagacctcaattatgacatttacagggatgatataacattcaaagaccctttgaatacatttcctgggattgagaagtacaaattgatcttctgggcattgaggtttcaaggaaaaattttgtcccgtgagattgctctagatgtgtataggatatggcagccttcggagaacgtgatattgatcaggtggaacctgatgggtgtgccccgcgttccatgggag

SEQ ID NO: 14564 - DNA, 501 bp, Glycine max
  Clone ID: jC-gmle01810078h03d1
gaaagagagttttctaattgatctgattaaacattcttaagggtgaacaattatatgagaataaaacgccaagattccattttgcaagagaaacaaaattattcttaattatcaaactttgattatagcatatagatctatctcatctgtgtaaactcaccagacataaaaaccttcatttcctccaacatcagaatgggaaacttgcactcttctgcatccctgcctatctatatacactctgtcctttgagaaaaaccattgtatgctattgaccaaatttcatcatatttaaccaatctattacaacctatagtatatatcatctagggaacaatttactaagtggtcactatgaacatgtagccatacaatcttgtggtaacaacctctctttttgatccacagtgtccttaacagcatgataaaactctaaccatgaaaaagagttggaatccaaaggaccccatgaaaattgtagatttggacttgccgggcaag

SEQ ID NO: 14565 - DNA, 305 bp, Glycine max
  Clone ID: jC-gmle01810078h04a1
tgaagttgaagtcttgcccttctctcttttactcctaacacaagacatcatcatggatggctgcctccggctccactgtcggagctgtccacagagctctttcgaacctgaatgggtctggacctggggtttcagctcccacttcatccttctttgggagcagcttgaagaaggttattgactcaagggtccccaacacaaagatttcctctggaagcttcaagattgttgctggagaagagaagaaagagattgaagagacccatcagaccgacaaggacagatggaaggggcttggctatgat

SEQ ID NO: 14566 - DNA, 355 bp, Glycine max
  Clone ID: jC-gmle01810078h04d1
acgacaaatttttaaggcaccaaattcaatttaagtggacagtgtaactcaaaattatagaggaagacagtccaatatgtaaaatttagtaaaatcatttcaaacttggcatcttctctttgcacctaagacattgagaattctaagaatgctacacgcaagtcccatcacaacttctagcacttggatcagcacaaccttcaggaacagaaatatttacttgccaagtttgctttgcctccaattcaagattggaaaaaagttcccctgttaataccatcctcgttaggatttccaagtgcatcctcgttcaagtacttgtcagccaatgggacttttttgaaattatcttgtt

SEQ ID NO: 14567 - DNA, 520 bp, Glycine max
  Clone ID: jC-gmle01810078h05a1
gccttctctaagaatctgaaactttgtattcatgaggattctcagaacaagacagagcttgctgaattgctcaggtatcactccaccaagagtggtgatgagatgaccagcctcaaggactatgttaccaggatgaaggaagggcagaatgacatctactacattactggtgaaagcaagaaagctgttgagaattcccctttccttgaaaagcttaagaagaaggggttcgaggttctctacatggttgatgctattgacgagtatgctgttggtcagcttaaggaatttgagggaaagaagttggtctctgctactaaggaaggcctgaaacttgacgagagcgaagacgaaaagaaaaagaaggaagaattgaaggagaaatttgagggtctctgccatgtgatcaaggatgtgttgggtgacaaggtggagaaagttgtggtgtctgatcgtgttgtggattctccttgctggctcgtgactggggaatatgggtggacagcccacatggaaagga

SEQ ID NO: 14568 - DNA, 494 bp, Glycine max
  Clone ID: jC-gmle01810078h05d1
gccaaaaagctgacacaaattttccatggggaaactaaatacactactaatccaggaaacggcacctaactagccaacattccaaaatttcgaaaattcaaaacataaacatagtaaaagactgttccccaatcattgtttctaaaaacacaaaggcgaatcaataattaagttagatttaatcaacttcttccatcttgctaccctcagcatcggcatcagcatcggcgtcctcgagaggaggcatgtcagcatttgcttcaccagcatcttcataaatgctcagtccaagcttcagcatcctgtgaatcctgttaccgaaagtgttgggatcatcaaggctgaacccacaagttagaagagcaggctcaaagagtaggagaacgagatccttcacagatttggcattcttgtcagcatcagctcgcttcctcaattcatccatgaaggggttctcaaggttaatctccatggtcttattgctcgacatgtat

SEQ ID NO: 14569 - DNA, 483 bp, Glycine max
  Clone ID: jC-gmle01810078h06a1
atccaagttcactttggtggcagttgaatgagtttgcaaccccacacacaaaaaccaagcccttaaaaatgtcatccccctcgccggtggccacggtggtctccgccgccgcgctgtacgaccgcgccaaagccgagaaagaattcgacgaaaccaaggtcggagtcaaaggtttgatcgattcgggaatcagaaccatcccccctttcttcgtccacccgcccgaaaccctagcggacctcaagcgcggaaccaaacccgggtccgcgccggagatccccacggtggacctcgccgccgaggagagctcccgcgccgccgtggtggagcaggtccggcgggcggcgagcaccgtgggattcttccaggtggtcaaccacggcgtcccggaggagctgctattgcaaacgctggcggcggtgaaggcgttccacgagcagcccgcggaggagagggcgcgggtgtaccgtatggagatgggga

SEQ ID NO: 14570 - DNA, 518 bp, Glycine max
  Clone ID: jC-gmle01810078h06d1
attcacaaacttattaagggtaaaattcatcatcgcatatccaacattgatacatcaccagaaatagatgctaatatatatgtgtacatcactgcctgaagaaatttgtcaatgatttaccgtccaactctttcgtgaagaaccttgtcataaattcatggaacgtgaagttcctataaagagctggtttctctgttgatgttagctctggtaatggtccaaaatgtttctccctatcacttgggttgaggaaaacggcaatagagactcgtggctcgttagaataattggctaacacccgatgatgagcactcttggatgtttcattagaaattatctgaaggaaatctccaatgttaataaccaaggcgttaggctgaggcttgacatggatccaaccctgttcagtctcaacctgcaatcccacaatatggtcctgcagcaacaccgtaagagcccctggatccgcatgcgagttaagcccccaccgtagatcaggttgaggacaaaacgggtaa

SEQ ID NO: 14571 - DNA, 422 bp, Glycine max
  Clone ID: jC-gmle01810078h07a1
ggagttgaaaagggtggctacaccatttcagacaactcatcaggtaacaagcctgaggtgattttgattggaactggttctgagttggaaattgctgctgctgctgctgaggatctaaggaaggaaggaaaagctgttagagttgtttcttttgttagctgggaactttttgatgagcagtcagatgaatacaaggagagtgttctacctgcttcagtaacagctagagttagcattgaggcaggatcaacatttggttggcacaagattgttggaagcaaaggaaaggccataggcattgatcgatttggagcaagtgctccatctggaaaaatatacaaggagttttggtatcaccaatgaatctgttattgctgttgcctataaactttcgtagatatatttgtagggtttcttttatc

SEQ ID NO: 14572 - DNA, 372 bp, Glycine max
  Clone ID: jC-gmle01810078h07d1
ggtacaaattcatacaacgggattaattcaactcatccttcaatgtaaggggttcctctgacaatcatatgcaagaacaatctaatcttccttattggggctaaagtgatatctcaaaaaacaagtcatgtaacagtaacccaaagccacaagtgaaaaccacaagttctagatgagataaaagaaactcaacaaatttttctacgaaagttctttggcagcagcaataacagcttccttggggataccaaactccttgtatatttttccagctggagcacttgctccaaatcgatcaatgcctatggcctttcctttgcttccaacaattttgtgccaaccaaatgttgatcctgcctcaatgctaactct

SEQ ID NO: 14573 - DNA, 494 bp, Glycine max
  Clone ID: jC-gmle01810078h08a1
gcgcaacaagaggaggagcattcttcatcagcggcaagtcaggggaagacaagggactaggaggaggtgctgaaaaggtttcgtgggtcccagaccctgtcactggttactacaaaccggagaacatcaaagagattgatgttgctgagctgagagccacggttttgggcaaaaaattcaaccactaggctctacttaatttcaataattaacctttttggtctcacgtgaatatgttatatgatatatgaagttcacagaaccttcggggattattcagcatggggtttttttcttgtatttctctcttgagaatttggactagcatatgaccaaattaatgtttactagtgtgattggatctcccgttgaaaactcaaagctatgcttctgttgaattcactttcgccgaataataggagtattttgaatctttctatgcaaaatatccaaatgtacacgctctattaagtatgaaccctccttttccgttt

SEQ ID NO: 14574 - DNA, 494 bp, Glycine max
  Clone ID: jC-gmle01810078h08d1
aaacggaaaatgttggttcatacttaatagagcgtgtacatggggatattttgcatagaaagattcaaaatactcctattattcggcgaaagtgaattcaacagaagcatatctttgagttttcaacgggagatccaatcacactagtaaacattaatttggtcatatgctagtccaaattctcaagagagaaatacaagaaaaaaaccccatgctgaataatccccgaaggttctgtgaacttcatatatcatataacatattcacgtgagaccaaaaaggttaattattgaaattaagtagagcctagtggttgaattttttgcccaaaaccgtggctctcagctcagcaacatcaatctctttgatgttctccggtttgtagtaaccagtgacagggtctgggacccacgaaaccttttcagcacctcctcctagtaccttgttttccactgacttgccgctgatggaggctgctcctcctcttgttgcgc

SEQ ID NO: 14575 - DNA, 464 bp, Glycine max
  Clone ID: jC-gmle01810078h09a1
ctcgagccgctcgagccgcttgagtcgttcgaggaggccacgaacacgggaaacgccgaggatatcgatcgatttaataagcgtctggtgcgtgccacgcctcaacacaatgaagactgcaaggaattgctgaaactcatgggagtcccacacattacggctgcgtgcgaggctgaagcttcttgtgctgcgttggccaagggtggacgagtctatgctgcaagcaccgaggatatggacgcactgacgtctggtgtacctgttttgaatcgacgcttgacagtgtcaccggcgaaaaaggttccaattcttgagattcgattggaacgcgcacttcaagagctggatctgactaatgaacagatcgtggacttgtgcattttatgcggctgtgactactgagattcgatccgaggtgtggctccgaagaaagcatctgcaggtattaaggagcacaacaacat

SEQ ID NO: 14576 - DNA, 541 bp, Glycine max
  unsure at all n locations
  Clone ID: jC-gmle01810078h09d1
agggcatgtacttctcctaagncnnncnnnnnnnntnnntnnnnnnnnccnnncnnnnnnnnnnnnnnnnnnntgtngggnnnnntnnnnntnnnnnnnnnntttttttttntnnnnnntttctnntttttttgggtggggttttttttttatttttttttttttatttttcctttttttttttgtttaagttttcctaagtccatcattctacatgcaatccctaaacgcaagaatcaccatcaagttgcgttggctcttcactgcctaacactactatagacctgcactccgcatcttgttatctcttgcccttcttagagacaactgccttcttacctccctttctccatacaggtaccttacgctttttccgcgctacttacagtgcttgttcgcaccgtaaagaaactgccaaatcgtttctgtaactgcccacttttacattattttagtctcgcaatggctgacaccacacggtcctcctggaagccatgtttcttgacttacaagaccaccaactcagtctcccttggtcact

SEQ ID NO: 14577 - DNA, 305 bp, Glycine max
  Clone ID: jC-gmle01810078h10a1
ctcaagccgctcgagccgcttttttttttcgaggaggccacgaacacaggaagggccgaggatatctatcgatttaataagcgtctggtgcgtgccacgcctcatcacattgaagactgtaaggaattgctgaaactcatgggagttccacacattacggctccgagcgaggctgaagcttcttgtgctgcgttgtccaagggtggactagtctatgctgcaagcaccgtggatatggacgcactgacgtttgggggccctgttttttatctactctttgacattgtcacccggcgaaaaaggtt

SEQ ID NO: 14578 - DNA, 432 bp, Glycine max
  unsure at all n locations
  Clone ID: jC-gmle01810078h11a1
caaagttctggcctaccacaggacgtgttgataatgtgtacggtgaccgcaaccgcatttgcacccttctcccagcatcacaggctgttgaagaacaagcagctgccacagcataatgtgttcaaatgacaactattttcatttcccgttgtacataaactcttattcctattcatacagttcttgcacttgttgaatattgcttcatcatatgtgacaatgatgataatccactgctcttaagtttcatccaatcacaggaaaaaaaaaaaaaagtaattcgtataattgctgctgctattggattttaggaatgtattttaggcctatctgttacagtaatgtgaaaaaatggatttgattcatgtnnaaaaaaaaaaaataaaaaatattattatttttttaataaaaaaatttataaaaaaaaaaata

SEQ ID NO: 14579 - DNA, 303 bp, Glycine max
  Clone ID: jC-gmle01810078h11d1
aaaaccactattccactttcctatatttttttcttctaaaaaaaaaaacaaaacgcccacccctgcctccaaatatacaaaaaaaaaaacacatacacaaatcacacacagaaacaaaaaaaaaaaaaaaaaaaaaccaccaaaaacaaccaaaaaaaaaaaaaaaaaacaaaccaaaaccaaaattccccccaaaaaaaaaaaaaaaaaaaaacccggaaccaaaaaaaaaacctcctaaaaaaacaaataaaccccgcaccccaaacatcctctaaaatgccaaacaaacaacaaccaacc

SEQ ID NO: 14580 - DNA, 578 bp, Glycine max
  Clone ID: jC-gmle01810078h12a1
ctttatcttcctttatgttggtatgtttgccttggacattgaaaaatggaaatttgggagtgatagccctggaacatctgtagcaactagttcagtattgttgggtctaattcttcttggaagagcagcttttgttttccccttatccttcctatccaacttggctaaaaaatcaccaaatgagaaaatcagcttcagacagcaagttatcatttggtgggctggtcttatgagaggtgctgtttcaatcgcacttgcatataatcagttcaccatgtcggggcacacttcactaagaagcaatgcaatcatgatcacaagcaccatcactgttgtgcttttcagcacagtggtgtttggtctgttgactaagccactaataaggcttttactgccccatactccacatcataaagaatcaagcatcacgataaccacagatccatctacttcaagtccaaaatcagtcactgtcccacttcttgggagtgcccaagaatctgaagtcgatattgatggccatgatattcatcgtccaagcagcattcgtgctttacttttcactacaacacacactg

SEQ ID NO: 14581 - DNA, 533 bp, Glycine max
  Clone ID: jC-gmle01810078h12d1
gaaaaaaataaatttaatttagctttagctattcaaacttttgggacaagaaatctaataatcaaatattacattttacggaagacgtagagatgagttgagatgcttatggtgcattgcacagccttctcactacccaaagagctaaacaaaatctcaggacaggattcttatacacgcattgctcactccacaaaacttatgcagtttacaaacaaattacatatttcttggcttttttctcaacgccattgatggccattacgttcagttggtgagccaggttctataggaacaaaacccctgccaccaaaaacaggacgcatgaatgcatcatcaaacttacgccacaagcgatgaacagtgtgtgttggagtggaaagtaaagcacggatgctgcttggacgatgaatatcatggccatcaatatcgacttcagattcttgggcactcccaagaagtgggacagtgactgattttggacttggagtagatggatctgtggttatcgtgatgcttgattcttatgatgt

SEQ ID NO: 14582 - DNA, 530 bp, Glycine max
  Clone ID: jC-gmle01810080a01a1
tcgattgctcctctttttctttgtccctaacacacttcaactccactcatttccttttagtggctcttgagtcttgaagttccttattagataagatttatgcaaatcccttcagaaaatctccaatatccaataattgcgccaaacccaaatccatttcacttcatattccttcaacaactcgtcacctgaaccgaaccatgagagaggcgcagaacgacatcgttgcaacagaattcgcaacgacaacaaacgacgaggaggttccgtccggcgtcgttttgttcgggaagtacgagttgcgaaggttgctgggagttggcgcattcgcgaaggtgtaccacgcgacgagcgtggacgacacgcaccagagcgtggcgttgaaggccgtgagcaagaacaaggtcctgaacggaggcttcgccgccaacgtggagcgcgagatctccatcatgcgccgcctccaccaccccaacatcattaacctcttcgaagtactcgcgaccaaaacaaaaatctacttcgtcatg

SEQ ID NO: 14583 - DNA, 554 bp, Glycine max
  Clone ID: jC-gmle01810080a01d1
caaccaccaccagctcatcggttaattggtaaaccagaacaataccaatcaaattaccatcctgcccttctagctttgctccaccaccattcttctcccttctcaccaccacccttccctcctccgtcattgcctccactctctccataattttctctggcaccactgtcgaaacaacccgttcaaccgaattcgatccggtcgggtcctcgaaaagacccgacatatccaacccggtcgagaaagaaattaagtcgaaagcattcaaagacttgaatccggttcgacccaattgcttttcacactcactctccttgaccaaaacccggttgaaccgatactcgccatccgcattgaaccacgtgtccttatagatctcatcgacggttatccttgtcttgggattcgtgtccaaaagtcgtgataagaggaatctcagatcatgtgatatccacctcgggaaccggaattgaccgcggtaaatcttcctatacagaacggagggattgtaatcattgaaggtaaatagccagcaatgagcgcgaacaaacgac

SEQ ID NO: 14584 - DNA, 570 bp, Glycine max
  unsure at all n locations
  Clone ID: jC-gmle01810080a02a1
aggccagctagctcgtcagacnccnagnnnnnntnnnnnnaacnnncnnnnnnnnnnnnnnnnnnnggnnnnnnnnnnnnnnnnnnnnnnttttttttcnnnnnntnntnnntnnnntnnnggggggggngcttttttgntgctttgtagtggacaaaatcggaaccacattcctgggaattgatcttcccaatagaggtatgtggtcctaataatggttttgaaatgtggagttctgagtgggcaaatcaaacttcatggcacttgagtttccttattgacaatcccaaacagtctacagtttttgatattctcttgggaatttctcaagattttgaaattgctggtaatactcttatgccagctttttctgttccacaggctactgccagatcttctgaaaatgcggaatcctctgcatgatctggaatttgtgttttctttcgtttgttcgtttgtttaattcaataaaggaaattagacatgaccctcttgttgagtatgctctgtctatntgaaaatttccacacctcttttaattgtcgtaatgatgtgtgaagtgtgtgttat

SEQ ID NO: 14585 - DNA, 501 bp, Glycine max
  Clone ID: jC-gmle01810080a02d1
aaaataacacacacttcacacatgattacgacaattaaaagaggtgtggaaattttcaaatagacagagcatactcaacaagagggtcatgtctaatttcctttattgaattaaacaaacgaacaaacgaaagaaaacacaaattccagatcatgcagaggattccgcattttcagaagatctggcagtagcctgtggaacaaaaaaagctggcataagagtattaccagcaatttcaaaatcttgagaaattcccaagagaatatcaaaaactgtagactgtttgggattgtcaataaggaaactcaagtgccatgaagtttgatttgcccactcagaactccacatttcaaaaccattattaggaccacatacctctattgggaagatcaattcccaggaatgtggttccgattttgtccacttacatgcatcgaaatgctctgtactgttgctgtttgttaaaaacacttgtaccaatgaggcccaatcactcctttt

SEQ ID NO: 14586 - DNA, 608 bp, Glycine max
  unsure at all n locations
  Clone ID: jC-gmle01810080a03a1
aggcctgtagtcactacgagtacnccgagnnnntanntnnnnngaacccncncnnnnncnnnnnannnnnntggngcnnnntacgngccnnnnccattgtttagaaaacaataatggccaccacctgggggggggatatggagaacaagagtgatcaagaagaactgaagcatcttgggtttgtgaagattgcggcaattaaagcctttgtgtgtgtgtcgaatctctacgacttcgcaaagcaaaactcgggacctttgagatctgctgttggaaccgtggaagacactgtaaccaccgttctgggtcccgtctaccaccaattcaaggctgtccccaaccacctcctcctttttgccgacaacaaggtggatgaagctgctcacaaattcgatgagcatgcaccttctttggttaagcaggttgcaacccaagtcacttgtttggttcaggaagtgacacacaaagctgagaaagtagtgagtgaggctcaatctggaggggcacgagcagcagcaaattatgtagccactgagtccagcaaattgtgctctctgtttcggtgaaattgtggactggtctcaaccaatatccaccattccattcag

SEQ ID NO: 14587 - DNA, 453 bp, Glycine max
  Clone ID: jC-gmle01810080a03d1
gacacaatcccattttgttctacgaacttggttaacttacaccatgggcacacttcgaacccatttcttacacttccatgaacatccacattgccctcaaactgaaacaaatactagccagaagcagattttatgaagaaaatagctaccctattagtagtgctctaagaactctctgccacggaacctgcttcatcttcattcacattgccttctccctgtttaaacgctgttgctatctcatcaattggaatcagaggcaaatagccaaacacggcaaaacccttttcactcgttccctttaccacattgttgtatttttctgaccagtgtgcagctcggggaactgccatctctgccactgaatggaatggtggatattggttgagaccagtccacaatttcaccgaaccagagagcacaatttgcttggactcagtggctacataattt

SEQ ID NO: 14588 - DNA, 545 bp, Glycine max
  unsure at all n locations
  Clone ID: jC-gmle01810080a04a1
ggaatgggacctcttaacaatgattaagtagtgaaccctaaaacaaagaacatgcgcttgtatgttaagcgtgtattcatttcagatgattttgatggggagctgtttccacgttacctgagctttgtgaggggtgtggttgattcagatgatcttcctctcaatgtttctcgggagatccttcaagaaagcagaattgtaagaataatgagaaagagacttgtaaggaaggcatttgatatgattcaagaccttgctgaaagtgaaaataaagaggctgatttctcaacagatgacataattcttggcaagagtcttgttagcgtataaacttttctatttcaattttaagtatttcacttgtatttagaaaagctgttcggatttgctacattatgaagtcgtgaaatattcatgagcttttcgttcagtatttttttcaacaaaaaataatggatattggttttgtcttctnnnnnaaaaannnnnnnntttataanaatttaattatatttaaaatttatattattttttttaatttttat

SEQ ID NO: 14589 - DNA, 327 bp, Glycine max
  Clone ID: jC-gmle01810080a04d1
accattatacatccaacattaaataacttgatggtccataatgctttgttatatgatgatagaaccctatgacatgcatataacttaaatattcatctagttttttacaaaaatatcctatgaaccatataggaatacgtgataatccccctcacagtgaaaaacctccgctcgttactttcttatattgggaaaaaaaaatataatcaggtaatttaatatttttccaaacaagactataacttcttgcaaaaacttcccctaataacacctttatggtgttttaattagatatttcaggcgtaaaaaactattcactacttactc

SEQ ID NO: 14590 - DNA, 515 bp, Glycine max
  unsure at all n locations
  Clone ID: jC-gmle01810080a05a1
agggnaatttgactccgtgaagtacnccnagnnnntnntnnnnngnacccncntctnnnnttnnnnnnnnnntggntnnttnntnnnttttntcttttttttttttgtnnctnttttctanttccttgggggggcttttcccttgtctgtgtttgtggacacttatggaactgggaagattcctgacaaggagattcttcaaattgtgaaggagaatttcgacttcagacctggaatgatcaccattaacttggaccttaagaggggtggccataggttcctcaagacagctgcttatggacactttggaagggatgaccctgacttcacctgggaagttgtgaagccactcaagtctgagaagcctcaagcttaagattgttgtgaagttaatcactcccttcaatggatgtcttgctaggtgtggatgaataatttgcgtgttccatgactactactacttcattcataggtctaatgtcatctcatcaatacttaaactgtttttttttttc

SEQ ID NO: 14591 - DNA, 417 bp, Glycine max
  Clone ID: jC-gmle01810080a05d1
gttaaaaaaaaacagtttaagtattgatgagatggggttagacctatgaatgaagtagtagtagtcatggaacacgcaaattattcatccacacctagcaagacatccattgaagggagtgattaacttcacaacaatcttaagcttgaggcttctcaaacttgagtggcttcacaacttcccaggtgaagtcagggtcatcccttccaaagtgtccataagcagctgtcttgaggaacctatggccacccctcttaaggtccaagttaatggtgatcattccaggtctgaagtcgaaattctccttcacaatttgaagaatctccttgtcaggaatcttcccagttccataagtgtccacaaacactgacaagggctcagggacaccaatggcataggaaacttggacaatgcacc

SEQ ID NO: 14592 - DNA, 182 bp, Glycine max
  Clone ID: jC-gmle01810080a06a1
cttcactctttttaaaaaaaatggttctcaccatttccaattagacacacataaaacgattcgcaatagccgcctctgataattgattactatcaacccaacttcaagttgtgttcttttgtggtgtgtaaccgtattctgtattggttttcatcaattggaaactgggttttctcgctttt

SEQ ID NO: 14593 - DNA, 332 bp, Glycine max
  Clone ID: jC-gmle01810080a06d1
attgaattctaaagttctaaagtaccctgaattgagcctataaaatcctgggaatcttgaccaaacaaattacatcaaatcagtcacttacattccaagcaaaattgagctgaatgtatacaacaaacctttgaataaataacagaacactaataattcagatactttaaagaaaccttaacagatagattgaataattacaagaaattgatattttttttcctgattttggttaagctaatgcctacaagaaagctcacaatcacactacctaaccaaaccctattatgatagatgtcttcatgggatcttctaatgtgatatatgaacct

SEQ ID NO: 14594 - DNA, 571 bp, Glycine max
  unsure at all n locations
  Clone ID: jC-gmle01810080a08a1
aagaaagtagaacgatctcatgaggtccacataactgagatcatctacaagggaacgcacgaccatgcaaaacctcctccaaatcgccggtcaagtataggttcggttaaccttcatactgacatgcaagtggacaaccctgaacacgttgaaccacacaatggtggtgatggtgacttgggctgggctaatgtacaaaagggaaatatagctggagctgctaattggaagcatgaaaacattgaagccacatcatcagcatctgttggccctgaatactgcaaccagtcccccaatttgcaggctcaaaatggtactcacttagattcaggagaggcggtggatgcctcatctactttttctaatgaagaagacgatcaagtcactcatggtagtgtatcattaggttatgatggggaaggagatgaatctgagtctaagagaaggaaactggaatcatatgcagagttgagtggagctactagagccattcgcgagcctagagttgttgtacagactaccagcgaagtagatatcctcgatgatggntatccggtggcggaaatatggg

SEQ ID NO: 14595 - DNA, 494 bp, Glycine max
  unsure at all n locations
  Clone ID: jC-gmle01810080a08d1
gagcaaaataacttttacctttgacatgtgatgaagaatgtcaaacgttacaatgagtctaataatgaaaagtccgcctatgtatgccttggcattacatatatgtataaatctatatatgtatgttatcagatgtaaacattagttttttctttaaagaatcagggaataaaattttacatatgaggtccaagaggcatgcgactcatcatttcttggtacactgatgagccatttgacaggttaaggccaccatgttcaggaatagcctccacatttggctctccctttggcaacatgaaacccaaatcatttgcagcgcattgttgttgttgatgttgctgttgctgttgatgttgttgctgctgctgttgatgttgctgctgctgttgatgttgttgtcgctgctgatgttgttgttgcgctgccaagaacggatgaacaggcatgacaggaagctntgcttgcgcgtggcctaaccctgacatcaccag

SEQ ID NO: 14596 - DNA, 566 bp, Glycine max
  Clone ID: jC-gmle01810080a09a1
ttaattaacttgctaattaatgtactgtcgcctgatattagcggagaacctcattgagagactgccagtaaatttggggaaactccaatctctgaaactgatgaacctggatggaaatcgaattacttccttgcctgatgaattgggccagttagtaaggcttgaacgcatatccatctcagggaatttgttaacatccttgccagcaactattggaagtttgagaaatctggtgcttttaaatgtgtcaaataacaagttacagtctcttccagagtctgttgggagttgcttctctttggaagaattacaagctaatgataatcttattgaagatcttccctcttctgtgtgcaatctctctcacttgaagtcactttgcttggataacaataatgtgaagcagatacccctgaatttattgaaagactgcaaagctcttcagacatatcactgcatgctaatcctatatcaatggatcaatttcagctgatggaggggtttcaagagtttgaagccaggaggaaaaagaagtttgacaaacaaattgattcatatgtgatgat

SEQ ID NO: 14597 - DNA, 482 bp, Glycine max
  Clone ID: jC-gmle01810080a09d1
gacataattaatgggatagaatgcactgccgttcaaatcatatttaaagttcgtaatttacagctgctgagatacatatttcattatcaacaaaatggccccaaataccatattctgaaatttagtctagtgctggatattgcctgcatctacaagccagcacatttataggcaaatctggatagggtaacaaaaaataaaaataagaataatatacaacgtgacaaaaggatctccatacacttatttcatttgtgaaataaaaggcatggacaaaacacccagtattccacgctacattcagaagctcattcaaatgtacaactgaaagaaccccatcaacaagcctaagaccacctcatagatcaacaccctcatcaagacctttggaaccgatcatcacatttgaatcaatttgtttgtcaaacttctttttcctccttgcttcaaactcttgaaacccctccatcagctgaaattga

SEQ ID NO: 14598 - DNA, 577 bp, Glycine max
  Clone ID: jC-gmle01810080a10a1
tgcagcaaaagttgccgttccttctataaaatcaatctgccaaaaatggtactctaagtactctagctaagaaaggcaagccagctgccagttcaagctcttctgaatcttctgatgataactctgatgaggatgaggcaccaaaaaccaaggtggcccctgctgcaggcaaaaatggacatgcttctacaaagaaaactcagccaagtgaaagctctgacagtgatagctctgattctgatagcagctctgatgaaggcaaaagtaagaaaaaacctacaactgctaagctgcctacattgccagttgctccagcgaagaaagtggaaagctcagatgatgaatcaagtgaaagctctgatgaagacaatgatgcaaaacctgctgtaactgctgtatcaaagccttctgctcgtgcacaaaagaaggttgaaagctctgattctgatgatagcagctctgatgaagacaaggggaagatggatatcgatgatgatgatgatagttctgatgaaagtgaagagccacaaaagaaaaaggctgtgaaaaattcaaaagaaagcagtgacagttctga

SEQ ID NO: 14599 - DNA, 455 bp, Glycine max
  Clone ID: jC-gmle01810080a10d1
tttttttttttttttttttttttttttttttttttttttttttttttttttttttttttttgggttttttttttttttttttttttttaaaaaaaaccccggtttgtcccaaaaaaaaaaaccctaatttttaaaaccccccaaacccttttttaaaaaaaaacccccccccaagggtttaaaatttttaccccccgaattctcccaattctcccccccccccgaatccccaaaaaaaacggggggccccccccccccggaaagttttaaaaaaaaattttaaaccttaaagtttcccttaagggccccccccccccattaaaaaaaaaattgggtttttccccccccccccccccccaaaggggggtttttttcccccccaaaacattttgggccccccctctttttccaaacccaacaagtccaaaacccctaaacctccccctttttttttg

SEQ ID NO: 14600 - DNA, 552 bp, Glycine max
  Clone ID: jC-gmle01810080a11a1
gtggtgccttatcgctgtggttattatcttcttcttcctctttcttagatctcttgtttctctacgccgcacgccgaaaccatggccggaaaaggagagggtcctgctatcggaatcgatctcggaaccacctactcttgcgtcggtgtgtggcaacatgaccgcgttgaaatcatcgccaacgaccaagggaacagaaccacgccgttttacgtcggattcactgacaccgagcgtctcatcggtgatgcggccaagaatcaagtcgccatgaaccccatcaacaccgtcttcgatgccaagaggttgattggtcgtagattcagtgattcctctgttcagagtgatatcaaattgtggcctttcaaggtcattcctggtgctgctgacaagccaatgatcgtggttaactacaagggtgaagagaagcaatttgccgcagaagaaatctctttcatggtgctcatcaagatgcgtgagattgctgaggcttacctaggctccacagtgaagaatgctgttgtcaccgtccctgcttacttcaatgattct

SEQ ID NO: 14601 - DNA, 361 bp, Glycine max
  Clone ID: jC-gmle01810080a11d1
ccgccaataaaacattcacatttgggggctaaatacaagatatttcatttaacaagacaaaataattccttcagggaaagtgcataacaattgatttttccatctaatattgaaaataacccaaattacattatgcttaaagcaaccttcatttcagaagggaaaaatatttttaattccattccacaaaaatcattcgattaaaatccaatttaaaaagcataaagttaaattagtttttaaaacaggttttttgaggaaagcaacttcatttagtccacttttcttaatcttggggccagcaccactttcaccagaaggaggagcagcattcttattctttggtgtaccaacaccaccc

SEQ ID NO: 14602 - DNA, 482 bp, Glycine max
  Clone ID: jC-gmle01810080a12a1
cttggtttcatggctgctgcaagtgttcgagtggcaaacgagcttggaaaaggaagctccaaagctgcaaagttctctatagttgtgacagtgcttacatccttggccattggatttgttctcttcttatttttcttatttttaaggggaaaacttgcttacatatttacctcaaataaagacgtggccgatgccgttggggacttgtcacctttgttggcaatctctattctactaaacagtgttcaacctgtactctcaggggttgctattggagcagggtggcaaagtattgtagcatatgtgaacatagggtgttattacatcataggtattcctgtaggagttgtgcttggtaacgttttgaatttgcaagtcaagggtatttggattggaatgttgtttggaacatttattcaaaccggagtgctgacttgtatcacttacaaaactgattgggacgaacaagtaactaaagctcg

SEQ ID NO: 14603 - DNA, 266 bp, Glycine max
  Clone ID: jC-gmle01810080a12d1
gttaaaggacaatgtccaattaaattcaagggtcccatcctttccaacataatttgggtccatacaaataaacaatatttgcctgtttaacacttgccacagaaaatattttgccctaaataaatccggggcttgattcattaattttgaatttaaaaaactaaatcaaagaagggacatgaaacttatcatttggtggaattggttcatgatcagattccaccttgggcccctttttaatacgattaccagctttagttacctgt

SEQ ID NO: 14604 - DNA, 570 bp, Glycine max
  Clone ID: jC-gmle01810080b01a1
gagcatccttgatgtccagggaaatccatatttgtccttttttctgcgtactttcatcgaattattgcttgttagctctataccaacttcttatatatcccatcctccacatctacgcctgaatcatcgtccaactattagttcctctctctgcgttcatatcgcaacatgcttcccttttcaactctctttcaaaccccgttaaccaccgagtattggtacaaccaccccacaacaacacttctagcgttcttgctcatctcccttgttacttgctatgcatggctcaagcccaaggcccaaaggcttccaccgggcccatcgggcctccctttcttcgggaacctcctatccttggacccagacctccacacttacttcgccgtcctggcccagatccacggtccaatcttcaagctccagctcgggagcaaactctgcatcgtgctgacttcgccgcccatggctcgcgcggtgctcaaagagaacgacaccgttttccaaaccgtgacgtccctgccgcgggccgggccgcgagctacggcggatccgacatagtgtggaccccat

SEQ ID NO: 14605 - DNA, 603 bp, Glycine max
  Clone ID: jC-gmle01810080b01d1
aatgaatgatccaacccaggataattttttttataacaaatccatattttttgatgtacaatgacaacgacttatatctaacaccttatgctggtactggtacacataattaatgtagttttttttttttacaaaataattaatatagtgttgagcgttgaataatggatacaagtatattatagtaaactctattgataaagatctgggttggataaccgtggggtggggatagcaaccaaaggtattttctttttgagaacaattccaaatttctctgatacctctaacttttctccttggggtactgtccaatcaaataagtgtacgagtgtggcaagaaaatgcaaaaccgtcttctcagccattgctattcctgcacaaattcttcttccagatccaaaggggaaatagttgaagtcattgccactgaaatccaattttgcatctaagaatcttgtaggatcaaattcgagtgatttcttccaaattgaagggtctctatgaatagcccacacattcacaaacacccgagacccctttgggattgtgtaacctcccacaatagtggtttcgctaggacaatgaggtactagaagtgga

SEQ ID NO: 14606 - DNA, 544 bp, Glycine max
  unsure at all n locations
  Clone ID: jC-gmle01810080b02a1
agagccatgctaggccttacagnacnncncttnnnnnnntnnngnnnannnncnnnnnnnnnnnnnnnnnnnnngggnnnnnnnnnnnnnnnnnnnnnnnttttttttnnnnnnnnnnnnnnnnnnnnnnggggggggnnntttntntnntttttttgttttgtttctttcattatgcgtgagatctctatcctgcgccgtgttcgccaccctaacatcgttcagctcttcgaagtcatggccaccaagagcaagatctatttcgtaatggaatacgttcgcggcggcgagcttttcaacaaggtcgccaagggaaggctcaaagaagaggtcgcgagaaagtactttcagcaattaatctctgctgtgggattctgccacgccagaggggtgtaccacagagatctcaagcctgaaaatttgttgcttgatgagaatggcaatctcaaagtctctgattttggattgagtgcggtgtctgatcaaatccgacaggatggtctttttcacactttttgtgggacacctgcgtatgttgctcctg

SEQ ID NO: 14607 - DNA, 531 bp, Glycine max
  Clone ID: jC-gmle01810080b02d1
agaaaataaattcatactcattcactatatttcaatgggccggttttctcgtatggcaattagacaaacagtaggcacctaacgctccagtcaagaagcaaacctaaaagcaggacaatcaatcctgtgtggaaatttttttaccaatttccatacacaatctataacataaaaaaaaagagagagagagaaagaaagagtgtgtgtgatacagagattagagagaaagtccttaaccatttttctcttcttctctatatctgagtcttcaatcatcagaaggtatacagagcggggtttcaatatcagaagaaatatccggcacaggttcagaaaggccacgtagtagggaaggttgaataggtgtagacaactctgaagaagtagcagactcctccaccatcaaattctgcaatccaggctttaactcatcgttacaaaacctctcatactcggctctatcccctccttttttcttcacctccaccacaaccaaagaaggtgtcaactcaaatatctcagcagcaatag

SEQ ID NO: 14608 - DNA, 665 bp, Glycine max
  unsure at all n locations
  Clone ID: jC-gmle01810080b03a1
agggccatttagttcttactgtacnnctnttnnnntnttttnngnnannnncnnnnnnnnnnnnnnnnnnnnnggnnnnnnnnnnnnnnnnnnnnnntttttttntnnnnnnnnnnnnnnnnnnnnngggggggggtntttnnnnnnntnnnnnnntttttttcctttatcattcttgtgtcacagacagcattctcatcaacgccggcaccgactgcaccgaggagttcgaagccatccactccgacaaagccaagcaaatgcttgaagactaccgaatcggcgagctcaccaccacctgctacaactctgattcttcatcgtcaaacccctccgtgcatggcagctccgacaccatccttttgacccccatcaaggaagtgattacaccaatgcgaagcgtggctcttaacccacgcgagaaaatcccatgcaagctcatctccaaaaccttcatctctcacgacgttaggcttttccgctttgccctcccctccgacgacctacttatgggtttgccagttgggaagcacatattcctatgtgccaccgttgacgagaaactatgcatgcgagcctacactccaacaagcatcgttcacgaagtgggatacttcgaccttgttcgttaatgtttacttcaaggggtgcaccctaagttccca

SEQ ID NO: 14609 - DNA, 485 bp, Glycine max
  Clone ID: jC-gmle01810080b03d1
agttgcacactgttttatttatttatttatacatgcaaaagtagtcgggataattgacatacttgtctacatcaaaagttgacgaggaaaagtaaacctgcgtagctagctagctgtcccatgtacacttttatttaaaaattgaaacataaaaaaatcttgaaacgaagcagctaatagaatccattatttatatataacaataaactactatatacacatacaatgtattctagtttagtcccctaaaacacgagcaagttattctgggtgtcgtagcccaacttctccaaattcggctggactgcaaattgaatcataggtggtggtccacaagtcaatgccaaggtatcaggagatgcatttggaatatgctccgtcaggatacttttagtgatgaatcccacactgtattcccacccttctcttatgcttttttgtatcacgtaccacacctttaacctatcatactttttagcccactc

SEQ ID NO: 14610 - DNA, 549 bp, Glycine max
  Clone ID: jC-gmle01810080b04a1
aaaacaaaagcatgtgatgtttactgcgcgaatttgaagagttgtttcttcctgggcatcgcgcttcttctcactctctccacaatcgccttgacctacgtgaaggagaaaacggtgtcgtcagagaaaacggtgaggagttcggtggaggaggatgggtcccacgggggcatgccgtgcttcgggcagttattcggtgcgttccgcgaactgaagcgtcccatgtggatccttctgttggtgacgtatctgaactggatcgcctggttcccttttttgctattcgacaccgactggatggggcgtgaggtgtacggagggacagtaggggaagggaaggcgtacgataggggtgtccgcgcgggtgcgttggggctgatgttgaactctgttgtgcttggtgcgacgtcgttgggagtggaagtgctggcgcgtggggttggaggcctcaagaggctgagggggattgttaactccttgttcgcgggttggttggccatgaccgttttggttactaagatggcccaacaatttcgacatacaccctac

SEQ ID NO: 14611 - DNA, 545 bp, Glycine max
  unsure at all n locations
  Clone ID: jC-gmle01810080b04d1
gccaccgcatcccaccacgaatcgctggcaatgttatccacctccaaatagagcatncccatggtccagcgtatcacatgacaccaccatcntgtggtatgacaatntgcatagattgagccactcccagagacaataccttggctctgcgccctgaggttgctggagaatactttgatgctagagcaaacgggtattgctgtaagtaaatcgcgaagtgggattccgaggaagagagaatgagagccacacgcgccgtgctttgaccggcggcgggaggagggcaggggttctctggtgggccgttggggagtagaggtgtatttgtaaagaatgttgggccatcttagtaaccaaaaccgtcatggccaaacaaaccgcgagcaagaagttaacaatcccccacaggctcttgacgccctcaaccccacgcgccagcactttcactcccaacgacgttgtaccaagcacaacagagttcaacattagtcccaacgcacccgcacggacacccctattggacgccttcccttcccctactgtcc

SEQ ID NO: 14612 - DNA, 565 bp, Glycine max
  unsure at all n locations
  Clone ID: jC-gmle01810080b05a1
attctttcacgggggaagcttctctcattcctcggccaacagtcacatctacgacaccttctgccgccgccttgtgaggatttgcaaggctgctgtggtgtctgtgaactaccggcggtcaccggagcatcggtatccttgtgcatacgacgacggctgggcggcattgcggtgggtgaagtcgagagcatggctgcaaagtgggagggaggccaaggttcatgtctacttggcaggggacagttctggagggaacattgttcatcatgtggcagtgagggctgcagaggaggaaattgaggtcctggggaatattcttctccaccctttgtttggtggggagaagagaacggaatcagaattgagattggatgggaaatactttgtgaggcttaaggatcgtgattggtattggagagcttttctacctgaaggagagaatagagaccaccctgcttgcaacccttttggaccaaggnggagaagcattgaaggactcaaattccctaanagtcttgtttgtgtggctggtttggatcttctgcaggattggcaattggcatat

SEQ ID NO: 14613 - DNA, 373 bp, Glycine max
  Clone ID: jC-gmle01810080b05d1
aggaccacacatttccttggatttcggggttgtatatgtcaagctttagttatgtatgcctcctgtaggtaagggaaggttaaatagtagcagtagtagtagtagtcgtctgtcgtcttagtactaatagtatattaacagtcagaatcagaattgacaaagttgttgatttctttcatgaggcaatagaaatggtcattgtttggcaagaagtagaaaccaatagtggcttccttgaaaaaaaaaagcttgacctgttgtccacaatcctcaagaccttttgcatattccaattgccaatcctgcagaagatccaaaccagccacacaaacaagacttttagggaatttgagttcctcaatgcttcttcccc

SEQ ID NO: 14614 - DNA, 211 bp, Glycine max
  Clone ID: jC-gmle01810080b06a1
ttcgaacgttgaaggttattgggtgctctgttgattgggatgagactctggttagggttggatgttccaacaatgggttggttgaggttcacttggagaagcttcaggttaccgatgtagggcttgttgccgtgtctaaatgtttagggttggacactttgcacgttgtgaagaccgctgagtgctccgacgtggggctttgtgcggttgc

SEQ ID NO: 14615 - DNA, 368 bp, Glycine max
  Clone ID: jC-gmle01810080b06d1
ggaaataaaacagtctttttactaaggtgatataaccagaaatgctggcgggtcaatgagggtgaccgacaaatctagtcaacaaaagaaatgctgctgctatcagctactcaggcaaaaacaaaaagtcacatagcaaccctgcaaagaacaggcaatcgacatgagaactattatagatatattggggaatgcgaacatggcaagactgtgtttgcgctttcttactaacatcatccaaaactgctactggagacattatcactgttagaccaccttttgaaggcacccggtactaaatttctaccagccaaaaacccaaaccttgatcttaacattggcattcgggtgttattattacttgaaga

SEQ ID NO: 14616 - DNA, 181 bp, Glycine max
  Clone ID: jC-gmle01810080b07a1
gcacacctgcagtgcccacctacttacgatcaacaaacccacaacccgaccccagcgacggcctgcgactgatatggctgccggagccattgacaacatagcgaatctacatgaatcgtaacggacaaagggggctccatcgtcaaagcgttaacattccttgagctcagtttcctgcaca

SEQ ID NO: 14617 - DNA, 370 bp, Glycine max
  Clone ID: jC-gmle01810080b07d1
ggttatacacatcacccattcacaagtactctaggggagacaaagccaccttctgccaatctctaactggagcagccccgctaaatgcgacaagaccaaagaaacgcctatcaaatgcaaagttactcccacccttcgtcgcaatatgccaaaacctttttcgaaaaccgtccagaaaaaagttttcccaggctagcacctgggtctaaaaaagtcatttgaacatggaccacggcaagctccgggtcctcctgaaagggggtaatcgttgaagaagcgaaaggacatatggtaacaaatggaatctttgtgacgtaaaataatgcaatacataaaagaaaaagccttttctaatgcctgaaaagacatg

SEQ ID NO: 14618 - DNA, 527 bp, Glycine max
  Clone ID: jC-gmle01810080b08a1
atcacaccccccattgcaatgaccttcatcaacaactcttctgcatcttcaaactgggttgtggcttttctaagtgctgtgattctttctttcatctttttcttcaggtcctaaagcatacttgtgatttcctccattatttcctttgagatttggacagtagttggtcatacacccaattctaaattagagttgggatgtctggaggagtagtttgatacagtgatgcatctccacagatacttgagtaaagctatatgctgtggtgtagatttttactatggagttaaatgcaagttatgacgtcgagcattcacattctacacaaagaatacagcatgagctgtggcctctagatccaattgatccaaagaaggcaaagtttccatgttgtttggtttggaatccacttcctgtggtctcatggttggctcccttcattggtcatgttggcatttgcagggaggatggagttgttttagatttttcaggatcatatcttgtgaatgttgatgattttgcatttg

SEQ ID NO: 14619 - DNA, 492 bp, Glycine max
  Clone ID: jC-gmle01810080b08d1
caggttgctttacagttccaccaattagtcaatacaattgcatgggtcacggtctaacgaagcatcaagtacactttcaaaagctattccattaactttccataagagataactatttcttgttccaatatcaacatttaaacctgttatttggagaagagggaacacaaatcatgaccatctttcaattcaagagaccatctagcactctaatagggttctaaataggcaagtacccaatagaaaccaccctattaagagtagagagaaggatagtaacccaagtaagaagggccatccaaccataaaaacacctaagcaaacaaccacaacaaaaggcagaaaagaccttacaattgacctgaaatcaacccagtgccccttaaatattaccaaagctcctacattcaccatgttccaattcattgatccaccataacacagccgattcagacagttggcaacaaacgagtggcatttgcaagtgaaaag

SEQ ID NO: 14620 - DNA, 531 bp, Glycine max
  unsure at all n locations
  Clone ID: jC-gmle01810080b09a1
gttaaaagccttagccttccctacttctccaaacacaaagacatcatcatccatgggtgcctccgtctccactgtcggagctgtcaacagagctcttttgaacctgaatggttctggagctggagcttcagctcccagttcagccttctttgggaccagcttgaagaaggttattgcctcaagggtccccaacagcaaggtttccggtggaagcttcaagattgttgctgtagaagagaagaaagagattgaagagacccagcagaccgacaaggacagatggaagggtcttgcctatgatatctcagacgaccaacaagacatcacaagaggaaagggtttggttgactcccttttccaagctccacaggatgctggaactcactatgcagtcatgagctcctacgagtacctcagcactggacttcgccagtacttggacaacaaaatggatggattctacattgctccagcttttatggacaagcttgttgttcacatctncaagaacttcatgaccctgcccaacat

SEQ ID NO: 14621 - DNA, 484 bp, Glycine max
  Clone ID: jC-gmle01810080b09d1
aagtggacactgtaactcaaaattatagaggaagacgggccaatatgaaaaatatagtaagatcatctcaaacttagcatcttctctttgcacctaagacattgagaatgctaagaatgttacacgcaagttccatcacaacttctagcacttggattagtacaacaaccttcacgaacagaaatatttacttgccaagtttgctttgcctccaattcaagactggaagaaagttcccctctgaatagcatcctcgttagcatttccaagagcagcctcgttcaagtacttgtcagccaattggactctcttgacattctcttgttcttggacaagcatgttaccatacagcaagagcttctccagagtcatcttgggctgctcaaaggttggaggtccatcttttgagttcacaagcttcttcccaacactgtcaacaccaacaccagaaatccacttcctcacttcatcatcatatactctg

SEQ ID NO: 14622 - DNA, 552 bp, Glycine max
  Clone ID: jC-gmle01810080b10a1
gctcagtgaagatgataaattgactgttgtccgtgcccgtaagattcagcgattcgtaagccagcctttccatgttgctgaagtcttcactggtgccccaggaaaatatgttgagttgaaggagaacgttgccagcttccagggtgtgttggatggaaaatacgatgaccttccagagcagtcgttttacatggttggcggtattgaggaggtcattgcaaaggccgagaaaattgctaaggaatctgcagcgtcttaatcacacacagccctgttctcattttaatcccttttttttttgtaattgctaaatttaataatttaggaactcttggcaatgccaaacaacaaaattttccattttttgggtatgaaaatgtatcaggttattccttccttccattttaatgttgccgactgtgagatgaactacggtcaatgtctgtggccaaactgcccccctgtttttaagttgtgttatttaataaggggaaaagggcaagaggatgtacattttttactttctggttgagaaacgtggatgcaataatg

SEQ ID NO: 14623 - DNA, 320 bp, Glycine max
  Clone ID: jC-gmle01810080b10d1
accctggccattgaccttgtgggggagacttcttaatttttaacataaatgcctccaacacttcttaaccaaataagtaaaaaatgtacttcctttttcccttccccccttaattaataacacaacttaaaaacaagggggcagttttttcacacactttgtccgtaggtcatcatacaaaaagggaacattaaaattgagggaaggaattacctgatacatctacattcccaaaaaatggaaaattttttttattggcattgccaatagctcctaaattcttaaatttaccaatttcaaaaaaaaaagggattcaaatg

SEQ ID NO: 14624 - DNA, 509 bp, Glycine max
  Clone ID: jC-gmle01810080b11a1
cgcatggggaattcaaggccccctatgcgctaatttacagaaacatggcggttggaggcgtcgaaggtttctccgcactgccccagcattgcttgcagctctgttacgggttctttgctttcgcggtggtggtgaacatggtgagagacctctcccccaacgtgtttgggaaatggatgccgttgcccatggtgatggcgattccctttctggttggtgcctactttgccattgatatgtgccttgggagtttggtggtttacgtgtggcacaagcttaacactaagaaggcagaggccatgattccagcaactgcctctggactcatttgtggagaaggcctgtgggctcttcccgcttccattcttgctcttgccaaagttaacccgcctatctgcatgaattttcttgcttcctagaacttgatcaactacatcaaaccaatgaatgccataattagttagttaattaatactactatatatgttagcaggtacacttcatacata

SEQ ID NO: 14625 - DNA, 500 bp, Glycine max
  Clone ID: jC-gmle01810080b11d1
aattatgactcctgtgaagaagaaattcccttccgagagatcaatgggcaggaactgacttttcctacaaagttgtagtaagcaataatacaatgttcctaagcccaatggccagacacttggaatatttatagcattttggttatgtatgaagtgtacctgctaacatatatagtagtattaattaactaactaattatggcattcattggtttgatgtagttgatcaagttctaggaagcaagaaaattcatgcagataggcgggttaactttggcaagagcaagaatggaagcgggaagagcccacaggccttctccacaaatgagtccagaggcagttgctggaatcatggcctctgccttcttagtgttaagcttgtgccacacgtaaaccaccaaactcccaaggcacatatcaatggcaaagtaggcaccaaccagaaagggaatcgccatcaccatgggcaacggcatccatttcccaaacacgttggggag

SEQ ID NO: 14626 - DNA, 527 bp, Glycine max
  Clone ID: jC-gmle01810080b12a1
ggttcccattcaaggcctttttctttttcccaacccaatgcgccttaaagggacgggatgtgacagaattctctgggcttacatccacttcatgtgtcacatatgctaacagtgctagagaatcttccttttttgatcttgtagcttcccaactcactcccaagaccaatggatcaactcctgtgaggggagagacagtggccaagttgaaggtggcaatcaatggtttcggacgcattggtagaaacttccttcgctgctggcacggccgaaaagactcaccccttgaagtcgttgttgtcaacgacagtggtggtgtcaagaatgcttcgcacctgctgaaatatgattctatgctgggaaccttttaggcagatgtgaaaatactatacaatgaaaccatcactgttgatggtaattccatcaatgttgtttcaagcagggaccctcttaagcttccattggctgagcctggaattgactttgttattgatggaacgggatttgtttgtggttggccctggggc

SEQ ID NO: 14627 - DNA, 342 bp, Glycine max
  Clone ID: jC-gmle01810080b12d1
caacttccttctatattttttttttttcacacaaaacacccacggaaagggggtctcttttattaataaactttccatccctaaacagcagggtttgattcacaaaaacccaacattgggtctccatttccctctttagggccccctggccacttgtttgctcccaaactggccaaacctaccacttttgggctgaacccccatatattggaaacccaagaacccacttcaaccattttatatcccatgaccatattgaaggaggattcattattgccggaaacatcagacccccgtgagtcgtctaacccaagtggaacatcacacacgtgcaatacacct

SEQ ID NO: 14628 - DNA, 462 bp, Glycine max
  Clone ID: jC-gmle01810080c01a1
tgggaagtaaataacagtaatgttgctctcatggcaaaaaataactttgcagtcaacaaggttgtagctcttgtatgccaaaacttcacttgtagcccctctgtgactgaccattcgtcacttaaagctttgctctccaaaaaaccttcctcttcgttcacgtaagctattggttctgatgagtaggaaaatagttaacgtcggcgaaagctccctcttagagatccccctttcaatctacagaactagttggttctgacttctctgtcaaaataaagataggtaacattctctgttgacttgaggaattgatgcatgtccttttcgtatgcctgtgctcaacaagccatgatttttcttcaaatgtgatacagaatgatggaatcatggaagtatgtataattgtatatgcaatgtaagctatcgttgaaataattatcttttccagttggagtctgttct

SEQ ID NO: 14629 - DNA, 444 bp, Glycine max
  Clone ID: jC-gmle01810080c01d1
ttttttttttttttttttttttttttttttttttttttttttttttttttttgtttggttttttttttttttttttttatttttttttttttttttttttttttttttttttttttggaaaaaccccccccccttgaaaaaaaatttttttcaacaaatgcctaaaatggtttaccaaataacccccccccccataaacccccttttttttttccctttaaaaaaaaaattttttttttttccccccccccttcaaaaaagaccctcccttttttcctaaataaaaaaaaaagggccccctttttttttttcacaaaaaaaaaaaaccccccttttttttttttaaaaaagggggttctttaaaaaggaacttttcccccccttaaatttttttttccattaaaaaaacaatatttttccttaaaaaaaaagaatgttttttgg

SEQ ID NO: 14630 - DNA, 635 bp, Glycine max
  unsure at all n locations
  Clone ID: jC-gmle01810080c02a1
ggccattactccctanganccnnnnntnntnnngnnnnnnccnnnnnnnnnnnnnnnngggnnnnnnnnnnnnnnnnnnntttttttntntnntttnnnntttttttggggggtgttttttttttttttttttttttttttttttntttttnnggaggagctccagcgtgtcatggaagaccttgacaccgatcacgacggcttcattaacctctcggagttcgccgccttctgccgctccgacaccgcggacggcggcgacaccgagctccacgatgccttcaacctgtacgatcaggacaagaacggcctcatatccgccacggagctctgccaggtgctgaaccgcctcggaatgaagtgctccgtggaggaatgccacaacatgatcaaatccgtggattccgacggcgacggcaacgtcaacttccccgagttcaagcggatgatgagcaacaatcgcgaaaatgctagcaatgctgaaaaaaaaacagattaggccctttggatttgaattttatagataggctatgcactttcgctgcacaatctcttgactaataaatctnaggtctgtatgatccgctatttcttttctcctcggttcctctttttatatatatataattatatat

SEQ ID NO: 14631 - DNA, 377 bp, Glycine max
  Clone ID: jC-gmle01810080c02d1
gggtaggtatatataaatatttttttataaaaagaggaaacgaggggaaaagaaattgcggatcataacagacctagatttattagtcaagagattgtgcagcgaaagtgcctagcctatttataaaattcaaatccaaagggcctaatctgttttttcttcagcattgctagcattttcgcgattggtgctcatcatccgcttgaactcggggaagttgacgttgccctccccgtcggaatccacggatttgatcatgttggggcattcctccacggagcacttcattccgaggcggttcaacacctggcaaagctccgtggcggatatgaggccgttcttgtcctgatcgtacaggttgaaggcatcgtggagct

SEQ ID NO: 14632 - DNA, 566 bp, Glycine max
  unsure at all n locations
  Clone ID: jC-gmle01810080c03a1
aggccatctatctcctagacnccnntnnnnntnnnnnnnnnncnnnnnnnnnnnnnnnngggnnnnnnnnnnnnnnnnnnnttttttnnnnnnnnnnnnnnnnnnngggggggnnnnnnnnnnnnnnnnnnnnnnnnnnngnnntgggcnntccatttctcaatctcactgttgatggtttccttaagatcggagctgtcgcagccacgcgatcagctgctgaagatacttatcatattatccaaaaggggaatatctcaagtcatgatttcgagaaaacgttgaagaagatgtgcaaagaaggtgtatattggggaactatagctggcgtttatgttggaatggaatatggggtagagaggatccgtggcaccagagattggaagaatgccatgattgggggtgcagtaactggggcccttgtatctgcagccagcaacaacaagaaagacaaaattgcaatagatgccattactgnggcagcaattgctactgctgcagagttcataaattaccttacctgaattaatgaagtggatgtcttgcttgttttcttgcatgttttg

SEQ ID NO: 14633 - DNA, 501 bp, Glycine max
  unsure at all n locations
  Clone ID: jC-gmle01810080c03d1
catccagaaccttcattattccaaaacccaaagactaaatcgaactgaacatgctttgacataattgcacaagtctagcttgactaaattgcaaggcaaagctactaacatgcagaaaaccgaatggccaatataatttatcaaaacatgggttttatagaaagttaaataaatagcatatcttagaagtaactgcaccaatatcaaagacggaaccggtacagagtatgactaaagagagactgagtgtgcaatccttttccaaaacatgcaagaaaaccagcaagacatccactttcattcattcaggtaaggtaatttatgaactctgcagcagtagcaattgctgccccagtaatggcatctattgcaattttgtctttcttgttgttgctggctgcagataccagggccccagttactgcacccccaatcatggcattcttccaatctctggtgccacggatcctctctaccncatattccattccaacataaacg

SEQ ID NO: 14634 - DNA, 552 bp, Glycine max
  Clone ID: jC-gmle01810080c04a1
atgctctatcctctatgttcccttttctttatcccattggtcctttccctttacttttaaatcaaagtccacaaagccacttgacatctttaggttccaatctttggaatgaagatctagagtgtcttgaatggctagaatctaaggaatctcgatccgttgtttatgtgaattttggcagcatcactgttatgtctgcagaacaactcttggagtttgcttggggtttggccaatagcaagaaaccctttttgtggatcattaggcctgaccttgtcattggtggatccgtgattttgtcgtctgagtttgtcagtgaaacaagagacagaagcctaatagcaagttggtgtccacaggaacaagtgctaaaccatccttcaattggtgtattcttgactcattgtggatggaactcaactactgaaagtgtttgtgctggagtgccaatgttgtgttggccattttttgcagaacagccaacaaactgtagatacatttgcaatgagtgggaaattgggatggaaattgataccagtgcgaaagagagga

SEQ ID NO: 14635 - DNA, 361 bp, Glycine max
  Clone ID: jC-gmle01810080c04d1
ggccgggaaatactcaaagtttgaaaattccaaactaaaatattccctcccccaataaacaaaacccaaaggggcccttccaggggcccatttttcccatgcaaaaaatttcaaaaaaaaacaacgacccttttttataaaaataaaccctttaaaaaaaaaaaaaaaaaaaccccctcaatttaacagggtttaaataaaaaacccccccttaatttctttgtccaaatttatgttttaaacaccccccagcttggggaccccccttgccttccttttaaaaccccagacctttttttttaatatttttccccttttctcccccacaaatttgtttacttgcttttcccccccctttttt

SEQ ID NO: 14636 - DNA, 626 bp, Glycine max
  unsure at all n locations
  Clone ID: jC-gmle01810080c05a1
attagcatatattagcatatattattatatattggatattcaaaaaaaaaataatgaataaaaaaattaagagccataattagaattctgtatgatatttacgtttacggcgtgtgataaaaagatactatatagaactaaaggagattcccgtttcagttacattcaattcaacgattgaccaaaagagaattcaaaaaataacatttagatcacccaaattccaatatttctatgaaacaataattaaatctaacgaatttatttcgattgattgtatccatatggggtaataataaaagggggaggagagcttaaaaaaacaagataacaaataaagtataagtgcggggggtcaaactgggtgtatataatcggatcactataagacaactctttcttttgaggtttcaaagaatgattttcgaattcgattgaatctaaaacacaaaagaattggtttacaggatagaagacanccacgtatatgtgataggatattctatatgaactaggtatatatgaactaaccatatccatatatattatataaaataactaatattttatatctaaaattgcccgctctactgtaaattcgatagggataaaaaacaagcctttcg

SEQ ID NO: 14637 - DNA, 485 bp, Glycine max
  Clone ID: jC-gmle01810080c05d1
agtcattgaatattcaattcacaattcgagatgaaacggaaagggtgtgttttttaatccctatcgaaatttacagtagtagcggggcaattttagatataaaatattagttattttatataatatatatggatatggttagttcatatataactagttcatatagaatatcctatcacatatacgtgggtttcttctatcctgtaaaccaattcttttgtgttttagattcaatcgaattcgaaaatcattctttgaaacctcaaaagaaagagttgtcttatagtgatccgattatatacacccagtttgaccccccgcacttatactttatttggtatcttgtttttttaagctctcctcccccttttattattaccccatatggatacaatcaatcgaaataaattcgttagatttaattattgtttcatagaaatattggaatttgggtgatctaaatgttattttttgaattctctttt

SEQ ID NO: 14638 - DNA, 338 bp, Glycine max
  Clone ID: jC-gmle01810080c06a1
ttggagtctctcaaggatgcccgattcttttctatgttctctacttttgccgtcagaggacgcaatgctgctgttgctactgttgtccaaaactgtcctgactttactcatttccgactctgcatcatgcaccctggtcagctagattacttgacccaagaatcaatggatgaggcctttggagctgttgttaagacttgcactaaactccagaggcttgcagtatcaggttatctgactgacctaacttttgagtatataggcaagtatgcaaaaaaacttgaaaactctttccgtggcttttgcttgaagcagtgaatggggcatgcgctgtgtgc

SEQ ID NO: 14639 - DNA, 361 bp, Glycine max
  Clone ID: jC-gmle01810080c06d1
aacaaaaaccccacccaaggcccgatttttcccctttttaaaaaggaatggctcattttgttaaaaaaatttttcaaataaaaccaaactccccagataatgccaggtctctcccacaaaaacaaaacccctcataaatataaaactttttgagagcaatgaacaccatttctttcagacatatagggatcgttccaactattcgccccggaatcccttaattacacccccattcccagggacctcccgacaagttaaaaccaaaaccccctttttttcttccccctcccataatataccatctgacaaatccacgtggacttttacacattttgggacaccaccaaatacaagggccttt

SEQ ID NO: 14640 - DNA, 346 bp, Glycine max
  Clone ID: jC-gmle01810080c07a1
cgcaaagaagccttctcttcagaaaagacgagacgagacgagcgagatcttcattcgatttgtcattttaaataaaatcgcgtcttctcctctgtattgagacatggccgaagaagaggaagaatcagagctcagcgataagcagaaagtggagatcgcgaaatggttcctcctcaactctcctcccggagaaatccaatacgttgccaaagatgtgaaatcgattctcaacaacgacgatttgtacaaggaagccgctttcgaggctttttcctattacaacaaatcgcacttgatttccattccaatgcccaaccgaagcggagacgtactggttacttcgttc

SEQ ID NO: 14641 - DNA, 435 bp, Glycine max
  Clone ID: jC-gmle01810080c07d1
ggctagaaacaacaggaactcttctgctatgggaataatgtcaaaaaaagaattacagtacactacagtacatcagcggaagatactcacttactcagacaaaggagggtactttgttaagcaaatgagtgaatataacgaacgtcaacccaaagaatgattgacttgatcaaatgacatgtagtgaatatatgaggaacttgtcaccaccgagtaaacacaaacttttatttgttctgtgtgaatgtagggtatttactttccaatgccaagttcttttgagatgtctcttgtcaagctgaactgcaaagtattatgccatggaaataacgtgcgggtgacaggaagctttctccgaagatccttgaaagtagaatcaggaaggtttagatatgatgcctgtcaagttgtgatcattagtaaatcatgtgcaca

SEQ ID NO: 14642 - DNA, 542 bp, Glycine max
  unsure at all n locations
  Clone ID: jC-gmle01810080c08a1
aagaatttcaactagctttaaggatacttcggggtaaagatgttgatatttctgatgaagctgctgaaattctggactctattgaaactcttcgaagccttcctaagattaagctgttggatttgttccaaagcaaacatgtgcgctctgtagttattggggtcgggttgatggtatgccaacaatttgttggaattaatggcataggattctacacagccgagacttttatagcagctggactttcttcaggaaaagctggtaccatagcatatgcttgtttgcaggttccatttactgtattgggagccattttgatggataagtctggaaggagacctcttatgatggtttccgcaactgggacattcttaggttgctttattgccgctattgctttctttctcaaggaccaaagcttaatgcttgagtgcgcaccgatatttgcagttgctggtgtgttgatctacatagcagcatattcaattggtgtaggaccagntccttgggtgataatgtcagagatctttcccattcatgtg

SEQ ID NO: 14643 - DNA, 344 bp, Glycine max
  Clone ID: jC-gmle01810080c08d1
acaaaaaatgggttatggggattattattattattattattatcaaataagctaatatgatgcattattattattactactatacaacaaaaaaatgggtttggcacactggtattttatgccatatccatttttttggtgtgtaggcctactatacaacaaaaaaatgggtatggcacactgttattttatgccttgacgtttttaaatgtatccaaaagaattttacaaatgatgggtttgggcttgactgttgctgcgaggttttggtcttttatttttatggactaaaccaagcccgaatgtttttcaaagagtttcctctgggttaggggactaaattt

SEQ ID NO: 14644 - DNA, 440 bp, Glycine max
  Clone ID: jC-gmle01810080c10a1
cgcatcttttgcttcactcgtcatttctactcagatcgcagcaaaccagactaagcgccgacgatgcctcccgtcgctcctcgatccggtgatgccatattcgccaacgtcgaacgcgtcaatgcggagctgtttactttgacgtatggcgcaattgtgcgtcaattgctcacggatctggaagaggctgaggaggttaacaagcagcttgatcaaatgggttacaatattggaatccgtttgattgatgagtttttagccaagtctaatgtctccagatgcaacgatttcagagagacgactgatgttattgcaaaggttggttttaaaatgttcctcggtgttactgcatctgtgaccaattgggatgctgatggaacatgttgtagtattgttttggaggataatcctttggtagattttgttgagctttctgacaa

SEQ ID NO: 14645 - DNA, 388 bp, Glycine max
  Clone ID: jC-gmle01810080c10d1
aaagcccatttgataatcatttaaaaaaaaattttttgggggatttaggggtttattaaaaaacacacagggcccggcaaaatttgataatcttataatgccgagatgatgaagtaatgaaaacctggggttttcaattcttcaaaaaaaattccctcggcatccttgggtggatacttttttgggacatgcttgaaaaattttacctgcaactaaaacacattattcccgggaagcacattacgaagcccagtttccttagtttttattgaccccatttttaagggtcctttgatgaccccccttaaaaggtggcaatagtacaaaccttgggggttggcaggaagctcaacaaaatttcccaaagggtttttccccaaaaaaatac

SEQ ID NO: 14646 - DNA, 511 bp, Glycine max
  Clone ID: jC-gmle01810080c11a1
aagagggtgaggacactactaactttgtctctcgcaggttggccctcactgttcggattggtgctgctgctgttggctctaaggttgcacctgctgatgctgcctatggagaagctgccaatgtgtttggaaagccaaagacaaacactgacttccttccatacaatggggatggattcaaactctcaattccctcaaagtggaacccaagcaaagaggttgagtacccaggtcaggttcttagatatgaggacaattttgactcaaccagcaatgttgctgtcatggtcactgcaactgacaagaagtccatcactgactatggttcacctgaggagttcctatctcaggtggattacttgcttggaaaacaagccttctttggccaaactgatgctgagggtggttttgattccaatgctgtggcaactgcaaacatcttggagagttcaacgcctgtcattgatggggaacagtactacagtttgactgtgttgacaaggacagctga

SEQ ID NO: 14647 - DNA, 482 bp, Glycine max
  Clone ID: jC-gmle01810080c11d1
caacttaaaatgcttaattaaagagagaaaggggggggcaagagaggagggtaagtccttagaagacatgaaaaattaagaatcaaagtgcttactccaaccaacagcctcaaaaactgaaacttgtggacaaaaagtggccacataattcaacacatacacaccccttcaagatgattcacatgcagaatagcactccactgataagttcttaggcaacactgaaagaacttgctgggctctccacaaatcttcttgctcccttaaaccatctcttgtctccagcttgagccttgcaaatgtatagtttgccatctttcacagttgctgcaatcagctggtgcttgccaccttcatctccatcagctgtccttgtcaacacagtcaaactgtagtactgtttcccatcaatgacaggcgttgaactcttcaagatgtttgcagttgccacagcattggaatcaaaaccaccctcagcatca

SEQ ID NO: 14648 - DNA, 379 bp, Glycine max
  unsure at all n locations
  Clone ID: jC-gmle01810080c12a1
gttggagtaaacttcaatggtgtttantatacttttcatttatttgtagcggctggaatacacccaacgtaatactggaaagtattgttgccggtattacgttgggtgtgttggagtaaacttcaatggtgatgattatacttttcatttatttgtagcaactgtaatacgaattttggggatttgcatatatttgttttttttcaatgatttggatatttgttaaaaataacaatttttagtgcaaaagatgtcactattttgtgctttaaaaaaaaaaaaaaaataaaaataataaataaaaaataaaaaaaaataaaaaaaaaaaaaaaataatataaattataatataatataaaaaaaaaaataggggcggccc

SEQ ID NO: 14649 - DNA, 334 bp, Glycine max
  Clone ID: jC-gmle01810080c12d1
ctaacattgcgttttcttttttttttggaaggctactttaacttgttagtgtttatttttttaccctttccccccctatcttttttaaaaaacaaaaacaaccactatttttgcaaaaaaacaggatttttcaaaaacaattccaacatgcttgaaaaaaaacaaaactgtatacaaaccaaaaaatttgtactacaactgtttcaaaaaaagaaaacaaaggaacccacattgacgagaagtgcccctaaactccccacgtatccactccaagaccatactctcatatgtcacccgtggagcatctacaggtataaaccaatagataacatga

SEQ ID NO: 14650 - DNA, 594 bp, Glycine max
  unsure at all n locations
  Clone ID: jC-gmle01810080d01a1
cttctttttaacccccttaaatgaaaaaaggggttccccgacttggatagggaactatgcgagtgacctacctaatcttattgtagaaattttcaggatcaatgattagaccatgcaaactagaaatgctttttcttgtataaaggaagggattactcgatccatttccatatcgatcatgatatatataataattcgagcacccatttcaaacgcatatccaatttttgcacagcagggttatgaaaatccccgagaagcaaccggtcgtattgtctgtgccaattgccatttagctaataagcccgtggatattgaggttccacaagcggtacttcctgatactgtatttgaagcagttgttcgaattccttatgatatgcaagtgaaacaagttcttgctaatggtaaaaagggagctttgaatgtgggggctgttcttattttaccggaaggttttgaattggcacccnccgatcgtatttcgcctgagattaaagagaagataggcaatctgtcttttcaaaactatcgtcctacaaaanaaaatattcttgtggtaggccctgttcctggtcaaaaatataaagaaat

SEQ ID NO: 14651 - DNA, 351 bp, Glycine max
  unsure at all n locations
  Clone ID: jC-gmle01810080d01d1
caagttaatngaagaaattcaatttgtttaaggaaggtccccaaccccctctctttttatttgttcactacgtattatatgcaataaaatattatatggcagaaatattctaagttggaaaaaatagaaactaagatataggatttttcaggaaggggttaaaaaagattattttattgatatttttagaatatttctatttcgacacaaacaagaaggaataggaatcggactctaggaaaagacaaaaaatcccccctagagtaccttttccatattttaattgattttggttcaaattatctatctatatagatatctattttatgtntagtatcgaatccaatttta

SEQ ID NO: 14652 - DNA, 526 bp, Glycine max
  unsure at all n locations
  Clone ID: jC-gmle01810080d02a1
aggccatgcaggncgtcgaggcnnnctngnnttnntnnnnnnncnnncnnnnnnnnnnnnnnnnnggnnnnnnnnnnnnnnnnnnnnnttnttttnnnnnnnnnnnnnnnnnnnnnnggggggggnnnnntnnnnnnnnnnnnnngnnnnnnnnnnnnntnncttttcctttttcattattatttcatatttttttccccttttcaattcttcaaaaaattctcgcgactaaattcacgtcagtacacggaaacataaaattcagtttttttttattaaaatttgttggcaaacaaaaacaaaaaaaaaattgaaattttgatccgttttgccgaattggaccgcgcgttcaattgggttgtcgaattcgaggcagaggaatcgtgggtgtacgaggaatttcgactgtgttgttgtactttggtgattgtcagaaaacggtgtcgtttggtttgagagaagctggggacttggggtgatcgaaacgacgtcgttggaggagaaggagaaggagaagggatggatt

SEQ ID NO: 14653 - DNA, 533 bp, Glycine max
  Clone ID: jC-gmle01810080d02d1
agaatataaatcataagaatatatattgagggatgggaacattaacatatagtaccaaaaattcccagacccaacaaatataagaggcaaggaataaatatcagacataatgggtaggtatccagtacttggtgattgtcactggacaccaaccaaaaattcgactctgcaattgcgacacctcaaaaacatggacaagaaaaaaggaaagaaccgtttcattataaaatggcttatttgttgttgctatggctgcctatatgaacctgtcgtttgttgatcagacttattaggtagcaagatgaggatttcatagagggaaaaatagccgcataattctgtattatttttgttcagtctcttgttaacttcaaagccaaaatctgtacatgtcaaagaggccttaacaaggggtgtctccatctctcaggcttcatcctccagttactttcaatgtttcttggcttcaacattcgctctatttcgattcctgattgaagacaagattgcagcctcttcaaatgtccacaaca

SEQ ID NO: 14654 - DNA, 580 bp, Glycine max
  unsure at all n locations
  Clone ID: jC-gmle01810080d03a1
aggggagctatccctcaagacnncnnnnnntnntnnnnnncnnccnnnnnnnnnnnnnnnnngggnnnnnnnnnnnnnnnnnnttttttttnnnnnnnnnnnntnnnnnnnnggggggggttttttttttttttnttttttnnttttttttttttttttttattggatgatttgaacggcgccatgacgacggagaatagcaatgcggaggtggttcgatgggagaggtttctgccgcggatggtgctcagagtgctgcttgtagaagctgatcattccacgcgccaaatcatcgccgcgcttcttcgcaaatgcagttacacagttattgcggttccggatggattaaaggcatgggaaacgttgaagaagaaggcacctgagctagatctcatattaacagaagtggagctaccagcaatatctggatttgcacttctttctttgatcatggagcatgacatttgtaaaaacattccagtcataatgatgtcttctcatgattcggttagcatggcattgaaatgcatgttaaaaggggcagttgatttttttataaaacccattccgaagaatgagc

SEQ ID NO: 14655 - DNA, 425 bp, Glycine max
  Clone ID: jC-gmle01810080d03d1
gggaaaaacccaaggttttaaggggggttttttaccccccccttttttttttcaacccaaaaaaatttttccccgggaaaatcccaccccacccccctaaaaaattggaaccctaaatttgggggggggggcccaaaaaaaaaaccccctacgggcccactttttttttgcccaaggggaaaaaaaatttcaaaaaacaattcccgggccccccccttaagttaatttttggtgaaacaaaaagggggacaagccggtgttttttaattctcccccaaacctaaaaaaaaaaaagtttttaaatcacccccccccccaagaacagggaaaaaatttggaaaaaaaaaatggccttttaaccgggggcggtggtttggcaaattttttcgggttataaataaaactttttttaaaaaatttttttt

SEQ ID NO: 14656 - DNA, 487 bp, Glycine max
  Clone ID: jC-gmle01810080d04a1
ctctctgactagtgatatctatccatggaggccaagaacttgtggcgcttcctggttctttcaatcggtgtggtactagttttacttgtcacttggctgcccaacaaggaggctctagactgcaacctttactctggatggtgcacctcaaagaactggttctactcttcagcacatcctaataatccgattaagaaaccatcattttccacatatcatcatcacaagaaccaacaccatgaatccgagattcctcaacaccctcttgaccctctaaccatccaagagttcaacaaggtccgcaccatccttttgaactaccctctcttcaagtcctcatccagctacactctcaactccgttgtccttgaagagccagacaaaaaacttgtcctcaaatggaaaaagggtgatctacccttgcctaggaaggcttccgtggttgcatatgtgaagggagactcacatgtgctcacggtggacctcg

SEQ ID NO: 14657 - DNA, 449 bp, Glycine max
  Clone ID: jC-gmle01810080d04d1
aacatcataatttttcttatacataagaattaaacatggtatcaaaaggttttacaatatttatacattctgtttaatcaacagaactagaccctctttactttaagttaggtttaaagttcagtttgggcatcatcatttgctacatgcataaataaagcatgtatctaattagactaaaaaccaactgatgggatctcaagctgaatcacgagccttgcaaacaggtaaatcatcttcgaaattgggagggactccaaggattggatttctctcaaagaaattagcaggcttcaaatcaaaacttgatgatacagtaggcatgacaggatagtcctcttgacagggtatatgatggaaccctattgtgtaccacaaaacaatgtctttattctcaattggacgatccctgttggaccagacttgaagagtatcatcccctttgctct

SEQ ID NO: 14658 - DNA, 453 bp, Glycine max
  Clone ID: jC-gmle01810080d05a1
atataatggaaggcaaggtgatgttgttgaattttatcatgaattaatagagcagggttaccctgatggaaatgaaaaggctttatggacagaggtgctggaatcatgttagtcctcatctgcagtcaagttaccacagaaaaatgtatacatgccagttgaaaatctggaaaattcagtatcttctgcaagaagggtaccagtttccaaccaggaaaacagtcactggctcaacttcaacagtaataattctgaaaactgtatgatttactttcacctggttaacatttttggcatattttggtgtttctttaacttctgtcccctcccatgttagcagctgtattctcacaaccttaaggtgttgattaagtcaaattttcctgtctattcttctatggtggaaacacaagtaattaattctgactactatgaaacattgtttgaccaaag

SEQ ID NO: 14659 - DNA, 476 bp, Glycine max
  Clone ID: jC-gmle01810080d05d1
ctaaaccccacccttttcttattcaagaccatttcatattttacaaatgaacaatgttcattgttattttcactatacaatctatactgtctcaaactaataattcagtttgttctatgcatctaaatacatagaccatcgaaatggttgtgccacaaattgatcattcaaaataatgaagattaccatggctagcgttgctcctagggaaatggataaaaatcatcaataaataagtcatctcctacagaagttgataatgatgcctcttcactcgtaccctcaagtttatcctgcaagggaattgacaagttatgcattaacagcacaaagcaattgcattctaaaaggccaaaatggttgataactctgtatggtatactattttgcctttatttctgattgaccaccgaatgccccattgaagccttatgcaaaacaaatgttaaattattcaactagtggcaaactaacac

SEQ ID NO: 14660 - DNA, 353 bp, Glycine max
  Clone ID: jC-gmle01810080d06a1
gaggctgcgtatcggttgggctggtttggcacaaagatcttcccgtcgcaccggggcggatccgactctcgacgtgtgggccctggtgtagagatgcgcgctgatcctgtggagcgaaggcggaggaatggccaggaattggacatgtacacgtctcttgagtagaagccgcaagcaaggttgaggttcctggaacgcatgtgtacatacaagtgcgattcatggcataggatttatacgcataacgagtacggtctcgacacatctaagagtgcgaataccgacatggcaagtctgatctggagtatttgcatatgcaatatttgtacaaaatctgactatgcgtactgccc

SEQ ID NO: 14661 - DNA, 355 bp, Glycine max
  Clone ID: jC-gmle01810080d06d1
gggcagtacgcatagtcagattttgtacaaatattgcatatgcaaatgcgtgccagatcagacttgccatgtcggtattcgcactcttagatgtgtcgagaccgtactcgttatgcgtataaatcctatgccatgaatcgcacttgtatgtacacatgcgttccaggaacctcaaccttgcttgcggcttctactcaagagacgtgtacatgtccaattcctggccattcctccgccttcgctccacaggatcagcgcgcatctctacaccagggcccacacgtcgagagtcggatccggagcggtgcgacgggaagatctttgtgccactccagcccaaccgatacgcagcctc

SEQ ID NO: 14662 - DNA, 321 bp, Glycine max
  Clone ID: jC-gmle01810080d07a1
caaagatggggaacacggagaagctgatgaaccagatcatggaattgaagttcacgtcgaaatcgctgcagcggcaatcgcgtaagtgcgagaaggaggagaaatcggagaagctgaaggtgaagaaggcgatcgagaaaggcaacatggacggagcgcggatctacgcggagaacgcgatccgtaagcgcacggagcagatgaactacctccggcttgcctcgcgcctggacgccgtcgtggcccgcctcgacacgcaggcgaagatgacgacgatcagcaagtcgatgggcaacatcgtcaaatcgctggagtcgtcgc

SEQ ID NO: 14663 - DNA, 397 bp, Glycine max
  Clone ID: jC-gmle01810080d07d1
gaaaagacatttttaagcattcaattaatgtattaagtattcaggcaatgacactaacactaacacgaagagaaggccataaacccctaaaaggggagagcccatataacaagtgccaactgaattcagttaaatatacacaatatatatatatatatatatatatatatataatattccactgcatcagcgacgagaatcgagaaacaacgataatgatgatagtattattactgataaattaacctcgggccttgagttcagcaaggcggcgagacaagatatcctcgtcgaccttgtcggcttccttggccggaacggcgttagcggcgggctgggggaggccgaccgagaccttgaggccgtagtcgtcggcgacctgctgcatgaagctgtt

SEQ ID NO: 14664 - DNA, 556 bp, Glycine max
  Clone ID: jC-gmle01810080d08a1
ctcgagccgaatcggctcgagggtgattggagtgtgttatgttttgaaatttggcatctttcaggagatcaggtctattgtaaatcaagttcttaaatcagtgtaattgtggaccaaaaaattgtcaaattataattttttgcataccatgctaatagggagcaacccttgtcatggaaaaaagggaaaaaagaaaataaagtagtccaagatcctgagttatattcatgctgcagtatatacaaatgaagcaccaacaacagaaatagagcaggtgtagtattaagataatggaaaatgagagcctaagctcttaaaaaggatacaaccagagtctcagctcctcagagaaaaatgccttcctatattccccactccaaatattccagaccttgggcttcccatggttacaggatgttaaatatctatgattctatcatattcatattcttgtatgtaaactattgattatgtggacagtctaacaaatcaataactttattgagttgttttatatgatgaggattatatgcctaaagaaattcataaagtttat

SEQ ID NO: 14665 - DNA, 457 bp, Glycine max
  Clone ID: jC-gmle01810080d08d1
gtgacaacataatttcatttgattcatataaccaacagctaatgggacaagacctctgtagtattcaccaagatacatccaacattaaagaacttgatggtccagaatgctttgttagatgatgatagaaccctatgacatgcatttcacttaaatattcatcgagtatgtaaacaaatctttcctaatgatccatataggaatacgtgataatttccctcacagtgaaaaacttctgtttgttacttctcatattgggaaaaaaaaatataatcaggtaattttatatttttccaaacaggactataacttcttgcagttacttcccctaatttcacctttatggtgtcttaattagatatttcaggcataagaaactatccactacttaatctaatagagtgcttttaacaaatccttgctgcaggattttagtaactacaaagctaccaatgac

SEQ ID NO: 14666 - DNA, 545 bp, Glycine max
  Clone ID: jC-gmle01810080d09a1
gccacatggataagagaaagaggattatgtaagaagaagatgatgaacaacaacaggcagcacagcaacaccaactgaaacatcttcatcatctacgaacgaccataaattttctctctttccctttccctctctctgtctgtgttttttcttaaaaaattctgtgagaggcatagaggaagatgaaggaaagcagtgatgggtttgtgagagcggatcagattgatctgaagagcatagatgaacagttggagaggcacctcagcaaggtgttgaccatagaaaagaaaaagcgctctgaaggggaagaagatgctgatcatgttcatcttcatgttcacaccaccagtgccactgcttctcccaaattctcacatgcttcttctgctgctagggttaacttcaagaagaaaaagcaggattgggagattgatccttctaaactcatcatcaaaactgttatagctcgtggtacttttggcactgtccatcgtggtgtctatgatacccaagatgttgctgtgaaatttgtggactggggggaa

SEQ ID NO: 14667 - DNA, 498 bp, Glycine max
  Clone ID: jC-gmle01810080d09d1
acatagcaaattttttcaacttaatcacatcaattatgattgcgaggaggcaatattataatgaagatcctgcatgttacaagtccaatctggcaacattgccaccaagctgaaagtaatacccatacccacataacccaaaccaatgtgggggaaaaaaaaggtaaaagaaaatcagaggtacagttttacacacccaccaacatattgacatgtcaccagctcctcctaactgtaccccctactgtgtatttgtctcatctagtatccaaatgctgctttctcactataggtacaaattgattcttcaaatagtgaaaaatcattattaccaaattgtttgctgggctaacaaataaaacatcaaggccctctatgcttgcggaagcagaaacaaccctgctgctgatcaagaaggatcattacctccacctttggatgtgtcaatggcctccaccttggaaactaccttatccattttcggccgcttatcgggac

SEQ ID NO: 14668 - DNA, 213 bp, Glycine max
  unsure at all n locations
  Clone ID: jC-gmle01810080d10a1
attttagtttgacctggtggcactgtgaaattttttacactataaatacacaagaaaatgtcataatgttgtggtgactaaggtttgtcacttacactaaaagcttcttaactggttnttcaaacctatggcatcgtatagtgtgtcaaaaataaaatctaatatatatttactacattttacataattaagaagtacttaacttgtgatttt

SEQ ID NO: 14669 - DNA, 515 bp, Glycine max
  Clone ID: jC-gmle01810080d10d1
tttttcttttttcttttttcctttttttttttttttttctttttctttcccctcctcttttttgctccttctttttttccctttcttccttctcccctctcctctctcccttccctttttctccaaaaaaaacccccctaattttttttaaaaaaacaattccccccccccccccccccataacccaaaccccccagcctggggggccccccaaaaaacccaactttcctttattccccaaaacaaactgttcaaaaacccgtccaaaaaccaacccccccttctgcaaaaatgccccccccccccccccaaaaaaaatttggtttcttgtgcccccccaacccccaacctctgttactaccccaaaaaaaaaggtccccccccctctcccagccccttttgtttacccaccccggcccccccattatttaaaaaatttttaaaaaaccccccccccacctgggaacccccccccccccttaccccccttatccaaaaaaaagcccccccccccc

SEQ ID NO: 14670 - DNA, 560 bp, Glycine max
  Clone ID: jC-gmle01810080d12a1
agagtgtgaaaccaaagagtgtaatttctccagcgaaaaaggctacggctaagagggggggtaggaagtgagaatgtggtgggtaccagtggttttagggttagctctccccacgtcctttcccctctcggtcctgtccctgcccccccacctcctcctacctcttctgcccccctcccttctcccccctccgtttctccctcccctccttcagtccctctccttcctctccctcctcctctccctctttctctccctccccctcttacctctcctccacctctcccttcctccctccttcctcttcttccctccctccttctcccccctccctccctcctccctctcttgttctctcctctctcctccccttttcccctccccccttttcgtctcctctttcctcctctcaccctcctcccctcctctctccctccccctctatatatccccccccctctctccttaccctctcccccccctccttccttcctccctttccctcccccttcctcctctcccctcttctcccctttccctctccccccccttccctccct

SEQ ID NO: 14671 - DNA, 432 bp, Glycine max
  Clone ID: jC-gmle01810080d12d1
aaaggtataattttatacttcatacacagaaagcatgtgctacagatccattcatgtgaaaaaggtgcttatactacattgatccatcaaaggtactataacgcagagaaacctcatactctataagatacattttatgattaactcatttagctgaaaagcagagctagaagctttttttaatctactccctaaggtcgaaccaaagaaaaaattcaaactaaataaaagaaaaaaaaaacaaaggtttcataaaatcagatttcatatattataggatcatctgtaaccccaactacaccaccaagaggacaaagaacttcacaaaactaaccctaaaaccactctacccaccacattctcactttctaccccctctcttagccgtagcctttttcgctggagactttacactctttggtttcacactct

SEQ ID NO: 14672 - DNA, 476 bp, Glycine max
  Clone ID: jC-gmle01810080e01a1
attgatttcaaaaattatccggaaaaaatctgaatctatctttatatgcgaatcaatgctactacttctggtcctgaggtttctgcgctggaaaaaaaaaatctgggacgtatcgcccaaataattggtccggatctagatgtggcttttcccccaggttagatgcctaatatttacaacgctctgatagttaagggtcgagatactgatggtcaacaaattaatgagactcgagaagtacatccttcattaggaaatgatggaattacagctgaagctatgagtgcgacacaaggtctaatgagaggaatggcagtgattgacacaggagctgccctaagtgttacagctggtggagcaactctaggacgaattttcaacgtgcttggagagcccattgataatttaggtcctggagatactcgcacaacatcttccattcatagatctgcgcctgcctttatacaatgagatac

SEQ ID NO: 14673 - DNA, 459 bp, Glycine max
  unsure at all n locations
  Clone ID: jC-gmle01810080e01d1
agttgggccgatattcggacgcatcaacttgttatgaaatcacattgatagcctctactcgtgtcctagctcgtctaagagctagatttgcctcaattgtttgtctcttgccttccgccttattcaaattagcttctgctatttcaagagtttgctgtgcttcttgtggatcaatgtcactacccttttccgcatcatttactaaaacagtgatctcattattgtttattctagcaaaaccgcccatcagagccatcgttaaccattggtctttaagaagacgtattctcaaaatacctatatctacggctgtggcaataggcgcatgatttggtaatactccaatttgtccgctattagtagataaaatgatttccttcacttccgaatcccaaacaattcgattgggggtcagtacacanagatttaaagtcatttcttcaaattgctctccatttc

SEQ ID NO: 14674 - DNA, 592 bp, Glycine max
  unsure at all n locations
  Clone ID: jC-gmle01810080e02a1
aagcccatactacgtcatactagnacncccnnnnnnnntnnntnnnnggnnacnnncnnnnnnnnnnnnnnnntnnnnntggnnnnnnntnnnnnnnnnnnnnnnnnttttttttttntnnnnnnttnntntttnnttnttgggggggtttttttttntttattnnttnttttnntnnnnnnntttnttggtacttttactgcttccaaaacttgtcaaagttccatgaccgtccatgcctcatcgacggcgacaccggcgagaccctcacctacgccgacgtcgacctcgctgctcgccgcatcgcctccggcctccacaaaatcggcatccgccagggtgacgtcatcatgctcgtcctacgcaactgcccgcagttcgccctcgccttcctcggcgccacccaccgtggcgccgtcgtcaccacagccaaccccttctacacgccggcggagcttgcgaagcaagcgacggccacgaaaaccaggctcgtcataacgcaatccgcgtacgttgagaaaatcaagagtttcgcggacagcagcagcgatgtcatggtgatgtgcattgatgatgatttttcttatgaaaa

SEQ ID NO: 14675 - DNA, 498 bp, Glycine max
  Clone ID: jC-gmle01810080e02d1
catgcaatacttgcatattatatatatggatggataacgagatataaaattggaacaaaaaccacaacaggaagggcctgtggtacggtaagtaaaacagccacgattttcctctgtcacaattatggacctaattggccaccaccaaaccttcgttaagtcttgcagttaatacctttcgcagaattttgcctgagggtgctttaggaatagagtccgtgaagaaaactctacctattctcttgtaaaaaaccacctgttgtgaaatgtatttcttgatttcatcctcggcgatctcagaaccatttgaccttacaacaaatgcaactggaatttcccctgcagcttcatctttcatgcctacaacggcagcatcagaaatgtttgggtgggcaatcaacaatgcttcaagctcagcaggagccacttggaatcctttgtatttgatcaattcctttaaccgatcaacaatgaagagttcatcatcatcatcaatga

SEQ ID NO: 14676 - DNA, 547 bp, Glycine max
  unsure at all n locations
  Clone ID: jC-gmle01810080e03a1
aagacccaatactactncactcnaagaaaantcnnnnnnnttnnntnnnggnnacnnncnnnnnnnnnnnnnnnnnnnntgggnnnnnnnnnnnnnnnnnnntnntttttttttttnnnttntnntntntntttttttttttgtggggtttttttttttttttttttttttttttctttttgcttggctcaaaatatttgttactaccaatgatatttattgatctcatttcaggcttattctcaccactaacttatttcttctcaagaaatggatctcacatgttggattaccagcttgctcttcagcgatgcgttagaaacaatactgatgaacgctttcgggaagaaaaaaatagggcattcatttcaaagtggctaagaagaccgttgagagtatatgaaaactttgatttgtcattggagggactaaaatctttctttgagaatgccaaggaacattatggcataaatacagtacgtgccacacagagtttgggtttaaatggggatgtcctccaaaacaaagatcagaatgcatggttcac

SEQ ID NO: 14677 - DNA, 458 bp, Glycine max
  Clone ID: jC-gmle01810080e03d1
gtgaaccatgcatttttatccttgttttggacgacatccccatttaaacccaaactctgtgtggcacgtactgtatttatgccataatgttccttggcattctcaaagaaagattttagtccctccaatgacaaatcaaagttttcatatactctcaacggtcttcttagccactttgaaatgaatgccctatttctttcttcccgaaagcgttcatcagtatcgtttctaacgcatcgctgaagagcaagctggtaatccaacatgtgagatccatttcttgagaagaaataagttagtggtgagaataagcctgaaatgagatcaataaatatcattggtagtaacaaatattttgagcctagtcacacataaaaacaataaccccagaccttccaaagttatcactgacatggcacttatttgcagtatctgtctccgagtctgtagcaactttg

SEQ ID NO: 14678 - DNA, 590 bp, Glycine max
  Clone ID: jC-gmle01810080e04a1
gatcgtacttcctatcataatgaatctgttgacagcattatgtgtaccctacgtgttggccaaaggtgtatttccagtgcttgggtatcccttggtgataaattctgccgtctatcggtttgcatggttgggatgcctctctttcagtttcgtgtgcttctgtgccaagagattccatgtctggttcacaaatctccataattcaatacgcgatgaccgatatctgattggccggaggttgcataactttggagaacatgctgagaaagcaaatgtggcagaaactaattcaggggagaaggacactattttactaggtacaggtttaaaccaacaagatcgcgaagcagatgtcggactacggttaaggcacgtaaatcaacaggtgggctgaattgtattttcaggtaggaaggccactttgtaggttgtgatgcctcgtgatggtttatgaatcactgatgtatactctacacttgtgttggggtagttataacacattgtcatgacacacctgtgatgtagttaaccgtaacattttgtgcggtgtacttgttaaaattagctattggaagaaatataattgttgt

SEQ ID NO: 14679 - DNA, 487 bp, Glycine max
  Clone ID: jC-gmle01810080e04d1
atcaacaattttattttcctcctattagctaaattttaaacaagtgacacgcacaaaatgttaacgttaactacatcacaggtgtgtcatgacaatgtgttataactaacccaacacaagtgtagagtatacatcagtgattcataaaccatcacgaggcatcacaacctacaaagtggccttcctacctgaaaatacaattcagcccacctgttgatttacgtgccttaaccgtagtccgacatctgcttcgcgatcttgttggtttaaacctgtacctagtaaaatagtgtccttctcccctgaattagtttctgccacatttgctttctcagcatgttctccaaagttatgcaacctccggccaatcagatatcggtcatcgcgtattgaattatggagatttgtgaaccagacatggaatctcttggcacagaagcacacgaaactgaaagagaggcatcccaaccatgcaaaccgtttgacg

SEQ ID NO: 14680 - DNA, 479 bp, Glycine max
  Clone ID: jC-gmle01810080e05a1
gtcaaaaactggaaggaaacttattataactgttgtagaagcaaaggatctcggtgcaaaagacaaatctgaaaaaattaacccatacattaaattgctatatggaaaggttgtcaagaaaacaaaggttgctcttactactactagtactactacaaatcctgtctggaatcaatcatttgaatttgatgagaatgatggtgatgaatacctaaatgtaaaatgctttagtgaagaaatttttggagatgaaaatattggtagtgcaaatgtaaatttggaaggactgggggatgggtcaatcaaggttgaatggatccctcttgaaggagtgagttcgggtgaattgaagcttaaaattgaagtagttaaggtggaggaccaagaaggatcaaggggttcaactaatggttggatagaacttgttgtgattgaagcgagggatcttattgctgctgatcttcgagggacaagtgatc

SEQ ID NO: 14681 - DNA, 442 bp, Glycine max
  Clone ID: jC-gmle01810080e05d1
aagaaacataaactccctttggggtggattgatcaactaaatatataccggtgctatgtgaggggcaactacacaagaatttttggattaaaaaaaaaaagtcttgtccttatgattcccattcccatgagcaatattttggattggaaatgtaatgtctaaactccggcttactttttgtatatgatgctcatgagggtcaaattccactttgagaaggacttctactagcgcgggaagaaaaattgatgatctccccacccaattcatttattttgctgagtaaaaacattttctctgtctccaactgtgttatatacccttcccgtgtttcctttaaactttttaactcattcaaagatgttgtaaaccctttaagatttttatcctttattaatgaccgaaactttttcataatcttcttcatttgggtaggaatttg

SEQ ID NO: 14682 - DNA, 396 bp, Glycine max
  Clone ID: jC-gmle01810080e06a1
aaatttttcctttgatattaaatctcgctctagattggaaaaagtttcctctacagaagcacaatttgttagtggaaaaaccttcaaatatgatataattggtgctggttcacattcttcagaagattttcctgaaaaggaagatcaagaaaaacccaaaaagattgataccagattgagacaaagaatagatcctcaatacaatgaggttcaggctcagatggaaacaaatttgtttaaattgtctcttgatgatgttgaaactcctaaaggttccatgttggatcttaaaatttctcaatctaaaattgcacttcccaaaaacacagttggaggaaccattctgcgtagtgatctattggcaaatttttgaccagagggcaatttagagcaagt

SEQ ID NO: 14683 - DNA, 503 bp, Glycine max
  Clone ID: jC-gmle01810080e06d1
aaaataacacacacttcacacatcattacgacaattaaaagaggtgtggaaattttcaaatagacagagcatactcaacaagagggtcatgtctaatttcctttattgaattaaacaaacgaacaaacgaaagaaaacacaaattccagatcatgcagaggattccgcattttcagaagatctggcagtagcctgtggaacagaaaaagctggcataagagtattaccagcaatttcaaaatcttgagaaattcccaagagaatatcaaaaactgtagactgtttgggattgtcaataaggaaactcaagtgccatgaagtttgatttgcccactcagaactccacatttcaaaaccattattaggaccacatacctctattgggaagatcaattcccaggaatgtggttccgattttgtccacttacatgcatcgaaatgctctgtactgttgctgtttgttaaaaacacttgtaccaatgaggcccaatcactccttttga

SEQ ID NO: 14684 - DNA, 557 bp, Glycine max
  unsure at all n locations
  Clone ID: jC-gmle01810080e07a1
atttcaaacgcatatccaatttttgcacattagggttatgaaaatccccgagaatgaaccggtcgtattgtctgtgccaattgccatttagctaataagcccgtggatattgaggttccacaagcggtacttcctgatactgtatttgaagcagttgttcgaattccttatgatatgcaagtgaaacaagttcttgctaatggtaaaaagggagctttgaatgtgggggctgttcttattttaccggaaggttttgaattggcaccccccgatcgtatttcgcctgagattaaagagaagataggcaatctgtcttttcaaaactatcgtcctacaaaaaaaaatattcttgtggtaagccctgttcctggtcaaaaatataaagaaataacctttcctattctttccccggatcccactactaagagagatgttcatttcttaaaatatcctatatacgtangtgggaacaaggggaggggtcagatttatcttgacgggagcaagaaaataataatgtgtataatgctacagcagcgggtatggtaaaaaaatca

SEQ ID NO: 14685 - DNA, 403 bp, Glycine max
  Clone ID: jC-gmle01810080e07d1
cccagttaatggaaaaaatttaatttttttaaaaaaaatccccaaccccctctttttttttttgttcatccccttttttatccaaaaaaaaattttttgggaaaaattttttattgtggaaaaaaaaaaaactaaaattttgggttttttaggggggggtgaaaaaaaaatttttttttgttttttttaaaaaatttttatttcgccccaaaccaaaaggaattggaattggcctttttgaaaaaaaaaaaaaacccccctaaaggaccctttccatttttaaaaagaattgggttcaaattattttttcttttaaaattcttttttttgtttaggtaaaaatcccattttttttttttttacaaatcaaatttttttattagaactctttttttttgaaaaa

SEQ ID NO: 14686 - DNA, 595 bp, Glycine max
  unsure at all n locations
  Clone ID: jC-gmle01810080e08a1
ggaggagaaagacttggagctttccagtgctaggaaaatgctgggggatgttaacgaggaaatctatgatcttaagatgcttatgcacagtaaagaaacccagctcattgaagcaaacagtatgctaagggacaaagatgagcatgtgaaggtaatccagaacaagttgaataatacaaaccagaaggcttttgaggctgaaactgtggtagaaagaattttagatctcacaaacagacttgttgcttccattaaggatgaagatatgaactcatcaaaaccactactagatgaaatgggtaaccaactacttgatcaactattggagaaacctgctaatgaattgaaatggcaacaaaaaagccttgagaatgagcttgagttggccaaggtaaccttaaaagaaaaggagatggaagttcttgctgcacagagggctctaacgataaaagatgaggagctgaagatgacactttcaagattggactcaaaagaggaagagttgaaaaaagtaaggggaagaagtgacagaaagactccatgatcttaanaggcttgatgcttgggcacaggagagaatnggcgagaaaagctt

SEQ ID NO: 14687 - DNA, 493 bp, Glycine max
  Clone ID: jC-gmle01810080e08d1
aagagtaacactttaatagtaactcctcatgtaatgattgtacgtggcgatatcttgtagtagagtaccaaaaacagatgtgatcactatctgtacattgtacatatcttgcaaactaagggaagattttatgatctaccaagggacaagttagccttgcaatggctttgggagcaaaaagatatcaaaatacaataccccccaacacacacacaactttcttcattacctctctctcttagtttgcaggaacaatacccgcctgcatcacaagctgctcagacaaagatgagaggcgagcaactcttgcttttacctcttcgaaacattcagggttattggtgtcggggatcaaatcgggggctttattaccatcagggacactgatgtagttatcagcttcaacactcatgatagctttgttcagaagttgtcgactcatttcagccagtttttgtagtgcattggtggcagcttcaacttaagctgagct

SEQ ID NO: 14688 - DNA, 589 bp, Glycine max
  Clone ID: jC-gmle01810080e09a1
ttcctttctttttattcttccctttcctgagtcttccacattattttccttcttctgatcaagaaattttggtggcagaccctgtgagaaatattaaagacgggccactttcaaaatataccatggagccacaattagaatcccctttgggaagaaaagattctacaggaagtgccgattcttctaagccttcaaagcatgtcattgagacagctgcgccctttgaatctgtcaaagatgctgtgtccaagtttggaggaagaattgattggaaatctcgtcgaacccagagtctggtggaggagagaagcaagctcgtagaagactttagaaaggaagaaactgcagaggaattggaaaacactaagaagcttatagaagaactcaaaactagcttagaaaagatagaaaaagatgagcttcaagcaaaagaagaggctgaacgtgtgattctcaaaattgaagagatggagcaggacattgtaagtgaagctagtattgaagcccaggcacaacttgaggctgaaaaagccatgcttacagaagcgctttcgggagttgaattcgttaaaagagaactggactcact

SEQ ID NO: 14689 - DNA, 467 bp, Glycine max
  Clone ID: jC-gmle01810080e09d1
gattccatatatgctggtgggtcagctttcaaaccatgcagtaaggaggaagctgattccaattttgatttaagaaccctggctgacaaaacttgctcattaagtctttggagctcctcttctacttgttcaagttccagcttcaaattgttcgactcttgatcaactactcctagtctttgttcttctacttccaaatgcgcggttcgcatggaattcaacgcctcttttgttgcaatcaactcagcagtcaaatcttccactgccttttcaatttgcttggatgctgcaatagtctcttctgcattattgattgctatatcccttccactcgccatagaagcatactccttacgcagtgagtccagttctcttttaacgaaatcaaactccgaaagcgcttttgtaagcatggctttttcagcctcaagttgtgccttggctttaatactagcttcacttacaat

SEQ ID NO: 14690 - DNA, 263 bp, Glycine max
  Clone ID: jC-gmle01810080e10a1
cgcttcggcatcatctacaccgactccgtctctggaaccgccgaggtcggctgcgtcggcgaagtcatcaagcacgagcgcctcgtcgacgaccggttcttcctcatctgcaaggggcaagagcggttccgcgtgaatggtgttgtccgcaccaaaccctacctcgtcgcgcaggtgacgtggctcgaggaccgcccttctccctccaccgacctcgatctcgacggtctcgccaccgaagtggagacctatatgaaagacgt

SEQ ID NO: 14691 - DNA, 476 bp, Glycine max
  Clone ID: jC-gmle01810080e10d1
atatccgcaaaattgtatgtgtcggattttttatttatcaagtagcggagtatataaaatgtatcacaaatgaaaaaaaaaaacaacaactagcgtttaggcacaaaaataatttacatctattttctgaatatattgagacgaggttacacttaaaagcaacaataccttaggtaaagtataagccccaatcaagaagaattggaagaagagggaaaaacgtctttaacagcagaagcagcagtgaggtaattaagcgtgttcttcaacgtttccttctccctcttcaatctggccgcagtgtcctccaattcaagcagcgcttgttgctccctaggcgcgccctcaaaggtgctcccaacgaaaaacgaaaacggcgtgggaaagaagtttcgtctcaaatccccaacctccttctccggtttccctcccaaccggttcgataaccggataacgtctttcatataggtctccac

SEQ ID NO: 14692 - DNA, 234 bp, Glycine max
  Clone ID: jC-gmle01810080e11a1
cctacctctttttcttctctctcaacaacttcaccttcttcctcctcgatcatgtctgacttcaagggcaagtaccatgatgagcttatcgccaatgctgcgtacattggcactcctggaaagggtattcttgctgctgatgagtcaacagggacaattggcaagcgtttggccagcatcagtgtagagaacattgaatccaacaggcgagctcttagggagctgcttttcact

SEQ ID NO: 14693 - DNA, 402 bp, Glycine max
  Clone ID: jC-gmle01810080e11d1
ggttccacggcacgggggggtttttaaaaaaaacaaagttccattcccttccctggggcccaggtttgcccaaatcccctgatttcctaaattggacctaaaaggaccccttggaaaacaaaaggcaaaattccaaacgatttttttgggaagagccaaccccctttaattcttttcaacaaaaaattcggttgtggtacccataataccgattcctactcgcacttgttttttaaaacaacaccaacttttattgatcagaacctgtggttcgaaaaatgggggcttttttggggcccattaacaaggtgggagttacccttggggggtcccaaaattgtcctttggttaaccttgggttttaccaaaaggggttaccgggcctttttaaatttttttttt

SEQ ID NO: 14694 - DNA, 560 bp, Glycine max
  unsure at all n locations
  Clone ID: jC-gmle01810080e12a1
aaaaaactgaattgtgtgaatcgtttactaaacattgctattgtaaaagttgcaggtgcttataaacaccctaatattattgcagaatttatagctggacaattaaagaatagagtttcgtttcgtaaagcaatgaaaaaagctattgaattaactgaacaggcgggtacaaaaggagttcaagtacaaattgcaggacgtatcgacggaaaagaaattgcacgtgttgaatggatcagagaaggtagagttcctctacaaaccattcgagcgaaaatcgattattgttgctatacagttcgaactatttatggggttttagggatcaaagtttggatattttctaaataaagaaaaatatattattctttatcttaaatgtgctatattttatcttaaatgtgctatatttttttttagaaaacaaaaaatgaaaaattactcgatttttatttctccaaaatgatcaattttataagattgaatcgactaanaaatgaaatgaatcatttcatattgatagtattgctatgcttagtccccaaagaaccagatttcgt

SEQ ID NO: 14695 - DNA, 410 bp, Glycine max
  Clone ID: jC-gmle01810080e12d1
attatatatatatctatctatggtctatgtatagatatattggttaggttatcaagtattaatctgaaataaataagaattgctgcttctaatacttataataattactacaaattctaataattactacaaaagggatatatgttagataaaatagattaattaatctatttcacaaaaaaataatgtatccatagcacagtttcgtcttataatacctcgggtgctaatgaaactattttagtgaaatttaactgtctcaattcccgggcgattgcacaaaagattcgagttccttttggatttccttcttgatcaatgacaactgcggcattatcatcatactgaattattataccggtgctacgtttgagttctttacaagtacgtacaattacagctctgatcac

SEQ ID NO: 14696 - DNA, 437 bp, Glycine max
  Clone ID: jC-gmle01810080f01a1
ctggtcacctacaatatcatgattgccttgcaagctaaagcaaggaattatgagatggcattgaaactatatcatgacatgcagaatgcgggatttcaacctgacaaagttacttacagcatagtaatggaggcacttggccattgtggttatctcgaggaagctgaatcagtttttgttgagatgcaacagaaaaactgggtgccagatgaacctgtttatggtcttttagtagacttgtggggaaaggctggtaacgttgagaaggcttcggaatggtatcaggctatgctgaatgcaggtttacttccaaatgtacctacttgcaattcccttctcagtgcattcctcaggttgcatcgattgccagatgcttataatcttgtccaaagcatggtggctcttggccttagaccttctttggaaacttatacttt

SEQ ID NO: 14697 - DNA, 463 bp, Glycine max
  unsure at all n locations
  Clone ID: jC-gmle01810080f01d1
gaacaaattacatcagtgtaatttgctctttcgtgtatatttacaaataataatataatatagaaagcatagactatcatagaggattcgttgttattttttgaggaacaaggaatttagaggtatgggatgatagccaactacagtaaatgcatcctttccacataagagtggttcaaccattggcaaagaggctccccacatcccacaaaacaccctgaatttcccttttcagccaaaaatgggaaactgaatgtgtgcaacaggtcctgcactgcctgtctcaccagagaagatcctgtcaccttgctccgacgaccccatcctgtgataatgtctacccgactagggcgaatcccggataccagcatacgttggcgaaaccaagcaagtgtcctagacaatgctgtcacagcagttccatcagacatgacatgaagatttatangccaatagcgagagc

SEQ ID NO: 14698 - DNA, 658 bp, Glycine max
  unsure at all n locations
  Clone ID: jC-gmle01810080f02a1
aggccatgtacgtcttacttgannncnnnnnnnnnnntnnnnnnnnnnnnnncnnnnnnnnnnnnnnnnnnnnnnggnnnnnnnnnnnnnnnnnnnnnnnnntttntttttnnnnnnnnnnnnnnnnnnnnnnnngggnggggngtttntnnnnnnnttnnttttttttttnttttctctgnggaggacgacggttctgatggctccaccgccacctccgccgccaccaccaccaccaccaccaccaagcctaagaaaggcaaggccgcgttgcctcttaagagggacaggacgagatctaagaggttcttggaaattcaacaattgagggagcgtaagaaagagtatgacttgaagacagcaatatctttggttaaagaaacagctaaaaccaagtttgtagaaacagtagaagcccatttccgcctcaacattgaccctaaatataacgatcaacaattaagagcaacagtaaatcttcctaagggaaccggaaaacccgttaaagtggctgttcttactcaaggcgaaaaattcgatgaagcaaaaaatgccggagctgatttggtgggtggagaggatctgatagaacagataaaagcagggttcatggagtttgataaactaattgcttctcagatatgatgcctaaggttgc

SEQ ID NO: 14699 - DNA, 379 bp, Glycine max
  Clone ID: jC-gmle01810080f02d1
attccctcgaaaagaaaatataattagatctggggtgttagttacgaagtaatacaaggaaaatcctcagccggggtcaaagattatgtaatgtagcagagtgcaaacatttggaacagagagatcctatcccctgtgtatgtaactttggtaacatctttgactaaatatttggcaagatctcacaatggcacccgggatagctgacagaggccaaacgaacatttacatgtgaaggttctattctgatggaggtctgtaatcaagcatctccctgatatttaacctgattgaaggtcccatggccgagcatatgtgagcactttttcagtacacacctttagcacctgaaggtttgttagcctctactgattttact

SEQ ID NO: 14700 - DNA, 636 bp, Glycine max
  unsure at all n locations
  Clone ID: jC-gmle01810080f03a1
aggccagcctacttctcctagncnnccnnnnnntnnntnnnggnnacnnncnnnnnnnnnnnnnnntnnngggtnnnntnnnnnntnnntntttttttttttnntttnttnntttttttgggggggggtnntttntttttnntttttttttttttcttttttttttttgctttctgtgtaagatgtatcagctcttttgaatttgaagactagaagagtggcgtgcagcagtcggaatagaaccggggcatttcacgtattccatacatcctgccttatacactggataatcttgtgtgaatttgagataatcacaaatcatttagtctgtccaaatgttagacgagtagtgaagagaaaggttgcgtcagatggcaacaaaattggaaaagaaaaagatattggaaaacatataagaactgtattctgcccagagtgccaaggtactggtatgatcattgatggagatggggtggagcagccagaattttctttgtcgcagatgttcaaattcaaaataaaggcatgtgatgcacgcagagattggataaagagtcctgaagttttgaagaattgctcaactgggtttcacttcccttcacaatctgaagagatatttgaggaaaaagtggaacc

SEQ ID NO: 14701 - DNA, 487 bp, Glycine max
  unsure at all n locations
  Clone ID: jC-gmle01810080f03d1
gaggcaacaactttggtggcattctagaatgatatctgttctttagcatgtactcgtaagtcactatgtcaggcattcagcaatgtgcattcacactcattagcaacaggtatacacatgaaatgtttaatctggtcactatctacgacccagtctatcaaccaacatttacctaaaaagttacacataattctagaaaatataagaccaacatactcagatgtataagaaacgtttgcccggttgttatgcccaactctgatcatcagcacgataaaaatgcagtaaatttatgggttccactttttcctcaaatatctcttcagattgtgaagggaagtgaaacccagttgagcaatttttcaaaactttaggactctntatccaatctttgcgtgcatcacatgcctttattttgaatttgaacatctgcgacaaagaaaattctggctgctccaccccatctccatcaatgatcataccagta

SEQ ID NO: 14702 - DNA, 588 bp, Glycine max
  unsure at all n locations
  Clone ID: jC-gmle01810080f04a1
gcagaggatgccgtacgacgccgtaatgcggtcgccgagtatcgaaagaaacttctccagcacaaggaattggaatccagagtccgatccgtcagggagaatttgcgagcttcaaagaaagagttcaataaaacagaagatgatttgaagtctcttcaaagtgttgggcagatcattggcgaagttctcaggcctcttgacaacgaacgccttattgttaaagcaagcagcggtcccaggtatgtggttggttgccgcagtaaagtggataaggaaaaattgacttccgggacaagggtggttctcgatatgacaacactcaccataatgcgagctcttcctcgagaagttgatccagtggtttacaatatgttgcatgaagatcctggtaatatcagctattcagctgttggtggcttatctgatcagatcagggaattgagggagtcaattgaactacctctgatgaatcctgagctctttcttcgagttggaattaaacctccaaagggtgttctcctttacgggcctnctggtactggtaaaacattggtagccagggctattgccagaatatagatgctaact

SEQ ID NO: 14703 - DNA, 435 bp, Glycine max
  Clone ID: jC-gmle01810080f04d1
aaaaaatataaagcaaattgtgcacatgccgagatccagtataaaatgagtcgcacttctacaatccagaaaaaaaaaggggtttgggttggttggggtgggggcaatgataatacaattcatttgaacatcgatttgatccgtttgataaagttacccttcttccaaatttagaattcggaaaacacaagccagaacaacccaaagggaacattacgcttagccctacgaattgagtaacttgcctgaggtatttccaactcaagatgcactgcctagatatccatggctctgcaagaattttgcaatagattctagtctttaccaaaatcagcactgtagtgtgcactggattcaagtttctttgcctcgttcagtttcctaacagccttcataaaatcttcatggatcacataatcacgctctgcccgaatt

SEQ ID NO: 14704 - DNA, 511 bp, Glycine max
  Clone ID: jC-gmle01810080f05a1
cacaacaggaggacgcatctggtgtcgaacaaactgcaccttcgacaacgcgggacgcgggaagtgcctcaccggcgactgcgagggtgttctggagtgcaacaaaacaggtacacccccgaacacggtcgttgatttcgcgttgaaccagtataacaacctcgacttctacgacatctccctcgtcgacggtttcaacgttcccctacagctgaccccgacctacaactgcagttccgttaaatgcgccgccgacatcatcggagagtgccccactcagctccaggttcctggcggctgcaacaacccctgcacggttttcaatacgactcagtactgttgtagcaccggagctgctgggtgcggtcccacagattattccaagttcttcaaggagaggtgccctgatgcctacagttaccctatggacgatgcaaccagcatgttcacttgcatgggatccgattatagggttgtgttttgcccttaattaattcaacatcatcaacta

SEQ ID NO: 14705 - DNA, 390 bp, Glycine max
  Clone ID: jC-gmle01810080f05d1
ctattcaacctttttgtaaaaaaaaaaaaaaaacccccccaaacctataaaaaaaaaaactttttgggccacttaaaaataattttttaaaattcttttcaccttttttggaacctcctaaagaaaaaaaccccccccccaaaccccccaaaaaaaaacttttttttttggtgaaaaaaaacccccaatttaaaattttcacacacccaccccaattggaatcccccaaatttgtgttgctactttatttttaattatcaaaaaacagttgtctctctgttttaaattatataagccaaaacccccccctttatattcccccccccaacaaaaacacatctctttcccttccccaaaacaaacattgcgccttacctctcccccctttca

SEQ ID NO: 14706 - DNA, 465 bp, Glycine max
  Clone ID: jC-gmle01810080f06a1
gccaatacccatgtgcaacgaaattcaagcccaagcccaagcccaagcccaagcccaacctgggtttaagctcgtcggtttcaaaaacttcgtccgaaccaatcctaagtcggaccgctttcaagtcaaccgcttccaccacatcgagttctggtgcaccgatgccaccaacgcctctcgccgattctcttggggacttggaatgcctattgtggcaaaatctgatctctccaccggaaaccaaatccacgcctcctacctcctccgctccggcgacctctccttcctcttctccgctccttactctccctctctctccgccggctcctccgctgcctcctccgcctccattcccagtttcgacgccgccacctgccttgccttcgctgccaaacacggcttcggcgtccgcgccatcgccttggaagtcgccgacgcggaagccgctttcagcgccagcgtcgc

SEQ ID NO: 14707 - DNA, 513 bp, Glycine max
  Clone ID: jC-gmle01810080f06d1
tctttttttttttttttttaatcaagtaatttttcaaagtatttaatagaaaaatactatccgggaagtttctgagatttcattttcatacaagggaggacactatcattgtaattctatgtattatagagtataaacaccctatgccacattgattcctgattaataatttccacaaaggaatatttatattattagggaaaaattgcttgaattccttccaacaaaaataattcgattaaaatccaattaaaatggcatgctctaaaatattgtttttaaaaaaatctctagaggcaagcaacttcaataatttcaacttctcattctttaccatgcaccctatcctatgaattatatgtataaaaatctctggcctgtccccaacaggcttggtgaaaatctgaagcaaagtgcccctgatcatctctgtcaacaagaataccaagcttcttacactgcttaatctggtcaacgggcaacacatcaacggcacggttgaggaggttggcg

SEQ ID NO: 14708 - DNA, 471 bp, Glycine max
  Clone ID: jC-gmle01810080f07a1
gcgactcgatcgccgtgggagcgttcggtgctgccaaccacaacgttctcgtctggtgctccgccggaaactcaggacctggtccttccaccgctgttaacatagcaccgtggattttaaccgtcggagcttccaccgtcgacagagagtttccggcagacgtaattctcggagacggaagagtcttcggtggcgtgtctttgtattacggtgaaagcttacctgattttaagcttccattagtttatgctaaggattgtggaagcaggtactgttacatagggtctctagaatcttccaaagtgcaaggaaaaattgttgtttgtgatagaggagggaatgccagagttgaaaaaggtagtgcagtaaaacttgctggtgggttgggaatgattatggccaacactgaagccaacggtgaagagcttcttgcagatgcgcatcttttagcaactactatggtgggtcaaa

SEQ ID NO: 14709 - DNA, 496 bp, Glycine max
  Clone ID: jC-gmle01810080f07d1
agttcaataatttattagaaccccttcgtcaactgcttcaaagtgggtcctgagtacacttgcaagaaagagcacacctaaaacgtattttatagtttttacaataaggcaatacgattacagaaaattacaaagagacttgactaaatccatcacctgtgaatgaatgatgtgtttccacagcaacacccgagtgcaattcaaattgatgatgagggttcaccgctccatccgaccccaattgacatcagttagagataagccagaaaaggcttgcaagattcaaatgtccctagtatatttcggcaaatccatctagctgcagtgctgccatatacatctcgcttagcatgacataacctaatatcaatcaaatgagacgtgtaatgaaaccacaataatctgatccaactatcttaaaaatcacatctgatttccccaaattatcagaagcccttcatcaactactttgaagtcgttattctgtcgtttgtac

SEQ ID NO: 14710 - DNA, 547 bp, Glycine max
  Clone ID: jC-gmle01810080f08a1
caggtgagttgcgttacccttcgttcccatagcaaaatgggacatggaaattccgaggaattggtgctttccaatgctatgacaagtatatgttgagtagcttaaaagctgctgttgaagctcacggtaagcctgaatggggaagcacaggccctactgatgctggccactataacaactggccagaagacactcaatttttccgcaaagaaggtggtggatgggatggtccatatggtgagtttttcctcacttggtactctcagatgctgttggaacatggtgacaggattctctcatcagccacgtcgatctttgacaacactggagttaagatctcagtgaaggttgccggcattcactggcactatggtacaaggtctcacgccccagaactcactgcagggtattacaacacccgattccgtgatggctacctccccattgctcaaatgctggcgcgccacggtgccatctttaacttcacctgtatcgagatgcgcgatcacgagcagccacaagaggccctttgtgcacctgagaagct

SEQ ID NO: 14711 - DNA, 499 bp, Glycine max
  Clone ID: jC-gmle01810080f08d1
aaggaaacatttccccaaagtctatgattacgtacacaatgtaaaagggtcacaaatagaagttttaggtgcatacaatacaaaacaatataatacaaaattttacatcttcaaagccacaaacctgggctgttggttcactaaaactttcacacagcctccttgtgacttattcctaagccctattaccacaaggatgttcaacaattctcagtgcatcagcactgcagcctcttgcacaagaggctgtgtaacatgcacaaaatgctcagcttccctctccacctcttcccaacacttgtgtgcactcttcccttctttcatcttcttcacaaaccccacaaacttcctccagttatttggttcaaacaaatgcggattcatcctcaggtatgtgaaggcacacatctctctatcaccagactcaccatcaacattcaattgtgatgcccttatgatctgctcatgtgcataactcgtcgtaccggggcagcgcgtt

SEQ ID NO: 14712 - DNA, 554 bp, Glycine max
  unsure at all n locations
  Clone ID: jC-gmle01810080f09a1
ataggataatggcaaaggtatctctgtttgtggtgtgtgtcgtttgcattctggcattggcctctgctcagagtgctacaaatgtgagagctacttatcatttgtaccaacctgagcagcataactgggacttactcgcagtcagtgcatattgttcaacttgggatgctgacaaatccttggcatggcgcagcaaatacggttggacagctttctgtggaccctctgggcctcagggccaacaatcttgtggcaggtgcttgagggtgacaaacactagaacaaacgctcaggaaacggtgagaattgttgatcagtgcagcaacgggggcttggacttggatattggtccgttccaaaagctggacactgacgggaatggcattgctcaaggccatcttattgttaactacgacttcgtcgactgcggtgactaaactttgactagctagcgttggttatatgcaaaaggaattgaataaagaaagccatacaagtgctntattgctgaatagtaataaaataaataaatgaaagcaagtattaatagtatt

SEQ ID NO: 14713 - DNA, 491 bp, Glycine max
  Clone ID: jC-gmle01810080f09d1
aatactattaattactgctttcatttatttattttattactattcaggaataaagcacttgtatggctttctttattcaattccttttgcatataaccaacgctagctagtcaaagtttagtcaccgcagtcgacgaagtcgtagttaacaataagatggccttgagcaatgccattcccgtcagtgtccagcttttggaacggaccaatatccaagtccaagcccccgttgctgcactgatcaacaattctcaccgtttcctgagcgtttgttctagtgtttgtcaccctcaagcacctgccacaagattgttggccctgaggcccagagggtccacagaaagctgtccaaccgtatttgctgcgccatgccaaggatttgtcagcatcccaagttgaacaatatgcactgactgcgagtaagtcccagttatgctgctcaggttggtacaaatgataagtagctctcacatttgtagcactctgagcag

SEQ ID NO: 14714 - DNA, 437 bp, Glycine max
  Clone ID: jC-gmle01810080f10a1
tcaatggccaccacagcagctctatccggaaccatggtgagcacctccttcatgaggaagcaacctatgacgaccaagagcctaaagacattccccaacgctctttttggtctgaaaggtggacgaggtggtcgtgtaacttgcatggcctcgtacaaggtgaagctcataaccccagaaggagaagtggagtttgaatgcccagatgatgttttcattgttgacaaggctgaggaagaaggcattgaacttccctactcgtgcagggctggttcttgcgtttcatgtgttgggaaaattgtgaaaggtgacgtggaccagtcagatggtagcttccttgatgatgaacaaatagaaagtggatgggttctcacctgtgttgctctacctaggtcagacgttgtcattgagacacacaaggatggagagatcgaatg

SEQ ID NO: 14715 - DNA, 497 bp, Glycine max
  Clone ID: jC-gmle01810080f10d1
gaaaaagataaagaataactattattgtcttagacaacatgtgcataaacagtaagcattaccaaactaattaattaaagtgcaacaatttcacttgtttccacaaacatgacaaaagtaattaataaactcgcgatgatttcagctagctaactagccaatgccaaatcactctaacaaaatcaaaacacgacatagatagatggcattagaagagcaatggacaagattacattatgatatatatcgatcattcgatctctccatccttgtgtgtctcaatgacaacgtctgacctaggtagagcaacacaggtgagaacccatccactttctatttgttcatcatcaaggaagctaccatctgactggtccacgtcacctttcacaattttcccaacacatgaaacgcaagaaccagccctgcacgagtagggaagttcaatgccttcttcctcagccttgtcaacaatgaaaacatcatctgggcattcaaac

SEQ ID NO: 14716 - DNA, 368 bp, Glycine max
  unsure at all n locations
  Clone ID: jC-gmle01810080f11a1
gaaagggaaggaaagatgcatatattcgtgaaaaccctaaccgggaagacaatcacgcttgaggtggagtcaagcgacaccattgacaatgtcaaagccaagattcaggacaaagaagggattcctccggatcagcagaggttgatcttcgccgggaaacagctggaggatggccgtaccctcgccgattacaacatccaaaaagagtcaacattgcatcttgttttgaggcttcgtggtggtattattgagccatctttgatggcactggcgaggaaatataaccaggataagatgatctgccgcaagtgctatgcccgtttacacccccgtgctgtgaactgcangaaaagaagtgtggtcacagc

SEQ ID NO: 14717 - DNA, 586 bp, Glycine max
  Clone ID: jC-gmle01810080f11d1
ttttttttttttttttttttttttatatttttttttttttttattttttttttttgggtttttgtttttttttttttttttttttttcttttttttaattttttttttttttttttttgcgtggggaaagaaaaaaaaaaaaaaaaatttttttttggagggtaaaggggcgccaaaaaaaaaaaaaaaaaaatttttcccaaccaaaaaaaataaataattaaaaaaaaaagatttttttgttttaaaaaaaaaaaaattcttctcacaaataaaaaaaaacaaaccccccccaacaaaaatatttttgttaaataaatctagagggagggggggggacttaaaaaaaaaaaagattttttacaaaaaaaaaaggtttaataaatacaaaattaaaaaaaaacaaccttctttgtgttttttatagaaaaaaattgttacaaaaaaaaaaaatttttttttttgttaagggaaaaaaaaagaaacaaaaaaaaatattttataaaaaatttaaaaagaaaggagagaatttttatttaaaaaaacaaaaaaaaaaaatttttttgtcttttatgggccacccccc

SEQ ID NO: 14718 - DNA, 579 bp, Glycine max
  Clone ID: jC-gmle01810080f12a1
aattaattaaaatatgtattccacttgtcaaattaatcagaattaagggtgaggacgtagtaaaatgaatatttagacatcttaaaagtaaataattacaaagtatgtttatctaattctaaagtgctataaaaattaataaacttattataaatatcaatatctactgtgaatgtattttaataaaaattctttaattatatggcactttagaattagataaacatactttgtaattaattaattaaaatatgtattccactagtcaaattaatcagaattaagggtgaggactagtaaaatgaatatttagacatcttaaaagtaaataattttgttatcatttagctataaaaccttctaagattgatttcactatttactcaatttattgacttcactgctggatatgaattcagaattgtggataagcattattatattgtggttgtggtgtgtgttgttcaaggtatttcgaggagaggcttgtgatgatcttggaggaactttctgtgagaccgagtatcagaagggtgtctactagagaaatgtgaaaacctttttattgccatgactact

SEQ ID NO: 14719 - DNA, 322 bp, Glycine max
  unsure at all n locations
  Clone ID: jC-gmle01810080f12d1
ggggnnnaaaatganaaggaacttaaacaaatcagaagnagaatatgacgtatcaccaactcactagtcagcggccaccctttttttatttatttttattttttatattttttttataaatttttattttatttttggttatatggttttttttaataatatataatcctttctcacctatttttaattccgattctttttcttcaaaaaaaaaaaacctaaaaaaacattaaacaaaaaaaaaaaacccccacaaaaaaaaacaaaaaaaggcaccctttatattaactccaaaaaaaaaacacccccttttttttaatac

SEQ ID NO: 14720 - DNA, 579 bp, Glycine max
  unsure at all n locations
  Clone ID: jC-gmle01810080g01a1
gtgccctccctctttctagctatttccctctcttaacacaattaacaaagatatatcatatcatatcaactccaaatgatgaaaaatattgggttgtttcttcttgtggtggtggctacttttgtggtggcagccacagctggtagcttttaccaagactttgaaataacatggggtggtgagcgtgccaaaatctatgaaaatggaaatcttctcaccctctccctagacagagcctctggctctggctttcgttccaaaaaagaatacttgttcggaaaaattgacatgcagctcaagctcgtgcctggtaactctgctggaacagtcactgcctattatttatcttctctggggcctactcatgacgaaatagacttcgagtttttgggtaacttgagtggtgatccttatactctccacacgaacgtattcagccaagggaaagggaacaagagacaacagttccatctatggttcgaccccaccaaggacttccacacatactncgtncaatggaatccctgcagcatcatattcttgtggatggggacaccaatanggagttcaagaatttgg

SEQ ID NO: 14721 - DNA, 562 bp, Glycine max
  unsure at all n locations
  Clone ID: jC-gmle01810080g01d1
aactccaacaattttattaatgaagatagtttacaatttcagcacatatacacgggcatgaatataattttgcaggctataatcatcttttgtgatcacaaacaatggagtagtgctcaacaaattaaagcacaaaccaaccaacaataatcatagttttagttacattagtttatacaagaaagtaaatcaacgtaataggcatacacgtgtcacgtatatggggaccattttttttatatatataataatatgcaacattgaattgaataatgaacattctcaagcaatggaacattctggagggaggccttgtgggaaacgtctaatatcagtgcaatagttgtaaatcatgtaattcttttgcacccaatggatcttggccagccccgtggcgtccagtgattggccagtggaggaagaggttagggcattgaagtttctgtatgaggctgtgaatggggccttgctccaatccgttttcacaagcccaccccttgtggcccaatcctcagcngtccaaagctagagtatattctcatgggttgggtctttgggaaag

SEQ ID NO: 14722 - DNA, 402 bp, Glycine max
  unsure at all n locations
  Clone ID: jC-gmle01810080g02a1
cagagaaggacaggcgccatttatatattcaaggagaatttggagttcattgggaagcacatcatcgaaggaaaaaagaggnacaatttaagcctaaacagttttgctgatttgactaacgaagaattcgttgcttctcacacgggagctctctataagccaccaactcaactagggtcgttcaagattaaccacagtcttggcttccataagatgagtgtcggtgacattgaggcaagcttggattggagaaagagaggagctgttaatgatattaagaaccaaagcagatgtgggagttgctgggcattttcagctgtggcagctgttgagggaatcaaccaaataaaaaatggccagttggtttcattgtctgagcaaaatttggtggattgtgccaac

SEQ ID NO: 14723 - DNA, 181 bp, Glycine max
  Clone ID: jC-gmle01810080g02d1
ggtagtcaataaatttttctcttaaccaatgtgatgtggtaaacatatgatctgatctaagatcatgatctcatagatgctacgtacattgcagcattacataaggattactggcggattaattaacttaataatatttttttattttagggtaatgtgctctaacacatatttaaagaaa

SEQ ID NO: 14724 - DNA, 665 bp, Glycine max
  unsure at all n locations
  Clone ID: jC-gmle01810080g03a1
aagggccaatcgctagtgcanttcgantgncnnnctncntnnnttnnttnnnnggnnaccnncccnnnntnnnnnnnnnnnnnnnnggnnnnnnnntnnnnnnnnnnntttttttttnnttnntntnttnttttttgggggggttttttttntttttttggtttttgcttctttnttgtgttttcccttcttaatttttcaactctaaatttgatcatcaccttcacccactttactcttactaggaggaacccttctctctgtgtgtgtgttctgagttgattctgtgcttcagctttccacaaagtaaagtagaaagatggcaatgattccttaccacctttgccgtttaccttaccaggattccctcaaagcacttgaggctgatatacagcacgccaatgctttggctgctgcaattcccagagccaagggtgagactcttcttcaaatgaaattggtttacaatcacttggctcccctcttcctgttatttctacaatggatggattgttcttgtgcaggctntctccataggtatctcgacctcttccacatacttatttacaaggtacataatgatggtagatcaatcatgcctactcatggaaggaaggctaccattgnggacttttattgctgtatattaccattctttcaacggc

SEQ ID NO: 14725 - DNA, 496 bp, Glycine max
  Clone ID: jC-gmle01810080g03d1
aacttaatggatcttttatgcaaggaattccaagttaattgcaagaacggtgtctacaatggagatatatcacgggagtaagaagaatggtttttctggactaaaaaaccagaaatttctcttaccataacaactgtgattaaattaccagagtattttctttttgtaccagactctattcacatttgcagtccggaatttcctatctgtacattttttttttcttcttcttatttagtagaaaattaaatgaggtattcataatacattaggaaaagtgcatctgggtgatctttaggcagcttgctgacatagagataaaaacgcaacaagtcctctttagaaactgtttcagcatcaacaacatcattattacaagttaatacccatagatcctccgaattaactctcctcaagctaccacggcaaaaaggacaagactttgactttctgttccacttgcggtagcatttaatacacatggcatggcagcaac

SEQ ID NO: 14726 - DNA, 599 bp, Glycine max
  Clone ID: jC-gmle01810080g04a1
agaaaaaataactgattagtctttctattataaaatagagtataggcattatttttttcttctaaaaaaataaaattaagaaattttcatggtaaccattcgtgcagatgaaattagtaaaattatccgtgaacgcattgagcaatataatacggaagtaaaaattgtaaatacgggtaccgtacttcaagtaggcgacggtattgctcgtatttatggttttgatgaagtaatggcgggtgaattagtggaatttgaagagggtactataggcattgctttgaatttggaatccaaaaatgttggtgttgtattaatgggtgatggtttgatgatacaagagggaagttcagtaaaagcaacaggaagaattgctcagatacctgtaagtgaggcttatttgggtcgtgttataaatgccctggctaaaccaattgatggtcgaggagaaatttcagcttcggaatctcgattaatcgaatctcctgctcccggtattatttcgagacgttccgtatatgagcctcttcaacaggacttattgctattgattcgatgatccccataggacgtggccaacgagaataattattggagac

SEQ ID NO: 14727 - DNA, 439 bp, Glycine max
  Clone ID: jC-gmle01810080g04d1
atatattaatattatatggaaatgaaataaaaagatattaaaagatactaattataagaatttgaaagtgaaattataaagttattaaatgattaatcaatttttttctacctgttcctgtagtaaaaagagttccatctgttcttgaatagcttccttcaaaaggacttctgcttccccagtgaatgtcttggtagaagatatgatttctttgaattgaggtttattcgtgtttaagtaagcacgtaactcaacaagaaatttccttacctgtccaatttctaatgaatcaagataaccattcgttccagtataaatagttattatctgttcttccacggtaagaggagctgattgggattgtttaagcaactcgcgcaatcgttgacctcttgctaattgattttgagtagctttatcgagatcagaagcgaattgg

SEQ ID NO: 14728 - DNA, 442 bp, Glycine max
  Clone ID: jC-gmle01810080g05a1
gtggcaacaaactcttattcccatttagtggtgaatttgccaaaccgggataagggtatccctattcaggaatacaatgttctcgttaagactccctattcctctcgttaaaacaccaccttctccctcttgttattattctcactattatcactatcgatatcgttatcgttgttatcatcctttccatcaccgttcccaaacacagagtcttatcgtctcgaagcgcggttccgccattgcgaagtgtcacgctgatagcgtgacacttcgtgatgacggagtctcgctcgcccaagagtcgttggagccacttccggcggaactcgcggcggagatgatgccgaagcatgtggcggtgataatggacgggaacgggaggtgggcgaaagtgaaggggctgtcaccatcggcggggcaccaggcgggggtgcaatcgctg

SEQ ID NO: 14729 - DNA, 492 bp, Glycine max
  Clone ID: jC-gmle01810080g05d1
gcaaacaattttttatgaatgtcgaccaccatagcgtctttgggggtgttgaaatgaacttaatgcatctacaaactcatccttcccaaaatctggccagagttcccgattaaaataaagttctgtgtaggctaattgccacaacaagaagttactcactctaagctcgccactagttcgtattagtagatcaggataaggaaactcagtacaattagtttccaattcttgttcaataatgttttcgtttatgtcatccaagtgaatgtgaccatctttgactttcttggctacacttttacatgcttgcacaacatcatattttccactgtatcccactgccacaataagttggaatctcgaattttgttttgtatcctcttctgcactagctatcattctttttaaagactcaggcaccttgatgaatctccaatcacagatattctaattccttccctcttaaaagtttgaactttagagtttattgtt

SEQ ID NO: 14730 - DNA, 553 bp, Glycine max
  unsure at all n locations
  Clone ID: jC-gmle01810080g06a1
gaaaaattgatgcgtgaaaggacattccttctgttggcttgttgttcaagaatggcgatgggtaagaaagatgtttggagagttgaatgtggaatcccttctggatttccgctcacagttatttgtaatagcatttttaatgagatgctcattagatatagctatgaaaaattactgcgccaggctaaagctccaagtatgtttttacaatccttcaaaaattttgtttctttgtgtgtgtatggtgatgataacttaattagtgttcatgaatatgtcaagccttactttagtggttctaaattgaaaagctttctagctggtcataatatcaccattactgatggtattgacaaaactagtgcaactttgcaatttagaaagttagcagattgtgattttctcaagagaaactttaagcagatgtctaatgttttgtgggtggctcctgaggataaggcgagtttatggtcacaacttcattatgtttcgtgtaataatctggaaatgcaagaagcttatctngtcaatctcgtaaatgtgttacgagaat

SEQ ID NO: 14731 - DNA, 333 bp, Glycine max
  Clone ID: jC-gmle01810080g06d1
aaataaaaacccccccatttcccaaaaaaaggcccctttttttaaggaaaaaaaattttcctcctttttcaaaaaagcaaaaggcccccccacaacccaatttttgaaaccctccccactttaaaaaaaacccgcccaaaaaagggatggggggttaaaaccaaaaattttttttttaaccccaaaaaaaaccccccctaaagcctctggaaaagggcccacctttttaaaaaaaaaaattttttttcctctcccaaaggggggggaaaatcttttttggattttcgggggggggtttttaacccgaaaaaaaaaccaaaaggggggggggaa

SEQ ID NO: 14732 - DNA, 558 bp, Glycine max
  unsure at all n locations
  Clone ID: jC-gmle01810080g07a1
tgactagacaaatagcttcaccagttgaagtggactctggctacggagagcctattgagatgttgtcatgcccctctgatggcagtgactgtggcggagcatacatcattcgtcttccatgcggacctcgtgataggtacataccaaaagaatcactttggcctcacttgcctgaatttgtggatggtgctctaggtcacattgttaacatggcaagagttttaggggagcaagtgaatagtgggaagccaacatggccttatgttatccatggtcactatgctgatgctggggaggtagcagcacacttatctggggccttgaatgtgcctatggtgctcacagggcactcgttaggtcggaacaagtttgagcagttgttgaagcaagggaggctctctagggaggccataaatgcaacctacaagatcatgaggaggattgaggctgangagttgggtgtggatgctgctgaaatggttgtcactagcacaaggcangagattgaagagcaatggngactgtatgatgggtttgatctcaaagtggagaggaagc

SEQ ID NO: 14733 - DNA, 397 bp, Glycine max
  Clone ID: jC-gmle01810080g07d1
ggaaaaggggtgggtgtatattattgaagttgggggatacattctaggatatgggttttttttccctcttttgggttggaggtttttctatgttcatgggtaatgacacttaaaaatagggcccaaaacaaaaatcatgatcctttgagatgctccaaaattggtgaaaaatcacaggcctcatagctcttttttggaaaaaaaaaggtggggcttttttgggagaacacaactttttttttggaactggcttcactgggaaaaaacctttcactggcatattaaaaaaccccctttaaaacaagggttttttgtatgccaacccctaattttttataatccgggtgaccttttttttccacaaatacaaccactttggatagaacaattccccact

SEQ ID NO: 14734 - DNA, 569 bp, Glycine max
  Clone ID: jC-gmle01810080g08a1
attctctctgtgtatttccctacctctcccttcaagatgcagatcttcgtcaagaccctcaccggcaagaccatcacccttgaggtggaaagctctgacaccatcgacaacgtcaaggccaagatccaggacaaggaaggaatccccccggaccagcaacgtctcattttcgccggaaagcaacttgaggacggccgtacccttgctgactacaacattcagaaggagagtactcttcacctcgtcctccgtctccgtggtggcatgcagatcttcgttaagacactcaccggcaagaccataaccctagaggttgaaagctccgacaccatcgataacgtcaaggccaagatccaggacaaggagggtatccccccggaccagcaacgtctcatcttcgccggaaagcagctcgaggacggccgcaccctcgccgactacaacatccagaaggaatcaacccttcacctcgtcctccgtctccgtggtggcatgcagatcttcgttaagaccctcaccggcaagactattaccctagaagtcgaaagctccgacaccatcgacaacgt

SEQ ID NO: 14735 - DNA, 358 bp, Glycine max
  Clone ID: jC-gmle01810080g08d1
ctaaacccacacccctcttttttttgaggaaaattttttccccccccataaaaaactaaattttttaaaaagttttggaaaccatcccactaataaccaacggttttaaacccccccccaatcacgaggccaaaggacaggggttttttcttttgaattgggaagaactacaagggttctttttttctcaaattttttcccaaaaaaaaaaacccttctttttaccgcaggaagccctccttttccctaattttgacccgttatatgataaaaggctattaccttcccccccccaaggtattttttttcccccggaaaatccttgtaaaaaatttctttcccaccctcaaacccctcc

SEQ ID NO: 14736 - DNA, 557 bp, Glycine max
  Clone ID: jC-gmle01810080g09a1
ggggcatcttggaaggatcccgattcaattcctctcatggtcatgcaagctattttgggttcttggaataagacagcaggaggtggaaaacacatgggttcggagttagcacagcgaattggcattaatgaagttgctgagagcattatggctttcaacaccaattacaaggacacgggtctttttggtgtttatgctgttgccaagcctgatagcttggatgatttgtcttatgctataatgtatgagacaaccaagttggcttatcgcgtttcagaagatgatgttacacgtgctcgtaatcagttgaaatcttcactgctactacacatagatggaacaagcccggtggctgaagatattggccgtcagttactcacatatggtcgaagaatcccgtttgctgaattgtttgctagaattgatgctgttgatgccagtacgattaaacgtgttgccaatcgatttatctatgacaaggatgttgttattgctgccatgggtcctattcagcgtttgcctgattacaactggttcagacgtagaacctactggaa

SEQ ID NO: 14737 - DNA, 410 bp, Glycine max
  Clone ID: jC-gmle01810080g09d1
aaaaaaataaaaaaataaaaataaaaaaatataaaaaaaaaaaaaaaaaaaaaaaaaaaaaaaaaaaaaaaaaaaaaaaaaaaaacaataaaataaaaaaaaaaaaaaaaaaaacaaaaaagatcaaaaaaaaacaaaaaaaaaaccctaaaaaaaaaaaaaaataaacaaaaaataataaaaaaaaaccaaaaaaaaaaaaaaaaacaaaaaaacacacccattgaaacaattaaaaaaaaaaaaacaaatataaacccatcaccaaaaaaaaaaaaaaatcataaaaaaaaaaaaataaaaaaaaaaaacaattcataaaaccaaattcaaaaaaaaaatttaaaaaaaaaaaaaaaaaaatcaaaagacaatgactaaacaacaaaaatttgttaaaaaaaataaaa

SEQ ID NO: 14738 - DNA, 456 bp, Glycine max
  unsure at all n locations
  Clone ID: jC-gmle01810080g10a1
ccgcgaaagagtattattcaatattttggttgggttgaatcccggggttgaggcgtggcagacatcacggctattctaagagtgtctcgctccctcattcatgtccgatctgtacgacggaggacgggtagttgcgtaactgccgttaacccttcgccgcacggtgggcgtggtgctttgccttctgaaggtggtagcccttcagacttgctcttcctcgctggtggtggtttcttctagtttcttcactcttttcattacttttagcctgcatagttttaaataagaaaaaaaaaacagcgactntgtgactnagtaagatcaccgnttcttcttcttcttcttcttcttcttcttctactactactactactanctttcctccacaaaatgatgctcagaatcaagaggggtcccactgtcgtttccactaccaaaagacgacgctgcagactc

SEQ ID NO: 14739 - DNA, 478 bp, Glycine max
  unsure at all n locations
  Clone ID: jC-gmle01810080g11a1
gcctcttcttcctcattcttattacccgtaatttgagttcttctctctattggctggttcaacatttttagcttcttctctttctcaaatccccctatcttcaaaatttcaaggttatcactctaaagacagatttttttcttaaatgactgtggctatggctgtttggagtgctggtcttcacttcagtgctgctacgaagcctcatagtagcttgaggcctttggagaaaatcatttgcactgcccctttcttcaaggcctcatctgggtttgctgctactaagccattctgcatccttaacacaacaagattgtcatattctggaactacaattatccctcgagcagcacctgttactgatgtggaagacgggaatcatggtgagactgataccatccaactcccgtagttataattgaccaagactctgatcctgatgctaccgtggtggagataactnttggtgatcggcttg

SEQ ID NO: 14740 - DNA, 292 bp, Glycine max
  Clone ID: jC-gmle01810080g11d1
atataagtattcgtccatgttgattcaattttatgatttaatgcattgggttgtggctatcggttagccatattcttcatttgtccttcaaatgacaaaacgaatgcaaacattgtacaatcccatggtgtacttcaaaagagaatacaatgtcctgcactactttccaagaagtaccactcaaaaactagattcctcagttgtcggacgcctcaagaaatatctcaagctgttagcaagaacctgctggagaggcttggagattgctttaccattgtagcttacatgaaac

SEQ ID NO: 14741 - DNA, 527 bp, Glycine max
  Clone ID: jC-gmle01810080g12a1
ggcgcagaggcacagaagccccttgacttgaccgaggagcttctgaaatggaccagcagcaccatctccatgatgatgctcggcgaggctgaggagatcagagacatcgctcgcgaggttcttaagatctttggcgaatacagcctcactgacttcatctggccattgaagcatctcaaggttggaaagtatgagaagaggatcgacgacatcttgaacaagttcgaccctgtcgttgaaagggtcatcaagaagcgccgtgagatcgtgaggaggagaaagaacggagaggttgttgagggtgaggtcagcggggttttccttgacactttgcttgaattcgctgaggatgagaccatggagatcaaaatcaccaaggaccacatcaagggtcttgttgtcgactttttctcggcaggaacagactccacagcggtggcaacagagtgggcattggcagaactcatcaacaatcctaaggtgtttgaaaaggctcgtgaggaggtctacagtgttgtgggaaagga

SEQ ID NO: 14742 - DNA, 280 bp, Glycine max
  Clone ID: jC-gmle01810080g12d1
ggggaagaatgaaacctttttgaaatgatgattatcaacccacaaaaaggaaattttccatatgaggatgatgaccatgatcttaattaaaaaaggggtttaaatgcaacgcccatccttggaaggggaacaaaaacaaaattttgtgcccttggaacaaggagggcgggtttttttttcatgctaactttgggggcaccaccctttaatatttgttcttggggacccagcacttgcaagttgaagcactgaataaaagatgcaagaagtgttgccattc

SEQ ID NO: 14743 - DNA, 537 bp, Glycine max
  Clone ID: jC-gmle01810080h01a1
accaggttctgtaaagataattgatggtgaaactataactctagagtctaactacagcagcagccgtggccacactggagtaatggggcttttctacctattggtggcagaacagcttccacaccaacacttcagatattcttctcgttcttcattttttatgaatataaatagtataattcattgatagataagttgtgagatgcaaatataagttgagtgtcatatcgatggtatcacagtatgtatcacggttaaaagaaatacagaaatacatatcgatggaacatatacttctcatattcggcagcaataggacaacacacgcaagaaccggcaaagagcatattttcaagtttaaggattgtagtaatgtgattatcaattatttgtattggtgagggtttgtaatgtttgtcttaaaccagtcttgcttattatggttgtgtgatatgtaatactatatatatcatgtttgctggaaataaagtggtcttatataactagaagagagaataaatcaagcttgtcgacagg

SEQ ID NO: 14744 - DNA, 410 bp, Glycine max
  Clone ID: jC-gmle01810080h01d1
ccccgggcaaaaaggtggattaattcccttttttagttaaaaaaaacccctttttttccaacaaacatgatttttttgggtttccattccacccaccctttataagcaagacgggtttaaaaaaaaatttacaacccctccccaatacaaaaaatgggtaatcccattcccccaacccttaaacttgaaaaattgcttttggccggttttgggggggggggccctattgcggccaaaaaaaaaaagtatatgtcccaccgaaaggttttttgggtttttttttaaccgggaaacaaacggggaacccctcggtttgacccccaactttttttggcgtcccacaacttatctatcaaggaattttccttttttttttcataaaaaaggaaaaccgggaagaatttttaaag

SEQ ID NO: 14745 - DNA, 560 bp, Glycine max
  Clone ID: jC-gmle01810080h02a1
gcgaacgccacccacatcgcgaattagcaagcttctaagagaagccaaaaagggtgcacttttgagttcaaagccatggaaatttcctttggttttggattccataacgagtattgttgttaagaggccgaagaaatggaggagcaaggaggagaaagaacaagaggaggaggttttggtgatagaagggattgagtttggaagtgataaatatgtcaagtttgatgttcatattgatgatgatgaagacaatttgagtggtccggatgagacagagtttgtgggaagttttgtgaatgtgcagcatgggcatggccataatgtcaaaactagctttaaggtagggatatcgaaagtgctggagagtgtaaaagctgaagaagacgatgaggtgctggtttctttggtacctaaggtgggaaaaggggatgccataataagaggcatcaaaattgagtttattccaaaatactacgattattttgtgggtgtgaaaaatttacactttttacaaagtttgttgtttatgcttttaaagggagttttttatttttcttttt

SEQ ID NO: 14746 - DNA, 400 bp, Glycine max
  Clone ID: jC-gmle01810080h02d1
actaaaatcacttttcatataaacaaaactcatacaaatttttacatgaaactcaattttttattatgaaaattagttctagaaaatcaaattgatttatttgattttctttacatgcactagtgttgaaagacatgcaccacaacaaatttatatctacttctaggagtacttccccacatccaaaatttcaacttccttcacattctttcccttccccaattgctgtaaaatatatagcaaattcgacatctcatatttcagttagttggacaaaatccagccacagagaatacgagctcgacttgctacactaaaaaaaggaaaaaaaaaaaactaccttttaaaagcataaacaacaaaacttgtaaaaagtgtaaaattttcacacccacaaaat

SEQ ID NO: 14747 - DNA, 669 bp, Glycine max
  unsure at all n locations
  Clone ID: jC-gmle01810080h03a1
aggggagatgatctcttagacnncnnnnnnnnntnnnnnnncnncnntnnnnnntnnnnntnnnggnnnnnnnnnnnnnnnnnnnttttttttttttntttttttttttttttttggggggggtgtttttttnntttttcgtttggaatgggaaccttcaccacgcgcgcgttggcgcagccgctccagaacgccgacgaactcatcgattccgtcgagacatttattttcgattgtgacggagttatatggaaaggtgacaaattaatagaaggggtgcctgaaacgcttgacatgcttcggtcaaagggcaaaagattagtttttgtcaccaataactcaacaaagtctaggaagcaatatggaaagaagtttgaaacacttggcctgaatgtcagcgaggaggagatttttgcatcatcctttgcagctgctgcatatctgaagtccattgatttcccaaaagataaaaaggtttatgtcattggagaagatggtatcttgaaggagcttgagcttgctggatatcagtaccttggtgggccggaagatggtgggaaaaagatagaactgaagccaggatttttgatggagcatgatgaagatgttggagcagttgtttgtggatttgatcgccacttcaactactattaaatccagtatgggaca

SEQ ID NO: 14748 - DNA, 424 bp, Glycine max
  unsure at all n locations
  Clone ID: jC-gmle01810080h03d1
gaacaaaattcaattttcttcttaaatacatgacttttcccaccaccatggggggatactgtataaatattatagtcatacagctgcagctttcagggaaagaaaatctgaaattttgttggtatagaagtccggctgtatggagttgttagggctctgaagcatggccagtgtggtgacgcctgagagcacaagaagagttttgcaaccaccattttgtccaaacaagatatcagtgtctaatctgtccccaaccatacatatctgtgacttcgaaatgccaaatttgtttgccaagtaatccatcataaacgttgagggttttccaacaactaatggttcacgttgagtagatccactgatagcgccaaccattgagcccncacctgcccattcttgagcatctgtgagatgagtaacagca

SEQ ID NO: 14749 - DNA, 560 bp, Glycine max
  Clone ID: jC-gmle01810080h04a1
attaatcacctctttgttttccttttttgtcttcgagccataaacacactttccaccactgtttccatctctgaaacttccaattccaaccaaacacttatctgtgtcctgcaacatccaaaccaacaaggacaatcaaatctcaactgtaccagcttccctcaggctcaggctattacacttgatgtcaatcccaatgtttcttactctcagattgtgggcggcaacgggttcgtgtgtgctttaggaccgttgtcttcttccatctccgtcatgggctgttggagattctctgccaatgctacatacaatgttccgtacaaacgcatctaccgtggacccatcgtggaagatatcgacagtggcaactctcacgtttgcggtcttgtaagaaaaggaaataagaacaatagccttgagctggagtgttggcaatggcatgggttcaattcaagcatgtccatgcccatgtcaagcgttgcagttggagagaatttcgtgtgtggcttatcagagagaggggacgttaatgcagggaagaggaagggtaatgggagtag

SEQ ID NO: 14750 - DNA, 466 bp, Glycine max
  Clone ID: jC-gmle01810080h04d1
gttaatccattcaagggagcgaaagatgagctatggtgaagaaatagaatcggtggtggacctagagagtattggcttggctaaacatgcagccaatgctctttccaagttatttacaacttgagacatagttggtctatctcgaccttcaagcctaacacaatcagcagccaaataaccgacgtaggccactgcctctatctcaaagggcgtgggtggggccactcttctgtccaacactctgtgaatctcatcttggaaaatgaatggcaccacaaaatcaacaacatttcgtggcaccccattctcgtttttatggatggccttgtagccggagagcaactcaagcaaaaccaccccaaagctgtagacgtcactcttgggggtcaaatgttgaagcctatagtattcagggtccatgtagccaacagtgccagcggccagaagtgaaaggtgggcatcctca

SEQ ID NO: 14751 - DNA, 584 bp, Glycine max
  Clone ID: jC-gmle01810080h05a1
attaaattgaggattcacatacccttcagtagaacccagtgcggtgccaccattcttcttttctccgttactgcaccgaccgctactctctccggcggactttattcaaaaagaaaagaaaaaaaacgatataaattaaaaaagtttcaagtttttataatatccaaacagaaattccttattagttagggtctaacgtttgggatacttaatcctacgttagttgtgcttcaacctattaccgcattcaattttccagaaaaataaaaaaaaaagaaagatagaaatggcgcatattcctcagacccccaccaatgacgcggcggcttctggtgcaaatccgtcgatgacgaccatctcgttgtacgtcggggatcttgaccacgacgtcaacgatccgcagctctatgatctcttcaccaggttgccaagtcgtttccgttcgaatttgagggacgtggccacccaacaaatccttggttacggctacgtcaatttcagcaacgctcgagatgccgcaaaagcaattgatgtgctgaatttcactccgctaaatggcaaaaccattagaataatgtactcta

SEQ ID NO: 14752 - DNA, 301 bp, Glycine max
  Clone ID: jC-gmle01810080h05d1
ctaaaaaaggggggccaaaaaagggccgcccaggaaaatttagttatcctgcaaaaaaaccacaaacaacggccagttactgttcttccccagggggggttttgttatcctccaaaaaagcccgaaacccccccctttttctttttaaaaaaaattttttttcttttaaactggcctgcaaaatttaaaactcgcaattttttttaaaaaaaagggaaccccacaaacccggggggctgagaaaatggtgacgtaaactttttaaaaaccacccgggggcccaaaaatttttgccttaaaa

SEQ ID NO: 14753 - DNA, 575 bp, Glycine max
  unsure at all n locations
  Clone ID: jC-gmle01810080h06a1
ggggtgtgcttcctcgaagcgtgttgattcggcagcagtcccctaccgtcccgcagccagaagcttggcggtgttcgacatcaacaccatcgaggagccatggctgaagcacctcaacaacaccatcgaggagccatggctgaagcacctcaacaacaccacccctctcccccaagacaataataaaccctccctccccgcccctattctccacaaactcaacttgctcgacgccaccgatgccccccaatcctgggatgagattagcaaaacactccaagacctcaaatccccctccacctcaccccaacaacaacctcaacctccacaaaagaccaagtccttccacacggtggaagagctagacgccaagctcaaccccaagcccgagcccaagcccaatccagaattgaaaaagcccgctgatcagataattaacagtagcatagttaccgagccagtccgagggaacaagttgaaggaaaacatgttcatagtttcggacaggctggagagacagaangaagagaaggagctcaccttcgagcgtcttcgtcgggacccgctgagcgcgt

SEQ ID NO: 14754 - DNA, 512 bp, Glycine max
  unsure at all n locations
  Clone ID: jC-gmle01810080h06d1
aaaaaaatatataagttcaaatattattcttatcgttaaaattcggtagacatacattttatgattttaatatattgcttttgaacttttctaaccttaacatgaaactaagtgcaggttaaggtgcgcaagtaaatttatctgcgtatgataataaaaaaaagagagtctttaaccccataactagattggtaacaattaagatggtccaaaaatattgggtggaagggttgatggtagagagagagacaaggtgtgaaatatgtatgattctagtggtgatttgaataacaaaattaaacagcagatatggaagttatgaaatacaagcagggcagtggaccaagccattctcattacaattggggcacctctctctgtgaagaagcttgcaactcccagcacagtcgaagcaaggaacgaacctagccccaccacaaccttcacacgtttgcctcccaatcccnctcttcacacgcgtngcattcaatattcctccgagtcgacccgtc

SEQ ID NO: 14755 - DNA, 399 bp, Glycine max
  unsure at all n locations
  Clone ID: jC-gmle01810080h08a1
gagcatttcagacaaacatgggggattattgaaagaagattagtggagagggggggttagtgaangttnanccaaaacccatcaatcgtttcacctcaaaagtggttgatttgttagacaaattggccgtgaatctcttgtatgattcttcactgccccatcactacctcactgttaattttgctcccgtgagtgatacccctccaaccaaggaccttcctgtcaaagggtaccttcctgattgcttgaatgggtagtttgtcatagttgggcctaatccgaagtttgctcctgtatgcttgatatcacttgttttattgatatggaatgatacatggcttgcgcatcaaatatggaaaacctacatatttttcccgttttgtgaaaacttctctcctt

SEQ ID NO: 14756 - DNA, 479 bp, Glycine max
  Clone ID: jC-gmle01810080h08d1
atattaaaaacttaaataatatttaatcattattgattcaatcgctggtattcaaccaatacctccattgactcaactaccaatccggttttaaaaacattggtttaatgagatactggatatatatggtacaatcgattatttgttgtatacaaagactgaggcaggacggtacagtgaggctgccaaaattatcacagtttaccctgctcttgcagttgttcctctgtcacaaagaaggcatggaaaccatatggaactctatgcggcaattcgacaactgcaacaggatctgctgacattgtttttgcattgatgacatgcacaaatgattttccggtattttcatcgcgtacaaaacaaatcaagtatccatcatcttcttcagaatcggtaccagggacacgagggacataaacagcttccgagccatacttccctggtcccaagtcatagagaccctgaacatttcctcctac

SEQ ID NO: 14757 - DNA, 563 bp, Glycine max
  Clone ID: jC-gmle01810080h09a1
ataagaagctcaggtcaaagagacttgctcctgttatgatcaaggaagtcaccaggagggttcatttggagaatatttggcaggcggcttatacggcaggagttgttcttccaacgccgatcacaacttgtcagtattggcaccgatcgttgaatccgaagaagctaattgatgttggattttcaaggcttggggctaggatgacgatgagccgcactataaaactttacaaattgcctgattcaacggttactcctggattcaggaaaatggagcttcgggatgtccctgctgttactcggctgcttaggaactacttgagccagtttgttgttgcacctgattttgatgaaaatgatgttgaacattggcttcttcccaatgagaatgtggtggatagtttcttggtggagagtccaaagaatcatgagatcacagacttctgcagcttctatactctcccttcttccatccttggaaatcaaaattactcaattctgaaagctgcttattcttattataatgtctacaccaaaactccactgactcagttgatgaatgat

SEQ ID NO: 14758 - DNA, 402 bp, Glycine max
  Clone ID: jC-gmle01810080h09d1
atgaagaaacaacaggggggtttacagaaacaaaattatgattcttgggatgacactctgaaagcaaaactgtgtattataaaacttaaacaccctatgccacattgattactgattaatcatttcaacaaaggagtatttgtgcacttccaatgggcttacgcggttcttttagctaacaaagacttcttatatgctacaatggatttgaaaagcttacaaaaattggctttcccaaaacccccacatgcacccttctggtacaccttcctttattaattctgcaccatgcacccgggccgctgaattatctttatgaatatcggtggtctgaacccaacaagtttggtgtacatcggaagcagaagggccagatcatatctgtcaacaagaatgccaagc

SEQ ID NO: 14759 - DNA, 372 bp, Glycine max
  Clone ID: jC-gmle01810080h10a1
gatttctctctaagctttgctttctatcttctccttacaaaaaaaaatcctttccggctcttgtcccaataattagcaaaagaagccaacagaaaactattccatatagttttcaattcaaacttgttttgattttcattttaactcaatggagaacagaacaagctctgtactcccacctggcttcaggtttcatcccactgatgaagaattaattgtttactatctttgcaaccaagccacatcaagaccatgccctgcatcaatcatcccagaagtggatatctataagtttgatccatgggaattacctgaaaaaacagactttggagaaaaggagtggtacttctttagtccacgagagaggaagta

SEQ ID NO: 14760 - DNA, 513 bp, Glycine max
  Clone ID: jC-gmle01810080h12a1
caacggcgagggcaacgtcgtaggttgggctgcctcgtccaacgaccccaacgccggtgtcgggggccacggctcatgctgcgccgagatggatatctgggaggccaactccatcagtacggcagtgactcctcacgcctgcagcacaatcgagcaatcgcgctgcgacggtgatacatgtggtggaacatactccgcagaccgctatgctggcgtctgcgaccccgacggctgcgacttcaacagctaccgcatgggtgtcaaggacttctacggcaaaggcaagacagtcgatacctccaagaaattcaccgtggtcactcaattcatcggcactggcgacgccatgcagatcaagcgcttctacgtccaaggcggcaagaccatcgcgcagcccaactctgctatcgctggcgtcgagggtaacaccatcaccaccaagttctgcgaccagcagaaggaagtcttcaaagacaggtacacctacaaggagaagggcggaactgccaacat

SEQ ID NO: 14761 - DNA, 328 bp, Glycine max
  Clone ID: jC-gmle01810080h12d1
ggacttcacatttagattcaacgagtggggattgcgggctccaccacctactgttcaaactatgtacaccatcttcaatctatgtacaatatccattgggttgggcgagatattctagccaaaagtagagttgagaacaccaaacttaatgttcgagtacacaacagtcgcatcaggactcttgctctccacatcagccggaacacccgacgtgacctcgcactctccacgaccgctaccaagatcagtctcagggttcttgtcggtagggtaagtagagtcgagccagagcatgttggagtagtgggcatcccacagcgacataaca

SEQ ID NO: 14762 - DNA, 378 bp, Glycine max
  Clone ID: jC-gmle01810082a01a1
taggagtgtgctgttccaagtcttttagctttgtgggaatcgatcttaaggcggggggtggtgagcaaaaagaccaaaagaacactaccaaaatccaatgacatctacctcaaattacttgtcaagctttatcggttccttgttcgaaggactggcagcaatttcaatgctgttatactcaagcgcttgttcatgagcaaggttaacaagcctccaatttctttgtcaaggctaattaagtatacaaaggggaaggaggataaaatagctgtaatagtggggactgtaactgatgatatcagagtatttgaagctccagcatagaaaattacaccacttaggtttactgagagagcccgttcacgaataacaaaggct

SEQ ID NO: 14763 - DNA, 509 bp, Glycine max
  unsure at all n locations
  Clone ID: jC-gmle01810082a02a1
ctcgagccgaatcggctcgagtttatctttttttctgtatagtctttttatacgatattttaagagttacttgtaacgtaatacaaataaactcgagtatggatattgtcaggaagactatttgactttgttttttcaaccccccaataaattcgaatattatggttatgacactgtttttttcagatttcatttttctataatagagagttctattatagaaatttcgattgtaaaatacaataaaattggattcgatactaaacataaaatagatatctatatagatagataatttgaaacaaaatcaattaaaatatggaaaaggtactctagggcggattnttttgtctttttctagagtccgattcctatttctttttgtttgcgtcgaaatagaaatattctaaaaatatcaataaaataatcttttttaacccctttctgaaaaatactatatcttagtttctatttttctccaacttagaatatttctgccatataatatt

SEQ ID NO: 14764 - DNA, 534 bp, Glycine max
  unsure at all n locations
  Clone ID: jC-gmle01810082a02d1
ntggtgggtaccatcactantggtaaatctnaagtgaaagttgttatgccgcacatcccccaggttactgaattcgtgtccgggctcactaccatcataactggttttttttgaaaggctacagctgaaatcggtcaaggggggatcttaaacagagggagctctaacacatacttaaacttacaatcctataaaacttttgatgacttaaaaagattaaaactagagagaggctcacttttcaacatcgaatctccatgtctgagctgacctaagatatttaattggccatcttaaaataattatttcttgatccatacttcaaggaacttaagatttaaaggtaaaacagttgaaaagagcaactgaagacccatcacttacaatttgatggaagggggcaaaaaccttccaatcgttaagggatgtcaagaaatattagcagccccttagcattgtaccttaaaaaaaatatgaattttgcaatgccccccaccaccagaatcttacctttttatcactgggagcaccttt

SEQ ID NO: 14765 - DNA, 416 bp, Glycine max
  Clone ID: jC-gmle01810082a03a1
caaacacatgcttgaacttgaactattgtgttttataggctgtctctgcccaggatcaaggtggatattgtatcacgagctatgctatttccgtaggctatactagcgctaacattaagcacaccgtgctcaagtgcttaagtgaagagtgtaactaatgtgaaaacagttatatttctgacccccaactttgaactgggaccaacatcggctgccaataaatacgattatgacactgattttgcaagagagcatatagcactccatactttcaatgctgaatgcggcgatgaatcatagaaccctgtgcctcttcatgaaacttatctccaccactgtgttagtgtcagatactatcaagctaaatatgagaccacacacacaaactatgatggacatacgatacttaacaactc

SEQ ID NO: 14766 - DNA, 438 bp, Glycine max
  Clone ID: jC-gmle01810082a03d1
ggacgatatgatttcatgaaacctatggaaattatatgcgggcaggcccaagctagtaatcttgctccgggctattttacttcctaatgagaaatttttttggtgaaagatgataccttggcgccggggaatccttatattcttgatgggctggatcacctcatgcatctaatttatttacacgaaccatctgttttattcaactcttccatatatgatacaatcataatatgatctatactaaagcttgtcctgttccgtttgctgtaaataccttaaataaagtatctctgcattgcaatgactacattgaagcctacaagtgacaatcaattgaaagccctcatgtgtatgcaattaccgacacagccattctacaaatgatacggcatgaactgaatcactctataattattagtgctgagagtggtgcaagga

SEQ ID NO: 14767 - DNA, 233 bp, Glycine max
  Clone ID: jC-gmle01810082a04a1
ctcgagccggttgttttttacattttgcttcagatcactgagacgagggttttatggttgtttaggacccttcggatatgaattgaccatgcgtgtacttacatatattgcgtttattcatgtatattgttcatattgaatttgttgccttatgttttcaataatatcagattcttttgaggaaaaaaaaaaaaaattatatccactataaaaaaaaaaaaaaaatatttttg

SEQ ID NO: 14768 - DNA, 182 bp, Glycine max
  Clone ID: jC-gmle01810082a04d1
ccttaaaagaatctgatttttttgaaaacataaggcaacaaattcaatttgaacaatttacatgaataaacccaatttttgtaagtccccccatggtcaattcatatccgaggggtcctaaacaaccataaaacgggcgtttcagggatctgaagcaaaatgtgataaacaaccggttcgag

SEQ ID NO: 14769 - DNA, 331 bp, Glycine max
  Clone ID: jC-gmle01810082a05a1
tgactgtgaattttcatatttcatttatggatgtttgggtgatgagagagtataggcgtggttacagctggtgcaagctgttcacgctggaggagtcgcgtgagttgagatcgttcaagtgcttgaggcccttgggatactcgagcgacgggaataaggttctgttggaacacgaccggaagaggctgtgttggtatgacctgggaaagaaagaggttacccttgttagaattcagggtttgcctaatttgaacgaagccatgatttgtttgtgaactctcgtcacaccctatttcttacctcgtcaaattttgcgcaagtcggcgacttt

SEQ ID NO: 14770 - DNA, 321 bp, Glycine max
  Clone ID: jC-gmle01810082a06a1
gtgttgtgaaagcatttttgtgttttacactaagctatcctcataggggcactgtaattatttgacaagataagcgtctaaccttagtaacattgtcacatattgtgttcattttggaattgtgcctctaaaattctattcaatttatctatggctgcctcttcttatgctatgcaattaattctggcaaaccctttgatccgtattttcagcggctctagggtgaaccaatttgtcgttcctgctttgcacatgattaaggattgtaggcctgtgagataattccatggctcatgaagaacaaccaagtgagcctgcatt

SEQ ID NO: 14771 - DNA, 506 bp, Glycine max
  Clone ID: jC-gmle01810082a06d1
aatgcgaattagtttggttatgattaacgaaataatttggggggggtgattataataaacacacgaagtacaaatcaacattggtctctctaatcacaaaggagattaagtccattgtggtgtgccttcatgactgaattataccaaagtactacccttaacatactcagtaaaagccagagcaatcaaacccaacatagcaaatctcccattccacagttttgcatctgaggacatgaaccctttggacttagactccacgctgacaccttggaagagtggaatcaaggaagcaagggtaaggtccacacttgttcccaagaaccatgggatgccaccattggatatttgttctaacacaccttgccctttggctacttccactggcatttgaagtcacaaacccaatcatggccaaccttcctttgatcctttcaggtgctggcccactgaatgccaacacattagaaaacttagtgctcacctttggtgatggagcagagact

SEQ ID NO: 14772 - DNA, 353 bp, Glycine max
  Clone ID: jC-gmle01810082a07a1
caagcaggcaccgaatgtcatggtcacctctctgcgtcggtcatcgggattagctccatgtctggtatcatgcgtcacgcgcaagggcacttcagctacaacgccgcaaagggtggcactgttcacctgacaaagttgatgtcggccgagtttcagaagctgaaaattagagtcaactcgatcgcaccaggttacttcccctctgagatgacggcgaaggagagcaacgacgagcagaagagccatgtgcctgatgagaagatccaggagaagggccacgttcctcacggacgagctggccatgacgaggagatggcacaggcggtgctgttccttacgaagaacttctatgt

SEQ ID NO: 14773 - DNA, 481 bp, Glycine max
  Clone ID: jC-gmle01810082a07d1
ctcgggtatcattgctctcattattgttcatgatgtgatctatccacgttttgtgcaagtgttcgccaggcgccgtcgttatgcatgtattcgtcacgagaagcggggtctgttaacgcccagcgacgacgttaaggacaccaccatcgacagcgatgatctcaccgttgacataggagttcttcgtaaggaacagcaccgcctgtgccatctcctcgtcatggccagctcgtccgtgaggaacgtggcccttctcctggatcttctcatcaggcacatggctcttctgctcgtcgttgctctccttcgccgtcatctcagaggggaagtaacctggtgcgatcgagttgactctaattttcagcttctgaaactcggccgacatcaactttgtcaggtgaacagtgccacccttgcggcgttgtagctgaagtgcccttgcgcgtgacgcatgataccagacatggagctaatgacgatg

SEQ ID NO: 14774 - DNA, 572 bp, Glycine max
  Clone ID: jC-gmle01810082a09a1
ccctcatattacaaccagggcggtgtttcgccagactactacggcggcagcccgaaccgctaccaacaaggcccgccccaaggccagtacggaccgccacagggccaatacggtcctcctcaaggacaatacggatacggaggccagcagatgcaataccagcagggaccgccacccccaggcggctactaccaagatgacaggagggccgatggcggcggcggaggcttgttcgctggattgtgcgctggtctggcgtgctgttgttgcttggactgcttgttctagacaggtcgctgtggacaaacagtgttggagggattgatagaaatggaatgcgcaagaggcggcatgttacatggggcaatctggcttttcgaccacggtaaatccgtataccatgcgaacatggagtgacgggaagaggattcggcgtacagactatagaccgatgggctttcttttgttctatttcaattggggtctctatggatatgactggttatcgatccgagggcatattaaagagtactggcagctaccaacttacctaattcgacgatttcattttc

SEQ ID NO: 14775 - DNA, 393 bp, Glycine max
  Clone ID: jC-gmle01810082a09d1
tcttttttttttttttttttttttttttttttttttttttttttttgaaaatgaaaggggggaattaggtaagttggtagctggcagtactctttaatatgccctcggatcgataaccagtcatatccatagagaccccaattgaaatagaacaaaagaaagcccatcggtctatagtctgtacgccgaatccttttcccgtcactccatgttcgcatggtatacggatttaccggggtcgaaaagccaaattgccccatgtaacatgccgccttttgcgcattccatttctatcaatccctccaacactgtttgtccacagcgacctgtctagaacaagcagtccaagcaacaacagcacgccagaccagcgcacaatccagcgaacaagcc

SEQ ID NO: 14776 - DNA, 505 bp, Glycine max
  Clone ID: jC-gmle01810082a10a1
caggcaagtgggttggcttgtgtttttttgttatatatgttgggttgtcctgtgctgggtctggtctcattctccttattaatttgtgttaagtagcaaaccaaaaccaaaccaattttgtggttgtgtgtgagtgagaaactgagaataattatcaattatgggcctctcaaatttcccaattagtgcatctgaaggggtgctacctgtgcttgtgataaacacggttttctcagtggctttgttgaagagcatgtttagatccatgctccaagtagtgtttggtggcagtgctgctagtagttcttcaaacattgaacatgatgatgaaattagttcatcatcatcatcacgggaaaggagggtgtcaataactcagtacaagtcattgtgccacagtcatgacataggaggaggaacaagtgtggctatggtggagtgctgcgtttgtttgtgtcgttttgaaaacaatcaagaggttagtgagttgccttgcaagcattac

SEQ ID NO: 14777 - DNA, 509 bp, Glycine max
  Clone ID: jC-gmle01810082a10d1
aatgcaatgtcatctctcattatgttccatatataaaagctaaaacatagagaaactgagttgggttgaaggaggtgtacaaatctaaaagtaaagaaatgaaaagaggcattgattcttttcactataacaagttaacaatatatagcaacaactacaactatagctagctggctagctctaattgtaaatttgaaactaattaacctttgtatatgtctctagtcgatggaacgacacaaggggcaagtgctgtgtttgttatcaaactcaaaccatttgtctaagcaacctctgtggaagtaatgcttgcaaggcaactcactaacctcttgattgtcttcaaaacgacacaaacaaacgcagcactccaccatagccacacttgttcctcctcctatgtcatgactgtggcacaatgacttgtactgagttattgacaccctcctttcccgtgatgatgatgatgaactaatttcatcatcatgttcaatgtttgaagaactact

SEQ ID NO: 14778 - DNA, 470 bp, Glycine max
  Clone ID: jC-gmle01810082a11a1
ggttgctgtataaaacaagaaagattttgttcatacccaacttaccgacatggacagatggaagggtcttgcctatgatatctcagacgaccaacaggacatcacaagaggaaagggctcggtcgactcccttttccaagctccacacgatgctggaactcactatgctgacatgagctcctaccagtaccttaccactggacttcgccagtacttggacaacaacatggatggattttacattgctccagcttttatggacaaacttgctggtcacattaccaagaacttcatgaccctgcccaacattgaggtttctctcattcttggcatccggggaggcaagggacaaggaaaacctttccaatgtgagctcggctttgcccagatcggaaccaaccccatcatgatgagtgctcgagagccggaaagtggaaatgcccgatagccagcaaaactgagcaggcaaa

SEQ ID NO: 14779 - DNA, 411 bp, Glycine max
  Clone ID: jC-gmle01810082a11d1
gtaggacaaacggaaaaggccccaaatgcaatttaaggggacactttacctcaaaattatacaggaagacagtccaatatgaaaaatatagtaaaatcatctcaaacttggcatcttctctttgcacctaagacattgagaattctaagaatgttacacgcaagtcccatcacaacttctaacacttggatcagcacaaccttcaggaacagaaatatttacttgccaagtttgctttgcctccaattcaagattggaagaaagttcccctgttaatagcatcctcgttagcatttacaagtgcagcctcgttcaagtacttggcagccaattggactctcttgacattctcttgatcttggacaagcatgttaccatacgtcaagagctgctccagagtcatcttgggct

SEQ ID NO: 14780 - DNA, 533 bp, Glycine max
  Clone ID: jC-gmle01810082a12a1
cagcataaacgggtggtgcctctctttctcttccccagccaaaacctctctcaggaagggggcattacgcccttccgtcttcgcaacccttaacactccttcttctccttcctcttcatcttccttcccctctctcattcaagacaggcctgtttttgctgcccctgcccccatcatcaccccaactgtgagagaggatatggctaatgaatactacaaagctattgaagaacttcatatattgctgagggagaagagtgaacttaaagcgacagctgctgaacaagtggagcaaataacagcttctctagggacattatcatttgatggcatcctatcatcagaagccttacacaggatcaaagctggtttccttcacttcaatacagagaaataccaccagaatccacctttgtatcgtgaacttgccaaaggccacagccccaagttcatggtgtttgcttgctcagactcaaaggtgtgcccatttatgtgctagatttcccaccaacaaaagcctttttggtcagaaa

SEQ ID NO: 14781 - DNA, 564 bp, Glycine max
  Clone ID: jC-gmle01810082a12d1
ataactagaggatttccaactcttattaaaagaagattttccgacatgcataaacgcagttcatagtttcatatatatctttataaatatcatatggtgatgaaggtggctaggcctcttcattgcagatacacacgacctctaagcatggcccctatagcttccaatggagaatggtggccacatctttaacggagaaagaggatgcaaggccaaactgaaggccccagagctcaaaagatcctttaacaaagtcatagtatcctcctttcagtgacaatgttttgttcaccaagccatctctaacaaatgggtaagttagcaggtttccaagggaaacattcacagattccttctcacagtgtgagcacaactcagcaaaaggggcatccccatgctgtgtcttcacctttgcctttgcaggcaagccaattttgacccactcctcaataaatcagtagagtaggttccatcatatgggaaagacagaagccccttaataccaccaaagcactgtgtccaatgaccacaatcttcgacaccttaagatgcaaaacagcatac

SEQ ID NO: 14782 - DNA, 516 bp, Glycine max
  Clone ID: jC-gmle01810082b01a1
aattatagcatctggtttccgtttaaatttgtatttgggtcctgtcctggtagggatctggtatggtgcacattggtccttgatgcccacaatcacttctgagatatttggtgtaaagcatatgggtaccatcttcaatactattgctgcagcaagtcctcttggatcgtatatactttctgtcagagttgttggatatatttacgacaagcaagccgataaagaagataatttgtgctttggcatcgactgtttcatgccctcattttttatcctggcaggtgtagctcttcttgcatttttggttggtttggcattgttcttccggacccgaaggttctataagcaagttgtgcttagaagattaaaacattatgcaggatgatgaagattgtatttgcctgcatttcaactctaggtaaaggctgaggaataaatataattatattaatgcagttttctagagggtgtctatgaagatgatttgatttgtgtattttacatgttataagagaa

SEQ ID NO: 14783 - DNA, 359 bp, Glycine max
  Clone ID: jC-gmle01810082b01d1
aatgctggggtcctttcttttatgacaagtaaaaaacccaaatcaaattattttactacccctcctaaaaaaaattggattaataaaatttatttcttaccccaccccttacctagaaatgaaaggcaagccaaaacaaattttattgccttgcgtaatgatttaatcttccaaacccacctttttaatctaaccttccggtccaacaaaaccatgccaacccaacctgaaatgggagataagcctcccccgccaaaaaaaaaagggagggaataaaacatgccaaaccaaaaaacaaattattttttttattggcttgcttgaagttaatctacccccctgccctgacagaaagtcta

SEQ ID NO: 14784 - DNA, 503 bp, Glycine max
  Clone ID: jC-gmle01810082b02a1
gggagtttccttggcggtttaatttgtcttagggttggcgatagccccagctggatccgaggctaaaagctagaaactttatctgtttttttgtgctatggatagacaagaaaatttgttagcattctccatgcctagccagctgttatcaattgacgaggaactatggcgaatggctgaagagagggcacaagagatactatggacaattgaaccaattgtattatctgaggtgaacagaaaagatgttattgattatgttcagaggctgatcagaggttactatggagcagaggtcttgccattcggttctgttcctctaaaaacctatcttcctgatggagatattgacttgactgctctcagtcatgaagatgcagaggaggatttggcacaagcagtatgcaatatacttcaaagtggagatgaccctgaatatcaagtaaaagacatacaatatatacgtgcacaggtccggcttgtgaaatgtacagtgaaaaaca

SEQ ID NO: 14785 - DNA, 577 bp, Glycine max
  Clone ID: jC-gmle01810082b02d1
aaaaaggattttattactatcatttttatttgatcaaaacaggggcaccatcaacaaagccacacattagaaactctgctgatgtatatccttcaaaattctacaaaatatataatgttaacactgtcaattcatcttctaattgctctagggagattcatctttcctctcggctgccacctttggaaccaccaacacagtttcttgagataatggaacaccagaatcttctctctcaccctttgttgataaacttggttctatcaatgattgtgatttcttgaaagttccaaactcaatatttttcagtttagactctttagaggatgggaaactcttggcttgcttagttaacttagcagcagactctgacagggcagtcttgtgagtgctttgaagaagggggaaatctttctttgagagctcaaacgacctcgaattaccctccatgtgtgtctcaaaataaacctttggaagaagggggaaatctttatttgaaaacttaagcagctgcgaaataacatccatgtctgtcctcagaatgaaacttgtaatggagtagactcttgggcttgtg

SEQ ID NO: 14786 - DNA, 514 bp, Glycine max
  Clone ID: jC-gmle01810082b03a1
gagaataatcatattaaatattttatagaataaatggcccgatcatttatcaggggccaagcttcggtagaagagaaggttcctttggaacacttatttctatttcagtataccgggtctctttctttcatttcaaaaaatttatagaatttcgattttgaaatgaaagaaaagtgtggggataaatataaatgacaaaaagatattggaacataatcttggaagagatgatggaagcaggagttcattttggccacggtactagaaaatggaatcctaaaatgtcaccttatatatctgcaaagcgtaagggtattcatattataaatcttattagaactgctcggtttttatcagaagcttgtgatttagtttttgatgcagcaagtgagggaaaacaattcttaattgttggtacaaaaaaaaaagcagcggatttagtagcacgggctgcaataagagcttcgtgtcattatgttaataaaaagtggctcggcggtatgttaacgaaatt

SEQ ID NO: 14787 - DNA, 425 bp, Glycine max
  Clone ID: jC-gmle01810082b03d1
ttattttttttatttttttttttttttttattttttattcctacttctgtttctggtgcttgggagagtgctataacaaacacactgtttcctggggaacgaaaaggcttggttttgaaagcccaattcaaattgctttggattgagcgggcacatacacatgaaaaacaatggtgatgttgttgaaagtgaatggggccatggagctaatcttgatgttctggaatcaaaaattgctttaaatacttcacacggcttttaggctacttggaaccgatcacaatgaggacttgtaactggggtccacacatatgacattggtctttgtgagacaccaaaatagagagctaccatcatccagccctccttattgctgacggagtgtcccccatgcgcgcttttgattttcggatggatgaatggtg

SEQ ID NO: 14788 - DNA, 405 bp, Glycine max
  Clone ID: jC-gmle01810082b04a1
ctcgagccgttttttttttgccctatctcatagggtttccaccctctgtctcatgcatttttgctctcacgagttcttctttgccgttgccctcttattctttgctgtatttggagccttcttttgtgtggaacagagcagatttcacctccctgggttttttgaaccgtgcccatgtctaaagttttcagctttaccggaaatgatgatttctaccatgggggccctatttatcctaacccgaaggaaccatgtctcttcttgtctcttggccgtcaagttgatgtttaccttcctcttcagaagaggtctcgcttcagtgttccatttgatatcagcggagaatggtttgagcagaagcagaagccacagacatttattgaatctttgccagatgaatgcctt

SEQ ID NO: 14789 - DNA, 427 bp, Glycine max
  unsure at all n locations
  Clone ID: jC-gmle01810082b05a1
aaaaaagaaactaaccgtatctganacgagtagacgtgcacgcacgccccgaagctcgaattcgctcgagtaaggagtttggctttttcacgctaaacttgcatgaatatatgaaggatctgggctctctttgttcatggcccatcaactttctccaccgagagagaaatggaagcagcatcatggccgacaataatactactactgatcattatgatatcggcatggaagacgctgaactggatatgcctgacgccaaacaggctcgaaaggcttctgacagaacaaggcctttatggcagctcatacacgctccttgttggggacttgaaggagtttggcacgatgcgaaatgaaatcttatccaaacccatgaaacacccctctcatgacatagcgccgcgcgtgacatcctttttcaacacac

SEQ ID NO: 14790 - DNA, 426 bp, Glycine max
  unsure at all n locations
  Clone ID: jC-gmle01810082b05d1
aggcgatgtgcantgatcgctaaccggaacgttanattgaaacgacgagccgactatactacgcccggcccgccctttttttttttttttttgttttctttgcaaaaatctactatattacaagctaactgcttaaccaaacaatgctccctgggctcactgaaaacaccaaataactcctttgaccccacaaaaaacaaattggcggccataaaaaccacaccacctaactaccttgaaccttgaatcttactatttgctttgccatttgctttctttcaccaaaagccatcacttcgatgcccaaccaacccaaaaaaactacatctttggagatgttactcaagcaaaccttaacactaccactggtagcaatgctgcagcagtatagtaaatatcttttatgctcttatccaacttttgcat

SEQ ID NO: 14791 - DNA, 492 bp, Glycine max
  Clone ID: jC-gmle01810082b06a1
gttcctctactggtttttcgttttctcatgaactccctctcaaatccggaattggttagatcgatctccttccgtagctaatccttgtctctttttcaataattaattagatctgcgtctcctatttcctttttttgttttgttctgttatcaaaatcaaataaaaaatctccttctcggaaatggcgtcgtcaatccaacaacaacgctcgactgcaacaagttctggatctgaaggaggaggagatccgcaaatgatcgacgagaggaagcggtagaggatgctgtcgaaccgcgagtcggccgcggcgatcgcggattaggaagcagaaacagctggaggatttgaccgatgaagttagcagattgcaaggcgcgaacaagaagctgccggagaacataaaggcaaaggaagaagcatgcgtggagaccgaagccgcgaacagcattctgagggctcagaccatggaactggcccatcgattgcgcttt

SEQ ID NO: 14792 - DNA, 332 bp, Glycine max
  Clone ID: jC-gmle01810082b07a1
gttttgctgattccgcgcatattttagtgtttgcctcaaaggattgaccgtgagagcttcctccttgcacttcagatggcagtggaagccgataatccttattttcgattgggttacaacagcttgggtgcttttgcaactatcaaccatcttcacttccaggcttattatttggctctgcccttcccaattgagaaggcccccactaagagaattgcaagtgtaaatggtggggtgaagatatctgaactgttgaagtatccggttagaggctttgtctttgagggcggcgaaatgctggaagatctatcaaacggttgttcagatgcatg

SEQ ID NO: 14793 - DNA, 507 bp, Glycine max
  Clone ID: jC-gmle01810082b07d1
aaaataacacacacttcacacatcattacgacaattaaaagaggtgtggaaattttcaaatagacagagcatactcaacaagagggtcatgtctaatttcctttattgaattaaacaaacgaacaaacgaaagaaaacacaaattccagatcatgcagaggattccgcattttcagaagatctggcagtagcctgtggaacagaaaaagctggcataagagtattaccagcaatttcaaaatcttgagaaattcccaagagaatatcaaaaactgtagactgtttgggattgtcaataaggaaactcaagtgccatgaagtttgatttgcccactcagaactccacatttcaaaaccattattaggaccacatacctctattgggaaagatcaattcccaggaatggtggttccgattttgtccacttacatgcatcgaaatgctctgtactgttgctgtttgttaaaaacacttgtaccaatgaggcccaatcactccttttgact

SEQ ID NO: 14794 - DNA, 187 bp, Glycine max
  Clone ID: jC-gmle01810082b08a1
tcacgatgtcaccgttttggacgttaagacccttctcttcggtgacgggccaggggctatttttggacacagaaaccctgaagagatcccatgggggtcaactggagctcacatcattgtggagtccagcggagttttcaccgattaggtcacggccgccgtacattggaagggcggtgcaaagaag

SEQ ID NO: 14795 - DNA, 332 bp, Glycine max
  Clone ID: jC-gmle01810082b08d1
actataacaatcaataacaagtacattagcaagtattggagccaagtacatcagcgagtatataaaaatccaaaaactcgatccccctccacaagagaaaacatcaaaagtccaaaaaagagctaatgctcctccaacaagtaacaccactggtttcagaaaccgatttattcagacctctcattttttgctcgagcaagacactaaatcgcagctaaacataaacatacggtaataatgtgaagacaagctactttgaagtaacaccttaaagagacttcttggccacgaatacaagaagatcaatgacacgtgagctgtatccccactcg

SEQ ID NO: 14796 - DNA, 573 bp, Glycine max
  Clone ID: jC-gmle01810082b09a1
ggatgtaaaagtagggggcatatcatattataggttcttttggacagtggtctagggttgtgtggacaattagacattgtgaaaattgtgataggtttggtcaaaacacttctgcaagggttgataaccagggctggcatatgctggtttaaatttgggtgtcatatgcagttaacaaaaggggcataggcagagaagatttaagctaaactactagcaagctatcatggtggtgcccaagtataaacacccaaagagaaactcatcctgatacaataattcaacaacaaaaaaataattcatgcataaaagttaaatattttacttgagttcatgtctctattgttcttcaaaaaggaatgcacctgttttaatttatgtaaggttggaattagttatgtgtagatcatgcatgcgatatgtgtaatttactctcaagttactgctaaatgtctacagccataaaagtatgatccaaaatgtcattaataaatcctcagaacttttctaattctttctttttttccatttgttagccccataattccaaactaatgtaactttcggagtgca

SEQ ID NO: 14797 - DNA, 435 bp, Glycine max
  Clone ID: jC-gmle01810082b09d1
catatataaatatcagttaaaaatgagtagaaaaaaggatatctatatccacaccaattaaaaaaaactctggaaagtagaacagatataattcatacaaaataaattgcttaaccatttacaagtggttcactgatttcaagcaattcatttctgagaccggtgaaaacaacagaatctgtttccagaggcttgaacttaattagagcagaaggtactaggtcttcttcctctattgttttagcattttcccctgctttcggaaaatgggggatcacgcgccgttggataagtacaggatgcattagctcaaattccaaacctggttcttttaatgctgagctgacaaactcatagagagcaatagttgtttcccatggagcaaatacaccttgaagtacaactccatttggaaatggaatcctgaaatagttt

SEQ ID NO: 14798 - DNA, 181 bp, Glycine max
  Clone ID: jC-gmle01810082b10a1
aacaagctcttcatgggctttcgtattttgtttatgggaaacgtgatgtgaggcgtgtgatgtttgaggtttttgactttgagcagatccagccaaaagaagtagtttaaatatggagacaaaaagactgataaaagctcttttgttttcctttattatttacctcctgttttccgtttct

SEQ ID NO: 14799 - DNA, 181 bp, Glycine max
  Clone ID: jC-gmle01810082b10d1
agaaacggaaaacaggaggtgaatggtaaaggaaaacaaaagagcttttatcagtctttttgtctccatatttaaactacttcttttggctggatctgctcaaagtcaaaaacctcaaacatcagacgcctcacatcacgtttcccataaacaagatacgaaagcccatgaagagcttgtt

SEQ ID NO: 14800 - DNA, 291 bp, Glycine max
  Clone ID: jC-gmle01810082b11a1
gaaccaccactaccttatccatttttattcctcaccaagccacaccatggcctcaagcggcgccctctcttcagcttccattctacgctctcccaaccgccagtctctgaccagaagagcgaaccacaacggaagagtaaattaccgtcaaccgaatagccgattctccgtcaaagcctccgacaaagagattgcctttgaccagcattcccgctctgctatgcaggccggcattgacaagctcgccgacgccggcgggctcactcttgggcccagggggaggaatgttgt

SEQ ID NO: 14801 - DNA, 436 bp, Glycine max
  Clone ID: jC-gmle01810082b11d1
aattcaatattataacctcttttctctcaggagggcgaacagatctaaaactgtttacaaatacatttttttttattgaacagaattctaacacttacgctctttcaattttctgcacaaaactgttctttgccgtagccctaataacctaaaaattaaacggtaaggccttgtggggcaccagctacaggtgccttgggcttaggtttttccaccacaatggcctgtgtggtcaacaccattccagcaactgaagcagcattctgcaatgcacaccttgttaccttggcagggtcgataactccagcctccactaaattctcatacctgtctaccatagcattgtaaccgaccttccattcaccactctttattttctccacaacaacttcaccttctattccagcattttgagcaatcaatgctgcaggagcta

SEQ ID NO: 14802 - DNA, 259 bp, Glycine max
  unsure at all n locations
  Clone ID: jC-gmle01810082c01a1
agcggattgctantgatactgtanatcacttnnaggtaccgccagaagctcgtaattcggatggagaatttggatttcaatgcctctcgttgcaccttttaatagaatctctatggcataacaaccgggaggatttatataccactgcacgaccgaaacactactgcttcatcgaaacacccggaggtgtttctcagatgctaaaaaacgacacggggatttacacctggtacggacgcgaactttttggtgaaactca

SEQ ID NO: 14803 - DNA, 391 bp, Glycine max
  Clone ID: jC-gmle01810082c02a1
gttgccattctcatcctcttctttctctctctaccattgccatggatccctacagagcaccggccatccagcgccttcaattctcccttctggactacaaattctggtgctcctatttggaacaacaactcctctttaaccgttggagctagaggtccaattctgctggaggattatcatcttgtggagaagcttgcaaattttgatagggaacgtatcccagaacgtgttgtccatgccaggggcgctagtgcaaagggtttctttgaggtcacccatgacatttctcacctgacatgtgcagatttccttcgagccctggagttcagaccgcctgtaatgttcgtttctcaactgtcattcatgagcgtggtagccctgaaacccttga

SEQ ID NO: 14804 - DNA, 471 bp, Glycine max
  Clone ID: jC-gmle01810082c02d1
aaatactaactaatacaaacggcatttattgagataggtcaacgagttgcattcatggagttatgggtacacacaacataatattgcaagaaaaggattagttctttcaggtaatccaaaatcacatccttatcgtactctttgcacgtctgcaactctaacaatcattctggagttggcaacaacattaaatatttggcctcgtgctgagatgagaagctatcttttggcctagagaacggtcagcctgagaccagtatgatatccagacactgcggatctcatgggtgacccgtgggtcagataaagcatcaacccatcggcgagcaaatctatcttgcctgcaaattagtaaaaaaccagcagaaagaacccaacattagacatcaccaaacacatttcacattgatcatatcatattttataacaggaacctgtcaggtgcccaaaaccggtatctctctccgggct

SEQ ID NO: 14805 - DNA, 491 bp, Glycine max
  Clone ID: jC-gmle01810082c03a1
aaaatgcccactttttttcttccatacgctcttgctccttgtcatagcctgcgccgcctctgtctccggccgccgtgacctcgtcggagactttctccggctgccctccgaaactgataacgacgacaacttcaagggcacccggtgggccgtcctcctcgccggttccaatggttactggaattacagacatcaggctgatgttcgtcacgcctatcaaatattgaggaaaggtggtctgaaagaagaaaatattattgtttgtatgtatgatgacattgcattcaatggagaaaacccaaggcctggagtcatcattaacaaaccagatggaggtgatgtttataaaggagttacaaaagattacaccggcgaagatgttactgacgataacttttatgctgctttacttggaaataagtcagcactgactggcggcagtgggagagatgtggacagaggtcctgatgatcatatatctgtatactata

SEQ ID NO: 14806 - DNA, 437 bp, Glycine max
  Clone ID: jC-gmle01810082c03d1
acaaaaataaatacaagttgtcattaatattaaacaataattttggcatcataaattctttcggaataattatacaaaagtgaccagggaaaacccgatctgccagttgcccactgaataaaaacacacatcatattactatgtgttgtcatacatgcattgtaatgagtggatattccaaagcaattggtccctttatccctacttaatccttatgccgaaaatggcaccatcccttgtaaattggaattgcttcttgagaaatagaattatacaaaggtagttgcattatgtatttgccaaactataaatgtaaagacccttgttcccaatcctaggagtgtcccaattgtttttacaaaggtgggacaagatatgtatatacaagtacaaccatgtcacataatgtaacaatcatcatactttggtcgttacta

SEQ ID NO: 14807 - DNA, 368 bp, Glycine max
  Clone ID: jC-gmle01810082c04a1
ggattatcatcttgttgtgaagtttgcaaattttgatagggaacgtaggccaggacgtgttgtccatgccaggggcgctagtgcaaagggtttctttgaggtcacccatgacatttctcacctgacatgtgcagatttccttcgagcccctggagttcagacgcctgtaattgttcgtttctcaactgtcattcatgagcgtggtagccctgaaaccttgagggaccctcgaggttttgccgtgaagttttacaccagagagggtaactttgaccttgttggaaacaaccttcccgtcttctttgtacgtgatggcatgaagtttccagatatggttcatgctcttaaacccaatcccaagaaccaca

SEQ ID NO: 14808 - DNA, 541 bp, Glycine max
  Clone ID: jC-gmle01810082c04d1
attgagatatgtcaacgagttgcattcatggagttatgggtgcacacaacataatattgcaagaaaaggattagttctttcaggtaatccaaaatcacatccttatcgtactctttgcacgtctgcaactctaacaatcattctggagttggcaacaacattaaatatttggcctcgtgctgagatgagaagctatcttttggcctagagaacggtcagcctgagaccagtatgatatccagacactgcggatctcatgggtgacccgtgggtcagataaagcatcaacccatcggcgagcaaatctatcttgcctgtcaggtgcccaagaccggtatctctctccgggctgcttgaagttgttctccttctcaattccacacttttcacgccttccactgcagatagcaggaggtatggggaacctttctgcatgacgaacaggatcataccttgaagggaagtaattgacctcctcatccctgtgaatgaaattatgaaaccttcatgatgattattgtggtgagcacacttgggagca

SEQ ID NO: 14809 - DNA, 402 bp, Glycine max
  Clone ID: jC-gmle01810082c05a1
gagaaaagatcagtcttctggttttaggtctgaaatccctgttgtccaggttgagcctgtttttgagggactggatggtggaattggcagcctggtgaagtggaacccggttgcaaatgttaatggtctagacatatggagcttccttaggaccatggatgttcctgtaaattcattgcattcccaaggatatgtttcgattggctgtgagccgtgcacaaggccagttttaccgggtcaacatgaaagagaaggaaggtggtggtggggatgccaaagccaaggagtgtggtcttcacaaaggtaatataaaacatgaagatgctgcccagcttaatggaaatggggcctcccaagcaaatggatctgccactgtcgctgacattttcaactccaagatgt

SEQ ID NO: 14810 - DNA, 356 bp, Glycine max
  Clone ID: jC-gmle01810082c05d1
ctggcaaaactaaaaacgggggggatgatagtgaagaaacaacataatacaaccataactctactcatctaacaaaacaggaaatcacattctcagaatgactactacaattatatttgggaggaagattatctaaacctatacagggatacttctagctgagaatcttcgttttgctgtcaaaactgccattcccattttcagggaattgccaaaactgggaagaaatttattgccggttttgtgcgacggaacattgagcaagatactcaattaaccatcaccgtaaagcattcacgaatgccgccaatgaatcaacatctttcttttccgaagggtacttaattggttgaaaa

SEQ ID NO: 14811 - DNA, 184 bp, Glycine max
  Clone ID: jC-gmle01810082c06a1
acattatgtattttacataaatataattcaatcgggtatacggtaaaatctatatggacaaacctaaaactaaacaaaaaagtaagaaatgaatattatattgatgaacttatttatttaacatttatttgtattataaaatataaggttgtcaaaaatggggacaaacactaaaaattttcac

SEQ ID NO: 14812 - DNA, 316 bp, Glycine max
  unsure at all n locations
  Clone ID: jC-gmle01810082c06d1
agaggatatctactgtatctaatcgaanatanatgaaacaccagcccacagactacggccgccctttccttttttttttttcttcaaatatttttctctcactcccaaatttaactaaggggacgtttttttcacaaaacctttccccaccctccttatttcacaacataaacattacttccaacctctctaaccaccttatcctctaaaaaaccttccttcaactttacccaattttacctttaccaaaaatttaaaattcattaccaaacactttaccttctttgctaaaattcttcaaccaacccacctaaaa

SEQ ID NO: 14813 - DNA, 455 bp, Glycine max
  unsure at all n locations
  Clone ID: jC-gmle01810082c07a1
ccaaagcggtcgatagttgcatttgttatctngactttagaaacgggagactgggaatggaacgtggggttcttgatagtatcattaataggctgcttgaagtcagaggcagaccagggaagcaggtgcaactttctgaggctgagatcaagcagctttgtctagtctccagggatatcttcttgaggcagcccaaccttttggaacttgaggcaccaattaagatctgtggagatgttcatggtcaatattccgaccttctgcgactttttgagtatgggggattgccttctcgttctaattacttgtttctaggggactatgttgatcgggggaagcaaagtttggagaccatatgtctccttctgggcttataaaaaaaatattccaacaacttttttcttctgagggggaaacatgaatgtgcttttataaaccgatttaccgattttatg

SEQ ID NO: 14814 - DNA, 469 bp, Glycine max
  Clone ID: jC-gmle01810082c07d1
atgttctgtgccatatagcacattgggtgggcttctttgtaaaccatacaattagccttgatatttcaataattaatttgtcaaaataggaacttaaaatgaacatcacaaaatcaatacagtgcacaaaaataatgcattccgtaatcttaagtcacattctgtggttagaaatgcattataacatgtactgcatatgaagtttaatcataataaatccaccacttttctttttcccttcaaacatgaaactcaaccatggttacatacattgaggtgacaattttctacagagatggggaaattactggacagacaccactttatcaacttgcacttgcaacatcagctataaatatgctggctgaatcacaccatccagccaaaacatctttgtcggagcacttactaaagccaagccaatttgagtctcctttaaatgaaaatattttgttggtctctttccatt

SEQ ID NO: 14815 - DNA, 332 bp, Glycine max
  Clone ID: jC-gmle01810082c08a1
gaagagagaagagcaaggttacaggttctaattttcacagatgaggcctgttgcaatagcgccttctgttgcgccccgtatgcctctctaccctcctggtgctcctggtcttggacaacaatttttgtatgggcaaggacccccagccatgatgcctccacaagctggatttggttaccagcagcaactagttccgggaatgagacctggtggtggtcccatgccaagcttctttgttcccatggttcagcagggccaacaagggcagcgcccagtgggccgccgaggaacaggtcctgtgcaacaaccccagcagccaatgccaatgatgc

SEQ ID NO: 14816 - DNA, 237 bp, Glycine max
  Clone ID: jC-gmle01810082c08d1
aatcaaccaagaacataaacttccttaggactgtgactaaaacaaaacatctaagacacctgcaaataaactggtgggtagcgtacgggatagaaataactggtgtacagattcttgtcaaatgactaacggaatctaagacacaagattgtcattgagagagagtgaggctagttgatcagctgggttggtttgctgttgagcaacatttctcaacacattcatggctttagcaac

SEQ ID NO: 14817 - DNA, 506 bp, Glycine max
  Clone ID: jC-gmle01810082c09a1
agagaagctatggaggtgctcaaggatatgtttggacccaacatacctgatgccactgatatacttgttcccagatggtggaataacaggttccaacgtggcagctacagcaactatcccgttatctctaatctccaagtagttcgtgatgttaaggctccagtaggtcgcattttctttactggagaacacacgagtgaaagatttagtggctatgtgcatggtgcatacctcgcaggtatcaattctagcaaagaactacttgaagaaatgagaaaggacaacaaaagaaaaaacaagagccaaagtcgagtattagagcccttgtcagcattaaccgaatgcaatattcctagacaataaaatctcaggggcaagcttagaatggcactacacaatcatccaacagcaaaccgaaataatccccacatctttgtcctacaactgtattcactattcatcacctctgtttcatcagcaataatagtaaaagaaaaataatcaag

SEQ ID NO: 14818 - DNA, 390 bp, Glycine max
  Clone ID: jC-gmle01810082c09d1
cttgattatttttcttttactattattgctgatgaaacagaggtgatgaatagtgaatacagttgtaggacaaagatgtggggattatttcggtttgctgttggatgattgtgtagtgccattctaagcttgcccctgagattttattgtctaggaatattgcattcggttaatgctgacaagggctctaatactcgactttggttttggttttttttttggtggccctttctcatttcttcaagtagttctttgctagaattgatacctgcgaggtatgcaccatgcacatagccactaaatttttaactcgggggttttccagtaaggaaaaggcaacttattgaggctttaccttaccaacttctttggagattagagataacggga

SEQ ID NO: 14819 - DNA, 559 bp, Glycine max
  unsure at all n locations
  Clone ID: jC-gmle01810082c10a1
gagaagcccatgtatgaacaaggtttaattttacttccccatctagctactctaggttggggggtaggtcctgggggggaagttatagacacctttccatactttgtgtctggagtacttcacttaatttcctctgcagtattgggctttggcggtatttatcatgcacttttgggacctgagactcttgaagaatcttttccattcttcggttatgtatggaaagatagaaataaaatgactacaattttgggtattcacttaatcttgttaggtataggtgcgtttcttctagtattcaaggctctttattttggaggtatatatgatacgtgggctccggggggcggagatgtaagaaaaataaccaatttgacccttagtccaagtattatatttggatatttattaaaatcaccttttgggggagaagggtggattgttagtgtggacgatttggaagatataattggggggcatgtatggnttnggttccatttgtatacttggtggaatctggcatatcttaaccaaaccttttgcatgggcctcgcgtgca

SEQ ID NO: 14820 - DNA, 492 bp, Glycine max
  Clone ID: jC-gmle01810082c10d1
atgtatctatataatcgaattgaaattacgattctatcaaatctttttatttactttttttttttttaagaaaaaaagaaagttctaattattaataaattatatctatatatatatatatacagatagatattctatatcttttatcttaattaatatttgacccctccttataatgggttatagttttctttatttttaggaacttatccattccttttttaatgtgcccgacaatccgaaagaattctgggggaggggtcatttcgtttttgatctagaataaatagagcttcaagaaatgagagaattaagaatacccacgagaaacactaatccaatccataatgatgtaccggaaaatacaacatttttgttattcgaccaaccttcaggagaagcaaatacaacaggtacactaatcaataaaataaatgaaatagcaattaatgcaaaaacagctaattggaaagcaatagtcatgtttctaat

SEQ ID NO: 14821 - DNA, 406 bp, Glycine max
  Clone ID: jC-gmle01810082c11a1
ctagatcgcgagcggccgccctttttttttttttttttttttttttttttttttttggggaaggcaaaaatttgctacgttgtcatcaatgccaataattattacatctaaaatttcttcaatcaagggtcattaatctgtgttgtaagtcaaatcaatgacctgtacacagttatttaatttcttgagtgtcaaaaatgaaaaacacgggcataacatggacatctgacactgtcattccatacagatacttggggaaaatgagtatgaaacattaacaagcaaagtcaattcatggctcaggttgcattttctcgcattcttcccgttttgactggaaaagaatatttgacaaatatctttcaccaaagcttgggaagacaaccccaataagcttttctgcatt

SEQ ID NO: 14822 - DNA, 494 bp, Glycine max
  Clone ID: jC-gmle01810082c11d1
tcgcgatctagaactaggtgtttgtgtagtagtgagtgactttgggttgggtttcgtctcaactcaacaaacgtcgtcgttctcccatttccaatctttctccaatggcttcttctgcttccttaatcaactcgttgacttgctcttcgcctgcacccactcagcactgtttcgccttcacccgcaccaccgccaccgctaccgccacgtcactgagacaattcaacagccaccgtccgcccccactcaccacgaggatctcctcgtcgccttccaccgttgtctgcaaagctgtctccgttaagccccaaaccgaaaccgaaggtctcaacattgctgacgatgtcacacagctcatagggaaaacgccgatggtttacctcaacaatatcgtgaaggggttctgtggccaatattgctgcgaagcttgagattatggagccctgttgtagtgtcaggacaggattggttttagtatgataaatgatgctgag

SEQ ID NO: 14823 - DNA, 450 bp, Glycine max
  Clone ID: jC-gmle01810082d01a1
gcagtgataaatgagagtgggatttgatagactttcatcacatgtccatgaatataacatttccagtaatttgaatctgactaaagactgttttattaattttcagattattttttaatttatttttaatgaactttagaaaaaaaattagtttattataggaaattttacggtgaatttcagaataaattttcatatgatacgactttattaaataaaaagtatctctatactattttattgctaatttacaaatatctcatttttttatatttatggaaaaaaaattggtatcttattataagaataataatttatatttataatataaaatatttgagtagttaatgaacttgtttgttaagattaagatgcagttaaataaatatcttggttcacccaaaaaaatatatcatttgatgagtagcatgaaaaaaatcattcaatgag

SEQ ID NO: 14824 - DNA, 421 bp, Glycine max
  Clone ID: jC-gmle01810082d01d1
tttttttttttttttttttttttttttcttttttttatccctacagttttttttatggaaacattataattttaaaaataaaaacatttccatttaaatatttaaaattcttataatttaaaatttctcaaaattttccattcaaacacacacaggcttaatatccacaaggtcaagggataaacttcttttaaaaaagtaaaaaaaaactggtccatcaaaatacccttcatttatatatttaaaaatttcattacgccctttactggaagaaattttaagacaaccactccgggtttacatttttactgacttatttgaatactgaatggtgttgccgccatttccaaattatctaatactgactatctcatttaaattaacatttaaatatatttattaattcaaaatcttctttacc

SEQ ID NO: 14825 - DNA, 397 bp, Glycine max
  unsure at all n locations
  Clone ID: jC-gmle01810082d02a1
ggttcacatcagtattgtggtcattggccatgtcgactctgggaaatccactagcactggtcacctgatttacaagcttggaggcattgacaagcgtgttattgagaggtttgagaaggaagctgctgagatgaacaagaggtctttcaagtatgcctgggtgctggacaaacttaaggctgagcgtgaaagaggaatcaccattgatattgctttgtggaagtttgaaacaacaaagtattattgcacagttattgatgcgcctggacatagggatttcattaagaatatgattactgggacatcccaagctgactgtgctgttcttatcattgattcgaccactgggtggttntgaagctggtatttccaaggatggacagactcgtgaacatgc

SEQ ID NO: 14826 - DNA, 538 bp, Glycine max
  Clone ID: jC-gmle01810082d02d1
gaacacttcaaatagaaagttgacatttaataaaccaaagcaacacaacgcagcaaagtcctgaaactcgctgcgcttaacaaaaatgtaatcaggggttccgacaaacacaacacattaaaacacagataaataaaagcaattttgccaccgtcgatcaagaacccagttctgggaacaacagttgcgagatgatggtggagacttcaaactttgtccgaaaaacaagctacctagaaaagaagacacaagagtacagaaaagaaaccaacatttattgtaaccaacatcccctgatgaaccagcccgcacgattcacttcttcttctgggcagccttggtgaccttggctccggtaggatccttcttctcaacgttcttgatgactcccacagcaacagtttgacgcatgtccctaacagcaaacctaccaagtggaggatactcggagaaagtttcaacaaccatgggtttggttggaatcatcttaacaaaaccagcatcaccgttcttcaaaaacttgggctccttctcaagc

SEQ ID NO: 14827 - DNA, 467 bp, Glycine max
  Clone ID: jC-gmle01810082d03a1
cgactctatcgtcctattcttttttcacaatcagctccacatttttcaaatcccggttttgccctcctcccttcccctctcgcgtggtggcgtgtcacgttggatccaattccaatgttcaaaagcacgttgccaccgacctcaagttcgtcctccacgacgccctccatgactctggaatcaacaccactcatgccagagaagctagggagcatttctgctcacaaattaggagattcactgatattgagaagggaaccagtatttgtatcaacaggtgtgttgatttggggagaactgctctctacatagctgcagaggatgattctctagtgtcacattcatcagttccacttcctgtcgatgattttattacgagattagatgatctttcgatggactactgtccgcactacagccccaaatatgattcatcgccggagaagttcttagagagcatagagaga

SEQ ID NO: 14828 - DNA, 373 bp, Glycine max
  Clone ID: jC-gmle01810082d03d1
agaataagatttatttggggtggtaattgtatcttacgtctatttgttgacttgcaatggactgaggactttttatgattatttgcaagtcttttaattattagaatagttattgtgcctagaaagatataaatagactctttaaaacacttagttgccaatattcagatcagattcaccattaaaaagatgtgtttcttggttttttggtgtgaaaccttacattcttatcgaacaattctattctttgtgacgaatcatcctcatcttatcatccaagattatgatggggatctttccatgtactttactcattctccttttccttttcatgaaggtgccgcggccgagaaccatcagcattcatttgcaa

SEQ ID NO: 14829 - DNA, 464 bp, Glycine max
  Clone ID: jC-gmle01810082d04a1
ggccctttcccttcccactgggattggtattgtggttgcaggccctaaagctatggaggcctcaaaacatgctaaatcacttagagttttctttgactggaaagactacctcaaattctaccagctaggaacctattggccatacactccttccatacatttgctgtatggtctgagagctgctcttgatctgatttttgaggaaggactcgaaaatgtgatcgcaaggcacagtcgtttaggcaaagcaaccagacttgctgtagaggcatggggtttgaagaattgcacccaaaaggaagagtggtacagtgacactgtgactgctgttcttgttcctgcttacattgatagtactgaaatagttaggagggcatggaaaagatacaatttgagcttatgtcttggacttgacaaagttgctgggaaggttttcagaattggacatcttggccacttgaatg

SEQ ID NO: 14830 - DNA, 397 bp, Glycine max
  Clone ID: jC-gmle01810082d04d1
gaaagtagattgtacgttcatcttcaaaggagtgtaaaagagggtaatatatattttacagaatttctgaaagagcagaaaaaggaagtaaagacaagaatgatttgtgactcaaatcctggaagggatcataggaatagtgttctgtaagtatgcactggcagcagcaactccacttccaagctttacaggataacccacatctttgagtatcatctctacaccagctagacatcccaacagttgcaactcattcaagtggccaagatgtccaattctgaaaaccttcccagcaactttgttcagtccaagacctaagctcaaattgtatctcttccatgccctcctaactattttagtactatcaatgtaagcaggaacaagaacagcagtcaca

SEQ ID NO: 14831 - DNA, 502 bp, Glycine max
  unsure at all n locations
  Clone ID: jC-gmle01810082d05a1
aattcagcttgctttggattgattagcagcaacgcctgaagttcaatgttgatgttgttgagagtgaatggggccatggtgctaagcttgatgttctggaatcaaagattgcttcagatacttcacacactataaaggcaatttgcattgttcacaatgagactgcaactggggtcaccaatgacttggccaaagtgagacaaattcttgattcctaccagcatccagccctccttattgttgatggagtgtcttccatttgtgctcttgatttccgcatggatgaatggggagttgatgtggcaataactggctcccagaaggccctttcccttcccactgggataggtatttgtggttgcaagccctaaagctattgaggcctcaaaacatgctaaatcacttagagttttctttgactggaaagactacctcaaattctaccagctaggaacctattggccatacactncttccatacatttgctgtatggcctgagag

SEQ ID NO: 14832 - DNA, 452 bp, Glycine max
  Clone ID: jC-gmle01810082d05d1
aagatgcatttatttttgatatacaggacaataaaagaagcaatgcattaaagctgaaagtagaaagtacgttcatcttcaaaggagtgtaaaagagggtaatatatattttacagaatttctgaaagagcagaaaaaggaagtaaagacaagaatgatttgtgactcaaatcctggaagggatcataggaatagtgttctgtaagtatgcactggcagcagcaactccacttccaagctttacaggataacccacatctttgagtatcatctctacaccagctagacatcccaacagttgcaactcattcaagtggccaagatgtccaattctgaaaacctttccagcaactttgttcagtccaagacctaagctcaaattgtatctcttccatgccctcctaactattttagtactttcaatgtaagcaggaacaagaacagcagtcaca

SEQ ID NO: 14833 - DNA, 445 bp, Glycine max
  Clone ID: jC-gmle01810082d06a1
aaaataataaaatactatacatatatatatatacccaccatcgaaaggtcagagcagaacccaaccaaagcagctatggcggcgatgcagaggccactcaagagaaccattgcaatcgccaagcaacgcgcgtgcttttcctctctcctaccctccgccggtgccgccgccgccgccgataccgtcgcgcctccgcagctccccccgttcgatcaccagccgcacccttacaacggtccctccgacgatgaagtcttcgccaagcgcaaaacgttcctcgggccttccgtgttccactactataagaaacctctgaatatcgtggaagggaagatgcaatatctttatgatgatagtgggaggcgttaccttgatgcatttgcgggaatagttactgtttcttgcggacattgccaccctgaaattttgaatgctatcacggagc

SEQ ID NO: 14834 - DNA, 359 bp, Glycine max
  Clone ID: jC-gmle01810082d06d1
gaatgcaactttttgatgtcatgaaacccaaagttatatacaataatagtcagcattcaacttataatgttcagcaaaaagggagggaaaccccctctcttctcaacggggagaacattacattattcatggggattcctatgaactaaatgacctttttgctgttggcttgcattaatttgactccattgtcgaagattttatttcatgctaccaagatgcacaatcagctcacaacttacatagagaatagtccaaggcatccacaagaaaatctgcatcatctttggagaaacacattggtggcttgatcctgaaaacattgccatgaagtcctactttcccaactagcacaccga

SEQ ID NO: 14835 - DNA, 544 bp, Glycine max
  Clone ID: jC-gmle01810082d08a1
agaggatagggttgttatatttgatcttatcagaggattgctcttggtgaacttgggagcccgtttattaaatatgttgcctggtctgatgacatggaacatgttgctttactcagcaagcatgccattataattgctagcaagaaacttgtacaccaatgcactctccatgagactatccgtgtaaaaagtggagcttgggatgaaaatggtgttttcatttatacaacactaaatcacatcaaattttggcttcccaatggagataatgggataataaagacattggacattccaatttatatcacaaaggtctttggcaacacaatcttttgcttgtatagggatggaaagaaccgatcaataactattgatgctactgaatatatttttaagcttttcttttggaaaaatgatatgatcatgtcatgaacatgatcaggaacctaccgttttgtgggccagcttttattgcttatctaccgcaaaaggcttttcttgggttgacttgattttgtgaaaatgaaaaaattcgttcaatttg

SEQ ID NO: 14836 - DNA, 459 bp, Glycine max
  Clone ID: jC-gmle01810082d08d1
gaatcccgactaaacacagacatatatggggttggccaataaaactgtgcaaatttaactcttgcacagcctataatcatcgtttgatctaagtacaacctttcactttcttgtgtatgaaaaactaacattgaaaatcattttcaaggaaagagaacggcaagcaaaaagacgaaaaattaattcctcgtgactaactctcacttttatcacagtaccatgagcatgttgactaattaataaggattcaactagtgctgaaaactgacccaaaacaaaatttaacattggacctgatccagtagttcaatcagcgtatctgggaaggtgaacaaaccagaccagaagcatctgctccaatcactgcaagatcgcaaacattacagagttgtccctcctggctaggcacataacgtgaagaacaatatgggcaagagacattcttttgtcctcgattga

SEQ ID NO: 14837 - DNA, 512 bp, Glycine max
  Clone ID: jC-gmle01810082d09a1
gttttgtttggtttcatcgatcttcatttttcataatcagattcagcttttattatgtttacaacaacgtccttaatttgatgattctttaatcgtagatttgctctaattagagctttttcatgtcagatccctttacaacaagccttaattgttgattcattaatcgtagattagggcttttttcattgattacttcagatccgttaaacgtaaccatagatcagggctttttcatgaattacttcagatccgttaaacaacagccttattttttatacttctgtggtttttcaagaaattgttcagatccgttgacaaaaagccttattcgttgattctatatcgtttttcgagagatattgctcagatctgttagcaactgccttgtttgttgattctattgccgtggattagggtttttttttcacgagattgcttcagatccgtacttaagattacgtaatgggatttgattctgatttatctgtgattggtgactcgacagatgc

SEQ ID NO: 14838 - DNA, 420 bp, Glycine max
  Clone ID: jC-gmle01810082d09d1
attgtactattattaatgggacacaatggaggggaacacaaaccgaacttattttcaagggacattattacagacccattaaacatcaaagttcttcaaatgttttgggaacacatccaacattacacaacgagcttaaaaccccccacggagacggaggacaaggtgaagggttgattccttctggatgttgtagtcagcgagggtccttccatcctcgagctgcttgccagcaaaaatcagcctctgctggtccggtgggatgccttccttgtcctgaatcttggccttcacattgtcaatggtgtcagagctctccacctcgagggtaatagtcttaccccgaagagtcttcacgaaaatttgcataccaccacgaagacgcacaccaagtggagagttgactcctttggatgttgt

SEQ ID NO: 14839 - DNA, 529 bp, Glycine max
  Clone ID: jC-gmle01810082d10a1
caacgatcgtgagactggaagatcctgtggttttggatttgtgaccttcgcctcggggcagtccatgaaagacgccatcgaagggatgaacggtcaaaaccttgacggccgtaacatcactgttaacgaagctcattcccgtggtggcggcggcggcggacgccgcggaggaggtggatatggtgtatatcgtactttcacatgaaagtgtcataaaggcagataaaagcatattcattcaacacacacgaccattaggcttaagcacaaggcaatagtatgacttaaacggtgacacatttcatcaattattcttaaaacactgcagattttctgaatttgttcaaaatacaagagccttgttactgtagaaccacacattcttgtgaaccatccaccaccaccacagtagggtgttcgcttgtgctgactgcatcaactttcctttttgaccctttgaacattgacatcctccaattcaccacagccaatggctacaaacacaagatcattgacttcttgaaacctc

SEQ ID NO: 14840 - DNA, 542 bp, Glycine max
  Clone ID: jC-gmle01810082d10d1
actctatatttctgattatcatttcattaaatcgagtgataggcaaccatatatattggtcaaaaacaagaaccacggtgacacaaaaccataaagatactcaaactcaaacacaactaaaattactgagcataatcataaaccctaatcaacgacatcaagccctagtttctccagccttcattaccaccgtcaccaccacgagagtaaccacggtcaccaccaccaccataaccacggtctctgccaccgccatagccaccgccaccgtcaccgtcatatccaccgccgccgccatagccttcaccgccaccgctacggttgtatcccccttcaccaccgcgaccaccaccaccatattcaccaccgtgaccaccaccatattcaccaccttcaccgtcttcgtcgtcaccgtcaccacgggactgagcttcgttacagtgatgttaccgtcgtcaaggttttggccgttcattctttgatggcgtcttttatggactgctccgaggcgaaagtcaccaatccaaaacccctggatcttc

SEQ ID NO: 14841 - DNA, 535 bp, Glycine max
  unsure at all n locations
  Clone ID: jC-gmle01810082d11a1
agagcttcttgataaggagcttccttttaagtttgtggaggtggatgaggaacantgtagacttgtcctcagcaaccgcaaggccgtagctggcaaccaggcacagctaggaattggatcagtggtcantggctctaagcaaaggctgaagccatatggtgctttcattgacattggtggaattaatggcctccttcacgttagtcagatcagtcatgaccgtgtaactgatatttcaactgtgcttcaacctggtgacatattaaaggtgatgatcttaagccatgaccgagagagaggtcgagtaagtctttccactaagaagttagagcccacacctggagacatgattcgcaatccaaagcttgtctttgagaaggcggaggagatggctcagacattcagacagagaatagcccaagcagaagctatggctcgtgcagacatgctaaagttccagcctgagagtggattgactatcagcggtgatgggatcctgggaccatttacttcagactttgcctgaagagggact

SEQ ID NO: 14842 - DNA, 547 bp, Glycine max
  unsure at all n locations
  Clone ID: jC-gmle01810082d11d1
gataatatgaattagttctatttatttaactcacaataatacattggcatcaagacatcgttcggcaacaattgatagttagttacaaacaatattataaaaatgtaagcaaacagaaagaaaagagcacgcaattctgaatcatgattcttcagctggtggtacctcactcaaatccagtccctcttcaggcaagtctgaagtaaatggtcccaggatcccatcaccgctgatagtcaatccactctcaggctggaaccttagcatgtctgcacgagccatagcttctgcttgggctattctctgtctgaatgtctgagccatctcctccgccttctcaaagacaagctttggattgcgaatcatgntctccaggtgtgggctctaacttcttagtggaaagacttactcgacctctctctcggtcatggcttaagatcatcacctttaatatgtcaccaggttgaagcacagttgaaatatcagttacacggtcatgactgatctgctaacgtgaggaggccattaattcaccatgtcaatgaag

SEQ ID NO: 14843 - DNA, 434 bp, Glycine max
  Clone ID: jC-gmle01810082d12a1
atcatgctcggggccttgggctgcgttttccccgaactgttgtcccgcaacggggtcaagtttggagaagctgtgtggttcaaggccgggtcccagatcttcagcgagggtgggctggactacttgggcaacccaagccttgtccacgcccagagcatcctcgccatctgggccacccaagttatcctaatgggtgctgttgagggttatcgtattgctggtgggcccctcggtgaggtcactgacccaatctaccctggtggcagctttgacccattgggccttgctgatgacccagaggcttttgctgagcttaaggtgaaggaactcaagaacgggagattggccatgttctctatgtttgggttctttgttcaggccattgtcaccggtaagggtccattggagaaccttgctgatcaccttgcggaccc

SEQ ID NO: 14844 - DNA, 441 bp, Glycine max
  Clone ID: jC-gmle01810082d12d1
gtaaaaagcaagtaacattaagttggattgggatacacaagataattcacattatctgaagtacattgcaataacatatacttcaccaaacacaaatctaaaaactctcaaaagtccacaagtcatccttttctttcatgctcacttgccggggacgaagttggtggcgtaggcccaggcattgttgttgactgggtccgcaaggtgatcagcaaggttctccaatggacccttaccggtgacaatggcctgaacaaagaacccaaacatagagaacatggccaatctcccgttcttgagttccttcaccttaagctcagcaaaagcctctgggtcatcagcaaggcccaatgggtcaaagctgccaccagggtagattgggtcagtgacctcaccgaggggcccaccagcaatacgataaccctcacagcacccattagg

SEQ ID NO: 14845 - DNA, 370 bp, Glycine max
  Clone ID: jC-gmle01810082e01a1
ctcggctaacttacgtgtcattcctgttccctcgtctattccacgccgaataataccggggatggtgaggacatttacatgggatgggataatgacatctgaggaactttactgttctatatacaatgtattgtctgaagcatatgcctcaaatgatctatacaattactgcccttcatgggctctttcttggccatatcgcaggcaaaatttgttacggtaaattgttggttaccgaccagacattatttgtcttcaggaggttcaaagcgatcattatgacgaatttttttctcccgaattagacaaacatggatattatggcctttacaagagaaaagaggtgtacagtggcaacacacatacaatt

SEQ ID NO: 14846 - DNA, 539 bp, Glycine max
  Clone ID: jC-gmle01810082e02a1
cggttctttcggaggatggatctataagaattcacctatcccaataacaaaaaaacctgacttgaatgatcctgtattaagagctaaattggctaagggaatgggtcataattattatggagaacctgcatggcccaacgatcctttatatatttttccagtagtaattctaggtactattgcctgtaacgtaggcttagcggttctagaaccatccatgattggggaacccgcggatccatttgcaactcctttggaaatattacccgaatggtatttctttcccgtatttcaaatacttcgtacagtgcccaataagttattgggcgttcttttaatggtttcggtacctacaggattattaacagtaccctttttggagaatgttaataaattccaaaacccatttcgccgtccagtagcaaccaccatctttttgattggtactgtagttgccctttgtttaggtattggagcaacattacctattgagaaatccctactttaggtcttttttaactataaatttgatccatttg

SEQ ID NO: 14847 - DNA, 527 bp, Glycine max
  Clone ID: jC-gmle01810082e02d1
caaaatggaattaattttataagtttaaaaaagacctaaagttagggatttctcaataggtaatgttgctccaatacctaaccaaagggcaactacagtaccaatcaaaaagatggtggttgctactggacggcgaaatgggttttggaatttattaacattctccaaaaagggtactgttaataatcctgtaggtaccgaaaccattaaaagaacgcccaataacttattgggcactgtacgaagtatttgaaatacgggaaagaaataccattcgggtaatatttccaaaggagttgcaaatggatccgcgggttccccaatcatggatggttctagaaccgctaagcctacgttacaggcaatagtacctagaattactactggaaaaatatataaaggatcgttgggccatgcaggttctccataataattatgacccattcccttagccaatttagctcttaatcaggatcattcaagtcaggtttttttgttattgggataggtgaattcttatagatcca

SEQ ID NO: 14848 - DNA, 290 bp, Glycine max
  Clone ID: jC-gmle01810082e03a1
ctttcctacttggatggcagcctttcgggtgactatggatttgaccctctgggagtttcggaccctgaaggaacaggagggttcattgagccgaaatggctagcatatggtgagataatcaatggtcgttatgcaatgttgggtgcagttggtgcaatagcacctgaaattctaggcaaggctggtctgatccctcaagagacagcactcccatgggtcaaaaacggggtgtttccacctgtgagaacctacaaatactggggagactcctacacaacattgttcgtttt

SEQ ID NO: 14849 - DNA, 419 bp, Glycine max
  Clone ID: jC-gmle01810082e03d1
gtcgaatgtttttagttgttttacatgtcaattcttacaggggcacaccaaggaacaaaatgtccagatgatggtagagtcccaaagagcaaagagaggatatagaaaggtggttgagctttggtaactgcgaagcgaacaagaaccaagaccaagagggtaaagaatatgatataatacatttagtggaacttgagactggtcaagatgttgttgtgcacggggtcagccaaatgatctaggaggttttggtatgggccaacacctgtgacaagagcttgaacaaagtaacccaagattgccaacatagccaaccttccattcttcacttccttgagcttcaaatccttcaaggacttctcatccttaccaaagccaagtgggttgaagaaaggtcctcctgggtaagctggctcacc

SEQ ID NO: 14850 - DNA, 379 bp, Glycine max
  Clone ID: jC-gmle01810082e04a1
cgccgcctccctccttcgctccatgctccgctccggctacctcccccacgttaaggcctggaccgccgtcgtcgcctgcctcgcctcctcccctgaccgcggcgatggccccgccgaggccctccagctcttccgctccgtcacgcgccggctccgccggctccccgaccccgccatggccgccgcgtcgcgccccgacacggccgccgtcaatgccgcgctcaacgcctgcgccaatttgggtgatcccagggccttcttgcaggtgttcgatgaaatgccgcagttcaatgttgcccctgatgcgttgagttataacactatgattaagctgtgttgtagaattggtagaaaggacttgcttgtgtttgttctggag

SEQ ID NO: 14851 - DNA, 508 bp, Glycine max
  Clone ID: jC-gmle01810082e04d1
aaaaattaagtcatcgaaattattcattgatttcatgcgtgggaaacctgtgttttaattacaaaacgacattgcagttgtagagtacaataggcacttttttttgttaactaaacatttatttctacattgtagaatagaagtgtcctttctcatacttgagtatgttttgacaagctatgaaagggggagcaactaaaccgaatcagaggtattgccatacccttccataggttctaaccgccactcactttcatcataataggaattaggcaaacccagccaaaacttaaacgcctcagcagcccttttcctctctactcttctgtcttggctagcccttgaagcatgcttactagtaaacattcttgaatgcatttccacatagattctaataaacttggtcttgttgggaggtatcccattctcctccatgcaagccactatttccaatgcctttctaaagaaagcaggcctcacacagatatcagcattagtatctaaaagc

SEQ ID NO: 14852 - DNA, 564 bp, Glycine max
  Clone ID: jC-gmle01810082e05a1
ttgcaggggacaggttttgttgtttgtgaagagcgtgagcatttgcgaatgcggggccacacccgaagctgagactgcctacaagacaggggtcaatcgcaatccaaatatggggaaacttcaagctggctatctctttcccgagattgctagaagaaggtctgcgcacttgctgaagtaccctgatgctaaagtaataagccttggaattggtgatacaactgaacctattcctgaagtcataactgatgcaatgtcaaagagatcacatgcattgtcgactatagaaggatacagtgggtatggagctgaacaaggtgaaaagccattaagaagggcacttgcttcaacattttacagcgatcttggcatagaagaggatgatatatttgtctcagatggagcaaagtgtgatatatctcgtctccagattgtctttgggtcaaatgtaaaaatggctgtgcaagacccttcatatccggcctatgtagactctagtgtaattatgggccagactggcctctccagaagaatgttgagaaaagttgcaacattgaatacatg

SEQ ID NO: 14853 - DNA, 436 bp, Glycine max
  unsure at all n locations
  Clone ID: jC-gmle01810082e05d1
ctcaattgataaaccctgtctttgcatgggataatctaaactccacggaaaatcaattgcattatttaaataagacagccctagcttcagtccaagagaacaactcttgaaaccaaatgagatattctaacttcacttgtatagctgcttgaaccttctgcatgcctccaagacattttccctgtgaccaaaggcactaaccctgataaaaccttcaccaccaggtccaaaaccactaccaggggttgtaaccacatgagtcttctcaagaatctcagcgaatacatcccatgagcttcggccgggaaaatggacccacacatatggtgcatctttccctccatagactttaaacccaagagaatcaaatgtctncattattatgtgagtattttccttgtagaatccaataacatcacgcataggcttaagacct

SEQ ID NO: 14854 - DNA, 476 bp, Glycine max
  Clone ID: jC-gmle01810082e06a1
caaataatgagggttgtagaaatatggagaacgatactaggtgtaagttaaagggaaaggactcgaatagttggttattcatggaagacaccgcacaacaaatcaagcgtccttttggtgttcctgaaggaccagaattcactgttgggttggatgtacctttgagcgagttgaaggtggagcttcttaaagaaggtgtgtccatcattatgctgactggtttaggtggatcaggaaaaaccactttggctacaaagctttgttgggatgaacaagtcataggtaaattcaaggaaaatattttatttgtcaccttctcaaaaaagccttaagtgaagattattgtagaaagactatttgaacattgtggatatcaagtgcctgagtttcaaagcgatgaagatgcagtcaatcaattgggacttttgctgaggaaaattgatgcaagtcctatgttgctggtcctggatgatgtc

SEQ ID NO: 14855 - DNA, 374 bp, Glycine max
  Clone ID: jC-gmle01810082e06d1
ctattcttattacgaataacaaaatttacggggggggggtttaaaatactctcaaactctctaaacccaaaatacagagctccttgtaaaggagacaactactatctatctaaccgaaaatggttacaaacggaaaaaaatataaaatagttacaggtacaacacaacttatgttagtgaatcaccatgttggacggcccctcgcacgtgactggatgctccaccaggtgacataggattggatgacctatataaaagataaaagttctggaccagacgatcattgatgtccattctatgtctatcatgaattgtccaacatttattaatctccaccttgattcacatatatttcttaattacaactaactcaa

SEQ ID NO: 14856 - DNA, 379 bp, Glycine max
  Clone ID: jC-gmle01810082e07a1
aggaaaaggaaaaccttgtatatgtttcttcctcaagcacgccccctgggaacgggagggaggaaaccgacccatgactttctgtcactctacagtaattcaactgcccaacaagatccaaggccaccttctcaaggaagttacctcaagacccatgatttcttgcagccactagaacgggtagaaacgaaagccagtgcgaaggaagaagccacagatgaaatatcatcggtggttcaaaagccacgttcaccttcagttgagcacctcttacctggaggaattgggacttatagtcttagccacatttcatatgataataataataataataataatcaaagggcttcacaaccagagacatcatcccttacgggcg

SEQ ID NO: 14857 - DNA, 390 bp, Glycine max
  Clone ID: jC-gmle01810082e07d1
ctcctcgattagtatggaagcctggcatgcgttttatgatttagaacctaaaataccccattttattttgttggggtgagcctaatgatctcaacacactaagatgacactgtatgtacagtcgatctcccccacgctggataataaagccagcagaagacataaaataccccttccaaaaattaattttaaaaagctaccccacataattagaaagaatcgtactaaagaaagaatgaacttatcggccgaattaacttctgctagcttttagctacttaactgcttggtcagacttcccagagcttgcaactctagagcgcttcatcttttgattgttagaaggaactgcaccatccttagcaccacacactgtcactggtacatttg

SEQ ID NO: 14858 - DNA, 452 bp, Glycine max
  Clone ID: jC-gmle01810082e08a1
ggctgaaactgacatccaagactattttcaactcttcttcctctggttactctccatggtcgccgttagagccatactcaccaaactccgccacaagcctcgccgtccaccgggcccacggtccctccccatcatcggccacctccatctcatctccgccctgcctcaccagtctttccacgcgctctccacgcgctacggccccgccgtgcaagtcttcctcggctccgtccccgccgtggtcgtttcgtgcccggaactcgcgaaggagttcctgaaaacgcacgagcccagcttctcgaaccggttcgtgagtgcagcggttcaccacctgtcctatgggtccaaggggttcctcttcgcgccctacggaagctactggaggttcttgaagaagatttgcatgtcggagcttctcggtggccgcaccctcgaccagttccggcacttga

SEQ ID NO: 14859 - DNA, 427 bp, Glycine max
  unsure at all n locations
  Clone ID: jC-gmle01810082e08d1
ctctcctcctcatgctcccttatcaccctgtccatcatgccatcaaacctctccaaaatacccacaagcctcttctttatcccatgcaaatccaaccccttacacaaccacacaaaatccgccaagttgaacttccccgccagctcagcagtgtccgccaccatcttcctcacgtgctccacgtcaccatcgctctcgcaacatgttcgactcaaaaccatcctcgatattacactgttggtcaaagtcatcaactccccactaacatccacggcctcatgcgcctcccctttcgccctcaacacgcgcagaaacctcaaagtttcttgctccctcaagtgccggaactggtcgagggtgcggccaccgagaagctccgacatgcaaatcttcttcaagaacctncagtagcttccgtagggcgcga

SEQ ID NO: 14860 - DNA, 526 bp, Glycine max
  Clone ID: jC-gmle01810082e09a1
agtttctttagtcgggtttctttcaaaaaatggtgcagagtctctgtttgatggcttgggatggttaccctcctggccttgtcttgcatccacaagtactgggcttgccctgcagtaccatgaagggctaccaaacattctttccttctccagtagcaaaagcagacctgatcagatatcagtctccttgtcttgatccaagtccatgtgaggagtcaacgaaatctcaaaatgaatggtttgattataagaagtttgtcaatgttgacttctcagttgaaaggcccatgcttattaatgaccaagctaactgctcaaatgcagttctttttggctttggcattgttgaacaatgctctaagcatgatgaaattttaaaggtgctaatgtctgagactgctgaagcagggatagatggagggaatttatccttgttatcagacttgatgaaatttgcagtgtcaggcattgatgaaacccagcaaccatcatcatctcttatctacccaactggaaaattcaacat

SEQ ID NO: 14861 - DNA, 420 bp, Glycine max
  Clone ID: jC-gmle01810082e09d1
gattccattgcaaaattctactatattacaagctaactacaaaaccaaacaatgcttcctgggttaactgaaaataccaaattaactacaacacccaatagctgatcaacttggtgccttaaagatctcaccgtggaactactttgaaccttgattcttactatttgctttgccatttgctttctttcaccaaaagccatcactgtagcatccaaccagccagaaataactacatctttggagatgttactcaagcaagccttagcactaccactgctagcaatgctgcagcagtatagtaaatatctcttatgctcttatccagcttttgcatcatttcctcttctttcaaacccaactttcctgcattcttgctgatgttgacaattgtggcccttagcttatttactaccccagaaa

SEQ ID NO: 14862 - DNA, 492 bp, Glycine max
  Clone ID: jC-gmle01810082e10a1
gccacaactacctcgcaccaaaacatgttcaacagtcctagatctattcataacctggtggcacattgttgggcgcaatatcttcaaggaaaatggcagcaccgcctgccggtgaccgttggggggcgatggaaaggaaatctcatattgacaccattgatttgacgaattcatctcccgagccagatcagcattatcgcatgccattgaaacagcagcgacttccaaactacttcaaggaagagccacggaatgaatctcgtagcacacccagggttaagaccgaacggaaggcggcggaaatgagaccgctcaattctcaacgacgtgcgcgtcagatcgaccctcaacaccttgcccgaatcattgatacaagcagtccgcatactgtcaaagcggtattgctggatctttgcaagctctcacctgcattatctggagcccttgcgcgtggccttgcgccccactcaactttcgcgcagagcctcaaca

SEQ ID NO: 14863 - DNA, 420 bp, Glycine max
  Clone ID: jC-gmle01810082e10d1
cctggcttggaaattcattatggacaatcgaaggtcctagcctgtacagtccggccaggttcccgggtagtggcacaaagtaactcctttgtacgcgcaaaacacatgttgccgttaataattcccagtacacctaacgcactcgctgctaaaagaggaatcaagattaagggacctggccagattctttccgatcgataccaacgatgcagaattgatccaagaaatattcagtcctccccttgcgtgatgcgtggtcggagagatctaaacgtgaggcgctgcaggtcccttgttacgttggtcgtaacacaacccacaacctagtagattctgaaatgattggaaggtgaatgtccgttggatagtatagttcgtcctcgaatcccgccgcatttgacttgcgaacatgcaatccga

SEQ ID NO: 14864 - DNA, 507 bp, Glycine max
  Clone ID: jC-gmle01810082e11a1
gagccggatcgtttaccatcactataggcgttccggaataatatgcacgcgtccgcaagcgtcgaatttgcggccggcctttttttttttttttaatagaattcttattttatatataacaataaactactatatacacatacaatgtattctagtttagtcccctaaaacacgagcaagttattctgggtgtcggagcccaacttctccaaattcggctggactgcaaattgaatcatacgtgggggcccacaccctgatgccgaggtgttctttatagattgaaagccggacgcccaattcctattcccagctcaggactacagattacccaacttggtcattgttaaggatttggcgacagcttttatccaagttcttggtaatgagaaggccagccaggaagtattcaacatctcgggagagaagtatgtcacgtttgacggattaacaagagcatgtgctatggctggtgggttcccagagtcagagatcatttactaccac

SEQ ID NO: 14865 - DNA, 407 bp, Glycine max
  Clone ID: jC-gmle01810082e11d1
aaaaacactgaacgaaaagctcatgaaggggtcacatcttcctaatgtacaaaatccgaacagcttttctacatataagtgaaatactgataatcgaaatagaaaagtttatacactaacaagactctttccaagaaatatgtcatctgttgagaaatcagcctctttccggtatgttcctataccaaagtccaggttgttcgagtctgcaagaccctctacaagcccaaattcaggttcccacccaagcactctctttgttttctcaattgatgcaaagaaatgctggtcacggaatggaaatgatttcttttttccaaagtcaaaatctttagggtttgagtgaatgatccttggttctgggaacccaccaatcttagcccatgctcttgctaatccgtcaaacg

SEQ ID NO: 14866 - DNA, 331 bp, Glycine max
  Clone ID: jC-gmle01810082f01a1
ctaaatctaaactctcgcatctctctaggttttcatgcacggatccacactccggaactggttagcttttaattctctagccacccctaaagctacaaagcacttatgccacgatccaaaggataatcttgatgatcatgatgatggtagtaacactagtaacaacaataatagcgcactccaatacatttaagaggtcacaagcaactctgatgtaaattaagaaaaggttctagcccagatcctttctcgttgtgcacaccctcaattcctccaacgccctgttcctaaatgggctcactgacagaaacacttttcaagatgatcattc

SEQ ID NO: 14867 - DNA, 383 bp, Glycine max
  Clone ID: jC-gmle01810082f02a1
gcgtctcaagtcggcagctcgcattgtctcttgatcctggtttcctcaccctatggtgagggtttggtccctcttcaattaacttcaatatctgcgagagagcgtgagagtgacgcgcctcccgagagacgccatgggaggtgacagtgccattgaggaatccgaaggggtcaacgtcaacatcaacgttcgctgctccaacggtttcaagttttccgttcagattgccgtcgattccaccgttagtttcttcaaggacgttgtcgctcgcaactgcgacatccctgccgaacaacagcggcctaatttacaaggggttgattttgaaggatgatcaaaccctaccaagctacggtttggaggcagatcacactgtccatttt

SEQ ID NO: 14868 - DNA, 275 bp, Glycine max
  Clone ID: jC-gmle01810082f02d1
tccagcctaattctttttttgaacaaagtttatttttacttccccatctaccttctctaagtgggtgggtaattccttaatggcaaactataacacaccaatccatgcttatactttaaatatccccaaatcaattcctcccaagtaatgtactatgtcaatatttaaaatgcactcttcgtacctgaaacttaacaaaaaatttttccattcttcggttatgtgcttaaagatataaataaagtgactacaattttcggtattcacttaatcta

SEQ ID NO: 14869 - DNA, 227 bp, Glycine max
  Clone ID: jC-gmle01810082f03a1
cgtactgattcctcttcatctttttttaaagcgagtacttttcgttcttgatctggtggttacgatgtcgtattcaaggagatctaggtattctccttctccttctccttctccatacaagcgatacggtaggtctgtgtccaggtctctctcaatatcaagatccagaagccgttcaaggagtttatcaagagatgcaaaatccaggaaacaatttgtatgtgaca

SEQ ID NO: 14870 - DNA, 338 bp, Glycine max
  Clone ID: jC-gmle01810082f03d1
gggaaccaaaccaagggaaagtcccaaattaaataattttttctgggtaacaaaatttggatcccatactacatgaaaaaaaaacagggggtttttaaacaagtcctgaacgggaccaaacgaaaactccatttaaaactggtttcattttccacactaatattttttccactataaccctaaaaaggtaagccgttttggacccacaaatttcaaattgaaggaaagggataccttggagtatttgaccttcataccggttttgaacttgaattaacactcgaacttttttagtagcgtttcttacatttgccacccctattaaagcttcttgaatg

SEQ ID NO: 14871 - DNA, 509 bp, Glycine max
  Clone ID: jC-gmle01810082f04a1
gccaaacagggcggcttcatctttttattggaaggctactgggactggtaaggcggtgttgacctctggtgggacccaaaaggttggggtgaagaaggctttggttttctatggagggaagcccccaagagggatcaaaaccaattggatcatgcatgaatataggctaactgataacaagcctaacaataggcctcctcctggttgtgacttgggcaacaagaaaaacactctaaggcttgatgattgggtgctgtgccgaatctacaagaagagcaacacgcataggtcacccatggagcatgacagggaagattcaatggatgacatgattggagggattcctccatccatcaacgtgggccacatgagtgcgaggtttcatcatctttcaaagatgacgacagcctacaacaacggtgcattggtggaaaatgatcaccacaacttgttggagggatgatgataggtacagcaacgggggatgaacaaactactctactacacct

SEQ ID NO: 14872 - DNA, 522 bp, Glycine max
  Clone ID: jC-gmle01810082f04d1
gagttgaaatctcttttctcatttgaatatttgtatgggttaattaagagcacaccaccatttttttatttacataccaataaaaaaagcaaatatctatatatacgtataaagctatattaaagtttaactaaaagtatcccatggcctgacctttggtgttgttattgcttgcagctaactccaatggttgaagaacttcattggatgataatgaggcccatctaaatgatcaaactctaacaactgcttccaaattcctaacaaccaaaatctcaatatcccattaaaatcattacaatctaatagtgtagggtttccaccagctgatcgaggatcatatcatatatccttctttatagtaattcaatatctccctgttcatcaataattaaaacaaacctgaaattgttctaagcataccaattcattcctgaatttggtatgttgttctaagaagtccatcacctattgaccccaatattgatgggtggtgcaatgaaggggtttgagggagttgat

SEQ ID NO: 14873 - DNA, 568 bp, Glycine max
  unsure at all n locations
  Clone ID: jC-gmle01810082f05a1
gggtttttgagtgcggtgcggctatcctagcactctcttctgcagcggtcgccgacagcttcattcaccatggctgagcaaaccgagaaggcttttttgaaacaaccaaaagtgtttctcagctcgaagaaaactgggaagggaaagagacccggaaagggtgggaaccgcttttggaaatccattgggcttggatttaagactcccagggaagccatcgaaggaacctacattgacaagaagtgccccttcactggcaatgtttccatccgtggccgtatcttggctggaacatgtcacagtgctaagatgaacaggactattattgttaggaggaattatctccattttatcaagaagtaccagaggtacgagaaaaggcactccaacattcctgctcatatatcacctgctttcncgtgtgaaggaagggagatcacgttattattggtcaatgcaggccactttctaagactgtgaggttcaatgtgttgaaagtgatcccagctggatcttctaacgtgcaaagaaggcttttactggaatgtgagctttgatttccagtttt

SEQ ID NO: 14874 - DNA, 352 bp, Glycine max
  Clone ID: jC-gmle01810082f05d1
aaaacaagatcctaagcatgaagccagaacgaaacctcaaagaaaatccaaaattgacaagggtttcatatttgttatcatccagaaaagaaatcagatataataattaataagggaacatttatcttcaataaaaactggaaatcaaagctcacattccagtaaaagccttctttgcaccgctagaagatccagctgggatcactttcaacacattgaacctcacagtcttagaaaggggcctgcattgaccaataataacgtgatctcctttcttcacacggaaagcaggtgatatatgagcaggaatgttggagtgccttttctcgtacctttgggacttcttgataaa

SEQ ID NO: 14875 - DNA, 514 bp, Glycine max
  unsure at all n locations
  Clone ID: jC-gmle01810082f06a1
gtttgttgacttgatgcaacagttacagttgggttggttggtaccaaaggtgaggcaggggagactcagaaagagatggctgagctcggaggagttatgccagactgtgtatatgctccaaatccctaccatgaatgcacggaggcttgcgtgcataggatcaaggaagccaagcctggcaagccatctaaaactaaaaagggtaccgctttcaaagattatcgcagaagtgttacagatggtgaactgggcaaaacgatgaaagaagaaaaacgcaggccctcaggttgccctaaagcgtctaatccttaccatgtctgtgatgagtattgccagaaggctgattcaggtaccatgtctttaaactttgacaggagaaagaagtttggttctaagccagaactccccgttcttgacagtgttccaccctcaaaaaatggggctatntatctctctgatgcttcatcgccattatcaaattattctgaaagacaaaggaggagtcaaaaagcat

SEQ ID NO: 14876 - DNA, 348 bp, Glycine max
  Clone ID: jC-gmle01810082f06d1
agctgaaaaagatagctcatgcgtttattcagtaccatattttacaatttaagcattaccataattctggggatgaatttcaaagacaaattggctagagagtttcattaaactagttcatttagcaaggatttgctggctaaattatcaaccttggacttgattgacaagatgtttttgtccaaatcacaagactttagcttaagctcgcttaaacgctctttgatcgcttaaatttttggtttgatatcaggtacctcttggtctttttgagccaaaatttccagaattgattctagctctttggtcaatgattccactttacgaacagagttagcctttggcggc

SEQ ID NO: 14877 - DNA, 426 bp, Glycine max
  Clone ID: jC-gmle01810082f07a1
gcagaggaaagatcgttttatgtgtcctcttgtctccttacttgcagagccggggcagaaatcgcatataaaatgcgaaaagaaatgaattcaatgttcggagatctgcacaggatctctctccgtgtccgttgaactttctttacgccctcctcgtaacataaaaattcagatcccgccaactctgaagacctctattctctttccctcccctttccactttcccgagaaaaataaacttttccgtcaattttctctccacggtttccttcttcctcacaatggctccgaacttcgacaatcgaagattcgttctcgctcttcgcattttccttctcctctccttattcttcaacctctcaccgaccttcgctcaggattctctcgtgcagaacgcgaaggaagattccggcaaatctgtggatc

SEQ ID NO: 14878 - DNA, 467 bp, Glycine max
  Clone ID: jC-gmle01810082f07d1
aacgaattatgtaaaggggatgatacttttaccttccggaagtaatgataaatagcagtgtctgtctacgtgctaatgtgtggaggagacgagaatgtaacatattttacaaaaaaaaatgggattcaaaatctcatgttccagttagtatcgagctttcctagggaacaagtacaacaaaatctacaataaagacaattatgtagggggggaaaaagcaggatagaaaggccacaagcctttacgaatcagattactctgcacttgtattcatcatagaggcgggtagaaatatgaagatacagaaaatccgaggaagagcaagccaccaacagtggctactgagcgttgggaaatcttagatgccagcatgcttcctcccactacagccagagaggtacagatggtgtgtcctatagtggccccaactgctactccaattgcatttttgtgggttgccagtgcaa

SEQ ID NO: 14879 - DNA, 548 bp, Glycine max
  Clone ID: jC-gmle01810082f08a1
aaagaatgaacaaatggctgaggcttcagcacaagcttgtgtcagtattccttccaatccctggagttctctgcaaaggggtttcagtgcataataactccctgtaatgtgcactagtaaagaccaaagtatgattattgttacattatgttacatggttgtacttgtatatacatatcttgtcccacctttgtaaatacaattgggacactactaggattgggaagaagggtctttacatttatagtttggcaaatagatattgcaactacctttgtataattctatttctgaagaagcaattacaatttacaagggatggtgccatttacggcataaggattaaggagggataaagggaccaattgctttggaatatccactcattacaatgcatgtatgacaacacatagtaatatgatgtgtgtttttattcagtgggcaactggcagatcgggttttccctggtcacttttgtataattattccggaagaattatgatgccaaaattattgttaataattatgacaacttgatttatttttgt

SEQ ID NO: 14880 - DNA, 527 bp, Glycine max
  unsure at all n locations
  Clone ID: jC-gmle01810082f08d1
acaaaaataaatacaagttgtcattaatattaaacaataattttggcatcataaattcttccggaataattatacaaaagtgaccagggaaaacccgatctgccagttgcccactgaataaaaacacacatcatattactatgtgttgtcatacatgcattgtaatgagtggatattccaaagcaattggtccctttatccctccttaatccttatgccgtaaatggcaccatcccttgtaaattgtaattgcttcttcagaaatagaattatacaaaggtagttgcaatatctatttgccaaactataaatgtaaagacccttcttcccaatcctagtagtgtcccaattgtatttacaaaggtgggacaagatatgtatatacaagtacaaccatgtaacataatgtaacaataatcatactttggtctttactagtgcacattacanggagtttattatgcactgaaacccctntgcagagaactccaaggattggaaggaatactgacacaagcttgtgctga

SEQ ID NO: 14881 - DNA, 507 bp, Glycine max
  Clone ID: jC-gmle01810082f09a1
gctcaggaccagcagaactggtttttaatggaaaggctactgctgttaagggtcttgaacttatcttcgatagtgggagctcttacacatacttcaactcacaagcctatcaagctgttgttgatttagtaagatagaaactagagagaggctcaattttcatcatcaatctcgttgtcttatatggcctaagatatttagtcagccatcttaagttaataattccttgatccataattcaggtaactaaagatttaaagggaaaacagttgaaaagagcaactgatgacccatcacttccaatttgttggaagggtgcaaagtctttcgaatcgttaagtgatgtcaagaaatatttcaagcccctagcattgagcttcaaaaaaatcatgaatttgcagatgcacctaccaccagaatcttaccttattatcactgtgagcaccttttaagactgaacaactctgcctctagttaaggaaacaaatgaaattgtctaacatgctg

SEQ ID NO: 14882 - DNA, 442 bp, Glycine max
  Clone ID: jC-gmle01810082f09d1
gcgaacaaactgtcatgactgattaatgttattttacattttacaacttgcagtatgcaaatcaaaacttgtagcatcatgctgttggctgctgtgactgtcgtacacggggtttctgaagttggtatcaattcctaaaagtacagtcatgaaattatgtacctaatccagggtcttttaacttaatatgcactattatttcaggtacattatactttgtaacttcacaaaatactggcaatcttctctcaatcatccttgtgctggtgcatggaagcagtgaaggccaatcagttagtttaggcgaataactacttgctactgatgggaattgaggcccctcagcttcatgattttttctcaagcaggatcagtaactgtagcttggattcgttggggaagttatcatttacaaattcacaaaatgtagcttatgaagcat

SEQ ID NO: 14883 - DNA, 556 bp, Glycine max
  Clone ID: jC-gmle01810082f10a1
gttatttcactgcctaatgggaaagtttttaaggtgaaagaggagagtttggtgccagctaatcctgatattcttgatggggtggatgacctcatgcaactaagttatttaaacgaaccatcagttttattcaacctgcaatatagatacaatcataatatgatctatacgaaagctgggcctgttttggttgctgtaaatccctttaagaaagttcctctgtatggcaatgactacattgaagcctacaagtgtaaatcaattgaaagccctcatgtatatgcaattacggacacagccatccgagaaatgatacgggatgaagtgaatcagtctataattataagtggtgagagtggagcagggaagactgagacggcaaaaatagcaatgcagtacttggctgcccttggtggtggaagtggaatagagaatgagatattaaagactaatccaatactagaagcctttggtaatggaaaaacattaagaaatgacaactcaaggtcgttttggaagctcattgagattcacttcagtgaaactggaaaaatat

SEQ ID NO: 14884 - DNA, 478 bp, Glycine max
  unsure at all n locations
  Clone ID: jC-gmle01810082f10d1
caatcgatccatcttcactcccaagtttatgtaaaatgacctttgtttcacgtagtcttgcaccataatcctttttccaagcttcaaacatttgttttaaccttctaagctctctatctgggttcaaacttgcttcaacttgaccagattttacctctaccaagaatttagaatcatcaccaaacacttgactcctttgctcaaattcttcagccaaccgacttataacactcaaaccagcactcattgattttgccccattgctttcttggcgccggtgattggttcctacatcccagctgaaatccctgtcatcacttgcattaacagaagcatctgaatttctttcagaatcatccatagcaaggcttcttctttgcaatagagaggctagattgtagggacctcatntnngttctgccatacttcttcaatggatttcatctttaattcatattcagaccatctgttctatact

SEQ ID NO: 14885 - DNA, 195 bp, Glycine max
  Clone ID: jC-gmle01810082f11a1
ccaccacctgctcaacgcggagctctatttttccgccttcaagacaaagttcctcagaaggtatcttactcatgaggaccactatcacccatttcgtatattcaagattcaacttgcttcgagccaagttataccataaattggacccctacgtcgatcacggaggcaccataatctccctttctcactacgttt

SEQ ID NO: 14886 - DNA, 152 bp, Glycine max
  Clone ID: jC-gmle01810082f12a1
gtaaataaaaatgaggggtcgttcataattataacatagccgaatgcatggttgaagtggttgtttgttgctcttggaccctccatgttaaatggatggatactcttgtcccatcttatcaactggtagggcatatgccccaagccatgata

SEQ ID NO: 14887 - DNA, 283 bp, Glycine max
  Clone ID: jC-gmle01810082f12d1
gcctttttatttttctctctattttcaatttttctaccctttaaacatcaataaggggggttgtttttaaaaaaaaattcatctcataacacaagcgatttactttgagtgatgccaaaggatcatgttttcccatgacaataagccatatccctaccagttgataagattggcccacgcatatccatccatataacatggacgatccaagaacaacaatcaagaaactcaaccatgcattcggcttaacctatgtttcaaacaacccctcatttttatttac

SEQ ID NO: 14888 - DNA, 474 bp, Glycine max
  Clone ID: jC-gmle01810082g01a1
aaataggtgttttttttagttcgttgttttgctcttcgtgttgttgaagtgcagaggccatggatccagatcagggcacttcaaaagcccggaagcccaagttcaaacccaggaatctcaaagcagtccgagctcccaaaaccgaagcggatgataagcgaaacgaagatagcgaagtgcctcgagctctctcgcgtcgacgacatgaaaatcctgcaaaacgcgagcctaaagtcgaaagaaaatctagcgtggaagttgcatttagtcttggaagttcatcatcacattccctcaggacatatggcacaagcaaatctatagatagtggcacaagcagtggttcaccatctaaatattttgccaatgaacaaattcgttcaattgctactgaggatcaaaatgatgcttctaatgcatctgccaggaaaatcaaagagagtacaggaaccatgggattatgaaaactcttac

SEQ ID NO: 14889 - DNA, 444 bp, Glycine max
  Clone ID: jC-gmle01810082g01d1
agttcaatcattcacttgatatttcattaatatcaaatgctgggtctagtatccaattggcacttgccaattgtccgtgtctttttagtcacatatattcacataagccaacaaggtactgtactatccctgtatgtggtgcattagtcatatttgtctagagtgttttacagttcaattgaatcaagatcgggaaccacaacaacccttttgctaatctcgccaagattgcaacactgtttctgtgcagtgttcacagccataacatcttgaacacatcgacaatttgaacctggagacacgtcgagcagagtttctcctaattttagtttgattgctccactcttgtacaccagcattttgcccatatatcccctcggcaactcttccaaggcattctttgactttgtggcctctcccgatactgtggatgaaccaattttc

SEQ ID NO: 14890 - DNA, 332 bp, Glycine max
  Clone ID: jC-gmle01810082g02a1
gttttgctgattccgcgcatattttagtgtttgcctcaaaggattgaccgtgagagcttcctccttgcacttcagatggcagtggaagccgataatccttattttcgattgggttacaacagcttgggtgcttttgcaactatcaaccatcttcacttccaggcttattatttggctctgcccttcccaattgagaaggcccccactaagagaattgcaagtgtaaatggtggggtgaagatatctgaactgttgaagtatccggttagaggctttgtctttgagggcggcgaaatgctggaagatctatcaaacgttgtttcagatgcatg

SEQ ID NO: 14891 - DNA, 548 bp, Glycine max
  unsure at all n locations
  Clone ID: jC-gmle01810082g02d1
acagcaagtgaaaactttcatccttaagaactacaactacaaggacaaacagttacctgaatttattatttctcgcagcatgaaagccacgatagacagtcaagtcaagcattatgatacatcagaccccaaaataccaacaacactactcagctgagcagttattatatcgtactttcacatgaaagtgtcataaaggcagataaaagcatatacattcaacacacacgaccataaggctcaagcacaaggcaatagtatgacttaaacggtgacacatttcagcaattattcttaaaacactgcagattttctgaatttgttcaaaatacaagagccttgttactgtagaaccacacattcttgtgaaccagccaccaccaccacagtaggggtgttcgcttgtgctgactgcatcaacttcttttttgacactttgaacattgacatcctccaattcaccacagccaatggcttcaaaaacaagatcattgacttcttgaaacctctcttgagaaagggacacctcagcaagaagcctncaagca

SEQ ID NO: 14892 - DNA, 114 bp, Glycine max
  Clone ID: jC-gmle01810082g03a1
cctggttctttgtctctagttttttctataataaaacactgctactactgttcaggcgagagactagagctacaaaacagctgttcttacactcgctaggacagattcattaaa

SEQ ID NO: 14893 - DNA, 357 bp, Glycine max
  unsure at all n locations
  Clone ID: jC-gmle01810082g03d1
acnnnatttttttttttttttgaaaaccatttttttgacgcataggtctatgacgatcagaggggacttatactgactagccagtgagacaacgatcacaaccacattgaaacagggatggcaacagtggacacttgataagaggagtgtctaaagacacctgatgatttggttgacagtgggggaataaatcgacaacttaaacccaagcttgccactaaacaacacctaactgaggtccaaactgccaccccccctggcggcataatcaaggagcaaaagttcttccatgcccaatacaaacgtggcagaagtgcttgcactaagaaagctgagcccagacctggaaacatcatc

SEQ ID NO: 14894 - DNA, 478 bp, Glycine max
  unsure at all n locations
  Clone ID: jC-gmle01810082g04a1
tccaaaaccatccaactctcatgttcgaagaaaacatacacaatctcttcaaacgctaattttcttttcctttcatttaatttcctcaatggcggcttccgtcgaccagcgtccgtaccccggcctccacaatggcgtcgttcggcccctcaaaccaggcccggatatcccgcgtcccaagaagctaccccagccgccgccgccactctcggattcctcaagcgacgaagaagaagacaccaccttgaacttgaaggacctgattcgcaagggaacaacggaagttgaatcctccattttcgacccgcgcgacgatggaacctctgaccactggatccaacggaactcttcccttgtccgtttaacgggaaagcacccgtttactcggagccacccctccctcgcctcatgcaccacggcttcatcaccccggtccccctcactacgtncgaaccacgggccagtcccccgggcccgt

SEQ ID NO: 14895 - DNA, 417 bp, Glycine max
  Clone ID: jC-gmle01810082g04d1
aatagaatccattatttatatataacaataaactactatatacacatacaatgtattctagtttagtcccctaaaacacgagcaagttattctgggtgtcgtagcccaacttctccaaattcggctggactgcaaattgaatcataggtggtggtccacaagtcaatgccaaggtatcaggagatgcatttggaatatgctccgtcaggatactttcagtgatgaatcccacactgtattcccacccttctcttatgctttcttgtatcacgtaccacaccttcaacctatcatacttcttagcccactcatcaagctcttccttcagcaatatatcatcctcggttcggttcgcgtaaaccacatgcatcttcgggcagtcctctggatcctttagaatggcttgaaccacttggt

SEQ ID NO: 14896 - DNA, 475 bp, Glycine max
  Clone ID: jC-gmle01810082g05a1
taggagtgtgctgttttaagtcctatagcagcgatgggaatcgatcgtaaggctgggggtaagagcaaaaagaccaaaagaacagcaccaaaatccaatgacatctacctcaaattacttgtcaagctttatcggttccttgttcgaaggactggcagcaatttcaatgctgttatactcaagcgcttgttcatgagcaaggttaacaagcctccaatttctttgtcaaggttaattaagtatacaaaggggaaggaggataaaattgctgtaatagtggggactgtaactgatgatatcagagtatatgaagttccagcattgaaaattacagcactcaagtttactgagagagcacgtgcaagaatagaaaaggcttggtggtgaatgcttgacatttgatgagcttgcccttagggctcctttgggacagaatacggtccttcttagaggccccaagaatgctcgggaagct

SEQ ID NO: 14897 - DNA, 408 bp, Glycine max
  Clone ID: jC-gmle01810082g05d1
ggaatcaaaaaatcaaatgctagttttttgtaatgcacgtcaatgtaaaacatgggagccacgatatgttatcagaacagaaatatcataaaaactgttaccgacgcctagagcaaaaagtttaatttcagaagtgaacaattgtaaaaaaaaaaaaatagaacaaagttatattatatttcttaaactctaaatcctctgctgttcctccttcctctagccctctcgaactttcttccctttgctcgtacatagggcttggtatggctgtgtggcacaccaggagcaggaccaaagtgtttcacagcttcccgagcattcttggggcctctaagaaggaccgtattctgtcccaaaggagccctaagggcaagctcatcaaatgtcaagcattcaccaccagccttt

SEQ ID NO: 14898 - DNA, 277 bp, Glycine max
  Clone ID: jC-gmle01810082g06a1
caagaaaaagaggcgcttgatgattggtagggtttctgggaaggtggggtggttcaatgatcagaaggggtttggattcataagccctgacgatggcagcgacgatctcttcgttcaccaatctcagatcaaatctgacggtttccgaagcctcgcccgaagagagtcccgttgagtttcgccatggaatctgaacttaccggacccccgaaggctgttgatgtcactggccccgacggcgccagcgtccagggaaccagacaaggcggtgatggtg

SEQ ID NO: 14899 - DNA, 443 bp, Glycine max
  unsure at all n locations
  Clone ID: jC-gmle01810082g06d1
gatagcaattatactattcattatagcaaaatgtaagttgaaacggattttagtttgcagattgtaacgataacacagaaacccttcatttaaataaccaaaaaagaaaaatcccacacatctactcataagaacccatagtttggacagaaaccattaaaatccctaagacatattaaagtaaaaacttaaaacaatccgcaaaacataaacaaccctaacagtaaattcaacgagcacttgatgggcaatctctggcaaaatgcccagactctccacagctgtagcagctttctccgccgncgncgccgccttcaccaccaacgtacctcccgccaccgccgccttcatatntgccaccaccaccaccttctccgtacctgtccccaccaccgccttcactgtaatccctagccagatgtcccgattaccacagttgtagc

SEQ ID NO: 14900 - DNA, 362 bp, Glycine max
  Clone ID: jC-gmle01810082g07a1
caggtcttggtttttttttccttttcaccgttggtacatttacttcggcgagcgaatcttgggaagcttgctcggtgacccgaactttgccttaccgttttggaattgggatgctgtagaagggatgcaaatgccaccatatttcgcaaaccctaactcgtcgctctatcacaaactccgaaaccccaagcacttgccaccgcaagtggttgacctgaactatgatccatttgactttaatgatgatacaccttctcatcaacaagtttcgtataatctagccttcatgtacaagcaaatggtgctagcaagtaccaaagaattgttcatgggaagcccttttcgactcggcgataacccta

SEQ ID NO: 14901 - DNA, 496 bp, Glycine max
  unsure at all n locations
  Clone ID: jC-gmle01810082g07d1
acatcaaactcaattttttattatgaaaattagttctagaaaatcaaattgatttatttgattttctttacatgcactagtgttgaaagacatgcaccacaacaaatttatatctacttctaggagtacttccccacatccaaaatttcaacttccttcacattctttcccttccccaattgctgtaaaatatatagcaaattcgacatctcatatttcagttagttggacaaaatccagccacagagaatacgagctcgacttgctacactaaaaaaaggaaaaaaaaaaaaactaccttttaaaagcataaacaacaaaacttgtaaaaagtgtaaaattttcacacccacaaaataatcctagtattttggaataaactcaattntgatgcctcctattatggcatccccttttcccaccttaggtaccaaagaaaccagcacctcatcgtcttcttcagcttctacactctccagcactttcgatatcccta

SEQ ID NO: 14902 - DNA, 360 bp, Glycine max
  Clone ID: jC-gmle01810082g08a1
atttggacaagggcatggactgctgaataaaacagacacggtgatcttcttaacaagtatctttacttgagtggtcgagttgacatgaaacaaattgaaaagacaattcagtaccttattgggtctggaatggatcctcgaaccgagaacagcccctaccttggtttcatttacacttcatttcaagagagggcaaccttcatatcccacggaaacacagccaggcttgctaaggagcacggcgatataaagttggcccagatctgcggcatgattgcctcagatgagaaacgccatgagactgcatacacgaagatagtggaaaagctatttgaggtcgatcctgacggtacagttatg

SEQ ID NO: 14903 - DNA, 409 bp, Glycine max
  Clone ID: jC-gmle01810082g08d1
ggaaccaaccacagaagaactaaattttctttatcatcaaaattgccagagaaaaaaaaacgtttacttatacttcgacagacatcactaccacagagaaaagcgaaacaaaaaaaaaaaaatcccctttttaatactacagctgcccctaactgcttaacttgcgaaccatgcaagaacaactgcttcaccttacagggacatataacaaagaccaaaaaggggggaaaaataaaagataaaaatgacaaactgaattttcaactattcaacatttctcagaacggtattgccggaagatttcaccatgctcctcccttggggcatttagagtagtacttccctgtcatgaatccaactgaatttaaagtgttgacgactccttgactcttgcttgagctctctcctc

SEQ ID NO: 14904 - DNA, 320 bp, Glycine max
  unsure at all n locations
  Clone ID: jC-gmle01810082g09a1
atgccgtcgtgtgtctctgtaactacgtangacgttgtangcacgcgaccccaagcgcggaattcttctcgagcttgaacttgaactatcgagtcttattgtttttctctggtcaggatcaacatggatgtggggttactagcttagctacctccgtagactttacttgtgctcatattaagcacacctttgcctcaggtgcttttgcagaagagtggcactaatgtgaaaacagctatttttctgttccacaagtttgaacttggaccaggattcggagccactaaatatgattatgacacttattatccaagaggtca

SEQ ID NO: 14905 - DNA, 537 bp, Glycine max
  Clone ID: jC-gmle01810082g10a1
gaagattttcaagaccactactggaaccccatttctcatccctacaactggtactggtgcttgggagagtgctctcacaaacacactgtctcctggggatcgaattgtatcgttcctgattggccaattcagcttgctttggattgatcagcagcaacgcctgaagttcaatgttgatgttgttgagagtgaatggggccatggtgctaagcttgatgttctggaatcaaagattgcttcagatacttcacacactataaaggcaatttgcattgttcacaatgagactgcaactggggtcaccaatgacttggccaaagtgagacaaattcttgattcctaccagcatccagcccttcttattgttgatggagtgtcttccatttgtgctcttgatttccgcatggatgaatggggagttgatgtggcaataactggctcccagaaggccctttcccttcccactgggataggtatttgtgggtgcaggccctaaagctattgaggcctcaaaacatgctaaatcacttagagttt

SEQ ID NO: 14906 - DNA, 344 bp, Glycine max
  Clone ID: jC-gmle01810082g10d1
gaaagtagaaagtacgttcatcttcaaaggagtgtaaaagagggtaatatatattttacagaatttctgaaagagcagaaaaaggaagtaaagacaagaatgatttgtgactcaaatcctggaagggatcataggaatagtgttctgtaagtatgcactggcagcagcaactccacttccaagctttacaggataacccacatctttgagtatcatctctacaccagctagacatcccaacagttgcaactcattcaagtggccaagatgtccaattctgaaaaccttcccagcaactttgttcagtccaagacctaagctcaaattgtatctcttccatgccc

SEQ ID NO: 14907 - DNA, 586 bp, Glycine max
  unsure at all n locations
  Clone ID: jC-gmle01810082g11a1
aaaagaagaaaaaaatagacatgaactatcgtgacaccgtgtactaccattggttgaggaatcgtgtttgagctctctgttctgctaccgtgctgtgtggtgcttcgattacagcttatccatggacacaacttgcatacgatttgctttaggagccatcctcctccacctactgttgttgtccctccctaacctttccatagcagagtttatttatagtccccatgagatcttcagcatcaactgtggctctaacagtagcttgtccacgcgcgatggtcgcaattggactgcagacatcaaattcctctcagaaaacaaggactcagttgctgctcctgcactcacaccatctaccctggaaggtccttacaccgatgctcgtttctctcactcccaattcacctactctttccctgtctccacaggccctaagtttcttcgcctcttcttctactcaacttcctaccaaaacttccatcgctccaaagcctatttctcagtcaaagcaggcccatacaccctncttcaggatttcaacgcttccctccatgctgatgctggtaacgagcctggcgactacttg

SEQ ID NO: 14908 - DNA, 462 bp, Glycine max
  Clone ID: jC-gmle01810082g11d1
aattattgaatatgatattgtatagaattggatgattataaagaattcttggtcaagattacttattttccagataaatttcgaattaattaaaatcttttttactatttaactagagggttaaaaaaataatactgaaagagaaaacaaactccaacacaaaagattccatcctgcaacgatagatactcatgctaacttgaatactactgcttcaacctcatcgtcgctttggattcttagtctcagagaaaacatcatccggtatcaacacaaaagattccatcctgccatagctacgatctccatcacttgtcgtgctcaatccagtgttctcactacaatctgaaagagttacagtactatggctactgctatcttcataattaacagcactatcctgaagctgcaaaaccaactccagcatcccaacgatgtccttcatggagggcctttgagtcc

SEQ ID NO: 14909 - DNA, 522 bp, Glycine max
  Clone ID: jC-gmle01810082h01a1
acctctttcctttcactttgttgtttgtttgtgttatcttgacttttgaaacgtgagactgagaatggaacgtggggttcttgatagtatcattaataggctgcttgaagtcagaggcagaccagggaagcaggtgcaactttctgaggctgagatcaagcagctttgtcttgtctccagggatatcttcttgaggcagcccaacctcttggaactcgaggcaccaattaagatctgtggagatgtccatggtcaatattccgaccttctgcgactttttgagtatggtggattgcctcctcgttctaattacttgtttctaggggactatgttgatcgtgggaagcaaagtttggagacaatatgtctccttctggcttataaaataaaatatcccaacaactttttccttctgaggggcaaccatgaatgtgcttttataaaccgcatctacggatttatgatgagtgtaaccaaggtacaatgtgaggctttggaaagtgtcacggaatgtttcaactg

SEQ ID NO: 14910 - DNA, 255 bp, Glycine max
  Clone ID: jC-gmle01810082h01d1
aacaaccacaaaaacttttctttcccttcattaccattaatgtctaacaaaacaccccaaaaaaaaccaggagcgggggcgggcctgatcatataccaaaaaacaaaaaaaaaccccccccaaaaaaaaaaacaaccaaaaaaaaaaaaaaaaacccccccccccccacccctttcaatgcaaacaacttaaaaaaaagccccacccccacaaaaaaaaaaaaaaactgctcaccccccaaaaaaaaaagaaaaa

SEQ ID NO: 14911 - DNA, 422 bp, Glycine max
  unsure at all n locations
  Clone ID: jC-gmle01810082h02a1
caacacttcttgtatcagtagagtcagtgatgctaatttagtgaacgatagccgtcaaaggaatgaagagagaataataatgcatgtggaaagggattcatgttctcatgtcccagaaaagttgtcagaatgcttcattgagaattctagttcatcattgaccaaagagagggaacctgttgtttctggcaagaaatatattgctgttaaggatggccttattgagagtacttccaagatttcactaaaagtatgtcccaagtcagaagcagatactgatgtctgtgatgctaacaatgaagatcctaaatgtgcagttcaagatggacagtgtgagaaagctgaagagctggttaaatcacctggcaagcaggaacctcaatctgaagacgagagtgatgaatcnagatgttgtggacatg

SEQ ID NO: 14912 - DNA, 580 bp, Glycine max
  Clone ID: jC-gmle01810082h02d1
gccataaaaattttcacccgcaagttccttgtaacatctggagttatgccggcttcaattctctctatatatacaaacagccgttaactatgcattctgaacaaaaaaaaactaacataaaaacatgtatgtaacaaaggattaaaaaaaaaaacttattgactcttgttgaggacaatggctcctttctgtagggagagaggctggaagattatatctatctatcatacaggctgggccatcaggaacaagataagataatttacatgattggaagcaacacataagcagccagcagatttattttctcccaaaaaggaaaaacgggttgttcacacgctgcccatcaggcaaaagctctgcagcgtttgtgtgttccttgtttggagatggaaaggacagagagagggaaagagatgcagcgacaccttcatcctcctgcctgtctcccaagttatcagggtggttattttgcctgtctactgccccaactaagaaaggcagcatacccttaggcgcagctggtggtggttttgtttttccccctaaggcagctctaaattgggaatcccatcttgaa

SEQ ID NO: 14913 - DNA, 333 bp, Glycine max
  Clone ID: jC-gmle01810082h03a1
cactttgtctctgttctgtgtgttttagaaatggcgatggcaatggcgcttcgcaggctttcatcttcaattgacaagcctctgcgccctctcttcaatgccggttccctctactacaagtcgtctttgcctgatgaagctgtttacgacaaggagcgacccggagttacatggccgaagcagttgaatgctccacttgaggtcgtggatcctgagattgctgatattattgagcttgagaaagctaggcaatggaaggggctagaattgataccgtcagagaatttcacctctgtgtctgagatgcaagcggttggatcggttatgaccaac

SEQ ID NO: 14914 - DNA, 506 bp, Glycine max
  Clone ID: jC-gmle01810082h03d1
gagccggatcgtttaccatcactataggcgttccggaataatatgcacgcgaccgcagctcgtaatttgcggccggcctttttttttttttttaatagaattcttattttatatataacaataaactactatatacacatacaatgtattctagtttagtcccctaaaacacgagcaagttattctgggtgtcggagcccaacttctccaaattcggctggactgcaaattgaatcatacgtgggggtccacaccctgatgccaggggttatttatagaatgaaagccggacgcccaattcctattcccagctcaggactacagattacccaacttggtcattgttaaggatttggcgacagcttttatccaagttcttggtaatgagaaggccagccaggaagtattcaacatctcgggagagaagtatgtcacgtttgacggattaacaagagcattgtgctatggctggtgggttcccagagtcagagatcatttactaccac

SEQ ID NO: 14915 - DNA, 510 bp, Glycine max
  unsure at all n locations
  Clone ID: jC-gmle01810082h04a1
tccaaaaccatccaactttcatgtttgaagaaaacatacacaatctgttcaaacggtaattttcttttcctttcatttaatttcctcaatggcggcttccgtcgaccagcgtccgtaccccggcctccacaatggcgtcgttcggcccctcaaaccaggcccggatatcccgcgtcccaagaagctaccccagccgccgccgccactctcggattcctcaagcgacgaagaagaagacaccaccttgaacttgaaggacctgattcgcaagggaacaacggaagttgaatcctccattttcgacccgcgcgacgatggaacctctgaccactggatccaacggaactcttcccttgtccgtttaacgggaaagcacccgtttaactcggagccacccctccctcgcctcatgcaccacggnttcatcaccccgggccccctgcactacgtacgcaaccacgggccaagccccccggcccgctgggaagactggaccgtggaagtcacggg

SEQ ID NO: 14916 - DNA, 410 bp, Glycine max
  Clone ID: jC-gmle01810082h04d1
aatagaattctttttttatatataacaataaactactatatgggcatacaatgtattctagtttagtcccctaaaacacgagcaagttattctgggtgtcggagcccaacttctccaaattcggctggactgcaaattgaatcataggtggtggtccacaagtcaatgccaaggtatcaggagactgcatttggaatatgctccgtcaggatactttcagtgatgaatcccacactgtattcccacccttctcttatgctttcttgtatcacgtaccacaccttcaacctatcatacttcttagcccactcatcaagctcttccttcagcaatatatcatcctcggttcggttcgcgtaaaccacatgcatctcggtgcaggcctctggatcctttataatggcttgaac

SEQ ID NO: 14917 - DNA, 377 bp, Glycine max
  Clone ID: jC-gmle01810082h05a1
caaccttgtaacaatgttttcctttttacttcctcttttcgcatcaggaattggaagtctgtttttgttggtgagactaataaactcagagtttcaagtgttcctggtgctcatgttgctttcaatagaaagactgtagaatgtaaggaattacgaattgggaagctgccaattcctgtgccatccaatgtcacagtcaaattggaaggacaggatctacacgcgaaaggtccttatggtgaccttgcattaacttatactcttgaagtgtaggttgagagggaaaaatccagggactctaacgcataaataggcagttcttaccagaatggccaatcatctgcatcggctttttaggacacttactgacaacctgt

SEQ ID NO: 14918 - DNA, 419 bp, Glycine max
  Clone ID: jC-gmle01810082h05d1
ttttctctatttttaactatcttatctttttttaatgagtgacttttaaatcaggggaggggtaactcaacaaacctcgacgatcccccatttccaaatttatctacaaagaccacttatgcgtccttaataaaatttataacctccactaaccctgcacccactcatcacttattcttcttctcccgcaccaccatcacctgtaccgccacctaactgagacaattcaacattcaccatacgcccccactcaccactaagatctcctcatcgacttccaccgttgtctgcaaaactgtcatcgttaagccccaaaccgaaacccaaggtctcaacattgctgaccatgacacacagcttatacggaaaacgccgatgttctaccccaacaatatccctaagggttctttggcccataa

SEQ ID NO: 14919 - DNA, 167 bp, Glycine max
  Clone ID: jC-gmle01810082h06a1
gagcaatataatacgttagtaaattttgtaaatacgggtaccgtactggaagtgggcgacggtattgctcgtatttatggtcttgatgaagtaatggcgggtgaattagtggaatttgaagagggtactataggcattgtttttatatttggaatccaaaaatgttg

SEQ ID NO: 14920 - DNA, 577 bp, Glycine max
  Clone ID: jC-gmle01810082h08a1
ggatattctcggccaaagttcaatattgctggtgccatggaatggttgtgtttccgcttggatatgttgtcttctatcacatttgccttttccttaatattcttaatatctattccacagggattcatagatccaggccttgctggtttagctgttacatatggacttaatttgaacatggtacaagcttggatgatatggaatctctgcaatatggagaacaaaattatatcagtagaaagaatacttcagtatacttgtattccttgtgagccttcccttgttgtagacgataatcggccagatccttcttggccttcatatggcgaggttgatatacaagatttgaaggttcgttatgctccacatctcccacttgtcttgcgcggtcttacatgcaaatttcgtggaggactgaaaactggcattgttgggagaacaggaagtggtaaatccactctcatacaaacacttttccgaattgttgagcctactgctggccaagttatgattgacaacatcaatatctcttcaattggacttcatgatttgaggtctagactaagcattattcctc

SEQ ID NO: 14921 - DNA, 476 bp, Glycine max
  Clone ID: jC-gmle01810082h08d1
accatagaatacatcttatgagttctcacaatgtgagacaattgatatgacttctttcgaaacttattaaatcgagttgactaattagaggacattatactgcctttggtctacacatactaagaatgcatcaaaaccaactcgattttctatttgacttttgtataaatcttaccacaataatttcatccttcacccttgtaaagagaatagagtatttcacagctaaaagccctattttataaaatccatttttctataaataaaacaagaaaatccatgtaatccaccagattttcgtcattgtcaacaaacttctgtttctgtatgtttcaatcaatgatcatcagatttctcaaaactggagttggacctcatggtatactcagcaacaagttgagcaaaagatgatgacttattctccagcagccttgttggggtgtcatactcctcaataagtccttgactgagaagca

SEQ ID NO: 14922 - DNA, 400 bp, Glycine max
  Clone ID: jC-gmle01810082h09a1
ggttgacgagcccgctatccgagtgtgttttcccctccgaaaggccgactgggacggggacctttagtgggccgttgcctctttcaggctttctaccgccgtcgccgagttcaagacccagatccactcccacttttgctactctgacttcaacgacatcttcgcccacatcaaggccctcgacaccgacgtcatttcgatcgaggcctccaaggccgacatgaagttgatccagaccttcaagaacgagggatacaactctggtatcggacccggtctttacgacattcactctccccgagttccctccgaggaggagatgaaggagaaggtcaagaccatgttggagattcttgtcgccaacatctttttcatcaactccgactgtggtctcaagacc

SEQ ID NO: 14923 - DNA, 265 bp, Glycine max
  Clone ID: jC-gmle01810082h09d1
cgttgtataacgattgtatgcgacccgaaagtggtaaggaaaacatgatacaagtgggctcagagcccgccgacagagcggtaatcgtcgcggttcgtcataagaggtcgttttggtgttggcaatgccgttgaacgcattccggatgtaatatgaggtgtttaagcgtaagtggcacgggcccacttggcggtaccgaccaggttgttgagcgattgctcggtcttggcccaacctcggttcttgagaccacagtcggggttga

SEQ ID NO: 14924 - DNA, 583 bp, Glycine max
  Clone ID: jC-gmle01810082h10a1
aacacaactttgcccccttgtaaatttttttattgtgatgtctaaaagcgaagactggaggcttttgggaggctggttcagcccatttgccctgagggtgcagattgcccttaacctcaagggtctagaatatgaggttgttgaagagaccttgaatcccaaaagtgacctgcttcttaagtccaaccctgtgcacaagaaaatcccagttttcttccatggagataaagtcatttgtgaatctgcaatcatagttgagtacattgatgaggcttggactaatgttccctccatccttccacaaaatgcttatgatcgtgctaatgctcgattttggtttgcctacattgatgagaagtggtttacgtccttgagaagtgttctagtggctgaagatgatgaggcaaagaagccacactttgagcaagcagaagaagggctcgagaggttggaagaagtgttcaacaagtacagtgaagggaaggcctatttcggaggagatagcattggattcattgacattgttttgggagcttcttgagtgcatgagagtcattaggagatgagtggaagaaattgcttg

SEQ ID NO: 14925 - DNA, 435 bp, Glycine max
  Clone ID: jC-gmle01810082h10d1
caagtcaattgatttataataactcaaaatttttcagctaggttacttaaactttcttaatattttacattttaaatttaaaataacttttaaataaataaagttgcaacaacatagcctgagataaaaacaacttggacaacaattttgaaaatactctcgcaattaatttgattccatttactttgcagctgcagctgctgcagcagtccattttagctgaagaatcttggcaaactcaacaagcttatcagtctctggaagaatgcccttcacagcaggatcagcagcaaacgtttcagcccattgggtcaaaccagggtgcttcttttcatcaagcaattttcttccactcatctcctctatgactctcatccaactcaagaagctcccaaaaccaatgtcaatgaatccaatgctatctcctccgaaata

SEQ ID NO: 14926 - DNA, 327 bp, Glycine max
  Clone ID: jC-gmle01810082h11a1
cttggctgtgtctatggatcgcgctttttttctgttgctgggtgtacccctcttgggggtctgctctgacctcttctcccttttcactcatcatccaccgccgtccccccaccaccaccaccaccaccactatcctcactccacgtaccaccaccaccacccaccgcaccaccattattcacccacccgaccaccaccataattatccgcctcaccatcatccccaaccactgacaatctattacccttccgagaaccccaccactactattctcatgggtgtccccgggaacacattacacatcaatccatgatctatctgctctt

SEQ ID NO: 14927 - DNA, 540 bp, Glycine max
  Clone ID: jC-gmle01810082h11d1
attacattcaaactctgcacaaactattgactgggttttgccttcaacaatcacttagttctttcaatacagaaagttcatactccagtatacatctggaaaccttacaacatgataatcctattatatctgtatatcaacctttacttcatagtggaatggcaggcccagttacataatttatgacagctcaaaatatgtctccaccaaaggcactaagaggtcaattctgacacaccattgacacgtatagaatttgtcatctttttggtaatcagatccttcaactcgatctctccaggaaaccttccctccttcagtttagagaaaaccagttcaccattgaagtaaacttcgaaagccccagagctctgtaagaatgactgcaaggcattcccaagaagccaagtacttgcaatggttccaaacctattagcacgcaagttgtaataccaaggaggagggggcacaaaaccaacattggaaaaatatgtttccctgcaacaacaacccctatacaccaatctgacaactgaacca

SEQ ID NO: 14928 - DNA, 402 bp, Glycine max
  Clone ID: jC-gmle01810082h12a1
aactcacaacattcatcgcccctttttatttttgtcacgaacttctactactcagaatattttctattgaaaaaaaaaaaaaaaaccatggatctcattcttcaataagctctcacattttgtgaccaaaataatacttaggaaaaaaagaaaaaacaatgtcatccactgctagcttgggttatgggggtccaacctgcttcaacaatgttgttcatcagacaatgaggaacagtttcatagccacaaaacagcataacagtgtgatgagagtggtgaagggttggagaggaagacatggttataattgcaacacatccaaaagggcggtaggagttgtgcagtgtagagggctaggggacttcataggtggagacttgataaagtttgatcttggacgtt

SEQ ID NO: 14929 - DNA, 451 bp, Glycine max
  Clone ID: jC-gmle01810082h12d1
gaaattgattttctggaatatcatgtttggtaggagatgggtgtccttcgacagaattaaaccttgacaatgtgtcactgatgactgtggcagatctaattatttacaaggaacttgatttttcctatatctctttgtcttcctttattgtctcagttgtctgcagctatttgaagcctttaaattggagaaaataaaatgaatatttgtacttgattgttgatgattggaaacaagagatgataagtagctatgtagcaccatcaagcttcctcactggttgttagtcccgcaatttcttttagtggtttccacataaactttctccagtttccacattcagcaatgaccctcacattaggcctaagtgttggcagcaaagctaggaactgcagttctgccttagagagaaccttggcttcaattatccacaccaccagtcctttggcat

SEQ ID NO: 14930 - DNA, 523 bp, Glycine max
  Clone ID: jC-gmle01810083a01a1
taatcctccatcatcgattctattttcttgctctttgttatttccttggggggggaacaaagcaaaacaattccatcgatgaatcgggcgtcgcagctttcctgataatgatcttggcgctgcgaatcgattgcatgggtttggagaatgtcggagctttgtagtggaccgtgacgacgtcgtgctccgattgctcgtaaaagctccgaaccaccgtctctggcggggagatacgtcaagacccgcgctgcagtcgccagggaggcagcggcggcggcggagaggccaataactcgtttggcggccaaaaaagaggagaagccccttacagtaatatccgatcacgctaagaaagacgccgccgccattggctgacgagagcggtggcttgagtgcaaacaagggcgttgcacaagaagatgacacccacgcagcttcttttccggagagggtttttgttggccgacgagtctttggtggtacgaccgagcactggtgctggtgccactaaggtggcttgttg

SEQ ID NO: 14931 - DNA, 479 bp, Glycine max
  Clone ID: jC-gmle01810083a01d1
atgataagttcatgtaatttttttattatataattaagcatcgtataaataaattaatattttatgaatgagtacatattaagcaaggaggactcacactacgaaaacaactgaagatgtcgaacaatgatgagaccacgtactccccctgcatgaccaactctattatgtacatcgaccagcttctggaaataaattaaagcaccttttgtctgtaaccatggcagttagggtacttgcagttgtcattattacagatagcgccacatctccacgtgaaagatatgttataatgttactagctgtgcctcctggactgcacccaattaatattaaacctgctgcaaaatgtggtgcaagatttaagagtgtgcttatgagaaatccagagtggcatcacctgaaatttgttaggaatttacacaaccacattggtgtctttctctgggtttacaacatgcacataaacttcttgcccc

SEQ ID NO: 14932 - DNA, 366 bp, Glycine max
  Clone ID: jC-gmle01810083a02a1
gtcagtttccttcctaatcgctgttcagctatcaccgtcgcgactcgcgaggagacacggggcatcttctggcaccccctcttccgattccggcgttccctcttctagttctggagtttactcgacgtccttcatcaaagtttccggggtctgttcgaggtgcgtttctgtttatgcgttcagactccatagcttacttttctgctttcatgggttttttagtttcacgaaagaacatagcagatttatttttgcttttatttcatgctctggtggttcttctcttatttattttttattttatgacttactgctttcttttaattgttgcccgtgacatactctgaaaaatatgaataagataac

SEQ ID NO: 14933 - DNA, 490 bp, Glycine max
  Clone ID: jC-gmle01810083a02d1
cttcttcttcttcttctcctcctcctcctccttcttgtattggccatcatctttatcttcattacttttaaattcattgtgatccacatgttggttttctgcactcaatttcttcttcatcatcagcttgccttggtcatcatctttacctttgttgctttttaacctattatccttcatcattttcttgcttggttttgaaaaaaccaattcttggattccatttaatgaagaatcatctttttttcttttcttcatcttgctttcttggttgtcatccaagaactgcacttctttatcatcagcaacattaatattcattacttcatcttttctcccctttttcttggctttctcatccatgtctgagaaaagaatgaaaacaacagattaatcaactttattaacattgcttaatgtgctactgtttagataaaagtataaaagaattgcatcaagaactcacattcggaaagttcttaattttggt

SEQ ID NO: 14934 - DNA, 338 bp, Glycine max
  Clone ID: jC-gmle01810083a03a1
gagcttgtccctaatggaagtgtttaatctcacttacatggaactgacaaggaaagatgatgcacttgattggaattcccggatgaagattgctcttggtgcagctcggggattggcctatctgcatgaagattcaaatccatgtgtcatacatcgagacttcaaggccagcaacatcttgttggagtacgattttacacccaaggtctcagattttggattggctagaacagcactggatgagagaaacaagcacatctccacacatgttatgggaacatttggctacttagctcctgaatatgcaatgactggccatcttctggtcaagagtgacg

SEQ ID NO: 14935 - DNA, 375 bp, Glycine max
  Clone ID: jC-gmle01810083a03d1
acccaaaaaccaacatgggcatgtagtttatacatttggcaaaagtagttgtagtttgggactttttagattattatcacaatattttctttcaagtgaatctaacatgcgattcagggaacaatgaattcggtttgcaaaacgcaagattatgaaaagcttaatgggatccatgttcactggagctacctttaaacaaactttttaacttttgccagaactgcctttttttcccaatagttagaggccctgaacgagaatacctcctgaatgactcaaattcctgacctgaagtactgagcaactctggtgctgataatcttaccttttcttcaccagattggtagccaaaaagagttttttgatactttgaaa

SEQ ID NO: 14936 - DNA, 522 bp, Glycine max
  Clone ID: jC-gmle01810083a04a1
catgaaacaagtagctggtaaattaaaattggaattagcacaattcgcagaattggaagcgtttgcccaattcgcttctgatctcgataaagctactcaaaatcaattagcaagaggtcaacgattgcgcgagttgcttaaacaatcccaatcagctcctcttaccgtggaagaacagataataactatttatactggaacgaatggttatcttgattcattagaaattggacaggtaaggaaatttcttgttgagttacgtgcttacttaaacacgaataaacctcaattcaaagaaatcatatcttctaccaagacatttactggggaagcagaagtccttttgaaggaagctattcaagaacagatggaactctttttactacaggaacaggtagaaaaaaaatgattaatcatttaataactttataatttcactttcaaattcttataataggatctttaatatctttttatttcatttgaaataatattaatatataaataaaatgaattcgaatg

SEQ ID NO: 14937 - DNA, 431 bp, Glycine max
  Clone ID: jC-gmle01810083a04d1
tctttttttttttttttttttttttttttttttttttttctattttcattcgaattcatgggatttatatattaatattatattcaaatgaaataaaaagattttaaaagatactaattataagaatttgaaagggaaattataaagttattaaaggattaatcaatttttttctacctgttcctgtagaaaaaagagttccatctgttcttgaatagcttccttcaaaaggacttttgcttccccagtaaatgtcttggtagaagatatgatttctttgaattgaggtttattcgggtttaagtaagcacgtaactcaacaagaaatttccttacctgtccaatttctaatgaatcaagataaccattcgttccagtataaatagttattatctgttcttccacggtaagaggagctgattgggattgtt

SEQ ID NO: 14938 - DNA, 350 bp, Glycine max
  Clone ID: jC-gmle01810083a05a1
ctctaccctccaacgtgctctctttcctctttcacttcatccaaatctttctcaggtgttggggcaaatcacacttttaattacaataacacacactcaacttgagaattttccccaaaaatcccaatagctcgcgccatggtttccccggaaaacagcaattggctgttcgattacccgttgatcgacgactacgttattcccggcggagactcctacttcgccgtctacgatttcaccttgtcctggcccccaccttccgtcaatgggagtgtggaaattgatgctttgcttggggattctgatggcctaaaaaatcctgctttgaagagaaggactaaatctgaatc

SEQ ID NO: 14939 - DNA, 204 bp, Glycine max
  Clone ID: jC-gmle01810083a05d1
aaaaccaaaaacccccccctttctttaaaaattactaaaaaccccaaacaaaaaaaccccccccactatacctatctcttaaacccctaaaaaaaaaaacaaccaaaaactttacgaaaaaaattcccccccttttccccaaaagggaaccccaaaaaatttcacaacccccatctccccccccggggggcccaaaaaccctcc

SEQ ID NO: 14940 - DNA, 489 bp, Glycine max
  unsure at all n locations
  Clone ID: jC-gmle01810083a06a1
aggagataagattgcagtagtgctttgtgcttacacctgcagtgaacaatggccggtgcaggagcatctctgctcaagtcttcacttgttcttgacaagtctgagtgggtgaagggacaaacccttcgccaaccttctgcatcagttgtgagatgcaaccccaccaccccatcaggcctcaccatcagagctggttcctatgctgatgagctcgttaagaccgcgaaaacagtggcttcaccagggaggggtattttggccatggatgagtccaatgctacctgtgggaagcgtttggcttcaattgggctagagaacactgaagctaaccgccaggcataccgtacccttctcgtgacagttccaggccttggtcagtacatctctggtgccattctcnttgaggaaacactctaccaatccacaactgatggcaggaagattgttgacctgctgcttgagcaaaacattgttcctggtattaaagtc

SEQ ID NO: 14941 - DNA, 372 bp, Glycine max
  Clone ID: jC-gmle01810083a06d1
gggggggcttaaaccattttggtatatattgaaacataatcaagtacccaacttatatcaaaaggtttattaagcttgaaaggggcatttaaccataaacaaaaataggctccaagactataaaaacattacattttaaacaaattagtcttccactttattggccgtaaacacctactgtaactggtggtgttgctgcctaacaaggatcatattcactgcaaacattttaataggagtatgtttttgacgaacaactcctttttggctttcttggaatcacccctacacatgtactttccaagcttagcgagtgattttggacttggcacggaatgcaagggcattttgggctgccttaacgttttttgg

SEQ ID NO: 14942 - DNA, 430 bp, Glycine max
  Clone ID: jC-gmle01810083a07a1
aaagaaggctgtactccatagaatcttatgatgtaaaggatatatgtaggctggggatttactatttttatattttttttttcgtattagaagaattccgagcagaattgtttgttctttttcattcttggccattcattagctgattgaggatagaagcttgagggtgccagagagagtttcttggatcagattccaagtcataagtcagtttcgcaaatgacccgtttgaagccagaattccaagcaacacgcaagccatgcaggatcgccaataattctgctgtcatattggtagtgataccgccacaactactaaaacccgtaagccatttaccattagagtcccgtagaatcccaccaatgccagacattctcggatttccctaggagctaccatcaacattaaccttaacaaaatctgctacag

SEQ ID NO: 14943 - DNA, 480 bp, Glycine max
  Clone ID: jC-gmle01810083a07d1
gttctaattaaatttgcttctaaggcggggtaaaagaagaggaaccatgttgtctaaaagggactttgacaacatctctaaaaccttttacaacccctacatcttcatccatggtaaacagatcctccgttttcctcatgatagcatgggccaacacaaccactaaggcgacacacataccaactattacattgtaggttacatttgtaagtacaagcaaaccaatggtgatcaacaacaaagagataaccaccaatcgctcattcatcttaaacctcaaaatcaccaaaggggtatttcgtaggaaatataagttcagccatgcaatcatcataacaactaatatgatcaaagaaatggggtgtcctactaagctaaggaaaagcacaagcagtatgataatcacgtagtttgctcaaaaagtttggcatttgcgatgattctttggaatgcccccaaaaaagaagatggaagtttgag

SEQ ID NO: 14944 - DNA, 487 bp, Glycine max
  Clone ID: jC-gmle01810083a08a1
atcaaccccatcatgatgagtgcttgagagttggaaagtggaaatgcaggagaggcggcatttctgatcaggcagagatactgtgaagctgcagacatgatcaagaagggaaagatgtgcgctctcttcatcaacgatcttgatgcaggagctggtcgtcttggtggaaccacacaatacactgtgaacaaccagatggtgaatgccactctcatgaacattgctgataaccccaccaatgtgcagcttccaggtatgtacaacaaggaagagaacccccgtgtttcccatcattgacaccggtaacgatttctcaacactctatgcacctctcattcgtgatgggcgtatggagaagttctactgtgcacccaacagggaagaccgcattggtgtttgcaccggaattttccgcactgatggttttcctgaacaggaccatgtcaagctttgtgacacctttcctggccaatccattgatttcttt

SEQ ID NO: 14945 - DNA, 571 bp, Glycine max
  Clone ID: jC-gmle01810083a09a1
agctgatgaagctcctgtcacaatcacaggagatattgtttttgtattggaagtgagggatcacccaaggttcagaagggaacaagatgacctctttattgatcaaaatctcagcttaactgaggcactctgtggctttcagtttgccgtcaaacatcttgatggtaggcaactattgatcaaatcaaatcctggggaagtcatcaagccaggtcaatataaagcattaaatgatgagggaatgccacaacacaataggccattcatgaagggtcgcctttacatccaatttaatgttgatttccccgactcagggtttctttcccctgaccaatgccagttattggaaaaggtgttgcctcagaagagcagcaagcacgtctcagatatggagctggatgattgtgaggagaccactttgcatgatgtcaactttaaggaggagatgagacgaaagcagcaacagcaacaccgcgaggcatacgacgaagatgatgatgagccatctggtcaccgagtgcaatgtgctcaaagtagtgcaatttatggtagtagaggttctataatttct

SEQ ID NO: 14946 - DNA, 531 bp, Glycine max
  unsure at all n locations
  Clone ID: jC-gmle01810083a09d1
accaaagcatttaattttcatatacttgaaatctgccaagaactgtaaactaaataacattaccagccaaaacctaaaggtaaatttatcacgcagttataactgcattatccaaacaaaagataaaccaagcagaaattatagaacctctactaccataaattgcactactgttgagcacattgcactcggtgaccagatggctcatcatcatcttcgtcgtatgcctcgcggtgttgctgttgctgctttcgtctcatctcctccttaaagttgacatcatgcaaagtggtctcctcacaatcatccagctccatatctgagacgtgcttgctgctcttctgaggcaacaccttttccaataactggcattggtcaggggaaagaaaccctgagtcggggaaatcaacattaaattggatgtaaaggcgacccttcatgaatggcctattgtgttgnggcattccctcatcatttaatgctttatattgacctggcttgatgacttccccaggatttgatttgatcaat

SEQ ID NO: 14947 - DNA, 472 bp, Glycine max
  Clone ID: jC-gmle01810083a10a1
agacctcatcatagttttgctaacacaagtacattcattctcaaaaggtggaatggcatcctttctttccctctcttttcattggtgtgcactttcacttgtggagctagctgcaccaacagcagtggaaattgccttgttcttgagatgtctggtgttcttctttgggtgagttctggacccaaagagaacatcaactccttggtgagtttttcatgcaggagtggtggtggtggtgaaagaacacaaaagaggttttctggaatcagttttgcaagtggtgcctctgctttttcaagtgcagtggcagctgagactttaagatcctcagaggagagggtctatgaagtggtgctgaagcaagcagctctggtaaaagaaaacataaggggtacaaagatagctctagatttggacaaagacgttgaaggggaattcaccaatgtggatctgttgaatgcagcttatgatc

SEQ ID NO: 14948 - DNA, 543 bp, Glycine max
  Clone ID: jC-gmle01810083a10d1
ggtaaattgagatgtatacaactctaactgaaaagtatcacacattgtaacagttatctcctaaccattttggcaaacttctgagggcctagaagtgaaaaaccataggcagtaggtagtgataatagcttctttacttttcctacatatgccctttttgtgaagttattataatcattggcttcaatggaatctaatatttgcctatacaacaacaatgatgcccacacaggccacctgctagctgagttgaggtctgcaactcccctctctgcttcatcaaaaaacatcctcgccctctttatttgtcccttcatgaatttccgccatttgtctgtaactcttccgctgaaaatgtcttcatctgaaaggccagctagtgccaattcatcttgtgggagatatactcttcctcttctagcatcctctccaacatctctgagtatgttagtaagttgatttgcaatgcctagagccaatgcaacattataaatgctctctgttgaagcatttgcttttggtgcttatcccattactgggaca

SEQ ID NO: 14949 - DNA, 381 bp, Glycine max
  Clone ID: jC-gmle01810083a12a1
tagtaacaaatactgccgtgcattttttgtattcatgcacagaagttctttacaaaggtggagaattaggcccttgtaaagggtgctccaattggacaggctcttgatataaacattccccctccacggcccaaaagaaagccaaacaatccttattctctgaagaccatgattggtaccacatcattacatagtggagcaaatgatggtaaactcaatctagttgaatcttcacatgttaatcaagcactggacttgaaaaaagaaccacttccatagaaacatgatttagacgaagggctaacaactgtaaaagaaaatatggatgagaaccacgcaaaagtttttactcttctccaggaggtaccctgttcctctgta

SEQ ID NO: 14950 - DNA, 292 bp, Glycine max
  unsure at all n locations
  Clone ID: jC-gmle01810083a12d1
tgacccaatgacatagttcattgtaaaccaacannaanaatnnccgggaacgaccccgctcactactccgcggccgacctttttttttttttttgaacgaaggtttttacattccttgatgttcatggctcaacggggacttaatgcttcttatctaaatctatttagtcggaatctcaaactgcattcacactctccaaacgatatgcaaaccaccgttcacagtaatttaacactgtacacacataaaacacgacaagcctcgtgagctgcacaattataaatcaccata

SEQ ID NO: 14951 - DNA, 540 bp, Glycine max
  unsure at all n locations
  Clone ID: jC-gmle01810083b01a1
gtgaagagatgacattgattcctggaaccagtgttgaagaggcttacaacaagctaatagttgaacttgagaaaagtgttcctacattggttggcattgaatgtcccaaggatgagaaacttcctcgtcgcaaaatttttgacaaacctaagacgcgctgcttcactattctccctatggagtttaatcttgtggtccgtcaaaagtttttaaattttgtgaggttcattatgaagaaaagggacaagcttagttgtcaagttggaatcaacccatactccatggaatggactggtttggccaatagattactgagtaagggcaacgatattctgtgttgcgattatgctagttntgatggtttgattaccaagcaagttatgagaaagatgtttggagagttgaatgtggaatcccttctggatttccgctcacaagtatttgtaatagcattnttaatgagatgctcattagatatagctatgaaanattactgcgccaggctaaagctcccagtatgtttttacaatccttcaaaaa

SEQ ID NO: 14952 - DNA, 387 bp, Glycine max
  Clone ID: jC-gmle01810083b01d1
aaaaaaaaacccccccttggccaatgggaagggcctttttttacgggaaaaaaaatttgcgtgctggttacaaaagggaagggggcccttacaccccaaattttggggacttttacccttttaaaaaaagcccctgaacataggggaggggggggaaaaaccaaaaattttttttttacccccaaaaaaaaacccccagaaacttccgggaaaaggaccaccttttaaaaaaaaaaaaatttttttaccttccccaagggggggggaaaactttttgggtatttttgggggggggatgtgaagtgcaaaaattacacaaaagggggggggaaaaccaacccggggcctggcaagtgtgactttttaaaaaggggtttttggggggtt

SEQ ID NO: 14953 - DNA, 590 bp, Glycine max
  Clone ID: jC-gmle01810083b02a1
ccctcattgagaaatttcaatttttgatgtttgattataaaattgtggtgacttgagggggtgcatttcctaaatttggaaccccatatgttttaaaaccacttgctcatgaagatgcaatgaccctattccgacaccatgctctcttggaaaaaagcagttcaagtattcctgacgaagaacttgtccaaaaggttgtgagatattgcaagggtttacccctcgccattaaagtgattggtagatcactcagtcatcggcctattgagatgtggcaaaagatggtggaggaattttcacaaggtcattctatacttgattccaatattgaattacttacatgcttccaaaaactcttgcatgtattggaagataatcccaacatcaaggagtgcttcatggacttagggttgtttcctgaagaccaaaaaattcctcttcctgttctcattgatatatgggcagtgttatatggatatgatgatgacggcatagaaacaacggacatgaataataaataagactccatgaatctagttaatgtctttggtgcaaggaaaaattcaagtgactcagacaattactactac

SEQ ID NO: 14954 - DNA, 493 bp, Glycine max
  Clone ID: jC-gmle01810083b02d1
aaatacgcgatttcatacattacattaatcgggaaacgaatcagaacgaaaaattggagggacataagattaaattcgaagataagaaaacctacttcataaaaacaaacttttgaagttatcataggtcaattattttggtggcatcattatgctaagatgtccaatcgggacaacacacagcacataaaatcaccaacttctttcaagtagcatagtactgttcgcacgacatgcaaatactactacagcaacttgaatacacatttattatccctattttaaacaagattatttcacatgaaacagttacgagcattggtctaacatttttatagaaagaggtcataggagcaaattgaatgaaaccagcttcagttaacatcaacttgaggaacctcaaacttgagattgggaaagcatagcttcaaatgctgtccatgaagcacgacatgtcttaagagctaattgagtgaagccagtttgagttaac

SEQ ID NO: 14955 - DNA, 490 bp, Glycine max
  Clone ID: jC-gmle01810083b03a1
aaaaattcatcctctcttctagggtttcttccgctcccaaaacaatctcgcctccaacctctctctctctctctctctctctctcttcaattttcgttgcattcgcagggcacttctccgctcgcaatgccgtttccggcgaaaccaacgcgggatttcgacgagtcggcgagtccgtcgaacaacctgtgggtggggaatctggcggcggacgtcaccgacgctgatctgatggagctcttcgccaaatacggcgcactcgacagcgtgacttcctattccgctcgcagttacgctttcgtgttcttcaaacgcgtcgaagacgccaaagccgccaagaacgctctccaaggaacctctctccgcggcagttccttgaagattgagtttgccagaccggcaaaggcatgtaaacaactttgggtgggtggtattagtcaggctgttacaaaggaagatttggaagctgaatttcagaaatttggtaaaa

SEQ ID NO: 14956 - DNA, 469 bp, Glycine max
  Clone ID: jC-gmle01810083b03d1
agagctaaaaaaaactagtattccagtaagaacgacatcagatgaaaattgttatgtacattaaacagtaacaacaattaaaaaaaaaaaaagccaaccttacacctttgtattgtagtgagcaaagatgttaaaaagaaagaataagttggtgataaaagaactagtttctttaaataaaaatagttgtcgaagaatcgccgtcacatttgtcgcatacgaacatgcatctccctaggcacggtcattacagaaaacagttctcattgtcctggcccatgtcctcctggggcttgttgctgttgctgttgtagttggagaagaaggttggcagcaaattgtaacgttgactggtatctctggttcttatcagcctccacctctgtttgtccttgactgactccaaacataggaagttgctgattgggggtgtccgagtttacctggtccactgtatacagcatggcag

SEQ ID NO: 14957 - DNA, 563 bp, Glycine max
  Clone ID: jC-gmle01810083b04a1
ttcttcttctactttttgccggtttcgattcttctagatcagtgttatcattggggatgaagtatcttggacaattgcctcaagtttatgaacatgtcttggaagaacaacttgaaattagtcaagggaaagaggcagggcagttgttgcaatgggaagatgttcagaaaatgaaatactcttggaatgttgcatctgaagtcatgaggctgtccccacctgtgagtggtgcttacagagaagctataaaggatttcacctatgctgattataacatccctaaagggtggaagctgcattggaacactggttcatcacacaaggacccaacgctcttctcgaatccggaaacttttgatgcttcaaggtttgaaggggcagggcctacacccttttcatatgttccatttggaggtggcccccgaatgtgtttggggctagagtttgctagactagagattcttgtgttcatgcataataatcggaaacggttcaagtgggatttggtggatcctgatgagatgttcaagtttgatcccatgctagaacccaataaaagactt

SEQ ID NO: 14958 - DNA, 491 bp, Glycine max
  Clone ID: jC-gmle01810083b04d1
agctccttaacagaataatcaaagttttattgaaaccgatacttcatagaactcatggaagcagtacaaaaagctggggctaatcaatgtagcattaagttttttttctaatactaatctagcaatataagatgactacttagaaaacttctaaacaatgtattatgcgtatgatgaaggtgtttgactagaaatgggaaggatgaagtcgaattgcaagtccttttattggttctagcatgggatcatacttgaacatctcatcaggaatcaccaaatcccacttgaaccgtttcacgatattatgcatgaacacaagaatctctagtctagcaaactctagccccaaacacattcgggggccacctccaaatggaacatatgaaaagggtgtaggccctgcccctttaaaccttgaagcatcaaaagtttccggattcgagagagcgttgggtccttgtgtgataaccagtgttccaatgcagcttcca

SEQ ID NO: 14959 - DNA, 428 bp, Glycine max
  Clone ID: jC-gmle01810083b05a1
ggaaagcgcatcatagcttgtggttctctttttgttgctgacaccaatcgattgggactacgtagcttgcaccattccttacagactcccctccgataaccctcgcaagcccactcccaccgaaatctcttggattgatctctttctcaactcaatcccctctttcaagaagcgtgcagagagtgatacttctgttcctgatgctgaagctaaagctgaaaaatttgctcaaagatatgctgatatacttgaagatttgaagaaagatcctgaaagtcatggtgggccttctgattgcattcttctatgcagactttgtgaacttgtgcttacagaattgggattcaaatatatcttcaaaaaagcaaaggatgaaaaaattgcaaaaaccatctacctgtttgagaatgttgttcatcttactgatg

SEQ ID NO: 14960 - DNA, 453 bp, Glycine max
  unsure at all n locations
  Clone ID: jC-gmle01810083b05d1
tgccacctcaaaatgcgccgctctgttttcttngtaaacttcagtagaattatatcccggaacgaccagnctcactagntccacggccgtcctttatttttttttttttctcttttttttttaagcacaataacttcttattactaagggtaatttttggtattatcacctccataatactaaaatgacattttaaaaagtatccaaaccaccggctttgaatggtgcttcacgattaatgattaacactataaaaatttcttgtcttcacccttagttggaaaatattattacttcttatctaacttgaaactttattgtttttgaatacaccgttttacaaaccgtcaccgagaaaatgcgctaccttgggatgtttcacctattccaattttaacataatcacacttaaattgatcattcagatttttttttattccacgacccattccc

SEQ ID NO: 14961 - DNA, 89 bp, Glycine max
  Clone ID: jC-gmle01810083b06a1
tatttttggttaaaaatttttaattatataaagggccgccgccacctagggtgcgggtccactcagtaattcaaatcggaccgtatcct

SEQ ID NO: 14962 - DNA, 53 bp, Glycine max
  Clone ID: jC-gmle01810083b06d1
gtcatatacagcgcctggactaaaaatacattggctttcccctacatacaagg

SEQ ID NO: 14963 - DNA, 479 bp, Glycine max
  unsure at all n locations
  Clone ID: jC-gmle01810083b07a1
gggtnngcagagggagcgatttagattaaacaaagatggagactcctcctcgccaacgaggcgttgtgaagaagaaggagacaaggggccgaaaacccaaaccaaaggacgaacacgggaagggtttgaaggaaggtaggaaaacacaacaacaacaacaacatcatcatcagcagcagcaacagcaacaagatcaaccttcggtggacgagaaatacacgcagtggaagtcccttgttcctgtcctctacgactggctcgccaaccacaacctcgtctggccctctctctcttgcaggtggggcccccagcttgaacaagccacttacaagaatcgccagagactctacctttctgagcagactgatggtagtgtgccgaatactctggtgattgcgaattgcgaggttgtgaagcctagggttgctgctgctgagcacatttcgcagtttaatgaagaggcgcggtccccttttgtg

SEQ ID NO: 14964 - DNA, 467 bp, Glycine max
  Clone ID: jC-gmle01810083b07d1
tgtaactacgaaccggtttagcgtttagaaaacttcgaaaattatttgcgggacgccccgctcactactctgttcccgcccttttttttttttatttttcttcatttttttaccgtaaaaagcatgcctaaagtttcggggagatcatattgaattaacatcgtctgttccgttcagtgattgttagaaatgatccccattaaccctggatcatgatcttcaaacagaaaattaacttgtttctattaagtaacactaaccacatatcattgtcttgatctacgttaatctagggtattcttactccacccccatacatgaatggttttaaaatgccatgaaacattccccgcttatgttatattaattccaccagtaattttaatttaacttatttttgcgctacgacgtatggcattttttaaatctttgaagcacacccccccaccatgaagatttaaatttct

SEQ ID NO: 14965 - DNA, 441 bp, Glycine max
  Clone ID: jC-gmle01810083b08a1
tctttctcctttggaattttgagttttggtttgaagaagagacctctagatcttgatagtattaatgctgctagaaaggcaagagaaggtctaagatctgtaagaccaatgatgggtgcacatgatcagtttattggtaagtcaaaaggtgaagatatagtacctttgaagaattatttggacgctcaatattttggtgagattggaattggcacacccccacagcccttcactgtagtgtttgacactgggagttccaacctttgggttccatcatcaaagtgctactttactcttgcttgctatacccataattggtgcacggctaagaaattaaagacacatgtcaaaaatggaacttcatgtaaaataaactatggaactggatcaatatttggtttcttcaatcaagataatgttaaagttggcagtggctgtgtc

SEQ ID NO: 14966 - DNA, 422 bp, Glycine max
  Clone ID: jC-gmle01810083b08d1
aaaacacggaatgaaatggggatggttttttcatataaaaagcacacaacacttgcaagggggatacttctacgttttaaatggataaatacattcggggtttcaaaaagtaaccagagctacaattataacagtttatttacaacacccttaacaaatttacaaaaaaaatcctccaaaaagcgtaattaaactgcttcggcaaagccaacttggagatttccatagtcaaaaacggggtgatatgcccttatgaaaacatccccaagaatccacaatggaccctttggaggaggaacatcaaaagcaataaaccccctaaggcagacttctgtaatgccttctccagttcttaaaatatactgctctggggtgaggacaaaaggtttatttccaattgcgaacctaatgtttggcttttt

SEQ ID NO: 14967 - DNA, 525 bp, Glycine max
  Clone ID: jC-gmle01810083b09a1
cattttagaagaatacctttctcttcgctgcatcagaggagttgtaagtgaaggggatggcttcacaagctcttgtctcatcatcttctcttaccttctcagcggaggctgcaagacaaagtcttggaccaagatcactccaatctccatttggcttctccagaaaagcctcctttcttgttaaggcagctgctaccccccctgtcaagcaaggatcagacagacctttgaggtttgcatcaaagcaaagtctttcttacttggatggcagccttccgggtgactatggatttgaccctctgggactttcagaccctgaaggaacaggagggttcattgagccgaaatggctagcatatggtgagataatcaatggtcgttatgcaatgttggctgcagatggtgcaatagcacctgaaattttaggcaaggctggtctgatccctcaggagacagcccttccatggttcaaaacggttgtgtccccacctgaggacctaccctactgtgcagacttctacacac

SEQ ID NO: 14968 - DNA, 476 bp, Glycine max
  Clone ID: jC-gmle01810083b10a1
gagaaattgatgttctttatatgtttaaaagggttggaacggttttcgagtttaggaagcctgcaaagagccttcctttgtttttctctttttgagaagaaggctctttgttgttgtttttgaagaaggaaggaagaaagaaaaaaaatgttgaggctatggatttcttatctgcaattgttggagcttttcgtgagttcgttggttcacatgctttatgggttttacatatttagctccgctgttgctggggatctctcacaggttctcaatgaatattttcacaaggctaataataatgtgaatgttgaggtcaaagaggaaatttccaagctcaataatgctaatgatcttcctcctattgtgttggttcatgggatttttggatttggaaagggagattgggggctttatcgtactttgctggggcagagaagaacgatgaaagagttcttgtccctgatttggggtcctta

SEQ ID NO: 14969 - DNA, 545 bp, Glycine max
  Clone ID: jC-gmle01810083b10d1
agactaaatcagttatagattatagaatctataattggttaatcaacttaaatagtttgtacaacatatatatatataatgttagatataaggaaataatgcaaagctaagctctaagactagagtaactatgttatggatttactatatgtagtaattatacaaaccagatgccaggttgtaagggttggcaatctgattccttttcaaccaagcagttggggtgttcaattggtagacgaggatgagtcatgaattttgtgtttagtgctccatcattgtcttgccagtcctcatccctgtatcccttgtaagggggaggaacatctggaggaaaacgccactggcacatctgcaaaaccctaatgaaaagcaacgggtgaattccaagtatgcttgaaggaactgtaacgcccatgatcttcgttgtgcgcttggtagcatagctgaagtagtttgtgtttggaaatgtacgtatatggtagttgagtcttatagagccttgaattgtgagatcaaggaggatcccatctcccgaaacaaat

SEQ ID NO: 14970 - DNA, 491 bp, Glycine max
  Clone ID: jC-gmle01810083b11a1
gttccacaagattacaggcatatggtttgttttggagttaacacatatacgctgatgagacaaggctgggaaagcagtgtatgtgaaatttcactggaagaccactagtggtataaagtgtctattggaggaagaggccattaaggtgggaggagccaaccacagccatgccactcaagacctccatgattcaattgctgctggtaactatcctgagtggaaactgtttgttcagacaatagatcctgagcacgaagacaaatttgactttgaccctcttgatgttactaagacttggcctgaggacattatacccttgcagactgttggtcgcttggtcctgaataagaacatagataatttctttgctgagaatgaacaacttgcattttgccctgtcattgtggttcctggtgtatactactcagatgataagatgcttcaaaccatgataattctcttatgctgattcacaaaggcacagacttgga

SEQ ID NO: 14971 - DNA, 525 bp, Glycine max
  Clone ID: jC-gmle01810083b11d1
aaatactaacttatacaaacggcatttattgagatagctcaacgagttgcatgcatggagttatgggtacacaactaaaattgcaagaaatggataagttctttcaaattgatcgaaaatcacatccttatcgtactctttgcacgtctgcaactctaacaatcattctggggttggcaacaacattaaatatttggcctcatgctcagacgagatgctatcttttggcctagagaacggtcagcctgagaccagtaagatatccagacactgcggatttcatgggtgacccgtgggtcagataaagcatcaacccatcggcgattaaatctatcttgcctgtcaggtgcccaagatcggtatctctctccgggctgcttaaagttgttctccttctcaattccacacttttcacgccttccactgcagatagcaggaggtatggggaacgtttctgcatgacgaacaggatcataccttgaagggaagtaattaacctcctcatccctgtgaatgaaattcatg

SEQ ID NO: 14972 - DNA, 58 bp, Glycine max
  Clone ID: jC-gmle01810083b12a1
aaaaaaaaaaaaaaaaaaaaaaaaatttttaaaaaaaaaaaaaaaaaaaaaaaaaagg

SEQ ID NO: 14973 - DNA, 520 bp, Glycine max
  Clone ID: jC-gmle01810083c01a1
gtaatagtaatatacatatttattataaccaatggaagcgcgtgcaggagccgggcagcgtattgcaagaatctctgctcatcttcagcctccaaatttccaggaagggagtgatgttcttcttaagagtgctgagtgcagagcaaagggtggggcacctggattcaaagttgcaattttgggggctgctgggggaattggtcaacccctttctttgctgatgaagatgaacccattggtttcagttcttcatctttatgatgttgtcaacacccctggtgtcactgctgatgttagccacatggacactggtgctgtggttcgtggctttctggggcagcaacaacttgagagtgcactcactggcatggacttggtaatcatacctgctggggtaccaaggaaacctgtgatgacaagagatgatttatttaaaaatatatgctggaaattgtgaggaccctttgtgaaggaattgccaagagctgccccaatgcaattgtcaacttgattagtaatc

SEQ ID NO: 14974 - DNA, 389 bp, Glycine max
  Clone ID: jC-gmle01810083c01d1
atagaacaataggctgatattttagcatctttctgagattgtgaagcagttccactgatgtcaaatccgctatcatcagcaattacggatgacaccaaaaatttagagtactattcttaagaagaagaaaaaaatctatgaacaaagagaagcattacacatggtccttatatataagagacaaaaactagtttttccttatcacatttattttctgatgaactctacacccttctggatgcttcctgctaactctctctttgccttttacaaaccaatcctttaatactcattcaggggacccagttgattaacctattttgctccaggacgacctagacgtaccttggttgcaaagaagggaagttccgtatcctgagaatcaacaa

SEQ ID NO: 14975 - DNA, 486 bp, Glycine max
  Clone ID: jC-gmle01810083c02a1
ctcgagccgttcgttttgccactttagttttcgtttctgggtattctttttcaagtgttggtaaggatgaaattcctacagacgaatatgctttggaacttaatggcgttaccataaaagaaacagcaaaattaggccctcgcccagagaagcctattgaaatatatgaatttgagagctgtccattttgccgaaaggttagagaaattgctgccattttggatcttgatgttcttttctatccttgtccaagaaatggcccaaatttccgtcaaaaggttctagagatgggtggcaaactgcagttcccctacatggttgacccaaacacaggcgcttcaatgtatgaatcagatgacataattcggtatttgggtgacaaatatggcgatggaaacggtcctttatctttatcacttggatttttaacgacactaacggctggtcttggtatgcttagtcgtatttcaaaggggactacttata

SEQ ID NO: 14976 - DNA, 458 bp, Glycine max
  Clone ID: jC-gmle01810083c02d1
caaggtctattatgtagttattagagctgtaggcgcagtgatgatgaatgaaattgaaaagggtcccaaattaaaagaacgaaacagaaccctacttagcaacccacatttttaaccacctcaaaccattgctaaatattgaggcacttgattccactatttgaaatttctatatagagaaaatttgatttacccgttagaacttagaaccattagcaattacatttaccaaaggtattgaaggtgcatatcatgagacttaaaaacccttacaagcctctacctatcatagcatcacttactaaagagcgtatgttgctcttagatactctatgatttctgcactatcaaacatttatatcccagtgtttggatcttccaaaaaaggtgcctggaaagttccagttttctgataaagcatatgcctgtatgggctacccctagcacaactgacaagc

SEQ ID NO: 14977 - DNA, 458 bp, Glycine max
  Clone ID: jC-gmle01810083c03a1
caccgttcatggatccagtaagtttgtggtgtaacacgcccttggcgacggtgggtcccgagatccatgacctcatcgagaaggagaagcgccgtcaatgccgcggaatcgagctcatcgcctccgagaacttcacctccttcgccgtcatcgaggccctcggcagcgctctcacgaacaaatactccgagggcatgccgggcaaccgctactacggcggcaatgaatacatcgaccagatcgaaaacctctgccgctcacgcgccctccaagccttccacctcgacgcccaatcctggggcgttaacgtccagccctactccggctccccggccaacttcgacgcctacaccgtcgtcctcaacccccacgaccgcatcatggggctagatctcccctccggcggccacctcacccacggctactacacctccggcggaaagaagatcttcgccacc

SEQ ID NO: 14978 - DNA, 485 bp, Glycine max
  Clone ID: jC-gmle01810083c03d1
caattgctaaataaaaaaaaaaatatggggtcaatcaggctaacaaaattaaacatgaaatcaaagacaaagaaacttcaaacttttgaattgaaacaccatggcgataaaccctatcactcccaggaaaggaagacacatatttcctttttctccatttctgcactttgtgtcgaacttgagtgacacaatttagtaaaaagtggtatggttgaacctaatccttgtacttcatttcaaataccaggaagccaggcatgtcaaacaaggcagagaacttctcaacatcagctttgagatcttcaatagccttgttgttgacgagacccttgttgaaatccttgagaagtttgccatgctccttctggaactccagggtgagagtcacagcacggtgaaggaactcaccaatctgctcaaagtttttttcaaccaaacccctataagtcatggcaggggcaccaatttgcactccaccaggggcc

SEQ ID NO: 14979 - DNA, 556 bp, Glycine max
  Clone ID: jC-gmle01810083c04a1
caggtcctaaaacttgtactagcttcacattaaccaaccatttttcccatcaaaggtactggcaacttctcaaatttttctaattttcttgctccctttcttttctggtgtgtgcacttcgtcactttttgtgccattcaaaggtgcagcataagaagtaagaggaagttgcctagtgtttgagatgtctggtgttcttctttgggtgagttgtggacccaaggagaaccccatctccattgttggtcttgctggaagaggtggcagaagccagaggaggtttggactgtgcaatgggatcagttttgcaagcttttcaccagcagtggcagacccttcaagatcctcagaggagagggtatatgaggtggtgttgaagcaagcagcactggtcaaggagaagaataagggcaccaagagagcactgaatttagacacaccaacagttgaaggtgatttaacccatggggatctgttgagtgctgcttatgataggtgtggtgaagtctgtgctgaatatgccaagacaatttattcttgcacacaattgatgacc

SEQ ID NO: 14980 - DNA, 499 bp, Glycine max
  Clone ID: jC-gmle01810083c04d1
ggccaagaacaaaatatttacttccaaactgaatattaaatggatttctgttgaatattttttacttgagatgtatactattaaaacttgaaaaaaaatatacactttatagctttctgatttctagtgaacagaatttacaagctcaaacaatttgatgctcattggaacaacttttacatacttctcgtaaccattttggtcaacttttggggacctagaagtgctcttccatatgcagcaggtagtgatagcagcttcttaactttacctacataagctcttttagtgaagttattgtagtcattggcttcaatagaatctaagatttgcctatacaacaacaaagatgcccatactggccacctgcttgcagagttgagctctgaaactcccttctctgcctcatcaaaaaacatccttgctctctgtatttggcccttcatgaaattgcgccacttgtcggtaactttccctctaaaaatgtcatcatctgata

SEQ ID NO: 14981 - DNA, 564 bp, Glycine max
  unsure at all n locations
  Clone ID: jC-gmle01810083c05a1
gagacaagcagatgtgaactcacttatgctgttgttgggattgttgtgctacttgcttccaatgctgttcaaatacagtggtgcctcagctgctctcactgtagacccttcactacacttgtcaagagcttctagcattgtgatgttgattgcatatgttgtctacattgtctttcaactgtggacacacagggagttatttgaagaagaagatgtaaggtttcttgaattatgaaaatggttaattaagttggttagcaattaatctaatccttgccaatatcgtagaagtaattaattaattaattaacaccatgaattgttcaggacggtaaagatggcgaggatggttcagaagaacaagctgtgattggattatggagtggcattgcttggttggttggaatgactgtattcattgctgtgttgtctgaatatgtggtggatacaattgaggtaataattgacataaaatgtttttttttcttcaanaatgaagtccatttagttttgactataataaatattgatggtaattaatattgtcaaacataacaggatgca

SEQ ID NO: 14982 - DNA, 468 bp, Glycine max
  Clone ID: jC-gmle01810083c05d1
cccacgagacctagggcaatatatagtaacacaataaatacaagagattctgcaaactgaaaaagggattcttactaaagcaaactcaaacaagaacaacttccactcatttggcatctaccgtagtaacacaagatcaaaagcagcttctctgatagaacacacgtacgtatgattcaacatctttcacagtagtggttcatttctaacagctagctattgcaacttaaaataattgcaatgcttctgcaaagtgctaactttttttcccccccttctttatggatatgacaatgtgatcagaatgaaacaataaccaatccattgaatttgaatctgattttgggtttggatcgataccaccattcttcatctcaggaaaggacaagaaataggccaaagcctgcaaaccaacttcccacattaatttaactttatatcaaattttatgtgatttcacaagaagga

SEQ ID NO: 14983 - DNA, 503 bp, Glycine max
  Clone ID: jC-gmle01810083c06a1
ttttattactactactactactattattattattcaactcattaaaatggaatgggggacttatttttcccattcttactggagaactcgtgaagcaagcaggaaaaaattccagtagaggaagtgtttgagtcgctgaaatgttcaagagcaggtttaacatcagacgaaggagccagccggcttcaagtttttggaccaaacaaattggaagagaaaaaggagagcaaacttttgaagtttctgggtttcatgtggaaccccttatcatgggtcatggaagctgctgctataatggccattgctttggctaatggtggaggaaggcctccggattggcaagattttgttggtatcattgctctattgttcattaactccacaatcagtttcatagaagaaaacaatgctggtaatgctgctgctgcactcatggcttggtttggctcccaagaccaaggttttagagatgggagatggactgagccagatgctgcattttg

SEQ ID NO: 14984 - DNA, 462 bp, Glycine max
  Clone ID: jC-gmle01810083c06d1
catcagaaaaaaaaaatatttatgtggggccttaaagggacctaaatatcattaacattctcaaaacaagacgaaaagtaaatcctatcaaccacgttatttggtatggaataaaagagtaaaccattcagattttgactgacaaaaggaccttcatcctaatctaaagacggattaacttaggtcttcattacatttggggttcttgttcttggataagcaccaaagtgtgttctgcttgaaggttgcccaaattccttaaactgtataatgctgttggattgtatcaatgtcaagccccttcagcttcactactgattcaacatgtcctttcaaagtatgaagctccctgagccttgcaacctcggcacgtctcttagcttgctcagcaatctctgaaagctccctgtaactgttcttgtcattgaaaaggttggttgtttcaggtggctgaagaccatg

SEQ ID NO: 14985 - DNA, 460 bp, Glycine max
  Clone ID: jC-gmle01810083c07a1
gtagagttgatctacctttaatgtatggagcatcgtggaatagtagtggttgtggggcaccgtttctgagcaagacctacgacatggttgatgatccttccaccgacttagtggtgtcgtggggcgaaaacaacaactcctttgttgtttggaacgttccccaattcgccacagacatcttgcccaatcattttaagcacaacaacttctccagcttcgtcagatagttgaatacttatggttttagaaaggttgacccagatcgatgggaatttgcaaatgaaggatttttaagaggtgaaaaacaacttttaaaaagtatcagtaggcggaaatctgctcatgtaaatggtagtcaacaagcatctcaagtgcataaatcaactgctggagcatgtgttgaagtggggaaatttggccttgaggaagaggtggaaagaactgaaagggataagaatgt

SEQ ID NO: 14986 - DNA, 478 bp, Glycine max
  Clone ID: jC-gmle01810083c07d1
cagtaaacagtagttattcaacagcaagtggggagttatgatccaattatacggaacatccccacaaaaatatcatcgcattggaaacgggggcatagttattaaaattcaaaatacatggagatatatgaagtttcgggaacttgtatgtttttaagcccccaatgacaaacagaacacacgacgacattacaagcggataaaagcaccgatcaagttgttggatctgtcaggtttctttggtgaataagtaagatggctttgtctgctcagtagcaaaggggacctcaaccttcagttgtgagtgacatatatacacacaatcagtactccaatgcatgaagtcccatctgttgagtaagacaagcaacatgttggtttgtatcaaaattttcctggttatttaccatttttgaaggcaaaccctgatcttaatcaaaccacattcctaagagctacatttagcttcctctgggtc

SEQ ID NO: 14987 - DNA, 427 bp, Glycine max
  Clone ID: jC-gmle01810083c08a1
cagcactgactggtggcagtgctttcttatttccaagtaaagcagcaaaaaagtgggcactgactggtggcagtgggaaggttgtggacagtggtcctgatgatcatatatttgtatactatactgaccatggaggtcctggggtgctcgggatgcctgctggtccttacttatacgcggatgatctgattgaagtcttgaagaaaaagcatgcttctggaacatataaaaacctagtattttatctggaggcatgtgaatctgggagtatctttgaaggtcttcttcctgaagatatcaatatttatgcaaccactgcttccaatgcagaagaaagtagttggggaacatattgccccggggagtatcctagtcctccccaaaatatacaacctgtttgggtgacttgtacaatgttgcttggatg

SEQ ID NO: 14988 - DNA, 513 bp, Glycine max
  Clone ID: jC-gmle01810083c08d1
acaaaaataaatacaagttgtcattaatattaaacaataattttggcatcataaattcttccggaataattatacaaaagtgaccagggaaaacccgatctgccagttgcccactgaataaaaacacacatcatattactatgtgttgtcatacatgcattgtaatgagtggatattccaaagcaattggtccctttatccctccttaatccttatgccgtaaatggcaccatcccttgtaaattgtaattgcttcttcagaaatagaattatacaaaggtagttgcaatatctatttgccaaactataaatgtaaagacccttcttcccaatcctagtagtgtcccaattgtatttacaaaggtgggacaagatatgtatatacaagtacaaccatgtaacataatgtaacaataatcatactttggtctttactagtgcacattacagggagttattatgcactgaaacccctttgcagagaactccagggattggaaggaatactgacac

SEQ ID NO: 14989 - DNA, 474 bp, Glycine max
  Clone ID: jC-gmle01810083c09a1
cttgattcgaaaaggaatgaactttagacttgtttctctcagagatggggttgcgtaaggttgatttcgaggttggaactgatggggttgctgtcatcactatgtgcaacccaaccgtcaatgctttggccattccaattatcatggggttgaagaacagatttgatgaggcagctaggaggaatgatgtgaaagctatagttttgactggcaaaggtggcagattttctggtggctttgatatcagtgttatgcagaaggttcaccagactggggattcctcgcatctccctgatgtgtccgtggaactagtagtcaattcaattgaagattcgaagaaacctgttgttgcaacagtagaggggcttgctcttggaggtggcttacaactggcgatgggatgccatgcgcgtgttgcagctccaagagctcaactgggtctacacaaactgactcttggtattattcccggat

SEQ ID NO: 14990 - DNA, 486 bp, Glycine max
  Clone ID: jC-gmle01810083c09d1
agctcataataatttaagttctgaaaccgttttgttacgctgagaatgtagtttcatgctaagcaaacatgttaaataaagtaaaattaaaacacataccaaacttgaaggaaattacttgattaaagtagcatactgaggccttactagtcacccccaagaaacaattcttttccttaaatttttctctttgtgaaaccaactttaatttattatttaatctaggaaggaagcaaacattagttgttacatttttttattgtagaacatccaacatgctgaacaattggctttctcatagacgcgccattgactttggagtagatgaagcaggtgcactcagaggaattcctttgagtgctctttcttccaaataccttgagggtttatagaagttaccatataattgtgcccatttttttaggctggtaaatatatgattagccccaaccaaatctgcccagaaaacaatgccaccccggtaat

SEQ ID NO: 14991 - DNA, 400 bp, Glycine max
  Clone ID: jC-gmle01810083c10a1
attgaatctcagaattctttaaattagatctttttctgctctttgaagggagaagggtctttgcttgattttggagatgtctctgctctcagatctcatcaaccttaacctctccgataccaccgagaaggtgatcgcagagtacatatggatcggtggatcaggaatggacctgaggagcaaagcaaggactctcccaggaccagttagcgacccttcagagcttcccaagtggaactatgatggttccagcacaggtcaagctcctggtgaagacagtgaagtgattttatacccacaagccattttcagggatccattcagaaggggtaacaatatcttggttatctgtgatgcctacactcctgctggagaacctattcccactaacaagaggcac

SEQ ID NO: 14992 - DNA, 489 bp, Glycine max
  Clone ID: jC-gmle01810083c10d1
aaccattaaattattgtcattgtaacaatcggaaaacgagggaaaggaatagaagaaaacaatgaacaacccttgccagttagttgcaccaaccaacaaggcaccaaccatagtaccaatcaaaaggtaaaaagagagagagaccaaatcctactaagaaaagcataactgttcctttccatccaaagggagaaaacatgcaggttttgctcatggcttccacagaatggttgtgtctgcaatcatggaagtaaccacgtatgggtccatgttggaagctggccttctgtcctcaaaatatcccttccctgctttctctgtgtctctcccaaccctaacagaagctccacggtttgcaactccccataagaaggtgttgatgtcagcggtttcgtggcgtcctgtcaaacgacgttcgttgccttctccataagcagcaatgtgctccttgtgcttctttcccaacttgtcaattgctgctttgatcac

SEQ ID NO: 14993 - DNA, 490 bp, Glycine max
  Clone ID: jC-gmle01810083c11a1
gaaaattcctcagcactgaattctatcttgaggggaccaccagtaagtgttgagggccgaaaggagaaaagacaaaagattgatcggaaagggtctatgcagtgtgctacaatacttaagagtttaatgtctcactcatatagttgggtgtttcttaagccagtggaccctgtagcattgagtattccagattattttacaatcatatctcatccaatggatttgggcacaattaaatctaagctggagagaaacatttattctggcactgaggagtttgcagatgatgtcagactgaccttctcaaatgcaatgaaatataatcctcccggtaatgatgttcatatgatggcgaaggaactcatctaaatatttgacagaaaatggaaagactttggtaggaaatggaagtttgaagatgagcatgataaaagcgaaactgtaacaatttaggaaactgggagaaaaagtctttgtgcaatgctttccc

SEQ ID NO: 14994 - DNA, 428 bp, Glycine max
  Clone ID: jC-gmle01810083c11d1
ccaccccgggaaaagctttttttatatgttggcgggaaggaatactttaattttgtaaaacaaaattgcaagcgggggtagttatttaattcccaaacaagagggtaattaaggcaaatttagtcaaaagacttgattccaaacaatatgggcatttacaataattggctgtttccatgtctaaaggggatataaacccttaaagctggcaaaactgcatgaaggggcattcagttaaaaatttcccctttttaaaagcctccgttaaaaacctccttataaaaatctggggggaagtcttccttgataaaaaaaccaagccgctccaaggggttctcaaactgatgtttatccaatgtctccaatgcaactttgtagccatttttaccgccaacggccttataagatagcgtgcatccactcaaact

SEQ ID NO: 14995 - DNA, 503 bp, Glycine max
  Clone ID: jC-gmle01810083c12a1
cactagttttttttctacacatacatatatcccaagaaaaattaagcaacgattcaagaggaaaatgggttctgaacttgaagctcccattcacgtcctcatggtgtcctatccagcacaaggacacataaaccctttgctcagactaggtaagtgccttgctgcaaagggcttatttgtaaccttcaccacctcagagaccgctggtaaaaacatgcgaaccgccaataacatcactgacaaatcagtgattcctgtcggcgatggttttctcaagttcgatttctttgaagatggcatggcagatgatgatgatggtcccaagaagataaatctcggtgatttcagtgcacagcttgagcttttcgggaagcaatacgtttcccaaatggtcaagaagcatgctgaagaaaaccacccaatttcttgcatcataaacaacccttttgtcccatgggtttgtgacgtaactgctgaacatggtatttcttctgccatgttat

SEQ ID NO: 14996 - DNA, 447 bp, Glycine max
  Clone ID: jC-gmle01810083c12d1
gggaacggaccaatcaacattaatggcccccatttttcccccaaaaaaaatacttttttttccaaaaacttttaatcacgatcataatttttttaatgggaaaaaaagggggtccctcctgaaaaaattttattaggggtttccatgcaaggcaataatgaatcgggagggggcataaggggagacttagttttttttggccgaccccaacagttccacgttttttaaaacctttttttaccatttgcatgggttaagggaacacggagctttttatcagcatttaatttatgttttccacgctccaaagaacaaataaagggttatcgatctatcccacttttttactctttggttttttcaggaggggggggacataataattaataagggttttgacttattttccgttgacccaacagctccaggtttttaatttttttcaaa

SEQ ID NO: 14997 - DNA, 544 bp, Glycine max
  unsure at all n locations
  Clone ID: jC-gmle01810083d01a1
gtcaagagacacgtggttttctttctagagtgccattctgtggtttcttggtgggtttctttctgcatcacatcacaatttgcattgcctcgtgtcctttttcttctttgctctccaaaaatctcacacacacaggtatctagcaaatgggttctcaccaacaagaaccatggctattggagaatgggaaaccaagggttttgaccaaggagaccaggcatggccgttctgcacacagaatgtcctccacctctttgcgcaagaaatctagccgaactcttgtctcaaaggttccatgtgccactctcagaaactntctttcaaatttgcaagaggttattcttggcaccaagctttccattctcatccctgctattccagctgccatcgttgctgagtgctttggctttggaagaccttggatttttatattaagcttacttggacttcaccacttgctgaacgtgtgagcttcattacagaacaagttccttttacacttgtcccacagttggaggacttctgaagctacatgtggaaatgt

SEQ ID NO: 14998 - DNA, 454 bp, Glycine max
  Clone ID: jC-gmle01810083d01d1
aaaattaaaatttataaaaattttatttcccacgagacctagtgcggtatatagtaacacaataaatacaagagattctgccaactgaaaaagggattcttactaaagcaaactcagacaagaacaacttgcactcatttggcatctaccgttgtaacacaagatcaaaagcagcttctctgatagaacacacgtgcgtatgattcaacatctgtaacagtagaggttcatttctaacaggtagctattgcaacttaaaatagttgcaatgcttctgcgaagagctaactttttttcccccccttctttatggatatgacaatgtgatcagaatgaaacagtaaccaatccattgaatttgaatctgagactgggttgggatcgataccaccattcttcatctcaggaaaggacaagaaataggccagagcctactcattaagcgcttaaaact

SEQ ID NO: 14999 - DNA, 546 bp, Glycine max
  Clone ID: jC-gmle01810083d02a1
ccttagccttccctacaactccaaacacatttacatcatcatccatggctgcctgcgtctgcactgtcggagctgtcaacagagctcttttgaacctgaatggttctggagctggagcttcagctcccagttcagccttctttgggaccagcttgaagaatgttattgcctcaagggtccccaacagcaaggtttccggtggaagcttcaagattgttgctgtagaagagaagaaagagattgaagagacccagcagaccgacaaggacagatggaagggtcttgcctatgatatctcagacgaccaacaagacatcacaagaggaaagggtttggttgactcccttttccaagctccacaggatgctggaactcactatgcagacatgagctcctacgagtacctcagcactggacttcgccagtacttggacaacaaaatggatggattctacattgctccagcttttatggacaagcttgttgttcacatcttcaagaactttatgaccctgcccacatcaaggtcctctctttcttggatct

SEQ ID NO: 15000 - DNA, 400 bp, Glycine max
  Clone ID: jC-gmle01810083d02d1
aaagaggaaaacggcccaatatgaaaaatttataaaaaacatttcaaacttacctttttttttttgcccctaaaacattgaaaatgccaaaaatgttccccccaaggtccctcccaacttctaacacttggattagcacaacaaccttcacaaacaaaaatatttacttgccaagtttgctttgcctccaattcaaaactggaaaaaaggccccctttgaataccatccttggtagcatttccaaaaacagccttgttcaagtacttgacagccaattggacccttttgacatttttttgtttttggacaaacttgttcccctacagaaagagcttttccaaagttatcttgggctgctcaaaggtgggagggccatttttggaattcacaagctttttc

SEQ ID NO: 15001 - DNA, 517 bp, Glycine max
  Clone ID: jC-gmle01810083d03a1
gaggagttgaagagtacttcccatatgatgtaattcgtattagaagtaatgagaggctagggaatgaagatatgcagcatctactccgtatttttaacatgggaggccaaccacatcccacctttaatgctcaggatgatggataccctagttcatctacatacatttctgcaaaccccatgggctacaattttgatgatgaaccaaaccgctcctcaggcaaagctgttgtgggctggctcaagctgaaggcagctttaagatggggtatttttattcgaaagcaggctgctgagagacgggcacaacttggtgaattggatgacccatagagatcttggggtgcattactgatctttagtgatctgaacaataatgtttctggttatagcatccaaggcttcttagtcttttctgacattcagaattggtgtcatgctgaaatctcgtaacaggagcaaggatatgaaatctggactgaatctatttggtgcgaacctaactcaaagaatcaact

SEQ ID NO: 15002 - DNA, 207 bp, Glycine max
  Clone ID: jC-gmle01810083d03d1
aaaaaccccataaaaactctaatatatctttaaccccccaatatctaaaaaacatataccctcaaaaagttctaaaaaatatttttccacaaccaaattaaaaaaattaaataatcctcaaaaaaataaacaacaatacaaaaaaaccccctagaatttgccttaaaatttaccaaacataaaaaacacaaaacaaaaaaaacatct

SEQ ID NO: 15003 - DNA, 522 bp, Glycine max
  Clone ID: jC-gmle01810083d04a1
ggggacttctgctgagtcagtgccgcgactcgggcgtgtcgtgccgcgccgtgaactgcaccgggacgcggtggtccaacggcacgtcggcgattatggaaacctttctagactcggatttctgcttgcagccgagaggggacagcttcacgcgccgctccatttttgactgcatggtggccggttcgattccggtttttttctggcggcgaaccgcgtatttgcagtacgagtggttcttgccggtcgaaccggagagttattcggttttcatagaccggaacgcggtgaagaatggaaccttaaccgtgaaaaacgtgctcgagaagttcacgaaagaggaggtgaggaagatgagggagaaagtaattgagtacattccgaggttggtttacgcaaacacgaaacaagggttagatggtgtggaggacgctttcgatgttgccatcgaaggagtgttcaaaggattaagggacaggaacaaccgcagtttcatatgtggaaattacggcgatgcaatgc

SEQ ID NO: 15004 - DNA, 397 bp, Glycine max
  Clone ID: jC-gmle01810083d04d1
aaaaaaaaaaaaggaaactttttcctagggaattcaccttaattaaacatttctaattttttcattcatttatttataaagcttcttcgcccctcattaatctaggagaatttttattaactaaataatttttaaaataccatttttttttatcatgtgttattcctatatttaaaaccaacaaataaccttttctttccacttttttccacttattaaatatcatttgtctctgtttcttaatcttttttaacacttctttcattgcaactatcaaagcgtctttcccaccatcttaccctttttttgttttcgattaaacccacctttgaattatcccatatatttttccctattttttcttaacctctttttttataacttctttcacctcctt

SEQ ID NO: 15005 - DNA, 553 bp, Glycine max
  Clone ID: jC-gmle01810083d05a1
aatgaagcatgcggtgccagctattctggttgtcggttcctcgtcaataatcgggtttcggtgcctcatgccatcatccagtggttagggtcggagagcttgccctcacttttctcttccatcttcactctcagtctcactcactcaccattcaccattgccctttgcgtcgctctaagcaacacgtccttttcgatccacatattccagtgtgtatataagtcatcatgctgttgtgacagttaaagatagtgtggtgtggagaaggagccttgtgattagttgtttgagaccaccaaggacgtaaacaagaggatgtcaaacagtacgaacactcattggtgttatagctgcaggaggccagttcggctggggcggcgagatgtggattgtcctagctgcaatttgggatttgttcatgaacttaatgatattggccatgttaatccttgtgacctctttggaacggacgacaatgaagaacgagatcaaaggcttggactaatggacacattctctgctttatgaggcatcaaatggcagatatggggcg

SEQ ID NO: 15006 - DNA, 427 bp, Glycine max
  Clone ID: jC-gmle01810083d05d1
aaaaagcaaatccagactggggggcttaaatctcaaaccggtttcaccccaagcaagcagcattagtacataaaatttttaaatcaacctgagccttttaataaacaaaaaaaaatgttatactcaccccaagtcattcaaatggccacccaaaatacccagcttgatgatgatggctattttcagggatagttggggttggggggctgcttcctgttgcttcataattactggtaaaatgaaaaaaacgaaaaggccccaaaaaggaaaaaggatttttccttccatgggtctccctaccactactacttacccttgcacttttacttttaccattggcgccaccggtactactacttaatccttggggcggcagttcttggcggaaaacggggcaggagttttgctgccccaaccatggaacaat

SEQ ID NO: 15007 - DNA, 356 bp, Glycine max
  Clone ID: jC-gmle01810083d06a1
cgacacccttaacactttttatattaaaatgttgcgccccacctccaaggaacaggtggtggggtggccgccggtgagggcaagcaggaaaaatgctatgaagatgagttgcaagtcggtgaaggtggcggtggatggagctccttatctaagaaaagtggatcttgaaatgtacgaaacttatgagcatttgatgagggaattagagaccatgttttgtggtttagccattcgtaatcatttgatgaatgataggaaactgatggtttctggaaatgggattgaatacattcccacctatgaagacatatatggtgcactgtatgttggtcgtagatttaccctggaacatgttt

SEQ ID NO: 15008 - DNA, 234 bp, Glycine max
  Clone ID: jC-gmle01810083d06d1
aggatagaaatattatgaattatgaaatggggcataaaatgatcaggtgaatttatctaacaactagaaaactgggggtagaataactatctagcccaaagccaagtcatacattacatgcatactcatgatataacgatgatcccaatattgattacattgcccgcctccccttattagttttataaatcaccacctaatactatagaccaggattttttttaactcttaatt

SEQ ID NO: 15009 - DNA, 537 bp, Glycine max
  Clone ID: jC-gmle01810083d07a1
cttcttgtgaagccagtgaagattcagatgatggggaagagcaagggattgagagttgcatgccaagccaccagcatttccgctgatagagtccctgacatgggcaaaagacagctcatgaatcttcttcttcttggtgccatttcactccccactgctggaatgcttattccctacacctacttctttgtccctccaggttcaggttcttcagctggcggtactgttgccaaggatgccgttggaaatgatgtaattgccgagaattggctcaaggcacatggacctggtgaccgaacccttacacaaggattgaagggagatcctacctatcttgttgtggagaaagacagaacccttgcaacatttgcaattaatgccgtgtgcactcatcttggatgtgtcgtgccatggaatcaagcggagaacaagttcatctgcccttgccatggatctcagtacaatgaccaaggaagagttgtgagaggacctgcttcattgtctctggcattagcacattgtgatatagatgatggg

SEQ ID NO: 15010 - DNA, 340 bp, Glycine max
  Clone ID: jC-gmle01810083d07d1
acccggaaaaaaggggcctgttcaggttctttttcattttagcttcagttcacaaaatatcaatttgtttacaaaatttatttatgccttaatacaaaacagaatgtttgaatttcatgtttaaatttatattatgaccacagaggttttaaggagtttaagcccaccatggagcatcacctgttctgaaatctgtttcaacccaaggaacaaacacgaccttcccatcatttatatcacaatgtgctaatgccaaaaacaatggagcaggtcctttcacaacttttccttggtcattgtactgaaaaccatggcaagggcaaatgaacttgttctcccc

SEQ ID NO: 15011 - DNA, 532 bp, Glycine max
  unsure at all n locations
  Clone ID: jC-gmle01810083d08a1
ccaaccaccaaattaattcatatatagagagagttaggaaaacaatggaggccatttctcctaagcatcttatgacatcccttgtaataattatagcttctagtttgaccgcacactgtggctgtgccaagagagggggtgaaagaccatacaaagaagccaacacactgttcataagaacatcttgcagctccacaacatatccaagactctgctacagctccttagtgaagcatgcagacttgatccaaacaaatcgtgtggttctgacaggcgcagccctgaatgtgactcttgcgtcagtgaaatcgacatcggcaatgatgtcaacgctggcaaagaagcaggggctgaagccaagagaggttgcagcgatgcangactgtgtggagcaactgagtgacactgtggatgaactgagaaggtctattgcagaaaatagtgatctaagagctttcaattttgagatgataatgagtgatgtacaaacatgggtgagtgccgctttgacggatgaaaccacctgcaacga

SEQ ID NO: 15012 - DNA, 459 bp, Glycine max
  Clone ID: jC-gmle01810083d08d1
tctttttttttttttttttttttttttttttttttttttttttttttttttttttttggggtttttttttttttttttaaaaaaaggtttattgggccatatcaactccccttataaaaaaggagcccccgaataatttccccccacgaaaaagaaacaaaagagactttcccccttttagggggcaaacccacccccctaaaattcgcccccccccttgtggccccaaaacattaacccttcccgggggggcccccccccccacccaatggaaaattcccttttaacaaatttttaaaccaccccgcgggcgggggtcccaaattttaggggggggaaacccccccttaaaaggggaacaaaaaaaactaaaccccgggggggagggaaaccccccaaaaaaaaaagggggggagtttgaaaaaaaaaaaaattggctctccttttttaaaaaaccaa

SEQ ID NO: 15013 - DNA, 451 bp, Glycine max
  Clone ID: jC-gmle01810083d09a1
atgggtctggacctggtttttcttttcccagttcatccttctctgcaagcagcggaagaacgttattggctccctgggtccccaacacaaatatttcctctggaagcttcaagattgttgctgtagaagagaagaaagagattgaagagacccatcctaccgacatggacagatggaagggtcttgcctatgatatctcagacgaccaacaggacatcacaagaggaaagggtttggatgacttcctttttcaagctccacaggatgctggaactcactatgctgaaatgagctcctaccactaccttagcactggacttcgcctgttcttggacaacaacatggatggatattacatcgctccatcttttatggacatgcttgttgctcacattaccaagaacttcgtggccctgcccacatcaaggttctttttttttggatgcgggga

SEQ ID NO: 15014 - DNA, 430 bp, Glycine max
  Clone ID: jC-gmle01810083d09d1
ccaattaaaggggccgctttaactcaaaattatagaggaagacagtccaatatgaaaaatatagtaaaatcatttcaaacttggcattttttttttgcccctaaaacattgaaaattctaagaatgttacacgcaagtcccatcacaacttttagcacttggatcagcacaaccttcaggaacagaaatatttacttgccaagtttgctttgcctccaattcaaaattggaaaaaagttcccctgttaatagcatcctcgttagcatttccaagggcagcctcgttcaagtccttgtcagccaattggacttttttgacattctcttgttcttggacaagcatgttaccatacgtaaagagcttttccagagtcatcttgggctgctcaaaggttggaggcccatcttttgagttcacaagctttttccc

SEQ ID NO: 15015 - DNA, 323 bp, Glycine max
  unsure at all n locations
  Clone ID: jC-gmle01810083d10a1
atccgattggaaggcctttatcattatttgtgggactagagagtacagatgtgacggtggcacacttttctccaggaaggacagcttcataacgcatagagctttttgtgacgctttggctgaagaaagtgcgagggtaacaacagttccagcagctttaagcaacttgagaaacgatcatcatcatcatttgaccaatgctcaagcttcgaggatccctcagattaanttttcagggttccactcatcaaatcaattattcggtggggggatcatcaaaagcatttattggcgaatcattatcatcataaacaacaaaagct

SEQ ID NO: 15016 - DNA, 526 bp, Glycine max
  Clone ID: jC-gmle01810083d10d1
actcaataacttgcttaattaatttctcaatcggtctaactcggtataatatactgttcggtttataagagagtagcggctactactagctggctagctatatatatataactatgacacaacttcactagtttctttagctctaagatacagtttcaataaattggaaagtttgaaattaagttgaaactgaaactatagctaacactagcagtagtgtccaccgtactggctctgcaggttcatgactgatgctgaggctgaggctgaccccattgcattaaattcaacaaggtcttgttgaagaaaaggtcttcttatagagtcaatactattattatgatctccaacacccaagaaatctcttgttaaaccaagttgttgattcttgttatttgagcttagtgatgagtgtaattgctttcccataattgatgcttgttgtgtctcttcatccaccggcatcaccatgtgctccaaaccaccacccttgttggtgccattcacaaccacaaacgagttacta

SEQ ID NO: 15017 - DNA, 447 bp, Glycine max
  Clone ID: jC-gmle01810083d11a1
ccggtcaactccaacataccttatattttcttccactttccaaaccgcgaagatgacgggcgtcaagaccgcacacgccgagcagcttgacagagtttacactctcgaccacgagatgcctgtagcagctcgacagaccagtatctacgatgaggacatcctcatgcagaagaaggagggtggtgattactccggcgcgaaggctaagaccgacccggttgagatcgcgctcgtgaagaagcttgatctatggattatgcccatgctttggctgatgcactggacttaactatcttgtatgtagcgccatctagctcccaatgatcggcggtcttcaaaaagacctcaaactgggagaaacccggcgccacacatgtgagtcgatttgcttcgtatgctacattcttgggcagatgtcgtacaacatgggtctgactcgaggtggct

SEQ ID NO: 15018 - DNA, 483 bp, Glycine max
  Clone ID: jC-gmle01810083d11d1
gaaatgtacatttgtcataaagcgtgcgtatatacagccgttatttcgtgcttgagccttatcccagcgccggacctccaccattgtccacccagcactttcctccttttgtgcatacaatctagtaggcgaaggtgttgatcgactcgtcagggttctggcggatcttcttgttggtcctcttgagccagaagcacataacccaagcagcagcagcagtcgcgacggagaaggcggccgaagagctgagagcaatggtgtagcgcggcgcgtcagagtccatccacaagtaaggggtccacacgaaggaagcgttcgcgcaggtgttgacaatggcgagcgcagatgctttcttctctttggtctggccgcaggtggaagcgacccagccaagaataatggagttgacggcgtatgtgccgatggcgaagacgaccatggcgaagtacttggcgccggtgttcaggtggcgaaggcgaggat

SEQ ID NO: 15019 - DNA, 511 bp, Glycine max
  Clone ID: jC-gmle01810083d12a1
attctgtccaaattgaacggaagcgttatgacaaggatagaacattggaagagcacgggaagttggtggagaaggttctgaaacatgaccaaaaacgacgtaaaaggatagaggctgctgggattgattatgaatgccctgagattgtgggtaacatccaacctgctccaaagaaaataaagtttgaagactgagtgggtaacctgtctcatcatctttaaaagatgatttttctgcatatcctgaaaggtactagagaacttaatcaaagtgaggttgttttgttacctttcttcccttagatgtgttagagtaaaactgctactgctgttttaggacttagtattagcatttaactattgtcaagcctttgcaattttgggacttaattctgaaaccttgtgttctcaaaaatattttatagaagcattatccgtttcttaatatttttcccaggagggtagattgttaagattgccaatctgttgaaattgaattctaaagatagata

SEQ ID NO: 15020 - DNA, 546 bp, Glycine max
  Clone ID: jC-gmle01810083d12d1
gagttcacattgtggtcaaacccctcaaggaattttatctatctttagaattcaatttcaacagattggcaatcttaacaatctaccctcctgggaaaaatattaagaaacggataatgcttctataaaatatttctgagaacacaaggtttcagaattaagtcccaaaattgcaaaggcttgacaatagttaaatgctaatactaagtcctaaaacagcagtagcagttttactctaacacatctaagggaagaaaggtaacaaaacaacctcactttgattaagttctctagtacctttcaggatatgcagaaaaatcatcttttaaagatgatgagacaggttacccactcagtcttcaaactttattttctttggagcaggttggatgttacccacaatctcagggcattcataatcaatcccagcagcctctatccttttacgtcgtttttggtcatgtttcagaaccttctccaccaacttcttgtgctcttccaatgttctatccttgtcatgacgcttccgttcaatttggacagaat

SEQ ID NO: 15021 - DNA, 418 bp, Glycine max
  Clone ID: jC-gmle01810083e01a1
ctcctctaacacagccaaatttttttcctttttttccttttttctttcgagaacggcatcttgaatagcctattttaaccaccatggccaggctcacgctgagaccagacaattcctgctttttttcacacactcaaagagctaattcccacaccccttttaccataacaacctcgtttcaacgatttcactttcatctctcatcatccaaccacacccttaggctcagcagaatagtttctagtgcttaacaaaatgctaaagaaacccagagagtgtccatggccaaggcaaaaggccaaggttcttacggactctcaagtggaagaggttgaaaagcctcatgaaaacctgtcttggaacctgccaccttggaagaatttttcccataaatacaagcctattggcaccacattat

SEQ ID NO: 15022 - DNA, 500 bp, Glycine max
  Clone ID: jC-gmle01810083e02a1
ttggaactggcatggcaactattttaattttagtaggagtgacgaagctccaacgccacagaccaaagtctaagtccttgtttcttggccagaggcttaggattagaccattttggggggagcctcaatgcagtgaaagaagattattcagtgtctcaaaccccccaagagtggttcaagtttttgcactagcgggtggtgaatggcttgacactgttcacagcctctttgtgggtgttggggttggacttccttgcagtgtgatgcagtgtggtgatgtgatatataggagcactcttcccaagtcaaatggcttgacactcactgtccctggggtgattttggctttggggaccctatcttacctttgggccacacctggtgtggcacctggtttctttgacatgtttgttcttgcttttgttgagaggctgttcagacccacttacaagaaggatgattttgttctgggaaaaaagtgggggaaggatcatttggag

SEQ ID NO: 15023 - DNA, 435 bp, Glycine max
  Clone ID: jC-gmle01810083e02d1
gttcattcaacaaaacccttttgaaaatacattatataaatgtggttgcacgtgcagtcaaaagattccaggtatgcatccatcagattccagttagcttatggtaaacagtataaaactccagttagttttttttaaaaaaaaaaatcatattgaacattgttatatctgaatatgatatttaactttgatatacagactatagacaaaaattttgaaaaagaaaaatgggtatttagtatttacaattttcattcctctcttgggatccatctgctccaccaaaagcttttccggcgtcttgtgagctcatccatactctcatttaagggtcttataattttcctctgaagtctaagggctgaagctagagcatttctcggtgcactagccttctttttaggttcaatttctctcagttcctgaagctgagct

SEQ ID NO: 15024 - DNA, 519 bp, Glycine max
  Clone ID: jC-gmle01810083e03a1
cttctctcactctaaaattctgattcaccttgttttcaactgtttctctttcctggtttaggtgagtacttttcacttcttagctggttggtttcaacttgcaccatttcttcctcagcattctatatatgtcctcatcccactgtctgcattgctagctctcatattaccccaactctttgatttttatttttattttttattgtttctatgagttgtggaaaatgttacttagaagctcctccgcaccaattctaacttcattgttattctattccaaggagttcccctccgaaccagaacacattcttcaccttcctaaaacagcatcagctttaagtctaagccaaagcttggtggatatagaccttaaaaactcatcaagtcccaggagaaaaaatcgtgtgccacttagtaatgttcctaataatcaacagagtataaagatcaatgaaagatatgaagggaaagatccacaccataaaactttcatgaaagcaaaaccttcaattctagaac

SEQ ID NO: 15025 - DNA, 495 bp, Glycine max
  Clone ID: jC-gmle01810083e03d1
agtattctcaaataatgccttagtcgctaccgttgatacactgaaattaaacaagttgctgctaaactatagcgacactatttcccatacaatgacaagaactttgaaaaagacgaactctcaaaacacaaataccaccttatcactgagtctgacaggtgaaaaagacaagaacccataaatacatacatagctgacaaaagagccatatgtttgacctttcaaggccctagtacatttggagccataggtttatgtaattcactatcatcatctgttggaacatatgtaactacgaatgctgttgttgttgtccatggctccatgcagatgctctagtccttttccttcctgctccctttcgtgttaaaagattttagaaactgctttaaattaagagtagaataatactatattaaaggtatataacatagtggtgctctttaccccttagcctctgaatacaaaacttaacattctcaaaagagacattgg

SEQ ID NO: 15026 - DNA, 477 bp, Glycine max
  Clone ID: jC-gmle01810083e04a1
ctttctgtcaggagtcagcaatcttgtccttatgccaagaagaggtttgcttcaggaccggggcatggagtcatacaatccatgccacatgcaaatgtttctggcagatcaaggtctagttccttttcaaagtcgtcaatttcttcacctagatcaatagacaagcaaaagggcattttcattgacaatgacattgccggaccatcttgctcaagtcaaccatcaccaccacctgatgatgatgaatcaccaaagttggtaaagagaacttctgttggaaggaagttgagggaccattatttctgttttggtgcacctggcattaatgtcaaaaactcagttcacaggcagcaataaagccagagttacaaggctcatgttgttgcagtggcttaatgggatgagcttatataggtaattctcctgaccaggctaattcaacaaaatagggatgaagctgaatcattaactttaaac

SEQ ID NO: 15027 - DNA, 497 bp, Glycine max
  Clone ID: jC-gmle01810083e04d1
aacaaaaattcttatgactgcttaatccaaaaggtttaatgggtacattggcaacactaattcttacattactaagcaccaaattgagttaatttgatgctaatatgataatcatattttaacagcattttaccattaacaagtgaagttgaggatgagctaatccttaagtaacaaaatataatctataaaagcttgcaactaaggaacccccaagggacccttaacagtaaagtttaaagttgatgaatcagcttcatcccttatttgttgaattagcctggtcaggagaattacctatataagctcatcccattaagccactgcaacaacatgagccttgtaactctggctttcttgctgcctgtgaactgagtttttgacattaatgccaggtgcaccaaaacagaaataatggtccctcaactttcttccaacagaagttctctttaccaactttggtgattcatcatcatcaggtggtggtgatggttgac

SEQ ID NO: 15028 - DNA, 413 bp, Glycine max
  Clone ID: jC-gmle01810083e05a1
gaaaggagaggagttttggtttcttaaacctcgtttcttctcaatacaaaaaaaaaaaatgctgcagaagctgtgtttgatggcttctcatggatgccctcccggactttctttgcagcaagagctggccatggttggctgcaccattaccaagggttgtaaaccattattgccttctcctgtattgaaactagaaattatcagatatgggtcctccctaaatccattcgaggagtctagcaagtcccagaaagagtggttcaattctaatcagattgtcaacatgaacttgtcgactcaaaggcctatgctcattgatgtccaagaaacctatccaagcccagtagattttggctttggcatcgttgaacaatgcagtgagcacgataaaattttgcagtgtatcatgtctg

SEQ ID NO: 15029 - DNA, 389 bp, Glycine max
  Clone ID: jC-gmle01810083e05d1
ttttttttttttttatttttttttttttttttttttttttatttttttttttttttgggttttttttttttttttttttcatatttaaaccacatttattcaaaataataattttttttttttatacaaaaaaaaaacctccccccttaaccaaaaaaaaaattcccaaaaaatattttttttaaaaaaaattaaaaataaccctaaaaattttccccacccccctaaacccaaaaaaaaaaatatttctctctttttttaaaaaaaaaaaaaagctaacccaacccccataaaaccacccaaatttgtaaaaaaaaaaaaacccccaaatttctcgcccacaaaaaaaaaaaaaaatttatatttttaaaaaaaaaaaaacttttttt

SEQ ID NO: 15030 - DNA, 498 bp, Glycine max
  Clone ID: jC-gmle01810083e06a1
gaacaagtagttgagaactaagattgagaagcaaatggcttcctcaatgatctcgtccccagctgttaccactgtcaaccgtgccggtgccggcatggttgctccattcactggcctcaagtccatggctggcttccccaccagaaagaccaacaatgacattacctccattgctagcaacggtggaagagtgcaatgcatgcaggtgtggccaccagttggcaagaagaagtttgagactctttcctacctgccagaccttgatgatgcacaattggcaaaggaagtagaataccttcttaggaagggatggattccttgcttggaattcgagttggagcacggtttcgtgtaccgtgagcacaacaggtcaccaggatactacgatggacgctactggaccatgtggaagctgcctatgtttggttgcactgatgcttctcaagtgttgaaggagctttaagagcttagactgcatacccaacggcttcattcgta

SEQ ID NO: 15031 - DNA, 497 bp, Glycine max
  Clone ID: jC-gmle01810083e06d1
cattagttctcatccattaatttccattgaagtccgaaaacagaaaccaaaaatacaggatgatgaaatctcaaaaagcaaaaacaaatgggaatgtagtttaagtacaaacaaacaaagtggggtggcggctacaaatgctttgcaaatttttcacacttagaagcctgggggcttgtaggcgatgaagctgatgcactgcacttggcgaacgttgtcgaatccgatgatacggatgaagccgttggggtatgcagtcttagcctcttgaagctccttcaacacctgagaagcatcagtgcaaccaaacataggcagcttccacatggtccagtagcgtccatcgtagtatcctggtgacctgttgtgctcacggtacacgaaaccgtgctccaactcgaattccaagcaaggaatccatcccttcctaagaaggtattctacttcctttgccaattgtgcatcatcaaggtctggcaggtaggaaagagtctcaa

SEQ ID NO: 15032 - DNA, 505 bp, Glycine max
  Clone ID: jC-gmle01810083e07a1
gttggttgttcttgggtaaggtattggcgagagagtccagtgagtgagtgttagcggttctggaaattgattgagtcgaaaagaaccctaacataaaatggattctcaggttgccgtagctcttgctctttcacttgttggtggtgtcagcacttctatcggtgcactttttgtaattgttaataaaacgcccagtttgaagatgcttgggctattacagggttttgctgctggtttgatgcttagcatatcgttctttgatttggcccacaatgctttgaactcactgggcttcttgaaaggaaacctttggttttttgccggggtaatattctttgctgctggtgccagttttatcccagagccaacacttactcccacttctgatgtgaagggcagaaagaaaaatggggatgaaggagacaaggatattatgaaaaagcatcgtcggcaagttttatttcagtggaattgtacagctgtaggcataagtttgcacaatttt

SEQ ID NO: 15033 - DNA, 332 bp, Glycine max
  Clone ID: jC-gmle01810083e07d1
gggcgagttaaagtccattatcgttgatgatacagcatacaaggggggtcttttaaagaatttaaaggggttattcttttattttttttggaccttagtctataggggaacccccatcttatggggaatgcatccctcaaaattgatggctgattgattattttcctaaacacatgggggggccttattgtccttggaccctatttgaaaccccttttgaaggaactttgctgcgatggatgctacaagcttaagtccttaggtaagctgatacttaaaaaatacaggcttgcaaacatgaaagccctccccaaaaaaacagccttaacaaa

SEQ ID NO: 15034 - DNA, 550 bp, Glycine max
  unsure at all n locations
  Clone ID: jC-gmle01810083e08a1
gttgttctctgtttcgattcagcggaaacaaacatgtcgtggtgttacggcgctgagcctatgactttgcagttgccgttgcaatcaagagcagcatcatcgttccattcccacgttggaggagtaacagtaacattctcaacactgtctcttcgaccctcttctcctcttgttctgacccacaacctccacttccaacccaaactcaaacgcgcttccacaaccattcgctgctcctctgcgttgactcctcaattgaagtctaccttggatcaagttattgcttcaaataaagtagttgtgtttatgaagggaactaaagactttccacagtgtggattctcaaacacagtggtgcaaaatattgaagttcttaaatgtgccttttgaaaccataaatgtgcttgaaaatgacttgttgcgccaagggctgaaagagtacttcagttggcctaccttttctcaagtctacatagaaggagagtnttttgggggtgtgatatcactggtgaagcattataaaagggggaattgctggagctgttggaaa

SEQ ID NO: 15035 - DNA, 441 bp, Glycine max
  Clone ID: jC-gmle01810083e08d1
actcaaataccgggatattgggtttgcagtaatcataataggcaattggggacacaaaatgcatcatacaatttatttggcccattggcactggaccccagtataactttagggggaagattacaaattgcaaacttgggaaggcctcatattccttccatagcttaaggacaacaatggcttttccaacaaatcctgtaattcccccttctgatatgcatcaacagtgatatcacacccaccaaaaaacttttcttttatgtagacttgaggaaaggtatgccaactggagtacttttttagcccttggcgcaacaagttatttttaaacacatttgtggtttcaaaaggcacatttagagactttaatttttgcaccactgtttttgagaaatccacactgtggaaagtttttttttcctttataacaccacttctttt

SEQ ID NO: 15036 - DNA, 345 bp, Glycine max
  Clone ID: jC-gmle01810083e09a1
gaaactctcaagcaatattcagattcaatgaagctgctctcttattctagcttagttgggactatccttagtgcaatagtctcggggatagttgagagggacataaatgcttggaagataaagcgtaacaaggatgtcattctcattgttctaactgcactagttgggggagtgattcgtcctaatattcaagtatggttcactcgcatgaagggtccactttatgtgccacttttcaagccatttggtattgcatttgccactacttttgcagtttgcttcttttcaaacagccttcattatggaagtgggataggaacaactggacttggaatggggcattat

SEQ ID NO: 15037 - DNA, 518 bp, Glycine max
  Clone ID: jC-gmle01810083e09d1
agtaaagctcgagatacgtgtattacatatgtttacagagaaattttttgtacaacgaaaatataaaggtctcaaaaaaaaattcgaccacctttttttgcatgctacttacatgtttcatgatttatatatacacagttggagttaattacaattaaaatatttgcaacatgggagagacttgtatttgtatcacaatcgtttgaaacgaatcaaacgaaagggaggaagattctgaaaaataggtgaattcctctgcctctagaatctttcgaagttctattcacacttccattttttcttgcaaaaggggtaccatcttgtccaaagaatcagagctttcgtcacagcttgtctcttcttcattttctctgagttgtccatacattactgtataatgccccattccaagtacaggtgttcctatcacactttcataatgaaggctgtttgaaaagaagcaaactgcaaaagttgtggcaaatgcaataccaaatggcttgaaaagtggccataaa

SEQ ID NO: 15038 - DNA, 408 bp, Glycine max
  Clone ID: jC-gmle01810083e10a1
cgagatcttccagctgctgccgcatgacacgcaggtcaacctgctctcggccacgatggcgaccgacgtgctcgaggtgacgaataagttcatgcgcgaccccgtgcgcatcctcgttaagcgcgacgagctcacgctcgagggcatcaagcagttctacattgccgtcgacaaggaggagtggaagctcgacacgctctgcgacctgtacgagacggtcaccatcacgcaggccgttatctttctgcaacacgcgccgcaaggtcgactggcttaccgacaagctgcacgcgcgcgagttcaccgtgtcggccatgcacggcgacatggagccaggccagcgcgaggtcatcatgcgcgagttccgctcgggcttgtctcgcgtcctcatcaccacggacctgtttg

SEQ ID NO: 15039 - DNA, 484 bp, Glycine max
  Clone ID: jC-gmle01810083e10d1
ctggcataggctcgcgcgcgcgatggcggcggccggcttggattttggctgcttcccccaggtgcgaggccgcagggaggcagtgttctatatacaacaggagcggagcccggggtggagaaggtagagggtgggagggaggcacggaaatgaggcagcagcgtcactgcagaaagaggtgatctgcagcgctccttcgtcggtgtggatgatggcgtcgaggcagccgccgtggcgtgcacccaaagcatggtggggcgagtgggaagcgtgtgcatggcgccttgcgggcaaggagagcatacgtgcagcgcggcgggtcaggctgaggtggcggaagcgcgcgcaggatgccccgcggttggcgacggagtgacgatgtcatgtcgtggtcaaagagtttgcaagacggctgctaaagcgtgctggtgcggcgggtgaagggaccagatgggaataggtgacgggaacaacaggcgccggt

SEQ ID NO: 15040 - DNA, 513 bp, Glycine max
  Clone ID: jC-gmle01810083e11a1
gggaagctgatgaactgcgggggatgttgtagctgcggaacatgcatagctagagatgggttgaaggaaaggatcttttaaatgaaagaacaaacactgaattcagatatcttaagaagaaacccgaatcttggaggctggcttgtcaaactattgtcggaaacaaagaaaactctggcaaggttgttgttcaaaggattcctcagtggaagaagtaatagaccatgctaagcaggacctctggattcttagaaagaagagcttcatatgttcctcctcaatttaacacagtttgaagcaacactacaaatcactgatgctttcatcataaatatatggaaacttttgctttggttcttaatgtaatcacgcagatatctgtattgtataattttccttcatgatttgtaatgcttgccacttggtttcaattctttaggttaggatacaaatctttggcgaataatagcatgtgtgctttatccaaaacccaccaatgtgcagaatatgtga

SEQ ID NO: 15041 - DNA, 424 bp, Glycine max
  Clone ID: jC-gmle01810083e11d1
aaacaagttcaaaattgcattgcttgttggtttgtcctttatgtactcttttcacatattctgcacattggctggttttggataaagcacacatgctattattcgccaaagatttgtatcctaacctaaagaattgaaaccaagtggcaagcattacaaatcatgaaggaaaattatacaatacagatatctgcgtgattacattaagaaccaaagcaaaagtttccatatatttatgatgaaagcatcagtgatttgtagtgttgcttcaaactgtgttaaattgaggaggaacatatgaagctcttttttctaagaatccagaggtcctgcttagcatggtctattacttcttccactgaggaatcctttgaacaacaaccttgccagagttttctttggttccgacaatagtttgacaagc

SEQ ID NO: 15042 - DNA, 511 bp, Glycine max
  Clone ID: jC-gmle01810083e12a1
gtgttgaccacgttctatcatgtcttttgcagcgctctcaatcccatatgcagctgggctaggcgcatgcgcttttctctactttgttgtatatccggtcatcgaatattttcgcgatgttaacggtcttcgacgctatccgaacatgcacccgctctcgggtatctcttcgataccgttcatggtgcttgcacacggcggggcacggtccacatacttagagaagttacatcgaaagcatccagtcatccgtgttggccccaacttcctgtcatacggcgaccttcgagctgtaaaggatatctatggccataacacgccctgcaccaaggacggatcgtacgtgattactgcgggctctcattaccatcttgccgatgtgatagacaagcacgatcatgcccgaaagaggaaattgatgagctccgcgtatgctatcaagaacctggagggctgggaacacaaagtagccgacaagacgcagaagctactgaagcacttcgacgagtgc

SEQ ID NO: 15043 - DNA, 485 bp, Glycine max
  Clone ID: jC-gmle01810083e12d1
ccacgtctatcaatttgagctatgtgcgcagatctatgaagcacccaaacacctctgttatgcaacaaaaagccttctccttactcctgctgggccgattttcgctttcgccgccagatcttcactggcatctgacccagaatccagttcatcgtctccaaccgttgcagctcccagtttggactgctcagcgcaaagtcatagcgtcgcaacacgctcgcgagcaccacagtttgctcaagatatgagatgttgcgaccaatgcagcctcttgcgcctgccgagaaagccagaaagcagggttgcaacgccttgcccttttcacccagccagcgcttaggaatgaacttatcgggttgtggaaacatggactcctggcgatgcgcaacgtatgcaaacatagcgacagagacaccacctgggatgtagacaccgaggatgttcgcgccttctgttggcgtttgtcccggcacccctgaggggtc

SEQ ID NO: 15044 - DNA, 327 bp, Glycine max
  Clone ID: jC-gmle01810083f01a1
attttaatcacgcgcacattatctcaacacaacaattcactaagctaaagggacgggatcatggcttcctcgtgtgcttcctctgccattgcagctggtgccatctccacaccaagttcccagaagaatggatcactcttgggaagcacaaaagcttcttttcttagtgggaggaaactgaaggtgaacaactttacaccagttggagcacgatccagcactacaggttgcgcagttgctgagcctgataggccctttggggttcccaggcagcaccccttccttcatgggctaaatggcagttttgccaggaaaaattttgggctt

SEQ ID NO: 15045 - DNA, 494 bp, Glycine max
  Clone ID: jC-gmle01810083f01d1
gtgattacttcctgaatttacattaaatgcatctaaaccttaaataggtatttgtacattgaatcttcaatctatgcatgacaatagaagtagccattttacaagctttcaccaacataaacactcccacctaaaaccatttaagcgttacaacttagttaaaaaggtttgccaatgtttctccaaggcttgcaatcatagagttgttccaacacttctcacttgggagtgaaagcagcaaaaatagtagcatggccaggatctgcaaggtgagcaaagaggttgtcaataggaccagtgccagtgtaaatgtgctggaaccatgcccccatcacagccaacatggccaacctcccattcttgatctcctttgttctcaactccttgatcttctcaggagaaccacttccccagccaagtgggtcaaaccaaagcccacctgggtacccaacatcagttcctgtgagcttgttgttgggaaagatggggtcagt

SEQ ID NO: 15046 - DNA, 586 bp, Glycine max
  Clone ID: jC-gmle01810083f02a1
gcaaccaccacaccacacagcacttcccttttcctcctccaccatgtcattgccaccgccggcgctggtaacggcggcgactccgacggagcttccgatccggcagattccgggaagctacgggttcccgttgctgggccccatctcggatcggcttgactacttctggttccagaagccagagagcttcttcagaaagcgagtggagaaatacaagagcaccgtgttccgcaccaatgttcctccctccttccccttcttcgttaacgttaatcccaacgtaatcgcggttctcgacgtgaaatcattctcccacctcttcgacatggacctcgtcgacaagaaggatgttctcgtcggagactttgtccccagcgtcgccttcaccggaaacatgagagtcggcgtttaccaggacactaccgaacctcaacattccaaggtgaagaactacatcatggatattctgaaaagaagctcaagcatatgggtatcagaactagaatcaaacctagacacactgtgggacaacattcgaacatcactctcgaatcctcatcagtttcgaaccttttccgtacaacag

SEQ ID NO: 15047 - DNA, 510 bp, Glycine max
  Clone ID: jC-gmle01810083f02d1
atgaaagagttgcataaacctgcctcttctatataaatagatcatcattctcaagtaaataatataccttagataaaatacaagctccacaatgaaaatacacatttacccttctttcacttggtcttttgaagggcagtgatggaactgccatccccttggatggaatcatacctgcgaaaaaggtacgccacaatcaaagccgcggtgagtgtgacaacgtccttacccgcgcactgtttattggacacactgggcgacccggtctgaggcccattggaccaatacaagtagttcaacaactgggcccctttctcttgggtgaaccggtccggcttgaaccggtccggttcgtcgaatataacggagtccctcatgacgagcttctgaaagccgcacagcaactcgcccttcttgacgtggaagaccgagtcgtgcgaactcaaccggaagtcctttcgggctcgaccgtactggagtggaaccggagggttcatgcgcagcgtttcg

SEQ ID NO: 15048 - DNA, 519 bp, Glycine max
  Clone ID: jC-gmle01810083f04a1
cataaagatgctcatttatggaccaatattaaggaaatgagcgcacgtgaaatggcagttgcagcacgtgagggttctagacagcttcagatcctcaaatctgaagataggaggaaaatattgctggcaattgctgatgcattggagaaaaatgaaagtatgataaggcatgagaatgaggctgatgttgctgatgctgtggtagctggatatgaaaaatccttgatatcacgtttaaccctgaagcaagagaagatctctagtcttgcaaagtctgtgcgcttgctggcagatatggaagaaccaattggtcaaattttaaaaaggaccgagctagtagataaactcatcctggagaagacatcatgtcctttgggtgtccttctggttatatttgagtctcgacctgatgcccttgttcaaatagctgcattggcaattcgaagtgggaatggtctactgcttaaaggtggaaaggaagcccgacgatcaaatgcaatcttacacaaggtcattact

SEQ ID NO: 15049 - DNA, 414 bp, Glycine max
  Clone ID: jC-gmle01810083f04d1
aaaaaacctccccctaattattcaagttccctaggccggggggaaaaatatttataaccggccccgcattgggggtttacaaacccggaattttttataaaagagcccccaggggccacataatcaaacaggggccttcctatgattatttccccccccctcgaacttgctccaggaaaaaaaaaggccccggaagggggtaagggatagtcaccattattgggggcccgcattttaacaacttttggatattatagccaaacaaaaaaggggggctgctttgttgaaggggggcctatttagcttggaagggaactaaaactttgcttgcaaagctatgcttttagggggagccctttggagggggaattgaacccttgataaccataaaccacaggccccctccctttaaaa

SEQ ID NO: 15050 - DNA, 492 bp, Glycine max
  Clone ID: jC-gmle01810083f05a1
ctaaggttacagtagtacatcattataaataaaaaaaagtctacacactactatggggtgtgtaacattctaaatttctaactttcctctctctctctctctctctccgaggtcttagatctctgctctgtctctatctctacttgaggcctttccctctgttccgttggcgggtgggtctttcttctctcaaaatggccaccggagtgaccagaaaaatttctgctgcatcagctcgggcccacaccagaagggcgaagaaaaccaattctctaccccttccttcaggaattcttggaacagcactagcagtgttgtttattgggtttctagcatgggcttatcaggttattcaacctccccctcccaagatatgcggcactcctgatggaccacctataacagcaccaagaatcaaattaagagacggaaggcatttggcataccaagagcatggtgttccaaagatgccgcccagtataaatcatctct

SEQ ID NO: 15051 - DNA, 463 bp, Glycine max
  Clone ID: jC-gmle01810083f05d1
ctgttaaacaacttcccacacaagggaatatagttcatacaattattgagtaattgaattctccctaccattaagtgtacacaatgttgttcaaagttgatcatacatcattctgttcaacagtttgaatcctccaaaactgagatattaaatgctgaaactgacctgagatagaccgtaaccaatatagaagccgccaacttttcacagacagtaactaacataaaagaagcctacttcgcacgtaaaagtgacttgatgatagtatcactcataccatcagcatgagcaaaaatgtgaccagaaccttggagttcatgatagttaatccatggaaggttttgtgctatgtatcgttgcagtgtaactggaaccatcatatccttatctccttgccaaagatggacagagccttcgttatttggaaatgggttttcaagatcaaggggactatattcccagt

SEQ ID NO: 15052 - DNA, 449 bp, Glycine max
  Clone ID: jC-gmle01810083f06a1
caaagggaagatacgacatcatgttgaactacatgcctaaagttggctctcttgggcttgacatgatgttcaggacatgcactgtgcaggtcaatctggactttagttctgaagctgacatgatcaagaaatttcgtgcaggccttgctttgcagccgatagcaacggctctttttgcaaattcaccctttaaagagggaaagccaaatggttttgtcagtatgagaagccatatttggactgatactgataaggaccgcacaggcatgctgccttttgtttttgatgactcttttgggtttgagcaatatgttgattatgctcttgatgttcctatgtattttgtctatcggaaaaacagatatatcgactgcactggaaagaccttcagggactttttggctggaagacttccttgtatccctggtgaattaccaactctcaatgat

SEQ ID NO: 15053 - DNA, 500 bp, Glycine max
  Clone ID: jC-gmle01810083f06d1
aaagaaaaatttgtgtttattcaagcaacatttgcgcctagggcctaccacaaacatttaatctattgacactcttattaaaatgattatattgatggattttcaaatttgtgacattgaatgtcagcttgatcagatcatgttttccaagaaaggtatatgagaagcctcaaggcaaaaattacatttatattatttcctatatctaaatgaagctcaaatgagagataaccagaactataaccaaaggattacacaattaatcttccacagacatttgaaagacaatactaccttaataaagcaattcctcaaacacatgatctacggattgctcccactttccatgatacaattccaaaagcctctcagctggagtgacacctgttctaaccacctcggcaacctcattcaaaaatcccgattccttgaagcctcttctctccaagccatcctttgccaactttagaacatcttcagcaacatgcttcagcaaaccg

SEQ ID NO: 15054 - DNA, 327 bp, Glycine max
  Clone ID: jC-gmle01810083f07a1
tttcacaccatttttctattgacttcatcacaatataaaagatcattagtgtcggtattatcaccaccatattcttttggacttcctctgctatttctaggtttcgttttatttggctttgattttcttctgcaaccttatctactgcaaagctttgattactgagtctaacttaccctgccacagtttgccttgtttacctgagctctgtttttaactggtctttgatcaaggatggccataaaggcaattgagttgttgaaaggaagcggaaaccatgaagagatatttgaagttcttgcagcagtggctgcatctttgggggat

SEQ ID NO: 15055 - DNA, 365 bp, Glycine max
  Clone ID: jC-gmle01810083f07d1
gcggggaaataaaccatttattggaaatcacaaaacattaacaaactaggaattctcacttccattcctcaacttatcacaaaaggggggattactaacatacctggtgtaaaaattctcaaatcccccatttttagttatatattatttacaaattttatgcatcacatcatgcctttctattttttagtcaacacataccaagttgaacatgctaaaaacataaaaagcatccatgtcaatgggtcacaccattggcaatcccattttgggaaaccattcttggtgagtccaataaaggaggctttttcaaccaatattggtgaaatttttgcctcgcatactccttgtagtcaaaaacaatt

SEQ ID NO: 15056 - DNA, 396 bp, Glycine max
  Clone ID: jC-gmle01810083f08a1
aagggaagcaatcattggcaaatttacaacaagaccagttgtggagcatttcatggcgaatagttgctgacatgtggctcaaaaccatgagaaatccagatatcaatcttggaaagtagtaattagcacctccattctattattaattaattatgccaaggaagtagtcttgcattcatgtccaagtgaaaggttgttcttgtctacaacacacctaagccaagccactgcagctacctataccatttgggaagatttatgaattcaagaattgtgtaaatgttgtcatcattagttgtttctgtaaaagtcaataaaatttctaagtcgtatataagacatatggtatttcaacgataaaaggtaggttttagctctaccaggtttcatgccatc

SEQ ID NO: 15057 - DNA, 396 bp, Glycine max
  Clone ID: jC-gmle01810083f08d1
gatggcatgaattctggtagagctaaaacctaccttttatcgtggaaataccatatgtcttatatacgacttagaaattttattgacttttacagaaacaactaatgatgacaacatttacacaattcttgaattcataaatcttcccaaatggtataggtagctgcagtggcttggcttaggtgtgttgtagacaagaacaacctttcacttggacatgaatgcaagactacttccttggcataattaattaataatagaatggaggtgctaattactactttccaagattgatatctggatttctcatggttttgagccacatgtcagcaactattcgcgaagaaatgctccacaactggtcttgttgtccctttgccaatgattgcttccctt

SEQ ID NO: 15058 - DNA, 515 bp, Glycine max
  Clone ID: jC-gmle01810083f09a1
ggctcgagcaagattcttagagctcggcaaccttattgggacctcaacttctacagtaatctttccaccagacatcagcttccatgattttctgcactctattctgaggtgaccaattctgttcttcttttctcgcataataaagtaatcaataagcacataaaccttcgaggacatggcatcagccttgtccacgaccagtgtgctttgctggaggaatcctcagcacatgcatattatctcaccctcttcacagacacttcaaaatggaactctaagaactgtagctgcttcagcctcaaaagatatcagcatagaaagtgacaagtgttcctctttgttggtgaacagaagaacaattttggcttctggggtttccttgttgtctttcccgggtgagagtttggctgtggtgaaacaaggccttctagcaaggagaattcctggcctgtccgagccagatgaacaaggttggaggacctatcgcaagccggatgagaagtcaggaggacatg

SEQ ID NO: 15059 - DNA, 448 bp, Glycine max
  Clone ID: jC-gmle01810083f09d1
ggaaaaaaaaccccacggggttggttttttggagggcccaaaattttgcctttaatctcttggttcaaaaaaatccccctcaaacaaagtggggggaaaccccccttttgggggccccccccccaaaaataaaaggcgggctttaaattaactctggggtcccaaaaaattttttttttcccccccggaaagaatcccctttttttttaaaaaaatgggaggggcttttcccttgaaaacccctggctgttcccccaaacaaaaattaccgggtcgccacctggaggggcacaaaaaaaaataggggggggcttcaccccaaacgggggagaagtttttccttcatgtttgggggacataacgctaaaaacctttccttttacattttccccaaatatttttgggcccaaagcctggatccctttttttggagggcccattttttttt

SEQ ID NO: 15060 - DNA, 495 bp, Glycine max
  Clone ID: jC-gmle01810083f10a1
cgacaacagtgacccagacaatcgctttctgattccccgggaaatctatcacaatgccgtccaacagactcacctacaggcgtcgcgccccctacaacaccaagagccagaaggtccgcgtcatcaagacgcccggtggtgagctccgttacctgcacatcaagaagaagggcactgcccccaagtgcggtgactgcggttccaagcttcagggtgtcccagccctccgcccccgcgagtacgcccaggtttcccgccccaagaagaccgtccagcgcgcctacggtggatcgcgatgcgccggctgcgtccaggaccgtatcgaccgtgctttcctgatcgaggagcagaaggtcgtcaagaaggtccttcaggagtcccagcaaaagaagcgttaagcggatgcattgagtgaaggggtttagcatgtcaaaactgggtcttcggtgttcatgtgcattatgggcagtctcctgggtcggtcggcttttacga

SEQ ID NO: 15061 - DNA, 445 bp, Glycine max
  Clone ID: jC-gmle01810083f10d1
ccggggagctgggggatgtattcgggaccctactcagctacatcctgggggagggacgtaaaaatcgctttgatatcgtaaaagccgaccgaaccaggaaactgcccataatgcacatgaaccccgaaaacccagttttgacatgctaaaccccttcactcaatgcaaccgcttaacgctttttttgctgggactccttgaggacctttttgacgaccttttgctcctcgatcaggaaagcacggacaatacggtcctggacccagccggcgcattgggatccaccgtaggccccctggacggtcttcttggggcgggaaacctgggcgtactcgcgggggcggagggctgggacaccctgaagcttggaaccgcagtccccgcacttgggggcagtgcccttttttttgatgggcaggtaacggagcttaccaccgggcgtttt

SEQ ID NO: 15062 - DNA, 452 bp, Glycine max
  Clone ID: jC-gmle01810083f12a1
ggctaatgatgcttgggtgggtgcttttcttcggtagcctaacggtgggagtgggagcgatgtctgagtccccaaagtggcttgtgatgaggggtcgtttgggaaaagcaaaaaaagggctttacaaaaccttaaaccgtaaggaagaggcccaaatatggctagtcgaaatcaaacaagccgcagggatccccgagagttgcaaccacaaccgttttcctggaacccacacaaacacatgttatagcgtatggaaagaactttttctttatacaacgcccccaaattgtcacattgtaatcgctgtccttgggattcacttttttcaacaagcgttcggcgttcactcccgttttttgttccgccccatgatctttaagaaggctgggatcaaagaccacacgcattaactttttgcaaccccgggcggttgatttcttaaaaccggtttt

SEQ ID NO: 15063 - DNA, 518 bp, Glycine max
  unsure at all n locations
  Clone ID: jC-gmle01810083f12d1
accctgcgcccgcagcctcaacgggattttctcagaactataaacccacgtgatgggacccgcaccaatggagaacgtggccacgtaagccaacaccatggctatgctcaatgcaacggcccacattagtttcctctcggagtgaccaatgatcgtgaggctgatagcgagcgtgaggagagagagcaccatgcccccgacactagacaacaacaacggacgacgacccacgcggtccaacgtaaaagtagccgccaagatgaaaacggttttgacgaatccaacggccacggttgcaagaagtttatgcgtgtcgtctttgatcccagccttctcgaagatcctggggctgtacaaaacgacggcgtctacgcccgacgcttgttggaagaagtgaatcccaagggcagcgattacgatgtgacgaattggnggcgttggatagaggaagagttctttccatacgccttcacctgtgcttcgtttggttacctgaacgacgtcgtcgatgcaactct

SEQ ID NO: 15064 - DNA, 296 bp, Glycine max
  Clone ID: jC-gmle01810083g01a1
ggtaatttgtacaaggtgaaatcttaaatgaagtatgccatgaaaagttactgcggggagttctatttcaagactgaccctgatgttgatgcaggaaaacttgcggactggaattttgatttgcatgatctgcagttatgttttggtgtaaaggagtttttggtgattgctcctcagagtgcaagtggtgtggttcttgatgcgccagagtctagcaagctcttgagtgctattgcaattgctttgtctaattgttcaagtttatggccagcatttgttccagttcatgatccatc

SEQ ID NO: 15065 - DNA, 350 bp, Glycine max
  Clone ID: jC-gmle01810083g01d1
aaccaagaccataagtggggacataaaaatggaagaaatttccataagagagtgagttgttatataagcagtaagaagatagatacaaatgataacaaccgagcaggctctcacttgctaagttcacctgtcaactttcccagaaaattcctcactgggtgtctgtagactgaaagagtcatccccaactacactttcttcctcactcatggaatctatttgatccaagcttccaatacaatcttgatagtcttcactcagctgacactttctctcaatgcatattggcagcatttgaagtttctggttaatcaaacaagtggattggtcaattgatccattagctggca

SEQ ID NO: 15066 - DNA, 512 bp, Glycine max
  Clone ID: jC-gmle01810083g02a1
caagaatcatagaacaataaatttttagatatttcgtgatccttggctcctccggggtaggtgccttttcttcttcttcaacaccgcatcatcaacatcgtcaccccatcaaaccaccccacaagccttctctcccaaagctcgctcctttttcttccaattggaacatttcctgcgccctccaagccccactcgctctcagccactgcgctgattcaaagctcgttcaggaatttgaagtggtttttgaggactttattgattctggggtggtcgatgctgagcttctggccaaggtggttctgttgggaattcgagggaagaaggttcggagtgtgattcacgccctcaacaaagttcagggccgaagaatttctttgtctactcatcttaaaggctctgatatcattgcaaaggagtgttgccgcttggtcacgtgcagccacgttgaggaagctgttgaactcatggaggctctcgcacgtttccagatatcaatcagggaacttgtt

SEQ ID NO: 15067 - DNA, 333 bp, Glycine max
  Clone ID: jC-gmle01810083g02d1
gggaaaaaaagggcatatcttatctaattttggcccaaaatttctgtgagttataattaaactttttaacccttacttcctgtgcaaccaacggtttaatgattttttggggaccttcaaccttactagaactccaggcctccttgtttgaaaccccaatgctttctctccaggttgggctttttttcccaaattaaaaaagtgggggtcccctaaatttgctggggcactttaggccaatctgtgtttgggtggaaaaactttaagccccaacttatttctaagaagttttattatggcctcttgcccttctaattggtgttggggggggtt

SEQ ID NO: 15068 - DNA, 559 bp, Glycine max
  Clone ID: jC-gmle01810083g03a1
cttctttgcacagcgggcgatatttaaggtgcctggtgtaactgatatcggccttgagccaagaaatgtgaaaaaagctgctgttattggaggaggtctaatgggttctggcattgctacagctcttatactaggcaacattcgtgttatactcaaggaaatcaattctgaatttcttctgaagggaataaaaacaatagaagcaaatgttaatggcttagtaagaagaggaaagttgacgaaacagaaggcagatgctgcactgtcactgcttaaaggtgttctggattactcagaatttaaagatgtggacttggtcattgaggctgtaattgaaaatatcagtctcaaacaaactatatttggtgatcttgagaagatttgtcctccacactgcattttagcatcaaacacatcaactattgaccttgatgttggtggtaaaacgaccagctctcaagatcgcattgcgggtgcccattttttcagtcctgcccacattatgccacttttggagattatacgaactgataaacttctgcacaagtgattgttgatc

SEQ ID NO: 15069 - DNA, 487 bp, Glycine max
  Clone ID: jC-gmle01810083g03d1
gaaggaaattacttgattaaagtagcatactgaggccttactagtcacccccaagaaacaattcttttccttaaatttttctctttgtgaaaccaactttaatttattatttaatctaggaaggaagcaaacattagttgttacatttttttattgtagaacatccaacatgctgaacaattggctttctcatagacgcgccattgactttggagtagatgaagcaggtgcactcagaggaattcctttgagtgctctttcttccaaataccttgagggtttatagaagttaccatataattgtgcccatttttttaggctggtaaatatatgattagccccaaccaaatctgcccagaaaacaatgccaccccggtaatttgggaagctcattccaagaacagatgcaatgtcaaggtctgatgctcgtataacaactccatcttctagaacacggcatgcctcattaactactgggaatagtatc

SEQ ID NO: 15070 - DNA, 229 bp, Glycine max
  Clone ID: jC-gmle01810083g04a1
tatgtttacaaagtatacaatatttagattttatggcaagattgtataaaattgggattgagggcacataattcttcaacaggttcctggatctagatggcaatgtattggggaaaatttggattgggaggttttggacaaaaaggaaagggagtgtaaagttttattttttgaattaagagtatatagtgtttataaataaatgaataagagatgaaaatttcatgat

SEQ ID NO: 15071 - DNA, 229 bp, Glycine max
  Clone ID: jC-gmle01810083g04d1
atcatgaaattttcatctcttattcatttatttataaacactatatactcttaattcaaaaaataaaactttacactccctttcctttttgtccaaaacctcccaatccaaattttccccaatacattgccatctagatccaggaacctgttgaagaattatgtgctatcaatggcaattttatacaatcttgccatactatctaaatattgtatactttgtaaacata

SEQ ID NO: 15072 - DNA, 600 bp, Glycine max
  Clone ID: jC-gmle01810083g05a1
atccccccagaccagcaacgtcttatcttttccggaaagcaacttgaggacgggggcacgctcgccgactacaacatccagaaggaatcaacccttcacctcgtcctccgtctccgtggtggcatgcagatcttcgttaagaccctcaccggcaagactataaccctagaagtcgagagctccgacaccatcgacaacgtcaaggctaagatccaggacaaggagggtatccccccagaccagcagaggctgatcttcgccggcaagcagctcgaggacggacgtacccttgctgactacaacatccagaaggagtcaactctccacttggtgttgcgtcttcgtggtggtatgcagatcttcgtcaagacccttacgggtaagactattaccctcgaggtggagagctccgacaccattgacaatgtgaaggcgaagatccaggacaaggaaggaatcccaccggaccagcagaggcttatttttgctggcaacagctagaggatggaaggaccctctctgactacaacatccaagaggagtcaactctgcacttggtgttgcgtcttcgtggggggttttaagctggagctgatttct

SEQ ID NO: 15073 - DNA, 489 bp, Glycine max
  Clone ID: jC-gmle01810083g05d1
ggattgagaacaaaattcaaacacaatgggccagcatacagttgataattatatatcagctccacaaattgataacaaacagtagtaacattaatgggacaatagagttcaacacaaaccaaacttattttcaaaggtcattacagacccattacacatcacatttcttcttaaaatgtttgggaaaatccaacatcgaacatcacacagaaatcagctccagcttaaaaccccccacgaagacgcaacaccaagtgcagagttgactccttctggatgttgtagtcagcgagggtccttccatcctctagctgtttgccagcaaaaataagcctctgctggtccggtgggattccttccttgtcctggatcttcgccttcacattgtcaatggtgtcggagctctccacctcgagggtaatagtcttacccgtaagggtcttgacgaagatctgcataccaccacgaagacgcaacaccaagtggaga

SEQ ID NO: 15074 - DNA, 531 bp, Glycine max
  unsure at all n locations
  Clone ID: jC-gmle01810083g06a1
cttgcaattgaagttgaagtctttcccttctctcttcaactccaaacacaagacgtcatcatccatggctgcctccgtctccactgtcggagctgtcaacagagctcttttgaacctgaatgggtctggacctggggtttcagctcccagttcatccttctttgggagcagcttgaagaaggttattggctcaagggtccccaacacaaagatttcctctggaagcttcaagattgttgctgtagaagagaagaaagagattgaagagacccagcagaccgacaaggacagatggaagggtcttgcctatgatatctcagacgaccaacaggacatcacaagaggaaagggtttggttgactcccttttccaagctccacaggatgctggaactcactatgctgtcatgagctcctacgagtaccttagcactggacttcgccagtacttggacaacaacatggatnggatttacattgctccagcttttatggacaaactttgtgttcacattaccaagaacttcatgac

SEQ ID NO: 15075 - DNA, 494 bp, Glycine max
  Clone ID: jC-gmle01810083g06d1
aggacaaaaggaaaaggcaccaaattcaatttaagtggacactttaactcaaaattatagaggaagacagtccaatatgaaaaatatagtaaaatcatctcaaacttggcatcttctctttgcacctaagacattgagaattctaagaatgttacacgcaagtcccatcacaacttctagcacttggatcagcacaaccttcaggaacagaaatatttacttgccaagtttgctttgcctccaattcaagattggaagaaagttcccctgttaatagcatcctcgttagcatttccaagtgcagcctcgttcaagtacttgtcagccaattggactctcttgacattctcttgttcttggacaagcatgttaccatacgtcaagagcttctccagagtcatcttgggctgctcaaaggttggaggtccatcttttgagttcacaagcttcttcccaatgccgtcaacaccaacaccagaaatccacttcctcac

SEQ ID NO: 15076 - DNA, 507 bp, Glycine max
  Clone ID: jC-gmle01810083g07a1
gcctttcttgcctagtgtttctttcaagcactctccaccttccatttctccatcgtttggcttgaggagtctgaaatcaagctctttatttggagaatcgctaagagtggcctccaaatcaacaataaaggtttcaaagacaaagaatacttcactcgtgaccagatgtgaaattggtgacagtctcgaagaattcctcacaaaagcaacaccagataaggggttgatcaggttgttggtgtccatgggagaagcattgagaacaatttccttcaaagtgaagacggcttcatgtggtggaacacaatgtgttaatacttttggggatgagcagcttgcagtggatttgctagctaatcagcttctttttgaggccttaaattactctcatttctgcaagtatgcttgctctgaagaaaatcctgagctcttggacatgggaggtccagttgaaggtggatttagtgttgcatttgatccccttgatggctccagcattgtggacac

SEQ ID NO: 15077 - DNA, 474 bp, Glycine max
  Clone ID: jC-gmle01810083g07d1
ggctgaagatatagcatatatctttttttctaaaagcagataaaatagacaatgaattgcaggtttaacagattaagcagctgctccaacagctacaccatccttgagcctggatttaccatacagggtttcttcaaaccggatgatctcattcttggatccataagcaacttgagttctctcatcaatgttagtgatgactttgtctagcacagactgatgaccatcactgctgtaacctccggctttttcaatcaagaaccccaacggagctacctcaaacaacagtctcagcttggctttggctgatggtgatgtcacattggtgaagatgcctttttcttttacaataatctggttgacatctggcaccattcctcccgtgtatctcaatgtgtacttttcattgacatagtaatcgatcaacttagcctaatcgggggtgtcagatgtggctcttaaatttcctgggga

SEQ ID NO: 15078 - DNA, 101 bp, Glycine max
  Clone ID: jC-gmle01810083g08a1
cttgaaactcctaaaattcttttattttttcaacagcgctactctctcaactctggtgcgcggtgtcggacttgaatctcaggctcttttgaaagagtact

SEQ ID NO: 15079 - DNA, 524 bp, Glycine max
  Clone ID: jC-gmle01810083g08d1
ttttctttttttttcaaacacaagcttttttatagtgcaaaacataatatttaatacaggggggtatgttagaccaactctaaactcaagatctctcgtttaacggtttacccacaagaaatcaaccaccctttaaggactaaatataattatccgtatacagtatacctatttgcctagctagtcggttcaagtagttaacttacaaaactgatctattctagactccttatctaccaaaagtcaacagctactatttatacattagagtggcctaaatatgcactgtttgaaacaatgcgactgacaaccatctcaccatttttcctcattgcattgctctcgtaatctgttttctccctacctgggttatgaagtcccatcatttttggccttcttgaaatgatatctttatctctaccatcgtaacccccaaatagaattgcttctcttatgggccctggccaaacggattctttcaaaataaggtttgactatctcgcctttacctcccctttaataaa

SEQ ID NO: 15080 - DNA, 480 bp, Glycine max
  Clone ID: jC-gmle01810083g09a1
gaagcatctaagtgagatacacatttgttaggtagcaagcataagtgtctaaccggagaaacatatctgctacatatcgtgtgcattttggaattgtgccactaaaattctattcatctatggctgcctcatcttatgctatgcaatcaatccttgcaaaccctatgatccgcatttccagcgggtctagggagaaccattttggtgttcctgcttatcacatgagaaggaatgttggcctgagagttaggtccatggctgaggaagagcaaccaagtcagcctgcgaccccagttacaccaccaccagcagaacccaaaccacagccagtctctactccttcaccaaaggtgagcaccaagttttctgatgtgttggcgttcagtgggccagcacctgagaggatcaatggaaggttggccatgattgggtttgtgggtgcaatggcagtggaagtagccaaagggcaaggtgtgtttg

SEQ ID NO: 15081 - DNA, 466 bp, Glycine max
  Clone ID: jC-gmle01810083g09d1
gaaaaaaaaaaatggggattttatatgctgattaaataaaggccccaagtacaaaaagagattggtctttctaaccacgaatgacttaagaccattttggggggcattcatgactgaattacaccaagggaccacccttaacatactcagtaaaagccagagcaaccaaacccaacatagcaaatttcccattccacagttctgcatctgaggacatgaaccctttggacttaaactccacgctgatcccttggaagagtggaatcaaggaagcaagggtaaggaccacacttgttcccaagaaccatgggataccaccattggatatttgttcaaacacaccttgccctttggctacttccactgccattgcacccacaaacccaatcatggccaaccttccattgatcctctcaggggctggcccactgaacgccaacacattaaaaaacttggggctcacctt

SEQ ID NO: 15082 - DNA, 515 bp, Glycine max
  Clone ID: jC-gmle01810083g10a1
ggcaaatcaacttcatcacaccactccatgtacctagtttcaaaagaagaacccttggcttggttgggcaaatagctaacccaaaactctccccctattctccacttcatcacactcccttccatctctttgcaaagcctccaccccactttctctccatattcatcccctgcaataaccaccgacccgcttttattaaacgctctatttgccctcgcatatcgccctctcagcccatgacccgggtcaccacccgtttcacttatgggcctccacgagcccatttcctggcccgtagtgttatcatgcaaaacgacgtcgaatatcgccgcgttcccttccgcgtcttgatccattctccaactcctactccgcgttctcctcgacgacttggctaacgctttcacattcgaaccctgcgacttctccaaattgccctccacaaccctcttagtttccacttcgctctctttgttctccgtccaccggaccaagctcagcccagcgcaataagt

SEQ ID NO: 15083 - DNA, 368 bp, Glycine max
  Clone ID: jC-gmle01810083g10d1
aaaaaaaaaggtttgggtttatttatttctttgggggaataaaaaatccctgacagcatgcccccttagttgccagctttaaggggccccacgtgtaagggggtgggctccaaaaacccttaccctgacaaaatccggggggctagggttgtggttttccccctaaaacgacaagaatttcccctcgattcttccgccctagaaaggggaaaaaaggaaaagaaaactacccttttcaaggcctccaaactaaaaccttaagcaagaagacagaaacagccttttaaaaccaccagttcctcatccctggaggggttaaacgggttccaaccggtatcatatccttttttttatcaccaaatattaat

SEQ ID NO: 15084 - DNA, 490 bp, Glycine max
  Clone ID: jC-gmle01810083g11a1
gattatccttttcacagccacgctttttttgctttcactgattatcaccctccccttgcgtattggttcctcttttcttatttttaattaatctttctcgtcaagtcttagatttttttgtttgctctctctctctctctctctctctacttcgagctaatttctgtgggtatggaacacatattatttatgtggtagagatcgagggtcgaccgtgctgaaaagagagattgaacgcatgctactttttcccctccaaagagattgctttatctatggtagagctgcttaatgttaaattcgtggtgattttgctgctttaagaactcggaaaccattggctagctagcattctgtatctgatcggttcaagggaaaagaaaaggacttgcgcttctgcagaattctttctctctctgggacactcctaatgataactgatattggtgaaggggaagagttacaaatccccgctcctttaaggtgcata

SEQ ID NO: 15085 - DNA, 469 bp, Glycine max
  Clone ID: jC-gmle01810083g11d1
aaaaataatattggcaaacacctttattacaccaatatctattttacagtaatagccaaatactgtgaagtgttaaatatatacacaatgagaataaacaagaaatgtgtaattggtctacctagtatgaaggaaaagagaaatcacaaaaactgtctacttccttaacaattaacaagccctaaatcggaatgtcaaaactcataaagcacaactatacatcctcatactacctgttgttatactgcaaaattaagtagcagatgatttgcaaatgaatcttcaaagctaaaaatgccgcaaataagtgctagaaaaggcaaaacctataataagatcgcaaggttgttactgtgggttgaaatgcagaggaattcattgtcatcttttggattttgttgcatgagaactggactttgagaactgtgatagtttcttcagaaacgtggatctttttaatggctttttt

SEQ ID NO: 15086 - DNA, 483 bp, Glycine max
  Clone ID: jC-gmle01810083g12a1
atcaggttccagtcccagaatactgttattctcgaataactgaattgtgtttctagggtatcttctctgaattgcaattgcaaatgaatgatcgttgaaaaactatgaagaaggtgaggagaaagatcggcaagtatgaggtgggtcgaacaattggcgaaggcaccttcgccaaggttaagttcgcaagaaactcggagacaggggatagcgtggctattaaaatcatggctaagaccaccattctccagcacagaatggttgaacagattaaaagagagatatccattatgaagattgtcaggaatcctaatatagttagattacacgaggttttggctagccagaccaggatctacataatccttgaatttgtaatgggaggggaactatatgataaaattgttcagcagggaaagctttctgaaaatgaatctaggcgctactttcaacaacttatagacacagttgatcattgtcata

SEQ ID NO: 15087 - DNA, 385 bp, Glycine max
  Clone ID: jC-gmle01810083g12d1
aaaaaagccgcgcgaagaaaaaaatcttccccttttgggggggccaaaccccccccctctttttttttggggggccccccccccctttttaaacaaaaaagggggggcaaaaaaaccgggggggggaaaaaaaaaaggccccccccccccccccccaaaaagggggggggggggaaattttttttaaaaatttgggcccccccccaaaaaaaaaagggggggggaacccccggggggggaaagacccgcccccccccccaaggggggggggggggggttttccccccccccccccccggggggggggggggccccacttttcttttcccccgggggaaaggaaaaggggaccccgcgggggaaaaaataaaaaccgggggggggg

SEQ ID NO: 15088 - DNA, 549 bp, Glycine max
  Clone ID: jC-gmle01810083h01a1
gcgaaattcgttggatttaagattttccgtttcaaattgtagtcagtgcaaagcggaaggcgagaaatgtaaatggaagaacaacagaggtgacatcgaatgtttcgactgcaaggacaagcgaaaaactattcatgttcccaaatcttttatttactctgcaccaggttcgattcttttggggttcgtggttattgtcgtttttaagatcatataccattttagacagaaacaagaagaccaagcaagggtggagaagttcttagaggaatacagggcagaaaagcctgcaagatttacttatgctgatgtgaaaagaatcactggtggttttaaagagaagctaggggaaggagctcatggggctgtattcagaagaaaactttcaaatgagattctggtggctgtgaaaatcctcaataatacagagggagaagggaaagagttcatcaatgaagtggaaattatgggcaaaatccaccacatcaatgtggttcgtttgcttggctattgtgctgaaagaatccatcgtgctctggtctacaattt

SEQ ID NO: 15089 - DNA, 454 bp, Glycine max
  Clone ID: jC-gmle01810083h01d1
aattataattataatttattttattttcatacatttaatggaaacacaacaatttttacttctgaggagaaaacaaaatatgtgtaaacactaatcatctcccgttgtaaataaatcaataagttaatttctcattcttgaattacttccaattccaaaggtagtcttgccgaagtgaatccactaggaatggtggaagtagatgagtgaaatggattaggaggaacagttaataggtcttcctctttactttccaacatttgtatgacagattttatggatggccggttcaatggctgccactgaatgcaccaaagtccaacaattgctagttttcttgcaattttaacatcaccttcatcctcaacatggatatgtacatctccatgaactaggtcatgcatccaatctgggtacaacacatggaaatcttctgcagaagacgggtctacat

SEQ ID NO: 15090 - DNA, 459 bp, Glycine max
  Clone ID: jC-gmle01810083h02a1
catggctttcgcagcagctcctcttatccatgttgtattatacggaaatcccaaggttttggttttgaggagtactgctcgttgcacggtccacgcctctcgcagaccaccaccccctgggcctggagttgacaccagaatccattgggaaaacgaagatgaaggttggattggagctaccaataccaaacaccaacagacccacaaacccaataacaacatgttacaggctgatgactttcctgatttcctcaccgcttctttaggttctcattacgaattcttgggtgtatcaccagatgcggatgtagaagaaattaaagttgcttatcggaaattgtcaaaggagtatcatcccgacacaacttccctgcctctcaaaactgcctcagaaaaattcatgaaattaagagaggtttacaacgttcttagcaatgaagagagtcgaaagttttatga

SEQ ID NO: 15091 - DNA, 287 bp, Glycine max
  Clone ID: jC-gmle01810083h02d1
tttttttttttttttttttttttttttttttttttttttttttttttcctattttggggggttttttttttttttaatattaataaatttttgtttaataataaaaagggtgaaaaaatttggataaccaccccacactcaaacccccaaggggggaaaaaaagaaattcactatataaaaacaacaatgggcaaaaaaaaaaaaagggagaaaaaaggggaaaaccaaaaaaaaactgaaaaaaaaggtttttaaaaaaaaaaaaaaggctttaaaacaccatggg

SEQ ID NO: 15092 - DNA, 408 bp, Glycine max
  Clone ID: jC-gmle01810083h03a1
ccgacactgaaacaacaaagaagttgaattgaagtggaataaataaagcgctaggtcatggttagttgagagcaggagactagcctcgaaatcttgtacatgtgccttgctaggtaataaggtgtgatatcacacccatcttcctgtttttactttttaggatttaacgtcttgacatgtataagttgcgtcacgattgacaaatgtgaatcaacaaagctatggtccgcgaacctgagactcaatgtacctatgcacgtatcaatcttcataaagtgcttactctgtttaagagttggaaggattttaccgtgggaaattttgcaggaggcttatatagatgtttcctttagattatttttatttattggttaactgtttcctttatatataaaagttgagttgtag

SEQ ID NO: 15093 - DNA, 342 bp, Glycine max
  Clone ID: jC-gmle01810083h03d1
aaaaaaaaatttttaaaaaaccggggcaaggggtttttaaacccgggaaaaaaaatctggaaggggcccccccccccttttaaaaaaaaggggaagcggccccccaaaaaaaaaaaaaatttggggggaaccttttaaaaaccccccgggaaaattcccccggggaaaacccctccaactttaaaaaaaaagaggcccttttaaaaaaaggacccccccaaagggccaaggggtccaaggggcggggcccaaaatttgggggaaaaaaaatggggaaggggggcccactttattctggggagggggtttaacccctaaagagaaaaacgggggggggggggg

SEQ ID NO: 15094 - DNA, 421 bp, Glycine max
  Clone ID: jC-gmle01810083h04a1
cactaatactatatcagtttaatttaggtgttttacaattctcaaatttattaagggtatggtattaaatgttaggataaataacatgtgttctgtctgtgtaaacatcttctaagattgtatctaattataaattgttatatttagctagttgtattttcttaattttttaataataataattttaaatttttattaagaatgatgtctaattgattgacaatacatgtatattaaaatttaaatattatgagtcattaattatttatttgatttatattataaattttaaatgtcaatttatagtctgtaattcaagactttaagtttacgattctttacctgtgaaattggtggcaatggataaattaaatattctaactagaacattttgattatccatatcataataatatatttt

SEQ ID NO: 15095 - DNA, 415 bp, Glycine max
  Clone ID: jC-gmle01810083h04d1
ggggggcccttaaacaatcttttaaccaaattttatgttgcccgttgagggggatataaaaagggaagttaccccggccttactgggttcttacataactgggtataagggttacccttcccttccaactcaagggcaggggaaaaaaacataccatgtttattaaaaaaaagcaacaaagtcccccctggaaatgtttatttcaaattgggtcgctaaaaaaaaaaaaaggcgcggtccatcctgggattacctttttttgggtaagaaagtagtaaaactttttaatcaagctttattgccagatttttcaattaaaaaacaaggggtttgtttttttaccaaaattattaaaaccaccgatgctaaaaaaagagttttgtttgtaaaaaaaaaattgggaaaaacaaacctt

SEQ ID NO: 15096 - DNA, 435 bp, Glycine max
  Clone ID: jC-gmle01810083h05a1
aaaagatggacctccaacctttgttcagcctaagatgactctggagaagctcttggcgtggggtaacatgcttgtccaagaacaagagaatgtcaagagagtccaattggctgacaagtacttgaacgaggctgcacttggaaatgctaacgaggatgctattaacaggggaactttcttccaatcttgaattggaggcaaagcaaacttggcaagtaaatatttctgttcctgaaggttgtgctgatccaagtgctagaagttgtgatgggacttgcgtgtaacattcttagaattctcaatgtcttaggtgcaaagagaagatgccaagtttgagatgattttactatatttttcatattggactgtcttcctctataattttgagttaaagtgtccacttaaattgaatttggtgccttttccttttgtcct

SEQ ID NO: 15097 - DNA, 438 bp, Glycine max
  Clone ID: jC-gmle01810083h05d1
aggacaaaaggaaaaggcaccaaattcaatttaagtggacactttaactcaaaattatagaggaagacagtccaatatgaaaaatatagtaaaatcatctcaaacttggcatcttctctttgcacctaagacattgagaattctaagaatgttacacgcaagtcccatcacaacttctagcacttggatcagcacaaccttcaggaacagaaatatttacttgccaagtttgctttgcctccaattcaagattggaagaaagttcccctgttaatagcatcctcgttagcatttccaagtgcagcctcgttcaagtacttgtcagccaattggactctcttgacattctcttgttcttggacaagcatgttaccatacgtcaagagcttctccagagtcatcttgggctgctcaaaggttggaggtccatcttttctt

SEQ ID NO: 15098 - DNA, 515 bp, Glycine max
  Clone ID: jC-gmle01810083h07a1
gaggtctcgcttcagtgttccatttgatatcagcggagaatggtttgagcagaggcagaagccaaagacatctattgaatctttgccagatgaatgcctctttgagatccttagaaggctgcctgcaggccaagataggagtgtctgtgcttctgtatccaagcgctggcttatgcttctgagcagtatttgcaagactgaaatccacagctacggaagtactggaaatgaaaaccaggaaattagtgacgaaggatacctatcccgaagcttggagggaaagaaggcaacagatgttagacttgctgccattgccgttgggacagcctctcgaggagggttggggaagcttacaattcgtggatgcaattcagatcgtggggtgactaatgtaggtctcaaggcaattgctcatgggtgtccttctctaaggtttgctcttctatgggatgtcgctcctgttggtgatgtacgcctgaatgagattgctagtgggtgccattagttagagaagc

SEQ ID NO: 15099 - DNA, 233 bp, Glycine max
  Clone ID: jC-gmle01810083h07d1
aaaccgggcactaacacccccccccgaaaaaaaacccaccccccaaaaatcccctcaacaaactaccctcaaacccccaaaaatttgggaccaccccttcagcaaaacccacaaaaagacctcccccacaaaacccggaccaaaataaccctggggggtaaaccccccccaccacatacctaaaataccccagccccccccattcaaaaaaaaaaacccccctcccaaaaccc

SEQ ID NO: 15100 - DNA, 586 bp, Glycine max
  Clone ID: jC-gmle01810083h08a1
cacaacattgctacctaccattttctgtagtttttctttttcaaatcttggggtggttgaaagttttaaacttttcttgattcgattgcaagtctggtcttgaatgaatacttctaagaaaagggtgcctttaaactttttgaacgcttcttcttcttctttgtcatgtatgtatctctgcacttgatcaacaggtactgcctcgtgtcattggatgtgtgaatttctgaactcatttcacagaggtcatgcattattctgctgcttctctttgcatccaagacctggtgtcgatttagacttggaattcctaattcaggattgttcaagtgtgagctggatcccccttctatcctctggcattggcatgtaccaaatttgggaagcctataagggtttgctggggaagtagaggatctacactaatttgaatggggcattctgcagctgtgtgggactatagagcagcaactgaaattacaaaggactggaatggaattcatcaaattgtgcttcggactccaaggggtgcttcggcacaggtaagcttacatggggcgcaagtcacttcgtggcggatgagcat

SEQ ID NO: 15101 - DNA, 497 bp, Glycine max
  Clone ID: jC-gmle01810083h08d1
aaattaggcattacgtggaacatcataaaatccatccagggaagaaacttgacatctacacaacaaatctaacgcttcaaggagagagtccatagcagaaccgaaccagctaactaataaccgggtaacatttgatagccattctcacaaaaaacataggccactctaaaacactctttctagcctaaagatcacacaacagaaaaaccggatactcctaaggaggagcactatttctacaacttaatgctacattgcaggatgtagcataaactctctgaccgattttgtacaattcctcaaagatcacttctgtccagacctagatggtcgctgcaaaaacttgacggcacaatcgagagctgcagccgcccagtccattcctcgcccggcttcaagttcacaggtttctctattactgccccatcaacacaaagcatttgtttatactcctcatcaccaaagtctgacattgattttgatttcttctcccatgg

SEQ ID NO: 15102 - DNA, 565 bp, Glycine max
  Clone ID: jC-gmle01810083h09a1
agcgagtggatgtggtgttccggtataagttggaatggcagcggttagtgttagggttactgtgagagtgaggtggtgcactctaaaaccacccactccaactccaaccagattcagcgttaatgctctgtttggtgattggggatttgggaatagaacaaggaactcccttcagcagcaattcacgttcactcttgctgatagtaaagtgataagcgtgtcggttgtttcttcgatctcagatgttgcatcgagcgaatgggacgcttgtgctttggatgcgactggccctgacaacttcaatccattcctttcgcatgcctttttgtcgaccttagagcactctgcttccgctgtcagggaaactggttggatcccacaccacatcgttgccaaagccaacaacaacagcaacaacaacgttgtagcccgtgtcccactctatcttaaaacccactcctacggcgaatttgtttttgatcattcttgggctaatgcttaccattcttatggctacaattattaccccaagttacaatctttgtgtccctttacacctgtaact

SEQ ID NO: 15103 - DNA, 530 bp, Glycine max
  Clone ID: jC-gmle01810083h09d1
aggaataagttgaaggcgattttaatatccttcccaatggagaagatcactaatagctggtacaaataaaacacataattatatataatttgccacaaagcatcctctgtaaatcttcaaaaagtatgcagagtgaatggaacccttttaaatacagacatcctgtaaagtacctttatttcataaccccggaggcgtttcataatcaagttctgggctgagatctgcatacaaagatcatataatttatgaggctaaaactatccgggcaactgcattggtgtcacttaaaatctagaatcatttggcccatggtgatccaaagaaaagaaaccattttccgcagaacattctgattataatatatcacagccagaatgaaagagaaaaggcaattattgacgaatagaaataaaaacacacactgaggacagtgctattggatagaactctaagaccagttgataaaatctgcagatatcaacctttttgcgctcttgacgtatattttttcttttactttgcttcat

SEQ ID NO: 15104 - DNA, 515 bp, Glycine max
  Clone ID: jC-gmle01810083h10a1
gggatgcaaggacttgctacaccacttgtggaaaacagacttgctgatggaactgaaggtgaaatggaagtgataccaatgggtgtcaatagtcgggacatctctaacacgtttaggattgcctctccatttgttgttgatgaaactatgcttgaaaaagtgcttgggcccccaagatttgatggcagagaagctgcagaacgtgtggctacccctggggtcactgttgggctagtttggactgcttttggtggagaagttcagtttgtggaggctacagctatggttgggaagggtgaactgcatctcactggacaacttggtgatgtaataaaagaatcagctcagattgcactaacatgggtaagggcaaggacaactgatcttatgcttggtgcttcagagggatctcatattttggggggccgtgatgtacacatacatttttctgcaggcgctgtacctaaagatgggccctcagctggtgtgactttggacacagcattggtatcact

SEQ ID NO: 15105 - DNA, 525 bp, Glycine max
  Clone ID: jC-gmle01810083h10d1
aaccacattattgagaggaagccctctcttgttatgatctatgcgcaatatgttaaaagtgtatatatgtggtgacagggtaaataatttacaaaagtgtgacccggagatgttgtatggagagcactcaaaggatgcagttgctcaccttccacaatagttggtctcaagctaaagcatttacacactataattgaggtggagtggattcccattgataaatgtagatgtcagctcagctcccatccaaattgttggtttcttgagttttgcttaattacgatcagttgaagtcgaagtactcggacccgatatcacgatgacaatgatagatcaggaggggacggtatgtatgttgaattgatatagaagccattactgattgaaagacaaaggtttactaactcgtcctgcaaaataaggatgctgctataacttcgagtgttgcctccaagggcacccaccatcaaaagcatgttctaacacatcttccactcgtttagcaagcaggatctccaaattgga

SEQ ID NO: 15106 - DNA, 489 bp, Glycine max
  Clone ID: jC-gmle01810083h11a1
gttttcggcactcgatgcaaaacatgcctgaacctggcaatttcacgcattaagctggtgcaaaacaagagagatatgcaactgaaacaaatgtgcaaggagattagccaattcttgcaggctggccaagaggcaattgctagaatcagggtggagcatatcatacgggaacaaaatacatgggctgcatatgaaattttggagttgttctgtgaatatgttcttgcacgtgtacctataattgagaatcagagggagtgccccacggaattgcgagaagccattgcaagtataatttccgctgctcctagatgctcagatgtaccagacttattgcacatcaagaacttgtttaccactaaatatgggaaagaatttgtctctgcagtatctgaacttcgccctgattcgggcgtgaaccgcacgaatcatgaaaagctttcagttagtgctccatctggagaggtaaaactcaaggtcttgagggag

SEQ ID NO: 15107 - DNA, 528 bp, Glycine max
  Clone ID: jC-gmle01810083h11d1
cctgggtaaatttgatgtttaaattacttagaaataacatctgtaagttcatgatacactacgatccgcagttgcaagaatcaggaagatctagaaaatagaaaagttcacactgttcagtattccgttccgttacaatgatatacatgtattaattatggaatgtacaatgaagtacggcacaattcttattacatagaatcactgtatgaagctgtcacctccgcaacaaagaacataattttctcctttggcatttagttcttaacatttttttttccagcattaagatcctgggagggcagcattttcatcgatgtgaaggtttatttaccttccagcttcaatgatccaaaattactctgaactagtgcagcagcagcacgagcagctgcagatgcgcgatccgcagaagcaatggcagcccgtgccttctccagtacattagaggattgaaatcttgtctcacttttagcatctccagggggaacattattgtttttggggactgttcgatttcattagtat

SEQ ID NO: 15108 - DNA, 493 bp, Glycine max
  Clone ID: jC-gmle01810083h12a1
gttcctttcaaggagaaggggtttctatggttcaaggagcttccagaggaattgggctggaattttttcttccatctacaggtaaaacagcttttagagaacgatgataaagagcatgttattgctacatgccgtgatcctagtgcatcaactgggcttatccatctgaaagataaatttgcagaccgccttaaaattttgccggtggatttgactgttgagaattcaatcgaggcatctgcattggcaataagagagacatatggccgtctaaaccttctcattaatgcgtctgggattctttcaatacctgaagtaatacatccagcacatgtggcctcttctaaaagtaggaggcggccactggactggaagaagtgctgcagcggtggctagtttgagcgcaagggttgcatctattggggacaatcgagttgggggctggcactcatatcgatctatagaggctgctcttaatcaattatcaaagact

SEQ ID NO: 15109 - DNA, 459 bp, Glycine max
  Clone ID: jC-gmle01810083h12d1
gcaaatataatacaaactcttttcttaagtacctgagggcgaattcctatccacgtcagtacagcaaacattttttagtatctgtttctccaatattccataaacatcaatgaatcaaagaattttatgaaaaacaatttttgctcttgagagcagctgtgaaacttattattgatatatttcttacctgttatgacagggttaccaaggaatttcttttccatcccaggcaaagaacttgccattgtcatggatcttgacattggtaatgatgcttagtagcttctgaactgagaactctttggtgaagagcttgtctgggggaacatttctttgaaatggcttagagagatctgtgtcaactggaccaggatgccgtaaaaatgcatacaattggatcctttctttcttgcaaatccagggagaccgcttttgataattgattaagagcaacctttg

SEQ ID NO: 15110 - DNA, 508 bp, Glycine max
  Clone ID: jC-gmle01810084a02a1
gcacctacttctccttccatctccgcttcagagagagaaagtgaaagtgagaagaagaagccatgaacagaagaaccactttgcttgttcgaacgctattgttcctcttcgtcctcaactccttctctctcttcctctacttcatcacccacaaagcttcttcttctccttcttcttctttacaactcaaaaaacctcgcacctatctcacaccactttcccaccaaacgcacttctcaaagccatggcctattctcccctcctacctaccgcgggcgcaggctcctaccacggcccctccccgctcctgcgaggcctacttcgggaacggcttcatgcgccgccgcgacctccttctctcccgcggcggagccgggtggttccggtgccgccacagcgatacgctccggagctcggtgtgcgagggagggaagctccgcatggtaccggagaggatcgccatggcgaagggcggtgaggatttatccgcggtgatggggcggaggga

SEQ ID NO: 15111 - DNA, 239 bp, Glycine max
  Clone ID: jC-gmle01810084a02d1
tttctttttttttttttttttttttttttttttttttttttttttttcttttcttacttttggtttttttctttcttttattattttttcttttttttctatttctctcacaaaccaatatcttaatttcctataaaaaaaaaaacccctttaacaaacccatcaaaaaaccaaccggggaaaaaaccaactaaaaatcactattgaccaacaggaaaagaaacctgggaggaaaataa

SEQ ID NO: 15112 - DNA, 508 bp, Glycine max
  Clone ID: jC-gmle01810084a03a1
ctcataacacaaagcacaaagcatagctcatccttgagttaaaaaatggcagcagcttcttccatggctctctcatccccatccttggctggcaaggccgtgaagctgggcccatcagccccagaagtgggaagggtgagcatgaggaagaccgtcaccaagcaggtcttctcaggaagcccatggtacggcccagaccgagtcaagtacttgggcccattctctggcgagcccccgtcctacctaaccggtgagttcccacgcgactacggctgggacactgctgggctttccgcagacccagaaaccttcgccaagaaccgtgaactcgaagtgatccactccaggtgggccatgctcggagccttgggctgcgtcttccctgagttgctgtcccgcaacggggtgaagttccgagaagccgtgtggttcaaggccgggtcccatatcttcagagagggtgggcttgactacttgggcaacccaagcctgatccacgcccagagca

SEQ ID NO: 15113 - DNA, 449 bp, Glycine max
  unsure at all n locations
  Clone ID: jC-gmle01810084a03d1
gagagaacaaattgacacttgagttttgtaaaaagcaagtaacattaagttggattcggatacacaagataattcacattatctgaagtacttcaccaaacacaaatctaaaaactctcaaaagtcatttcgttctttgacgctcactttccggggacgaagttggtggcataggcccaggcgttgttgttgacagggtcagcaaggtgatcggcgaggttctccaatggaccctttccggtgacaatggcctgaacaaagaagccaaacatagagaacatggccaatcgtccgttcttgagttccttcaccttaagctcagcaaaagcctctgggtcatcagcaaggcccaatgggtcgaagctgccacctgngtagattgggtcagtgacctcaccgagggggccaccagcaatacggtaaccttcaacggcacccattaggataac

SEQ ID NO: 15114 - DNA, 480 bp, Glycine max
  Clone ID: jC-gmle01810084a04a1
agcatttaagtgagatacacagttgttaggtagcaagcataagtgtctaaccttagaaacatatctgctacatatggtgcgcattttggaatggcgccactaaaattctattcatttatggctgccttatcttatgcttttcaatgaacactggcataccctatgatccgaatgtgcagggggtatacggagaaccatattggcgttcctgcttatcacatgagaaggaatgttggcctgagagcaggtccatggctgatgaagagcacccaagtcagtccgcgaccccagttacaccaccaccagcagaacccaaaccacagccagtctctactccttcaccaaaggtgagcaccaagttttacgatgtgtgggcgttcagtgggccaacacctgagaggatcaatggaaggtgggccatgatcgggtttgagggaccatggctgaggaggttgccaagggcattgtgtgttaaaacaa

SEQ ID NO: 15115 - DNA, 262 bp, Glycine max
  Clone ID: jC-gmle01810084a04d1
ggggaaaaaaaaagggaatttttttttgggggttaaaaaaagggcccccgctccaaaaggggttgggttttttcacccccaatgacttaagaccctttggggggggcttcattagggaattacccccgggggccccccttaaaatttcttggggaaggcggggccccccaaccccacatgggcaattttccttttcccatttttttattggggggcaagaaccctttggggttaaactccccgccggccccttgggagaggg

SEQ ID NO: 15116 - DNA, 605 bp, Glycine max
  unsure at all n locations
  Clone ID: jC-gmle01810084a05a1
cttaccgaaaactagaggccagggtctcggagtgtttgggtttgtttatcttaaacaccacaaacacagaacagaggtgtagagaagaaagctcaaaaatatggcggcagagtcatcactgagggtggcgactcccactctttgcaacctcaatgggtctcagagacgaccaaccaccaccactctctctccgcttcgcttcatgggttttcgtcctcgaccctcctctcactctctcacctcctcttccctttcacacttcttcgggagcacaagaattcactccaattcttcttcttcttattcttccatttcacgccaacatgctccgagaagaaacttctctgttttcgccatgtctgctgatgacgcaaagcgcagtgttccattgaaggattatcgcaacatcggtatcatggctcacatagatgctggaaagactactacaacagaacgaattttgttctatactggnaggaactacaaaattggagaggtgcatgagggaacagcaaccatggactgtatggaacaagaacaagagagggggattaccattacttctgctgcaaccactacattttggaacaagcaccggatcaaca

SEQ ID NO: 15117 - DNA, 444 bp, Glycine max
  unsure at all n locations
  Clone ID: jC-gmle01810084a05d1
gggaagaaaaatcgtttcctatttttcttcagaatttttttttgttggctaaccttgtatagtacaaggaaaattacaataaaaaaaataccaaaaacaaacccaactatttgacaatggacataatacaactatcaaaggtaaaaagttccttgttaggagaccaagcaagtacattaagcggcaacttcttgctctttggtggcaagttggttctgaatgtgctgaggcaccacatcaaacatggctaattgcattgtgtaggatgcacggtcctttgtcatccctctgagtgtgctgacatactggaacatctcagcaagaggtaccagggaatcaaccaccttaaggccaccaggtttgtcaccaaaactgtngatctgtcctctttttgagttgagatccccaattacatcacctagatgttcttcaggagtaacaact

SEQ ID NO: 15118 - DNA, 586 bp, Glycine max
  Clone ID: jC-gmle01810084a06a1
actccttcctctttattttcagagactgattttgctggttggactttcaaatgtgaagaaacccccaaaatgatcaatgacaacaatgacagcactaaggatttatcgtaacatgaatggtgttctgtgaaatgacacaacagagtgctcgccatcttggaaatatgtctgcttgttcttgtttgatttgtttatttttactcgaggaaacaaatcatataggaagagggttttgggttggggggagcgccaggggacatgctcgagatcccttgtggctcactattggaacataagcttaaattaaattgaagttttaaattaatggtttggatagaagtatgatacttgatagaacattatggcggaagttgatccatgtaaccgaccccacctagtgggataatgcgttgttgttgttgctgttgtatatgtaacagtaagaagataagttttgccactttttttatactgcagcagattaatatgttccccactctaaatgggaactaaatatttggaatgaaagtttcgcccttccaagaaaaaaacccaacttgttggtaagcatgggtttataaaattt

SEQ ID NO: 15119 - DNA, 435 bp, Glycine max
  Clone ID: jC-gmle01810084a06d1
ttttttttttttttttttttttttttttttttttttttttttttttttttttttttttttgttttttttttttttttttttttttttttatattttaaatttttattatatattggggggggggaaaaaaaaaaaaaaaaaaaaaaaaaaaccagagggagggggggaaaaaaaaaaacaacggagagaaaaaaaaaagggggaaaactttttataaagggggaaaaaaaaaaaaaagcacaaaaacactatcaccacgctcagggggggggagccaaaaaaaaaaaccccccgaacaaaaggacaaaaaaacgcccccctcccaaaccccaaaggacaaaaactccttccaaaaacagccacccccccccaaaagggcccaaagggggtactaaaaaaagccccggagacacccaaaaaaaaaaaacaatttag

SEQ ID NO: 15120 - DNA, 541 bp, Glycine max
  Clone ID: jC-gmle01810084a07a1
gttggtaagagggtgaaatccgaacccagcatcccccaacaaagtgaagaaaagagaagtaggctctacggttttcgcgagtcaaaatccgaatcagcaactccaatccaaaaccggttatccgaattgaaatttataaaaaagtatcaaataccccgtgtctgttagttaatcagagagagtagtgagccaaagctgcgaagttaaacttggttgcatgcgaagagcaagaaatatgagaccaaacatcgtttctgaggccgggtttcctactaggatgagccaatggtgggaaagcattccggttctcacttctgcagaggtggttgtctgtggagtcatttactcgatttgtcttttggttggatatgattccttctacgaggtttgcttcttgccatctgcggatgtgtcacggtttcaagtttacaggatttatacctccattcttttccatggatcactgcttcatgttgtcttcaacatgatggctttagttcccctgggctctgagctggagaggatcatgggctcagttcgc

SEQ ID NO: 15121 - DNA, 528 bp, Glycine max
  Clone ID: jC-gmle01810084a07d1
cgagcgaaacaaaatgtttactatttctttaattaacaacatattcctaaccattgcttgtatcatttacatatgttcaatttctgctaattggcgttagcatggctatcaggtgtgagcgaattgttgtagggtccaaagattaaacagatacagtgattgaataaagcgcaatgacatactcatttaacagcgtcagggaagtctctgagaatccaagagaagctttctttttcaaccctgctggctcatgagtatttccactgccacattgagatcaccatcagcagctgccagtgccacttccacctgcgtcctatcaaagcccattgatacaagttttctaatcccttcttccgaaacagctgcaccctgattctgtggaacaccagcagctgctgtagctacattgtcaactgaatgccttccttcagacaaccgttgaggattactaggagtggatgaatctaaaggactattgggactgctatcctccaaaagtctagcttgaaggtttgaatctgaatg

SEQ ID NO: 15122 - DNA, 540 bp, Glycine max
  Clone ID: jC-gmle01810084a08a1
gttggtaagagggtgaaatccgaacccagcatcccccaacaaagtgaagaaaagagaagtaggctctacggttttcgcgagtcaaaatccgaatcagcaactccaatccaaaaccggttatccgaattgaaatttataaaaaagtatcaaataccccgtgtctgttagttaatcagagagagtagtgagccaaagctgcgaagttaaacttggttgcatgcgaagagcaagaaatatgagaccaaacatcgtttctgaggccgggtttcctactaggatgagccaatggtgggaaagcattccgtttctcacttctgcagtggtggttgtctgtggagtcatttacttgatttgtcttttggttggatatgattccttctacgaggtttgcttcttgccatctgcggttgtgtcacggtttcaagtttacaggatttatacctccattcttttccatggttcactgcttcatgttgtcttcaacatgatggctttagttcccctgggctctgagctggagaggatcatgggctcagttcg

SEQ ID NO: 15123 - DNA, 469 bp, Glycine max
  Clone ID: jC-gmle01810084a08d1
cgagcgaaacaaaatgtttactatttctttaattaacaacatattcctaaccattgcttgtatcatttacatatgttcaatttctgctaattggcgttagcatggctatcaggtgtgagcgaattgttgtagggtccaaagattaaacagatacagtgattgaataaagcgcaatgacatactcatttaacagcgtcagggaagtctctgagaatccaagagaagctttctttttcaaccctgctggctcatgagtatttccactgccacattgagatcaccatcagcagctgccagtgccacttccacctgcgtcctatcaaagcccattgatacaagttttctaatcccttcttccgaaacagctgcaccctgattctgtggaacaccagcagctgctgtagctacattgtcaactgaatgccttccttcagacaaccgttgaggattactaggagtggatgaatct

SEQ ID NO: 15124 - DNA, 527 bp, Glycine max
  Clone ID: jC-gmle01810084a09d1
aaacttaagagcagtggattatcatcattgtcacatatgatgaagcaatattcaacaagtgcaagaactgtatgaataggaataagagtttatgtacaacgggaaatgaaaatagttgtcatttgaacacattatgctgtggcagctgcttgttcttcaacagcctgtgatgctgggagaagggtgcaaatgaggttgcggtcaccgtacacattatcaacacgtcctgtggtaggccagaactttgcagtacggagccaaggagctgggaaggctgcatattccctggagtatggttttgtccatgcatcagccatgagcagtgatggtggatgaggggcgcccttaagtacattgttgttaatgtcaacctttcctttctcaatctcagcaatttcttgtctaatggaaataagagcatcacagaacctgtctaactcggccttgctttcactctcagtaggctcaatcatgagtgtgccaggcacaggccatgacattgttggtgcatgaaaaccgagttcatg

SEQ ID NO: 15125 - DNA, 484 bp, Glycine max
  Clone ID: jC-gmle01810084a10a1
cgagaagtgtgtttgatcccacttccagtctttacaattaatttttttttcgtcgcgtctcgccattatgcgtgccgacaccacactcattgcctctcttctggcggcctcggccgccgcccagcacaacttgactggttacaccaacaacacctccgtcgacaactcctacaacaagaagattgtcgccgacctcgaggctgaggttgccgctctcaagcaccagctcgaggaggcccaggccgagacctgcgatgtcacccccgtggctggaggctccactggcacctctcccgccggctctggctctgctgttgcccctgccgacgctgctaccacctcttccgagcccgactggtacaccggcgaggacgactctgagtcttccgacaagcctgctgctgagaagcccgctggctacaccggccagaccaaccccgtcgcttctgacaagcctgctggctacactggccagaccaaccct

SEQ ID NO: 15126 - DNA, 458 bp, Glycine max
  Clone ID: jC-gmle01810084a11a1
gatatctgcagtctagctattattggagccactgccctatcgctagaatgagagcacaagctacattgactatgaccagacggccaatgagagtacactctgactgctcacaaatgatcgaagatcgagcataccgcttatgccacgctctatgatgatgaacccgaggacaaggttcgcgatctacatgaacttatactataggcagatgttgaacacatcagtggatcaattacagctggtgtcgtgctataaactttcgattcttctgaagtaccacctaccacatctgacaggtcactagaaggaccctgtggagctctgatataatacaggaaccgggatggcgaaatggacaaccagggtaaagaggtatcgtatgagtacgaaaacttgaccgaccaggctgttggccctggaatgcaaggtgttcctcaacaccacactattactggttt

SEQ ID NO: 15127 - DNA, 555 bp, Glycine max
  Clone ID: jC-gmle01810084a12a1
ataaaggttactctattccatggtcgtggaggcagtattggtcgtggtggtggcccaacatatctggctattcagtcccaaccccctggctctgtgatgggaacgcttcggtctactgagcagggagagatggtagaggctaagtttgggttgccacagatagctgttagacaacttgagatatacacagcagctgtactacttgcaacccttcgtgcacctatcccaccccgagaagaaaaatggcgtaatgtcatggaagagatctcaaacatcagttgtcagtgttaccgcaatgtagtgtatgaaaatccagaattcctggcctacttccatgaagccacaccagaggcagaacttggcttacttaacataggtagccgccctacaagaaggaagagctcagtaggaatcggacaccttcgtgcaattgcctggatatttgcatggacacaaacaagattcgatcttccagcttggcttggagtccgagcatgtttaaaaagagctagcgagaaaggctacacccgagagctaaaagccatgtacaaagaa

SEQ ID NO: 15128 - DNA, 551 bp, Glycine max
  unsure at all n locations
  Clone ID: jC-gmle01810084b01a1
ggctgagaaatagagctatgatgccattgccagctgatgtatcgtcacagtcacagccttccacggatgaagggttgcttggagatattgtacccccgggaatgcgcatcagatgagagaattatttgatggatgatcaggtggaagtggagcagagaaaatgcatggacatgcatgcatctttattttctgcatactctgagcaagtaggccacaagtggcagcaattttttttcttttagcagcaagtcccttttagccatctattgtctcgagaagcgaatctagtattcatgcatgggtaccatataatacctcagtagcaggtaattatctaccttgggtcatattttgaccttgagcagttgagctgagttatatatatcattcattctgtgagagttatatattattatatatgtatgtatacagtttagattatcatantaggagtagccaccgtgcataatgtatactaaccaatttagattgctaaattctccttcaggattgtgcaatttatttgaaacctaaattcctagtacactttc

SEQ ID NO: 15129 - DNA, 466 bp, Glycine max
  unsure at all n locations
  Clone ID: jC-gmle01810084b01d1
gaaagtgtactaggaatttaggtttcaaataaattgtacaatcctgaaggagaatttagcaatctaaattggttagtatacattatgcacggtggctactccttatatgataatctaaactgtataaatacatatataataatatataactatcacaaaatgaatgatatatataactcagctcaactgctcaaggtcaaaatatgacccaaggtagataattacctgctactgaggtattatatggtacccatgcatgaatactagattcgcttctcgagacaatagatggctaaaagggacttgctgctaaaagaaaaaaaattgctgccacttgtggcctacttgctcagagtatgcagaaaataaagatgcatgcatgtccatgcattttctctgctccacttccacctgatcatccatcaaataattctctcatctgatgcgcattcccggnggtacaata

SEQ ID NO: 15130 - DNA, 331 bp, Glycine max
  Clone ID: jC-gmle01810084b02a1
ggctaaaaaaacgacaaggcggtaactctaccaaaacagtaacgattgatgctcacctgaaaaaagatagaggaccaggacctgctcgcctacatcaaaactcctattgcactagcacgaaacttttggctactgctccgtggctgaacatggatattcatctacactcttggcggcgatactgtacttctagaaggctagaggttcctctcctttgtcaccttacttgctggaacccatacctaactgtgtgtccgcccttacacctggaggctgatcttgagaagtattcctgtacacgaccgacgtttctttgcccaactctataggg

SEQ ID NO: 15131 - DNA, 452 bp, Glycine max
  Clone ID: jC-gmle01810084b02d1
gataacaaacagtagtaacattaatgggacaatagagtttcaacacaaaccaaacttatttttcaaaggtcattacagacccattacacatcacattttttcttaaaatgtttgggaaaatccaacatcgaacatcacacagaaatcagctccagcttaaaaccccccacgaagacgcaacaccaagtgcagagttgactccttctggatgttgtagaaagcgagggtccttccatcctctagctgtttgccagcaaaaataagcctctgctggtccggagggattccttccttgtcctggatcttcgccttcacattgtcaatggtgacggagctctccacctagagggtaatagtcttacccgaaagggtcttgacgaagatctgcataccaccacgaagacgcaacaccaagtggagagttgactccttctggatgttgcagtcagcaa

SEQ ID NO: 15132 - DNA, 572 bp, Glycine max
  Clone ID: jC-gmle01810084b03a1
gagagatagagagagagagaaagatattaagaaaaaatggcagcctgcactgtctactcaacacaatctctgagcacaaattgctccatctcaaccccatcaaagacacagctgagtttcttccaccaaaagcaggttgttttctggaggaacagcaacaggggcaacagcagcagcagaagaagctatgtgataacatgtgcagcaggtgactcacagacagtggggattggtcttgctgcagactcagggtgtgggaagagcaccttcatgaggaggctgacaagtgtgtttggaggagcagcagagccaccgaagggtggcaaccctgactcaaacacactcatcagtgacaccaccactgtcatatgcttggatgattaccactctttggatagaactggcagaaaggagaagggtgtcactgcccttgaccctagagccaatgattttgatctcatgtatgaacaagttaaagctcttaaggatggaattgcttgtgaaaaaccaatctacaaccatgtctctggtctcctggatccccctgagctcattaaacccgccaaaatctt

SEQ ID NO: 15133 - DNA, 513 bp, Glycine max
  Clone ID: jC-gmle01810084b03d1
gtctcaatcttgtatcaacataactgaatctcagcctcacttttttttctcggataagtacatacatacatacatatgtgtttttttcattaattatgatgcagaacagcctaataacaatagacaaaataacatgaaacacagtgaaattgtggaaaacatgaaagaagaaagaaaatgatgattttgatgagaactaatgcaatttgactgcgtcgctcggtcgatatgtatatatattattatggcaggttcaattcaattcctaagcttttgcagccactggagtctcagccttggtggctattagctgctcatataaatctcttatcttcaaaccaactatggtttggaagagacctgttccattgttgctgccggggaaatcagcatgcttcaacatctgttgagtaacctctccatagaactttgtagagaggttgcttaggtggctctcaacgtatattagttcatctagtctgtcaaattgtccatccatttctacaagtgaca

SEQ ID NO: 15134 - DNA, 457 bp, Glycine max
  Clone ID: jC-gmle01810084b04d1
acaatgacaataaaattatcttcataagctatcaaagtcatccgaaattcccatgtcaaacttatatacatgcatattccaataagatgcctcttttgtacctggaatccctacaattctacaaatccttagcagcacaagaaataaagtccagcttctcaggacatggttaagatgggagatctcactcatctcagggatcccacttttctttttacatcgaataccaagagtggcattagtttaaaattttagaccgaagtgaaccgaatttcagttggactagatataccacaatccgaattttcaggtgttgagttcacagccacaccttccacaacattcataattttgattgaaagaattctgtgaattgaaacacctttcccggttgccacctgagaaactaaagatctgagggccttagttttctaggtcttttatgagctgatggagc

SEQ ID NO: 15135 - DNA, 548 bp, Glycine max
  unsure at all n locations
  Clone ID: jC-gmle01810084b05a1
atggtcatcatcaaaccctcttctctttctcaggttctggtttttgattttcaaccaaaagatcctgaagatatatatgtggcactagcggctctatatggtagagcagtgccaggaactgttctggtgaggcagttaaaaaagttgccaagaaacaaatgctggcttgttggatattcaaaggcagaggcggatgctatggaaatagcaagggaattcaacaaagaatgggaaacaaatttgaggattggccttcatgattgtcgcgattataccaatagtttggttaggcaactcactggcgaaaaagatgtgctgaaacgtttgagaaacgttggtagttagagggaatccgttgtctggttagaagatcactttattgaattactttatcttgtatcatgccttcaacattntttagcacattcatcgcttcacttggatgggaactggctaaacatcgctttcatgggggctctgaagaaatcaatctcatacgagaaaaaacttatgctatttactttacccttctgtaacgttcttttttt

SEQ ID NO: 15136 - DNA, 396 bp, Glycine max
  Clone ID: jC-gmle01810084b05d1
ttttttttttttttttttttttttttttttttttttttttttttttttttttttttttttttttttttttttttttttttttgaaaataaaaaaggttcccgaattgaacagcccattggtttgcccgtttttaaattttacacaaaggggggtcaaacttttttttaaaaaggttttcttttattggcgggttattcttgttttattcaaaaacaaaatgaccttttaagactggtcaagcaaaaaaaaaaaccttcccaaagggggaaggaaaaagcctaaggtttttctcgggggaaaaagatttttttaaagcccccaagaaagggagggttatcccgctccccccccaggggagggaggaatgggctaaaaaaaggtgggggggtgatccc

SEQ ID NO: 15137 - DNA, 497 bp, Glycine max
  Clone ID: jC-gmle01810084b06a1
cgataagctcgttgtgatagatttctcggcgtcgtggtgcggtccttgcaaattcatagagccagcgattcacgccatggccgacaagttcaacgacgttgacttcgtcaagatcgacgtcgacgaattacctgatgtggcgcaagagtttcaggtgcaggcgatgccgactttcgtgttgtggaagaaagggaaggaagtcgacaaggttgtgggcgcaaagaaggacgagctcgagaagaagattgagaaacatcgatcgtgatcttagctctgtaatcctattcattcagctatttatctttctgtgcgaggtgaaaagaatattaaaacagagtttaaatttgttatatttggctgtagtgttatgatgatgatgatgatgatggatggggatgtaaaactctaaactggttggggtgtttcttcaggaagatggtgtcttgttcatattctaggcagattgatatatagaaattgaagactctcgctcactc

SEQ ID NO: 15138 - DNA, 497 bp, Glycine max
  Clone ID: jC-gmle01810084b06d1
gagtgagacagtattttcaatttctatataacaattttgctaaaatatgaaacagacaccatcttcctgaagaaacaacccaaccagtttaaaattttacaaccccatccatcatcatcatcatcatcataacactacagccaaatataacaaatttaaactctgttttaatattcttttcaccttggaaagaaagataaatagctgaatgaataggattacagagctaagatcacgatcgatgtttctcaatcttcttctcgagctcgtccttctttgcgcccacaaccttgtcgacttccttccctttcttccacaacacgaaagtcggcatcgcctgcacctgaaactcctgcgccacatcaggtaattcgtcgacgtcgatcttgacgaagtcaacgtcgttgaacttgtcggccatggcgtgaatcgctggctctatgaatttgcaaggaccgcaccacgacgccgagaaatctatcacaacgagcttatcg

SEQ ID NO: 15139 - DNA, 369 bp, Glycine max
  Clone ID: jC-gmle01810084b07a1
gtggaacccagtctgatggaggactaagaacatacagtggcttggagaccatcataacttacaagatctgacttacacatcggggtgagatctccggacccgagaatcaacacgatatgttaattttagagatgatgttgtgccctgaacttaatggctcgactgtaatgctgttcagactatggcgtatgcaaaaacattcttaacatacaagctgaggagaccaagtatcaaatcttgtgctcgctcttacatgcagatgaggcacatcagacgatcttaagtctttgatagacagagcccatgaactgtgtctggtcggtctagagagatattgtacacagtcgtgcatgaaatcatacagtggat

SEQ ID NO: 15140 - DNA, 303 bp, Glycine max
  Clone ID: jC-gmle01810084b07d1
ctgtaaaattcgtgaaatttgctatgcttgtgttattaaaaaaattcgagcattcacttatttcatgttagaaaaggaggatgaggataactttgcataagggggaaagaatagggtttgggggtcaccatttatatcattcgctcaaacagatcaagccttgtaacccttggggtggatctgacaaagagtgacataaaaatgcctggaccaatgaaagatgcattcgcaatagatatgccgccctggtagcctatcgggattccaagaaaaaagcgaggttctgcgaatacgggttgcata

SEQ ID NO: 15141 - DNA, 489 bp, Glycine max
  Clone ID: jC-gmle01810084b08a1
gttcccacctgcaggaacctacatctactgggcagactcctacacactgttcgtgtttgagatggcactgatgggatttgcagagcacagaagattccaagactgggccaaaccaggctctatgggcaaacaatacttcctaggactagagaagggtcttggaggttctggtgagccagcttatccaggaggacctttcttcaacccactaggctttggtaaggatgagaagtccttgaaggatttgaagctcaaggaagtgaagaatggaaggttggctatgttggcaatcttgggttactttgttcaagctcttgtcacaggtgttggcccataccaaaacctcctagatcatttggctgaccccgtgcacaacaacatcttgaccagtctcaagttccactgaatgtattatatgttattttacatattctttacgttgccaaaactcaactacctttctacctttctatatcatgtggacatttt

SEQ ID NO: 15142 - DNA, 368 bp, Glycine max
  Clone ID: jC-gmle01810084b08d1
acgtgttattttttacagggccacaccaaggaacaaaatgtccacatgatataaaaagggaaaaaggcaaaggagaaaaggcaacgtaaaaaatatgggaaataacatataatacattcaagggaacttgagactggtcaaaaagttgttgtgcacaggggcagccaaatgatctaggagggtttggtatgggccaacacctgggacaagagcttgaacaaagtaacccaagatggccaacatagccaaccttccattcttcacttccttgagcattaaatccttcaaggacttctcattcttaccaaaccctagtgggttgaagaaagggccccctggataagcgggctcaccagaacctccaaaaa

SEQ ID NO: 15143 - DNA, 520 bp, Glycine max
  Clone ID: jC-gmle01810084b09a1
ggacaagatcaccattctcttttccagcagtcaaatagtataaacatctctgaacttcaagaagcatatagagacgttggacgagatcttttaaggcttcttaattttggggaaatgaatgctattggtttgagaaagatcttgaagaagtttgataaacggttcggctataaattcacagactattatgtcaagacacgtgcaaatcatccttattcccaattaaggcaggttttcaggcatgtgggcattggggctgttgttggagtcttatctcatggtctggctgaccttcaggatttacaacaatctctaggaagctacatttgtatatatgaccagccttcttatactcatcaggatcctattcttgattccatcaaagaagctgtagccagattgtcaaactcaacaaactttcttcagtttttgggaagacatgcttttatcatgaaagaggagctgccatttccaagtgaagatcatattgttgatgaaagatatcatttcatgtcgcttc

SEQ ID NO: 15144 - DNA, 301 bp, Glycine max
  Clone ID: jC-gmle01810084b09d1
aaaaaaaaaaaaaaaaaaaaaaaaaaaaagaaaaaaaaaaaaaaaaaaaaaaaaaaaaaaaaaaaaaggaaaaaaaaaaaaggggaaaaaaaaaaaaaaggaaccactaaaaacggataaaaaaaaattttaaaaacccaacaatccacataaaatttttatagaaaagggaaaatacttcaattaaaaaaaaaaaaggaagggtagtatcaagaaagaaaaaaaaaaaaaaaccccattaagaggggaaaaaaaaaggggggattaaaaaataaacttacaaggaaaaaagggaaatttt

SEQ ID NO: 15145 - DNA, 561 bp, Glycine max
  Clone ID: jC-gmle01810084b10a1
cgagcctctctgtgaccccacaagcccttgccgctgataacgtcacccctccccctgtaattgaagcccaacagagccaattaaacccctccaactcatcctcccctttctcacagaacctcctcctcacagctccaaagccacaagcctcctccgacctccccgaaggcaccaactggcgctacagcgagttcttgaacgccgtcaagaagggtaaagtcgagcgagtcaggttcagcaaagacggttccgccctccagctaaccgccattgacggccgtcgcgcctccgttattgtccccaatgacccggacctcatcgacatcctcgccatgaacggcgtcgacatttccgtcgccgagggcgaatcccccaacagcttgttcaacatcataggcaacttgctcttccccttactcgcattcgcgggcctgttcttcctcttccgcagagcccaaggcgggcccggcgggcctggcgggctgggagggcccatgggacttcggcggaacatgtccaagtttcaggaagttcccgagaccggcgtgagctttgctgacg

SEQ ID NO: 15146 - DNA, 550 bp, Glycine max
  Clone ID: jC-gmle01810084b11a1
tataatatcagtataatagaataaaaaaattatgaaaagatctttggttctgtatagtctttttatactatatttaaagagttacttgtaacgtaatacaaataaactcgagtatggatattgtcaggaagactatttgactttgatttttcaaccccccaataaattcgaatattatggttatgacactgactttttcagatttcattattctataatagagagttctattatagaaatttcgattgtaaaatacaataaaattggattcgatactaaacataaaatagatatctatatagatagataatttgaaacaaaatcaattaaaatatggaaaaggtactctaggggggatattttgtcttttgctagagtccgattcctattccttcttgtttgtgtcgaaatagaaatattctaaaaatatcaataaaataatcttttttaaccccttcctgaaaaatcctatatcttagtttctattttttccaacttagaatatttctgccatataatatcttatcgcatataatacgtagtgaacaat

SEQ ID NO: 15147 - DNA, 374 bp, Glycine max
  Clone ID: jC-gmle01810084b12a1
accaaagcaaacaagaaaacaacaaaaaaaaagaaaaacaaaaaaaaaaagaaaaaaaaaaaaaaagaaaaaaagaaagaaaaagaaacgcaaagaagacaaaaaagggcgacagtagcaaaacagagaaagacgaagaatgcacgacgacgtaagcaaggaaaaggcaagagcaaaaaaaataaagaggatagggaataagcgcagcaaaacaagaaaaaggaagaggggaaaagaaaaggataacaacagaaaagaggacaaaggccatgaagaccaagggaaaaaaactaacaaaggacaccagaagaacaagcaaagaaagaaaagacaagaagagaaacagagaggacaaaagaaaggaagcaagcaga

SEQ ID NO: 15148 - DNA, 509 bp, Glycine max
  Clone ID: jC-gmle01810084c01a1
atcacaacaagacgaaaagcacgcctcgcaaccatcgcaccacttggaacactctcgcgacctttgcgctagtgatcaccgtctgttcctagccgaattgttccatccggccccggcgcatcgacgcgacgcgatattcaccgggcattggccttacatttcacaatcacaacacgctttggatctttgtcgcgtacctcagaaatcgttgtaacgacaagtgcgcattgaaaaagagcagtgcgcatatccggaagccatggcgcgaacacaagcaagttctgctgctcaaagagggcgaccaagcacaggcggcaaaggcaggcccagcgacgctggaaagagcagacctagcgagtctggcaaggaagtcacaaaagcgccgcgaaggagtagtggtggcaagacacctgcaagtcccggaactcgcaaaaagccgcgctacaagccaggcacggtggcattgcgcgaaattaggagataccagaagtcgacggatctcctactac

SEQ ID NO: 15149 - DNA, 518 bp, Glycine max
  Clone ID: jC-gmle01810084c01d1
cagcattacgtccaaggatcatattcaaaactctgcattcgcaaacaagttcgattacaagccatggccggagactcgttgctcaatgaacaatgttagtcagccacaatgaaaaaggcataacaaaatccagaagtacaaggaaaaacacctccaactccaccgctaaaatcagacgatagcacagtcgtcaagaacgaccgccaaaaccttgcccaataaccgtgccagtttgacacgattccctcctcttccacgttttcatagagctccccgtagtcgtctagcgagctgaatgtctttttgcatgatggtaacgcgtttcgcatgcagggcgcagaggtttgtgtcttcgaaaagatgcacgaggaaagcctcggcggcctcttggagcgcttggatggcttgagactgccatcgatggccttctaacgatgcaggcgctacgttatatgcgacttcgcggaccaaacgcgagaaaggcaatttgagtagtaggagatccgtcgacttctggt

SEQ ID NO: 15150 - DNA, 404 bp, Glycine max
  Clone ID: jC-gmle01810084c02a1
tgcactgagggcattaacggacagcgtcctactgagctaaacactctggaggctgcgcaaccctggcactggcttgaaaaccgaccagttctgttgtactgccggtgggtgtgggcccactgattattccagattctttaagccaagagagcccagatgctcatcgctacccgaaggatgatccaactcgcaccttcacttgtaatggtgggactgactatagggatgagttttgtccttgaacccaatcaccttacataatatataatatatgcactaaaataaagagcaatacaattacatgcggcgtgtgcactttgcgtgcccctgctaagatatgatgtgggtacttttattctgaatgaaatggggtacttatgaagaatatagttaactctatggcc

SEQ ID NO: 15151 - DNA, 538 bp, Glycine max
  Clone ID: jC-gmle01810084c02d1
cagcattacgtccaaggatcatattcaaaactctgcattcgcaaacaagttcgattacaagccatggccggagactcgttgctcaatgaacaatgttagtcagccacaatgaaaaaggcataacaaaatccagaagtacaaggaaaaacacctccaactccaccgctaaaatcagacgatagcacagtcgtcaagaacgaccgccaaaaccttgcccaataaccgtgccagtttgacacgattccctcctcttccacgttttcatagagctccccgtagtcgtctagcgagctgaatgtctttttgcatgatggtaacgcgtttcgcatgcagggcgcagaggtttgtgtcttcgaaaagatgcacgaggaaagcctcggcggcctcttggagcgcttggatggcttgagactgccatcgatggccttctaacgatgcaggcgctacgttatatgcgacttcgcggaccaaacgcgagaaaggcaatttgagtagtaggagatccgtcgacttctggtatctcctaatttcgcgcaat

SEQ ID NO: 15152 - DNA, 615 bp, Glycine max
  Clone ID: jC-gmle01810084c03a1
ccttcttcaagtaagaagagacttccttcacgatttcatctctggttttgagggtgacaacatgattgagaggtccaccaaccttgactggtacaagggaccaactctccttgaggctcttgaccaaatcaatgagcccaagaggccctccgacaagcctataaagctttcattgcaggatgtctacaagattggcggtattggtactgtgccagtgggacgtgtagagactggggttgtgaagcctggtatggtggtgacttttggtcccactgggctgacaactgaggttaagtctgttgagatgcaccatgaggctctcacagaggctcttccaagtgacaatgatggatttaatgtgaagaatgttgcagtcaaggatctcaagcgtggttttgttgcatacaactccaaggacgaccctgacaaggaagctggcaacttcacatcccaagttattatcatgaaccatcctggccagattggtaatggatacgcaccagttcttgactgccacactatttacattgctgagaagttttctgaaatttgaccaatatcgaatgcgatctgtaaagagcttgagaagagcccaaattttgaagatgggatgct

SEQ ID NO: 15153 - DNA, 470 bp, Glycine max
  Clone ID: jC-gmle01810084c03d1
ggcttgggaatttgaaaatctcagacttttaccatcaaaacaaaaaacagttctcatcaaaaacaaacagcaacgaaaatgttaccgccgatcaagaacccagttttgaaggctacggctacatgaaatcggcggacacttcaaaatataactggtaaaacaaacacctaagactctgcaaagataaactactgtaaaggaacaagtttttttgaaaccacgttgatgatcacatgtgctagcaaaattgccaaaatgcaatcacttttttttgggggcagcctttgggaccttggctccgggggggtcttttttctcaacactcttgatgactccaacagctacggtctgacgcatgtcccttacagcaaaacgaccaaggggaggatactcagagaaagtttcaaccaccatgggcttggttggaaccatcttaaccataccagcatcaccattcttcaaaaatttgg

SEQ ID NO: 15154 - DNA, 495 bp, Glycine max
  Clone ID: jC-gmle01810084c04a1
ctttgttcactcttcttctcttgcggctagggttttagcgcagcttcttctagatttaaggaagatgggtaaggaaaaggttcacatcagtattgtggtcattggccatgtcgactctgggaaatccactaccactggtcacctgatttacaagcttggaggcattgacaagcgtgttattgagaggtttgagaaggaagctgctgagatgaacaagaggtctttcaagtatgcctgggtgctggacaaacttaaggctgagcgtgaaagaggaatcaccattgatattgctttgtggaagcttgaaacaacaaagtattattgcacagttattgatgcgcctggacatagggatttcattaagaatatgattactgggacatcccaagctgactgtgctgttcttatcattgattcgaccactggtggttttgaagctggtatttccaaggatggacagactcgtgaacatgctctgctttcattcacccttgg

SEQ ID NO: 15155 - DNA, 444 bp, Glycine max
  unsure at all n locations
  Clone ID: jC-gmle01810084c04d1
gaacactacaaatagaaagttgacatttaataaaccaaagcaacacaacgcagcaaagtcctgaaactcgctgcgcttaacaaaaatgtaatcaggggttccgacaaacacaacacattaaaacacagataaataaaagcaattttgccaccgtcgatcaagaacccagttctgggaacaacagttgcgagatgatggtggagacttcaaactttgtccgaaaaacaagctacctagaaaagaagacacaagagtacagaaaagaaaccaacatttattgtaaccaacatcccctgatgaaccagcccgcacgattcacttcttcttctgggcagccttggtgaccttggctccggtaggatccttcttctcaacgttcttgatgactcccacagcaacagtttgacgcatgtccctaacagcanacctaccaagtggaggata

SEQ ID NO: 15156 - DNA, 573 bp, Glycine max
  unsure at all n locations
  Clone ID: jC-gmle01810084c05a1
gaaaaaccgaagatgagcttgttgaatgaggagagaaaaccgcacgctgtggttactccatatccagttcaaggacatgtgaaccctttgtttaaactagcgaagctgcttcatctcagaggctttcacataacctttgttcacactgagtacaactacaagcgtttgctcaagtcaaggggtcctaatgcccttgatggcctaccagattttagatttgagagcatcccagatggtcttccgccattggatgatgataatgttactcagcacgttccctctctctgtgactctatcagaaaaaacttcctcaaacccttttgcaaacttgttcatagacttaaccactcttctgccactgagggtctcatacccccagttacttgtttggtctctgacggttgcatgccttttactatacaagctgctcaagagcttggactccctaactttatcttttggcctgctagngcctgttctttcttgtctatcatcaactttcccactctggttgagaaaggtcttacaccactcaaagatgagagttatctgacaaatgggttttggactcca

SEQ ID NO: 15157 - DNA, 303 bp, Glycine max
  Clone ID: jC-gmle01810084c05d1
gaaatatcaagactaagatattacataccacaataaacaaaacacaaagtggcacttccagggcaccatttctacaatgcagaaaattctagagaagatcaatgaactatcatgataaattaaagcattaagaaaaagaaaaaaagaaaacccttcaatctaacagtgtctaattaagcaacacctccttaattactttgtccaagttcatgtatgaacaaccaccaggcttggtgacctcctctgccttcctctttaactccatgaccttttctctcatcttctttcccttctctcccacca

SEQ ID NO: 15158 - DNA, 594 bp, Glycine max
  Clone ID: jC-gmle01810084c06a1
agataattagtctattcataagaggagatgagatcatatgaaaaatataaccgattctttcctttgtttgggctactggccatccgccggaagtttcgggtttaataccgatattttagcaacaaatctaataaatcttagtgtagtgttaggtgtattggttttataaggaaagggagtgtgtgcgagttgtttatttcaaagaatagattggatccaaccaaactgcactttttagttataactaagaaaatgtgcataatcccgcgaattacttctgaaaattacttctgaattaatgaaattttttcaataatttaagaaaaaatatttaagaactatagcatttcgcgatttattggtaatccactttgattctatattaaccaataattttggactattaccatggctaaagtgaatagtttgaagtctagacgcagcgtagtgctctgtctaccactatgttaatacagaaatgaaatggttgtcgataaattattagattcttttttagatatacaacacttatgtcgataaaatggcttgaatcctattacgtacgcaagaaatagaaaaccggttaatttaacc

SEQ ID NO: 15159 - DNA, 296 bp, Glycine max
  Clone ID: jC-gmle01810084c06d1
aaacttagcattttttttctttacttaattctttgttattgcaaaaaacgacacacacaagttccatcacaaataaaagaacttggaaaagaaaaaaaaccaaaacaaaaagaacccctactagaaaagggggggggggcaacaaaacaagactggaagaaagaaacacttttctcaccacccccgccaaaaaaaaaaaagaccccccgggtaagaaaatgccccccaaaaagggaccctcgcccccccaaagagggtgggcaaaaaagaaaccatactccaagaggggggccaga

SEQ ID NO: 15160 - DNA, 455 bp, Glycine max
  Clone ID: jC-gmle01810084c07a1
cttcggaagcggaatcgatcaatccctcacctcattgctgagatctgcaaactggctatggactacgaaccctacgacagtagcggaactgatgatgaccttccaccaaccgatcaaaatataattttcaggggaggaggaggacgtctggctgggaatgggagatctgctgttgcttcaattccttacccaaggatgtacggtgaaattgatatggagacccagattcatcagcttgagcaagaagcatacagttcagttctaagagcttttaaagctcaagccgatgccattactagggagaaagaaagtttgattacagagctgagaaaagaactgagattgtcaaatgaggagcacagagaacttctaggtcgggttaatgcatatgatgtgatacggaggataagggaatggagacaggctggtggccatcagcctggtgtacttagtac

SEQ ID NO: 15161 - DNA, 493 bp, Glycine max
  Clone ID: jC-gmle01810084c07d1
caaaccgaaataaataattattaccaaactacaatatttgccatcctacataatgcctaatccacaagaaccatgcctacagctataaactgttagagagggtaataatctttatgtgataatacaagagaaatacaccctttccagaattatgctatcataatgcctcctctgctcattgtacaaagtaacaggtcctcatcactctcgatccattgattgagcatgtgagaaatggtggccagccccatcactttcaccgtcagaaagatcattaagttttgcaattgcatcaataagagcctgctcatgatccttcaatactttctttgctttctcaacttcaaggggatcagggtgatttgcactgaataccctctccacctccttgattagtgtgtctgtgtgaagtatttgtatatcatcatgcaccttctttcctaggccattttgtgatgacaaaaaatcttttctggattgcccctttgcagct

SEQ ID NO: 15162 - DNA, 370 bp, Glycine max
  Clone ID: jC-gmle01810084c08a1
cctcatagtctcccacatgtgccgtatcatccgtgcactctccaaagtcaaagccacaatgcttgagattctcaaaggatcaaacaaccaatccaataacattcactctcaccacataaagaagcaaaagatgactaacaaactcatttttggctcgattaggctccacttcaactggtgctactaaaaatcttatcatgttatccctgttctcgcttgtgtttttgaagggtggccaaaagctggtgacatgatccattatcatgatgaacattatttgtctgaggattgccatgatgatgattttcaccttgcgggatacctacagtggcttgaatagaacgcccaagctcatgatgattgataaaag

SEQ ID NO: 15163 - DNA, 559 bp, Glycine max
  Clone ID: jC-gmle01810084c08d1
aacaagtgactgtcccaactttgctagctgtttgttacaaaaatatctaacaccatggtttttttttctcatacgtaagaatcgaagacacaggcatgacatgagaggatttataacaattcacgctatctatattgaattgatctctggtacacaccatggttaacattattcaccaaattcaattcacatgcccctagccaacatttcatggaaccttctatcagactcttgcttctccaacttgaacttctcgtggcaattcgctatgaacatttcagccaacatatcaatctcgttcatctcatttccacaagcctttttatcatcatcatcatcttgaaccttctcttcaagccactgtaggtatcccgcaagctgagaatcatcatcatggcaatcctcatacaaatattgttcatcatgatgatggatcatgtcaccagcttttggcaacccttcaaagacacgagcgggaacagggataacatgagaagattttgaggagcaccagttgtagtggagcctgaacgagccaaagatgattttcttagtcatc

SEQ ID NO: 15164 - DNA, 458 bp, Glycine max
  unsure at all n locations
  Clone ID: jC-gmle01810084c09a1
ttagggtctactcccttttccaagctcctcaggattctggatcttactatgctgtcctgagcggccttcgagttccttatctcatggaccttcttccgtatcttggtcaacaacatggatggattttacattgttccagcttttatggacaaaccttgttgtttacattaccaagaacttcatgaccctgcccaaacatcaaggttcctttcattctggtatctggggaggcaagggacaaggaaaatccttccaatgtgagcttgtctttgccaagatgggaatcaaccccatcatgatgagtgctgggcagtcggaaagtggaaattgcttgagagccatcaaaactgatcaggcatagataccgtgaagccgcagacttgatcaataagggaaagatgtgtgctccttttatcaacgatcttgatgcacgagctggtcgtnttggtggtaccacc

SEQ ID NO: 15165 - DNA, 270 bp, Glycine max
  Clone ID: jC-gmle01810084c10a1
ctcaactgaagaaatgctacaatatttttgtgaaccattgagtctggaagataaagtattgcggtaatctaataccattatatatctatggtcctactgaaatcttatgtgatatgaaatcgagtattataatctcacacaagagcttaccttctatataccgcgtcattggaaaatcctaccctattgtctatgataatctcgtacaatctaataattttccttctgcagaatatggtggtctaaagagctgaactccaaccatcaaag

SEQ ID NO: 15166 - DNA, 488 bp, Glycine max
  Clone ID: jC-gmle01810084c11a1
cttttcttttaggtttccactctcacacactctccctcttctctttctctgcaataatctctcttctcttcttcactctctcaactcctgccaaacccccatttccgcagttcttaaatttggagtctgatgtctccgccattgctggttaccgaagatgaagggcagtgccatgcctcgatggtagcatctgcatcttcaccatccctgaactgtttctccctaaatgaggccggatttaaagaatgcaattacctgggattgtcagattgctcttcggtggacagttctactgtcccgaatttgtctgatgagaaaaaggagaatctgaatttgaaggctactgagttgaggcttggccttccgggatcccagtcacctgaaagggagacagaacttttctcgttgagctcaacaaaacttgatgagaaaccactgttccctttgcttcctacaaaggatggaatctgctcattgtctcaaaaact

SEQ ID NO: 15167 - DNA, 517 bp, Glycine max
  Clone ID: jC-gmle01810084c12a1
gattcttagagctcggcaaccttattgggacctcaacttctacattaatgctttccaccatacatcagcttccatgattctctgcactctattctgaggtgaccaattctgttcttcttttctcgcataatacagtaatcaataagcacataaaccttcgaggacatggcatcagccttgtccacgaccagtgtgctttgctggaggaatcctcagcacatgcatattatctcacccttttcacagacacttcaaaatggaactctaagaactgtagctgcttcagcctcaaaagatatcagcatagaaagtgacaagtgttcctctttggaggtgaacagaagaacaattttggcttctggggactgcttgacgcctttcccgggtgagagtttggctgaggcgaaacagggccttctaacacggagaattcctggactgtccgagccagatgaacaagggatgaggacctatcgcatgccggatgagacgtcatgaggacatggtgttggatgga

SEQ ID NO: 15168 - DNA, 534 bp, Glycine max
  Clone ID: jC-gmle01810084d01a1
acgccgtcaaatccgaaagcggcgttacctacaacaacaacaacaacaacaacaacgtttctgtttctcccatgtcgagaaagcgttcccgagataataacaacaattacggttacaacaacaacaacaacgattcattttcgtttctcggccaagacgtttctctccagatccagcagcagcaactcgacatcgagcatttaatcatgcaacgcatggagaaggtgagaatggagattgatgagaagaggaagaggcaagcgaggaggatcattgaagcgattgaggttggagtgatgaagaagctgaagacgaaggaagaggagatagagaaaatcggaaaactgaattgggcgttggaagagaaagtgaagcatctctgcatggagaatcaggtgtggcgtaacatagcggaaaccaacgaagccacagcgaatgctctgcggtgtaatttagagcaggttctcgcgcagcgcggcggaatggcggcggaggaagacgtctgcggacgcgccaccgtgtgcggcggcgcgg

SEQ ID NO: 15169 - DNA, 367 bp, Glycine max
  Clone ID: jC-gmle01810084d01d1
gggggttgggccataaacaaataaaggaaaaagcaatagatttaaaccaaaaaatacaaagaacagagaaaaacagaagatgacgattaagaaaaaaaagatctttcccaaaaaaagggaaagaaatgaaaacgggcacactttcaccctcataacaaacacgaatgggacaaatgtggaggggattcttaaacaaggacccctgggcccaaagacgggacaggaaagttaacacccaggaaaactccttcaaacaggtgttggataagggggaaagggaaaagtccccccatcccgtaaggcctcgccccgcgattaagggcggcaacaacacaagccattttttaaacatgacacctggggcccc

SEQ ID NO: 15170 - DNA, 495 bp, Glycine max
  Clone ID: jC-gmle01810084d02a1
gctaacttggacatgacatgacaatgagtaatacggtgtaccagttgataagcacaaaatattgacttaagtctgtgttagcaatgcttgtgtgggtaaatttattgtttttatgagagtaaagaaagaacaacaaaagcaatatcaaggaactgtgaatgagagaaaatttgagagactcaattgatgcaattggaactcgaggaaccaaaatcattcaatcactatatacaagggactaaaaatgcaattaaacttttattttatgcatttttatagatattataataaaaatatgtcattttgcttttatgatttattttctttttgaagtgcaaattgaagcaacatgccttgagatgaaagggcctaaaattttcatctttacttgctgaaaattcagaatctagattggatgagcctgtggtggatctcccaccactcaaggtgaaagatcttcctaagtttcagtcgcaggatcctgaggcattctat

SEQ ID NO: 15171 - DNA, 477 bp, Glycine max
  Clone ID: jC-gmle01810084d02d1
gatagaaatcgactagctatatatccattatccacctaaaaataaaaaatcaaaggcaatttgtttgagttatacagtataaacctaatctttaatgttaggaaataaacctagtggaataaacaacaaacaataaaagccttatcccactacagataaacctagaggagtttaagcaaaaaattgtagactaataaaagtacaagtaaactgtagacaaggtaagaggaattggtagctgatattatgtgctatatcagcatttgattgaattacaatttgatgacagctttttccttcagtctattttgttgattcataaattgaattgctttttgcaatacatgtggccggttgattgttagtaaagatatcagtgaactctagatgtagcagatttcagtgacaatatgtcactaaccaatctatcaaggaaacacgtagacgaaccaccttgtttcaaggaaacatttacct

SEQ ID NO: 15172 - DNA, 592 bp, Glycine max
  Clone ID: jC-gmle01810084d03a1
attctccctttcctctccgaaccctcgatcactctcacgcgctcctatattcgctcctccaccgtcgctctctcgaacaaccacaacaccatcttcatcacatggcaaacgcagcatctggtatggcagtccatgatgactgcaagttgaggtttttggagctgaaggcaaaaaggacacaccgtttcatagtttttaagattgaggagcagcagaagcaggtcattgtggagaagcttggtgagcctgcccagggctatgaagatttcactgccagccttcctgctgacgagtgccgttatgctgtttatgattttgagtatctgactgaagggaatgtccctaaaagcagaatttttttcattgcgtggtcccctgacacatcaagggtgaggagcaagatgatttatgcaagctccaaagacagattcaagagggagctggatggaattcaagtagagttgcaagcaactgatcctactgagatgggtcttgatgtggtcaaaagccgcgccaactaagatgattatataaaatagttggctttctggtgggagcagcacccctgaagccttagttactcatatggaaa

SEQ ID NO: 15173 - DNA, 462 bp, Glycine max
  Clone ID: jC-gmle01810084d03d1
aaatcacaaatcataataaaacacactggaacaagcaaagcttgtcaaaaggtgcaatagaattttatgccacaacttggaaaattgagagtttgggaccataactacccaagttgaccatcccacaaactaggatattttccatatgagtaactaaggcttcaggggtgctgctcccaccagaaagcctactattttatataatcattttagttggcacggcttttgaacacatcaagacccatctcagtaggatcagttgcttgcaactctacttgaattccatccagctccctcttgaatctgtctttggagcttgcataaatcatcttgctcctcacccttgatgtgtcaggggaccacgcaatgaaaaaaattctgcttttagggacattcccttcagtcagatactcaaaatcataaacagcataacggcactcgtcagcaggaaggctggcagtg

SEQ ID NO: 15174 - DNA, 554 bp, Glycine max
  Clone ID: jC-gmle01810084d04a1
gaaaacagcatcgaacccgtcgtagcagaaaaacttgtcaccatggtttcttccgacaaggatccacgagaggatgtccttcaagcctggtacatggatgatagtgatgaagatcaaagactcccccaccacaaagaacccaaggagtttgtctcgttggaccaacttgctgaacttggagtccttagctggaaactagatgctgataaccatgaaaatgatccagagctgaagaagattcgtgaagagcgtggttacacctacatggatgtttgtgaggtctgcccagaaaagttgccaaattatgaacagaaaatcaaaagcttctttgaagagcatcttcacactgatgaggagatccgcttttgtgctgctggaagtggctattttgatgttagggatcgcaatgaagcttggattcgtgtgtgggtcaagaaaggaggaatgatcatcttacctgccggaatttatcatcgctttacgctagatgagagcaactacattaaggctttgcgtttttttgttggtgagccagtttggactccatacaatcg

SEQ ID NO: 15175 - DNA, 488 bp, Glycine max
  Clone ID: jC-gmle01810084d04d1
cccgcttcaattttatctcgtaaaatttaaatacagcccaagcatacataaatatacatcagcatactaacatatgcttatgtttattctgtacccaattctaataataatacaatgcaatctttatacagggacaggcaacaaaaacactggcgagggtacatcaaggcataacaagccaggaccctttatttaaagacaccattattttctttttttcaaaccttactttagcaacaaagtcttggtccttttcatgtggtactatgattaggcagaaccagatcttacgcggcggcatcaacagcatggttgctaacatccttttccacaaaatccttgacatattgttgtcttgcagggagatggtcatttggacgattgtatggagtccaaactggctcaccaacaaaaaaacgcaaagccttaatgtagttgctctcatctagcgtaaagcgatgataaattccggcaggtaagatgatcat

SEQ ID NO: 15176 - DNA, 462 bp, Glycine max
  Clone ID: jC-gmle01810084d05a1
tctttatgttgatggctatcttcttcttgattgtgcttgatcgaataatatacctctgctcatttgccacggggaaagtggttttctatattttcaacctcattctcttcacatattcagttacagagtatgattggcaattgaagccatcccaacgtatagctcagtttgctctccgtgccatatttcttgcaaaggcagtttctctgggacttcaggctatacaaatccaatatggcattcctcacaagagcacattgtatcggcaatttttgacaagtgaagtttcaagaatcaattatttaggatatagactttatcgtgctctgcctttcctttatgaattaagatgtgttcttgactggtcatgcacaactacgtccctcaccatgtatgactggctaaagctggaggacataaatgcaagtttgtaccttgtcaaatgtgattcagtcttaaata

SEQ ID NO: 15177 - DNA, 540 bp, Glycine max
  Clone ID: jC-gmle01810084d05d1
ggttaactatacaagtttgctttcctataattctggcattgactgtattgtacattgtatacatgatttcccccaaaataatcattagcatcaatgttatgtatgataacagtcaagaatcacgatgccgtgctccccaatctgttcagagaaatgtttcataaccgcataatgaataccgcaccaaaaatgttgcaatattaatcttatcatgcaggcatcaacttgcattgtattgctcctgactccaacatcgttcaatgtcagtcaaatcatacgtgagcactgaacctggttagctgttagtgaccagaaaatggtacactgaaaattctaatcaggttttgtgtactcaagcagcatgtgcggggaccggtatatcttcactagagtccagtaaaggacctcttcgattccaagctcaccctcagctctagcagcatatatatcctcgcagatcgctatcaatctgtcacaggaaggtaggttctcatacggaattctcattcttaagtcagcgcaatggagtctgataaacgt

SEQ ID NO: 15178 - DNA, 504 bp, Glycine max
  Clone ID: jC-gmle01810084d06a1
aaacactcataacacaaagcacaaagcaaagctcatccttgagttaaaaaatggcagcagcttcttccatggctctctcatccccatccttggctggcaaggccgtgaagctgggcccatcagccccagaagtgggaagggtgagcatgaggaagaccgtcaccaagcaggtctcctcaggaagcccatggtacggcccagaccgagtcaagtacttgggcccattctctggcgagcccccgtactacctaaccggtgagttcccaggcgactacggctgggacactgctgggctttccgcagacccagaaaccttcgccaagaaccgtgaactcgaagagatccactccaggtgggccatgctcggagccttgggctgcgtcttcccggagttgctgtcccgcaacggggtgaagttcggagaagccgtgtggttcaaggccgggtcccacatctttaacgagggtgggctcgactacttgggcaacccaagcctgatccacg

SEQ ID NO: 15179 - DNA, 364 bp, Glycine max
  Clone ID: jC-gmle01810084d06d1
ggaaaaagcaagtaacattaagttggattcggatacacaagataattcacattatctgaagtacttcaccaaacacaaatctaaaaactctcaaaagtcatttcgttctttgacgctcactttccggggacgaagttggtggcataggcccaggcgttgttgttgacagggtcagcaaggtgatcggcgaggttctccaatggaccctttccggtgacaatggcctgaacaaagaagccaaacatagagaacatggccaatcgtccgttcttgagttccttcaccttaagctcagcaaaagcctttgggtcatcagcaaggcccaatgggtcgaagctgccacctgggtagattgggtcagtga

SEQ ID NO: 15180 - DNA, 566 bp, Glycine max
  unsure at all n locations
  Clone ID: jC-gmle01810084d07a1
ctccgcgcgtgcggcggcacgtaccaaacctgcatctgcgcccttcccttcctcgcccgtaaacagtgcctcgtcaccgtcacgtgcgaccccaaaaacctcgagcacatcctcaagctccgcttcgacaactaccccaaaggccccacgtggcagtccgcgttccacgatttgctcggcgaaggcatcttcaactccgacggcgacacgtggctgttccaacgtaaaaccgccgcactggaattcaccacgcgcactctgcgccaagccatggcgcgttgggtgaaccgagccataaagcacaggttctgccccatcctagccacggctcagaaagaaaacaaatcagtggatcttcaagacctcttgcttcggctcacttttgacaacatatgcggcttggctttcggccaagacccgcaaaccctagccgtggggctcccaaataacgctttcgctctctgcttcgatcgagccaccgaggccactctacaacgctttattttacccgagatcttgtggaagctgaagcgatggctcangctcggaatggaagtgagcctgag

SEQ ID NO: 15181 - DNA, 472 bp, Glycine max
  Clone ID: jC-gmle01810084d07d1
gtgagtaaagggaaatttcatctatacagacaacgtaaattaaactaacacagatgaaatgatacatcatcgtcaatattctatattaagtaatatataaatttcttataattaatattatttctttatttaaaccgatgatgtatctatctgtttaattaaccaaatcaaaatcacttttgaccaacagtaatagcaccctcggtggtggttaacttttccagcaccggtttgagatcccttgggtacacattcaccctgagaccgtacttcatgaacagtgtgagtgacatcttttgctcgacacggtgacccggcgcgacggcgaggcggtggcgcaagagcaccgcagcggcgattgacttcatctgcaagtaagccaagtccttccccaaacaaagcctaggtcccgcattgaacgaaacaaacttgtaggagtcttgcacctgaattttgtccccttccggagaga

SEQ ID NO: 15182 - DNA, 543 bp, Glycine max
  Clone ID: jC-gmle01810084d08a1
aaaaaagaataattcattatgatataaaaccagagaatgttcttcttgacatcaacttggaaccaaaggtagcagactttggcatggcaaagctttgcagcagggaaaacaatgtttcagtcaatacacactttaaaggaacaaggggatatgctgcaccggaaatgtggaagccttatccggtgactgagaagtgcgatgtttatagttttggtattcttctctttgaaatagtagggaggagaaggcattttgatgatgcctacagtgaatcacaagaatggtttccaaaatggacatggaatatgtttgagaataatgaattatttgtaatgctttcacattgtggaattgaaaacaaggacagggagatagctgagagaatgtcaaaggtggctctgtggtgtgttcagtattcaccagatgatagacctctcatgagtaatgtggtgaagatgttagagggtgaaattgaaatttctccacctccatttcccttccaaaacctgatgaatgataagccaaaatcgactccaaatggag

SEQ ID NO: 15183 - DNA, 430 bp, Glycine max
  Clone ID: jC-gmle01810084d08d1
gggggggcagaatatgcctgttttggaatattcaagaaagctcaaaatcactcttggtttattttaaatacccaatttgatggaatttttattttgcagcaatctctgtgctgatatgatacaactaagggggtttttcgatctgaaaagcattgttcttgattttagagccagattctagtaaagattccgtctcccatgatgtagtagtaccactacctgaatctacagggcttccatttggaggcaattttggcttatcattcatcaggttttggaagggaaatggagggggagaaatttcaatttcaccctttaacattttcaccacattactcatgagaggtctatcatttggtgaatactgaacacaccacagagccacctttgacattctctcagctatctccctgtccttgttttcaattcc

SEQ ID NO: 15184 - DNA, 456 bp, Glycine max
  Clone ID: jC-gmle01810084d09a1
atctatcgtaatagctaagtgctaaagggtaaagggacagcccctggcacgcccgtataaataaaaagaaggataggcccacaccacacaataaagaccaagaataagaactgcgcgcctctgatcaagacctggtgaagaggaacaaatcagtgtctcttgcaaagcacagagtataccacttagataaaaaacatgctacctgaacgcgagagaaaacgcttaagttgagctcagaatcactgaccctacacgcgagcattacgaaagcctagccaacacaaaagaaaacatgaagcaaaaaaaattatcattccggtggattgcaacaaccactcttccattacagatctgatggcaacaacaatgttgacggactgattgaacaaaacattgtgactgtgattacctcaagaaatgcatccggtgaatatagaaagatacaacaacgagatc

SEQ ID NO: 15185 - DNA, 486 bp, Glycine max
  Clone ID: jC-gmle01810084d09d1
gatatccaaaggttttattagatttttaggtgccggtaagcattatcaataatggtcgccctgactatgaaaacactccattttaaacaaattttatttccactgtagtagttcttgacgcctacattaactgttggtgtttgctgcctaacaagtttctatttcgctgcaaacatcttatctggaatcgatgttgacgagcagctcctcttcggattgctcatattcaccgttaccagtgtactttccaagctgctcgagtgactttaacctgtcacggaaagcgagtgcatcttgtgctgtctacacgttctatgggcggccttcccaggcggttaaggctatgtattggagggctctggcatacgagaatgacacgtgccacgggtttggagattggcgcatggcattcaaagggagggtagcttcaacctcagactgtccaccagacaaaaacataattgcagggacagcaggaggaattct

SEQ ID NO: 15186 - DNA, 503 bp, Glycine max
  Clone ID: jC-gmle01810084d10a1
ttcacttgttcttgacaagtctgagtgggtgaagggacaaacccttcgccaaccttctgcatcagttgtgagatgcaaccccaccaccccatcaggcctcaccatcagagctggttcctatgctgatgagctcgttaagaccgcgaaaacagtggcttcaccagggaggggtattttggccatggatgagtccaatgctacctgtgggaagcgtttggcttcaattgggctagagaacactgaagctaaccgccaggcataccgtaccctcctcgtgacagttccaggccttggtcagtacatctctggtgccattctctttgaggaaacactctaccaatccacaactgatggcaggaagattgttgacgtgctgcttgagcaaaacattgttcctggtattaaagtcgacaagggtttggtgccccttgcaagttccaacgacgagtcatggtgccaaggtttggatggtctagcctctcgctcagctgcatactacgagc

SEQ ID NO: 15187 - DNA, 482 bp, Glycine max
  Clone ID: jC-gmle01810084d11a1
ctgtgattggtggttctccttctgctcctcaaattgcttccttttctagccgtggaccgaaccatcttacatcgcagattctgaaacctgatgttattgctcctggtgttaacattttagcagggtggactgggcgtgtgggtcccacggatttggacattgatcctaggagggtcgagtttaacataatttcggggacttctatgtcgtgccctcatgcgagtggcattgctgcattgcttaggaaggcttatccagagtggtcacctgcggcgattaagtctgcattgatgaccactgcttataatgtggataattctggtgggaacattaaggatcttggaagtgggaaggagtcaaatccgtttattcatggtgctggacatgttgatcctaatagggcacttaaccctggtttggtttatgatttggactctaatgactatttggcgttcttgtgttctggtgtgtatgatgctaat

SEQ ID NO: 15188 - DNA, 567 bp, Glycine max
  Clone ID: jC-gmle01810084d12a1
gatcttccttgaactcaccaacaatcttctcctactaccaataacaatgattgttctcctaatagccaaaactgttggagacagtttcaacccaagcatctatgagattatactgcacttgaaaggccttcctttcattgatgcaaatcctgagccatggatgagaaatctcactgtgggtgagcttgttgatgtaaagccaccagtggttaccctccatggagtagaaaaagtagccaaaatagtagatgtcttgaaaaacacaacacataatgctttccctgttatggacaatggggtagtaccaccagtagtaggacaggccaatgggggaacagaacttcatggactgattctaagagcacatctcatccaggcaataaagaagaagtggttccttaaagaaagaaggagaacagaggaatgggaagtgagagagaaatttacctgggtagagctggctgaaagagaatgaagtattgaagaggtggctgtgaccagtgaggaaatggaaatgtttgtgatctacatcttttacaatacaactcccttacagtgtagagagca

SEQ ID NO: 15189 - DNA, 519 bp, Glycine max
  Clone ID: jC-gmle01810084e01a1
gcataatataatccaatttgactagaaatataactatgttcacatccaaatgaaagtcgagaggccaatcaagttgcagtggcaaatattggagaataaatggagatgtcatagaccaactcttctaaaacattatttgttaggtgaaggctcatgaatggttttaatcttacacccactcactcaggagccctttaggctacaaaagtccaccctacctttgggcagagatgatcaaactctttaggctttaatactatgtctcagatcaactctcctaaaagcacaatatattcaatgaggggtcatgaatgattttatatctaactggatgtaaagggggaaaatcagttgttttagtcgaaaacagatgtggctatgaataaagatcatggaaataacatgataaagggagctttgacttctggattgtgagtcacacacaacagataaattcagatcctgtttttagggtttttagaccagaatacccctttatattagatatcattggctact

SEQ ID NO: 15190 - DNA, 553 bp, Glycine max
  Clone ID: jC-gmle01810084e01d1
aaccccaaacaagtattttcgttgcatcttcatagttgatacaccagattgtccatgttctgttgcacagcatctaatgaactacaaactacattaaattacaaaacacaagggaaactaggaagaaaaacaaccccaaaaatagaggttaaaaaaacacattgcttgaaacacacaaaagaaaaattgatcaatatgaacacaagttaaatttcccttctctaactttgctgtacagccaataaaatgtttgcaagcattatgtatgaaactatgctaacatacataatgataaaggaaggaagaaacaaagagaactattaactgcatatgccatgcaacataaattgaaatcgcacaaaattttaattctaaggatcatggtcgtgaggagcagcagagactgatggtgatggaagaaccaatataggtaatccattatgtacaaattcagcgtaaggggaaacatgctctggcttatagtcccatatatgtcctggtaagtccacttgctgaacattaccttttgcaaactttaatgcacagcagatga

SEQ ID NO: 15191 - DNA, 526 bp, Glycine max
  Clone ID: jC-gmle01810084e02a1
tttggattgatcagcagcaacgcctgaaattcaatgttgatgttgtagagagtgaatggggccagggtgctaagcttgatgttctggaatcaaagattgcttcagatacttcacacactattaaggcaatttgcattgtccacaatgagactgcaactggggtcaccaatgacttggccaaagtgagacaaattctcgattcctaccggcatccagccctgcttattgttgatggagggtcttctattcgtgctcttgatttccgcatggatgaatggggagttgatgtggcaataactggctctcagaaggccctttcccttcccactgggataggtattgtggatgcaggacctacagctattgaggcctcaaaacatgctaaatcacttcgagttttctttgactggaaagactacctgaaattctaccagctaggaacgtattggccatacactccttccatacatttgctgtatggtctgagagctgctcttgatctgattttggaggaaggacttgaaat

SEQ ID NO: 15192 - DNA, 421 bp, Glycine max
  Clone ID: jC-gmle01810084e02d1
gggccataacacaggggcaaaaaagatcattagaggcaatggtttttggtttaccggacaaaaaaaaaagcaatgccttaaagctgaaaggagagggtttgttcattttcaaagggggggaaaagaggggaattttttttttacagaatttcccaaagggcagaaaaaagggagtggagccaaaaatggcttgggactcaaatccgggaagggaccataggaaaaggggcccggtagtattcgctggcagcatgaactcccctttcaaggttttcaggaaagcccacattttttagaataagttccacaccaggttgacatcccaacaggtggaacttattcaaggtggcaagaggcccaattttgaaaacctctcccccaactttttgtaaggcaagacctaaccttaaattgtgttttt

SEQ ID NO: 15193 - DNA, 554 bp, Glycine max
  Clone ID: jC-gmle01810084e03a1
gaataacgcaacatatgtctttatctcttattctaaactctgaaaaaacctgaagtatactactagggaagcatcagattttcatgctcctcctttcattaaattaaaggtagagattccataaacaagtcaatttttttggagcaggaagagatttttttttcttttcaatttgaattatttattatctatgaaaagcccttgactgatgcgtcccaaatccaaaattgctatattttctgttcagttctggctagtggctacaaaatctttgtacaaatttctgaacagtttctaggtatggaaactctttcatatgggtcagcaccatgctgccaagttgtgaactcaaagtggaaattagttgaaaagagtttgagttcacgtcaatcaagagtttcctctataggaaaacttggagtttattacacaggtactatttctgcatgtgcgcctgtgagattttatgagatgggtactagggtgcagctaagaaactcaaaaagattcaatttctaggtttgtagtggaaagtatgatgatggttatgtgat

SEQ ID NO: 15194 - DNA, 443 bp, Glycine max
  Clone ID: jC-gmle01810084e03d1
ggagtaatagttgttcactagcatgctttcttggggagtaattataggtatattatatatacaagattttacctatgattctaaagcatttgggtttgttttctctttatacaaactatgaaagagaagacagtttacaaagttgatttatatttgaagatgccatatgattcaccctgtcattgaggtttggctgccaaaatattactgaacttggattgagatctgatgaaagatcttatcctgtcccaaagtgagaaattggaagcgaaatatctgaccatcactgacttttttgaaccttctctgggaaattctaattccctgtcaataatagagggcttcatactggctagatcttcaagcaatggtaatgacacagaaccctgagactctaggtttctgatccacccgcgaagtaagaaatttatgatctcaggaac

SEQ ID NO: 15195 - DNA, 576 bp, Glycine max
  Clone ID: jC-gmle01810084e04a1
gcaagtcaattattttcctaatttcactcactttcaagcaaaacagtgatgcaatgttgtaattccgaggaaaataagtttttcgatgttttactaaccagctctttgctgagtagaaacaggaggcttgaaaatcctcgatggatgcagcatgcagctatgattaatttatgggaatcaatttcatcactttgataacgcatatcttgagtgcgtattagaatgggaattttttcattgactttccttcgagagatcaaaaggaggaatggtgcttcgtgctcggctcgatttattagctttcacctgcaggagagttacctgcattttttcacctggatgggaaaaaggagagacaaaattgaacataaagcaaggtcgaattttgatgggtctgttgcgagtttttgttacgccgttataaagaatcgattcctacgtaaaatcactagatgatagcgtcaaaggcatcaaaaagtttcaaaatctccgtgcaaaatcaataattttgtttaacaaaatttggtgatgacggtcaaatggtcggtcatactatggaggagtctcgtctaattg

SEQ ID NO: 15196 - DNA, 517 bp, Glycine max
  Clone ID: jC-gmle01810084e04d1
cctaacaaagaaaccgtattgctttccaattaagatgcaataattaattcaattccaatgcagatgagaaaggcatattgtgttgaaacttttgatgcaatggcatgttaacctatctttacgaaaatgaatttaaattgtcagttatgtttgtcaataagatattgcattcgtgtgataatgggtttgctgcacatttttgatacagcagtatggagggattatcccgatgtaaaattgcttgaaaataactccatgagagtatcagcattcagcatgttcaaaaaatcgacctactagctcaatgcatgcgcagttacaaaactaagatagcgatcaaatagttagtcgtactatacgggagtcctatccaagctttttccattccatgaatcatttccttcagaaaaatatagacgtgattaggggattctcttttcaatagattttctataaatctatggtcgatctttttaccgccatcttcgaatattcttatggtccatttgtatgattt

SEQ ID NO: 15197 - DNA, 571 bp, Glycine max
  Clone ID: jC-gmle01810084e05a1
aattgagggcttggaggagcagattgttaatcatgaaggtgacattgagcctactatttctgtgcttaatgggttggtggctatgactagatattgcaggtttttgctctttggctttgaggaggatgagcttggttttgagagtggaagtcagaagaagcctaagaggaggttgattactcaggaaattgctgaaacgtttttgactgttcctaaggacttttgctgtccaatttcgttggatttgatgagagaccctgtgattatttccactggtcaaacctatgatcggagttcaatttcgaggtggatggaagaagggcatactacttgccccaaaacaggtcaaatgcttgctcacactcgtcttgttccaaaccgggctctgaggaatttgattgtgaagtggtgcactgcacatggagttcctcttgagccaccagaggtcatggatgcgatgggtgaagttttcccgtcggcctgtcccaccaaagctgcccttgaagccaacagagccacagcgacgcttctcattcaacagctcgcgggtgggtctcaagctgggaagact

SEQ ID NO: 15198 - DNA, 465 bp, Glycine max
  Clone ID: jC-gmle01810084e05d1
gattccagacatggtctctcttttttatgagcattctctattcttacatcatttgactcataacatatgtgttgaggctaactgctcaacaacactcctggatctcttagaatacatgatgatattgctataatttcttatgactttaaatttcaataaaagaatctgtaaacacttacaagttacaacaaaaattgggaacttaagtaaacacaggagtattaccactataacacagaaatggacattggtactgaaacatcacccgcaaagctggtatccctagttgtatttgaattgctagcaaacgcatagccaacacctaatccaccataatgtaaagttgcatgctcacatctctgaaaaactcttgcaagtgaagctgcttttcttcttgcgcgttttgtccccgtaaaaagaagggtttgaagtaatccggccaaagctggtgccttcacaaccctt

SEQ ID NO: 15199 - DNA, 528 bp, Glycine max
  unsure at all n locations
  Clone ID: jC-gmle01810084e06a1
aaaagtcttgtttgtgtggctggtttggatcttctccaagattggcaactggaatatgtggaaggtctcaagaattgtggccaagatgtcaaacttctatacctaaaggaggcaactattggtttctacttcttgcctaataatgatcatttctataccctcatggaggagataaagaacttcgtcaaccctaactgttaatatactatttaaccttacttaaaggatcccatacataactaaaagcctgacatttcacctgggtaatgtttcttttttttatttttgtatctttttttcttttcttttcccaactttataggggtggtgtgtagttatataaatgtgtagtgctacttactgtgataacatctatggaggtaaatctggagctttctgtgatcggtgtggtctactgcttcctgtgctgtgttcatatctttgtgaagggtagcaccagtttcagcagtttgaagtgccagagttcagttctttagtggngtgttgctgaagcaacgtaaatgaagc

SEQ ID NO: 15200 - DNA, 499 bp, Glycine max
  Clone ID: jC-gmle01810084e06d1
agaagatgaaactgcttaatttaatttaacaggatgaaatatattacaaccttagcttcttcctgatgaaaattctaactgaaaagtaaacaaacaagacatttatatatagacataaaagttcataacaggatggcatttgctccagttcccagtcaataatatatgttatacaacataaatgcattcactgaaccaaagcgataagccaagccatatcttgtatctcccctcctcctactattgaggttgaaaaagttaaatagggcaagcttcatttacgttgcttcagccaaaccccactaaagaactgaactctggcacttcaaactgctgaaactggtgctacccttcaaaaagatatgaacacagcacaggaagcagtagaccacaccgatcacagaaagctccagatttaccaccatagatgttatcacagtaagtagcactacacatttatataactacacaccacccctataaagttgggaaaagaaaa

SEQ ID NO: 15201 - DNA, 528 bp, Glycine max
  Clone ID: jC-gmle01810084e07a1
tttccctgttcttaggtatctgattgatttctctctttctttttttttttatcagttttgaggaattagggttcgtgatctgatttgtttctttaaaatttccccggttcttaattaggctctgcgatttaatttcttttatcatatttgaagaatcatggttctttcttggtttgatttattgcgcactcagtttctgatatgcaaaatctttccctgttttaattaaggtttagggtttgcgagttgtcattttggaaaatagggtttgtggtttattgattgtgtaatccgtttggttgtaagcagaaacttctctgttttaaatcattgcttgtgatttagctctattttttatggttctgtttgtgattgaacagatgcagatcttcgtgaaaactttgaccggtaagaccatcacccttgaggtggagtcctccgacaccatcgataacgtgaaagctaagattcaagacaaggaagggatcccacctgaccagcagagacttatctttgcgggtaaacagc

SEQ ID NO: 15202 - DNA, 476 bp, Glycine max
  Clone ID: jC-gmle01810084e07d1
aaaaacataaacaacatactttcgctgaaacgagttcaatacatcattttaaaacataataaacagcagcacttaaaccagagatgcaaagcacaagttcaagggagacactgaacaaacagataagacatatgagaacacttcataaaagggattccccttagcaaccaccacgaaggcgaaggacaagatgcaaagtggattccttctgaatattgtaatctgccaaggtacgaccatcttccaattgcttcccagcaaaaatgagcctctgctgatctggagggataccttccttgtcctgaatcttagctttcacattgtcaatagtatcagagctttccacctccaaggtaatggtcttccctgtcagagtcttcacaaatatctgcatacctccacgaagcctcaacaccaaatgcagagtggactccttctggatattataatcagcaagagtacgaccatctttcagc

SEQ ID NO: 15203 - DNA, 578 bp, Glycine max
  unsure at all n locations
  Clone ID: jC-gmle01810084e08a1
ccccagttcaaagaaacttgacaccgattagattaggggcttcgaacaaggagccccgaaacccaaaccctaatctgattcgctttcgattatggcgtctgagagcgcttctcgatcgagttccgcggccgattcgtacattgggagcttgataagcttgacctctaagagtgagatcagatacgaaggtattctctacaacatcaacaccgaagagtccagtattggcctcagaaacgtgcggtcttttggaacagaaggaaggaaaaaggatggcccacaaatccctcccagtgacaaggtttatgagtatatacttttccgtgggactgacatcaaggatttacaggttaaatcttctccacctgtccagcctactccacaagtcaacaatgacccagctattattcagtctcactatcctttcccggtgaccacattctacagtttgccttctgctgtaagtgggtctttgactgatcctagctctcataccacacaaactggacttnccgggtcaaattttcaagggcccttacctttgtatcaacctggagggaacataagatcgtggggag

SEQ ID NO: 15204 - DNA, 227 bp, Glycine max
  Clone ID: jC-gmle01810084e08d1
gcataaacaacaatcctgcaataaattagtctaaacttctgcctgttgatataagctaaaataatatgttgtacaaacatctttccatcaaaccaagtggtagaggagtaacaagagggtaatatgacgagagaaaaaaaaaatgtcctacttattctgtgaaacaaacacataacaggcaacacaacaatgaagcataatctctaacatacttatggttctttaat

SEQ ID NO: 15205 - DNA, 516 bp, Glycine max
  Clone ID: jC-gmle01810084e09a1
cagaccacaggggcatatctcaaatttttttacaaagtggataatataatataaattgaataactgagggtttggtacttaagtttaatttagttaaagttgtttgtgtctggaattggtgtttgaaaatggctctctttgctgcattttccatttgtaaagttgccaaggatgcagctggagttgcaggaaatgtctttgcttttgggttgtttgtgtctcccatacccacatttaggaggattatcagaaatgggtcaacagagatgttctcagggttgccatatatttattcccttctaaactgcttgatctgcatgtggtatggcacacctctgatatctgctgataatttgttggttacaactgttaattcaattggagctgtctttcaatttgtgtacataatcatcttcctgatgtatgctgagaaagcaacaaaggtgagaatgattggattatcgctggcagctcttggcatatttgccatcatattagttggaagcttgaaataga

SEQ ID NO: 15206 - DNA, 567 bp, Glycine max
  unsure at all n locations
  Clone ID: jC-gmle01810084e09d1
gactcaatatttatttggtgatcaacatcagactataataaataatatatgccactcaaataatgtgtacatatttgtctgtaaacatctgatgaacttggaaatggcctcactgcaagagaagccagcctagagcaccaccaacgactgcaggagaggtgcgatgtgcctttcttgaaatagtcccatttcggagcatggttcaccttctcaaggcttgcataaatatacagaccatagttaatcctgcatattgtgtgctgtattcaacgtaccacaaactgcataccgtgttctctttaaagaaagtctagtaataataatgtaaaaactggccatctgtacctacaactacaagtaccacgtaccagtacttgtaccagatatatggtaactatgatatagacaatttcaagttattcattatcacaacttctggtctctctcaaagatgcaacggtaattgctctcctataaatngaatcaaacagacagggatgttgccaactccagtttcagaccacatctagcagcanaaggtcatttctaactctgattctcagtctt

SEQ ID NO: 15207 - DNA, 324 bp, Glycine max
  Clone ID: jC-gmle01810084e10a1
aaagccgacatgggccagttcagctttgaaactcatcccttcctcacttgaacgatggagcaatgtgtatggaagctgaactggcccatcgttcaagtgaggaagggatgagtttcaaaggaattcccaacagtatctccatctaaaatgtgtgtgtggtttgcttatctattgtgcttttgaataaaatagacaatacttgtctatggttattattggctgtatgtctgtatttggatgctctcgatcggtttgcaagtaataagagtgttttcactgtcaaaaaaagaatacaccagaaaaaaatgatactgatgataactt

SEQ ID NO: 15208 - DNA, 341 bp, Glycine max
  unsure at all n locations
  Clone ID: jC-gmle01810084e11a1
cgtgcgatgctaggtgncgtataccagagctatgatgcacgcgtgcctccgccctgagttcggattgcgattcgagtctatttatctaaccatgactgagtgacctaaaggagactaagggtgcgaaaaagagcgctctccgactgtctctcaactcaatgatctacggatctcacgtctgatacagcattggcgacggtagaccaagcgtgtgaaataaggaagacaggtctgctgataacagtaactgttattgcaaacatttctgatgcgcatgcgtatagataggaagacgcatggactcgtagtatcattaggattctatctggtacgtatgcaat

SEQ ID NO: 15209 - DNA, 459 bp, Glycine max
  Clone ID: jC-gmle01810084e12a1
gacgaatattgggtggcgtctggcgatgtcaccaaatcgccggtgacaagtgcgtttgaccttgaatctgtggcagtgcacgagatcgggcacttgctcggattaggccactcgtcggacctaagagccatcatgtatccttctataccacctcgaactaggaaggtgaatctagcgcaagatgatatagacgggattcgaaagctctatggtatcaacccctaattattatagctaggtgttgtttgtactagaactagagttttatttcggtaatttgcattaaaggattttgaaagttatcgaggtgaaattattctaattcaagaacaacaaagatcgcatgtaagatattgtattttagttttctcttaattaagaataaaccagctgatactaggtgatgcatatatgataatgaataaatgtgacaaatttaccttaatttatctaatctat

SEQ ID NO: 15210 - DNA, 546 bp, Glycine max
  Clone ID: jC-gmle01810084f01a1
tttggattgatcagcagcaacgcctgaaattcaatgttgatgttgtagagagtgaatggggccagggtgctaagcttgatgttctggaatcaaagattgcttcagatacttcacacactattaaggcaatttgcattgtccacaatgagactgcaactggggtcaccaatgacttggccaaagtgagacaaattctcgattcctaccggcatccagccctccttattgttgatggagtgtcttctatttgtgctcttgatttccgcatggatgaatggggagttgatgtggcaataactggctctcagaaggccctttcccttcccactgggataggtattgtggttgcaggacctagagctattgaggcctcaaaacatgctaaatcacttcgagttttctttgactggaaagactacctgaaattctaccagctaagaacgtattggccatacactccttccatacatttgctgtatggtctgagagctgctcttgatctgattttcgaggaaggacttgaaaatgtgattgcaagacacagtc

SEQ ID NO: 15211 - DNA, 375 bp, Glycine max
  Clone ID: jC-gmle01810084f01d1
gggccctaacacaggggcaaataagatcataagaggcaatggtttttgtttttccggacaataaaaaaagccatgctttaaaactgaaagtggaggggttgttcattttcaaagggggggaaaagaggggaattttttttttacaaaatttccgaaagggctgaaaaaagggagtaaagacaagaatggcttgggactcaaacccggggagggatcataggaatagggctctgtaagtttgcactgggggtagcaactccacttccaagttttacagggaagcccccattttttaaaattatttccacacccgcttgacatcccaacggggggaacttttttaaggggccaagatgtgcaattttgaaaaccttc

SEQ ID NO: 15212 - DNA, 520 bp, Glycine max
  Clone ID: jC-gmle01810084f02a1
gcggaaaactgcctcgtgggtaaggaagtgtgtattgcagcttggtccaactttcattaaacttggtcagttatcatcaacaaggtcagatctatttccacgtgaatctgtggatgagctcccaaaattacaggacatggttcctgccttctctcctaagaaagcaagataattcatcgagagtgagattgggagctcccatttacatattatttgaggagtttgaagatcgggcaattgctgctgctcctctcggtcaggttcatcgcgctattctgcataatggggaaaaagtagtcatcaaagttcaaaggcctggcctgaagaagcttttctgcattgatttgaaaaacttagagttgattgcagagtattttcagagaagtgaaacttttggtggtccacttagagattggattggaatatatgaagaatgtcaaactattttcgctcaagaaattgactatgtaaatgaaggaaagaatgctgacagattccgccgagattttacaaacataaa

SEQ ID NO: 15213 - DNA, 486 bp, Glycine max
  unsure at all n locations
  Clone ID: jC-gmle01810084f02d1
ctgtaaaattcgtgaaatttgctatgcttgtgtaatttaaaaaattgaacatttacaaattacaagtaagaaaatgaagatgaggataactttacataagtttgaaagaatcgaatttgttggtaaccatttatatcattttctcaaacttatcaagcatttttaccctttgcatggatctgacaaatagtgtcataaaaatacctgcaccaatgaaagatccattcgcaatagttatgttgccttggctgctcatagtgataccaagatttagcagagttcctcctaatacggtatacatagttgccatttgtaaacccgttgctttccgagcagctctttcagactcaagcactcggacccgaagttttagatcccctgcctcaagttgctttgtaaactcttctattctttgaactctgtatggcattgacatggtataggttgtagcatcatctgcttgctttcttatctcctncacaagct

SEQ ID NO: 15214 - DNA, 614 bp, Glycine max
  Clone ID: jC-gmle01810084f03a1
cttgatcaagtattctgccaccaacatcccaatccctcctccataaccatattgaagaataagataaatacaacaaaacctagagatggaagaagcacaggtgcaggtatgggaagggtatgtagattggaggaacaggccaaccataaaaggacgtcatggtggcatgcttgctgcctcctttgttttggccgctgaggtattggagaacctagcatttcttgccaatgcaagcaaccttgttttatatctgtccaagtttatgcacttttcaccatccacctctgccaacattgtcactaacttcatgggaactgccttcctccttgctattcttggtggatttctagctgatgcgtttatcaccacttactccctctatctcataagtgccggaatagaattcatgggtttattaatgctcacaatacaagctcacaagccgtcactcacaccaccaaactgcgtaattggaaacaccgacagtccatgcgataaaattcatggtgcggacgccgctatgctatttgcaggcctctatcttgtggttctgggcgtaggaggtataaaaggttcacttccttcttatggagctgagcagtttgatgagaata

SEQ ID NO: 15215 - DNA, 467 bp, Glycine max
  Clone ID: jC-gmle01810084f03d1
cataatgggtaatggattaatttataattaaaactcggtacattgcaccaagtaatatatagtactagtagagtggaatagctgcaccaatattggtctatgcatgtagctcatggacatgatataggtaaatgaggatggagtaggggtcactctctatctcactcattatttcattattttgggccaaccacaaactacctaatggtagtatatagagtctgtttggatacaaattataaatgttttagagagtttcttacgataaatatagagcttttttgagtgaagaaactttgaaaaactctcaaaaaagcacttctacttttatatccaaatagattcataaatgcaggtaggtttgtacgttctagctagtatatcccggtttggttgaacatctgtatttgtaggaattggcccataagagaaaatgaacgaagttgagtccactaagtacacacatc

SEQ ID NO: 15216 - DNA, 361 bp, Glycine max
  Clone ID: jC-gmle01810084f04a1
aagaacaagagaatgtcaagagagtccaattggctgacaagtacttgaacgaggctgctcttggaaatgctaacgaggatgctattcagaggggaactttcttccagtcttgaattggaggcaaagcaaacttggcaagtaaatatttctgttcgtgaaggttgttgtactaatccaagtgctagaagttgtgatggaacttgcgtgtaacattcttagcattctcaatgtcttaggtgcaaagagaagatgctaagtttgagatgatcttactatatttttcatattggaccgtcttcctctataattttgagttacagtgtccacttaaattgaatttggtgccttttccttttgtcct

SEQ ID NO: 15217 - DNA, 361 bp, Glycine max
  Clone ID: jC-gmle01810084f04d1
aggacaaaaggaaaaggcaccaaattcaatttaagtggacactgtaactcaaaattatagaggaagacggtccaatatgaaaaatatagtaagatcatctcaaacttagcatcttctctttgcacctaagacattgagaatgctaagaatgttacacgcaagttccatcacaacttctagcacttggattagtacaacaaccttcacgaacagaaatatttacttgccaagtttgctttgcctccaattcaagactggaagaaagttcccctctgaatagcatcctcgttagcatttccaagagcagcctcgttcaagtacttgtcagccaattggactctcttgacattctcttgttctt

SEQ ID NO: 15218 - DNA, 448 bp, Glycine max
  Clone ID: jC-gmle01810084f05a1
tagacttgaagtctccgctaacttttaaaaaaaaaaaaaaatagacatgaaccattcgttgattaatagtgtttgaggtctctgttctgctactatgtggcgcttggattacaatccatggaaaaaacttgcactggatttgctttaggagctatcctcctacacctgctgttgttgtccctccctaacctttccatagcagaggttactgtttatagtcccgatgagatcttcagcatcggttgtggctcatccatcaattcatccacaccggacggtcggaactggattggagacagcaacaccaaactccttcatgatagccagaacacaggtgcagctcctgcgcttacaccatctacacaacagggcccttacacctatgctcgtgtctctcactcccaattcacttactccttccctgtctgcaccggtccaaagctccttc

SEQ ID NO: 15219 - DNA, 423 bp, Glycine max
  Clone ID: jC-gmle01810084f05d1
aaaaaaaacttccttattcatatccacttttaaatattcccaagcccttacagatttttacatagacatccccaaacatttgtaagtttatctaattggaaataatgtgtaattaacattttccgggaactttaaacaccaaactcaacctgaacttgaacagtaccctcatcgcccctggggatcattaatctcagagaaaacattcttggggacgatcatcaacctgtaagattccttactcccatagctgggggggtgcaatccagggctgtgtactatgatccgaaagtcgcatactactgggggtactgctaaacatggcctcactggcttgataatcctcaccactcacaaccaaaggcgccactccattaacagcactatcctgaagctggagtacaaactccaacaccccaaaga

SEQ ID NO: 15220 - DNA, 405 bp, Glycine max
  Clone ID: jC-gmle01810084f06a1
tgcactgcggacattaacggacagtgccctagtgagctaaagactcaaggaggttgcaacaacccttgcactgtcttcaaaaccgaccagttctgttgcaattccggtagctgtgggcccactgattattccagattcttcaagcaaaggtgccccgatgcttatagttaccccaaggatgatccaactagcaccttcacttgtaatggtgggactgactatagggttgtcttttgtccttgaacccaataaccttacataatatataatatatgcactaaaataaagatcaataaaattacataaggcgtgtgcactttgcgtgccccttctagtatatgatgtgtgtacttctattctaaatgaaatggggtacttatgaataatatattaaactctttgggc

SEQ ID NO: 15221 - DNA, 406 bp, Glycine max
  Clone ID: jC-gmle01810084f06d1
gcccaaagagtttaatatattattcataagtaccccatttcatttagaatagaagtacacacatcatagacgaggaggggcacgcaaagtgcacacgccttatgtaattttattgatctttattttagtgcatatattatatattatgtaaggttattgggttcaaggacaaaagacaaccctatagtcagtcccaccattacaagtgaaggtgctagttggatcatccttggggtaactataagcattggggcacctttgcttgaagaatctggaataatgagtgggcccacagctaccggaattgcaacatgtactggtcggttttgaagacagtgcaagggttgttgcaacctccttgagtctttagctcactacggcactgtgcgttaatgttcgcagtgca

SEQ ID NO: 15222 - DNA, 504 bp, Glycine max
  Clone ID: jC-gmle01810084f07a1
gaagaattgtacggtccagttctgtatgtaatgaaatttcagactctagaagaagcaattgccttgaacaattctgtacctcaaggattaagtagttcaatctttacccatagacctgaaactatattcaaatggatcgggccacgaggtaatgattggggtatattgaatgcaaacatacctacaaatggcgctgaaactggtggtgcctttggtggagaaaaggcgacaggtggtggccgtgaagcgggaagtgactcatggaagcaatacatgctgagttctacatgtaccatcaattatggaagtgaactaccattagctcaggggataaactttggctagaaagctatcctagcacatgaggctgcacaaaataatgcgattttgcagtctgaagagagttctatatataccgagatgttagtctggctgacatgggttcaaagtgttgacttaacacgacatgcttgctgttaggatggcaccttgatatgacagttt

SEQ ID NO: 15223 - DNA, 380 bp, Glycine max
  Clone ID: jC-gmle01810084f07d1
gaccgggaaaagaattctcaggttattcatttaacatttatttaaaatatcttatacattgaaactgtcatataaaggtgccatccttacagcaagcatgttttgttaagacaacactttgaacccttgtcaaccacactaacaacttgggatatatagaactcttttgacaccgtaaaattggattattttgagcaacctcatgtgctaggatagctttttagccaaagtttatcccctgagctaatggtagttcacttccatcactgatggtccatgtagaacgccccatgtattgcttccatgagacacttcccgctttacggccaccaccggtcgccttttcttaccaaaggcaccaccaatttcaggtccatttg

SEQ ID NO: 15224 - DNA, 534 bp, Glycine max
  unsure at all n locations
  Clone ID: jC-gmle01810084f08a1
gacgtcatcatgctcgtcctacgcaactgcccgcagttcgccctcgccttcctcggcgccacccaccgtggcgccgtcgtcaccacagccaaccccttctacacgccggcggagcttgcgaagcaagcgacggccacgaaaaccaggctcgtcataacgcaatccgcgtacgttgagaaaatcaagagtttcgcggacagcagcagcgatgtcatggtgatgtgcattgatgatgatttttcttatgaaaacgacggcgttttgcatttctcaacgctcagtaacgccgacgaaacggaagcccctgccgttaagattaaccctgacgagctcgttgcgcttccgttttcttctggcacgtctgggctccccaagggcgttatgttatcgcataaaaacttggtcaccacgatagcgcagttagttgacggcgaaaacccgcaccaatacactcacagcgaggatgtgctactctgtgtgttgcctatggttcatatctatgcgctcaattncattttgctctgcgggattcgt

SEQ ID NO: 15225 - DNA, 204 bp, Glycine max
  Clone ID: jC-gmle01810084f08d1
aatgtgttcatgctgtaattcagagtctggtctccaatatatacaacattataagttacacaagaataaattcatgcaatacttgcatattatatatatatattgataacgagatataaaattggaacaaaaaccacaacaggaagggcctgtggtacggtaagtaaaacagccacgattttcctctgtcacaattatggacct

SEQ ID NO: 15226 - DNA, 595 bp, Glycine max
  Clone ID: jC-gmle01810084f09a1
gcaacttcctgctcagtcacagcagcagagccaacagggccatcaaaatgcaagtatgtctagtggatcatccacctctcagaagcagcatgctcaaaaccaacaacaaaagcctaataataatgctactgggtccaatgggggtggaagcttgcaaggctttcctgtcaccaaaaacccaccatcactgccactgcagttgcaacagcaacagccgcagcagaggcagaatcatcacccttctcatccagctcgccaggttgagtctgagatgggtggagaagacagtccatctactgctgatagtcgcctcgctcgcgctaccatgaatatttatggccaaaattttgcaatgcctatgcagtcgcctaactttgctttgatgacacctgcctcaattagtgcagcaggctctaacggaggtcacggtgaaaagaaacaaccccagcagcaccctggtccaaaggctggaggtgaaacagctcctgcatttgccatgtcatttgcatccatgaatggagcccctggccctgacctctcatctattgcacagaacccttcaatcatgccgagtaatcataactatcatataatg

SEQ ID NO: 15227 - DNA, 399 bp, Glycine max
  Clone ID: jC-gmle01810084f09d1
cccaccacatccttctaaaaaaaccaatcgaatttgtttagacttcaggatcaactttgtcagattataaacacaagggtacaaacaaattagtaaacacaattcaggcacatcaatggtctggtcgatttctcttccaaaattgaggaatccaaatcatctttatcttcgtgggccgagacctactccatccagcttgcttgctttttccacatacggcattccatcatcaacataacaacatgacattttacccccaccatttgagagggaccccatcttgcactttaaaatcccatgccaattcacatgcttcacttaagctatatacctttcttttttgataaccgcaagcacaggggtgcagcaaataaaggattttatatcattctactcacc

SEQ ID NO: 15228 - DNA, 504 bp, Glycine max
  Clone ID: jC-gmle01810084f10a1
cgccgaaaccaaaacgtcgtcgttcacccacgctctcttcgtcagcgccggcattgaccccttcgccaccattcaccacgccttccgtgcagttaggaaccacctcaacacgttccgactccgccacgagaagaaactccctggcatcgtcgactgcttcggctggtgcacctgggatgccttctaccaggaagttactcaggaaggagtcgaggccggaatcaaatccctagccggcggaggcacgccgccgaagttcgtcatcatcgacgacggatggcagtccgtcggcggtgacgacgacaaacaaaactcaaactcgttgcagaggctgacgggaataaaagagaacggcaagttccagaagaaggaggaaccggaattggggataaagaacatggtggaggtagcgaagaagaagcattcagtggagcatgtgtacgtgtggcacgcgataacgggctactggggcggggttcgtccaggggtgaaggaaaatggaga

SEQ ID NO: 15229 - DNA, 528 bp, Glycine max
  Clone ID: jC-gmle01810084f11a1
ctcttccataaacgggtggtgcctctcttccatctccccagccaaaacctctctcaggaaggccacattacgcccttccgtcttcgcaacccttaacactccttcttctccttcctcttcatcttccttcccctctctcattcaagacaggcctgtttttgctgcccctgcccccatcatcaccccaactgtgagagaggatatggcaaaggaatacgagaaagctattgaagaacttcagaaattgttgagggagaagagtgaactcaaagcgacagctgctgaaaaagtggagcagataacagcttctctagggacatcatcatctgatggcatcccatcatcagaagcctcagacaggatcaaagctggtttcattcacttcaagaaggagaaatacgacaagaatccagctttgtatggtgaacttgccaaaggccagagccccaagttcatggtgtttgcttgctcagactcaagggtgtgcccatctcatgtgctagatttccaaccaggagaggcctttgt

SEQ ID NO: 15230 - DNA, 519 bp, Glycine max
  unsure at all n locations
  Clone ID: jC-gmle01810084f12a1
aaccttttcaccctcatcaaactctcttcatcatccacaagaattttcaaccaaagcactcatcagtcttttggctcaacactcacaatcttatttggtgtgaccttattgtgggactacacacagtaatcattattgttcttctttaataatccatacaacaaacagtttccaaaatatccctctcaaaggagtggcacctcttgttgttattgccactcttctcctatattttaagtccttcatacacaccaagatttattcacaagttaacaccaatggttcacaagcacttctacgagctttcatgtggagttgttgaaatggcttggattatgcttagtgttgactactcacgcctactgtggcaattgtttggagtattttcttacgagaaccatgaatggaaacctcggatcatctagcacacacccttcagtttagtcacataatagttacatataatatntaattggttgccgagtttttcatactagtagctgtaagtctataatactc

SEQ ID NO: 15231 - DNA, 555 bp, Glycine max
  unsure at all n locations
  Clone ID: jC-gmle01810084g01a1
gaagctttgagggatcaaagaagaaatagcaatatggagacaagcaaatttttggagggacaaaatcctgcaaaacatgctgcacttaaagtgcatgcatatgctttgaggtttttagatgctaatagatctcagggaatttcctctcaagcagaagcaccaacaacacctgaaaagatatttgactcaagcactgtagatatgtcatgggatgagcatcttaatgaagaaaatcttttctatgaagttcctcctactgcaatggaaacatatagaaaagctatcgaatctcatttcctacagttcgagaaaactgggagtagcattcatgaggaaattgaaatgtctgtgtatgatactgcagcagagtttgggtctcaagagaatgcatatgatgaggaagaaggagaaaccgacacttattacatgcccagtgtctatgagggcaacaaatcatcaaaatctgcgcagaagaaacataaaaatttgaaggcttacactcctaggtgtggtgatgctggtgctgatttgccttatgtacactatgncactgga

SEQ ID NO: 15232 - DNA, 531 bp, Glycine max
  unsure at all n locations
  Clone ID: jC-gmle01810084g01d1
aacaaatgtttcaacacattcataagataactgtttttcataatctgcaactgactccacttcagtacttttctgaatcaggggaccaacatgtaaagtactctggtcatcatgaaaggaattggtatcgccacttgaagcatccgccttattagcttgagcctgtaatgtccccatgttgacggtgaaaggacttacaactctatgcctagtagcagtacgcatgcgctttgttggtattgacccaacatttacactagcaggtctttttccaaacagcatggatggttgatttccagttgcatagtgtacataaggcaaatcagcaccagcatcaccacacctaggagtgtaagccttcaaatttttatgtttcttctgcgcagattttgatgatttgttgccctcatagacactgggcatgtaataagtgtcggnttctccttcttcctcatcatatgcattctcttgagacccaaactctgctgcagtatcatacacagacatttcaatttcctcatgaatgctact

SEQ ID NO: 15233 - DNA, 591 bp, Glycine max
  Clone ID: jC-gmle01810084g02a1
gcgagcgcgggtaccggtggttcccctgcgtcgtgttgtgtgagatcaaaccctagtttttagacactgcaacagtagcagcagcaaccatggcgagtaggaggtgcctgcgagcgttaactcaaacgagaccgtttctcttccgaaaagcatcctctcttcgctcactcgccgtgcttccatttcccaactccaacgcttctccacacgctttcaccgcacgcgcctctgtttttgcgcaatgcccgcacctccgttgtttctcttccgacaaaaaagacgaccacagcgacgaagaagatgatagtgacgaggattacgatgaagaagaggattatgttgacgatgatgacgtcactgtgtcaagagggaaaaaagtatacacggcggaggagaaggaagcggaagcggcggctattgggtacagagtggtgggtcctcttcaaaaggaggaagatagcgtttttaagccttacgagcctgttttcgctgttgttcagattggctcgcaccagtttaaagtaagcaacagagacagcattttcactgaaagattgagttttgcgaagtgaatgacaagttgattttgac

SEQ ID NO: 15234 - DNA, 490 bp, Glycine max
  Clone ID: jC-gmle01810084g02d1
gtcagaaattggtaaaatgtattatatagtatcatgttttttactaacaaaaattacaggagtcattattaaatttcttgagacctcgaaacccgttcaaacattgaatcactaattatagcactacagagggaaaagaaaatttgtgtaacaattctacaaaacctgactactgagtggatggttgactatttccacctacctagaatttgcagatgcaaaatgaagagcttatcaacaatatcaccatgctcactacataccatccaactatcaaaactcactgagacaaaaagacagcaataaccatcaacacccaaaggggtaggtacatcctttttaagcagtaactgcaactttttccttttctttcttagcaggttttggaggcttttcaggcaatacattttgaggtttctcaattccttgaatatcagttatccttaacttagtcaattcctgacgatgtcctttggttcttcggtaattc

SEQ ID NO: 15235 - DNA, 521 bp, Glycine max
  Clone ID: jC-gmle01810084g03a1
ggttgactcccttttccaagctccacaggatgctggaactcactatgctgtcatgagctcctacgagtaccttagcactggacttcgccagtacttggacaacaacatggatggattttacattgctccagcttttatggacaaacttgttgttcacattaccaagaacttcatgaccctgcccaacatcaaggttcctctcattcttggtatctggggaggcaagggacaaggaaaatctttccaatgtgagcttgtctttgccaagatgggaatcaaccccatcatgatgagtgctggagagttggaaagtggaaatgcaggagagccagcaaaactgatcaggcagagataccgtgaagccgcagacttgatcaagaagggaaagatgtgtgctctcttcatcaacgatcttgatgcaagagctggtcgtcttggtggaaccacccaatacactgtcaacaaccagatggtgaatgccaccctcatgaacattgctgataaccccaccaatgtgcagc

SEQ ID NO: 15236 - DNA, 479 bp, Glycine max
  Clone ID: jC-gmle01810084g03d1
aagtggacactttaactcaaaattatagaggaagacagtccaatatgaaaaatatagtaaaatcatctcaaacttggcatcttctctttgcacctaagacattgagaattctaagaatgttacacgcaagtcccatcacaacttctagcacttggatcagcacaaccttcaggaacagaaatatttacttgccaagtttgctttgcctccaattcaagattggaagaaagttcccctgttaatagcatcctcgttagcatttccaagtgcagcctcgttcaagtacttgtcagccaattggactctcttgacattctcttgttcttggacaagcatgttaccatacgtcaagagcttctccagagtcatcttgggctgctcaaaggttggaggtccatcttttgagttcacaagcttcttcccaatgccgtcaacaccaacaccagaaatccacttcctcacttcgtcatcatatactc

SEQ ID NO: 15237 - DNA, 478 bp, Glycine max
  Clone ID: jC-gmle01810084g04a1
gcaggatagcagatatgttccggttaagttggcaccatcaggatttgtgcttctcagagacttgcatcctactgagccagaagtgcttgctctaactgacacgccctcatctaccagttctgctgctggtgggtcagcaacaggattgcagagttcttcatcagccatggctgtggatgaggaacctcaacctcctcaaccatttgaatacacctcatgagtttggacctgattccactaagttcaaatattcgatattcgtcatggtgcttatgaaaattggttcttctgaggagagtagctacctacgtgtgaatggatcaactctactgctctgttacccacttgaaatcgagttctggggcttggtttttcatttttcctgaacgcactgtgctgtggtatttgctccaatatgtagttaatatgtgtgctggttcatactatatatttttaaagtggggtgccgaagcagcgt

SEQ ID NO: 15238 - DNA, 454 bp, Glycine max
  Clone ID: jC-gmle01810084g04d1
aaaagagaaagaaactttttgaaagtgccactaccctacaaatagaatccttggccttctttgaaagtgccactaccctacaaatagaagaatccttggccccccatttggtgaccagaaattggagaagtacttcaaaaacaaattggaaacgataaaaaagaaaaacacattgacacagcagattggccgcacgctgcttcggcaccccactttgaaaatatatagtttgaaccagtacacatattaactacatattggagcaaataccacagtacagtgcgttcaggaaaaatgaaaaaccaagccccagaactcgatttcaagtgggtaacagagcagtagagttgatccattcacacgtaggtagctactctcctagaagaaccaattttcataagcaccatgacgaatatcgaatatttgaacttagtggaatcaggtccaaactcat

SEQ ID NO: 15239 - DNA, 504 bp, Glycine max
  Clone ID: jC-gmle01810084g05a1
aaatatattaattttgagatagccaaatgaaaatgggcatcgaccaaagactgtgttctagttggagtaacgttttcagattgggcaacaggaacagttacagttcttttaataaatctgttgatcccacaaacccatcatgttccagttcttccttcctcacgcatggaatccacgtgtttcaatgccccgatgcggttggaattgtagccaatctatcggattgcattgcgttgtcgggggggcaacattctctctgctgatgtttttggacctcaaaataaacgagtcttctactccagaaatgtttttgtttttgatcctgtcatgtggcctacaatgcagatggaggaggatttactaaggatctctataacattcaatgccatgagatctgttataagggtgccagctctggatcctaaatatgcgattgctattctcgtagaacagcatgaccactgtctgattgatttggtacatggataggacgatggaagactc

SEQ ID NO: 15240 - DNA, 490 bp, Glycine max
  Clone ID: jC-gmle01810084g05d1
aaagtaattattgataagtttatccaaatataagcatagcgtgggcttttgaagtaaataatcatatgcacttatagagatatacccccatttggcagagtgtataattgttgtttgtcctcaaaatacgacagtattctttttttcatatggcaacactcgaagctcacaataagacctgatagcgcttgtgaggcattgtttctcaaggttctctgatttctgcacatagctctgcaagttatctctatgggaaactctttcaaccatttgttcaataataggtccagcatcaagtccctcagtcacaaagtgacttgttgcaccaattaatttcacacctgcatcaacggcctgtttagatggattgctaccgctaaatgatggtaacaggccatggtggatgttaattatatccttcccataactccttaaaaagaagctggatagtatccgcatagacctcgcagtactaaaaaatcagtatttt

SEQ ID NO: 15241 - DNA, 489 bp, Glycine max
  unsure at all n locations
  Clone ID: jC-gmle01810084g06a1
aatgtcactaccttgtgtacgagttcatgaaaaatggaagcttgcaagacactctgagcaaggtcgagaggggcgagagcgagttggattggttgtcaaggcacaagatctccctcggtgtggctgctgggcttgaataccttcacatgaatcacaacccacgaatcattcatagagatctcaagcctgctaatatccttcttgacgatgacatggaggcaagaattgctgattttggactcgccaaggctatgcccgattacaagactcacataacaacctccaatgtggctggcactgtgggctatattgctcctgagtatcatcagatactcaagttcactgatgagtgtgatatttacagttatggagtgattcttggtgtattggtcattggtaagcttccttctgatgatttctctcagcacactgaagagatgagtttggtcaagtggatgaggaagacttntagctccgagaatcccaagg

SEQ ID NO: 15242 - DNA, 479 bp, Glycine max
  Clone ID: jC-gmle01810084g06d1
ggaaacaacgtaaaactattttattttcagggtgtatccataaacatgtaaagtggaaactagttgtgacagactagattatacatagatcatcgcagtgctgaatttttctttttccaaagaaattcagcaatccgtgataaaggaaacaagattacatcggttcattatttaccctatgaaccaacattgatcctctagttatcaactatattcttaaacaagcacactttggcacaaatatggtacacaatatttcacatacttaaacatacagcagattcagtgtttgatctgtgacagcatgcacctaacatccttactgttaggcctctccttgggatcatccatagtgcaaaagcatgcaatcttcaaaacaagaagcatctgctcctcatacccattccccagcagctttgaattaattgcctccttgggattctcggagcttaaagtcttcctcatccacttgaccaaac

SEQ ID NO: 15243 - DNA, 601 bp, Glycine max
  Clone ID: jC-gmle01810084g07a1
ggaacgtgtagctgaatccgagcgaactctgtacccatacgtgactggatcctctgtagtcgctatcaaatacaaagatgggattctaatggccgctgacatgggaggttcgtatggatctaccctgcggtacaagagtgttgagcgtatcaagcctattggaaagcattctcttcttggtgctagcggggagataagtgactttcaggagattctgcgttaccttgatgagcttatcctatatgacaacatgtgggatgatgggaattctctagggccgaaggaggtgcataattatttaacccgtgtgatgtataatagacgtaacaagttcaacccattgtggaatgcacttgtacttggtggggtgaaaaacgggcagaagtaccttggcatggttaacatgattggcattaattttgaggacaaccatgtagcaaccgggcttggaaatcatctcgctaggccaattctccgtgatgagtggcatgaaaacttgacctttgaagagggcgtcaagttactggaaaaatgcatgcgtgtgctcttataccgtgataggtctgctgtcaacaaaatccagatttcttaattacagatg

SEQ ID NO: 15244 - DNA, 470 bp, Glycine max
  Clone ID: jC-gmle01810084g07d1
gaatgtcataatgaaaggaaactggaatagaaattctaatgaaaatatcaatttggaccatcataggaatctttaaaaaaaatataaaaacaccaagtctaatttaatatccattaacaccttaaagagttctattggaatccatttcatatccatttaaaattctgtttcatttcacaatgagtcagttaccatgaaccttcagcgcccacagttggattcttgaaggcagagaactcccagtacgttttcaatgagaatggtgggaaaacagtggcaccttcatctgtaattttagatatctggattttgttgacagcagacctatcacggtataaaagcacacgcatgcattttttcagtaacttgacgccctcttcaaaggtcaagttttcatgccactcatcacggagaattggcctagcgagatgatttccaaagcccggtgctacatggttggcctcaaaata

SEQ ID NO: 15245 - DNA, 558 bp, Glycine max
  Clone ID: jC-gmle01810084g08a1
aggagagccagcaaaactgatcaggcagagataccgtgaagccgcagacttgatcaagaagggaaagatgtgtgctctcttcatcaacgatcttgatgcaggagctggtcgtcttggtggaaccacccaatacactgtcaacaaccagatggtgaatgccaccctcatgaacattgctgataaccccaccaatgtgcagcttcctggtatgtataacaaggaagagaatccccgtgtgcccatcatcgtcaccggtaacgatttctccacactctatgcgcctatcatccgtgatgggcgtatggagaagttctactgggcaccaacaagggatgaccgcattggtgtctgcactggaatttttcgcaccgattcaattcctgaacaggacgttgtcaagattgttgacaccttccctggccaatccattgatttctttggtgcactgagggccagagtatatgatgacgaagtgaggaagtggatttctggtgttgggcgttgacggcattgggaagaagcttgtgaactcaaaagatggaccgtcaacctttgagc

SEQ ID NO: 15246 - DNA, 480 bp, Glycine max
  Clone ID: jC-gmle01810084g08d1
aagtggacactttaactcaaaattatagaggaagacagtccaatatgaaaaatatagtaaaatcatctcaaacttggcatcttctctttgcacctaagacattgagaattctaagaatgttacacgcaagtcccatcacaacttctagcacttggatcagcacaaccttcaggaacagaaatatttacttgccaagtttgctttgcctccaattcaagattggaagaaagttcccctgttaatagcatcctcgttagcatttccaagtgcagcctcgttcaagtacttgtcagccaattggactctcttgacattctcttgttcttggacaagcatgttaccatacgtcaagagcttctccagagtcatcttgggctgctcaaaggttggaggtccatcttttgagttcacaagcttcttcccaatgccgtcaacaccaacaccagaaatccacttcctcacttcgtcatcatatactct

SEQ ID NO: 15247 - DNA, 455 bp, Glycine max
  Clone ID: jC-gmle01810084g09a1
ctctttctcttcctgcatttctccgcgtgtgtgtatgtgtgtatactctctcaagtacgcacatacatacacatccattcgtacataaatacttatatctcttcttccttcgccgttaattctctgaatccctagctcttctgttctccgatccgatcatggcctcgcttgtcaacaacgctaacggcgccggcaatggttttcctggaatatcccagaagctcattatcgataccgaccctgggatcgatgatagcatggccattcttatggcttttcaaagtccagatgtggaggttctgggcttgacaacctattttggatagtgtgagatggcaggccgtgaagatattccagttgcacagggaagccatgagccattgaaggggggaaagcctcgtgttgctgattctgttcatgggaaagatggactagggaacacattcctaccccca

SEQ ID NO: 15248 - DNA, 387 bp, Glycine max
  Clone ID: jC-gmle01810084g09d1
agcgaaatccaaacacaaataagttcatgtaaagagaatttcattggtacatgaactttataatattaaacggggtaagaactcattgtgaccttgaatgaaataaagaaaatgaccttatgcatatttttgcaaataagaagctatcgtcctatcactttccaatgctttttgtctgtcagaagggtagtacaaatgcctatacttcagggtttcatcaccagctccctgatataatcaagaacttcctcgagattcactgtccaagcaactgcgacaggagaataacccgtccatgggttgctcgtattccagtttttcaatccttggtccataagtgtatgcccaacacagatgccttgtgtttctaccctcactacccccttt

SEQ ID NO: 15249 - DNA, 467 bp, Glycine max
  Clone ID: jC-gmle01810084g10a1
gccctgcatgcatgcgccggggagcctcccctcgcattcctcgactctcttcttcttggagagtgggaagatcgcatgcagagaggactttttcgctatgatgttaccgcctgtgaaaccaaggtgattcctggtgaatatggtttcgttgcccagcttaacgagggtcgtcacctcaagaagaggccaactgagttccgagttgataaggtccttcaaccctttgatgaaaacaaattcaactttaccaaagtcggtcaagaagaggtcctcttccaatttgaagctagcgaggatggacaagtccagttctatccaaatgctccagttgatgttgacaattctcccagctttgttgccatcaatgacagtcctattgagtatgggcatgttctgctgattccgcgcatatttgagtgtttgcctccacggattgaccgatagagcttcctacttgcacttcaaat

SEQ ID NO: 15250 - DNA, 277 bp, Glycine max
  Clone ID: jC-gmle01810084g11a1
cgagggcagagtgaggacaggcgaacccgatgcatggccaacaaagagaaggaggaaccgtgagctagaactaggtacgagggggatgcagatctacagcagactttaacagggaaaacgatgaccggagagggcaaagctaagaaccaaagaaacggcaaggccgagatcgagagacaaggagggaagccaatcagaccagcaacgtctcacgatgaggcggaaagcaactagaggacaggcgcacccgcggcaaagacatcaaagagaaggaatg

SEQ ID NO: 15251 - DNA, 526 bp, Glycine max
  unsure at all n locations
  Clone ID: jC-gmle01810084g12a1
aggaggcgtacggcggcggcgtagcggtggaggagaaaccgacgaagtcggagacggagacggagaagctgaagaaggccttggtggattcgttttatggcaccgatcgtggactgaaagcaacgagcgaaacgagagcggagatcgttgaactcatcacacagctcgaggccaagaaccctaaccctgttcccaccgacgccttgactcttctcaacggaaaatggattctcgcgtatacatcctttgcaggtttattcccattgttgtcaagtggaacactaccattggtcaaggtagaggaaatatcccagattattgactcgctgaattttaccgtccaaaactctgttcagttcgctggtcctttggccaccacctcaattagtactaatgccaaatttgatgttcgaagtccanaacgtgtgcagataaagtttgaggaaggcataattggcacttcacagcttacggactcattagagataccggaaatgtggaattctgggtcaaagattgccttaca

SEQ ID NO: 15252 - DNA, 527 bp, Glycine max
  unsure at all n locations
  Clone ID: jC-gmle01810084h01a1
gcaattgaagttaaaagccttagccttccctacaactccaaacacaaagacatcatcatccatggctgcctccgtctccactgtcggagctgtcaacagagctcttttgaacctgaatggttctggagctggagcttcagctcccagttcagccttctttgggaccagcttgaagaaggttattgcctcaagggtccccaacagcaaggtttccggtggaagcttcaagattgttgctgtagaagagaagaaagagattgaagagacccagcagaccgacaaggacagatggaagggtcttgcctatgatatctcagacgaccaacaagacatcacaagaggaaagggtttggttgactcccttttccaagctccacaggatgctggaactcactatgcagtcatgagctcctacgagtacctcagcactggacttcgccagtacttggacaacaaaatggatggattctacattgctccagcttttatggacaagcttgttgttcacatctncaagaacttcatga

SEQ ID NO: 15253 - DNA, 483 bp, Glycine max
  Clone ID: jC-gmle01810084h01d1
aagtggacactgtaactcaaaattatagaggaagacggtccaatatgaaaaatatagtaagatcatctcaaacttagcatcttctctttgcacctaagacattgagaatgctaagaatgttacacgcaagttccatcacaacttctagcacttggattagtacaacaaccttcacgaacagaaatatttacttgccaagtttgctttgcctccaattcaagactggaagaaagttcccctctgaatagcatcctcgttagcatttccaagagcagcctcgttcaagtacttgtcagccaattggactctcttgacattctcttgttcttggacaagcatgttaccatacagcaagagcttctccagagtcatcttgggctgctcaaaggttggaggtccatcttttgagttcacaagcttcttcccaacactgtcaacaccaacaccagaaatccacttcctcacttcatcatcatatactct

SEQ ID NO: 15254 - DNA, 525 bp, Glycine max
  Clone ID: jC-gmle01810084h02a1
gtccatgtacgagcagtggctagtaaagcacggcaaggtgtacaacgcgctcggagagaaggagaagaggttccagatcttcaaggacaacctgcgattcatcgacgaccacaactcccaagaggaccgaactcccaagaggaccgaacctacaagctcggactgaaccggttcgcggatctcaccaacgaggagtacagggccaagtacttgggaaccaagatcgatcccaaccggaggctcggcaagaccccgagcaaccgatacgcgccacgtgtcggcgacaaactacctgaatcggttgattggaggaaggaaggtgctgttcctccagtcaaagaccaaggaggctgtgggagctgttgggcattctcagcaatcggtgcagtggaaggaataaataagatagtgacaggtgaactgatttcgttatcagaacaagaattggtggattgtgatacaggatataacgaaggatgcaatggaggacttatggactatgcatttgagttcattatcaacaat

SEQ ID NO: 15255 - DNA, 290 bp, Glycine max
  Clone ID: jC-gmle01810084h02d1
acattaacctttctttcttttttgagccgaaaaacaaggaaaggggcttgcgacaataatcaaaaaaaggggggacaaaccagaattataattttgtcccgcttgggggggggaagtacaaaaaaaaaaggccggaaaaaaaaaaaacccccgatggcccacgcgaaaaatgggggaaagtcccatcacaaaaaccgtcagaatgatcaaaaaaaaggggccccgcaaaaatttttgcctgggcaagggggggcaacccccgggggggttaaaaaaccgcccggggataa

SEQ ID NO: 15256 - DNA, 506 bp, Glycine max
  Clone ID: jC-gmle01810084h03a1
gaagttcctcgaagagaagcagaagggtaacaggcagttgctggaattctacactggtaacccggatgacgccgcgaagcgggcgcactacaaggctaccaaggagatgtggacttcggccgggattgttatcaggggtgtgatcacgcaggctctgcagaagactgggggacctttcgccggaggggacaagccgggagaaccggatttccacatcatcacctggctcgcccgaatggcgaccaacgcaggtgtcgagcctggatcaccggccagcgtggctatcccaaagctccaggagaagaccggcggacacgctttcgacccggtcgtctcgaaatactgggacgcctggacgcaacgagagtcattcaagaagaacaatatccactaaatcctgcggcgcagcggtgtagatacccagaactgtgcttgcggggaagatgaggattgacgattgagccaaaacttcgttgctggaacgtatgaatgagcgttctgacgag

SEQ ID NO: 15257 - DNA, 449 bp, Glycine max
  Clone ID: jC-gmle01810084h03d1
ctcgtcagaacgctcattcatacgttccagcaacgaagttttggctcaatcgtcaatcctcatcttccccgcaagcacagttctgggtatctacaccgctgcgccgcaggatttagtggatattgttcttcttgaatgactctcgttgcgtccaggcgtcccagtatttcgagacgaccgggtcgaaagcgtgtccgccggtcttctcctggagctttgggatagccacgctggccggtgatccaggctcgacacctgcgttggtcgccattcgggcgagccaggtgatgatgtggaaatccggttctcccggcttgtcccctccggcgaaaggtcccccagtcttctgcagagcctgcgtgatcacacccctgataacaatcccggccgaagtccacatctccttggtagccttgtagtgcgcccgcttcgcggcgtcatccgggtta

SEQ ID NO: 15258 - DNA, 360 bp, Glycine max
  Clone ID: jC-gmle01810084h04a1
caagggaagcatcccttgctggttctcaaagccaaccaccaaagcagtcccaacaaatatggcaaaacagctactaatcttattaacctcccggtttttaagggtcttgatgtgagtttgaaggtggcatttccgcggtctaataattaaaatgtgccattgtttggtcccaagagaccatatattgcccgctcctgccatgtgcgaagttgtattctatacaagttataattatgctcgtgatatttaacttaggtatttaagtgtgctaatttggtgtacgacgtacagtaccctttttatcaacattcttctcatctggttatagtggaaagtttcttggatgctaccttggatttt

SEQ ID NO: 15259 - DNA, 360 bp, Glycine max
  Clone ID: jC-gmle01810084h04d1
aaaaaccaagggagcatccaagaaactttccacttttaccagatgagaagaatgttgataaaaagggtactgtacgtcgtacaccaaattagcacacttaaatacctaagttaaatatcacgagcataattataacttgtttagaatacaacttcgcacatgggaggagcgggcaatatatggtcttttgggaccaaacaatggcacattttaattattagaccgcggaaatgccaccttcaaactcacatcaagacccttaaaaaccgggagggtaataagattagtagctgttttgccatatttgttgggactgctttggtggttggctttgaaaaccagcaagggatgcttcccttg

SEQ ID NO: 15260 - DNA, 460 bp, Glycine max
  Clone ID: jC-gmle01810084h05a1
cgaagatttgactgatgatgatattcgcacagccatacagaatgcaactggacctaaatcagcactgtttgttcctgaagtcccgtttgaagtgcttgtacgcaggcagatatctcgactattggatccaagtcttcagtgcgctaggtttatatatgacgagttaatgaaaatcagccatcactgtatggtcactgaattgcagcggttccctttcttgagaaagcgcatggatgaagttattgggaactttttacgagaaggcctagaaccctcggagactatgataacacacgtcatagaaatggagatggactacatcaacacttcccacccaaattttattggtggaagtaaggcaatagaagctgcagtgcaacaaaccaggtcttctaaagttggtttaccagtttctagggtgaaggatgcactggaatctgataagggaccagctactgag

SEQ ID NO: 15261 - DNA, 531 bp, Glycine max
  Clone ID: jC-gmle01810084h05d1
aatagtaatatacatgaatacagtgaaaaaattctctcaactgaaaaatcatctgctcctattattctttccggagccttggtaaataacgctatatgcgaacaaaagggaacttagataaagaaagcacccaccaacactcaggaccattttaatgggaaaaatagtaactgaatgcagtccagctccaggaggagttgcaaacctcaaaaattgcataagcataaacaaataattaaacgctgagtcaaatttcttggactaacaagcacaatcagcgagttcattcaccagccattggataacctgacgtgtatggccctccatttccgcttgaatcctgaaatggagattggagttccccagaatgtgaagactttttatttttagactttgtgttcttgggagaagcttcataatagtctcccgaactgctagcagaatacatagatgaagttggcaatccacgaattttaggtaagccggtagtaatttcaggcaaactgtatcccctttcaactgtttcagctt

SEQ ID NO: 15262 - DNA, 465 bp, Glycine max
  Clone ID: jC-gmle01810084h06a1
ctatctttaacatgtaccaaactgagcatgagttgcttaggtacttgtataagctacaatcaaaagatctctcactatgccacagtatgattccacttggatcttggacaatgaagctgaatgcaacaactgaaatgatgcctgtgacatggcccagctttactgatattcacccttttgcaccagttgaccaggctcaaggttatcaggaaatgttcaataatttgggtgaactgttgtgcaccatcactgggtttgactccttcttcttgcaaccaaatgctggtgctgctggagaatatgccggacttatggttattcgtgcatatcatttggcaaggggagaccaccaccgcaatgtttgcattatacctgtctcagcacatggtacaaatcctgctagtgctgttatgtgtggaatgaaaattgtctctgttggaactgacgccaagggtaacattaata

SEQ ID NO: 15263 - DNA, 396 bp, Glycine max
  Clone ID: jC-gmle01810084h06d1
aatgctgaatgtttttctttttttctttttatacaattcgtttacatgaatcaaattcattttttcacattattgtgacagataggcctaaaatacattcctaaaataaaatagcagcagcaattatacgaattacttttttttgtttcctgtggttggatgaaacttaagagcagtggattatcatcattatcacatatgatgaagcaatattcaagaggtgcaagaactgtatgaataggaataagagtttatgtacaacgggaaatgaaaatagtcgtcatttgaacacactatgctgtggcagcagcttgttcttcaacagcctgtgatgctggcagaagggtgcaaatcaagttgcggtcaccgtacacattatcaacacgtcctgtggta

SEQ ID NO: 15264 - DNA, 582 bp, Glycine max
  Clone ID: jC-gmle01810084h07a1
cacacacaaaaaaaagctttagtttaggatgacccaagtgaggaacaagcaagtggttctaagagattatgtcaccggattccctaaagaatccgacatgaacattgttgaaggcaccataatattgaaggttccagaaggttccaatgatgtccttctaaaaaatctctacttgtcatgtgatccatacatgcgactcctcatggccaaggaccgttctttcggagatggctccttcacccttgcctctccattgaaaggatatggtgtgtctcaagtgctggaatctggacgtccagattacaagaaaggtgatttagtgtgggggattactaaatgggaagagtatagcttggtcccctcatctctcatacatttcaaaattgagcacactgatgtcccactttcctactacactggaattcttggtatgccaggaatgactgcttatgctggtttctttgaggtaggttctcccaaaaaaggagacactgttttcgtttcagctgcctctggtgctgttggtcaactcgttggccaatttgctaagttgactgtttttatgttggtggaagtgctgga

SEQ ID NO: 15265 - DNA, 509 bp, Glycine max
  Clone ID: jC-gmle01810084h07d1
agcatatattagaggttttatttatcacaaaatgtcactaatgtagtaatttctatcaacaaaatagaagaatgactgcataaaccataaaagcaaggttcaatatccaacagaaaattgaaaattcggaattaaagcttagagaataacaatatatttatataattttactcgtgagtaacaacaaccacttgtttaccaacattgcgaccggtatagaggccaaccaaggctgcagggcccttctcaaggccctcagcaatgtcttccacatacacaaccttcccttctctgatatgaggcaggacaaactccaagaattttggatataaatgatagaaatcagttgcaataaaaccttccattttaacccgcttaaatatgagatttgccaaatttgttacaccatcgaactgagtaagattgtactgcgagatcattccacagacaggtatgcggccatgaaatttcatgtttgggagtactgcatcaagtgtcttgcccccaac

SEQ ID NO: 15266 - DNA, 467 bp, Glycine max
  unsure at all n locations
  Clone ID: jC-gmle01810084h09a1
cttactttctggcctgaagacttgtatggaaatatctagttacatgcattctggaggagtgtcaatgccccatggatctattgttgctcctagttcaatcatggaagacaagggaaaatttgatgcagagtgcacagaccaggagatgccatctaggtcacggttgctgaggaaaaggggtaaaacaaggaaatttaaatattcttggaaatctgctggccacccatcaatatggaaaagaattgctgatgggaaaaaccaatcttgcaagcagtatacaccatgtggatgtcagtcaatgtgtggaaaggaatgtacttgtgttaatggtggaacttgctgtgagaaatattgcggttgttctaaaagctgcaaaaatcggtttagaggatgccattgtgccaagagtcagtgtagaagtcgacaatgcccatgctttgctgcaggacggnaatgtgacccagatg

SEQ ID NO: 15267 - DNA, 471 bp, Glycine max
  Clone ID: jC-gmle01810084h10a1
cttactttgtggcctgaagacttgtatggaaatatctagttacatgcattctggaggagtgtcaatgccccatggatctattgttgctcctagttcaatcatggaagacaagggaaaatttgatgcagagtgcacagaccaggagatgccatctaggtcacggttgctgaggaaaaggggtaaagcaaggaaatgtaactattcttggaaatctgctggccacccatcaatatggaaaagaattgctgatgggaaaaaccaatcttgcaagcagtatacaccatgtggatgtcagtcaatgtgtggaaaggaatgtacttgtgttaatggaggaacttgctgtgagaaatattgcggttgttctaaaagctgcagaaatcggattagaggatgccattgtgccaagagtcagtgtagaagtcgacaatgcccatgctatgctgcatgacgggaatgtgacccagatgtctg

SEQ ID NO: 15268 - DNA, 538 bp, Glycine max
  unsure at all n locations
  Clone ID: jC-gmle01810084h11a1
tggagggaatagagcacaggacagttgaagtaaatggcataaaaatgcacattgcagagaaaggagaaggccctgtggtgttgtttctccacggcttccccgaactctggcactgttggcacaaccagattgtggctcttggttccctcggataccatgcggaggcaccagatctccgaggctacggtgacaccgatgcaccaccttcaatagacagctacacatgctttcatatagtggctgatctcgttgcgcttattgattctcttggtgcagagcaagtgttccttgtggctcatgactggggagccatcataggttggtacctctgcatgtttcgccctgacaaagtgaaggcctatgtctgcctcagtgttcctttcatccgcagaaaccccaacgtcagaaccgtcgatggcatgcgcgctatgtatggagaagactactatatctgcagatttcagaaaccaggggaaatggaggctcagatggctcacngtggcacagagtatgttctcaaaaacatccttacaattcg

SEQ ID NO: 15269 - DNA, 496 bp, Glycine max
  Clone ID: jC-gmle01810084h12a1
catgtccaatattatttgatgatccacaccacactagcatggtaaaccctagcctatccctatatatacgtcaatgagatgttcatttttgttgtaagaagagcatatatatatatatatatattgtcatctcttcttccaccaaactttcggagttttctttggttaattagtaaaaaattgcttaattaatttgtccttccagaggatcgaatgagatagaaagggtactggaggggcaattaattaattaatctctagtgagtatatatataaatatggagagcctggaagaaagagtgtttatgttgatgaatgaacaatattattattccaattccaatgtatcagatcagctgcatatgcatcatcatcgctctgtgtctgtggagaatctaaacctatggtgggaaaacaacaccgactccgatgactcagccgagcgaattttgtattgggaatctcagatctcactgcttcaggaaattttggagcg

SEQ ID NO: 15270 - DNA, 569 bp, Glycine max
  Clone ID: jC-gmle01810085a01a1
gggcgtcagaaaaagaccgtggggccggttcgctgccgaaatcagagaccctttgaagaaagccagggtttggctcggaacctttgacaccgccgaggaggcggtgcgtgcctacgacacggtggcgagaacccttcggggaccaaaggcgaagaccaatttccctctttctccgccgttctaccatcccgatccattttccgatcaccggcactttgccaacaccggcgaagatttccacgatcaccggcgaccaacatccagtggcatgagcagcaccgtatagtccttcagcggcccccgtgctgccgtgccggcgacagcgccggtggccaccggtcggagatatccccggacgccacccgttatccccgaggactgccgcagcgactgcgattcgtcgtcctccgtcgttgacgactgtgactgcgacaacgtggcgtcttcgttcccgcgagaaccgttgtcgtatgatctagacgcgttgccgttagacgatgctgacgtggcaacgatgatctgttctgcaccgttctttgctttgatgaggaaaaatgaaaaaccggacg

SEQ ID NO: 15271 - DNA, 418 bp, Glycine max
  Clone ID: jC-gmle01810085a02a1
ctgaaaaccaaattagactcttgcaccgcaataatggcaataaaatactagcataatttatttgtgagtctcaaaaccttagcacactatatatacactgcatagccttggggtcttcaaaatcatcaattcaatggcttccctcatgagcaccatcctcatgcaaaggtcttcttctacttcacttgctgctgggaggttgttctccacaacaacagcaaccattattgattccccttcacttgctcagagaatcagagatttgcctaaggacctccctggaaccaacatcaagaaacatgtttctcagctcattgggaggactccacttgattatcttaacaaagtcactgaaggatgtggagcttatgatgctgtcaagcacgagatgatgcaacctactgccagcatcaaagac

SEQ ID NO: 15272 - DNA, 504 bp, Glycine max
  Clone ID: jC-gmle01810085a03a1
tgttggcctgagagttaggtccatggctgaggaagagcaaccaagtcagcctgcgaccccagttacaccaccaccagcagaacccaaaccacagccagtctctactccttcaccaaaggtgagcaccaagttttctgatgtgttggcgttcagtgggccagcacctgagaggatcaatggaaggttggccatgattgggtttgtgggtgcaatggcagtggaagtagccaaagggcaaggtgtgtttgaacaaatatccaatggtggtatcccatggttcttgggaacaagtgtggtccttacccttgcttccttgattccactcttacaagggatcagcgtggagtctaagtccaaagggttcatgtcctcagatgcagaactgaggaatgggagatttgctatgatgagatctggttgctctggcttttactgagtatgataaaggtggtacctaggtgtaattcagtcatgaatgcacaccaaaatggtcttaagtcattc

SEQ ID NO: 15273 - DNA, 424 bp, Glycine max
  Clone ID: jC-gmle01810085a04a1
cggctcgaggtgattatagactatctttatataataatataaataagaataaaaaaaaaaaaaaaaaaaagaatctatataaatataaaaataatatatataaggtacaaatagtaaatcgaggtacccattttatgataaactttccttccatttttgttcctctagtaggcctagtatttccggcaattgcaatggcttctttatttctttatgttcaaaaaaacaagattttttagatacagaaaacaaagtaaaattctggggtttattattccccaattataatgctaaatacaaaaaaaggagagtactgagtataatctttcgctcagacgatgtactgatatattctatggcggaggttcaaagaacaagcaatttatatagagccgttttcactgtgataggtacattggggtta

SEQ ID NO: 15274 - DNA, 512 bp, Glycine max
  Clone ID: jC-gmle01810085a05a1
ggaattatgggacaaaaaataaatccgcttggtttcagacttggtacaactcaaagtcatgattctatttggttagctcaaccaacaaattattccgagaatatacaagaagataaaaaaatacgagattgtatcaaaaattatatacaaaaaaatataagaatatcctctggtgttgagggaattggacagataaagattcaaaaaagaattgatcttattcaagttataatatatatgggatttccaaagtttttaatagagggtaagtctcaaaaaatcgaagaattacagacgaatatgcaaaaaaaactgaattgtgtgaatcgaaaactaaacattgctattgtaaaagttgcaaatgcttataaacaccctaatattattgcagaatttatagctggacaattaaagaatagagtttcgtttcgtaaagcaatgaataaagctattgaattaactgaacaggcgggtacaaaagggagtcacgtacaaattgcaggacgtatcga

SEQ ID NO: 15275 - DNA, 484 bp, Glycine max
  unsure at all n locations
  Clone ID: jC-gmle01810085a06a1
ctccgccacttctgaatctattgaatcaacaatcatgtcggacgaagagcaccatttcgagtccaaggccgacgccggagcctccaaaacctaccctcagcaagccggtaccatccgcaagaacggctacatcgtcatcaaaggccgcccctgcaaggttgtggaagtttcgacttccaaaactggaaagcacggtcacgctaagtgtcactttgttggaattgatattttcactgccaagaaacttgaggatattgtgccctcttctcacaactgtgatgttcctcatgtgaatcgtactgattaccagctcattgatattgctgaggatggatttttgagtctgcttactgaaaatggtaacactaaggatgacctcaagcttcccactgatgagagtctgctcactcagataaaggatggatttgctgaaggcaaggatctntgtgagtctgacatgtctgctatgggtgaggaacagatt

SEQ ID NO: 15276 - DNA, 557 bp, Glycine max
  Clone ID: jC-gmle01810085a07a1
gcggtagcgcgcggttgttgggggaagaagagagaaagcgatggcgaatcagggtgctaagaaacgcaaggaagagaacgctcgtcacatggctaggctccgccaaatcatcatcgcctgcaacgttatctatgtgttgctaagaatgttggtgttccattcgagcttcacctggaagcactggattgggttgattgtgacttctttggcatatgttattccctatcaacagctcgcgaagatggcgacccctgcttacgctgaagatggtgaacttttagatggtggatttgatatgtctacaggtggagtttgtggatatttacatgatgttatctacataacatgctttgtgcaagtcatgtccatcgtctctggaaagttctggtacacatatcttgtgataccggcttttggagcataccagtcctttggtttcattaaaggatttttggccaggggttcagaggaatcatttgaagatgaaaagacccgcaagaagagagataagatggagaagaagcatcgagacccaagtttgcaagacaagaactaga

SEQ ID NO: 15277 - DNA, 606 bp, Glycine max
  Clone ID: jC-gmle01810085a07d1
gctagctacctgtccgtcatacatatgcccattttttacacccacgtaagatttccaacaaggaggttaaactccatttaagcaattccacgtcattcactaacgttgagtcatttgataaagatgatgaatcttcccgtaattgacaactcttagtcccaatatcccatagaggttagcttttccaaatacttatctaaactgtgtgtaagcacacatgttcttggagggcataaaaagtaaattgtaatacatgaaatacaactcagactttgtgcagcatgtgttcgcaataagttgaaagtttcagggcaacctccatcaatcttggatattgagttacattgggtaactgggtgccctacactaaactatctagttcttgtcttggcaaacttgggtctcgatgccttcttctccatcttttctctcttcttgcgggtcttttcatcttcaaatgattcctctgaaccccctggcaaaaatcctttaatgaaaccaaaggactggtatgctccaaaagccggtatcacaagatatgtgtaccagaactttccagagacgatggacatgacttgcacaaagcatgttatgtagataacatca

SEQ ID NO: 15278 - DNA, 220 bp, Glycine max
  Clone ID: jC-gmle01810085a08a1
attgtttgttgttgtaactcgttcctaggggcttttaccgtgggaaattttgcaggaggcttttaaatatgtttcctttagattttatttttatttattgattaaactgtttcctttatatttcaaagttgagttgtagcacaactcagagtattctatgcagtgtaataaagacattgtacacggtcataaaaaagaaaataaaataatcgcctactgt

SEQ ID NO: 15279 - DNA, 228 bp, Glycine max
  Clone ID: jC-gmle01810085a08d1
acaggaggggattattttattttcttttttatgaccgggtacaaaggctttattaccctgcatagaaaactctgagttgggctacaactcaactttgaaatataaaggaaacagtttaatcaataaataaaaataaaatttaaaggaaacatttttaaaagcctcctgcaaaatttcccacgggaaaagccccttggaagcttccaactcaatggacctatgcacctt

SEQ ID NO: 15280 - DNA, 534 bp, Glycine max
  Clone ID: jC-gmle01810085a09a1
tcgtttccaactaccaaaaagacgacgctgcagactctcctcgtcccgtcggaggttgtggtcggaattgcctcaaagcttgttgccttccagatgcaaagctgcctttgtatgctttcaagaaggctaatggaaaggatttggccctgcatgcatgcgccggggagcctcccctcacattcctcgactcacttcttcttggagagtgggaagatcgcatgcagagaggactttttcgctatgatgttaccgcctgtgaaaccaaggtgattcctggtgaatatggtttcgttgcccagcttaatgagggtcgtcacctcaagaagagaccaactgagttccgagttgacaaggtccttcaaccctttgatgaaaacaaattcaactttaccaaagttgggcaagaagaggtcctcttccaatttgaagctagcgaggatggacaagtccagttctttccaaatgctccagttgatgttgacaattctcccagcttttgtgccatcaatgtcagtcctattgagtatgggcatg

SEQ ID NO: 15281 - DNA, 484 bp, Glycine max
  Clone ID: jC-gmle01810085a09d1
actacaagaacaaacagataactgaatttattatttctcagagtcaagtcaagcattatgatacatcataccccaaaacaccaacaacagttctcaggggagcagttattacatcggactttcacatgaacgcgttataaaggcagataaaagcaaatacattcaacacaggaccttaagggtcaagcccagcacaatactatgggacttaaacggggacacaattcagcaattattcttaaagcactacggatttgctgaatttggtcataattttagagccttgttagggtagaatcacacattcttgggaaccagtttccaccacagtagggggttcgcttgggctgactggatcaacttttttgacactttcaacgttgacatcctccaattcaccacagccaatgggttcaaaaataagatcattgacttcttgaaacctttcttgagagagggacacctttgcaagaagcctccaagc

SEQ ID NO: 15282 - DNA, 496 bp, Glycine max
  Clone ID: jC-gmle01810085a10a1
gtgggccgtatcctaagggagtacggggaagaaagtaattggcgaactctgcaaaagaaaattgtcaatgcccgattacatggtggattgcattcgactagtgacttgctcgatcttattcggcgcgtggctcctccaatgagaggtggacggcaaggttggataaagacggcaacccgggtgtttcaagctctgagaatcgctgctaatgatgaactgaagacacttgaggattctctctattattgttatgattgccttgcacctgggggtaggcttgctgtcatatcttttcatagtctagaggacagaattgtgaaacagacatttcttaacataatcaaagggagcaaagatgtggaagaaagggagagcctcaacagtgatttgaggaagactagtgatgaaatcaaagaaaaagacgcatggataaagcacgtaatatatggatcaaatggaacaattctcactaaaagaccaatcacgccatcaggag

SEQ ID NO: 15283 - DNA, 577 bp, Glycine max
  Clone ID: jC-gmle01810085a10d1
acaattaaattaggacttcaactacatataaactgctgaatgtttaaagcctaagcagatgaattactaaaatccaaatctttagacagtaatttgctagaaatttctagttaaaatagacatcaggtaatttgcaaccgtatgcacaagtcccttttgacctttctcttttaaagaggacttgtgaacatagcaactttttatttttttaataaagattaaccaagttaccgacaagattatgaatccaggtatttctaaaaactctacactaaactacaatttgccatgttttatcatcttcagtgcttctgaataaccctgagctttgcacttctacttcgccggtttaatttttcttcttctcctgatggcgtgattggtcttttagtgagaattgttccatttgatccatatattacttgctttatccatgcttctttttctttgatttcatcactagtcttcctcaaatcactgttgaggctctccctttcttccacatctttgctcccttggattatgttaagaaatgtctggttcacaattctggcctctagactatgaaaagatatga

SEQ ID NO: 15284 - DNA, 419 bp, Glycine max
  Clone ID: jC-gmle01810085a11a1
gggaacccactacctcgacgcagggcaacgacggtgccagtattgctgaaaaatggcagcagcttcttccatggctctctcatccccatccttggctggcaaggccgtgaagctgggcccatcagccccagaagtgggaagggtgagcatgaggaagaccgtcaccaagcaggtctcctcaggaagcccatggtacggcccagaccgagtcaagtacttgggcccattctctggcgagcccccgtcctacctaaccggtgagttcccaggcgactacggctgggacactgcttggcttttcgcagacccagaaccttcgccagaaccgtgaacctcaagtgatccacttcaggtgggccatgctcggagccttgggctgagtcttcccggagttgctgtcccgcaacggggtgatgttc

SEQ ID NO: 15285 - DNA, 499 bp, Glycine max
  Clone ID: jC-gmle01810085a11d1
gtaaaaagcaagtaacattaagttggattcggatacacaagataattcacattatctgaagtacttcaccaaacacaaatctaaaaactctcaaaagtcatttcgttctttgacgctcactttccggggacgaagttggtggcataggcccaggcgttgttgttgacagggtcagcaaggtgatcggcgaggttctccaatggaccctttccggtgacaatggcctgaacaaagaagccaaacatagagaacatggccaatcgtccgttcttgagttccttcaccttaagctcagcaaaagcctctgggtcatcagcaaggcccaatgggtcgaagctgccacctgggtagattgggtcagtgacctcaccgagggggccaccagcaatacggtaaccttcaacggcacccattaggataacttgtgtggcccaaatggcgaggatgctctgggcgtggatcaggcttgggttgcccaagtagtcgagcccaccctcgc

SEQ ID NO: 15286 - DNA, 531 bp, Glycine max
  unsure at all n locations
  Clone ID: jC-gmle01810085a12a1
gcttcctgagaccgtgttccatggcatgctctccttctacaactcttgtgtcaaattctcttctccttaacaaaacgactagtcagtgtcggcttcatgttcatcccaccctttcacttaatcaaaaccttccaatatattctaataacctactcaaactctcaacaattcaataccatgcaacaaccacaccctttgttgctgcttctgcaggagttgagtctccggtgttgggtgaggataccacgagttcactggattcggtgaaagtgtttgatttgaatggaaacgggattccaatttctgacttgtggaaagataggaaagccgttgtggcatttgcacgccactttgggtgcgtgttgtgccgcataagggctgattatctttcatccaagacggatataatggatgcatctggtgtggcacttgtattgattggacctgngagcattgatcatgccaaatcctttgctgagaagtcaacatttgaaggagacatctatgcagaccccactcactcatcatatg

SEQ ID NO: 15287 - DNA, 499 bp, Glycine max
  Clone ID: jC-gmle01810085a12d1
cgacactaaacagtctttttaatgaaagtgattaagcaacaggtctgttttagaagtcccgtccattccatcgcaaattggaaaatgaaataaaatgatacaacactgatgtaacctatttctccattcgaccattccatcggtaggaagaacattttgaaataatcaatagaatcttaaattaagagcctcatagtaataggttccaaattgtgagttgtcattggataaatggcgggtaataacgttatatcttttaactgaaactcgaagaaaagccactgttcagcgtaagaagcagcttaaatatgatgtacaatgccgtataatgcgagttccatttcagtagcaggctaaataaagcagagaaagaggggctccctctcttctttcttcacgagcaacatgctttcaagatatcttcaatttctgggtcatcccctgcctacttgtctctgtgaaggtatgagaatgttgttttacccgggcctgcaactat

SEQ ID NO: 15288 - DNA, 442 bp, Glycine max
  Clone ID: jC-gmle01810085b01a1
tttccatgcttgactctgtgaagatgattttttttcttcctattatcccatttggcgtactctatggttaataaaacaaaaactgaattttaattcaattatatatactagtctttagctggtcacccgtttcttcatatcagtgaagaggatcaggtgacttattaaggtttcattgacttatcatggattctatctatgataatcaatctctatttgctgatattttacatgtgcaactgagcagttcttttttgtttcaccaatcaccacacgtattttctttaggaggcaatcctgtctgatacactgctgtcagtcgacgctaaatgtatacatatgtcctagctaggattcacaccttattcaccctctattcgatggttgtatagtagagaatgcttatgtacatcacccctatgcaatgagtctgtctttatta

SEQ ID NO: 15289 - DNA, 525 bp, Glycine max
  Clone ID: jC-gmle01810085b02a1
gagaaaagggttttgtgcctagtactagtacttttgtgatcattgtttgtagtctcgcaatggagcgaaggttggaggatgcgatcgagcttttgtttgatatgttggggcagtctaggtcccctgatcatctcacttacaagactgtcttggaagggctgtgtcgcgagggaagggtcgatgaagcgtttgagctgcttgatgaatgcaagaagagggatgtttccatgggtgagaagacgtacaagagtttgttgaatgacttgtatgttatatgccgcgagtagatgctgttgagctaaactgctaatgcatttgcttgaagatgcaccatacgtttcttttgtatgagtggaactctgttattctcctgctttgcagagcctgatattagaaggcatattcttctgaatgacagctaaatgcagattagtgagcattttgcatggagaattgctctcgaacttcttttgatagataaatatgggggattcctgagtctattatacatatgatatactatat

SEQ ID NO: 15290 - DNA, 562 bp, Glycine max
  unsure at all n locations
  Clone ID: jC-gmle01810085b03a1
gagtactcctccagttgttgagcgcgtttcagaatgcttcatcaagccgcagcactccaaccatgaatcaaaccaaatctgctacttaacaccttgggatattgctatgttgtctgctcactatatccaaaagggccttctcttcaagaagccctcatcaccacttgttagtcacaataatttcatagagaacctgttgcagaagctcaagcactctctttctctcaccctcttccatttctatcctttggctggtcgccttgtcacccaccaaacccatgaccctcccttctatgctgttttcgttgattgcaacaacagtgatggagccagattcatccatgcaactttagatatgaccatatctgatatcctctctcccgttgacgttccacccattgatcaatcattggttgaccaccacaaagctgtcaaccatgacggtcacacaatgccgtatgtgtccgtccaagtcactgaatttgtggatggtgttatcataggttgntccatgaaccacactcttggtgatggcacttcttaatggaatttcttcaacaca

SEQ ID NO: 15291 - DNA, 557 bp, Glycine max
  Clone ID: jC-gmle01810085b05a1
ccttgttaaggttcttcctggtctacttggtggcagtgcagatcttgcctcttccaacatgaccttgttgaaatcatacggagatttccaaaagaatactcccgaagagcgcaatgttagatttggtgttagagaacatggaatgggagcaatctgtaatggtattgctcttcatagccccggattcattccatactgtgcaactttctttgtcttcactgactacatgagagctgccataaggatttctgcactgtgtgaagctggagttatttatgtgatgactcatgattcgattggacttggagaggatggaccaactcatcagccaatagagcacttggcaagcttcagggcaatgccaaacactatgatgcttcgtccagctgatggtaatgaaactgctggatcatacaaagttgctgtggttaacaggaagagaccctcaattcttgcactttctaggcaaaagttgacccaccttcaggaacttctattgagggaagtgaaagggtggctacattatttcagacaactcgtcaggtacaagcctgatg

SEQ ID NO: 15292 - DNA, 479 bp, Glycine max
  Clone ID: jC-gmle01810085b06a1
tgatgctgtgcaaaaggtaacactagttcctcgcggtcaagctcgtggacttacatggttcattcctaacgatgacccaactctgatctccaaacaacaactctttgcaagaattgttggaggactaggtgggagggctgcagaagaaattattttcggtgagcctgaagttacaactggagcagctggtgatttgcagcaaatcaccagtttggcaaaacagatggtgaccacatttggaatgtctgatattggtccttggtcacttatggaaccatcagcacaaggtggggatgtcatcatgagaatgatggcaaggaactcaatgtcagagaggcttgcagaagacattgatgctgccatcaagaggatctcagatgaagcatatgaaattgcactggagcatataacgaacaaccgtgaggccattgacaagattgtggaattcttctggagaatgagactctgagcggagatga

SEQ ID NO: 15293 - DNA, 500 bp, Glycine max
  unsure at all n locations
  Clone ID: jC-gmle01810085b07a1
ctgagggccatagattntgtattcttcctctgaagccataacctaaccttaaaaggctaaaaccttttgtgtttgcgccgctctaaagccaagcctgagactcgcgactcaccaccactgctcgccggcctctaattntgaaagcttctgcgcctcccacgccatttttgatactctctntgtgttcgcatagtgagatatggggaagaaggcgaagaaagctatgaagaagaatttgaaaagggcttcctttaataagaatccatctgaggatgctgatttcttgcccttggaaggtggccctgctcgtaagctcgccggccagcagaagccgncgncgncgncggagaacanccgcacggttttgtacgtcggtcggatcccacatgggttctatgagaaggagatggaaggttattttgggcaatttggaacccattagaggttgagaatcgcangaaataaaagtctgggaaatcaagacatttngggttcataga

SEQ ID NO: 15294 - DNA, 463 bp, Glycine max
  Clone ID: jC-gmle01810085b07d1
gggcaaacccctcaaggaattttatctatctttaaaattcaatttcaacagattggcaatcttaacaatctaccctcctgggaaaaattttaagaaaccgataatgcttctataaaatatttctgagaacccaaggtttcaaaattaagtcccaaaattgcaaaggcttgacaatagttaaatgctaatactaagtcctaaaacagcagtagcagttttactctaacacatttaagggaaaaaaggtaacaaaacaacctcactttgattaaattctctagtacctttcaggatatgccaaaaaatcattttttaaagatgatgagacaggttacccactcagtcttcaaactttattttctttggagcaagttggatgttacccacaatttcagggcattcataatcaatcccagcagcctttatccttttacgtcgcttttgggcatgtttcaaaaccttt

SEQ ID NO: 15295 - DNA, 494 bp, Glycine max
  unsure at all n locations
  Clone ID: jC-gmle01810085b08a1
ccgcgagggaggcactgccacaagcaatggaagagtcttcatccattgaggaatcggtggcaagcgtggtcgaagaagcgaaggaggttcaagacgccgtttccgctcacatctctaaggcttccagcgacgaggaacctctccggcaacgtgtccgtcgcgtcgattcccgaatccattcgctccgttcctctctcgattctcttgtctccaccaaacaaatccctccctccttagccgataagttggatgaagatttgcagagagcgagatgcatcatcgttgacggtgactcctcttcgcttctccctggccatgcacaaggaagctttctgaggatgtttctgggtcctatcaatgttcgtgcctccaggaaggacgttcagctcaaggtcaaagaggaatacaacagttacagggatagaactgccctgctattcctgctatttccggcaacactgcttattctaagatcttgggtntggtctggatgc

SEQ ID NO: 15296 - DNA, 465 bp, Glycine max
  Clone ID: jC-gmle01810085b08d1
ttgttgttttttttttttttttttttttttttttttttttttgtttttttttttttacttttttgcctgatttatttttttttttttttgggctgctcatacgctttttatatcatacacaaattgggagggatatggctccgcaacattaaacgaatttcattgtatacaatgagatgccatccataatgggcaatatagtgagtgtttggttagacctttacggcttcagacatccataaacgtgtcccaaattggcaaacgttaaagtaactatacagctggattggaaaattggtgggaaaccatgaaccctaacttataccaaagactgaaagcatacgctccacgttacgaatacttcaacagagtgtgattcatgaggcgtcaactgatacaagacaagccttcagttgaacgtgttgattaccctcattgactgggtgaacaatgaccgtagcatgc

SEQ ID NO: 15297 - DNA, 432 bp, Glycine max
  Clone ID: jC-gmle01810085b09a1
gattgatgatgggtgctattccagaggccaacggaaatgtcgccgacgaagaaaacgggagcagcgttggtggatccatcgatttcggcacggcggaggccgttcaatacgtccgttccctcaccgacgttggcgccatgacgcgcctacttcacgaatgcatcgctcaccagagagcggtggacgttgaactcgacgagcttctgtcgcagcgcaccgacctcgaccgtcatctactccagctacagcgctcctctgacgtcctcgacatcgtcaactgcgacgcagactatatgctctacaacgtcggctacaccttcgacctcgccgaccaggtcagccgcaaggtccgtgagcttgacctcgcccagtcgcgcgtacgcaacacgctgctacgtatcgacgccatcgtggaacgcgccaactccctcg

SEQ ID NO: 15298 - DNA, 515 bp, Glycine max
  Clone ID: jC-gmle01810085b09d1
aataacccaataaaaagaaaaatgtgaagagaccatataaacggatattacaacttcagagcagctattgcttctgatttaaaatcaactcgcagacccaatacacgcctaacctctgctggagttaatctccaggtcataggtccagagttttcaccccagaaatctagaatctcagaaaccttttctaaatttagaattgttgccatttgagtaagacgtgcaaacttggctctaacagttctctgggtcatggcactgaaatggcttaccaaagctctagcatctcggtcaagctgaagaccacctagctgactaaatcttttctgcatcataatgacttctagccttttcacaatgaagtcaataatcaaatgaacaaacgtgtcataattgttagcagtcattagtggctgcagccatgccacatttgactcaacggcatggagaagtctttgaacccatgggtcattcacctcaatatctgcatactcagcctttgaaagctcatagct

SEQ ID NO: 15299 - DNA, 139 bp, Glycine max
  Clone ID: jC-gmle01810085b10a1
acgggagcgggtggtcgcacaggactcttagactccgccatggccacaacgacgactcacctacttaggattacctgtcagtgtctcacatagcgaactatgccccccttatgcccatgtgaaagacgatattgatgcg

SEQ ID NO: 15300 - DNA, 383 bp, Glycine max
  Clone ID: jC-gmle01810085b10d1
gggaaaaaaaccccccgggaaaccggaaagggggggccggtaaaaaaaccatgggtttttcaaaggggggccgggccccacccgggggggcctaaaaatggcccaaaaaaaaacctttacaaaaaaaaaaattggggcaaaaaggcccaaaacccccaggggggaaaaccccaggggtttggggcccctggaaacccccttaaaaaaaaaaaaggggggggggaacggggaaaaaaaagccctgaaaaccctggggggggaacccggccccccggggttggggccccaagaaaaggccctgaaattggccccccaaaaaataagggcccgaaggccaacttttggaaacaaagaaccaccaaggggtccgggttcaggggggg

SEQ ID NO: 15301 - DNA, 323 bp, Glycine max
  unsure at all n locations
  Clone ID: jC-gmle01810085b11a1
ctgcagtgcgnnnttgcatgcgcatgtacgtaagcttaagctcggaatcgagcatcggcaaggtaaggcacttgaagcatggaatgctctccttatacaactcttgtgtcaaattcttttcatggtaacataacgactattcttggctggcttggtgttcatgctacccttatacttaatagaagccttacagtatatcatgatgacctactcaaactatcagcaattcattagcatgcaacagccacgcccttagctgctgatgctgtaggacccgtgtcttcgctagcgggtgaggatcctacccgttcactggattcgcg

SEQ ID NO: 15302 - DNA, 387 bp, Glycine max
  Clone ID: jC-gmle01810085b11d1
gagcgacgctaaacggtcttttcaatgaaagggattaagctacacgacagtattcaaagtaccggacgttctataccaaattggaaaatgaaatctcttgatacaccactgatgcaacctagctcactattcgacgactacatcggtgggatgagcataggcaaagaagcagtcgggtctaaaatggagagcctcatagtaatacgatgcaaactgtgaggtgacaatggatcaatggcggaagataaccttatatatcatgaccgaaactccaggataggccactgttaaccgaaggaagccgatagcctctgaggcacaatgccggataaagggagctacattgcaatcgcaggctatagaaagcaggaactgacgggctgggtc

SEQ ID NO: 15303 - DNA, 433 bp, Glycine max
  Clone ID: jC-gmle01810085b12a1
aattcggctcgagctcatatcggaaggatgtcttacgttgctcacaacgttaatcagccacatatctgctacatatcgtgtgcattttggaattgtgccactaaaattctattcatctatggctgcctcatcttatgctatgcaatcaatccttgcagaccctatgatccgcatttccagcgggtctagggagaaccattttggtgttcctgcttatcacatgagaaggaatgttggcctgagagttaggtccatggctgaggaagagcaaccaagtcagcctgcgaccccagttacaccaccaccagcagaacccaaaccacagccagtctctactccttcaccaaaggtgagcaccaagttttctgatgtgttggcgttcagtgggccagcacctgacaggatcaatggaaggttggccatgattgggttt

SEQ ID NO: 15304 - DNA, 384 bp, Glycine max
  Clone ID: jC-gmle01810085b12d1
gggaaaaaaaaaaagaaaatttaatgggggggaaaaaaaaaggccccaaggacaaaaagaaatggggttttttaacccccaagggcttaaaaccatttgggggggcattcagggggggattacccccggggacccccctaaaaacacccagtaaaagcccaagcgaccaaccccagagaagtaaaacacccgtgcaccggtttggaatttggggacgaaaacccttgggccttaaacctgacctggccccttaggaaaaggggattcaaaggcaccaggggaaggcccacccttgttcccaaaaaccatgggaaaccacccggggacaattgtgaaaaaccacatggcccttggggcatcttcccggggatggccccccaaaac

SEQ ID NO: 15305 - DNA, 500 bp, Glycine max
  Clone ID: jC-gmle01810085c01a1
tggagtggaagtgcgatcccagtgttagtgtgtatttcctctcttctcactccgggatcgatattttcaagaacagatcgaaaagccgttcatcgatttgttggatctgtgagtgagaagatggttactaagacagaggagactcaattgaacaggctcgaaaaccaggtcgataacggcggcggcggcgcgtgggagtacctctgcctcgtgcggaagctcaaagttcggcggtcggagaaagttctgaagcacggtctctccatcttgaacgacctcaaacaacgatcctctctcggctccgatgaatggaccttgtatgagcaggttgctgttgctgctatggactgccaatgtctcgacgttgccaaggactgtacaaaggttcttcggaagagattcctagagagtaaaagagttggtaagttgacatatttaaattgtgtatttcttcttcccaagtttggatttgggttagttagctaaatagcactgtctac

SEQ ID NO: 15306 - DNA, 353 bp, Glycine max
  Clone ID: jC-gmle01810085c02a1
aactttcatcaatcaactgcttgtggaacttgatggatttgagaaacaagatggggttgttttgatggctactactagaaatctcaagcaaattgatgaggccttgcagaggccaggtcgcatggatagaatatttcatcttcaaagaccgacacaagctgagagagaaaaaatattgcacttgtctgcaaaagaaaccatggatgatcagtttattgattacgttgactggaaaaaggttgctgagaagacagctcttttacgacctatcgaattaaaaattgttccaatggctttggaaggaagtgccttccggagcaaagtactgtacacagatgaattgatggactact

SEQ ID NO: 15307 - DNA, 486 bp, Glycine max
  Clone ID: jC-gmle01810085c03a1
gtttcgatccatcttccctcacccctcaccccaccccacccaccttcttctttctctctttctccccttttccctttagtcttcgtttggtcttcccttatgggttctcttgtttctctttgatctcatgaagaagatgaaaggggttgtctccttggaccctccttatgaggtatatcaggatcagagggccaggctgaggcaccagagtctcttgcaggactatgaagacctgcacaaggaaacagaagccatgagaaggaaattgcaggctacgaggcagaaaaagttgatgctggaagatgaagttcgatttttgaggcaacgttacaattacttgctaaaacaccctattctaaagcctcatccagagcaagttgtaaagccacaaaagctcatattgcaagcacccatcatctcgaagggaaagaattacagcaggaaggagcctactctgcgacctcaccccacatctcatttgaactc

SEQ ID NO: 15308 - DNA, 540 bp, Glycine max
  Clone ID: jC-gmle01810085c04a1
ggctcgagctcgagccgctcgagcggctcgaggctggttgccacactacaccgatatttccaccaaacccgtttgcgttgttgtttgcgaataaatggcaactaagaggagcgtgggaacgttgaaggagggtgatttgaaggggaagagggtattcgtgagggtcgatctgaacgtgcctttggatgacaaccttaacatcaccgatgacactagagtccgtgctgctgttcccaccatcaagtacttgactggttatggtgctaaagtgatcctttctagccatttgggacgtccaaaaggtgtaacacctaaatacagtttgaagcctcttgtgccaaggctgtctcaacttcttggaattgaagttacgatggccaatgactctattggggaagaagttgaaaagttggttacacaacttccagaaggtggtgttatgcttctagagaatgtgaggttctacaaggaggaagagaagaatgatccttgatttgcaaagaagttgcttctctagctgatctctatgtgaatgatgca

SEQ ID NO: 15309 - DNA, 511 bp, Glycine max
  unsure at all n locations
  Clone ID: jC-gmle01810085c05a1
ggaagagttgaaaaaacaggaaggagacaacgggaaggaagagttgaaagaactggaaggagagaaaggaaaggaagagttgaaagaactggaaggagaaaaaggtgaggaagagttgacagaactggaaggagagaaaggaaatgttgaattgaaagaacagaaaggagacaaaggaaaggaaaagttgaaagagcaggagccagagaaagcaaagggagaggaaacaaacctttttggacatgaagagaactctgagtcttttggtgtagaaggtgaagcccagttgcaaaaagaagatgctaatcctattaaagatggcggtgaaggaccaaagattggtgaaaattcagatcttggagaacaagggaaggtggagcttgttgaagatccagaagaaaaccctgaagaagatccagaggaaccttcagaagaaacttcggcattggaggaggagcatagggaattggaggctattgcanatcagcgaaagatttaaaaagaacatgag

SEQ ID NO: 15310 - DNA, 429 bp, Glycine max
  Clone ID: jC-gmle01810085c06a1
gacgagggttctcaaggttctgtgccgcaaagtacccgtcggcgtctcgtccaagtccagctccggtgatttggtcggcggagatcgggaatgtcaggtgtggacgtgaattttctgagggtgatgtttttcaaaaccctaggtttggtaatggggggaaatttaattttctgattttattatatatagttaattgatgctttcgacggtttatatttatgcgatttggtttaggtttcaatggaattttgttggtagtttatatgattgtatatagttatcagcaaccttatattgtttgcttgcctttctagagcactcagtggagatttgaaactttgttagtggaaaatttgcaattgtatgttaattggagatggagacaaaataggaggcagatataaatatttatttggatatcattgactt

SEQ ID NO: 15311 - DNA, 187 bp, Glycine max
  Clone ID: jC-gmle01810085c07a1
gacagttaatagtaataataataattaaaactctggggaggcacaggcacagatacattgcctctctctgtatgtatggcattagacagcctcttgcacttatggtgcaattgtgcatgccaactctctgtaatataatgaatgtggttgtgctaaggaggatttggtttgatcattttcgttcatt

SEQ ID NO: 15312 - DNA, 192 bp, Glycine max
  Clone ID: jC-gmle01810085c07d1
atgaactaaattgattaaaccaaatcctccttagcacaaccacattcattatattacagagagttggcatgcccaattgcaccataagggcaagaggctgtttaatgccctacattcagagagaggcaatggatctgggcctgggcctccccagagttttaattaggattattattattaaattgggccagg

SEQ ID NO: 15313 - DNA, 522 bp, Glycine max
  unsure at all n locations
  Clone ID: jC-gmle01810085c08a1
ttattcaccctagtcttagccttccctacaactccaaacacaaagacatcatcatccatggctgcctccgtctccactgtcggagctgtcaacagagctcttttgaacctgaatggttctggagctggagcttcagctcccagttcagccttctttgggaccagcttgaagaaggttattgcctcaagggtccccaacagcaaggtttccggtggaagcttcaagattgttgctgtagaagagaagaaagagattgaagagacccagcagaccgacaaggacagatggaagggtcttgcctatgatatctcagacgaccaacaagacatcacaagaggaaagggtttggttgactcccttttccaagctccacaggatgctggaactcactatgcagtcatgagctcctacgagtacctcagcactggacttcgccagtacttggacaacaaaatggatggattctacattgctccagcttttatggacaagctnnngtgtcacatctncaagaacttcatg

SEQ ID NO: 15314 - DNA, 514 bp, Glycine max; identical to SEQ ID NO: 5725
  Clone ID: jC-gmle01810085c08d1

SEQ ID NO: 15315 - DNA, 471 bp, Glycine max
  Clone ID: jC-gmle01810085c09a1
acggaaccttctagaaccaccataacatcattctccgttccctcgcgtttcaacaccgataacccgcaaaaatacccattgatctgcgcctcctcttccatggctccaccgtcgccggtggaacacaacggcgactccgccgctaccgcctccgcctccgcctgcgcggagtctcagagatcaattcccacgccctttctcaccaaaacctatcaactcgtcgacgaccaatccatcgacgacgttatttcctggaacgacgacgggtcaacgtttatcgtctggaaccctaccgttttcgccagagacttgcttcctaaatttttcaaacacaataatttctctagcttcgttcgccaactcaacacttacggattcaggaaagttgtgcctgatcggtgggagttctcgaacgattatttccgccgaggcgagaagcggcttctttgcgaaattcagcggcggaagatc

SEQ ID NO: 15316 - DNA, 523 bp, Glycine max
  Clone ID: jC-gmle01810085c09d1
aataaaactataaatatattcacataagtatgaatgttgagtttctacaggcaagtaaaataatttataggactaatgaaatattcaacactaccctcaatggcaaagctacagtccaagtccaatttaacgaatatataatataaataaaaaagagatagcgaagaaaaaaggattagaaagtatcgttttcctctgacttctgagaaacttctgggaatcggtcccaaacggttaaacgacgcacgtgacgtctccgcgtgccggtttcggattccctacagcactacgtatctaatctaaaatgtttcattcgattagccgtcgccgcgtgtcagttgcacaccctttgatttgtcctgtgacacggactcaaccacggcgtttcctgattctcgcgatggttctggcaatccaacggctcagatttcacgtttgcagaacccacgtgatgcaggcgcagcagggtatcttcctctccttctctcctactcttcgaatctcgccacttcacttcctctct

SEQ ID NO: 15317 - DNA, 474 bp, Glycine max
  Clone ID: jC-gmle01810085c10a1
acggaaccttctagaaccaccataacatcattctccgttccctcgcgtttcaacaccgataacccgcaaaaatacccattgatctgcgcctcctcttccatggctccaccgccgccggtggaacacaacggcgactccgccgctaccgcctccgcctccgcctgcgcggagtctcagagatcaattcccacgccctttctcaccaaaacctatcaactcgtcgacgaccaatccatcgacgacgttatttcctggaacgacgacgggtcaacgtttatcgtctggaaccctaccgttttcgccagagacttgcttcctaaatttttcaaacacaataatttctctagcttcgttcgccaactcaacacttacggattcaggaaagttgtgcctgatcggtgggagttctcgaacgattatttccgccgaggcgagaagcggcttctttgcgaaattcagcggcggaagatctca

SEQ ID NO: 15318 - DNA, 486 bp, Glycine max
  Clone ID: jC-gmle01810085c10d1
aataaaactataaatatattcacataagtatgaatgttgagtttctacaggcaagtaaaataatttataggactaatgaaatattcaacactaccctcaatggcaaagctacagtccaagtccaatttaacgaatatataatataaataaaaaagagatagcgaagaaaaaaggattagaaagtatcgttttcctctgacttctgagaaacttctgggaatcggttccaaacggttaaacgacgcacgtgacgtctccgcgtgccggtttcggattccctacagcactacgtatctaatctaaaatgtttcattcgattagccgtcgccgcgtgtcagttgcacaccctttgatttgtcctgtgacacggactcaaccacggcgtttcctgattctcgcgatggttctggcaatccaacggctcagatttcacgtctgcagaacccacgtgatgcaggcgcagcagggtatcttcctctcctcctc

SEQ ID NO: 15319 - DNA, 434 bp, Glycine max
  Clone ID: jC-gmle01810085c11a1
attttagaagaatacccccgtaactcgttcttcttcttttgttgttctgtgtttgtgtttgttttttctctcacctgaaaatgtcttgctgcggtggtaactgtggttgcggaagctcctgcaagtgcggcaacggctgcggaggctgcaagatgtacccagacttgagctacactgagtcaaccaccaccgagaccttggtcatgggagtggcacctgttaaggctcaatttgagggtgctgaaatgggtgtgcccgctgagaacgatggctgcaaatgtggaccaaactgctcctgcaacccctgcacttgcaagtgaggtgttgggagagcaagcttcaagcagagatagcccttaattaggaataatgataaactattaatgtgtagctaaaaacttatgtattatgtctgagatggttttcgtgcactc

SEQ ID NO: 15320 - DNA, 363 bp, Glycine max
  Clone ID: jC-gmle01810085c11d1
aggcaaaaaaaggaaaaaaaaaaaaaccggagaaaacaacataagaaacacgcgactgaaaaagaaaaaggagaaacaggcgaaagcaaaaaaaaaaaaaaaaaaaggaacgggggaacaaaaaagccaagagaaagaacaaaaaaacagaacacaggaaaaggggaaaaacaaccaaactaaacaagggggggggaaaaaacaaaaaaaacaaggggggcaaaaaaagaacaaaggaaaagaaaaaaggatataaccgccaaaaaagggaaccaaaaaacatcaaaaaaaggggcgaccctaggaaaaaaagggcgcccaaaaaaacctgatatggaaaaggcggggaaaaaaaagagctat

SEQ ID NO: 15321 - DNA, 362 bp, Glycine max
  Clone ID: jC-gmle01810085c12a1
ctctcacgttttccgatagaaagaatcccaggcgaggagaaagatggaggggaaggagcaggatgtgtcgttgggagcgaacaagttccccgagagacaggcgattgggacggcggcgcagagccaagacgacggcaaggactaccaggagccggcgccggcgccgatggttgacccgacggaggttacgtcatggtcgttttacagagcagggatagcagagtttgtggccacttttgtggttctctacatcaccgtcttaaccgttatgggagtcgccggtgctaagtctaagtgtagtaccgttgggattcaaggaatcgcttgggccttcagtggcatgatcttcggcctcgattact

SEQ ID NO: 15322 - DNA, 548 bp, Glycine max
  Clone ID: jC-gmle01810085c12d1
aaagagatgcatatatatgactctggtgttatttttgattttgcaaattaaattacacaatcacagccgtacatcacacatgagttgggcctcttccaacttaaaagcagaggataacattggcccatgacgcgacacatgcaccacctaataatcataattttacatctttacatacaaaatacaaagactttaaattttaaaaagaagaaaagagataaacagatcatcttaatgaaatgaaaccaaaacccacaaacattggcttgatttttgttgttgttgttgttcccaacttgattaagcatgaaccgtttgattgaatcacttggacttgaagggaatggccctgattacgacctggtggtagagtgctgcaagagctgcaccgatgaatggtcccacccagaagatccagtgttcatcccaaccaaggtccttgttgaagatgatagcagcaccaagactacgagcagggttgataccagttcccgtgattgggatggtttgcaagtgaaccaagaacacagcgaacccaattggcaagg

SEQ ID NO: 15323 - DNA, 474 bp, Glycine max
  Clone ID: jC-gmle01810085d01a1
ggctcgagaaaatgtcctccatggcttcctccaccgctttcttcacacccctccatgatttcactcaagccagaacaaccccatcaccccctttgcctttcatcaaatcctcctttgcttcctccaagtcaaccttttttcaccctgccctttccctacaaacctcttccaactttcccaggctttttggaaagcctaagtttttctctgttcatgcaagggctgccacagaaaaaaccatttatgattttactgtcaaggatattgacagaaaggatgtttctcttagcaagtttaaggggaaggttctattgattgtcaatgttgcttcacgatgtggtttgacatcatcaaattactcggagctgtcacgcttgtatgaaaaatataagaatcaaggtttggagattttagctttcccctgcaatcaaattggtatgcaggaacctggatcaaatgaagatattaagcaat

SEQ ID NO: 15324 - DNA, 531 bp, Glycine max
  unsure at all n locations
  Clone ID: jC-gmle01810085d02a1
atttcttacaccgtcaacacatcgcaattctgaaagggaatggaaggagatattaagcttttggatggagatgacactcacaaaaagaaagaaagttctctggtgaagataaaagtattgtttttcgccagagcccgtgatctcactggcctgagtgagttgccactggaggtgtcatctggaagtactactcatgattgtttgaaaaagctttttgtcaagtttccaagtttggaagaaataagaggctgcatggttttggctctgaatgaggagtatacaactgagtcaaccattgttaaagacactgatgagttggccataattcctccaataagtggtggctgaatcacttaatatcactgcatggtacttctactnttgtaatctaatactgattgataagttaatatctcatgtagggtaaattctattggtggtgtgcagttctcactcaagaggttaacctttctcatcatacaattaggagatttctactaggttttggataactgttcaatcatgaagtta

SEQ ID NO: 15325 - DNA, 499 bp, Glycine max
  Clone ID: jC-gmle01810085d03a1
aatggatcacagtgccgatgctcaacgcacggacttgatgaccatcacccgcttcgtgctgaaccaacaatccaaccaccctgagtctcgtggcgatttctcaatcttgctcagtcacattgttctcggttgcaagttcctctgctctgctgttaacaaggcgggtcttgctaagcttattggacttgcaggagagacaaatgttcaggcaagtggttgataaataaatcttagtaacctgcatcatgcatacaaattccagcatggtaactttctaaataatgtatgatgatttgatcctccttgattagtttttcttatttcggtgttcatttttattcaatttgtttcttaactggaataaagggcgaagagcaaaagaaactggatgtcctttccaatgatgtctttatcaaggctttggtcagcagtggacgaacagtaagtcatcaatatgtgatttggtgtgtcttgaaaactaaggggttatttttttttt

SEQ ID NO: 15326 - DNA, 538 bp, Glycine max
  Clone ID: jC-gmle01810085d04a1
ctcttcttctcttgcggctagggttttagcgcagcttcttctagatttaaggaagatgggtaaggaaaaggttcacatcagtattgtggtcattggccatgtcgactctgggaaatccactaccactggtcacctgatttacaagcttggaggcattgacaagcgtgttattgagaggtttgagaaggaagctgctgagatgaacaagaggtctttcaagtatgcctgggtgctggacaaacttaaggctgagcgtgaaagaggaatcaccattgatattgctttgtggaagtttgaaacaacaaagtattattgcacagttattgatgcgcctggacatagggatttcattaagaatatgattactgggacatcccaagctgactgtgctgatcttatcattgattcgaccactggtggttttgaagctggtatttccaaggatggacagactcgtgaacatgctctgctttcattcacccttggtgtgaaacagatgatttgctgctgtaacaaaatggatgctactacacccaag

SEQ ID NO: 15327 - DNA, 480 bp, Glycine max
  Clone ID: jC-gmle01810085d05a1
gaacgatttaggacaataactagtagctactatcgtggagcacatggaatcattattgtttatgacgtgacagatgaagatagcttcaataatgtgaagcaatggctcagtgaaattgaccgctatgccagtgataatgttaacaaacttttggttggaaacaagagtgatctgacagcaaatagagttgtctcatatgacacagctaaggaattcgcagatcaaattggcatacctttcatggaaacaagtgcaaaagatgctacaaatgtggaagatgctttcatggccatgtctgctgccatcaagaatagaatggctagtcagccttcagcaaacaatgcaaggcctccaacagtgcagatcagagggcaacctgttggacaaaaaagtggttgctgctcttcctaaccaggtggtgctgcttggtctacacttaccttttgcatgtaaggggcatatgctatttcactaaatagt

SEQ ID NO: 15328 - DNA, 447 bp, Glycine max
  unsure at all n locations
  Clone ID: jC-gmle01810085d06a1
aagaaagctacctagagcttgcacctattggtatcttctacaatatcctctcatagtgctcttcttcttcttcattttcattatcaagatgtctttgctttcggatctcatcaacctcaatctctcagaatccacagaaaagatcgttgctgagtacatatgggttggtggatctggtatggacctcagaagcaaagccaggactcttcctgggccagtgagtgaccctgcaaagcttccaaagtggaactacgatggctctagcacagaccaagctccaggggatgacagtgaagtcatcctatacccacaagctattttcaaggacccctttaggagaggcaacaatattcttgtgatttgtgatgtttacacccncgctggtgagccacttccaaccaacatgaggtatgatgctgccaaaatttcagccaccctgacgttgct

SEQ ID NO: 15329 - DNA, 518 bp, Glycine max
  Clone ID: jC-gmle01810085d07a1
ctccaagttcctctgctgtcattttcagctttggaccctaccctttcttcacttcaattcccattcttcattagaacttgtcacagtgatctttatcaaatgactgcaatagcagaccttgttaactaccatgattggaaagatgttattgctgtctaccttgatgatgataatgggagaaatggaataggcgcattaggcgataagcttgctgagaggcgttgcaggatatcatataaagcacctttgagccctgatgcatctatggaagagattactaatgtgcttgttcaggtagctctggcagaatcacgggtaatagttgttcatgcaaatactcaatttggccccaagttgtttagtgttgcaaagaatcttgggatgatgggaactgggtatgtctggatagccactgctttcctctctgctctccttgatatcaacagtcccctctctccagattcattggatgacattcaaggagttcttacaccgcgtatgtacataccggattcaca

SEQ ID NO: 15330 - DNA, 577 bp, Glycine max
  unsure at all n locations
  Clone ID: jC-gmle01810085d07d1
gtataaagaccgtgttaaaaataagtgttacatatagctaacaaaagttctaaagtatccaacatatatatttacttgaaaagaaggaagtactagtagcccagtagttgcagcatgaatgaagagcgttggtgttgtagctagcataagaggctagaaaatgatgtagaaatattgatcatacttcgctagcacattcacttctgcgtgaagcatatccctggttggagctgatggataagcttccttcactgtttctgtatgagatcctctccattttccttctcttggaccggctcttaaaggtctcttctttttcatctacaaatgaaaggaaagtcttgagatgtgaagattttgatcctatgttttggccgtcagtagaatgaagttcctctgagacgtagtgcttatggtattgcctccaaatctgtataagatatatgaagagtgcaagcaagcaggcaagcccacagatcatatagaggccccaaaagcttttaagttggagtctttccacttcaaactttgcaccttgtgataagcaagcgctactcaaaagccattngtcatggat

SEQ ID NO: 15331 - DNA, 498 bp, Glycine max
  unsure at all n locations
  Clone ID: jC-gmle01810085d08a1
gatccaaccccaggagacttatcatggattattgtgcttcatccctatcctgaaatttacatgatgagtggaacaaagaagcaccacagacttggaccgtggaacggcttgcgtttcagcggcatgcccgagatgaagcctaatcctgttttcaattacaagtttgtctccaacaaggacgaggttacctacatgtggacattgcagactagcttgatcacaaaagtggttctcaaccaaacctcgcaacagcgtcctcgctacgtgtggtccgaggccactagatcgtggaacttctactcaaccatgccaggagagtactgtgactattatggcgtttgcggngccaattcattttgcagctccactgcatcgccattgtgtgactgcttaaaagggttcaagccgaagtctccggagaaatggaactcaatgtattggacagaaggatgtcgcctgaaaagtccactgacttgcgggtttgatggatntgctcat

SEQ ID NO: 15332 - DNA, 647 bp, Glycine max
  unsure at all n locations
  Clone ID: jC-gmle01810085d08d1
gcaacaactgatgatttacattttggtacttctcgtgcaaaatatccttcataccattcagcaatttcctttacaacaatatccacctatctcgttgattatcagcgagcagttaataaggttatggacatcgcattggttgaactacatgagcttgaatttgcttcaatagattccttcttcacaaaatgccctggctctttaggttcatccaattgcacctcatcactccccaacaagagaaccactgaggtcattgtaggcctatcctctgggtattgttgcacgcacaagagcccaatatggatgcaacgtaacacttcagacgcaatgcatgaatcctccatgtttgggtcaactatttgtaaagccatatcttttttccacaatgtccacacatgatcaacaaggtgaacaatttgcttcccactagaacatctacttttcttcccacatataatctccaacagtaaaacaccaaagctgaagacgtcagattttatagaaaattgcccatcgatagcatattctgggtgcatgtacccatatgttccaacaattctattgggattccttcaaattctcttctnccaaagtttagccactcaaaatctgaaattttggaatcaagtatcattagtaaacat

SEQ ID NO: 15333 - DNA, 501 bp, Glycine max
  Clone ID: jC-gmle01810085d09a1
gtataagctttactggtggtgatactggcattgcaatttcaaagaaggcaggcatgattcctctgcaaatggagttgggaggaaaagatgcctgcattgtacttgaagatgctgacctggatttggttgctgcaaacattataaagggaggtttttcatacagtggtcagagatgcactgctgttaaggttgtcctggtaatggagtccgctgctgatgctttggttgagaaagtgaaggctaaggtggcaaaactaactgttggaccaccagaggatgactgtgatatcaccccggttgtgtcagaatcatgcgccaatttcattgaaggcctggtcttggatgctaaggagaaaggagcaacattctgtcaggagtacaaaagagaaggcaatctcatttggcctttgctactggacaatgttaggccagacatgagaattgcatgggaagagccatttggaccggttttaaccagtattaggatcaattcagttgaag

SEQ ID NO: 15334 - DNA, 529 bp, Glycine max
  Clone ID: jC-gmle01810085d09d1
gaagccaatgtttttccccctcatttcattgatttgacattcaatttaattggaacacaatgatattccttaatgataaggcacaagataaaattcagtttcatatcatcctaaatacgagtacaacaagtagtcacatatgaagtagctatgcgacatatcaatcaaactcgttattcatctctgtgattcccagctgcaaaagacaatgcaatgctgaactcacacggttgtacgttcactatgatttatggaacatgctatataatgatgttcccccatgcatgtgtgtattacactactagcccatagtataggaagggctgggtaagttgatcacagtcgttttgaccttggtcatcatgtttatgctgttggtaatcccttgagatccaatgccactgtcctttataccctgaaagggaaaatgatctggcccacgagctggggcagaatttatctgaactgttcccgtttccattgcatcactgatcattattgctctgatgacatcctttgtgaagacaca

SEQ ID NO: 15335 - DNA, 503 bp, Glycine max
  unsure at all n locations
  Clone ID: jC-gmle01810085d10a1
cttgcaaactagttctgtttttggaacatatcgcattacattacattagattggtggcaaagcaatggcatcgtcactacaagcagcagctactttcatgcaacccaccaagtttttgcagctaaagtctactcaggccatatctaaggcttttggtttggaacctgctggagttaataaggtcacatgctcccttcaggctgatcttaaggactaggctcacaagtgtgttgatgctaccaaaattgcaggctttgcccttgccacctctgctctcgttgtttctgatttgttctatgaaggatcttctggttcgtaagtggtaaccgtcaatctgattaaggatgccaatgacatatgttgtattagaattatcaaatgatactaatatcattaatcaaatnttgtcttataacatcccactaacaaaaactagcaactaatatttgtgaataaaacatacattggcttatgacaatattcagcatacgagctttatgatc

SEQ ID NO: 15336 - DNA, 449 bp, Glycine max
  Clone ID: jC-gmle01810085d10d1
aaaccttgaaattttaagcattgtaattgggggcccctaatggtcaaccatatgaccggactcctatggggctaagaaagttgggtcaggggatgatgatgcggcaacagcatggggttacaagaaaacaaaggcttgaaaaaaaaaaaacctaaaaaaaaccctttatgactcaagctgaacatcccagatgccctggattttggcatcctttggagcctttgctcccaaaatagtggcggacggttgaaaactttggaacacgccgataacctccccggtcttaggctggggcttggggaccctgtaggggaatccccccttggaggatgcggcccttttggggcgtcctttggcaagtgcccccccatatcgttttgcaccaacaggtgaaggcactgcttgtgaataacctgtgaaggcaccttttcccttggggtccaagaaag

SEQ ID NO: 15337 - DNA, 422 bp, Glycine max
  unsure at all n locations
  Clone ID: jC-gmle01810085d11a1
gaactgcggtagcccacatttctcggttcctccactttatattattgtttcaaaatatttaattctattattgacagtgtcttttctctctagtgtaatatcattgaagaatagttttaattgaacatgtttgatgctaaatctgcttaaattatttgccccctcaagtcatcatttggttacttttctttgttttggttgccaatgcttacttttatctttcttaatattcaggccaaatacgtatgtgttgatggagatggaacagttcctatagaatcggcaaaggtttgttaatttccgtatacacgagttttcttggtattgtgtcaatgaagtagcattagtgttggtagtaatgattgggttaaagcccaaaatgtattttgattaaacctaaatgcangctgatggtctcaatg

SEQ ID NO: 15338 - DNA, 501 bp, Glycine max
  Clone ID: jC-gmle01810085d11d1
ggcacagcaacatcaaatgaatatcattatatacaagaatgccagaacgatggtattcattttcataactgatacatacgcttcgcatatcatacacaaatcgggagggatatggcaccgcaacatcaaacgaatatcattatatacaagagatgtcaaccataatcaacaatatagtgagtgtttggtttgccctttacggctccagacatccattcacgtgttccaaattggcaaacgttaaagtaactatacagctggattggaaaaaaggtgggttaccatgaaccctagctttttccaaagacagaaagtattccctccacgttacgaatacttcaacagaatgtgattcatgaggcgtcaactgaaacagccaaagcattcagttgaacgtgttgtttaccctcattgtctgggtgaacaatgacagtagcatgcgcctcggaataagattgattggctccttcttgtgaaactgatatggagcacactttatct

SEQ ID NO: 15339 - DNA, 523 bp, Glycine max
  Clone ID: jC-gmle01810085d12a1
gtgcataggcacattgagacactccaagtctcggccacgatcccgaatttagctctccccacctagtcatccttcttcctcaacaccgcaaatatggatcaagcaaagttggcgcgcatgcaagcgtcagtgcgcattggcggcaagggtactccccgcaggaaggtcaagaaggtccacagggccgctggtaccgacgacaagaagctccagaccgcgttgaagaagctcaacgtccagcccatccaggccattgaggaggtcaacatgttcaagagcgacggaaacgtcatccacttctcggcacctaaggtccacgcctcagtacctgccaacaccttcgccatctacggacacggtgaggacaaggagctaacagagctcgtccccggcatcctcaaccagctcggcccagattcgctcgcatcgctacgcaaacttgccgagtcctaccagagcatgcagaaggagaagggtgaggactgcgagaagaaggacgacgacgacgaggacgatgatgaca

SEQ ID NO: 15340 - DNA, 465 bp, Glycine max
  Clone ID: jC-gmle01810085d12d1
ggggagcgtgctagaagattttcattcatatctggtccgagacataacgccggtccggtatctgaatgcaagacccaccgcgactgctgaccgtcacggtcgttgcatccatgaagtcctccatatcaatatacatgcggtaggctgtcattgcacatgactcctccctggctctttccagtcgttgtcaagctactttttgtgtaacttcttactcgacctcagccttggactcgaagttctcaccagcgacaagttcggggatgtcatcatcgtcctcgtcgtcgtcgaccttcttctcgccgtcctcacccttctccttctgcatgctctggtaggactcggcaagtttgcgtagcgatgcgagcgaatctgggccgagctggttgaggatgccggggacgagctctgttagctccttgtcctcaccgtgttcgtagatggcgaaggtgttggcaggtactg

SEQ ID NO: 15341 - DNA, 560 bp, Glycine max
  unsure at all n locations
  Clone ID: jC-gmle01810085e02a1
gaagaatttgaagaatatctcaggcatattattggtgatcagtgtactggtgaccgaaatgagatggctcaattgcctgagggcataactgaattgtggcatcatgacaaattgtctgtgcccttgatcaagtgcgaaaatgtaataattcttagtgcaacaaatgttccggagatggaaaagcagtgggactgttggattgaattagcaaaatctagtgacctactagcattgctggaaccatatgtatcaaagcatgtgacaactaatctttcagatgttgaaattgctcaacctctgtcaaagctttgccttgaatttccagatctttatattggctgttaccgcaatgccagatatggatctcttatagtaagcttcaaaggaaaggacctaacacgcattgaatcagctataaaagctttacaaangaaatttcaacccagtgctttcattgagacgaaatggatgatgttctaatgctatggtccatntcttttggatgccaacagaatgaaaacctttcatggcttgggtcatatcattctcatattacctac

SEQ ID NO: 15342 - DNA, 500 bp, Glycine max
  unsure at all n locations
  Clone ID: jC-gmle01810085e03a1
cacataccaaaccacgttggttctctcattttcaactttcaattcctgttccattttttacacaaaggaaaggaaaagagaagagcgaagagaagacgtagtggattttggtccgtgtatgcaacgaaggagccacgctcgaacacgatgcccctaaccaatcatcttaacataaaaacattttaacattaaaactcttttccatttctcactctcttctcttctcttacactctctcccaatccaatcaatggcttcttctctttccccttctccctcttccctcgaccaaacccttcgcgacgtcgacgactacgttctggaaaatgggtcagaaggtttgtcaagggacacacttcattatgtgtacgagcttgtgaagaatgggaatgtggcatttcgagagaacagaatggaagaggcaatcaacttttactcaagagccaataacatcaaatcaggtgatccaatcatnctcagcaatcgaagtgcagcttata

SEQ ID NO: 15343 - DNA, 560 bp, Glycine max
  Clone ID: jC-gmle01810085e04a1
atccaatgatttttacagagaataaatcacctatccaagtgggtaagcaattgaccatgatacaacatgaaagtgacaaggatgttctcccaggtgctacagatcaagttggtgaagagcttagtgatcatacgatttgtcagacagctaaagtagatttaaaaattcagtcaaatggacaaatttcttctaatcttggttcaaaatgttgttatgttggaagcattcaagattcaccagatccatcattaccagcaaatagtgaagacaacattagaactgtgaatgattccaatacagcatctgatgcatcagaacataatggaataagccttgaccctgtaatttgtgtggacaaaaatgatgccttttcacctcataatgtcgatgtgcttcagaatgagggtgctgtatgtgaggatgcagagtgcttgaagccagctgttgttgagattggcacctcaaatgatatgcgtgatattgtgaaagaggtaaaatgtaaaggtccagagcatgatatgaattctgtctcaacatctgatgactgtttgggtgaaagg

SEQ ID NO: 15344 - DNA, 477 bp, Glycine max
  Clone ID: jC-gmle01810085e05a1
tgaaattaaaaatgctatcaaggaggcttccttctccagcctcactgtgaggtcaacaacagagacatccacgctggatttggcctggcaatgatccaccaacagcaacacttccatctttactacctccttcaggatttgaaatccacgctgagattgtgatggaacttccaattgaacatggcttacttttggacaatcttttggatcttgcacatgccccttttacgcacacctcaacatttgctaagggatggagtgttcccagcttggtgaattttttgacacctgcatctggcctgcaaggatactgggatccctatcctatcgatatggagtttcgaccaccctgcatggtactatcaaccattggaatttcaaagcctgggagactggaaggacaaagtaccagggaatgttcaacgcacctgcaccaacttcatgtctgcttaccatcttcaaaacaaaaagacaaga

SEQ ID NO: 15345 - DNA, 507 bp, Glycine max
  unsure at all n locations
  Clone ID: jC-gmle01810085e06a1
atcggatgcaagttggaggagctggaatccgagttcgctccacaggaactcgtccttcgcttgctgctccgccgagacaacgccgcatgttcagcacctcgcaacctccaccttctcgattgaccagactaattttggtggcgagaggttgaagctgttttcggggtcatgttacctaccacatccggataaggaggacacaggtggagaggatgcacattttatttgcacagatgaacaagcaattggtgttgcagatggtgtaggtggctgggcagatgttggtgttaatgctggactctttgctcgagaactcatgtctcattctgctagagcaattgaagaggaacccaaaaattctattaatccggctagggttttagagaaggctcactcatgtacaaaggccaagggttcatcaacagcttgtatcattacccttactgacacnggactacatgccattaatttgggtgacagtgggatcatcgtggttagaagatgatg

SEQ ID NO: 15346 - DNA, 479 bp, Glycine max
  Clone ID: jC-gmle01810085e07a1
aggtcgtggagaactaagaagaaggaaatggcttcctcaatgatctcctccccagctgttaccaccgtcaaccgtgctggtgccggcatggttgctccattcaccggcctcaaatccatggctggcttccccacgaggaagaccaacaatgacattacctccattgctagcaacggtggaagagtacaatgcatgcaggtgtggccaccaattggcaagaagaagttcgagactctttcctacttgccagacctcgatgatgcccaattggcaaaggaagtcgaataccttctaaggaaaggatggattccttgcttggaattcgagttggagcacggtttcgtgtaccgtgagcacaacaggtcacctggatactatgatggacgctactggaccatgtggaagctgcctatgtttggctgcactgatgcttctcaagtgttgaaggagcttcagaggctaagactgcataccccaat

SEQ ID NO: 15347 - DNA, 403 bp, Glycine max
  Clone ID: jC-gmle01810085e07d1
aaccataaatacacaacccaaaaattccaaaggggcccgaaaaacgaaaccaaaaagccagggggaaaaaactcttaaaagcaaaaaaaaaggggaaaggaagaaaagccccacaaaaaaaggggggggggaaacaaagctttgaaaaaatttcaaagatcaaaaaacccggggggttggaggccaaaaaacttaacccccgaacttggaaaacggggaaaaacccaagggaacggaaaaaacccttgggggttgccgatttaccccctgggaacccctttaccccccggaaaggattagggcccccaaaaataggggggtaccacaagggtcaagaccccccaccattgtatccaagagaacctttggggaaaggggacccaaaaacgggccccaaaccgaa

SEQ ID NO: 15348 - DNA, 458 bp, Glycine max
  unsure at all n locations
  Clone ID: jC-gmle01810085e08a1
tgcaacttcaaatgtcagggcaggaaagaataatggtcgggcaccttcagctccggttaaaaaggttgaaaccttttggactatctgtaataggtgcaggacacattatgaatatctcagggtttatttgaatcacacccttttatgtccaaactgtaatgaagcttttgttgccgtagagaggggtccaccaccaaatgtttttaagccaccaaattggtcttctcatcaacggcatcagaattctcaacaccatgctggaagtaataatacaaattntcagtggggttctcactctagaatggctggttntggtagcacagatggatcaacatctgttgcagctcaagctgcaagtgttgtgcagcaggcaagtgagagagtaaggagggaaggttcttttcacatnagctgaaaacctatgaagaanaggangacagatgatnattgcattaatg

SEQ ID NO: 15349 - DNA, 452 bp, Glycine max
  Clone ID: jC-gmle01810085e08d1
agccaatgaatccaatggaattaatacccctgagtttttaacccaagacaaaatatgcccctccattttctggaagagtaaatcacccggctttgggcttccagaaatgccataactttagcttatttattttgcttgccaaacccataatgataactgccactgttttaccaaaaacaagttggaaaatttttccccaaaaacccaaaagttgggggacactttggtccctttttcacccaaaaagggccttttaaaagttttgtgcggcttaaaaaaatgaaatcttccatgcaaaaggattattcattggcccacattttggtttttcaagcccattgccttattaggccctccaacatttttatcctgtgaacttggatttataaggctgtaactggtttctaccctgcgataacatttttgtcctacaagggtttgaagccttcttt

SEQ ID NO: 15350 - DNA, 468 bp, Glycine max
  unsure at all n locations
  Clone ID: jC-gmle01810085e09a1
nnnnnngnnnnnnnnngggccnnngcttagaaagttgaagctttttttgttgaggtgaaagtgaaatggttggcaaggataatctgagggctgaggatttgaacttgtgctttaagaagcttatgatggtggccgggagtgggaacagtgagaaaggggtgaacttgaaggttggggtgatcaccgagtggaaggatattcctgtggagcttctgatgcaaattctgtcccttgtggatgatcagacggtgatcatagcttctggagtttgtcgtggatggagagatgctatttactttggccttgctcgtttatcactctcatggtgtagcaagaacatgaataacttggtcctatctcttgttcctaaattcgcaaaactgcaaactctaatcctacgtcaagacaagcctcaactagaggataatgcntgtgagactattgcaaaatgctgtcatgaactgcaga

SEQ ID NO: 15351 - DNA, 427 bp, Glycine max
  Clone ID: jC-gmle01810085e09d1
aaactcaaaatagcttactaggaacaagccagttttagcatccaaaatgtctcgagcttacacaattcggggattaaagcaaaccgagtttaagacataaagttgaagaaaagatgtacataatcagctagattcaagtcttttttatgcaggcatacatttacaagggggggggatttcacttttttcacttttttgagcccttttaaggggcacattctcgaagggggttcaacatcaaaagcatgagctttttaatgggcaggataagggaaaggggtgaatgcacggggcgcatggacaggacaggcacaatgcactgatgtcaagttgaggcagccactcatgatgagtgagtgcctccctgagcatgtgtggagagaagggaatgagtcacaaacagcttgaacagcaaatggggtgagtg

SEQ ID NO: 15352 - DNA, 433 bp, Glycine max
  unsure at all n locations
  Clone ID: jC-gmle01810085e10a1
cgctttttcactgccgtattgnnnnnttncnnggnnnnnnncnnnnnnnnnnnnnnnnnnnnnnnnnnnnnnnnnnnnnnnnnnnnnnnnnttttnnnnnnnnnnnnnnnnnnnnnnnnnnnnnnnnntngnnnncanattntggtgcttctggttggaacagctactcctctttaaccggaggagctagaggtccaatcctgcctgaggattatcatatcgtgtacaagctagcatactttgacacgggcacgtgtgccataacgtgttgtgcatgcctggtgagctagcgcaaagggttcctatgaggacacacatgacatatctcacctgacatgttcagatttacttcgagcccctggagtacagacgcctgtcagtgctcgttcctcaactgtcattcatgatcgtcgtagccctgagaccttgtagg

SEQ ID NO: 15353 - DNA, 393 bp, Glycine max
  Clone ID: jC-gmle01810085e10d1
gtgttgttaaattactttttataaactcaccttttggagcctaacatgctgggacaataaggacaaagtagtacaagttggatatacagaacaactccttgaaggcccaacatagtctgtgtcatatctaggctattgagaaacgctttaattcatgctaatcttgaagacatgcactcactacactgatttgaatagtgtaaaaaccgtgtacatgttcataactataatataatttagaagaataacaaaaccttgttagaaggatgaaacattatattaatttgaagcaaggagctgagggaactacatgagactaagagttcctaacatatttgttcttattatcatggagatggcacattttccttcgcctgtggagcaataccttgt

SEQ ID NO: 15354 - DNA, 401 bp, Glycine max
  Clone ID: jC-gmle01810085e11a1
ataatttgatgaccctcttcctatttcactccctcattctctcctcacacaatccacactcataacaaaaccctcccaaaaatcaaaattgaaattattaactttttttttctgttattctttctctccaccaccatggctactaccataacagagcaagacacctcatcacgtgccccacacgtgctcgattacgccaccactacatctgacgaggagacggaacaggacgaggaggaggagctggtgccggaggaaaacggcttcgggaacggcgtacggtggtttccggcggcgagcggttgcggagggcgacggagcggcggaggtgcgttgggtagggttcttgacccgagggcgaagtgggtccaggaatggaacagggttttcctgctagtgtg

SEQ ID NO: 15355 - DNA, 511 bp, Glycine max
  Clone ID: jC-gmle01810085e11d1
gaattcatgtaacaaaaagtaacatatattggtcttcctgtttatttttggaatataataaactgttaaacaacaagcaacgcatgttatgcagatcagcacatcatacaagtgccgcgttttaccttccaaaaataatgacaaaaatatctcttcaatattttccttcggtactatgcaaaaaaccaaaaaggaaaatgaagacacagtcatgcaaataaaaagtttgacacaaaaaattgacattttttggggtggtttctgcacgaagcacgtgcttaggctcgtgtagtgttccttgttaggtatgtaggtcaaatgctgttttatttttatttatttgttcaattagttacgaataccatcttatatacaatgtgagtgagaggacttaggatcgaatttccccttcaatgcaaaggggaaatcaaagatataggggcctgtggtagaggaagaataacaaacaggtcaaaataagaatccggtccgtgacttgagataaccgatg

SEQ ID NO: 15356 - DNA, 461 bp, Glycine max
  unsure at all n locations
  Clone ID: jC-gmle01810085e12a1
gtgagtggcgggccagagtatatgatgatgaagtgaggaagtggatttctggtgttggtgttgacagtgttgggaagaagcttgtgaactcaaaagatggacctccaacctttgagcagcccaagatgactctggagaagctcttgctgtatggtaacatgcttgtccaagaacaagagaatgtcaagagagtccaattggctgacaagtacttgaacgaggctgctcttggaaatgctaacgaggatgctattcagaggggaactttcttccagtcttgaattggaggcaaagcaaacttggcaagtaaatatttctgttcgtgaaggttgttgtactaatccaagtgctagaagttgtgatggaacttgcgtgtaacattcttagcattctcaatgtcttaggtgcanagagaagatgctaagttngagatgatcttactatatttttcatattggacc

SEQ ID NO: 15357 - DNA, 340 bp, Glycine max
  Clone ID: jC-gmle01810085e12d1
aaaaaaggaaaaggccccaaaaaaaataaaaggggccccaggaaccaaaaatttttggggaaaccgggccaactagaaaaaattaagggggaaattcaaaaataaacattttttttttggcccaaaaaaattgaaaaagctaaaaaggggcccccccaggtccttaaaaaattttgaccctgggggtgacacaaaacctttcaaaaagagaaaattttcctggcccaattggtttcgcccccaaatgaaaactggaaaaaagtcccccccggaaaacaccccccggtagaatttcaaaagcccacccaggaaaaatccttggaacccaatggggcttttt

SEQ ID NO: 15358 - DNA, 537 bp, Glycine max
  unsure at all n locations
  Clone ID: jC-gmle01810085f01a1
caaaaaccaaaaccaaaaccaaaccaaaactttatccatccatcccaaaaagtttgctttggttaatgcccctaacaaatttccatttttattttccctgtttgtgactagagagttgggttcccatgccggttgatttggacaacgcttccacagcttcaggggaagccgccagcgtctcttcctccggccaccaaacaaaacccgtcgtcccaaagaaaaaacgaaacctcccgggcatgccagatcccgaggcagaggtgattgctctatcgccgacggcgctcttggcaacaaaccgtttcgtgtgcgagatatgcaacaagggattccagagggaccagaatctgcagcttcaccggcggggccacaacctgccgtggaagctgcggcagaggtcaagcaaggaggtgcgaaagagagtgtacgtgtgccccgagcccacgtgcgtgcaccacgaccctgccagagctttaggggacttgacngngatcaagaagcacttctgcaggaagcacggcgagaagaatggaaatg

SEQ ID NO: 15359 - DNA, 507 bp, Glycine max
  Clone ID: jC-gmle01810085f02a1
gggtagtagtgaatatcagactctgcacattttcttctttcccttcttggctcatggccacatgataccaaccgtggacatggccaaattatttgccgaaaagggtgtgaaggccactataatcaccacacccctcaacgaacctttcatctacaacgccattggaaaatccaaaactaatggcaacaaaatccacatccaaaccatagagtttccttctgcagaggctggtttacttgatggctgtgaaaataccgagtcagtcccttccccagaattgttgaatccgttttttatggccacccatttcctccaagagccacttgagcagctactgcaaaagcaacttccagattgcattgttgctgatatgttcttcccatgggcaactgattccgccgccaaatttggaattcctaggctcgtcttccatgggactagtttcttctccttgtgtgttaccacgtgtatgccattctatgagcctcatgacaaatatgcttcttc

SEQ ID NO: 15360 - DNA, 544 bp, Glycine max
  unsure at all n locations
  Clone ID: jC-gmle01810085f03a1
gaaaaattactgcgccaggctaaagctccaagtatgtttttacaatccttcaaaaattttgtttctttgtgtgtgtatggtgatgataacttaattagtgttcatgaatatgtcaagccttactttagtggttctaaattgaaaagctttctagctggtcataatatcaccattactgatggtattgacaaaactagtgcaactttgcaatttagaaagttagcagattgtgattttctcaagagaaactttaagcagatgtctaatgttttgtgggtggctcctgaggataaggcgagtttatggtcacaacttcattatgtttcgtgtaataatctggaaatgcaagaagcttatcttgtcaatctcgtaaatgtgttacgagaattgtatttgcacagtccagaggaagctcgccaattgagaaggaaagctctctctcgtattgaatggctgcaaaaagctgatgtgcctaccatagcacagattgaagagttccattcgatgcataggatgatgaatgctncttgatcanatgataata

SEQ ID NO: 15361 - DNA, 502 bp, Glycine max
  Clone ID: jC-gmle01810085f04a1
gcatgtccaatcaaggacgtggtaaatgacacaattgccattgtttgagctatatctgatgtagtttgagcagaaggcaaatgaagtggtggcaatgctcccttgggtcaagaatgtaaaagttacaatgtctgcacaaccagctagacccatatatgccgagcaacttccagcaggtctacagacaatttcaaatattgtggctgtgtccagttgcaaggggggcgtgggaaaatcaactgtagcagtaaaccttgcttacactttggctgatatgggtgctagagttggtatatttgatgctgatgtttatggtccaagcttaccaactatggtctctcctgaaaaccgactgttagtaatgaatccagagaagaagaccataattccaactgaatacttgggagtgaagttgatctcttttggatttgctggacaaggacgtgcaataatgcgtggccccatggtttctggagtcattgatcaacttctgactactact

SEQ ID NO: 15362 - DNA, 475 bp, Glycine max
  Clone ID: jC-gmle01810085f05a1
agagagcaaggcaggaagtcagtgtttataaaacgacagtaggagcctggtctggtcggtgtggcactcaaacattgtttgttgtaggaagaggaatcttgagaaatggcaggggacagcaagagcaagattctgttcatcggagggactggttacatcggaaaattcatcgtggaagccagcgccaaagctggccacccaactttccttttggtgagggagtccactctctccaaccccgcaaaatcacccctcatcgacaatttcaaaggcctcggtgtcaatcttgttttaggagatctatacgatcaccaaagtttggtgagtgctataaagcaggtcgatgtggtaatttctactgtaggacacctgcagctagctgatcaagataagatcatttctgcaattaaagaagcaggaaatgttaagaagttctatccatctgagtttggaaatgatgtggaccggactcatg

SEQ ID NO: 15363 - DNA, 148 bp, Glycine max
  Clone ID: jC-gmle01810085f06a1
tctcgacgcagggcaacgacggtgccagtattgctgccgtctcgacaggtgctttcgtggtcgccttggctgctaccttcttctaggcatagtcttgaatgaacattcattgtaggatcgttaaaagaacgtaaggtgccctcatcgc

SEQ ID NO: 15364 - DNA, 159 bp, Glycine max
  Clone ID: jC-gmle01810085f06d1
gcgatgagggcaccttacgttcttttaacgatcctacaatgaatgttcattcaagactatgcctagaagaaggtagcagccaaggcgaccacgaaagcacctgtcgagacggcagcaatactggcaccgtcgttgccctgcgtcgaggtagtgggttcc

SEQ ID NO: 15365 - DNA, 500 bp, Glycine max
  Clone ID: jC-gmle01810085f07a1
ccaccatctcgcatacctcccccccatcgaatcccgggacaagcacgccgtatccccagtcttgtctccccgacccgccaccatggcgcccagcaaggacaccatgttccgctcggcggacatgtccttgacccagctgtacattgccaacgagattggccgtgaggtcgtttctggccttggagagcttggtgtcatggacttcagagatcttaatgccgacacgaccgccttccaacgtacttttacacaggagattcgccgcctcgataatgtggaacgacagctccgttactttcgcgcccagatggagaaatcggacattgcgatgcgctccatctacgacttcaacaaccccttcactgcgccatccgcttccgagatcgacgaactcgccgacaagagccagagcttggaacagagaatctcttcgttgaacgagagctacgagacgttgaagaagcgcgaggtggagctcacagagtggcaatgggttctga

SEQ ID NO: 15366 - DNA, 440 bp, Glycine max
  Clone ID: jC-gmle01810085f07d1
ggcgagggaacaatggccatttttatatacaaactggaccattttactcggagggaactttagcaaacttatttatttttacaccagcccccattttttaaagcccccccaaaagaaaccccaggaaaacggtttttttcctcaaaggaacctacttaaaagggtccttcttaaaaaaccccttgaaactaaatgggtaaaacgccccaccattaccaaagaaaagcttactcattggcttcacccaggggaatcgaaaactgggcaaaatggggcttgaacccttcataacacacaaaaccgccccagtcaacgggaaccaaaagtaaaagaccaaccccttgatgaaagccccgggtacgcctttaaaagggaacgcatttttaataggcatttcccccaagacaagggacaaacctttatgggcgaatgacaagggc

SEQ ID NO: 15367 - DNA, 504 bp, Glycine max
  Clone ID: jC-gmle01810085f08a1
gctcgaggtggacaagtcttgtactagttgctcgtttttaaattctcatcatcaagattcctgctacctactcccctagttgtaaaattcatttcagcaactagaagatggctatctgattataaaagttattcttttttcacgatctataaataatttcaccctaacccgcagaagattaggagtagaatggcgaaggagatagtgaaagagcttcttcctctaattcgagtgtacaaggatggcagcgtggagcgtcttctaagctctgaaaacgtggcagcctcccctgaagatccccaaactggagtctcatccaaagacatagtcatcgcagacaacccctacgtctccgctcgcattttccttcccaaatcccaccacactaacaacaaactccccatcttcctctacttccacggtggcgccttttgcgtcgaatcccgcttctcctttttcgtccaccgctatctcaacatcttggcctcagaagccaacataata

SEQ ID NO: 15368 - DNA, 528 bp, Glycine max
  Clone ID: jC-gmle01810085f08d1
gaaaattgaaatattaattcaggagtgtacggcatccttttgttgaataatgaccacatacagtgataggtattgataatggtgacaaacaaaaacaaaaacaaaaacaacgagggagagggaattattgtgtttttgttgaataataactaaaacataaaattcaatctaaaactggagtagtagacaagacaggtgaaggcacgcacgatttattatgtttggaatctctcatgacaagccatccattaaaccagaaaagaagccaagcgtttgatcatggctttagcaagatgagtctcaggcttgaagagctggaaagcatgctcctcattgccagcatcaaagagttgaagttcaccttggcagccactttgctcaacggtgtggtggtagagaatatctctgtctctgaactcgtctttgccagtgatagtaacgagcaacttatagcatgcaagagtggtcaaagagggtgccccaggaacacaggggttgatccaggggttatcgattccactcggggca

SEQ ID NO: 15369 - DNA, 410 bp, Glycine max
  unsure at all n locations
  Clone ID: jC-gmle01810085f09a1
attgttnnntnnntnnnnnnnnnnnnnnnnnnnnnnnnnnnnnnnnnnnnnnnnnnnnnnnnnnnnnnnnnnnnnnnnnnnnnnnnnnnnnnnnnnnnnnnnnnnnnnnnntttnnnnnnnnnnantgnnngagctgtcaacagagctcttttgaacctgaatgggtctggacctggggttttagctcccagttcatccttctttgggagcagcttgaagaaggttattggctcaagggtccccaacacatagatttcctctggaagctttaagattgttgctgtagaagagaagattgagattgaagagacccagcagaccgacatggacagatggaagggtcttgcctatgatatctcagacgaccaacaggacatcacaagaggaaagggtttggttgactcccttt

SEQ ID NO: 15370 - DNA, 543 bp, Glycine max
  Clone ID: jC-gmle01810085f09d1
aggacaaaaggaaaaggcaccaaattcaatttaagtggacactttaactcaaaattatagaggaagacagtccaatatgaaaaatatagtaaaatcatctcaaacttggcatcttctctttgcacctaagacattgagaattctaagaatgttacacgcaagtcccatcacaacttctagcacttggatcagcacaaccttcaggaacagaaatatttacttgccaagtttgctttgcctccaattcaagattggaagaaagttcccctgttaatagcatcctcgttagcatttccaagtgcagcctcgttcaagtacttgtcagccaattggactctcttgacattctcttgttcttggacaagcatgttaccatacgtcaagagcttctccagagtcatcttgggctgctcaaaggttggaggtccatcttttgagttcacaagcttcttcccaatgccgtcaacaccaacaccagaaatccacttcctcacttcgtcatcatatactctggctctcagtgcaccaaagaaatcaatggat

SEQ ID NO: 15371 - DNA, 525 bp, Glycine max
  unsure at all n locations
  Clone ID: jC-gmle01810085f10a1
ttttcttttcttctatttttttttttttttttttttattatttcttttttttatttcttttattttttttattttttttttttttttttctatcttattttttctgtatccnnnnnnttnnnnnnnnncnnnnnnnnnnnnnnnnnnnnnntnntntttntntttgttcctaacacacttnaacttcactcatttccttttagtgtctcttgagtcttgaagttccttattagataagatttatgcaaatcccttcataaaatctccaatatccaataattgctccaaacccatatccatttcacttcatattccttcaacatctcgtcacctgaaccgaaccatgagagattctcataactacatcgttgcaacagaattctcaacgacaacaaactactaggatgttccgtcctgcgtcgttttgttcgtgaagtactagttgcgaatgttgctgggaatttgcgcattctctaaggtgtaccactctactaacgtttacgacactcaccatatcgtttcgtt

SEQ ID NO: 15372 - DNA, 567 bp, Glycine max
  Clone ID: jC-gmle01810085f10d1
atgaaaaagagtccaaaagtatctttaaattctagtagtattaaacatgttcatttctttactatatacttatataagttccttaaaacattacctaaaccttcaccaatccataaaaacaatggtttacggttgttacccaaaacaaaaaacatagataccaaattatattctatagaaatcaccgagagaccggctcttccaattcacttgccaattcaagaagcagtggccgcagtttatctttccaaaactgccccccaaacccccctcccttttcacttcttttcatttcaaccaccaccagctcatcggttaattggtaaaccacaacaataccaatcaaattaccatcctgcccttctagctttgctccaccaccattcttctcccttctcaccaccacccttccctcctccgtcattgcctccactctctccataattttctctggcaccactgtcgaaacaacccgttcaaccgaattcgatccggtcgggtcctcgaaaagacccgacatatccaacccggtcgagaaagaaataagtcgaaagcattcaaagactt

SEQ ID NO: 15373 - DNA, 540 bp, Glycine max
  Clone ID: jC-gmle01810085f11a1
cctagggctcgagcttccaccttaacccttctggccgttttgtcattggtggccctcatggtgatgctggtctcactggaagaaagatcatcattgatacctatggtgggtggggtgctcatggtggaggtgccttttcagggaaggaccctaccaaggttgacagaagtggtgcctatatcgtgaggcaggctgcaaagagtgttgtggcaaatggccttgccagaaggtgcattgtccaagtttcctatgccattggtgtccctgagcccttgtcagtgtttgtggacacttatggaactgggaagattcctgacaaggagattcttcaaattgtgaaggagaatttcgacttcagacctggaatgatcaccattaacttggaccttaagaggggtggccataggttcctcaagacagctgcttatggacactttggaagggatgaccctgacttcacctgggaagttgtgaagccactcaagtctgagaagcctcaagcttaagaatgttgtgaagtaatcactcccttcaatggat

SEQ ID NO: 15374 - DNA, 380 bp, Glycine max
  Clone ID: jC-gmle01810085f11d1
ggcaaaaaaaggggacaaaaatttgaaaaaattccccttggataaaaaagggaaccttgggtaccccaaaaaaaaagggggggtaaaagggaaaaagggaaaaaaaaaacagttaaagatttggggaaaagccatttgccccaagaaggaagcaataagagaactggaacccccaaatttttcatccccccctagcaagaaatcccttggggggggggattaactttccaacaatttaaaacttgggggttttaaaacctgggggggttcaaaacttccccggggaaagcgggggcatccctttcaaaggggcccaaatccggttgtttggggaacctatggccccccccttaaagggcccagtctaaggggaaaattcc

SEQ ID NO: 15375 - DNA, 347 bp, Glycine max
  Clone ID: jC-gmle01810085f12a1
tgcaattgaagttaaaagccttagccttccttacaacttctctcacgaacgactcactatccatggctgcttggctctatacatgggagatgcaagctctgagcccttctgaacctgaatggcgctggatctggacctatagctctcagctccgcctggattgatgaccacttgagcaattgctctgcctgatgggtccccatcggcagagttggcagtggaagcttacctaatgcacgtcgaaacgatatccgagacatgtgcgataccccacagacctacaaggacatatggactgcatctgcctatgatgtctaaggctaccctcacgacatcacacgaggcaa

SEQ ID NO: 15376 - DNA, 452 bp, Glycine max
  Clone ID: jC-gmle01810085f12d1
tggccgtccttttttttttttttttaagatacataattttcgttgaataatacccataagtgaaccgttgcattaaatttgaaaaatagccaatacatccacattaaaacataactatagatcatctaagtgccagcatcgaatattgactggagctgcattcctttcagatagaggcaaggtacctgctccagtctcttctacatgcactagcaatatactatcagactcaacacgatccaaacaagctcgaatacaaatgaggctgcatgccattgctgggctggcaaaagtttgacagtgaagagcctcgatactagaatttccaaggacgaccttcttcaagaccgggatagccaattggcctattagaggtctggctttttaccactaccccgtgacgctatatggtgaaactatgaatgacccattaggggtggtcaaagggagca

SEQ ID NO: 15377 - DNA, 487 bp, Glycine max
  Clone ID: jC-gmle01810085g01a1
caaggatgcttctatttcagctcttccagttgatgagttgattgagaaggctgatggatttgcaggagtatttcctgaacacaaatatgaaattgttaagaggctgcaagagaggaaacatatatgtggaatgacgggagatggtgtaaacgatgcccctgcattaaagaaagcagatattggaattgctgttgctgatgctacagatgctgctagaagtgcttctgatattgtcctcactgaacctggtctgagtgtcattattagtgcagtgctcaccagcagggcaattttccagaggatgaagaactatactatctatgctgtctcgatcaccattcgtattgtgtttggtttcttgtttattgcgttgatctggaagtttgattttgcacccttcatggttttgattattgccatactcaatgatggtaccattatgactatatccaaggatagagtgaaaccatcttcacttcctgatagc

SEQ ID NO: 15378 - DNA, 510 bp, Glycine max
  unsure at all n locations
  Clone ID: jC-gmle01810085g02a1
ctcgagccgaatcggctcgagtgctccctcagaagcgaagaagaagccacagagaaccagtctcctactctctctcacccacaagaaaaatggcatctcacatcgttggatacccccgcatgggtcccaagagagagctcaagttcgctctcgagtctttctgggatggcaagagcagcgccgaggatttgcagaaggtggctgctgatctcaggtcatccatctggaagcagatggctggtgctgggatcaagtacatccccagcaacactttctcgttctatgaccagctgctcgacgccaccgccaccctcggtgccgtcccccccaggtacggctggaccggcggcgagattggattcgacacctacttctccatggccagaggtaatgctaccgtgcctgctatggagatgaccaagtggttcgacaccaactaccactttattgaccctgaatngggccctgatgtgaacttcacctatgcttctcacaaggcttgtgatgaat

SEQ ID NO: 15379 - DNA, 458 bp, Glycine max
  Clone ID: jC-gmle01810085g03a1
caccgttgatctctctttcaacaacttaaccggcgaagttcctgactccgctgtattcacgaatcagaattcgaagtctttctctggcaacgttaatctgtgtggagaaatgacaaagaacccatgtcctattccttcttcgccgtcgtcggaaccgaaagcttccgctcctatttctcctcctgcaatcgccgcaatcccgaagaatttagacgattctccgctggcgccgacggggcataaacagagtggtctcaaacaaggaacgatcataggaatcgtggtgggagacgtcgtcggcgtcggaatcttggccgtgctgcttgtctacgtgtaccggttgaagaaaaagaaagaggaggagggttcaaagacgaacaacgaagcggctataacaaggagcagaagcgagagttcttcgtcgacaacctcggagtcaagaggcttcacgaggtggt

SEQ ID NO: 15380 - DNA, 552 bp, Glycine max
  Clone ID: jC-gmle01810085g04a1
gacgaggagaagaggaacaagttgataaggtggatgattcagtcgttggagaagagcgtgagaagccttgacttctctccgacaggcatatcgacaatagtgcaggtgaacgaccttaagaactctcctgggcttggcaagagggagctgaggcaggccaccaatcaggtccttcaattgtttcaggataactaccctgagtttgtggccaagcagatattcatcaatgttccctggtggtaccttgccttttctaggatgatcagccccttcttcacacagaggaccaagagcaaatttctctttgctggcccatccaaatctgctcacacccttttccaatatatagctccggagctggtgccggttcaatatggtggacttagccgagaggctgaacaggaattcaccacttctgatcctgtcactgaagttacaatcaaacccgcgactaagcatgctgttgagttccctgtttctgagaaaagtcatgctgattgggaaatccgagtggtgggcttggatgtcaactacggtgctgaatttgttccc

SEQ ID NO: 15381 - DNA, 474 bp, Glycine max
  Clone ID: jC-gmle01810085g05a1
gcgccgtggagttcgttttggtgaggattctgattaaagagttttcttttattctttcggagaagcgtctctgtctctctgttgcggtggattcttaaaatttgctaaatcttcttttttctttccctaatctctattagtatcatcctgcgtgtggctagtgattggaatgcttagatttatattttttgttaccaaacagagacggatctctacctttctatttcttttgcagtagcatcaccgtatcatcagcttcagcttgctttcaccaagacggctttactatttggtgtgttccatgtcacaaaaaacgaaaggagatattccttttacccactcctcgacagggaagatctgaagcagcgctagcagcacacgtcctctaatggacgccgactcctctggagacgaagtggatattaaaacaagataaccatgtactatcacaacgcaaagagaacgattgacaga

SEQ ID NO: 15382 - DNA, 519 bp, Glycine max
  Clone ID: jC-gmle01810085g06d1
aaagaagaaaacatccattcaaccttattctaggaacaatacacataacactttacaaaaatttggctttctaatcaccttaagatacaacaattggaccatgatgaggggctcatttttccaactcagatgaatattttagtccttacaacatgggtgaagaataggcatacttgggatgcaggcaactaaaagagctgaccgtgcaaccttcctgatcaagtattgcgttggccatttaatggggatagttaacgactgaaaaagccaggtccagctcgagaaagaagctcctcttcaggatccttacccatctttatcatatgttcgaaagcatatgaaccaattctggaagtttcgagcacgcgggttccatcaggggaagcaactaatcctttaaacaagcaattgccatcctggtttttggtagcataacctgcaataggagtgccgcaagatccttctaacttttcaaggaaggctcttttacaggaaactgctagccttgttcttcatgat

SEQ ID NO: 15383 - DNA, 443 bp, Glycine max
  unsure at all n locations
  Clone ID: jC-gmle01810085g07a1
ggaaccctcataacacaaagcacaaagcaaagctcatcatcgttaatcagccccaagagaaagatttgttggagggaaatttttcctttgatattaaatctcgctctagattggaaaaagtttcctctacaaaagcacaatttgttagtggaaaaaccttcagatatgatataattggtgctggttcacattcttcagaagaatttcctgacaaggaagatcaangaaaacccnaaaagatggataccagattgagacaaagaatagatcctcaatcaatgaagttcaggctcagatgggaacannnattgttaaaatggctcttgatgatgttgaactcctaaaggttncatgttgggatcttaaatttctcaatctaaaattgcacttnccaaaaacacagttggaggaaccattctgcgtagtgatctattggcaaattt

SEQ ID NO: 15384 - DNA, 543 bp, Glycine max
  Clone ID: jC-gmle01810085g07d1
aaaataacacacacttcacacatcattacgacaattaaaagaggtgtggaaattttcaaatagacagagcatactcaacaagagggtcatgtctaatttcctttattgaattaaacaaacgaacaaacgaaagaaaacacaaattccagatcatgcagaggattccgcattttcagaagatctggcagtagcctgtggaacagaaaaagctggcataagagtattaccagcaatttcaaaatcttgagaaattcccaagagaatatcaaaaactgtagactgtttgggattgtcaataaggaaactcaagtgccatgaagtttgatttgcccactcagaactccacatttcaaaaccattattaggaccacatacctctattgggaagatcaattcccaggaatgtggttccgattttgtccacttacatgcatcgaaatgctctgtactggtgctgtttgttaaaaacacttgtaccaatgaggcccaatcactccttttgactgctgcattcccagacatcacaattttaaccattaaaca

SEQ ID NO: 15385 - DNA, 479 bp, Glycine max
  Clone ID: jC-gmle01810085g08a1
aaaaatacttgctctacctctgccactttctgagtacaatacaacactgccatggctgcctcagtctccactattggagctgtcaacagagctccactgagcttgaacagctctgaagctggagattcggttcccagttcagccttctttggcacaagcttgaagaaggttactgcctcaagggtccctaacgtcaagatttcttctggaagtttcaaaatcgttgcggcggagaaagagattgatgagcaacaacagacaaacaaggacagatggaaaggtcttgcctatgatatttcagatgaccagcaagacatcacaagaggaaagggtatggttgattccctcttccaagctccacaggagactggaactcactatgcagtcatgagctcttttgagtaccttagcactggacttaaacagtataacttggataacaacatggacggtttttacattgctcctgcttttatgga

SEQ ID NO: 15386 - DNA, 479 bp, Glycine max
  Clone ID: jC-gmle01810085g08d1
gtagtaaaacaccttctattatttgaagccacaaagttcagcagaaccacaatgaacaccaggaaatattaattgattatctcaagtgttttttttagtagtgagacaatgtaactcaaaattataaaggataacaatccaatatgaacaagataaattatttgattatatcaagtcatagcttctcttcaagtggagaatgcttaggttctcagggtgtgtataagcaggttccatcatcacttcttgcagttgggtcgaagtttgaggcatttggatcagtacaaccttcaggaacgggaatttttacttgctgggctgctttgccatagaaagttcctcttttgatggcatcctgattagcatcaccaagagcagcctcgttcaagtacttgtctgccagttgtactctcttcacattctcttgttcttggacaagcatgttaccatactccaagagcttgctcaaagtcatcttc

SEQ ID NO: 15387 - DNA, 78 bp, Glycine max
  Clone ID: jC-gmle01810085g09a1
ttatttttttttttttttttttttctttttgtttttttcttctttttttttttttttttttttttttttttttttttt

SEQ ID NO: 15388 - DNA, 498 bp, Glycine max
  unsure at all n locations
  Clone ID: jC-gmle01810085g09d1
atctagagaggagttggtatatcgcgggtattctacagaaaaggaaccctagctgacgaagaaggaagacgttcatcgcgcgcacaaagtatgctttatgtaatgcccccccttcccccccgcagaaacaccgtcgccaatgtacagcagcacccgcagatgcagcgactgtgagtagccgctgcagcccaagacgcctgtttccctccgccctaggtatctcgctcccaacaaacaaacaaacgccgcgcttgcgaagggcaagcgatgaagttaaagcaaaaaattgttgaagtgcccggccgcaccgtgggaggtggggggcgttttgaaggttcttttggccgttacgaagaatgggaataaagggtgtatgttntgaagccggcgacgggatgaccgtctagcgaaagaagtggaaacacacagacagcgatgcaaatagctcaagcagccatctcaccaagctgcctgccaccaccgacaagttctaggatc

SEQ ID NO: 15389 - DNA, 503 bp, Glycine max
  unsure at all n locations
  Clone ID: jC-gmle01810085g10a1
attcgttgtttactttcttcctnnnnnnnntnnnnnnnnnnnnncnnnnnnnnnnnnnnnnnnnnnnnnnnnnnnnnnnnnnnnnnnnnnnnnnnnnnnnnnnnnnnnnnnnnnnnnnnnnngggannnngnnatncnctggcatgggccacctaatcccaatgatcgagttcgcaaagcgagtggtgtgctaccataacctggcggtgagcttcgtgatccccactgactgcccaccttcaaaagcccaaaaggcagttctggaggcccttccggactcaatttcccacaccttcctccctccggtcaatctctccgacttcccgccggacaccaaaatcgaaaccctgatctcccacaccgtcctccgctcccttccttccctccgccaagcattccactccctctccgccacaaacaccctctccgccgtcgtcgtagacctcttcttcaccgacgccttcgacgtcgccgccgaattcaatgccttcccctacgtcttc

SEQ ID NO: 15390 - DNA, 494 bp, Glycine max
  Clone ID: jC-gmle01810085g10d1
acgtacacttacccaattattttattaatgtcatgtatgccaagtgacatttgataagttaagtgcagataattgaaaggaagaagctactagttgaatttgtgggtccacttgagagccaaattggagatgttggtggtggaggaaccatgttgagcgagagccttagccgcagcctccttgatatccttgattcggtaacgaagcttcttcccttgttcaccttccatgaggcacttgactaggctggctatctcctgtctctccaccaagccactctctgcaacgttgggcctcagcgccaccttgacgtcatgcgtgagcataaaggcgttggtcctctgctccgcgaacagaggccaggctatgaaaggcacaccgttcaccacgctctccagaatagagttccagccgcagtgggtcaagaacccacccgtggatggatggcccaatacctgaggctgcggagcccaagactgaaccaaaaaccctct

SEQ ID NO: 15391 - DNA, 425 bp, Glycine max
  Clone ID: jC-gmle01810085g11a1
gtcagaaattgtgcttacacttttactgtcattgaggtttatcagtcttgtttttgatgaggttcggaacattgctttggggattgtatctcgtaggctaaattggaagcagctgactgttatggagacaattgatattttctttaactacttccgtcgcatcttcaaaaatattttcagccatgcagagcaaatttctcaggctatgatagtcagaggttttaaaggggactgtggcactcataaaatttactttttgtcagaatcatcttttgggatggtagatattatatgcttgctgagcttgacactattaataggagctgctctcctgtctgagtactaccttgtctaacaatatatgccactcctgcatctggcaaggcagattgcagcaaattatgcagtttttcccatgaagatgt

SEQ ID NO: 15392 - DNA, 552 bp, Glycine max
  Clone ID: jC-gmle01810085g11d1
aacgaacgcacatgtataaggaatttggtttatctctacaagagggagtctatacgaactgtagcacgaatgatcacgatatcatgatcaatagctcaataagtttgaccgttcagaagccatccaaattttcctcacttcaactttcgatccttttcatattgccaccttgtatcttcatagggcccttgacatcttcatgggaaaaactgcataatttgctgcaatctgccttgccagatgcaggagtggcatatattgttagacaaggtagtactcagacaggagagcagctcctattaaaagtgtcaagcacagcaagcatataatatctaccatcccaaaagatgattctgacaaaaagtaaattttatgagtgccacagtcccctttaaaacctctgactatcatagcctgagaaatttgctctgcatggctgaaaatatttttgaagatgcgacggaagtagttaaagaaaatatcaattgtctccataacagtcagctgcttccaatttagcctacgagatacaatccccaaagcaatgttccg

SEQ ID NO: 15393 - DNA, 519 bp, Glycine max
  unsure at all n locations
  Clone ID: jC-gmle01810085g12a1
atccaaccccaggagacttattggcatcgtcactacaagcagcagctactttcatgcaacccaccaagtttttgcagctaaagtctactcaggccatatctaaggcttttggtttggaacctgctggagttaataaggtcacatgctcccttcaggctgatcttaaggacttggctcacaagtgtgttgatgctaccaaaattgcaggctttgcccttgccacctctgctctcgttgtttctggggcaagtgctgaaggagtaccaaagcggctaacctttgacgaaatccagagcaagacctacttggaagtgaaggggacaggaacagcaaaccagtgtccaacaattgatggtggattggagtcatttgccttcaagcaagggaaatacaatgccaagaagttctgccttgagccaacttcattcacagtgaaggcagagggtgtggccaagaacgctccccctgagttccaaaacacaaagctcatgacacgtttgacctacactctngatgaga

SEQ ID NO: 15394 - DNA, 385 bp, Glycine max
  Clone ID: jC-gmle01810085g12d1
gtcattaataatttaaacctagaaagataaaaacgaagaactggaagcccaagaaatccaacaagaaggaagagcgcaaaaggtggagcgaacgtaaggagctagaaaaagatggcaaaggaaggaagggggggggagaaaaagaaacaaaagagaaaagaatagcacgggaaggagctgagggatgagagggattgaaggcaacggaaggcgaggctaagacaaaagaagccggggaccagaaaaaaaaggacgcaagcggaccatttaggaaaaaaaggaaagtcccgacaggcgaagacttggaaccgatgaggcggacggcagtaaaacgaagggccgatgagaccaaaagcgtgaggacccggctacaaatgggcacaag

SEQ ID NO: 15395 - DNA, 439 bp, Glycine max
  Clone ID: jC-gmle01810085h01a1
caagttcatggtgtttgcttgctcagactcaagggtgtgcccatctcatgtgctagatttccaaccaggagaggcctttgtggtcagaaatgttgccaacattgtcccaccatatgaccagtcaaaatacgctggaactggggctgcagttgagtatgctgttttgcatcttaaggtgtcggagattgtggtcattggacacagtgcttgtggtggtattaaggggcttctgtctttcccatatgatggaacctactctactgattttattgaggagtgggtcaaaattggcttgcctgcaaaggcaaaggtgaagacacagcatggggatgccccttttgctgagttgggctcacactgtgagaaggaatctgtgaatgtttcccttggaaacctgctaacttacccatttgttagagatggcttggttgacaaaaca

SEQ ID NO: 15396 - DNA, 480 bp, Glycine max
  Clone ID: jC-gmle01810085h02a1
cttagtgggaagccttgctaccttgctttgatttttgttgttaattaacgatcttcaacaatcttttatgtaaacataaaatcaccaccagctatacctcttgaaattttttgttatggtatagattctaatcattctggggcgatcagtgtggtcgtgtaatacatgtactcacctcacataatgagataaggctttcttgttgatgttgtacagattcttgtcacatatgaaagcttataactataggtgtcctgtctctctctctctctctctctctcttttggggtttctcaggacaatattggacttattgagagagtagtcatggaggggatggctcccaattcatgtgcaaggccagttctagagaaaaaaacaaggccacaagagcaactgaattgtccaaggtgcaattcaaccaacacagagttctgttattacaacaactacagtctcacacagccaagatacttctgc

SEQ ID NO: 15397 - DNA, 578 bp, Glycine max
  unsure at all n locations
  Clone ID: jC-gmle01810085h03a1
ctcgtcggagactttctccggctgccctccgaaactgataacgacgacaacttcaagggcacccggtgggccgtcctcctcgccggttccaatggttactggaattacagacatcaggctgatgtttgtcacgcctatcaaatattgaggaaaggtggtctgaaagaagaaaatattattgtttttatgtatgatgacattgcattcaatggggaaaacccaaggcctggagtcatcattaacaaaccagatggaggtgatgtttataaaggagttccaaaggattacaccggcgaagatgttactgttgataacttttttgctgctttacttggaaataagtcagcactgactggtggcagtgggaaggttgtggacagtggtcctgatgatcatatatttgtatactatactgaccatggaggtcctggggtgctcgggatgcctgctggtccttacttatacgcggatgatctgattgaagtcttgaagaataagcatgcttctggaacatantaaaacctagtattttatctgggagcatgtgaatctggagtatctttgagggctttcttctg

SEQ ID NO: 15398 - DNA, 525 bp, Glycine max
  Clone ID: jC-gmle01810085h04a1
ctcaacagaaaccattttctaatagtgtcataggttcatcccccaatgttttactcccacaagcatcacaactaaaggctgaagaggcaacttctgtttctgatttgcagaggcagattgttccatctaagtctcagctatcatcagagtatgggatatctcagaatcatgcctcttctaacagcaaagattttcaacatgaagctggaaaaatgaacttcttatcccctctatctattcaagtgctgcaagaaattgggaggcggtgtaactctaaggttgaatttaagtctattttaagcaccagcaaagacttgcagttttcagtggaggtactattcactggtgagaaaataggtgttggtatgggtaggacaaggaaggatgctcaacaacaagctgcagagaatgctcttcgtagtttagcagagaagtatgtggcacatgtggagcctcaatgtagagctgtcgataagaatttgacatgcttctcttgatgtgacaatggttctttgtggatgtgat

SEQ ID NO: 15399 - DNA, 498 bp, Glycine max
  Clone ID: jC-gmle01810085h05a1
gagaaaaaagaaaaagaacaaagaacaaataaaccttttttttttataaaaaaagaaagaaaaggaaataaagttttttgttttttcgatgaaccagaagttcatcggaaagccgccggcgacggtggacctggatcggatgccggagcgtgggtcccaccaccggcgttcccactccgacacctccttccgcttcgccgcgaacttcgacgaccttctcctcttcgacctctccgacttcgacatctccggcctcccgttgccgctccctctgccatctccggtctccgccggcttggttccgatgtccgtcgactccgacgagtccggcaaacagtcgaggccggccggtgcgtccggcggtggtcacctgcggagtctgtctgtggattctgacttcttcgacgggctcgggttcggcggcgactagagaggcgccgggaaaggaagcggccgcgagcggatggtggagcaccaccggcacaggaactcgattga

SEQ ID NO: 15400 - DNA, 529 bp, Glycine max
  Clone ID: jC-gmle01810085h06a1
tcggctcgagcgcaagcaaaaagaaagattgctgcatcagaggagttgtaaattaagagcatggctgcacaagctcttgtatcatcatcttctcttaccttctcagcggaggctgcaagacaaagtcttggaccaagatcactccaatctccatttggcttctccagaaaagcctcctttcttgttaaggcagctgctaccccccctgtcaagcaaggatcagacagacctttgtggtttgcatcaaagcaaagtctttcttacttggatggcagccttccgggtgactatggatttgaccctctgggactttcagaccctgaaggaacaggagggttcattgagccgaaatggctagcatatggtgagataatcaatggtcgttatgcaatgttgggtgcagttggtgcaatagcacctgaaattctaggcaaggctggtctgatccctcaggagacagcactcccatggttcagaacgggtgtgttcccacctgcaggaaacctacactactggggcagactctaca

SEQ ID NO: 15401 - DNA, 553 bp, Glycine max
  Clone ID: jC-gmle01810085h06d1
gtcgaatgtttctagttgttttacatgtcatttcttacagcgccacaccaaggaacaaaatgtccacatgatatagaaaggtagaaaggtagttgagttttggcaacgtaaagaatatgtgaaataacatataatacattcagtggaacttgagactggtcaagatgttgttgtgcacggggtcagccaaatgatctaggaggttttggtatgggccaacacctgtgacaagagcttgaacaaagtaacccaagattgccaacatagccaaccttccattcttcacttccttgagcttcaaatccttcaaggacttctcatccttaccaaagcctagtggattgaagaaaggtcctcctggataagctggctcaccagaaccttcaagacccttctctagtcctaggaagtattgtttgcccatagagcctggtttggcccagtcttggaatcttctgtgctctgcaaatcccatcagtgccatctcaaacacgaacagtgtgtaagagtctgcccagtagttgtaggttcctgcaagtgggaacacacccgt

SEQ ID NO: 15402 - DNA, 482 bp, Glycine max
  unsure at all n locations
  Clone ID: jC-gmle01810085h07a1
cgttttccgcttcagttttctcgggaaaatcatggtgaaaggtccaggcctctactctgacattggcaagagagctcgcgatcttctgttcaaggattatcagaatgaccacaagttcaccatcaccacttacacttccaccggagtggaaatcacttcaactggagtcaggaaaggtgagatatatttggccgatgtcagcactaaggtgaagaacaagaacatcacaactgatgtcaaagtggacactaactcaaatctgcgtacaatcattactgtggatgaacctgcccctggactcaagacaatttttagctttaattntccagatcagaaatctggcaaggtagaactccagtaccagcatgagtatgctggaatcagcaccagcattggattgacagcaaatcctgttggtaacttctctggtgtggttggaaataatttggttgcccgtgggacagatctttcatttgatacta

SEQ ID NO: 15403 - DNA, 502 bp, Glycine max
  Clone ID: jC-gmle01810085h07d1
aaatcaaagcttcgatatacaccctaaaacaaccaaattgctgggcaatcaccttccatgctcaaaaagcttactcaaagatgcacctaaatcaatggctttcgggtggatctgttgaataagtacaaattcaaattctttttgtgcttattgattttacactcaagtccaccaagatatgaagaaattgatatagctccaaaatgaagcactagatgttcattgggaaagtgaaagtctacaacaacttattatcctccaccacgagaagcatcccatatatcactcacaaaacgacttggtctatggtttcaaggccacagcaagaccaacctttgcactcttttcgatggccccagtatccacctcaccaacaagcgaaaatcgagttcttggagtccagtcgtgctggatcagagcacttgcacgaccatagttgttcacccgagctttcaacagcgttagcgggtccagagcatgctgtgtaccaaaggtgagtata

SEQ ID NO: 15404 - DNA, 558 bp, Glycine max
  Clone ID: jC-gmle01810085h08a1
aaagctcttaaggatggaattgctgttgaaaaaccaatctacaaccatgtcactggtctcctggatccccctgagctcattaaaccccccaaaatcttagtcattgaaggcttgcacccaatgtatgattctcgggtcagagatctcttggactttagcatctacctagacattagcaatgaggtcaaattcgcttggaaaattcagagagacatggcagagcgtggacacagtcttgaaagcatcaaggctagcattgaagcaaggaagcctgattttgaagcatatattgatccacaaaagcaatacgcagatgcagtgatagaagtgttgccaacccaactcattccagatgacaacgagggtaagattttgagagtgaggttgatacagaaagaaggggttaagtactttagcccagtttacttatttgatgatggctctaccatttcatggataccatgtggaaggaagcttacatgctcctaccctggcatcaaattcttctatggaccagagacttactacggaaatgaggtgtcacttgtagaaatggat

SEQ ID NO: 15405 - DNA, 321 bp, Glycine max
  Clone ID: jC-gmle01810085h08d1
aaaccaacaaaaaaaaattaaaaaaatccccttggaaaaattcacaaaatccccccaaaagggttggaaaaaaaaatggccgggcccggtgggataaagctagaaaaagaaaaccccattttgggccaaatttggggcaaaaaaaaatgaattccagccccacttttttttccgggaaaaggccataccaacaaacaaagggggtttttcaaaaaattaggagggaaaacagcctattaacaaggggcaaaatatcgtgaaacccagggaaatgggggaaaacttgaaagaagaaagaaaagggggattttgctggaaacc

SEQ ID NO: 15406 - DNA, 417 bp, Glycine max
  Clone ID: jC-gmle01810085h09d1
aaaaaggggggggttaaattttcactttcaggggcaactgttccaaggtgaaaaattttaaaaaataaagaactctccctttcactcttttttttctcaatgggcttgggaaaaaaataagaaacctaaaaagaaaaaacctgccaaagctaaaaacctgcctatgggggttgcccccttatccatcggggaattttccaaaggtaattaaaccccttggtgaacaaaaacccccctttgtttgaaaaaagggaaaaacttcaacccccgatcaaaaggtttcccaaactgggggctcctttgtccaggggaacacctttgccccctattggaagggcccccaaaaaaaatttcatcccccaaacaaatggcccccgtttcaaacaattttggaatcaaatcaaacttaggcccccc

SEQ ID NO: 15407 - DNA, 476 bp, Glycine max
  Clone ID: jC-gmle01810085h10d1
caaaaggcataaagtgcatgtctcgtctttcatgaacagagataatcatatcaaacagcatcaaccactcatacccctgcaccccaccgggcgccccatctccatccacacccccacttcctccaccttccactccacctccccctgtcccatgttatatacaaactcaaattcagaatcgtcagctcactcacctgtgttcgattgatggggacgagacgaaatgatgatgtgatgtaataatgtgatgttgtgatgttgtggtcgttggagtcgtagcgggtcctcgtcttgtcagtagtcggttcaagcggaatgggagatggaaacgatatgcgatgtataagaagaaagggtagaactttcgtaggccggtcgatgagaggccagcatggcaatggctcgagagaagttggtgggcagtgtcttgaagcgccgcattggaaagcctgcgacagacggcgaggtggaaagcg

SEQ ID NO: 15408 - DNA, 548 bp, Glycine max
  Clone ID: jC-gmle01810085h11a1
gtcgaggcacaatggactaccttctacttcttccactaataatcaccatagtatggataaacattcatgtattcatctctagcttcaaaccactcaaatcctctaaaaatcccccgggtcctcgcccttttccaatcataggaaacatcttggagcttggcaaccagcctcaccaagcacttgccaagctttctcaaatttatggtcctataatgagtctcaagcttggtaagactaccaccattgtcatttcctctacacaagttgccaaagaagtgctacaaaaacatgatcaaatttttgctaataggacagtccctgatactctccgagcacttgatcatcacatactttctgtggtgtggatgccacctttagcacactggaggacccttaggcgagtttgtgctaccaaagtgttctcttctcagcagctggattctacacaggtttttcgtcaaaggaaggttcacgatcctatggattatgtgaaggaaagatgtgagacaggtgaagctttggatatgggtgaggcttcctttacaact

SEQ ID NO: 15409 - DNA, 522 bp, Glycine max
  Clone ID: jC-gmle01810085h11d1
gcatgcaaatgattaaaggttttattaagaattttttttattcataagaatcgaactcaggtacagtttacgacaacttattaagaatttgattgcatgcatgcaatcttccttggtaatatgcttggatgggaatgactaggagaggttgtgccttatgcaaagtaatcccatatttctcagacatatccatgtcttctggcttttgtccatccgtgagcttccaattatagttgtatagaagagaggccaacacaatgtgcacagttctagaagccaatggcaacccaggacaaatccttcttccagctccaaagggtattagctcaaaatcttggcctttaaaatcaatgtcactttccaagaatctttcaggtgtaaattgatttgggtttgtccaaatacttgaatctcttcctgtggcccatacattgactagaatttgggcacttttaggcaccatgaagccacatagttcaacatcaacttctgacttgtgtggcactaacattgggatgggtg

SEQ ID NO: 15410 - DNA, 461 bp, Glycine max
  Clone ID: jC-gmle01810085h12a1
ggaaaagatggaggtgattagaaatagaggcattcctgctgatgttcttgcaaagcgagctcatgaatttgaaaaacatgttgctcatgaaagcctcaaggatcaaattcctgctgttgacaagttgtattctactaaggttaataagtttgcaaaaattatgaaccttagacaaagtgttgttggtgatcttaaacttcttactgatgggaagttatatgaaggtaagcatattcctgtatctaatattagtgcaagggaaaatcatgtagttcaaatacccctaatggcacaggaggaaattctgtcttctagtgcaagtgatttcagaactgcaatggtgagtaaaaatagcaagcctcaagctactgcaatgcatgtgggagctatagaaattatcattgatagtttcgcaagtcctgactgaacatagatggtgcaatgcttttggttgatactta

SEQ ID NO: 15411 - DNA, 438 bp, Glycine max
  Clone ID: jC-gmle01810085h12d1
aaaataacccacacttcacacattattaccacaattaaaagagggggggaaattttcaaatagacagagcatactcaacaagagggtcatgtctaatttcctttattgaattaaacaaacgaacaaacgaaagaaaacccaaattccagatcatgcagaggattccgcattttcaaaaaatctggcagtagcctggggaacaaaaaaagctggcataagagttttacccgcaatttcaaaatcttgagaaattcccaagagaatttcaaaaactgtaaactgtttgggattggcaataaggaaacttaagggccatgaagtttgatttgcccacttaaaactccacatttcaaaaccctttttaggaccacatacctttattgggaagatcaattcccaggaatgggggtcccattttggccacttacatgcattgaa

SEQ ID NO: 15412 - DNA, 434 bp, Glycine max
  Clone ID: jC-gmle01810086a01a1
aaatctttgttatcagcagtcctaaaacttgagttctagtagtctttctcttgaggcggtcttagataacctaatgtgttcattcaactagataattgttttctcactgatatgttatgacaagattgtaataataaaaaattgtgatcaaattgaactaaaaaaatcatgtaataattaagactccagactaatcttaatcaaatataagcaattaaaaaacgctgtatgcccattagatatgtggatgtcatgcgacagaattcttagctaatttgggcttaagaccattatgaatatagacaattgtaaatgtatttatgtattatcaaatacagttttttcttaaataactagcctgtgcgtatacacggatagcggatgttaataacttgcctatgcgtatctactgttgtttcgctgcgctgagttat

SEQ ID NO: 15413 - DNA, 511 bp, Glycine max
  Clone ID: jC-gmle01810086a01d1
cttgatccaatcaaggcataaagttcaatttatacgtatgttttcttgtaacttcatttaatttaaatcaaatctaacatgatgttttagctcaagtttattttcgtatatagaaatatatcactagtttattttcgtgtatagaaatatatctacattactgtagtaaaaaatcaaatagaaataaaggataaattttattacatcaaacttctattataaagtgttggtattgaaagtttgcaaataaaaattcgactatttaatatctacttggtcgaattgatatcaggtgtgaaaaaaaaattcatattaaatttgatcaacatatttaaattaaaatgtaatattttttttatgatatctataatttgatatattcaaaatttattaaataatgtgtagttgtatacgaacgatacaattatttaaaataaaattcatatttaagttagttaaaaacatattatcttattcaatatattctttagcacatcaattaacctatttt

SEQ ID NO: 15414 - DNA, 580 bp, Glycine max
  unsure at all n locations
  Clone ID: jC-gmle01810086a02a1
tcttctatctgttttttttatctcttatgttatgtcttattattctatcacttatctaatttgttatatatttattcttatatttatttttcttatattgtattttttattttatttaattattctatttatattttatttattttatatttttattttttttatcctgtattatttnttnnnntnnnnnnnccnnnnnnnnnnnnnnnnnnnnnnnnnnnnnnnnnnnnnnnnnnnnnnnnntttnnnnnnnnnnnnnnnnnnnnnnnnnnnngnnnggnnnntacatttttttttgttggacagatatggaaatgctattgcttgtttggatgttttgcatataactcatgctgcaatttctctggttgaaagtagtcctggagcatctaatgatgctgcaaacacagttatgcaaaaattttgggactcagcttttgctctatagctgtcgtctgaagattttgacacccatagtgaagcctatggacggttgacttttgatggggcatatactacaaagtctacatattaatctgtaggttttggaaattcatttgctttttaatttgatgatcac

SEQ ID NO: 15415 - DNA, 464 bp, Glycine max
  Clone ID: jC-gmle01810086a02d1
aataatattggaattgatttcatcaaatggcttgaccttgatggggatctaactgataatatctggacccaaaagtcgtaagtgatgaaagttgataaatatatggaattacaagtaccttaattgagaagaacatggggacacttcagtattgcatgccacgactatatctttggttctaattacatcagggactcaaaaagaaaaagattattaaaaacggctgattagagagactccacattatccacctattccgggtccatcatttcctttgtcaacgagcatttgatttatgacgaaactctgggattcatagagtaagattatagcatgttttgttttcaagctggcaaacatattactggctagagcgctttaagtacaccaatacgctaatgctcgttagaacaacaacacctgcaaaaataccagaacggagacgcaatgtactggttttcttg

SEQ ID NO: 15416 - DNA, 514 bp, Glycine max
  unsure at all n locations
  Clone ID: jC-gmle01810086a03a1
tgtttttatcctgcatgctgnnntnnnttnnnnnnnnnnnnnnnnnnnnnnnnnnnnnnnnnnnnnnnnnnnnnnnnnnnnnnnnnnttnnnnnnnnnnnnnnnnnnnnnnnnnnnnnnnnnngnnnnnnnnnnnnnnntnntgttattgttttggctgccactaacagaccggatgttcttgattcggcgttgttgaggcctggccggttcgacaggcaagttactgtggatagacctgatgttgccggcagagttaaaattcttcaggtgcattctagaggaaaagcacttgcaaaggatgttgactttgaaaaaattgcaaggagaacccctggattcactgaggctgatctgcagaatctgatgaatgaagcggctattcttgcagccaggcgtgacctcaaggaaataagtaaagatgagatatctgatgcgcttgaaaggatcatagctggacctgagaagaaagatgctgtgtctcagatgagaagaagaattagtagcctatcatg

SEQ ID NO: 15417 - DNA, 556 bp, Glycine max
  Clone ID: jC-gmle01810086a03d1
ctccttgaatttgataaaataattattgattcttacagtgtacaagtcagagcgtattttatagtacaaacataattctgtgacttgcgtgtatgattatgcaacatataattcggcttttccatcaatgaatagactcatgaactcttcaccatccacagtttctttttctatgagaagttgagcaagcttgtgaaggatatcaatgtgagttgagataatatgtgttgccctagaatatgctctctctaccagttccctcacttccgcatccactacatccgcagttgccatggagtaatccttttgcgatgacatctgttgacccaagaatggatttccaccaggtccaccaatggcaacttgtccaatttttttgctgaatccaaatctctcaaccatctgccttgccactcgtgaaacttgcatgaagtcgtttgatgctccggtggtgacattttcctggccaaaaataacctcttcggcaacccttccacccagggcaacagccatctgattttcaaggaacttctactgtacaatccagactcgagcc

SEQ ID NO: 15418 - DNA, 569 bp, Glycine max
  unsure at all n locations
  Clone ID: jC-gmle01810086a04a1
attcgatcctctcttctcttctttcaattccgctccctcgcacgaaaatgacagggtttcctcaacctcgccgcgatcacgcttcttcttcctcctcctcctcctcgcacaattccaacagcaggggtagcaatgtatttaatttgcttgcaaggagggagatctcgccccgatcaagatatgtggcaaaaaggcattggggagaacccggagaagcttcaaaatcaaagtctagtccttattctcatcctaaaaatgaagttgtgagagatgcaagacgtggtctcctctcatgggttgaggctgagtcattgcggcatttgtctgctaagtattgtcctttgttgcctcctccaaggtctactattgcagcagcatttagcccagatgggaaagttcttgcctccacacacggtgaccacacagtaaagataattgattgtgaaactggaagttgcttaaaggtattagttggtcataggagaacaccttgggtggttagattccatccattgcatacacatatactngctagtgggagcttggatcaagaagttcgtttatgggat

SEQ ID NO: 15419 - DNA, 569 bp, Glycine max
  Clone ID: jC-gmle01810086a04d1
aaccactaaaagttacacatgtagaaagagaagcccacttatgggttggagggggaggggtaaataagaaaacatgttaacaaaggaaaatgttagtacatattcatacgtggataatacaaaaatatacattttgctattgcagtgagtgaagttccaccatcggttgcatgggctcagcatttatgtttgtgcagatcatcagcagagacagcatatgagttgtacagtaagtaatgtgaagcagatgtttgaattacatgtccaatcattcgtctaaaccttgctcactgactgacaccaacgatggtctcctcaggaaagtaacttggtccagtgccattcactgcatgagcaccgtcatactggaggaccctaagctttccttcctttgttccataaactagtcctcccccagcaaaaggatgaaagcatgccacattgacctcgtcttctgcactaggaagcaccctaacaagttccatatctgacactttgtatacctctaacactgtatatataaggcaatgtgttctccatcgataacatacttttaagaagagaccatg

SEQ ID NO: 15420 - DNA, 528 bp, Glycine max
  Clone ID: jC-gmle01810086a05a1
gagagagagagagagagatgtcgagattgcgaagactgatccaagcttcagttgatgctactaagaaagttatatccggtaatcttgatgatttgatgccaccaccggagagacccatcttcagcttcaattccaagcaagagttaagcaagtggcatttgtattctgattctgaatttggaggtttgtcctctgcgtctctgcagataactgagtcggaaaatggagcaacttctggaatcttctccgggaacctttctctggatgtctctgaaggctctaaatggaacatcactcgaagtggcttctgtggaatgcgctcaaaaaagtgtgatggctttattgatttggattcatatgatactattgctatgaaacttaaaggagatggaagatgttatatatctactatctacacggagaattgggtcaattcacctggacagatggaagataattcatggcaggcttttgtttatgtgcctgaaggacactggtatatcatgaaggttttgtacctagttgagc

SEQ ID NO: 15421 - DNA, 473 bp, Glycine max
  Clone ID: jC-gmle01810086a05d1
ccgaaagtgcttccattattgcacctaccataccactcaataataccggaagagtactggtactggaataactaccaaatatattttccttttatgaaccataaaatgatacattattattattacaaaaaaataaagcaccctaaaagaagagaaaaaatcttaatttttatgcataaccaatactttattctgttctcatggctttgatccaatcaagttcaactctgaaatcacctggtccagatctagcacctgggacaccaccctcagcattgacagatagagacatgcctaaaacacgggatggattcatttcgatttgtgcatctataacgttccctctccaagtaggtaaatatcgagctagaggaatatggatcacacaatgtcattggactcggttaaagaccatgagtggtccatgtttagtatttcgacaaattttatgttaagtgctgatgacctaacac

SEQ ID NO: 15422 - DNA, 515 bp, Glycine max
  Clone ID: jC-gmle01810086a06a1
ccaagttttaattcttcttctcttactcctcccaccttcaagtctctaataattggttatattatatccctaacaaatgggttcctccaagttattgggtattatggccatgcttttcatagtgcttctacccatggctgccaaaggggataatattactgatttctttgataaggtttgtgaagaagtggaatgtggtaagggaagctgcgtagtaaacacaagttacccattaaacttcgtttgtgaatgcgattctggctggaagcgaacccaagatgacgatgatgaatatgccactagctttcttccatgtgtcattcccgaatgtagcttgaactatggttgtcagccagcaccaccgccagttccagagaagagttttccacataacttctcagcttttgatccttgctattgggcgtactgtggggaaggttcatgcaccaagaacagaacacatacacacagatgcgaatgccaacccaattactataatcttctcaacatctcag

SEQ ID NO: 15423 - DNA, 314 bp, Glycine max
  Clone ID: jC-gmle01810086a06d1
actggtaatgggagaagatatgttattaatttattatacaagaaaataataacactgcagtaatagtattatctatggataatccacttgccggggaatataactaggttatacaagctctaaagttcaaatctcactccctttattacacaaaaaactttttttatggatatgtatacaggacattacacagtagtcattaaacgccaattggtgaacaacaatcaaatcaatttttcgccaaaataattgggactatccctgtgggcactagctccaaataaccatcccgggggacataaacaacataaccc

SEQ ID NO: 15424 - DNA, 425 bp, Glycine max
  Clone ID: jC-gmle01810086a07a1
gaaaaccgaaaaggagggatgtacagtaagatttttttttgaagcggcgggcaattacctgcaaatggattgtcaaattatagggatgcagtggacttgtaaataaacattctagattcaagttagagacagtgcatgctggttgctgtcttcatgcagaatctgacaggtttgagcaaccgaggcaaattccagagagatcgaggtggccaaatctgtaactggccttggtggagttttttttttctctctattttttttccctgcttttcccttagtctacagtatttacatgtattttttaaaacagttgatagcattgggcatttattttaaaattttgactttacttacctgttcttataatgcacatagctatattcatttaccttttagtaaacgataatctcttatcctttcggttt

SEQ ID NO: 15425 - DNA, 397 bp, Glycine max
  Clone ID: jC-gmle01810086a07d1
ggtattaattttattgttcattgatattgttttttattttgatggtttttgttttttatacaagttttataatgaaaaatgaaacaacaagagtaagaagaggaaaaagaagaaacagtaagcagacaaaacaacaaaggcatggcacaaacaaacacaggcgaataaccaaaacaaaaaaagaaggaaaaaaaaacacaaagaggcaacaacgaaaaccaaaaccacaacccttggggagaagccccacacagagaaaaaccaagcaatgacctcaaccaaggagaaaacaagaccaagggcaacaaggagagcacgaaagaggacacatcagagcacccgacgccaacagacacaaagaggctcagcacacacagagaggattgccaaggagccc

SEQ ID NO: 15426 - DNA, 441 bp, Glycine max
  Clone ID: jC-gmle01810086a08a1
cttgttctgaatgattttactacaaatttggcatgcctagtagcaatgattgttaaagtttctttgatttggtgttttattgcatgtctaaatactactatactagtcatcctttgctggtttaaatggagcatggattcttggatcttgatttattcagatcgaatctgtttttgatttttgcgatcttacattattgacaagatgattaagtacatgaatatattgctaccaatctctctgctgtaataaataaatatgctttcttatacatatgttcagctgcctgcacatatagatatgataaagagatcgcgtggtttatatttgtatattactgcttttgcgctcatagttaattttatatccttctcagactgcagagatgcctggtctctataaagaaggcgagcactatcttagtggctgagcaggtggcat

SEQ ID NO: 15427 - DNA, 243 bp, Glycine max
  Clone ID: jC-gmle01810086a08d1
gggggcaaattgcccaacacttttgggggccccaaaaaaacggccccttaaaaacgcattttcccaaaaaaaaatttccccacgaaagctttaagggggcccccccggtttaaccccccttaaatttaaccaaggggcacccccttgccgctaaaaacttcccccgggggggaaaaatttccttgcccacccacgttcccggaccctctttaaacaccctatggcccaacggcctggaggctc

SEQ ID NO: 15428 - DNA, 375 bp, Glycine max
  Clone ID: jC-gmle01810086a09a1
caaacacaaattttatgtgattagtcgcggtatttaaaataaaaaatgaaagtcgacaaataacaaaggaaaggagatgttcgaataaaaatagttccctttcaagttcttattttttgcgaggacaggacattgtgagtgttatattatgctctatcaacacattaaaaagattatatgatttatctgctgcggaagactgtaacatttttattggcaaatagggagttcccaagtccatgcccaagtacttattacttcttggagctgaatggatatcttattgtgctccgccattctaattattggaaatctgcaaaccattctcgctttgggacacaatgtatgtgcatatgttaataaattgattcgaga

SEQ ID NO: 15429 - DNA, 268 bp, Glycine max
  Clone ID: jC-gmle01810086a09d1
aagacatgtacatgtggagagaatattcctgacccaagcaaccataaaaaactaacaaaaacactcacaggcaacccaacaaagaaccaaaaagaaaaagacagacaaaaaaaaggaacaaagaaaaaaacaaaggcggaataacaaaccaaaacaaaaacgaaaccgcaaaggacaaggaaaagaaaagaagacaagaggaaccaaagacacatacaaagaccccgggggggcaccagaaaaccgaaaccggctccccgcaagaaaa

SEQ ID NO: 15430 - DNA, 506 bp, Glycine max
  Clone ID: jC-gmle01810086a10a1
tctcaccgcaaattaaccatgagcttcctcagtatcaccttcataacactcttcctcctttcccaccactacatacaccacccccaagcgaataccccagtggaccgttttaccatcaattgtggcgcctccgtgatatcctccgacggagaaagaacttggatgggggacacagactcaatgcttttatccagtcaagatagcaccgtttttgctaaaccaacatcacaatctccatctaccaatcatgttccctttaccactgcacgcatgtcacgttcccaattcaactactccttccccgttaccccaggccccaaattccttcgtctcttcttctacccagctgtttatgcttcctttccccacaccgatttctgcttgaaagttcaatgcaaccaatttcttctcctcgacagttttaatgcctctttaaacgtcgatgctgtaaaaaaggaaaccatcttcagagaatacatcgtctatgtgggcgacaatcagatgct

SEQ ID NO: 15431 - DNA, 321 bp, Glycine max
  Clone ID: jC-gmle01810086a10d1
gggggacaaaatttaaaaatcaggggaaaaaaaatggggggggaaagggcccctgggccaaaaagcaatattaaccccagggccttaaaaaaaaaaagaacccaaaaggggggaaattttcgcccggggaaaaaaaaagggggtttaaaaaaaaaagggttgggggccattttaaaaggggggggaaaaaccctttggggcccaaatttttgggggaaaatttttggaaaaaaccgggaaaggggtaaacttccccgaaaaggggggccacgcccctgggtttaaaaaaaatgggacacaattcccttttttttttaaaaa

SEQ ID NO: 15432 - DNA, 496 bp, Glycine max
  Clone ID: jC-gmle01810086a11a1
gtcggttcttccttctcaaatattcttgagatccccattttctccgaagcaaagccatggctaagggtcctggtctctactctgacatcggcaagaaagctagggatctgctgttcaaggactaccacagtgaccagaagttcaccatcaccacctactcaccgactggagtggctattacagcatcaggaaccaggaaaagtgaactgtttctggctgatgtcaacacccagttgaagaacaaaaacatcactactgatatcaaagttgatacagattctaatctcttcacaactatcactgacaatgaacctgctcctggtctgaaggctatttttagcttcaaagctcctgaccaaaggtctggaaaggtggaagttcagtacttgcatgactatgctggaataagcaccagtgttgggttgacagcaaacccaattgtcaacttctgtggtgatataggaactaatgttcttgctctgggtgctgatctttc

SEQ ID NO: 15433 - DNA, 327 bp, Glycine max
  Clone ID: jC-gmle01810086a11d1
aaaatcaatgcggtcacatatatatagcttctttaataaaacattgaccagtataaataatattactgttatgtatgggcagtaatctcaagccaggaagttttagttttgcctcctcatttcatccacggtgatgggcttccttttaaggcatagacaaatttaatcttaattatctttttcttataaaataagacatagacaaaagaatttgctcaactatgctcacaatttacctatatttcatatagattattttttcttttatcttaattattcggatcatcggaagaaggagaccttaactatttcgtaatttagtcggga

SEQ ID NO: 15434 - DNA, 397 bp, Glycine max
  Clone ID: jC-gmle01810086a12a1
agaaaatagaattgaattaaggacttggtaccattccatggtgggagttgagttgagtagagagaaagaagatggtggcgcgcaggtttcaggtgatccacgacgattctgactttgatctccattacgacacagacgacggcttcgaagtttttcaattccagctctattccctctcttccgttccacctcatcaacaaaagattttcggagccgaacaagatactccagtggtcaatgactctgatctcgttgccatttctgacaaactacgactagtctcggtcaacgactccgaaccggaaccaagcgctgccgatttgttgaaatccgatgaggaattggccatactcttgcaggcagaggaggaagcgctaatgttgcagcagtatgtggc

SEQ ID NO: 15435 - DNA, 357 bp, Glycine max
  Clone ID: jC-gmle01810086a12d1
aaaatcaatgcggtcacatatatatagcttttttaataaaacattgaccagtataaataatattactgttatgtatgggcagtaatctcaagccaggaagttttagttttgcctcctcatttcatccacggtgatgggcttccttttaaggcatagacaaatttaatcttaattatctttttcttataaaataagacatagacaaaagaatttgctcaactatgctcacaatttacctatatttcatatagattattttttcttttatcttaattattcggatcatcggaagaaggagaccttaactatttcgtaatttagtcgggaggtaattaaagtctccggatttcatataga

SEQ ID NO: 15436 - DNA, 563 bp, Glycine max
  Clone ID: jC-gmle01810086b01a1
caaaaaataaatgttaaatgacttctttcttctaatatgataaatgcttttccaataataaatttatgtttgtttccttaattgagacattggttagcacttgccttttatgaatattccgaacctgtcatgatccaagactatgatgaatgaggtacagattctttttttttattcgtgaacgaggtatagattgcctggctaaatagagtaaaacgattcatagaattgatgactatgctgcctttgatatgtaattatgtatatgcaatactgttgcaaatttctgaaaacaatgacttatcctagttaggatttgatagttttgtttctcagtttgatggggttgctttttgcattttcaaatgatatttatgcatagaacgtgatgaaatatattgattgttttggttgcagtgacagattgcatggtgttaattccagtatagttggaactgatcttgaccacatgttgataaggttctggaacttgactgataagaattgtgttcttagttcttggtgataagctattagcagagaatgaagatgatgtaatagag

SEQ ID NO: 15437 - DNA, 337 bp, Glycine max
  Clone ID: jC-gmle01810086b01d1
attggatcctctttgaacactattattttttaattgattatcttttttgacacccggaaaagggggattaagaaacccccaaaaaaaaaggataacaattcattagggggaaaaccctgggacagaaatatcaagccataggggaaaatttagcgggggaagcaaacccccccagggcggggataagcaggcaacaggctcacttcaagaaaaaaggacggagggagcggaaaaaggatcagcactcccaaaaagaacgggaatgggtacttgctgggctgctttgccataggaagaacctcttttgaagggaacctgaaaagcataatcaagagca

SEQ ID NO: 15438 - DNA, 408 bp, Glycine max
  unsure at all n locations
  Clone ID: jC-gmle01810086b02a1
gcttcattactgcagtagtttcttcatgtcnnnnnnnnnnnnnnnnnnnnnnnnnnnnnnnnnnnnnnnnnnnnnnnnnnnnnnntttntnntnttttttttttntttttnttttttgttttgagagttcaattggctgacaagtacttgaacgaggctgctcttggaaatgctaacgaggatgctattcagaggggaactttcttccagtcttgaattggaggcaaagcaaacttggcaagtaaatatttctgttcgtgaaggttgttgtactaatccaagtgctagaagttgtgatggaacttgcgtgtaacattcttagcattctcaatgtcttaggtgcaaagagaagatgctaagtttgagatgatcttactatatttttcatattggaccgtcttcctctat

SEQ ID NO: 15439 - DNA, 351 bp, Glycine max
  Clone ID: jC-gmle01810086b02d1
atagaggaagacgggccaatttgaaaaattttgtaagatcatttaaaacttagcatcttttttttgcacctaaaacattgagaatgctaaaaatgttacccgcaagttccatcacaacttttagcccttggattagtacaacaacctttacgaacagaaatatttacttgccaagtttgctttgcctccaatttaagactggaagaaagttcccctctgaaaagcatcctcgttagcatttccaagagcagccttgttcaagtacttgtcagccaattggacttttttgacattctcttggtcttggacaagcatgttaccatacaggaagagctttttcagagtcatttt

SEQ ID NO: 15440 - DNA, 542 bp, Glycine max
  unsure at all n locations
  Clone ID: jC-gmle01810086b03a1
tccttatttctttccctatttctttttctttattttcttcctttactcttttttttgcttttttgtcctctgttatttgctttattgtgtcttctctatcttttctttctcttctgttttcctctgcggtgtttnntnnnntnnnnnnnnnnnncnnnnnnnnnnnnnnnnnnnnnnnnnnnnnnnnnnnnnnnnnnnnnttnnnnnnnnnnnnnnnnnnnnngnnnccnnannntattaaggctggagctgatatagtcagtgttcattgtgaacaatcttccaccatccatttgcatcgtactgttaatcaagtgaaaagtctgggagctaaagctggagttgtcttaaaccctgctacccccttaagtgcaatagaatatgtccttgatgtggtggatttggtcttaattatgtccgtaaaccctggctttggtggccagagttttattgagagtcaagtaaagaaaatttctgacttggagagagtgtgcgcggaaaagggagtgaatccatggattgaagtagatggtggagtttgt

SEQ ID NO: 15441 - DNA, 448 bp, Glycine max
  Clone ID: jC-gmle01810086b03d1
aaaaaaaaaaaaaatatatatatatatatatatataatgtatttagctggttttgttcaaaacttgtattgatagaaatcacaactgctttacaatatgggggaatagaattgacaggctacaaggtgatacagagtaaagggctttatcttgaattaaacttgtcctgatactccaaaagattatacacaaactacgcatcacagcagcagccttacttggactgatttcttatagttatttccagagaaaagcaaattgccagtggtgacagcaggccaggcaacataatggtgctcgataggccactaattcatgagtactgtgttggagcataccgtgaatattgaaccacatgggcatttcacacagcaactgcttcaagtcttttgctggtttttgattcctcttatagcttcggcataatctttagctccaaacacagcag

SEQ ID NO: 15442 - DNA, 544 bp, Glycine max
  unsure at all n locations
  Clone ID: jC-gmle01810086b04a1
ctctctctctctctctttctctatggcatctgcgacgcgtctggtgcactgcgagctgcgctcggcgaggcccgcggttcggccgagggaaccggccggtccggttcaggttacgatccccaaacccaaacccaaagcggcggaggcggaaggcgcgaacatcgttttgcagccgcggttgtgcactctcagatcctacggttcggatcgagccggggtgcttatcaagactcgcaaggagggtgaccatgatgacgtgtcacccttcttcgccgcgctttccgactatattgagagctctaagaaaagtcaagattttgagatcatctctggtcgtctagctatgatggtgtttgcagcgacggtgacaatggaagtggtgacagggaactctgtgttcagaaagatggatattgaaggaatcacagaggctggtggggtgtgtttgggtgcagtaacttgcgcagcactctttgcatggntctgcagtgcccgaaacagagttggtagaatcttcaccgtaagctgcaacgcattcattgac

SEQ ID NO: 15443 - DNA, 384 bp, Glycine max
  Clone ID: jC-gmle01810086b04d1
aaaaacccctttaaaaaaaacatttttcatcatttaaaagggctttttaaaaaagggaaaacaatcgtttaccggatccctttggggtcaaaatttttggggcctcaacatttattttgggacccaatttttttttggaactggaagggcataaaattggctattctcccccggcccaaatatttaaaaaaatttttaggattgcattttttaaccggggcaatgatttttaaaccccttaaatctgcaaaaaggggaaaaattttttttccctaaagaacccgggttattaggcccatcaaatggggcccctttataaaaaaaaccctcggggaattgggcaaatcccgggtcaaaaaaagccttgcactttaccgggaaaat

SEQ ID NO: 15444 - DNA, 537 bp, Glycine max
  Clone ID: jC-gmle01810086b05a1
aattttccatgctaatggcgagtcttttgatgcattacagtgcaagggagaagaatagaacaagatcttgattagggttgtggagcccatttattgtgtccattcatgcactgtggaacattgattttttgaagagtagatggagactggtgaaagcaacagtactagtagtaaccaaagttgtgcagtgatgaaggattctaaatggtacactcaattcagaaatgtatccaatccttggatggcaagatatgtttatggcttgattttcctagtggccaatctgttggcatgggctgcccgtgatgaactttctagtcttagtgctttaacagaaatgaaggggttaaagggatgcaaggttggaaaagactgtttgggtgcagatggtgttctgcgtgtgagcatgggttgctttgtatcctttgtcaaaatttcaatatttattatatgcatgaaatctggttgttaaaggctctgtacataaggtttataaaaaagaaaagggaaaactaagcattatatgaatcattaatc

SEQ ID NO: 15445 - DNA, 595 bp, Glycine max
  Clone ID: jC-gmle01810086b05d1
gattgtaacttcgatattatttgtcactgacaaatggtaatccactgcttaccttatgttgaacatatgatgattcactcacaataaaattactttaagcatttaaaccgataaattggcaaatcatgaatgaactttatgatgagcatcctcaaaatgggtttttaagttactttatactccctcagtgataaatgaacaggtattgtgtagcttcaaataaaaaatccaacagcttatgtgcatttttgccagaaccattgcttctgacttcgaatttccagggtgttgcagttgcaaacttgcaattccttttcctaagagctgtaactggaggagtccactaaatgtgtagcaaatatatgtggcaatttaagatcttaatcctcacaatttcaaaccagaatggagataagaaggaagttctcatgtagaatcagcatgtctactcttccatatgattggagctaccagcatccataagtagacacaaactgccaaccattcatttactattctgacccaagcactggtccagcccacatcaattgtccattttctcatagaatgatgactattccatccgatcaatagc

SEQ ID NO: 15446 - DNA, 516 bp, Glycine max
  Clone ID: jC-gmle01810086b06a1
gatcatcattcctcttagcttgaaagctgatgtagaaacacaaggtgattttgtcatgtccttggcagctgaagttcgagcagcctccttctcagatattaatgacttggtggcctttgtgaactggctagatgaggaactttccttcttggttgacgaacgagccgtcctcaagcactttgactggcctgaaggaaaagcacatgcactaagggaggcagcttttgaatatcaggatttgatgaaattggagaaccgagtctccactttcgttgatgatcccaatctcccatgtgaagctgcactgaagaaaatgtattcattgcttgaaaaagtggagcaaagcgtatatgctctcctgcggacaagagatatggccatttcacggtacaaggaatttggaatcccagtgaactggctaatggattcaggggttgtaggcaagatcaagctttcttctgtacaactggcaaagaagtatatgaaacgtgttgcatctgaacttgatgaactatc

SEQ ID NO: 15447 - DNA, 457 bp, Glycine max
  Clone ID: jC-gmle01810086b06d1
gagagtattgaatactgttcagttgaatttcttattatagggaaaaacaaggcagaggtagggatcatgttggagtacaaagttacaattacaatatgattctcgtatcatcgggtagcatgcaatatgtataggctattcaaattgaagcaaaatgaaatttacagctgaaaaggcaacatatttttgagagacacagcttcaaagggaaaaaaagaagagaaaaacttctgatgggatagcctaagtttctgatttgctattttcaccagcttgagaggtttggatgcggctccttagttcttcaaaagccttcatgctctctgcatcaaagcctcctgcaaactgatggacacggaaagcgaaacgcacaccttgtagaaccaaaaactttctaactggttctttatcaggaccagatagttcatcaagttcagatgcaacacgtttcatatac

SEQ ID NO: 15448 - DNA, 517 bp, Glycine max
  Clone ID: jC-gmle01810086b07d1
cgagagatatattcatcaatttcgattctttttcgatcgagatgtatggattcatgggtctatgtgtctatatagatcctgttcatggattaacgaaaatgtgcaaaagctctatttgcctctgccattctatgagtctcttcctttttgcgtatggcatcgccactacctttggcagcatccactaattcggaacttaatttgaaagccatatttcgacccggacgttttcgggatgcccccaataaccaacgaatggcaagtgcttttccttgtgtggatcctatttcaacgggaacttgatgagttgatccgcctacgcgtcttgcttttactgctatatcgggagttactccacgtattgcttgacgtaaaacagatagtggatttgtttctgtcttttgttgaatctttttcatagctcgatagataatttgataagccaatgatttttttccgtgtttcagaatacggttaaccaacatgttaactaatcgattacgataaaatggatcgg

SEQ ID NO: 15449 - DNA, 370 bp, Glycine max
  Clone ID: jC-gmle01810086b08a1
cattgtattgctaagtgacgcttatggggctgaaggtgaactgggtgtggttttatctgacaagttcattgaacatgatgcttactgtatgtttgatgctttaatgaatggggcacgtggttcaattgcaatggctgatttcttctcttattctcctttgcctgggtcccatactggcttgcctcctgtaattgaagcttctgctgcattgtatcatttgttgtctcatgtggattcatctttgcatggccatctcgttgatctctgggttgaaccccattactttgctctccgctggttgcgagttatatttggacggcgaattttcactcggcaacctgttgataatctgagatgaaatctcttcatc

SEQ ID NO: 15450 - DNA, 473 bp, Glycine max
  Clone ID: jC-gmle01810086b08d1
gaaatgaatcatcataatttatttcatgataaatcgaatatttgtatttacacattcatctctgcaaaactatggtattcatgacatgaggtatggaagtgaagccgaagaaactcattttattgccactaaagaattgtaattacaaaatatatacaggacacatcaatgtaagatttggctcacatctcagacaaaagattgctaattttgcggagctccttgagagctgacatggcattaacctgcgctttaccaaccacaacagttttagacatgttatctaatgatgcttattggcccctgtcttgttggaaagcacactcaatcacctggatatgctcaagcattgactgcccaatattcctcatactgcccataacagtctgatctgtagattcccctttgaactaacagaactacaatgtccattggctgtagaagagggtattatgtacctttgattattacaa

SEQ ID NO: 15451 - DNA, 426 bp, Glycine max
  Clone ID: jC-gmle01810086b09a1
gtgcttcgtgtccgtgctaattatgtcttcttctctttcaattccgattccatttccgatcgcattggattctgcgtcgtctttgacggagacacagatagcgcttttcaaacctctgaagcagaagcatcatttcgtcagaggcagagtcagtgttattagaccacttcatcgccgcctcaactccgtttcgtctccgaggtgctcttccgccggtgacgacgccgtcattactctccatgttgaaggaatgatgtgcgagggatgtacaaatagcgctaaaaaaattctataaagccgaccgcaagtgatatctgctcatgtaaatatgtcatgcgagacagccaccgattccctagtgcctgaacaaaaaactgcaccaaatggcctaaagcaatagggggaggaacttgcacaaaatttaac

SEQ ID NO: 15452 - DNA, 401 bp, Glycine max
  Clone ID: jC-gmle01810086b09d1
aaagattatattgaggttttttaatatacagatcatactcaacatgagggtcatgtctaatttcctttattgaattaaacaaacgaacaaacgaaagaaaacacaaattccacaacatgcagaggattccgcattttcagaataactggcagtagccagtggaacataaaaagctggcataaaaatattaccatcaataccaaaatcttaacaaattcccactacaatatcacatactgataacagtagagtagcgtcactggagccactacatggtatggacactttagcttaataaaatcagaactacacattataaaaccattattcaggaccacatacctttataggtaagatcaattaccaagaatagtagttccgattttgtccacttacatgca

SEQ ID NO: 15453 - DNA, 555 bp, Glycine max
  unsure at all n locations
  Clone ID: jC-gmle01810086b10a1
cttgaactatcgtgtcttcttggctttctctgttcaggatcaacatggatattgtatcacgagctttgctatttccgttggctatacttgtgctcatattaagcacaccttgctcaggtgcttttgggaagagtggaactaatgtgaaaacagctatttttctgtcccccaagtttgaacttggaccaggatcggtagccaataaatatgattatgacgctgattttccaagaggtcatatagcacttaagagtttcaatgctgaagtagttgatgaagcagggaaccctgtgcctcttcatgaaacttatctccaccactgggttgttgtaagatactatcaacctaaatatgtgacgacacacacaaactatgatggacataggatacttcacaactctgaccatatatttgtgaggaacagcggcttatgccagagagatactctaggacaatactatggccttggatctgaaacacgaggaacagctacggatgttcctgatccttttgggatagttgtaggtgatcctgcanaaattccagagggatatg

SEQ ID NO: 15454 - DNA, 516 bp, Glycine max
  Clone ID: jC-gmle01810086b10d1
atataagaccactttatttacaacaaacatgatatatatagtattacatatcacacaaccataataagcaagactggtttaagacaaacattacaaaccctcaccaatacaaataattgataatcacattactacaatccttaaacttgaaaatatgctctttgccggttcttgcgtgtgttgtcctattgctgccgaatatgagaagtatatgttccatcgatatgtatttctgtatttcttttaaccgtgatacatactgtgataccatcgatatgacactcaacttatatttgcatctcacaacttatctatcaatgaattatactatttatattcataaaaaatgaagaacgagaagaatatctgaagtgttggtgtggaagctgttctgccaccaataggtagaaaagccccattactccagtgtggccacggctgctgctgtagttagactctagagttatagtttcaccattcaatatctttacagaacctggttgaggatacatgtgc

SEQ ID NO: 15455 - DNA, 382 bp, Glycine max
  Clone ID: jC-gmle01810086b11a1
tgcatttgtatttgtgcttgtttatgttccagagaccaaaggattgacctttgatgaagtggaagtaatatggagggagagagcttggggcaagaaccccaacacacaaaaccttcttgagcagggaagtagttcctaattaataaagtgtgagcttgttggcctaaatagatgtatcgtgtgggtacatttcacataagcattttattatgactttatatatcatactgtttgatttggttcgcatctttcacttgcctcataatataagtgaatggaatgggaatagttgtgtagttccatcgatcggcaccatcattaaaatgctgtagttccatcgtccatggttatttcaactcattttgtggagtttcacttttac

SEQ ID NO: 15456 - DNA, 382 bp, Glycine max
  Clone ID: jC-gmle01810086b11d1
gtaaaagtgaaactccacaaaatgagttgaaataaccatggacgatggaactacagcattttaatgatggtgccgatcgatggaactacacaactattcccattccattcacttatattatgaggcaagtgaaagatgcgaaccaaatcaaacagtatgatatataaagtcataataaaatgcttatgtgaaatgtacccacacgatacatctatttaggccaacaagctcacactttattaattaggaactacttccctgctcaagaaggttttgtgtgttggggttcttgccccaagctctctccctccatattacttccacttcatcaaaggtcaatcctttggtctctggaacataaacaagcacaaatacaaatgca

SEQ ID NO: 15457 - DNA, 517 bp, Glycine max
  Clone ID: jC-gmle01810086b12a1
gtgtgctctcttcatcaacgatcttgatgcaggagctggtcgtcttggtggaaccacccaatacactgtcaacaaccagatggtgaatgccaccctcatgaacattgctgataaccccaccaatgtgcagcttcctggtatgtataacaaggaagagaatccccgtgtgcccatcatcgacaccggtaacgatttctccacacctctatgacgcctctcatacggatgttgaagtggttcaggtatcgtcaacatcatctcctgagccatctgtgccagtttctgctgaaactcaaccaccaatactgccattgtcagcaacttcacggcccaattacagacccggtgtagctcctatccaaattcatcatggctataattatagaggacgtggaagaggaaggggaactgggggtttgcacccagtcacaaaattcactgaggattttgatttcacagcaatgaatgagaagttcacaaaggatgaagtatggtgtcatcctggtaaaagtaagtc

SEQ ID NO: 15458 - DNA, 394 bp, Glycine max
  Clone ID: jC-gmle01810086b12d1
acgtcaaacaaaaaattttaatttaaagcattaaaaatcaaaaattttggacaaaaggaaaaggccccaaattcaatttaaggggaccctttaactcaaaatttttgaggaagaccgtcccatttgaaaaattttgtaaaatccttttcaaacttggcattttctttttgcacctaaaacattgggaattctaagaatgttacacccaagtcccattacaacttttagcccttggatcagcacaacctttaggaacagaaatttttacttgccaagtttgctttgcctccaattcaagattggaagaaagttcccctgttaatagcatcctcggtagcatttccaagggcacccttgttcaagtacttgtcagccaattggacttttttgacat

SEQ ID NO: 15459 - DNA, 447 bp, Glycine max
  unsure at all n locations
  Clone ID: jC-gmle01810086c01a1
atttaattatcaagtgggaggaaatgttgtcttctgatggatcatgtgaaattgacgtatggcctttccttcaaaatttatctagtgatgctattgctcgaacagcatttggaagtagttatgaagaaggaagaaaaatatttcaacttctaaaagagcaagcagaacttgcaatgaaagctataatgaaactttacatccctggatggagatttctacctactgctaaccataggaggatgaaggaaattgatagagaaataaaagcttcacttacagatatgattagcaacagagagaaagcactaaaggcgggtgaggctaccgagaatgacttgttaggtatacttttggagtcaaatcacaaggaaactgaagaacatggaaacagtaagaatgttggaatgagtctngaagatgtaatcgaggaatgcaagctattctact

SEQ ID NO: 15460 - DNA, 564 bp, Glycine max
  Clone ID: jC-gmle01810086c01d1
tcgcgatctagaactccctttttttttttttttgctttataaaatttgcaattctgaaatgcaaatcaaacaaggcttgttactattattttttatatttcaactttacgtaaaatgacatgagcaccatattggggctgaagagtaaatactgtaacaggagcatgagcataagctggagaaagttcaaatgagaaatgttgtaaaatcgttgacaaagccatctttgcctccaacaaggaaaagttttgtccaatgcatattctaggaccccatccaaatggaaaaaatgaaactctgccatttgtggccttcagaactccttcagaaaatctctcaggtttgaattcattcacatcatcaccccagagttcgcggtcatggtgaaccatagttgttggtaaggaaacttgcactccagcaggtaatgataggtttccgagtttcatatctctgtcaacatttctattaaggccaactgctggtgggtatagcctaagaacctcattcaaaatcatgctgacaatcttaagtgacttagcccatcaaaatttggtttttgtt

SEQ ID NO: 15461 - DNA, 524 bp, Glycine max
  Clone ID: jC-gmle01810086c02d1
gatataattgtccctcatcctcaatccctagtttctccttggcgtgtgatgcttgatcctcttcctgtttctcagtatcattggtgtttatttctccagtctcctcggtatcattttgtggaatcttcacctcttcatttaacttttctgtgaattcctcttcttcctctctctcatcttgactactctcaacaactatttcgtttccaatagatgtttcgtcaagtgttggttggagggatttatcttcatgtacaccttcggtttctgtctttggtatctccacatcggtcaattgatttgcatctgtttctttctctgctgtaatttcgcttgcatacttgttctctaaattcccttctgagcacgtgtctactattatctgttcatcgatgtccacatcaccagttgagtttttgctgctttctgatgtgatgtgtcctcccggtgttgtataatttgtacttccattcaacacgttagattcttcaaattggtggtctgcttttacatctttcctcgag

SEQ ID NO: 15462 - DNA, 482 bp, Glycine max
  Clone ID: jC-gmle01810086c03d1
caaaaaacaatgggagcccaattcataacctgaatctcggattttacattgaaaagtattgcgattacagaatagacccattcaaaagtagaaactatgaatcctttggtgaggggattgaaatgaaaattacacagacatattaagcagtgggaagaaccttattaacaatctcctggctaagggctgcgatctgggaatcaagggacttgatggtttcttcctttggattctccaaggcagccagagcctcctgcagctcagcctccactttcttcctcccctcagcaatcttttgttccacctcagcctgcgtctccttcttcatcgtgttcagcgccgccgctatctcggcccgagaagccgccatgacagcattggccttctcctccagctgcttcacctcctccgacgtgtccttcacgctgctcagcttctccctgatcgccgcgtccctctcgtccatgaatttcccaagcggg

SEQ ID NO: 15463 - DNA, 545 bp, Glycine max
  unsure at all n locations
  Clone ID: jC-gmle01810086c04a1
gctccactcacatgtcgaaatcagggcattagggttttccttctcccctgcaactgcaattcccccttttggaagatggttccacagtcagtgataacgcaagtctccgattcaagtggcgtgaatgcgatatcaaacgtttcttctggccacggattctacgattggttgttcgaatgtcacgggttctggcacaatgccactctcaacatcccctcgttcctcttcgtcttctacttggcacttcaagccaggcacagcttactcaaactctcccttgcgcgctcctatataatcatttcatataacctttgcctctggctcattactctgctcaatctcgcttggtgctttctccaggcatgggagtgcacgtctgggagaaagttgacatggaacctgttatccttgttcactacttccggaatgctgtttttggaagagagcttgctggctcttttatttcaaggaaataatgcangcggcttagatgcaatgaaacgaacttttggtatctcaacgcttcagtgtggcttggatatact

SEQ ID NO: 15464 - DNA, 533 bp, Glycine max
  Clone ID: jC-gmle01810086c04d1
aaaaataaacatctttttaataatattccgatctgctaacatggttattttatttacatatgtcctgatcggggttccctgcgatgactatactgaggcaatgtcaatttatagctgatacatcatcactcccagtccgtgtcaaagaaacctgcatctttcatctcggaataatacacattttccaaatggaaattttcctcctgaaaaaagtctgctaggaatgttgtatacaaaaaaggaagataaaatgcatggtagaagacaaccgtgacacgatacagccagaaagcaaacgcagcaccagttccagcaaggccacaagcaagtgtcgcaatcgcattaaaaatgaacataattgcaacatacttgtaaaaggcaatttttgctgcatgaaagaagaggaaattaggtaatcacaaacatcgtgtaataatcccgtcaattaactcaccaggcaacgtttctttccatccggaatggtatataaacattatgaagccataaacagcagtgagcaacagcttgtggac

SEQ ID NO: 15465 - DNA, 555 bp, Glycine max
  unsure at all n locations
  Clone ID: jC-gmle01810086c05a1
gagaacttccggatgccaacttggtaagagaccagaagatttgtgggcaattcattcccaacccgtctttccacgacctcacaagaaggaaaatccttcttggatagcgatacaaaaggtagctgcaagaggtgaaaaaattggcctgcaacattttgtgcccataaggccgttgggttgtggagacactggcagtgttcatttggtggaactcaaaggtactggtgaactatatgcaatgaaggcaatggaaaagtctgtgatgctaaatcgtaataaggttcaccgctcatgcattgagagagagattatatcattattggatcatccttttcttccaacactatacacctcatttcagactcctacacatgtatgtttgattactgacttctttcctggaggagagttgtttgcattgcttgacaagcaaccaatgaagattttcaaagaagaatcagcgagattctatgcggcagaggttgtcattggtttggaatatctccactgtttaggtataatttaccgngacttaaaagcctgaaatatcttact

SEQ ID NO: 15466 - DNA, 516 bp, Glycine max
  Clone ID: jC-gmle01810086c05d1
aatcaaaataactagtaatatgtatgatattttaataagccatatacaaaagtgtattattgatgtatcgtcgatgagcatataactaggatgcttgtttctatcggaaaatgactttattcaatgtacattctacttttctgctaatcctacataacttagaatttgtttgaagttgtctattggcagatcacatgatggtagtattggaccataaccaaatcaacagacactattacacttgaatgacttagaccccgtgatcgttgcagcatgaaatcagataagatgctgaccaaagatcctgagtgaacagtgcaaaccgtcaaaaaatatccatatcaatagagctaactagcactccatcatcttcccactttatatcctttgccacgggatcgtttcctatcaatttaagaggaacatctaatgggggtggagtcatgttgcggataagaggccaattgattccacggtaaaaaggatgttgcttgatttcattggcaccagtggttg

SEQ ID NO: 15467 - DNA, 463 bp, Glycine max
  unsure at all n locations
  Clone ID: jC-gmle01810086c06a1
ctcatgcatgatcgcaccttcaactctcttcttcttcaccatggctttacttcaaggttttggcgctgtggagttcgttttgtagcatcaccttatcatcagcttctgcttgctttcaccacaacggcctcactatttggtgtgttccatgtcacaaaaaacgaaaggagatattccttttacccactcctcgtcagggaagatctgaagcagcgctagctagcagcacacgtcctctaatggacgccgactcctctggagaagaagtgcttattaaaacaagaaagccatatactatcacaaagcaaagagaacgatggacagaggaggaacataacagatttctagaagccttgaagctatacgggcgagcatggcagcgcatagaagagcatataggaacaaagactgctgtgcaaatcaggagtcatgctcagaaattctttacanagttggagaaaga

SEQ ID NO: 15468 - DNA, 509 bp, Glycine max
  Clone ID: jC-gmle01810086c06d1
gaaagtaaaaagagtgtaatgtaataatttaatatggtacacacacctacacgacaagtttcgtgagctgcagaattagaaaataagcaatacagacaatgaacaaggaaactaagaaataatatatgcaaaactagagattttctttgtgtggttgcatggatatatcaagcatcaagttgaagcctccccattcaagcgtattctcttaggacctttttcttcaccttggttgcaggctgttccgatcctgttttcattggcctctaccgaacatcttttgtaaggtttaaaccctgttggacgagtctttagctttcctggtccaagacctatgattagcagtccctcctcctcattgttatctttgacaaatagcagatttttctgcaccccatcacaattagaactgcatttcttgctttcaaggtcttcatctttgtagtctgtgttttggtcgttatccttgatgctgtctatctgattatcctcatttatcaaatcatgag

SEQ ID NO: 15469 - DNA, 455 bp, Glycine max
  unsure at all n locations
  Clone ID: jC-gmle01810086c07a1
tggagttctatgcaattctgaaaatgggtgtgaggattttccttgcttttgcttctgggtttgaggctgtgttctttggatttgatttgtttggggtttgttagggtacagctgctacaaaagtcaaaatggcacagaaagtggctcagggggttgctgacaaaagaagaggaagaaggggtccgggcagtgttattggatccagcgctgctggttgcatttgtgctttcctcacaatttttggtgttggaggagaggcattttctcggctatggagacttgggtttgttgccagtttctgtaccaagttgagtgacactgtctcaagtgagatcgggaaggcatatagaaaaacaacgtgagtggtgaattcaggtgtgaatattggttgcgttatgcnagatgacaacatctgtgtatgaagcattcatggttctttacttgttagctattct

SEQ ID NO: 15470 - DNA, 476 bp, Glycine max
  Clone ID: jC-gmle01810086c07d1
aggagaaactgttctatttcttaaaagtaagttggatcaaggaaagggaagttcacatctacattttgaaagaaccactgcttcccatacaagacacttgaatcatggttacagcttactgagttttgtggtttccattgccacttctattaatttctgtaactaccaacatgctttgagtacgatcagaagaatgggtttctatccatgtttaaataagtataaacatctgagtcggttttcaaggacaaataaatgaataatcattttatctgcactgctccattgctcaaacccgtgttctagataagcacttatgaagatggtcactacgttaatatgattgagctccgtgaaaaccttggcatcaagtttaggaaccacagatctggagtgcttgctgcatgaagattgctatgatactgcccattgatatgttgatgacattgactgcatcattgttaagccatttaaat

SEQ ID NO: 15471 - DNA, 376 bp, Glycine max
  Clone ID: jC-gmle01810086c08a1
caaactcatactgtgaaaagcagtacacatggaaaattacccaagcctgatacggcaccctccaaggattttgaattaaatttgtttgaggataaagatcgtgtaggtgagagtacaactaactttcaaaaccaggcttttaacacttttgttgctgaattcgatgccactaagctcaaccctggacttaataacaaacccgaaagggaacaagcattagaggctgcggtggagatactcaaagagaagctgaaggaagctaatttggaaaaagctgaaatcacatcaaagtacgaaaagctttctgctatctgccgatcacagaggcaagaattgcaggatctcaagcaagcactcgcagctaggactccttacc

SEQ ID NO: 15472 - DNA, 537 bp, Glycine max
  Clone ID: jC-gmle01810086c08d1
gtacattgtaatgtatagttctgattcgtacatatattccgacggtttatattttaattatatgaaccatataatgatacataactattattacaaaaagataaagcaccccaaaagacgagaaaacaaattaatgtgaacacaataccacattactctattctgtaggctagaaaaggatgatgcaaattggttgactatttagacgcactcattacagatcagtgtttgataatcggcttcttcacgatcatcacagtgcagtgagcatgatgagcacaatagtcactgacactacctaaaaccggcctttttatagccccataagcatgactacccacaaccgacattgcagcacggtacttatctacagcatgacaaagaacatttctaggatcaccttccaccacttatgctgtcacatcatttacggaattgttgatgcaaagttgtttagcggtttcgaggacttctgcgccaatctttcttaaatcggaaactacaataggcaagacctgagtggctcctgcaacacag

SEQ ID NO: 15473 - DNA, 465 bp, Glycine max
  Clone ID: jC-gmle01810086c09a1
ctaagtgtagatcagtcacgagttagtgttgttacttgttagaagaagtagagtacatgaggaaaagggtcgctggagaagctttttgaataaagaaaagaaagtatcgttgtgagggaaaagtgaaatggagccactgaatcagaagtcttttgagagagtggtttcccagaaagccttgcaaatgggaaactcatttccttgccaaatttgtgtggtgggatttctctgcggtgtatgccttacctctctgttcttggctgctctcacatcctttggctcctttcagcttggtcccattttgttttcaaccatgtcaatggctaattcatcagggtattctacttttcctaacgatatcaacatggttacacgttcggactgccactttaagtttaaggaaactgagagattaggggattctaagagcagcagagagcgaaataacgatgagagagtctcatt

SEQ ID NO: 15474 - DNA, 341 bp, Glycine max
  Clone ID: jC-gmle01810086c09d1
gactccaaaaacaaggggcaagcattttgattgtttcatcatcactctatcaattagagatcgcgttgttttattttttacatatgtacaataattatacatacagagaatcatattgcttggtagcctaaccactgatgatctaatttacaaacgtaactctaccaaaatctgtctttattgacactcaagtgcccagccattacctttcccccagtatttctcattccatctataagaaaggaccaggaagaacccaatgccccaacgtaaaaatctgagtcagcagccatcaagaaattaaccagtggataatttgtgctggtctccctacccagact

SEQ ID NO: 15475 - DNA, 582 bp, Glycine max
  unsure at all n locations
  Clone ID: jC-gmle01810086c10a1
aatcaaattagttcattctctttgcgcagttccctacctctcctttcaagatgcagatcttcgtcaagaccctcaccggaaagaccatcacccttgaggtggaaagctctgacaccatcgacaacgtcaaggccaagatccaggacaaggaaggaattcccccggatcagcaacgtctcatcttcgccggaaagcagctcgaggacggccgtaccctcgccgactacaacatccagaaggagtcaacccttcaccttgtccttcgtctccgtggtggcatgcagatcttcgtcaagactctcactggcaaaaccataaccctagaggtcgaaagctctgacaccattgacaacgtcaaggccaagatccaggacaaggagggaatccccccagaccagcaacgtctcatcttcgccggaaagcaacttgaggacgggcgcaccctcgccgactacaacatccagaaggaatcaacccttcacctcgtcctccgtctccgtggtggcatgcagatcttcgttaagaccctcaccggcaagactantaccctagaagtcgagagctccgacaccatcgacaacg

SEQ ID NO: 15476 - DNA, 493 bp, Glycine max
  unsure at all n locations
  Clone ID: jC-gmle01810086c10d1
gataattatatatcagctccacaaattgataacaaacagtagtaacattaatgggacaatagagttcaacacaaaccaaacttattttcaaaggtcattacagacccattacacatcacatttcttcttaaaatgtttgggaaaatccaacatcgaacatcacacagaaatcagctccagcttaaaaccccccacgaagacgcaacaccaagtgcagagttgactccttctggatgttgtagtcagcgagggtccttccatcctctagctgtttgccagcaaaaataagcctctgctggtccggtgggattccttccttgtcctggatcttcgccttcacattgtcaatggtgtcggagctctccacctcgagggtaatagtcttacccgtaagggtcttgacgaagatctgcataccaccacgaagacgcaacaccaagtggagagttgactccttctggatgtngtagtcagcaagggtacgtccgtcctc

SEQ ID NO: 15477 - DNA, 541 bp, Glycine max
  Clone ID: jC-gmle01810086c11a1
tctacaacatcttgacctcgttcggcgccgttgctcgacaggtccatcaaaaggtcatctcttcggattacaccgccttgaaatcatccggcagtccaacgcagttcccgtccttgtcggtgaacttttcgcggtcataccggacttgaacgagctttacattcccaccgcagacctacaaggccgagtcccagctcgacctctccaaacgaggccctcccgtttcggctcgggcacactgcaggacaggttcaacgtccgatctccccttttatctcgtcagatctccaatctttccctcgaattgcacaatggccgttgcacctatccctcccgtgccccggtggaggaagcgacaagaggcatcttcagcagtcgcagcatcttccgctcccgccgccgcttcgtctgaagcgcccgtttcgagcgctgcccctcagtcgtcggctgcccccgctttatctgaggccccaacatccagtgctgcgcctcagagctcgcaagcggctcagagctctgctgcaccgccgacgagcacgac

SEQ ID NO: 15478 - DNA, 541 bp, Glycine max
  unsure at all n locations
  Clone ID: jC-gmle01810086c11d1
cttgatgatattatcgatcacatcgagaaatcgagatgaggatgatacaaaggatgatatttggttcgatacgagtgcccacgatggtatctcctttcgatcttacttctgcacttcttcacttcgtacacggctgattctggcccgcttcagcccgattgtccatatccaatgtgatccttctgcgtcgcttctcgacgaaggtatacacgacgcccgttgcgttatctaatgacgagacgggttggccacgtgaagagggttctcgcgttcgagcggagtatccagactgccttctcctcccgacccttggtacccagcatacggatcatcatatcttccgtaaccctgtccatacccctgatccgcatcggcatactgccccgcatcgttcgggtcaaagtaatacccctgatgctggccatgttgctgcaacccctcatacccgcctgcgccaccggcagctgccgccgctccgtaatcgtaccccgtgcggtgtatcgaacgggcccttgtcgnccctgaccagatggtcggaata

SEQ ID NO: 15479 - DNA, 503 bp, Glycine max
  Clone ID: jC-gmle01810086c12a1
ccatgatctcctatgcaattctcaagcttagatataagtcttaattaaacaaacttggcattgtagtagtagaaccttatttgactcaggttttcatggctgcatttcctatgctctacaaaacgccttacaaggaccaaaatctgccaacccaaaatgtaatgaggcagaatgagaagaggttcatgtatgagtgtgataatatgaagaggctcatcaatgtcaactcctggtcaaatatgcaggagtagtctaccatggaacaaagtccactgtggcctcacataatcaaacacagaagagaggaatgctcctaggaacatacttcatggcagatgctctttgcataagaatgtcacataactttgtggttcagacagtcacctaaagcctcattaaggaatgttattcaaagacagaaaacctttccagagtttggtgagcagcaggctctagctcaactgagaagcaactaaggtcattagattcttattttggaaaac

SEQ ID NO: 15480 - DNA, 495 bp, Glycine max
  Clone ID: jC-gmle01810086c12d1
gaaaactctgaggcatgtgctgacagcatcacacacacataaaaattatgtctatacagctcatttacaataaaatggactaaactatagcacatattaatctctcaattgtggagtgtgttaaaatggaggaaaataactttctattttaagcatctatcaagtatgagaattgtaatctaatcttgaaaatattagtgcttgtgcaaaacttagtttattgggctggggactgagcttacacaattatacttttgtaaccctataatatttatatactagaagaaacagtagagcctaatctcagtaattagtgcctctaatgcatttctcactttttacttccttttttacaatacatgtctttgtagggcagtagcgactgccttccttccaaggtataagtccttcttagggcagaaaccttatgacatgttgcatcagccaaatatcaacatatattccaaggcatcaacagctgctgcattgacagat

SEQ ID NO: 15481 - DNA, 465 bp, Glycine max
  Clone ID: jC-gmle01810086d01a1
cgcaaccagcaatccaagagtgccgtgtatggtcttgaccaattctcagatttgagtgatgaggagttcagaaccaccatcctcatgaagaacaccttgcccattgacaacagcgcccccgtcccctttgttggctcaccctctgccccagctacctttgactggagatcctctggtgcggtcacagctgtaaaagatcaagagcaatgcggaagttgctgggccttctccgcaactgaagccatcgagtctgcttggatccttgccaagaaggcaactaacaactcagttgacctcgctcctcaacagatcgtcgattgtgacagacaagacggtggatgcaatggtggatggcccagcagcgccatggagtacgttcacagcgctggtggtcaagaggatgagagccactacccatacaccgctaagaccgaaactgcgcgttcaacttcgttacgtcaagcg

SEQ ID NO: 15482 - DNA, 485 bp, Glycine max
  Clone ID: jC-gmle01810086d01d1
agccgtaatcgaattctattatattttaaattacacaaataaatcgttacgtaacatcacgtgtaaaagatacatttaaaatttaattataaaaatattataactttaatataattataaaaatactaaattatctttataatgtgggccaagttgctttggcagtaagagcgcaggtatcacctcccatagcaaggtagatgtatccaccatatccccaaccatttccccatgagtttctcacaatccagtaaggagtagacgcggccgagttgtatccaacaagttgaacacaatggtctaattggcaggaagtgcagcattctctagaggtcaaaactccaccttggtatccattccagctggaagcatcaacacagatggagagaggtcccaaagcgagcaagccagcttgaagagagttctcgtccttaggggtggcagccactttgtaagcattaatcttcgctttgacgtaagcggag

SEQ ID NO: 15483 - DNA, 473 bp, Glycine max
  Clone ID: jC-gmle01810086d02a1
cttatataataaaattagagaccatgtaatagtcagctgcattatcaatgttacagtggattacagatcaggtctgatatctttagagaggacaccgacaacttggcatgcaattcctatgccggatgtgaatattcacactacagaatatctatatttatgtggaactattctgcatcaagaatcttgtgaaatgctgcatgatcttggataataactgtgaaaacaattctgaattgacatgatcaactgtattgagatgctcaacgatatatatattataccatggcaatacatttgatcaaagcagggataatacgggacattactggacgaattatacaatgttgaatctttaaatgactgcttgtatgacgctcacagaactctggatgacattgatgagaatcaactatggtacacttaattcatcagttactgctcgttggaacacgacatcgtatgcgctaaca

SEQ ID NO: 15484 - DNA, 500 bp, Glycine max
  Clone ID: jC-gmle01810086d02d1
aaaaatcaataattctttttaaatgagaaatcacgttaaccatctattccaccagtaataaacaatgacattaatgcgtatacaatccttggtaataactattagcattaaagtgttaagatagtctcatgcatcatcagtttgcaccgtgaggtcctgtacacccaaatcatggtatagaccatgcacaaattctagtattggccgatcgtacggcccttgctttacctgtcagaatgacccactaaaagtgagtatctagattaaagctactgaataaaaagaaacggaaacatgccgaactgacatactcaaagtttgaaaatgaaattagggctctatacaatagatgaacaacatttaacttgggtgcccaattgaacaggactaagcgttcgagggatgtgaatccagacagataactaatcaagtttcagagagttgctcccactagggagcaccagtattgataaaggaaaggagaacacatcataaattac

SEQ ID NO: 15485 - DNA, 540 bp, Glycine max
  Clone ID: jC-gmle01810086d03a1
ccgattgcaagcaatggactccttcaattccttcttcgattcaacaaaccgatggaattacgatactctcaaaaacttccgtcaaatttctccggtcgttcagaatcacctcaagcaggtttattttactctgtgtttcgccgtggttgctgcggctgttggggcttaccttcatgtcctcttgaacattgggggttttcttactacagtggcatgcgtgggaagcagtgtttggttactctcgacacctccttttgaagagaggaaaagagtgactttgttgatggccgcatcactgtttcagggtgcctctattggacccttgatagatttggctattcaaatcgatccaagccttatctttagtgcatttgtgggaacatccttggcctttgcatgcttctcaggagcagctttggttgctaggcgtagggagtacctgtaccttggtggcttggtttcttctggattgtccatccttctctggttgcactttgcttcttccattcttggaggttcaacagctctctttaagttgag

SEQ ID NO: 15486 - DNA, 570 bp, Glycine max
  Clone ID: jC-gmle01810086d03d1
tttaacaagtgtcaacactgtatagacagctgttttaagtattacagtccaagggagttgaagtgttaactgagcagattggtaagaaaatcaatctctcctcttctttttcttctcattcctctcagccgaattcttcaacataataacaagaatccggacaaaaactgcaaccaaatcggtaaacaaggtcaaggcatgctttacatagtccagatcgcccaagtgtgccctctcaactatttcttgggtgtctactacaatgtaacctacaaacaccaaaagcccaaagtacaactcaaacttaaagagagctgttgaacctccaaagatggaagaagcaaagtgcaaccagagaaggatggacaatccagaagaaaccaagccaccaaggtacaggtactccctacgcctagcaaccaaagctgctcctgagaagcatgcaaaggccaaggatgttcccacaaatgcactaaagataaggcttggatcgatttgaatagccaaatctatcaagggtccaatagaggcaccctgaaacagtgatgcggccatcaacaaagtcactct

SEQ ID NO: 15487 - DNA, 550 bp, Glycine max
  Clone ID: jC-gmle01810086d04a1
ctcgagccgatcatctctatattattttttaaaatatccaacatttgtaatatatgaaaacttattggctctttagaactaaaatttgaatatttcaaaaatataaagaccaaaacttacgattctgaaattcgtaagatatgaaaactaatgattgaactaaaagcaaataggatccatttttaagagactataaaataatgcttttaaaaataaaactaatgattgaactactgaagacactaattaaatttatatttttaaatattatctaacttttttttcgggcacgtcttgtgcttgaaaatggccatcttcaataagaatattcactttccttaaaaaaataataatattatctaacatttgaagtaatgaaataatataaaatcgtaataagaaaccaagatataaaaaatgtaaattaatataaatgattaaattgtgtgttttataaattaaaaattaaaattaattgataaaataatttatacctgtgtaacctttaagatgtgtttttatttttcttaaaaatatttaagattaaatt

SEQ ID NO: 15488 - DNA, 577 bp, Glycine max
  Clone ID: jC-gmle01810086d04d1
caatatgtcggtagcaatcatgtttgaaatacatttataattatatttaaatcataaatcaccaattatgacgttgataactaaattatatcttctcatattagcattttgattattgtgttacataatggttctgcaatccggatttcaattccacgctttctcttaataaatatacccatatggtcatatcaataaactctagttctttttaatttcataaattgataagtcatcggacatccgttatattttacaaaacaactattaattaccaaaaataatcggccactttagttatgatggcccaaaaatttagttatgatgttattataatctatttaattaaaccttatactaaaaaaactctatataattaaatctttcctaaataatataatactaatgtttttttttaattctgttttcaaatgtaaatgtccaacccttttttagaaaataagttttgaaattaaataaactgaaaaagaaaagttgaggcagatgcaatctctcaatctattaagcttaattaaaaaaatatcgtacggattaatcatattttaacataatttta

SEQ ID NO: 15489 - DNA, 542 bp, Glycine max
  unsure at all n locations
  Clone ID: jC-gmle01810086d05a1
tgatgataagattgtgggtgctgtatcgaaatctgttttcacggttgatgagaaagagcgtgagaagaatgttgaagaaacatatgaggctcttcagtttcttgagaatgagctgaaggacaagaagttttttggaggagaggaatttgggttggtagatattgctgctgtcttcatagcattttggatcccaatttttcaggaaatagcagggttgcagttattcaccagtgagaaatttcctatactctacaaatggagccaagaattccttaaccacccttttgtgcacgaagtccttcctcctagagacccactttttgcctacttcaaagcccgctatgaaagtctttctgcttcaaaatagacttatttaaggatatttgttgaacaacttgtgtcttgttgagttattgctgtttgaatttcatgtaaaatgatactagctatatgtaaatcccagaaaaaaaaaaaaaagaatctctaggatcttgtttcgttctggccatttcagttaataaagaaattatttntctcgattt

SEQ ID NO: 15490 - DNA, 554 bp, Glycine max
  Clone ID: jC-gmle01810086d05d1
atatcgaaaaatataatttctttattaactgaaatggccaaaacgaaaacaagatcctaggattcttttttttttttttctgggatttacatatagctagtatcattttacatgaaattcaaacagcaataactcaacaagacacaagttgttcaacaaatatccttaaataagtctattttgaagcagaaagactttcatagcgggctttgaagtaggcaaaaagtgggtctctaggaggaaggacttcgtgcacaaaagggtggttaaggaattcttggctccatttgtagagtataggaaatttctcactggtgaataactgcaaccctgctatttcctgaaaaattgggatccaaaatgctatgaagacagcagcaatatctaccaacccaaattcctctgctccaaaaaacttcttgtccttcagctcattctcaagaaactgaagagcctcatatgtttcttcaacattcttctcacgctctttctcatcaaccgtgaaaacagatttcgatacagtacccacaatcttatcatcactcgagccgaat

SEQ ID NO: 15491 - DNA, 493 bp, Glycine max
  Clone ID: jC-gmle01810086d06a1
ataactcgtagtcacaatggcaaacgacgctctccaggtcaacttggacaacaactcccagttgggtatcacccaacatggctctgactggctctgggcagtcttcgccgtcatgctcttcaccgacttgattgtcattggatggcacttcaccgtccctcgaggacaacgattgttccaccagctcggtgcgattatcttgaccactgccgctatcgcctacttctcgatggcctccggtctcggttacactcccattgccactgagttcgcttacttgggctaccccgttggcactctccgacagatctgggtgagtgcgcttgaaatcgacagtgaacatctttgctgatggcggtagtacgtccgatacatcgactgggtgatcactacccctgctcttttgctagagttgtgccttgcctccggtcttcctttgtccgacattgtcactctgatcttcttcgacttggtcatgaatatcactggtctc

SEQ ID NO: 15492 - DNA, 472 bp, Glycine max
  Clone ID: jC-gmle01810086d06d1
attataatgatttgcatgaactatgtaatatggctacatactacgctggaggtagatcaattatagaagaggaatatcatccgttgttgtcttggtgtgaaaaagtatcgcgtgtgataggatgatcgttggatgatgttacgcaacgatcagattgaactccggcagggcttatcgcgaagccatggtcgcctctgaagtcctgggcatggtggtgttggcatcggcgggatggtcggcattaacgggttgagcgtcgtacttgcctttcctctggaagaagcccttctttccgtgagcagccatgttgtcgtggccggcaggggcgacggggtcgttggcgatcattccggtgttttgggtagtacgagggttcttctccatgtcgtgggtggtgatagcggcggccgaagtggtgtacttgccggactggagttgcaatctggtaaggtcacagttcctaagggagatg

SEQ ID NO: 15493 - DNA, 536 bp, Glycine max
  unsure at all n locations
  Clone ID: jC-gmle01810086d07a1
atggaatgcaagagttttatgtgcacttccatggacccaatgagagtccttatcatggaggtgtatggaaagtaagagttgagctgccagatgcttatccttataaatctccttccataggctttatcaataagatctatcacccaaatgttgatgagatgtcaggatcagtttgtcttgatgttatcaatcaaacctggagtcccatgtttgatcttgtcaatgtgtttgaggtgtttctaccacaacttcttctgtatcccaatccatcagaccccttgaacggagaagctgcagctttaatgatgcgtgatcgagccacttatgaacaaagggttaaagagtactgtgagaagtatgctaaacctgaagacataggagctgccacagaagagaactccagtgatgaagagctaagtgaagatgaatatgattctagtgatgaacaggttgctggtaaggcagacccctagccttgcatgcatgttcctgttcttctcattctatcttaacttgngcatgatgttctagtcatg

SEQ ID NO: 15494 - DNA, 401 bp, Glycine max
  Clone ID: jC-gmle01810086d07d1
aaaaaacaggaagggaaattttcccctttccacaaccaagtccatttcatttaaggggggaaattaacatgactagaacattatgcccaagttaagattgaatgggaaaaacaggaacatgctttcaagggttggggtctgccttaccaaaaacctgttcattactagaatcattttcattttcacttagcttttaataactggagttcttttttgggggagctcctatgtcttcaggtttagcatacttttaacaggactttttaaccctttgttcaaaagggggtcgatcaccccttattaaagctgcagcttttccgttcaaggggtctgatggattgggatacaaaaaaagttggggtaaaaacaccttaaacacattgacaagatcaaacatggga

SEQ ID NO: 15495 - DNA, 456 bp, Glycine max
  Clone ID: jC-gmle01810086d08a1
aaaaaagtgtggaatcaattgaaatcaggcggtgctgttgaattctgcaatggcatcagcagcgcctaatgtcgatctcttcgatgcctattttcgccgtgcagatttggatcgagacggccgtatcagcggtgccgaagccgtttccttcttccagggctccggattgcccaaacatgttcttgcgcagatttgggcatttgcaaaccaaagccagagtggtttccttgggcgggcagagttttacaatgcccttaagcttgttactgttgcacagagtaagcgggaactaactcccgaaatggtaaaagcagcattgtgtggcccggcttcatctaagattcctgctcctcaaattaatttcattgccacagtatctgcaccacagattagccctgctagtcctttatcccaccaaaatcttggaccaagggggggcagctccaatttgagcgc

SEQ ID NO: 15496 - DNA, 276 bp, Glycine max
  Clone ID: jC-gmle01810086d08d1
gtagggttaggttgttattttatttttttgtttctttttgatttgtttttacccccccccacaaagggaaaacaaacatataaaaaaagcccttgcaaaaaaccaaccaaaaccatagtttgtatggacccaaaattttttttggggggcatgggaaaattttcaccccaaagacccagaacatttagcaagggggggcccatgtttgaattacgggggcaaaaaatcggggaaagggagaaaaacgcctgccccccccaaaaaaaaacgggggga

SEQ ID NO: 15497 - DNA, 425 bp, Glycine max
  unsure at all n locations
  Clone ID: jC-gmle01810086d09a1
aatcaaattagttcattctctttgcgcagttccctacctctcctttcaagatgcagatcttcgtcaagaccctcaccggaaagaccatcacccttgaggtggaaagctctgacaccatcgacaacgtcaaggccaagatccaggacaaggaaggaattcccccggatcagcaacgtctcatcttcgccggaaagcagctagaggacggccgtaccctcgccgactacaacatccagaaggagtcaacccttcaccttgtccttcgtctccgaggtggcatgcagatcttcgtcaagactctcactggcaaaaccataaccctagaggtcgaaagctctgacaccattgacaacgtcaaggccaagatccaggacanggagggaatccccccagaccagcaacgtctcatcttccgcggaaagcaa

SEQ ID NO: 15498 - DNA, 474 bp, Glycine max
  Clone ID: jC-gmle01810086d09d1
gataattatatatcagctccacaaattgataacaaacagtagtaacattaatgggacaatagagttcaacacaaaccaaacttattttcaaaggtcattacagacccattacacatcacatttcttcttaaaatgtttgggaaaatccaacatcgaacatcacacagaaatcagctccagcttaaaaccccccacgaagacgcaacaccaagtgcagagttgactccttctggatgttgtagtcagcgagggtccttccatcctctagctgtttgccagcaaaaataagcctctgctggtccggtgggattccttccttgtcctggatcttcgccttcacattgtcaatggtgtcggagctctccacctcgagggtaatagtcttacccgtaagggtcttgacgaagatctgcataccaccacgaagacgcatcaccaagtggagagttgactccttctggatgtagtagtcag

SEQ ID NO: 15499 - DNA, 610 bp, Glycine max
  unsure at all n locations
  Clone ID: jC-gmle01810086d10a1
atgaaattcgaacaatgattttttcattttctttttaatacttttttggtttagactccctaagaatctgtcgatatttccaattaaatcttcttgttcctgtgaaggtcctataaaaaaaagggctatgccctttctttactcagaagggccttattccaagttccaccaaacaagtttttattcatttgaaacatctttttttccgaatacaagaaaaaattcatttcaatttcaattatttctataagataaaatcgatatagatagattttatcttatagaaataattgaaaaatacattcaattatgtcttcgcgtatcaaatattttcttttcatatcgatgcgtacgatatttttccagcaattaatgtatgtgagacagaaactttcacttacagttttttctttttaatattgtatttcattttttttaataattaataaaataataataataatgaataaaaaaatcaaataataattaataaaaagaanaaagtgtaaatcaaatagaaatttataaaatctatgatcctagagagttccctagacaaaatagaagtagttcacaaacaagattcaagaataagattctctgatgaaag

SEQ ID NO: 15500 - DNA, 458 bp, Glycine max
  Clone ID: jC-gmle01810086d10d1
cgaataaaaaataatttatgagtctattgatatctagggcaaatcgatgaactcaatgtagttattcctttctattcttaaaaatcctccaagtcataaatcataaaatctcctatgactcaaaaatccgatagaaaatttttttaaaagaactgttcaagaaacaaatgatcccctctttcactccttatacccagcggatcctcagacatatttctctcctttcatcagagaatcttattcttgaatcttgtttgtgaacttacttctattttgtctagggaactactctaggatcatagattttataaatttctatttgatttacacttttttctttttattaattattatttgatttttttattcattattattattattttattaattattaaaaaaaatgaaataccatattaaaaagaaaaaactgtaagtgaaaagttctgtctcacata

SEQ ID NO: 15501 - DNA, 560 bp, Glycine max
  unsure at all n locations
  Clone ID: jC-gmle01810086d11a1
ggagttgtgttgcttgaactattgtccggtagacgagccgttgacagatcaaaagccggtgtagagcagaatctagtagaatgggcaaaaccatatttgggtgacaaaagaagactatttcggatcatggacaccaaattgggaggccaatacccacaaaaaggagcctatatggcggccactcttgctctaaaatgccttaatcgtgaagccaagggaaggcctccgattacagaggttttacaaactcttgaacagattgcagcctcaaaaactgcaggaagaaactcccaattagaacaaaagagagtccatgctcctgtcagaaagtctagtgtgcaaaaggggtcccatttgaatcatactcctactgcattcccataatctgcttgtgtactctgaattttgaacatctgtatatacattccttatttttataaggttggttntgacaaggagaaatgctagggaacacactcttagacatactcttttgaacacatnctctcttgtagttgaaattattgaaaatgacanattttgtgagtcttacatatgtt

SEQ ID NO: 15502 - DNA, 264 bp, Glycine max
  Clone ID: jC-gmle01810086d11d1
aaacatgatgtaagactcacaaaaatttgtcattttcaataaatttcaactaacaagagaggatgtgttcaaaagagtatgtctaagagtgtgttccctagcatttctccttgtcaaaaccaaccttataaaaataaggaatgtatatacagatgttcaaaattcagagtacacaagcagattatgggaatgcagtaggagtatgattcaaatgggaccccttttgcacactagactttctgaccagagcatgggccctttttt

SEQ ID NO: 15503 - DNA, 581 bp, Glycine max
  Clone ID: jC-gmle01810086d12a1
ctttcgcttctgaatcttcaacaatggtgctcgaggcgacgatgatctgtatcgacaattctgaatggatgcgtaacggtgattactctccttctcgatttcaagctcaagcagacgctgtgaatctcatttgcggtgctaaaacgcagtctaatccagaaaatacagtgggagttctcacaatggcagggaaaggcgttcgtgttttggtcacccctaccagtgatctgggcaagatcttagcctgcatgcatgggctagatataggtggtgagatgaacctagctgctggcattcaggttgcacaactggctcttaagcatcggcaaaataaaaaacaacagcagaggattattggctttgctggaagccctgtcaagcatgaaaagaagatgttggagatgataggaagaaagttgaaaaagaatagtgttgcacttgatattgctaatcttggtgaagaagatgaggggaagacagagaagctggaagcactcctcgcagctgttaacaataatgataccagccacattgttcatgttccatcttgtcctaatgccctatctgatgtacttataagt

SEQ ID NO: 15504 - DNA, 576 bp, Glycine max
  Clone ID: jC-gmle01810086d12d1
aaaagccctcgtcacatgataagcaccaaccaagaacaaggcatgataatcaagaacattttaagttaaaaatcatccaatattcaatcgagagacatgcattggttccaattaaagtgcagagagacacattgaaacatgcgtaaatagttcccccgattagtaacagccgcgaagaatgctaccaagaaaataaaaccatacagggcaaagtggttctcaaagattacttcttctcctcctcgtttgatggcttgtcgtcattcttctgttgaggctcagactgattttgcatggaagccagcaaatccttgacagaagggtcatttgggtcaaccccaggaagcgatgcaaggatagaagatacaaaggattgatcggccaacaatttgctcatgtctgactggctgccttgatcctttgtactatctgctattgacaattggagtgccagagccaagtcaggatcacttgcagaagcttctgacatatctgtatcttttacatcatggctaatggcaggatcatccatagacattgcaagcgcctgctgtagtaaggcattctcatcatcca

SEQ ID NO: 15505 - DNA, 449 bp, Glycine max
  unsure at all n locations
  Clone ID: jC-gmle01810086e01a1
cgggatgttcagcctccacaaaagcatgcatatacggcatccagtacggtgacagttcgttctccgttggctacttcagccgcgagcggctctccgtgaccgccaccgacatcgtcgacaacttcctcttcggttgcggccaaaacaaccagggcctctttggtggctccgccggcctcatcggcctcggccgccaccccatctccttcgtccaacaaaccgccgccgtatatcgtaaaatcttctcctactgcctccccgccacctccagctccaccggccgcctctccttcggcaccaccaccacttcctacgtcaagtacacccccttctccaccatctcccgcggctcctccttctacggcctcgacatcaccggcatctccgtgggcggcgccaaactcccagtctnctnctncaccttctccaccggcggtgcaatcatcgac

SEQ ID NO: 15506 - DNA, 402 bp, Glycine max
  Clone ID: jC-gmle01810086e01d1
ttttttttttttttttttttttttttttttttttttttattttttatttattttttttattatatttatttttaaataattaaaattttataaaaaaaaaaaaaaataagaagaaaaaaaaaaaaaagagagaaaaaaaaaaaaacatacataagggaggaaaagaaaaaaaaaaaaaaaaaaaaaagggggaaaaaaaaaaaaaattaaaacccaaaagaaaaagaaaaaaaaaaaaaacaagggagggaggaggaaaaaaaaaaaacccccaaagaaaaaaaagaaagaaaaaaaaaaaaaaaaaaaaaaacaaaagaaaagacaaaataatttgcaaggaccaggggaaaacacaaatgtaaaaaaaaaaggaaaaaaaaaaaaaaaaaagggccaacg

SEQ ID NO: 15507 - DNA, 533 bp, Glycine max
  unsure at all n locations
  Clone ID: jC-gmle01810086e02a1
gtccatattatgatgataacattttgcagccaccatctttcttatcaattgacagatacttcaaatcaactgtcaaagtaaaaaaatgcggaatatgccctctttataccaaaaagaaagatgataataatgcaggtgcaggcgactattctggatctgtgagattttcaaaaaatggcattgaagaacctagtggaagcaatgctgcatgaaaggaggaagacctttaataagctacctaggcagctaatatcttgttcttctggttcactcaggtgttcccaaagagattttgaagttgtggtgagatatagtttgttgttgctatatcagcataagttggcttgctcggtttttccacagctgcaatgtttcatagtcttgtatggaaatacaataagatagtaagctagtctcttgttcttccggttcattcaagtgtggacaaagagatttctaagttgtagcgagatatagttggatgttttcccacaacgaaatggccaaatattacttcatgctngcatagcagc

SEQ ID NO: 15508 - DNA, 570 bp, Glycine max
  Clone ID: jC-gmle01810086e02d1
cttacaaaaaatcattaaaaaccctccaataaggatagtttgtagtttgtcatgctgaaagaaagtcgcgaaaggagtaaaacaaagagaaaatgataataagagattcaatcaacttgattatacattaaaatggtcttcaacttgattatcaaactacaattaacacatgctaacagcacttataactcacaacccgaaacaagctttcccaatgtgaagaaagaacatatttgaatttggactcgtattcaacatgaagcacagataagcaaaacaatcagggccagaatgtagaaaatgccatgagagttgtatacaccaaatccagctgaattttaaattcctttataaatggagctcctctaaaattcatattgcctttgctgctatgcaagcatgaagtaatatttggccatttcgttgtgggaaaacatcaaactatatctcgctacaacttagaaatctctttgtccacacttgaatgaaccggaagaacaagagactagcttactatcttatggattttcatacaagactatgaaacattgcagctgtggaaaaaccgag

SEQ ID NO: 15509 - DNA, 524 bp, Glycine max
  Clone ID: jC-gmle01810086e03a1
gcagcgagagattaagtgaggctcaagatgtgccccagtatgtacattgccaagttatgcaaactcttgtgcagagcacttgtacatcccctatttttgaagccaagagtacatatgtggaaaatatgcaggatgtgcccccgctgaaaagttctaaactgaacaaaattgatatggtgaagcatgaaaagtttgcccaatttgaaagggaatcagctgagcataatgatgaaacagaagataaatcagttacaattgtatcagatgctgcaaggtgcgacaaaacttctgaattaacagagttaaggccagaacaagactgtggtgttgctgaacctgaaactgaaaacgaggatgaaatcttaaaatctgagttagacggagacaattctcatgttagtatgatgcaaggatgcagtgctgagcgggtgaaaccttctaaaggagctattgacttgattgccacagttggaaatcttccaaagcaccttgatgaaaactgtagtctcaatggtggtaataca

SEQ ID NO: 15510 - DNA, 615 bp, Glycine max
  Clone ID: jC-gmle01810086e03d1
cgaaactgtcatatcgaatcaattccgattattcccggactggtcggcggccgccctttttttttttttttttgatcactcaattgcaaaaccagaggttctagaggggattttttacagacccatattagtattcaaccaagaaaacatatacacaggtaaaatccaaaccaaacccactaaataattgcaatcctaaatttgtaagtggcagtccaaatataaatctccctactggcctactcttcttttgcctaatggataaacagattccaacaacacatacacagacaccaccctacagctaatccttgttgacacaatcagtgttacagtcagctgtaatttaatactacacgaaacctaaaaagaacaaagttcatgaatcaccaccagcctcagcgacaggatgatcatgttgacgtacaaactgccccttcacccgaggccgctgctctgccagtcttttccggctttgatatcgaacctttttctcgaagcatctctctttccgcttcagtcgaaacttcactagcactgcttctctttgactggagcgatgaggatctgtcactctaaatccatcataattatgacaaccactatcactgaaac

SEQ ID NO: 15511 - DNA, 526 bp, Glycine max
  Clone ID: jC-gmle01810086e04a1
gtagattcctctctttcgattcatttgcttctcgctgatcaaaggtaacttggtatgggagttgtgactgtttctagctcggctgctcggactccattgggattgaatacaaagttttgcaataatcgtctgaagagacctttaattgtagcatttaagggggataagcacaatgactcagctttggttgcaacacaagagaaaattcctgtgccggttgaaacggcgaagaagacgcagaaaaagaggataggaaaaactaacaaactacctaagagagagagttctccatcttccatggatgtggactacaatgaagctgctgccatgcttgaaaatctatacaaacttagccctgcttctgataatgcagaatgcatagatggtaaaatcaaaagagtctctcggagagggaagaaggttgttgatgaaagtgaagaaaaggagttaaagggcgattgggtggtcagaaaccagaacaagaacaagaaacctaaacgattgaatcttgatcagagaatttcat

SEQ ID NO: 15512 - DNA, 377 bp, Glycine max
  Clone ID: jC-gmle01810086e04d1
gaggcggccgccctttttttttttttttttttttttttttttttttttttttttttttttttttttttttttttttttttttttttttttttaaccaggaaaaaagcaaaagcccttaaaaacttggggcaggggcacggttatctaaaccaaaaaacgggggttgacataataagaacgggctttaaaaaacccggtgttcaaaaaatagggtaactttaaaaccgggaaagggggtaataaccaatggggggttatccaaaaaaagggggaaaaaaacccaatctagcggaaggcgggggcttaaaaaaagcctgggattaggggttttaaaccatttccccaaaaaattctaagagcccagaaatttttcccaa

SEQ ID NO: 15513 - DNA, 467 bp, Glycine max
  Clone ID: jC-gmle01810086e05a1
gaactcgcacataatcttcttcttccttctcgattttcctcttcttcgaccttttctagggtttcgattcgttcaccaaagcgcgtctgtggtttctcttctcttcacgattttggggtcgaagcttggagtttagttttgccggcatgtccatgagtgagcgcaagactattgacctagatcaaggatgggattttatgcagaagggcattttgaagctgaagaacattctagaagggcttcccgagcctcagttcagctcggaggactatatgatgctctacacgaccatatacaatatgtgcactcagaagcctcctcatgactattcccaacaactgtatgacaagtacagggaatcatttgaagagtacatcgtatcaacggtattaccatctttgagagagaagcatgatgaatttatgttaagagaacttgtaaaaaggtgggcaaaccataaaattatg

SEQ ID NO: 15514 - DNA, 482 bp, Glycine max
  Clone ID: jC-gmle01810086e05d1
gagtataatctcatttcgtcacgccttagtgtgaaacatccaaatatccagagatgtgaaagtatagatccattctctcggcattatcacagaaagcattcaccggaagaacatagaaaagtcgaccatgacgacatgcacaatcttgaaatccttgagatacccattcacttgatggttttgaagacgacaatcaaactacaatttaactgaaactagggttacacgatttctatttcctttatgggggttgggtgaaataattaacacaggcatcaactaagttgtcatcatatggaactgcagcaatcaaaatgaaaaggaagtgaaggtaccagtgagctggtcctacttatggaattcattacaacttctccaggggcacacatctacagtagtaatccatacctggatatggaggcaaaatgtacaagcactcgcagaccctccttccaaggaaactatggagaaactgataattt

SEQ ID NO: 15515 - DNA, 472 bp, Glycine max
  Clone ID: jC-gmle01810086e06a1
atttaaagggctgacgagaaaatgagtgctggaggtaaaaaaagaaacactttgaaattcactaccacttgcgccgtagctgctggtagatctatgatcatagatgcttcatatgctggtgaaagggatcttcactatggagggaagattctcaagaggaagaatcagaagccactctatgaagccctgcaaaaaattaaagaagagttgatgctattgggctttatttctctgctactgacaataacacaaaatgggataatcagaatttgtgttccagagggttggactcaccatatgcttccttgcagtctaaaggatcatggaaaggaagaattaacaaaaaccacatcacattttcagacttttttctctttctctgatatttctggcactgctaggcgccttttagctgagagtgagagtgagaatgaggatcaccaaccagcaacaggagaaaaacttggacact

SEQ ID NO: 15516 - DNA, 269 bp, Glycine max
  Clone ID: jC-gmle01810086e06d1
agaccttcattaaacattgaaatggtaaaaataattcaggttatgcattggttaaaagctttcccacattagaatttataactgacgtgcaaccttgaccgttttggctaaattttgggatgagaacggattcttacattcttcaggatgaaaaagcttagactggttatgggatcacgttttctttagccctcttttttggggggccaagctccaacttagtatggtcccaaaacatgtttttttgtgcaatgcggcttgggtttttc

SEQ ID NO: 15517 - DNA, 509 bp, Glycine max
  unsure at all n locations
  Clone ID: jC-gmle01810086e07a1
gcgctgcgccatcccctactcatacgtcaaggagcgcgcgggtcctctgaagcccggtgtcgacaccgtggaggaggccgtgaagaccgtcgtggctccggtctacgataggttccaccttgtccccggcgaggtcctcaaatacgcggatcggaaggttgccgagttagacagccacgttccctccaacgtgaagaaggtctcctcccaggcctgctccgtcgtctctgaagtccgccgcgatggcgtctccgcctacgccaagaccgtttactccaagtacgagcctacggcggagcagtgcgcagtgtctgcatggcggaagctcaaccagcttccgctcttccctcaggtggccaatgttgtgttgcccaaggctgcctattgcaccgagaagtacaacgaggcggttgtttcctctgctgagaaaggttacagggtttctgcttatctttctttggtgcctactgagaagatcgncaaagtcttcngtgggaactgatctcgat

SEQ ID NO: 15518 - DNA, 396 bp, Glycine max
  Clone ID: jC-gmle01810086e07d1
gagtaacattattctatattattatatagtaattaacaaaacagaacattcacatcatcatatatccaatccaactcacacactaacagtagcaactagcaacaacactttgtaaagaaagtaaaaacaataagaaattcaaaaccgcaatagatcgagatcagtttccaccgaagactttggcgatcttctcagtaggcaccaaaggaagataagcagaaaccctgtaacctttctaagcagaggaaacaaccgcctggtggaacttctgggggcaataggcagccttgggcaacacaacattggccacctgagggaagagcgaaagctggtagagcttccgccatgcagacactgcgcactgttccgccgtaggctcgtactgggagtaaacgg

SEQ ID NO: 15519 - DNA, 459 bp, Glycine max
  Clone ID: jC-gmle01810086e08a1
ggtttatttactcgtatgtatacagtttaatgtttttgtgattagaattgaattgaaagtcgcttactattaaatgattcgttaaatatcgtaatcactatacaatctccttcaaaagagatcaatgtagctagctcgctcttgactgtatgatggtttacacccatgtatactgtgacgtattttatattttcatgatttggattgaatttgaagcttcttacaattaaatgactcgttcaatatattgtagtcaggatacaaatctacttcgttcaccataattttgattgatttaattaactattatgttcactataattttgattaatttaattaactattaatctttgagaatagcaataatttttaatattgggttcgagttttaactagttcaataagaagttgcaagttttatttatgttcagcatacatttgctatttatcaacctatgt

SEQ ID NO: 15520 - DNA, 526 bp, Glycine max
  Clone ID: jC-gmle01810086e08d1
cacctaaaaacatgtttctcttcattattgtgtagtcctgtttttaacattaaaatggtgaaaatccacattaagaatggatttatgcttcagaaaaaaatgcagagaacttacagaaaaaatgattgaactacttcaatataatgtataccatctccgacaaatttttcatacagccaacaaaaaagccataacaccatcgtctctaataactctaaatcaatcttcccatttcggccccaaaagtatatagcattgcggatattctgatcctcccaaagaattaattagttatcgcatcaaaaaaaaaatcattccattaacttaaaaaccaagaagtcaaagctgatgatcctccacctcttccaacaatatttgataggcaaattacaaaacccaaaattgagaaccaattttaagtgcgcttgccatagtcaaactactccaaatagtcagtgataaatactttgttcccaagaactacagaaaatgaggatgaatttcattacaacgatcagggttcaaa

SEQ ID NO: 15521 - DNA, 469 bp, Glycine max
  Clone ID: jC-gmle01810086e09a1
cgcactctgtgttttcagcgccgtctccgatctccgacaatggcgacccaaatgagcaagaagagaaagttcgtagctgatggagtgttcttcgctgaactgaacgaggttctgacaagagagttggccgaggacggttactccggcgtggaagttagggttacgccgatgcgcaccgaaatcataattagagccaccagaacccaagctgttctcggtgagaagggaaggagaataagggaacttacctctgtggttcagaagaggttcaagtttcccgagaacagtgtcgaactttatgctgaaaaggtcaacaataggggtctttgcgctattgctcaggctgagtctcttcgatacaagctccttggtggactcgctgtgcgcagggcctgctatggtgtttagaggtttgtatggagagtggtgctaagggatgcgaggtcattgtgagtgaaaaatgagagcc

SEQ ID NO: 15522 - DNA, 412 bp, Glycine max
  Clone ID: jC-gmle01810086e09d1
gataaatattattcaaatgacttaaaatacttgtaactgagtataacaatttcttcaaaattttgaacatgtcttcaacaacaaacattgcattcaagaaaaactaggcactaagctaatatgaattactcctccagcgtataacttttcaagcaacagggacctcaatatcattagcggccaaaactggagcaggctggatgtattcttcttcctcctttggagaatggattgcgacaagatcaggaaggggagttttaggaccctgtttccccttaggatcccaatcaagcctgatctttaccttaatgccaagaacaccctgtctcaggagcacatgtctcactgcagagtccatgttatctttgacaggttgcccagaagaaatcatgtgcccatccttaaacttcat

SEQ ID NO: 15523 - DNA, 435 bp, Glycine max
  Clone ID: jC-gmle01810086e10a1
aattcaatgaagatttggttcatcctacacgtacacgtcatgggcatcctgcttttctatgttatatagatttgtatgttactattgaaagtggtgatattatacataatgtgactattccaccaaaaagttttctattagttcaaaacaatcaatatgtaaaatcagaacaagtaattgccgagattcgcgcaggaacatacacttttaatttaaaagaaaaagttcgaaaacatgtctattctgacttagaaggagaaatgcattggagtaccgatgtgtaccatgcatcagaatttagatatagtaatgtccatatcttaccaaaaacaagtcatttatggattttatcaggaaaatcatacaggtcccggttcagtctttttttcaatccgaaaagatcaagatcaaatgaacattcattatctttctact

SEQ ID NO: 15524 - DNA, 468 bp, Glycine max
  unsure at all n locations
  Clone ID: jC-gmle01810086e10d1
ctcactagtcggcggccgccctttttttttttttttttttttttttttttttttttaccgttcttggtggtatcaacacggcactgtgtcgggatatcttatccatttctccgggaaaatagatatccccggaaaatatttttaattcaatctttttttttttcttctccaatcggaccaatccccttactcgacttcttatatttaaagggattagtgtatctacttcaacgatactattgttccgtaccattatggaagaagattctggtaaaatatgcacttcctcgggaatgaaaaaaaattgatctactttaatttggtattttggcttaaattctttaactccttgatactcaattaaaaaatcctcttttttaaaaatggaatttatacctatagtcctatatntagtaattcccgagctctgtgttcggtattgaggatcatcgaaataagcaagaatgc

SEQ ID NO: 15525 - DNA, 549 bp, Glycine max
  Clone ID: jC-gmle01810086e11a1
cgcgagcggccgctcgcgatctagaactaacgactatcccgagctgtagaagaagatatgaggggggtgtttcttccatggaacccaccttgcttccacgacgcactccatctcccttccgtctcgctcctgccaacgagacccttcttcttcaccctctcagcctcctccaccccctcagcgcccgtggagtccgcgtcgcagctcaccgcgcgcgagaggaggcgcgcgaggagcgagaggagggagacgaggagcggcgcgaagaactggagggaggtggtggaggagaggctcatggaaaagcccaagaagcagaagggctcgtggatggacgagctgaacctcgacaatctcgccaagctgggtccacagtggtgggtcattcgggtctccagggttaagggaaacgacattgcgcaactcctcgctcgctcgctcgccaagaattatcccgatatggagtttaagatatatgctccatctgtcaatgtgaaaaggagattagagaatggctcctactccgataaaccaaagcaactgttccca

SEQ ID NO: 15526 - DNA, 462 bp, Glycine max
  Clone ID: jC-gmle01810086e11d1
aactcaataatcacaaagttcattcattatgtcaaattatcaattccttttacagagccagtgggaatgagggattcagttgtgaaatctgcattagcaataccataatgcaactacaaacctcatattttaggctttcagcgcgtatacatctaagatttcagttttgggaatgaagcaccagcaaaaggcttccacctgtgtcctgctaaacttgcagtgaatttcttaacttctgcatgactcaaaatacacaagtaagctccaggtaagatataagaatgcatttatttctctataaagaaatccagcttcatccacaaatggaaaaatgctgaaagagcatgcagtgtgcaactcttcaaagcttttcttttcaatactactggcgattctatgattactgctggacacgtgaagcataccatcagtttggctctatagcaatttcataacgtctat

SEQ ID NO: 15527 - DNA, 339 bp, Glycine max
  Clone ID: jC-gmle01810086e12a1
aaagggtgttccaatttggtttcaagtttttatctttaaacatgtctcaccttctatctgctgctactactttgtctcgtttccaactcttgaccctcaacaacacattcacaacccaacctccctttgtcggattcaagggtacatcatgtttttttgagaagcacagttgctgcttgagtgataaaccattttgcgcatcccagaagagaggggccaatatcttctgaactatgaatatggcagcacagcaatcacatgatcatgggaaaatgaagctggaccaattcatagacaaagtgcaagagctttgggacagtactcctgagccggtgaaga

SEQ ID NO: 15528 - DNA, 518 bp, Glycine max
  Clone ID: jC-gmle01810086e12d1
ctggaccaacattttatgtcactccaaacagaaagtcgaacatgatataatataagatgaaatttttctcttgtacaacaagcaaagtcaccattgacatctatttctcgatactttatctacccccaccattcatcacaaccacatattcgcaagacaaactattttctcaacaaagtgaaatccaaattcaatcaaaatctcaacgggttgcttaactccattaaaatcttcacgagtaaaaacttggtctcaactgaaactgactttgcaggcaacaagtatcataactcagtgagttaactaactagaacccaacatcttcaatgctttaggtcttctataccacaatattgcaaacaatagagtcctcaacagaaccccatttgcaaaatgaggaattattatacgtacccagtaagggtaatatggtccaggcaatttgatcaatgtgaagaaaattgcaatggcaattaaatgccatggaacttctgaatcccttagacgtggagataact

SEQ ID NO: 15529 - DNA, 507 bp, Glycine max
  unsure at all n locations
  Clone ID: jC-gmle01810086f01a1
ggtggggaatcaagagaaaccactagaatatgaggcacaatttgtccgtgctaaagcaccaaaagggctgattgaacttgtcaatggcaatctatgaagcacggacacttcagtcccttgccgtgtccggtgtccgacacgcgtccgtgtcagtgtctgaccgacacgacacccgtactacgttctatatttgggacattacaggtgtccacgtgtccgtgtctgtgtcgtgtccggtgtccgtgtcggtgttggtgcttcatagatggcaatactgacttaggttgtgcttaaggtctatntgttcattgctgttactcttgatgaacactaattatgtgcctggtgcagctgaagatttcttcgacaagtctcttgccaagcagtattgtgatggtatcctcccgttcatgaggtactggagcaggcatccttcaacaccgaatngatgtttggttttgtaggtactgctggtctatcatatgtggaaattctgcatanaatagg

SEQ ID NO: 15530 - DNA, 540 bp, Glycine max
  unsure at all n locations
  Clone ID: jC-gmle01810086f01d1
aaaaataaataaaattgatttcaataatttaataaataacttcacacttcaaagcatttaaaacatcaacatcatataatgtaagtgaatattaaaaagacctcattaaaattcggtctaaatatacatcagccgatcttgaatatcatagtatatgtcggcacgacatttcaaactctacacaacattaatccatggtattggttatgtatcacggtccaacaagaacctatagcagtaataaggtaaaaacacagaaaattgaccaatttacagaatcctgccaattctagaatctatgatattctcccctgaatcaatagctttagccagcggcggtgtttccatagagactcagccaagtactttcatcttctccccttctgcctgtctttttttttggacactaactacttctgcgtatacaccccataagtacttcaagctgtcctaaagcacacaaggaccctacaattaattcttccatgctcatgttacccgctcctaagtatggtctgccagcattntttacttcagtag

SEQ ID NO: 15531 - DNA, 434 bp, Glycine max
  Clone ID: jC-gmle01810086f02a1
gtgggttttggagttccctcaagtctatcttgctgaggaatttcatggtgggttcaaaatcagatgatgagtatcgccaagctgtggtcaaggtggagggtctcctatcctcgattgccattcaaattggaaggtatattgtgactatgatgagcactggggtcatcctttcaattggatttcagatgtcaggtggagacagtcagatggatgcattaatatggtatagttggctaggaggagtaatcattgggacaatgataggtgctaacatggtgttggaggaacattgtcgcgcaggtccacgtaatgttgtcataacggcgagtacaaggggattgggcaaagccttagctcgcgagtctcttctttccggggatcgtgtgattggtacctctcgcagccccgagtctgtgcacgacactatcaaagag

SEQ ID NO: 15532 - DNA, 494 bp, Glycine max
  Clone ID: jC-gmle01810086f02d1
aaccaaaaaaaatgtatatagcattaataaaagcgttgtgtgttgtccaatgtccaatataaatttcagattttagcacactgataaatatacattcaaataaatatattgggtagaaaatatgaaatttcactagtctacaattcaatgaaggctatacatagtaacatactatgactataagcatcttaatgaagaatgctgattgcagggcagcctatatacatagtacatggggagccaaatgtctgagctaagggtgtcaaatgataattgtttaggtggacatggtgggaaaaaaacagatccactttgtttataacttagactttagattcattctattgtcttgatgatttcaggcaccaattacctgtccacaaaagcaaatgcatttttgcattggcagcaatacatcgtcatgttccaggcaaattgctgcctgtgctggaaagaattatgaaggcacagacaactgaaagtgagaagactga

SEQ ID NO: 15533 - DNA, 517 bp, Glycine max
  Clone ID: jC-gmle01810086f03a1
cttcctctcccttctcttcttcctctatctctacatccagttcctcgctagaaaaaaaccccgcaacaacaaagccttcaaagactaccctctcatcggaaccctaccggagttcctcaaaaaccgccaccgtttcctcgagtggaccacccaagtcctccgcgactcccccaccaacaccggcgtcttctctcgcccctacaaactccacggtatcttaacggccaaccctgacaacgtggaacacgtgctcaaaaccaaattcgacaactaccccaagggagaacgcttcatccacctcctccaagattttttgggtaacggaatcttcaactccgacggcgacctctggaaggtgcagcgtaaaacagccagctacgagttcagcaccaaatcgctccgaaacttcgtcgtcgacgccgtcaccttcgaactccaaacgaggcttcttccaattctctccaaagcctctgaaacaaacaaggttctcgatttgcaagacttgttggagcgcttc

SEQ ID NO: 15534 - DNA, 458 bp, Glycine max
  Clone ID: jC-gmle01810086f03d1
attctaactaatgatttcattaaaacagcagaaattacaattattttgcagagtggtggaagacaggtacatgtggagagaatattcctgaccctagcattcattcattccttactcttacactcacaggcaaccctcctttgatcctcatcgtcaaagacaaaacatgctccggacacgtgtccttatccaaagcctcaatctcaaacctctccaataacgaagctgcaattgacttcatctgaatataagccatttccttccccagacacattcgtggacccgcgtgaaacaccggataccgaaacggactctcggctcgattctccaaccacctttcgggcttaaattcggtacagtccttcccccacacgctctccatcctccccatcgcgtacgtgtggtacgtcacgaaccaccccttcccaaccctagttccgtcccgcaatacgtcgtcg

SEQ ID NO: 15535 - DNA, 543 bp, Glycine max
  unsure at all n locations
  Clone ID: jC-gmle01810086f04a1
gttgaatataacatttacaggaagtgctgggcagtcatttgcatgctttctgactcctggaatgaacattcgccttgttgaagaggccattaaggtgggaggagccaaccacagccatgccactcaagaccttcatgattcaattgctgctggtaactatcctgagtggaaactgttcgttcagacaatagatcctgagcatgaagacaaatttgactttgaccctcttgatgttactaagacttggcctgaggacattatacccttgcagcctgttggtcgcttggtcctgaataaaaacatagataatttctttgctgagaatgaacaacttgcattttgccctgccattgtggttcctggtgtatactactcagatgataagatgcttcagaccaggatattctcttatgctgattcacaaaggcacagacttggaccaaactatctgcaacttcctgctaatgctcccaagtgtgctcaccacaataatcatcatgaaggtttcatgaatntcattcacagggatgaggaggtcaatta

SEQ ID NO: 15536 - DNA, 510 bp, Glycine max
  Clone ID: jC-gmle01810086f04d1
gcgacccgtgtccgtgcgagtcaattccggaattaattcccggactagccggcggccgcccttttttttttttttttttttttttttttttttttttttttttttttttttttttttttttttttttttttttttttttttaaaactaacaaaaacaaacgggattttttggaaaagggcaacggggtgcattcatggggttttggggcccccccacattattttgcaagaaaagggtttgttctttcagggaatccaaaatcccattcttaatggcccctttgcccgtttgcaactttaacaattattttggggggggcaacaaccttaaatatttggccccgggctgaaaaaaaaagcttttttttggcccaaaaaacgggcagcctgaaacccgtttgatatcccaaccctggggatctcaggggggaccccgggggcaaaaaaagcctcaacccatgggggagcaaaattattttgcctggaaggggcccaaaaccgggatttttt

SEQ ID NO: 15537 - DNA, 521 bp, Glycine max
  Clone ID: jC-gmle01810086f05a1
attcatcttcggtcattttattttgtataataaaagaaagataataaagagaataatcatattaaatattaaatagaaaaaatggcccgatcatttatcaaaggccaatcttcggtagaagagaaggttcctttggaacacttatttctatttcagtataccgggtctctttctttcatttcaaaaaatttatagaatttcgattttgaaatgaaagaaaagtgtggggataaatataaatgacaaaaagatattggaacataatcttggaagagatgatggaagcaggagttcattttggccacggtactagaaaatggaatcctaaaatgtcaccttatatatctgcaaagcgtaagggtattcatattataaatcttattagaactgctcggtttttatcagaagcttgtgatttagtttttgatgcagcaagtgagggaaaacaattcttaattgttggtacaaaaaaaaaagcagcggatttagtagcacgggctgcaataagagctcggtgtcat

SEQ ID NO: 15538 - DNA, 521 bp, Glycine max
  Clone ID: jC-gmle01810086f05d1
aaataccgcgactaatcacataaaatttgtgtttgttctttttatatttatattatttatatttttattttttgtacaatttattactagtatagtaatcgattccctaaatctatgaacccctccaactaaatccaataatttttttattttattattaatcaagaatttcgtatatagctagaacggccctcacaaattgcaaatactaatttgttaagaattaatcgaattgaggctatagcatcatcattagctggaattgaaatatcggcgaggtccgggtcacaatttgtatcgattaaacaaattgttggaatttccaaagttatacattctcgaagagccgtatattcttcttgttgatcgacgattattacaatatcaggtaaccccgtcatatatttaatgccgccaagatatgtttccaaatgagctaaatgtctcttcaatatagcggcatctctttttggaaaactattgagtctccccgtcttttggtgcattctcaagtccctgaa

SEQ ID NO: 15539 - DNA, 518 bp, Glycine max
  unsure at all n locations
  Clone ID: jC-gmle01810086f06a1
cgagatcggagaagaggaagaagaagaagaagagtatgggaacgacggtggcgggtctagcgccgggtctgtcacggaagctgaagaaggttctagaatctcggatcgatacgccagacctcttgtcttcgctcaacacgctctcttccttctacgatgacaacactcctcaggcgcgtcgcaacctccgatccaccatcgagaagcgcgccctctccatcaaccgcgaattcctcgacgcttcccacgccgcgcagctggccttggatagcgtggagaacgaggtcgatgcgctcgctgagtgctgtgacaggatagcaaaggctttgaatagttgtagtgctagcaccgctgacattatcggcaccacagagaggctcaaacaagagcttgtaactactacacaaagacaagagattgtagcatgtttcttacgtgattatcagctctcccctgaagagataaatgcacttagagaagaagagctgaatgaaaactttntcaaggcattatctcat

SEQ ID NO: 15540 - DNA, 327 bp, Glycine max; identical to SEQ ID NO: 15433
  Clone ID: jC-gmle01810086f06d1

SEQ ID NO: 15541 - DNA, 458 bp, Glycine max
  Clone ID: jC-gmle01810086f07a1
gctgagttgagttgagttgagttgagaagcctctcacaccaaaccaaaccttattcaattctctctctctctctctcatatcgagaatccaacagcaacatggcggaatcgtttgagcttccgaatcggttagcaatccttcctttcaggaacaaagtccttttgcctggcgccatcatccgaattcgctgcacttcccccatcagtgtaaagttggtggaacaagaactttggcagcgagaagagaaggggttgattggcatcttaccagtacgtgatgctgctgctgaaattcagcccgcgggtccagttatatctcacggcaaaggtaccgattctctagaccaaaactcaaaagttcaagggtggttcatcagattctcaaaagcttgatgtgaaaaatcagcatgatgttgttcattggcataacaggggggtagctgctcgagcactacact

SEQ ID NO: 15542 - DNA, 483 bp, Glycine max
  Clone ID: jC-gmle01810086f07d1
gaggtggccgcccttttttttttttttttggagaaaataatggtttattcacaataataaaattatagtaacatgacaaaagattaacaaaatacagggagccaaggattgggtgctgaaggggagagtgaaaaacatcatttactgaacttggataagtacagctgctcgaaagcaaaaaaaaaatacttacaaaagattatggagagtggagtctcaagaatatatgcagatgccagctcctttccaaaactgtcggtttctagagttgtgctcaatcacaagaagttgaagagataagtactcactcaccaacaatgttgcaatagcatagatcaggatttaaatgaatacataagccaccggggattgccacataacgtgcaagtcaaggatgctattacaactttgagtgttgtctccaagggcacccaccgtcaaaagcttgctctagcacgtcttccatacgttttgcaagcagta

SEQ ID NO: 15543 - DNA, 493 bp, Glycine max
  Clone ID: jC-gmle01810086f08a1
cttgtactcactcaatccgagaccaaaacggcgccatgcctaccgtcagtgtggggcgggatcgcctgtttgcggctctaggaaagacttacacgcaagaggaattcgaagacttgtgcttcagtttcgggatcgagcttgacgacgtcacgacggagaaggcaattgtgagaaaagagaagcatttggaggaagaagaagctgatgaggacgaagaagttatctacaaaatcgaagttcctgccaacagatatgacctcctgtgccttgaagggcttgctcaagccctccgagttttctgtgagttccaggagattcccacttacaaactgtccaagatcagtaaggatgcaatgctgaaaatgcacgtgaagccggagacttctctgattcgtccatatgttgtatgtgctgtattaagaggtataacttttgataaagcaagatacaacagctttatcgatctccaagacaagcttcaccaaaacatatg

SEQ ID NO: 15544 - DNA, 471 bp, Glycine max
  Clone ID: jC-gmle01810086f08d1
gtgactcacttttgtattgacaaaattttcaaacgaataaatatccttgctatcttggttttaaggccaaaatcaactattttaaaaaataactataatttatggtcgagattatccctactaaccaattcgtagcttctgatgttctaaacatttaacaacggagaaacttaggaaaattttacgggtatataatcaaactaaacacccaaatttagggcacatcagtaacattccgctccccagctatagtgtagttctaaattccacgaagtgttttgattcccatatagtcactcaagcagttgagcatcttgattccctaccaattgatacagataatctttataggaaactttcgatgttaagttcaacaaaggagcagggatcaggaatgtcaaaggtgtttaatacctctggatgaacaatgccaaaagtgccaatatgttttcctttgaaatgattctagct

SEQ ID NO: 15545 - DNA, 479 bp, Glycine max
  Clone ID: jC-gmle01810086f09a1
gaaagaaagagagaaaaaaaatcaatgatatagaattctaatatgtaaaggtctatgggttatctcataaaaggtagtgtaataaagcatcaatctaaatcaattcatatctatttatatatgaattaatttataacgtaaacaaattaagagctctgaatcaataaaaactgagaatattgattcacgaaaaaacaaatcaatattcgaaaaaaaaaaagattattaattttaagatatgagaaaggctccattgtcgaattcagacctaaccattaatcgagaagtgatgggaacgacgaaacctgcaaatacttaagattttattaaaaacaaatcttaatgattcattaggtgggatggcggaagaaaccaaaaagcaatcctttttttagggagttgcgccctacattacatctgaatttgattgataataaaagagtaaatattcgcccgcgataattttgattttattgaat

SEQ ID NO: 15546 - DNA, 521 bp, Glycine max
  unsure at all n locations
  Clone ID: jC-gmle01810086f09d1
acgttctattatatatatatctatctatattctatatatagatatattgtttaggttatcaagtattaatctgaaataaataagaattgctgcttctaatacttataataattactacaaattctaataattactacaaaagggatatatgttagataaaatagattaattaatctatttcacaaaaaaataatgtatccatagcacagtttcgtcttataatacctcgggtgctaatgaaactattttagtgaaatttaactgtctcaattcccgggcgattgcacaaaagattcgagttccttttggatttccttcttgatcaatgacaactgcagcattatcatcatactgaattattataccgttgctacgtttgagttctttacaagtacgtacaattacagctctgatcacttctgatctttctaagttcgtatttggtactgcttgttngattacagcaacaacaatgtcaccaatataagcatatcgtcgattactagctcctaggattcgaa

SEQ ID NO: 15547 - DNA, 509 bp, Glycine max
  Clone ID: jC-gmle01810086f10a1
attttatccaattgaaattttaaaaatgactgggataaacttaagaattcaattattgaaattgaataagtaaacaatttaattggattggtcgaatggtatcaaaaaaatggagtactaactcccatttcttatttattattgaattaaccgatcaacttgctttgttatcgaacatttctttttgatttcaaaaattttccggaaaaaatttgaatctatttttatatgcgaatcaatcctactacttctggtcctgaggtttctgcgcttgaaaaaaaaaaatctgggacgtatcgcccaaataattggtccggtactagatgtagcttttcccccaggtaagatgcctaatatttacaacgctctgatagttaagggtcgagatactgttggtcaacaaattaatgtgacttgtgaagtacagcaattattaggaaataatcgaattagagctgtagctatgagtgcgacagaaggtctaatgagaggaatggaagtgattgaca

SEQ ID NO: 15548 - DNA, 287 bp, Glycine max
  Clone ID: jC-gmle01810086f10d1
agttattccgaatttcggacccctaaactgggtatgaaaacccattggaggcctttactgggggcctaactgggttaaaacctaaattggcccaaatgggtgggcttttgccttccgccttattaaaaatagctttgggtttttaaaaaattggctgggctttttggggaacaagggcacaacccttttccggataatttactaaaacggggaccccattttgggttattttagaaaaaccgcccatcaaggcctttgttaaccattgggttttaaaaaaacgtttt

SEQ ID NO: 15549 - DNA, 505 bp, Glycine max
  unsure at all n locations
  Clone ID: jC-gmle01810086f11a1
cccatggcttcgatacggacgacggccagctcttatggtcgcctggtgtgtcgcgcgtgccgacggcctgcggtcgtacagtcatacgcgaagccagcagcatggcgggctctgtctaccgaagggcagcaaaagctgctctctgccaacctggaacaggccgatccctcagtgtttgacattatccgcaaggagtagagacgacagaagcacttcatcaatctcatcccctcggagaacttcacgagccaggctgtgttggatgcgctggggagtgtgatgcanaacaaatactcagagggatatcccggggcacgatactacggcggcaatgagtttatcgatgaagcagagatcctctgccagaatcgagcattggagacnattccgggtgcagaaggacacatgnngagtaaaacgtacagccgctgtctggctcgcctgccaatctgtacgcttactcggcggtgctcaacacccacgaccgcattatgggcctcgatct

SEQ ID NO: 15550 - DNA, 418 bp, Glycine max
  Clone ID: jC-gmle01810086f11d1
agtggtagagcgtcagtcagcttcaccgacattaagtcggaacagacaatcgtgttacacagctacttgccaattcacacgctcgagaagtgctactacgaagactcggtccatggcaaggagaatgtgccgacccagtcctcgacctctcgccgcagctcgatgatctcaaccacttcctcgccctccttcacgtactccttgaacgccgctacgctccctgggttcttgcggccgttcttctcggctgtctccttagccttggcgtccagggtcttggtgatgttgacagctctgtccacgatgtccgcgacgcgcttgaagtcgccagtctggaagccacgcgttgtcattgctggcgtgcccatgcgcaggccacctggcttcaaggcgctcttatcgccaggcactgtattct

SEQ ID NO: 15551 - DNA, 519 bp, Glycine max
  Clone ID: jC-gmle01810086f12a1
tggtggtgccttatcgctgtggttatcatcttcttcttgctctttcttagatctcttctttctctacgccgtacgccgaaaccatggccggaaaaggagagggtcctgctatcggaatcgatctcggaaccacctactcttgcgttggcgtgtggcaacctggccgcctttaaatgattggccacgaccaaggggacctaaccactccgtcttacgttcgatttactgaccccgagcgtctcattggtgatgccgccaagaatcaagttgccatgaaccccattaacaccgttttcgatgccaaaaagttgattggtcgttgattcagaggttcctctggtcatagagatatcaaatagtggtctttcaaggtcattcctggagctgctgacaagccaatgatcgtggttaactacaagggtgaagagaagcaatgtgccgcataagaaatctcttcatggtgctcatcaagatgcgtgagattgctgacgcttacctaggctctacagtgaagaatgc

SEQ ID NO: 15552 - DNA, 580 bp, Glycine max
  Clone ID: jC-gmle01810086f12d1
caagcattaaaaacttgaattatcgtgtatacttaaagagaataacttgccaataaaacatacacatatgatgactaaagacaagatatgtcatttaacaagacagaataattcctacaggtaaagtgcataacaattgagtataccatctaataatgaaaataacgcaaataacataatgcttaaagcaacgttcatatcagaagggaaaaatagtttgaatcccatccaacaaaaatcatgcgattaaaatccaattaaaaaaagcataaagtaaaataagtgtttaaaacaggtatctggaggaaagcaactacatttagtccacttcctcaatcttggggccagcaccactttcaccagaaggaggagcagcatactcatgctctgctgcaccagcaccacccacgtctggaccagcaccaccttggtacatcttggcaatgattggattgcagatgctttccaattacttcattttgtcctcaaactgatctgcttctgcaagctggttgctgtctaaccactggattgcttgctcaattgcatcctcaatcttcttcttgtcactcgggtcaag

SEQ ID NO: 15553 - DNA, 467 bp, Glycine max
  unsure at all n locations
  Clone ID: jC-gmle01810086g01a1
gtctacctcctgcccgtgtttnnnnntntnnnnnnnnnnnnnccnnnnnnnnnnnnnnnnnntnnagctgcgnnggnactgaatnccttaatcgagtccagtattcataatctttgagttgatatgggcaactggagcagtgaacgtcatcaaaccactcaacaaagtgatctcggtgcagttttgcgtgatggaaaagaagtacttcttcaagcattcaactgggagtccaacaaatacaactggtggaataatttagaaggcaaagtttctgacatagctaaagcaggatttacttcagtctggttgccaccaccaacccactccttctcacctgaaggttatactccgcagaacctttactctcttaatagtaaatatggttctgagcgtcagttaaaagctttacttcaaaagatgaagcaatacatagtaagagcaatggctgacatagttattaatcatcg

SEQ ID NO: 15554 - DNA, 551 bp, Glycine max
  Clone ID: jC-gmle01810086g01d1
aggtactaatagaaattttattattaatttattttacatatatgacatagacaaagctgcttatttttattgttatgtattacataaacaaagcagctactgtaaattagttatagttacatactgtttatttaactgggtagcacgtaagttgaaaggaaattaaagagctttccaaagcctgcgagattaaggaaatagcttcaattttatcaagcttaagactccagaagcatataagcacgtaattcctttctcttctctgtgattccagtggagaagggtcatgacatgccaacagaacactacttgtgccacacagcataattgtgaccagaagttgatagtgtccattccctcccagttgggcaccatgaaccatttccaatcttcatgcacaccttctctccgattactgcagagtaaaggtcgtgcttggcctccagaattctcacagatgatctactttgaataccttgacgcttgcgaacatcaatcaacttcacaatctgctcccgaattgaatcaccccagtcatagaagtggtcata

SEQ ID NO: 15555 - DNA, 458 bp, Glycine max
  Clone ID: jC-gmle01810086g02a1
ctcagtgaaagagaatccgaggcgaagagaagagaaaaattaagatggaggggaaggagcaggatgtgtcgctgggagcgaacaagttcccggagagacagccgattgggacggcggcgcagagccaagacgacggcaaggactaccaggagccggcgccggcgccactggttgacccgacggagtttacgtcatggtccttttacagagcagggatagcagagtttgtggccacttttctgtttctatacatcactgtcttaaccgtcatgggagtcgccggggctaagtctaagtgcagtaccgttgggattcaaggaatcgcttgggccttcggtggcatgatcttcgccctcgtttactgcaccgctggcatctcagggggacacataaacccggcggtgacatttgggctgtttttggcgaggaaagtgtcgttgcccagggcgattttctac

SEQ ID NO: 15556 - DNA, 429 bp, Glycine max
  Clone ID: jC-gmle01810086g02d1
aaaataaaataaaaagatgcatatttgactcgggggttatttttgattttgcaaattacacaatcacagccgtacattacacgtgagctgggccttttccaacttaaaagccgaggataacattggcccatgacgcaacacatgccccacctaataatcataattttacatttttacatacaaaatacaaagactttaaattaaaattaaaaaaaaaaagattaaccgatcattttgatgaaatgaaaccgaaacccaaaaacattggtttgattttttttggtggtcccaacttgattaagcatgaacggtttgattgaatcacttggacttgaagggaatggccctgattaccacctggtggtaaagtgcttcaagtgcaccaccaatgaaaggtcccacccagaagatccagtgatcatcccaacc

SEQ ID NO: 15557 - DNA, 532 bp, Glycine max
  Clone ID: jC-gmle01810086g03a1
cagcttggtcaactcaggtgcgtcctgcaacaactctgttggctgatgggtgtccatatttgtatgctatggtgcatgatagttcagtgtctacaataccaggtgattttgtcattggtgttaagttgacaaccataaacaatatgtgtgcatatgggctcaatcctggtatttcaggttctcgtcttttgggcaccattcctcagtctatttcacagcaaactgtttggaatcaaatggcaacagtgagaacaccattgaattttgattctagcaagcagagcttttgtcaattttctattgaccttctcggtggaggaattttagtggacaaaactggagattggatcacacttatacaaaattctccaattagtaacttgttgagagttgctgcttggaagaaaggctgtttaatggttaaaattgtgatgtctgggaatgcagcagtcacaaggagtgattgggcctcattggacaagtgtttttaacaaacagcaacagtacagagcatttcgatgcatgtaagtgg

SEQ ID NO: 15558 - DNA, 543 bp, Glycine max; identical to SEQ ID NO: 15384
  Clone ID: jC-gmle01810086g03d1

SEQ ID NO: 15559 - DNA, 514 bp, Glycine max
  unsure at all n locations
  Clone ID: jC-gmle01810086g04a1
gaaccccaacacaaaattcactatctttagagccatggcggttgtgggaggcgaaaaggagaaagaggagcttattcccgggttaccctacgaaattgcagagctatgccttcttcacgttccgtatccgtaccaggcactgtcacgctctgtttcgtccacgtggaacagagcaataacgcacccttcctttatttactccaagaagaccctctcccaccctcatctcttcgtactagcgtttcattcacaaaccgggaaaattcagtggcaggctttggacccttcctcggggcgctggttcgttttaccgcaaatgcccttgccggaaaacacttcctccacggcgttcgcgagcgcggcgctgccgcgccaggggaagctctttgtcatagccggcggcggcgaaggttccgacaccctcgtctaccgcgccgccacgaaccagtgggcactggcggcgcccacccgngtgggaggaggaggggcttcttcgcgcggagggagtggaggg

SEQ ID NO: 15560 - DNA, 546 bp, Glycine max
  Clone ID: jC-gmle01810086g04d1
agatcataaagcgaaatatcagtatatttctctactttttaaaaataatattaggtttaaataattatagtagtagctcagaacatggcctccacgatgaagcttgaaagctatgatttccctttttccgaatccaagttgtaggcgaagaagacatgttgaataattatggtgttatcctagcaggctaccacacacattgtgttcctaatctgcactacagagactgcgattcagactgaagtaacaactctaagatccaccaaagccactaataaaatagaaatgagtggcaaagtgggatccaagacatgttatgttcactttgcctaatagaacaaaactagtaacatgtccaccctggccacaattcaagcatagagcatttggcaactagaaggagagaattcacggaaagcacgcggtgccttcacaaccttccacgtcacactcacttgctcattattactattcacacccaccttaattttcccaatggccacgttcaaatccaaagacgccacgtagattcggtcctccaccccg

SEQ ID NO: 15561 - DNA, 583 bp, Glycine max
  Clone ID: jC-gmle01810086g05a1
aaaaagaaaagaaaagatgattagtgcacaataatttctattatttagatgaatttggtcctcaggagggtcatgggcatggccatggatgctttccagcaccaaactctcatttccatcattctggccatgttagtaggcgtgttgatttatggcttaaagagaacacatagtggccatggcaagatctgtagtgcacctcaagcaggaggagcatggccaattattggccatttacacctctttgggggtcatcaacatactcacaaaacacttgggataatggcagagaaacatggaccaattttcacaataaagcttggatcatacaaagttcttgtattgagtagctgggagatggccaaggagtgtttcactgtccatgacaaagcattttctaccagaccctgtgttgcagcctcaaagctaatgggctacaactatgccatgtttggcttcactccttatggtccttattggcgtgagataaggaaattaactactattcagcttctatctaaccaccggctggaactgctgaaagacacaagaacatctgagtcagaagttgcaataagagatc

SEQ ID NO: 15562 - DNA, 528 bp, Glycine max
  Clone ID: jC-gmle01810086g05d1
aatacactgaagctccattaaaaagtgaaccatgagtacataatcattatactacattgcagctgcattaaacatgttattgttattaaccgatttcaggacctagaggaccccttcccttatttttgagaaaactagcttaatataatctagttctcataaagtttggtgtctagacgtggagttaggagaatttcaagcggggttgcttttaaatttgtgagtccaatgctctctgtcatgtccacaacttgatttgaaggagaagcaacattgaaagaatgtaacagtctagccatggtcaagtgcaccacacgcagagccagcgaggctccagggcatgctctccttccagaaccaaaagggacgagctcatagttctgacccttcacatcaacatctttgtggcttgtcaagaaccttccaggcttgaaatcatgaggatcactccaaacacgaccatcccggtggatctttcaagcattcaccattaaacgtgtaccagcaggaatgtgatagccacctgag

SEQ ID NO: 15563 - DNA, 560 bp, Glycine max
  unsure at all n locations
  Clone ID: jC-gmle01810086g06a1
gtttttcaaagggatacaccttcaagacttggatgcagcagcatatgaagagcaaacagctctaccattcaacctcgcaacacactcagagtttggagctggtgcttctcaagttggagaaggtgaaatcctagatgaagttattactagaagccgtggcgagtttaggcacactagcagtcccaagatcacaagctccaccccaacaccaagaactgatactaacagccatctaagcccacgcctctcatttagttctcgcatgggtgagttcaaaactgagcagagtcctcggtctggtgcaagaggtcccctcagtccaaaggcaggagaagtgagattatcacatctgggaagaagtcctcttaatccagattcaaaacaacatgaccacaactaataattaaacctagaagattgcagtcgtatgccttagaaggactacttaggaggcttatttgtagctacatttccattctagtttgttccttaattntgcttgtcatggntgtaactnttaaagtcctttcccttgtcccatatacgacagatatgagcta

SEQ ID NO: 15564 - DNA, 515 bp, Glycine max
  Clone ID: jC-gmle01810086g06d1
attgaaacaaacttgtgatgatgatatacattagcacaaatatagtgacattcactaatacaattgacataggaaagcgccacactttgttacatagctcatatctgtcgtatatgggacaagggaaaggactttaaaagttacaaccatgacaagcaaaattaaggaacaaactagaatggaaatgtagctacaaataagcctcctaagtagtccttctaaggcatacgactgcaatcttctaggtttaattattagttgtggtcatgttgttttgaatctggattaagaggacttcttcccagatgtgataatctcacttctcctgcctttggactgaggggacctcttgcaccagaccgaggactctgctcagttttgaactcacccatgcgagaactaaatgagaagcgtgggcttagatggctgttagtatcagttcttggtgttggggtggagcttgtgatcttgggactgctagtgtgcctaaactcgccacggcttctagtaataac

SEQ ID NO: 15565 - DNA, 332 bp, Glycine max
  Clone ID: jC-gmle01810086g07a1
ccttaagcaactctgaagatcactattaaaggagtgcacgcgatccaaagctggggtgcatactgcatcctcaggcaaggatcttacagatctgctttgaaatggctcaacggtccaaaacaggcagaagataaacatcatctgtgagctctcagatctgtggctagaacactagatacactgaggcgagatgataaaggaacaggcaaagctatcaattactcgacccctgccaaaatctgacttgcttagatcactgatcggttacaggcagggcgctggtttgatgatcagggaagagcatcatatgcagctgaagcagaccgacttct

SEQ ID NO: 15566 - DNA, 418 bp, Glycine max
  Clone ID: jC-gmle01810086g07d1
gctgtacaatgtccaatgtaaatatcagatattagcacactgatcaatatacattcaaatatatatattgggtacacaatatgaaatttcactagtctacagttcaatgaacgctatacatagtaacatactatgactatcagcatctgaatgactactgctgattgcagggcagcctatatacatcgtacatggggagcccaatgtctgagcttagggtgtcacatgatcttagcactagtggacatggtgcgaaaagaacagatccactttgtttataacttagactttacattcattctattgtcgtgatgattacagagcccaaatgcctgtccacaaaagctgatgcatttttgcatcggcagcatgtcatcgtgatgttccatgctaattgcactctgtgctgcaaagaatt

SEQ ID NO: 15567 - DNA, 381 bp, Glycine max
  Clone ID: jC-gmle01810086g08d1
ccacaaaacaaaggaagttttatttttcccatttccataagaaaatttagtccctttggatttttatacatggtaaagaccttttttccatcagttttttcacatatttatatttgtcccccaacttaaaactcaccaaactaagcccattaaaggcaaaaacaaaaaatttaatgggacacgaaagaaagccaaaatttagttcccattttccaccgccaactaaaaaaacctcctagcaaattagttcattccattccctttacctttgcagaggaaaatccgagactaccaacctttacttaattgcaaactcaatgaggcttattccaaaacacccattgctgaaagatggtcaccgtttcttacaaaggggggttt

SEQ ID NO: 15568 - DNA, 448 bp, Glycine max
  Clone ID: jC-gmle01810086g09d1
ctatgtatctatataatcgaattgaaattacgattctatcaaatctttttatttactttttttttttttaagaaaaaagaaagttctaattattaataaattatatctatatatatatatatacagatagatattctatatcttttatcttaattaatatttgacccctccttataatgtgttatagttttctttatttttaggaacttatccattccttttttaatgtgcccgacaatccgaaagaattctgggggaggggtcatttcgtttttgatctagaataaatagagcttcaagaaatgagagaattaagaatacccacgagaaacactaatccaatccataatgatgtaccggaaaatacaacattttcggtattcgaccaaccttcaggagaagcaaattcaacaggtacactaatcaagtaaatccatgaaatagcaat

SEQ ID NO: 15569 - DNA, 374 bp, Glycine max
  Clone ID: jC-gmle01810086g10d1
tgactaggtctgcggccgccctttttttttttttttctatgtatttatataatcgaattgaaattacgatgctatcaaatgttcaaatttactatatgattttttaagaaaaaagaaagtgctaattattaataaatgatatctatgtatatatatatacagatggatatcctatatctgatagcttaattaatattcgaccccttcttataatgtgttatagggcgctctatgtttaggaacttatccattgctttcttaatgtgcccgacaatccgaaagaattctgggggaggggtcatttaggaaccgatctataacaaatcgagcttcaagaaatgacagaattgagaatacccacgagaaacactaat

SEQ ID NO: 15570 - DNA, 481 bp, Glycine max
  Clone ID: jC-gmle01810086g11a1
gagagaaagagatcacatagcagaatggcttctactcaatgtttcttgcaccaccatgctcttaccacccctgccagatccccatcacaacgcatcatggttagcaccaagcctaaccagcttgtttgcaaggcacagaagcaagaggatattgatgtcagcccaatctctcgccggttagctctaaccgtgctcattggtgctgctgctgttggctccaaagtccaacctgctgatgcagcttatggggaagctgccaatgtgtttggaaagccaaagacagacacagattttctgccatacaatggagatggattcaaactatcgattccctcaaagtggaacctaagcaaagaggttgagtacacaggtcaggttgttagatatgaggataactttgattcaaccaccaacgtggttgtcaccatcactccgactgataagaagtctatcactgactatggttcacccgaagagttcc

SEQ ID NO: 15571 - DNA, 528 bp, Glycine max
  Clone ID: jC-gmle01810086g11d1
tactagtcggcggccgcccttttttttttttttttagacaacttcaaacatagatagcacttaaggtagatttacacatagcagatatatataaccagctattattgaagatttttaagcaacactgaaagaacttgctgcactctccacaaatcttcttgctcccttgaaccacctcttgtctccagcttgagccttgcaaatgaacagttttccatcttttacagttgctctaattatgtggtgcttgccaccttcatctccatcagcagtccttgtcaacacagacagaaaatagtacggcttcccatcaatcacaggtgttgccgtctctaagatgttagccgtggccaccgcatttggatcaaaaccaccctcggcttgtgtttcgccgaagaaggcctgttttcctagtaaataatccaccttagagaggaactcttcgggtgaaccatagtcagtgatagacttcttatcagtcggagtgatggtgacaaccacgttggtggttgaatcaaagttattcta

SEQ ID NO: 15572 - DNA, 444 bp, Glycine max
  Clone ID: jC-gmle01810086g12a1
ctagttctaagatcgcgagcggccgcccttttttttttttttttaatattcaatttgcttgatatagatagatatagtaaacaagtataattatacatgatatgtttcaacaattgtgatacaaggttttgaatctatcactttttgtaatttacaaggtttgaatctaccacttgtaatgtcttgaaccctataaatatcaacagtaacacactcttgatggttcgtacttaattgcacatgaaatatatagtagtaacaaagtatagcaattatgcattggggtaagaagccaacattgctatgccacacaagccttctttagcagtaacatctctttgcatcctaatgtatcctttatcaccccactttactctccatgaattcttaaccaaccaatacttagttacatcatgacttactgcataccccacagcagtgaca

SEQ ID NO: 15573 - DNA, 606 bp, Glycine max
  Clone ID: jC-gmle01810086g12d1
tcgcgatctagaacgggcaatgctcgcactctcgaagatgctccaatgcgtgagaggcatgagcagtggatggctatacatggaaaagtctacacgcactcttatgagaaagagcagaaataccagacattcaaagaaaacgtgcaacgtatagaagcctttaaccatgcgggaaacaaaccttacaagctaggcatcaaccattttgctgatctcacaaacgaggaattcaaagccataaatagattcaagggtcatgtgtgctccaaaataacacggacacccacatttaggtatgaaaatatgacagcagtgccagctacattggattggagacaggaaggagctgtcacacccatcaaggaccaaggccaatgtggatgttgctgggcattttctgctgtggcagcaacagaaggaatcaccaagctgagtactggcaaattgatttctttatcagaacacgagcttgttgattgtgacacatagggtgtggaccaaggttgtgaagggggtcttatggacgatgccttcaaattcatcttgcaaaacaaaggactcgccgcagagccaattactcttatgaggtgttgatggacatgcaat

SEQ ID NO: 15574 - DNA, 291 bp, Glycine max
  Clone ID: jC-gmle01810086h01a1
gctcgagctcagtgaaagagaatccgaggcgaagagaagagaaaaattaagatggaggggaaggagcaggatgtgtcgctgggagcgaacaagttcccggagagacagccgattgggacggcggcgcagagccaagacgacgggaaggactaccaatagccggcgccggcgccactggttgacccgacggggcttacgacatgggacttgtacagagcaaggatagcataacttggggcccattttctggttataatacatgactgtttaaccgtcatgggagtcgacggg

SEQ ID NO: 15575 - DNA, 311 bp, Glycine max
  Clone ID: jC-gmle01810086h01d1
aaaaacaaaaacaacagatgcactactacctagggggtatactttgattaatgaaattgcagagatacaagggatcattacacgggagacgggcctttaagcaattaaaagcggacgatacaattggcccagaacctaaaaaatgtaccacttaataatcaaaatgtaccctctttagatcccaaatataaggactttaaatacagatcacagaatgaccgctgaacctagcttttttgtgaaactgaaccgaaacccagaaacattgttttggtatttagtggcgagcccaacttgcttaagcttgaacg

SEQ ID NO: 15576 - DNA, 386 bp, Glycine max
  unsure at all n locations
  Clone ID: jC-gmle01810086h02a1
gtttctcccggctctattcttganntcnccnnnnnnnccnnnnnnnnnnnnnnnnnnnnagctnnnnnnnnnctgantnnctnattttagtccagtattcataatctgtgagttgatatgggcgactggatcagtgaacgtcatcaaaccactcaacaaagtgatctcggtgcagttttgcgtgatggaaaagacgtacttgtttaagcattcaactgggagtccaacatatacaactggtggaataattcagaatgcaaagtttatgacatagctatagcaggatttacttcagtctggatgccaccaccaacccactccttctcacctgaaggttatactgcgcataacctttactctcttaatagtaaatatggatctgaacg

SEQ ID NO: 15577 - DNA, 550 bp, Glycine max
  Clone ID: jC-gmle01810086h02d1
aggtacttatagaaattttattattaatttattttacatatatgacatagacaaagctgcttatttttattggtatgtattacataaacaaagcagctactgtaaattagttatagttacatactgtttatttaactgggtagcacgtaagttgaaaggaaattaaagagctttccaaagcctgcgagattaaggaaatagcttcaattttatcaagcttaagactccagaagcatataagcacgtaatgcctttctcttctctgtgattccagtggagaagggtcatgacatgccaacagaacactacttgtgccacacagcataattgcgaccagaagttgatagtgtccattccctcccagttgggcaccatgaaccatttccaatcttcatgcacaccttctctgcgattactgcagagtaaaggtcgtgcttggcctccagaattctcacagatgatctactttgaataccttgacgcttgcgaacatcaatcaacttcacaatctgctcccgaattgaatcaccccagtcatagaagtggtcat

SEQ ID NO: 15578 - DNA, 535 bp, Glycine max
  Clone ID: jC-gmle01810086h03a1
gactaaagagagttgtggtgtggtggtggttgtcgtttttgaaatggcagcgtcgtcgtcagagaagcaagtggtggtgataggcatagacgacagcgagcagagcacgtacgcgttgaattgggctctggataactttttcccgagcccaattttcaagctcgttctcatccactccaggcccaccgccacctgcgctgtgggcttcgccggccctgtgtttgcaggagccgctgaggtcttgcctattgtagattccgatttgagaaagattggcgccagagtcctcgaaaccgctaaacaactttgcatcaacaaatccgtaaatgatgtgacagcagaagtggtggaaggcgatcctagaaatgttctttgtgatgctgtagataagtaccgcgctgcaatgttggttgtgggtagtcatggttatggggctataaaaagggcggttttaggtagagtcagtgactattgtgctcatcatgctcactgctctgtgatgatcgcgaacaagccaaaaatcaaacactgatct

SEQ ID NO: 15579 - DNA, 489 bp, Glycine max
  Clone ID: jC-gmle01810086h03d1
aatggaattgaactcatcagttcaagaacttttcgtgtacaatgtaaggtaaagtcctgatacgtacatattttctgatggttccatctttaaaaataaactgtgcctcaacgtatcaaaccataaagtcaataagccatatccatacaacaagcatagttacgaatttctgtgaacattattctctttctctcttctttggctgaaaggattatgtttattgttgtactatatagacgcagccattacagatcagtgtttgatttttggcttcttcacgatcatcacagtgcagtgagcatgatgagcacaatagtcactgacactacctaaaaccggcctttttatagccccataaccatgactacccacaaccaacattgcagcacggtacttatctacagcatcacaaagaacatttctaggatcaccttccaccacttctgctgtcacatcatttacggatttgttgatgcaaagttgtttagc

SEQ ID NO: 15580 - DNA, 507 bp, Glycine max
  Clone ID: jC-gmle01810086h04a1
ttattgagaagtattattaagacattttcagtacatcttttctaactgtttttttcttcttcttcttctcttggtatttctagaaaaagttgtagaatatatccatgaatagaaatagaattttgggtgcacgcagttttatttgaactgcatgcagagaatcatggatcctgttccgcgtgacgggtgttgctcatgtacacaggtacctgtagcttccctagtgggtaaaacaattggactctacttctcagcggaatggtgcgtcccatgcgccaagttcactcccaagctgatttccgtttacgagaagataaagcacgagctacgccaaaaagggagaggaggacttcgaagttgtgctaatatccagcgaccgcgaccaagcatcctttgactcctactacagcaccatgccttggttggccttgcctttcggtgacccagagatcaagaacctcgttagacactacaacgtgcaagggaatcctttgttggtgattatag

SEQ ID NO: 15581 - DNA, 445 bp, Glycine max
  Clone ID: jC-gmle01810086h04d1
ataaaaaaaagctatggagaatcaaatagttgattccccaagtatctccttttctttttatcaccgtcagtcacatattctgaacaagtagaaaagcacccataaagacacgtgatctaactaatttaagggcattccagtcccttcccttgtgcactcaagtcatcgccctctaggacgacatagaattaattgccaaaggaattgaattagttaattaaatcctagaagcaaccagtggtgtccaccaagacattgtcatcgcgttccacagttctgacgcactttgggtgcacttcatagccacattggagacactggtaggcccagctagacccttgttcatcacacacgcagcagataaagggccctccaccatttccatcagacaccaaattcagatcatgtcgatgcccttggtgatacaccaatgctggaagaccct

SEQ ID NO: 15582 - DNA, 516 bp, Glycine max
  unsure at all n locations
  Clone ID: jC-gmle01810086h05a1
cgttcatacacttcttctgcaatacaaaaaaaattcccgcattagggtttcctttctccggcgacaatggaggtagctgcgaacgcgcggaaccccgccgttaagcgaaaattcgacgacgccgtttctaacggcgtcgccgcccccgccgacgtcgatctctccctcctcgaagccatcgagaagtcgcagaacgcggtcgaagccctcgatctccgagccctaaagaagcacgtgctctccttcgagcgtcgcctgaaggataacatcgaagcgcgccttaaataccctaaccaaccggaccgtttcgtcgattccgaagtagaactccacgaagagcttcagaagctgaaggtcctcgccggcgcgccggagctctacccggacctcgtcaacctcaacgtggttccctgcatcgtggaccttctcaaccacgacaacaccgacatcgncatcgacgtngtgcaattgctgcatgacctcaccgacgaggacgttctcgacgacaacgacgac

SEQ ID NO: 15583 - DNA, 611 bp, Glycine max
  unsure at all n locations
  Clone ID: jC-gmle01810086h05d1
gacacccctccaagggaaaaaaataatatccaatataactacattaagaagttgtgtgaaataaacactacatggctatgatctcaacgacatttgcagatcggtgttccttctccattaccctgactaatctattctcttttacaagcaaaatgaattacttgagtcacctccattgaagtttgtgtcttacactaattataaggccgttatgaacttctgaatttttgtctgtgctctctccttctcttccggtccatcaaggtcaccaatattgtcatgatactcctgaagtatatccttgatatgcttcttactaagtttgttctgcttgagaagtagttcaattctccctctcatttgtggatgctctgagcaccaaagatgacccaaaatgacagcaatcaactgaagagtatatagtccagattctagtttacggttgtatttttcatcttcatccatctccaagtcatcaagctcaacttgattcaaccgttcagtttctgctttgactctatctgaatatctgatgatagttccattagcctggctatcttctgacactcatgttcaacaaatttacttaatanatcttctgttctagaacc

SEQ ID NO: 15584 - DNA, 543 bp, Glycine max
  unsure at all n locations
  Clone ID: jC-gmle01810086h06a1
gatgctcaggagcagcacgctaacacagagtgttacagtcacctgtgttcatcacagtcacagacaatggttccaatcaattcccgtaaattatagattctgtgacgctgctcggaactctctatcatccaactccgccatcttcaagtggaaaagaacggttaattataatcgtaaccgttctggaatgggaaccttcaccacgcgcgcgttggcgcagccgctccagaacgccgacgaactcatcgattccgtcgagacatttattttcgattgtgacggagttatatggaaaggtgacaaattaatagaaggggtgcctgaaacgcttgacatgcttcggtcaaagggcaaaagattagtttttgtcaccaataactcaacaaagtctaggaagcaatatggaaagaagtttgaaacacttggcctgaatgtcagcgaggaggagatttttgcatcatcctttgcagctgctgcatatctgaagtccattgatttcccaaaagatnaaaaggtttatgtcattggagaagatggtatctt

SEQ ID NO: 15585 - DNA, 545 bp, Glycine max
  Clone ID: jC-gmle01810086h06d1
gttgcctactttcagtcctcttaggaactagtattgattaataaaaataaataaggaatgaacaaaattcaatttacttcttaaatacatgacttttcccaccaccatttggggatactgtataaatattatagtcatacagctgcagctttcagggaaagaaaatctgaaattttgttggtatagaagtccggctgtatggagttgttagggctctgaagcatggccagtgtggtgacgcctgagagcacaagaagagttttgcaaccaccattttgtccaaacaagatatcagtgtctaatctgtccccaaccatacatatctgtgacttcgaaatgccaaatttgtttgccaagtaatccatcataaacgttgagggttttccaacaactaatggttcacgttgagtagatccactgatagcgccaaccattgagcccccacctgcccattcttgagcatctgtgagatgagtaacagcatctccgtttgtagcaatgaaaagacatccagggttttcacgtatacagagtgtcccatactg

SEQ ID NO: 15586 - DNA, 392 bp, Glycine max
  Clone ID: jC-gmle01810086h07a1
tgagaggaagagggagtgagagagagtgttcttcgtttgctaccttctcccagaaatggttacgttcaggtttcaccagtaccaggtggtcgggagggctctcccaacggaagcagatcagcatccgaagatctaccgaatgaagctctgggccaccaacgaggttcgcgccaagtctaagttctggtattttttgaggaagctgaagaaggtgaagaagagcaatggtcaagttcttgctatcaacgagatttttgagaagaacccaaccaagattaacaactacgggatatggttgcgggatcagagtaggactggttaccacaacatgtacaaggggtaccgcgataccactctaaacggctcaagttgacgcaaagaacaatgagatg

SEQ ID NO: 15587 - DNA, 271 bp, Glycine max
  Clone ID: jC-gmle01810086h07d1
cggtattcaacaaaagtgtatgcaagcatgtattacgatacagtgacataggaaaataagttggagttccgactgttttgcaatagccaactgaatgacttgtggcaatattcagaattaataagatctggattgacggccatatatataaatttgttcaattctactactcaattatcataatgatcacgattatatccaacagaaacttcaggataaacccgatgaaaaaacctgagacacaaatcaggaagttaaaatcctacgagta

SEQ ID NO: 15588 - DNA, 486 bp, Glycine max
  Clone ID: jC-gmle01810086h08a1
gtaactttttgattcctaaattctctaaaattcgaaattctaatttcgttaggggaaagagattgtttgtgtgtgagtgagtatggctggaaaaggcgagggtcctgctatcggaatcgatttgggaacgacgtactcttgcgtcggcgtgtggcaacacgatcgtgttgaaatcatagccaacgatcagggtaacagaactaccccatcctacgtggctttcaccgacacagaacggttgatcggcgatgcggcgaagaaccaggtcgctatgaacccaaccaacaccgtttttgatgctacgcgtctgattggaaggcgtttttccgatgcatcagtacacggtgacatgaaattgtggcccgtcaaggtgattcctggccctgctgagaaacctatgattgtggtgaactacaagggggaggagaaacagttttccgcggaagagatatcctccctggttcttatgaaaatgaacgacattgc

SEQ ID NO: 15589 - DNA, 429 bp, Glycine max
  Clone ID: jC-gmle01810086h08d1
gagcaaaaacttatatcattggtcaagtagaaacggggaaaagtacattaaaaaaaaaagagaaaaataaaatcgcaataaaaacataatgacacgctgatatctaaacttcaaaaggggctttgacaaaatcaagaacaacccatgagaatgttctgcttaatcgacttcctcaattttgggtccagcaccgcttacactgacagctgcaggaccatactcatccatggctgcacccgtatcaccaccagcaccctggtacatctttgctatgatgggattacaaatgctctccaactgcttcatcttatcctcaaattcgtcagcctcagcaagtcggtcttcatgtagccattggatagcctgctcaatcgcatcttcaattctgttcttatcatcagacgacagctcggaaagcaatcttgtcat

SEQ ID NO: 15590 - DNA, 489 bp, Glycine max
  Clone ID: jC-gmle01810086h09a1
tcattttcagaagcctctttgggaatcaaatccgaagcatgatgcattgtgcgagcattgtctcggctccgtcctacgcgttcccttttctctctggctccgcttccactactccaactgcgatctcgctcactaagcgcagttggaagccacctccgagcatggcaaaaggcccagtcagagccaccgtttctatagagaaagagaccccggaggccaatcgtcccgaaacgtttctcagaggagtggacgaggcccagtcttccacttcggttcgggcccgcttcgagaagatgataagggaggcccaggacaccgtgtgcagtgccctcgaggccgctgatggtggggcccagttcaaggaggacgtttggtccaggcccggtggcggcggtggcattagcagggtccttcaagacggtgccgtttgggagaaggctggggttaatgtctctgttggttacggtgtcatgccacctgacgcatatc

SEQ ID NO: 15591 - DNA, 470 bp, Glycine max
  Clone ID: jC-gmle01810086h09d1
acgcggatgactctagcaaaatacgtgatttacaatccacctagtacaacaagctaacattctgactcatcataacaagcacttgatatacaccgaaaaaagaaacaagctcccttattattaaattaaaaagctgacaaattggggggtcaactgatgaattagatccattccttggggttgatgcatgcgtccaagagtttccattcttcgcttccttcttccggtttatgatcgtattcccaccgagcagtcagtgggagagaaacaagtatactctctattctccctccagttttcagtccaaatgttgtacccctatcatataccaaattgaattcaacatatcgtccccttcgcaattgttgccatgctttctgatgatcattgaagggcatatccttccttttctctatgataggtaaataagcaggaataacagaatttcacattcagtagcaaagggaaag

SEQ ID NO: 15592 - DNA, 404 bp, Glycine max
  unsure at all n locations
  Clone ID: jC-gmle01810086h10a1
caaaaaggtaaacttctgcaacaaccatggttgcaatggcagcagcaacagcatcctcccagttgattttctcaaagcctcgttcaccctcgcgtctctgccccttccaactatgtgtctttgacaccaaacaagtgctgtcaagttcaagtggcaggagaaggcatgtggggggttctggagttaggtgcatggcggtgggagaagctgcaaccactgagactaagaagagaagtggatatgagcttcaaacactcactaactggttgctgaagcaggagcaagctggggtgattgatgcacaactcactattgtgctgtctagcatttccatggcgtgcaaacagattgcttctttggtgcanagagccaacattttccaccttactggggttcaaggagct

SEQ ID NO: 15593 - DNA, 188 bp, Glycine max
  Clone ID: jC-gmle01810086h10d1
gatatgaatgcttttattgccacaaaattatttccaatttgaacatgttcaaagttatccaaaattcttggtcaaaatgatctgcagattggtggaatcatttttttctttgcacaaaaggacggggggggccctatgattaaggttttattggtcaccttaatctgagtgacctgctgccaatgctt

SEQ ID NO: 15594 - DNA, 446 bp, Glycine max
  Clone ID: jC-gmle01810086h11a1
ctatttctaagatcgcgagcgttccgcccttttgtttttttttttaatactcaatcgcgctgatataaaccgttataataaacaaggataacgatacatgatatttaccaacactagcgatccagggttgatgagtctatcagttattggaagttgcagggaatgcaactaccacttgtaatctctccacacctatgaatatcagcaatgacacacttttgatggttcgaactggagtgcacatgaaatatgtagccgcaacagagtatagcaattatgcatgggggtaagaagccagcactgctatgccacacaggccttctttagcagcatcatctgtttgcatcctaatgaatcctttagcaccccactgtactcccgatgaattcgaagccaaccaagacttatttacattatcgcttgctacattccctacggcagcgaca

SEQ ID NO: 15595 - DNA, 354 bp, Glycine max
  Clone ID: jC-gmle01810086h11d1
tctcgatctataacgggcaatgctttgtctctggaagatgctccaatgcgtgagatgcatgagcagtggatggctatacatggaaaagtctacacgcactcttatgagaaagagcactagttccagacattcctagaaaacgtgcaacgtatagaatcctgtagccatgcggttaacactccttacatgctaggcatcaaccatgttgctgatctcacatactaggaattcaaagccatatatagatacaagggtcatgtgtgctccaagataacacggtctcccacattcacgtatgcaaatatgacagcagcgccagcttcattggattggacacaggaacgagcttgtaca

SEQ ID NO: 15596 - DNA, 436 bp, Glycine max
  unsure at all n locations
  Clone ID: jC-gmle01810086h12d1
agcaggtcatgatgatcgaaggctcgttngcggggccgacgacctcactagtccgggggccgctagcgactaagacgggggccgtgcttgcactttttgaagaagctgcaatgcaagagagtcatgtacgggggagctctataattgtatatgtcctctatctccctgaggatcactgagatagaatctctctagctcagacatcagatggccgcgcctttctatgttctcccttctagaggtactttcatcagctttagcctcttcgacgtccacctcccgtgccatttcaagaaggtggaattcttggtcttcattccttttctgaataatggattatcgagcatgacgcctctagtgcactttggccacaacctctgacaaagagggaagctacgctgcaaggtttcatgatctcgtatcaggaggctaaatg

SEQ ID NO: 15597 - DNA, 570 bp, Glycine max
  Clone ID: jC-gmle01810087a01a1
cgcaaatacgagaaggaacataacaccgcggaagcaaccatggccgaagcagaacacaacgatcccacctcgccggagcgcgaggtccaaaccaagagcaacaagaagaaactccgcaagagggacaggcctcacacgaccgagcagaaacgagatgaggacatgaacgatgctaacattgatagtgcccaaacacgaaccgccgatgaagaagaagaacataaagaagaagacacacacaacttctcatccggaatcatgagcaccgagtctttctcctctctgggcttgtccgaacccacttccaaagccattgcggacatgggcttccaccgtatgactcaaattcaagcgaaggcaattccgccgcttctgaccaggaaggacgttctgggcgcaccgagaacgggtgcgggaaaaaccctagcgtttatagttccggcggtggagttgctgtacagcattcagttcacgcctcggaacgggacgggtgtatgtgtgatatgcccgacgagggagctggcgattcatacgcacgccgtggcgaaggagctgcatgagatcactcgc

SEQ ID NO: 15598 - DNA, 532 bp, Glycine max
  Clone ID: jC-gmle01810087a01d1
gtaggtagctcagttcagtgttactattgcttttcacaagtgcttgaaaattcatgatataattttcaacaacaaaagaataagcttacaaattcgaacatgggatgggacaccggtcgtcatgtggaatattacggttcaaaaatgcgcataacacattctaatttaaattttctgatgcttctaataaccaaggttgtttgataaagttacaaatccatctctttatataaaattggggtgcctaccaaaactttatggggtggtgtggtgtgggtgggagaatgtggggatcacaccactgcacgggcgtgagaaaatgccttttatcatcttctctttccttctactttgcgtatttccttcctatgctttgaagcactgctatctatgttcagattcaccttcggtgggttagaaaaacagaatgaagcagctacagcctgtaaatcaaggcggtgaacattgaatatatctttcatggagtgtgaattatatgctaatatatatgaccctattgcatctttagcca

SEQ ID NO: 15599 - DNA, 479 bp, Glycine max
  Clone ID: jC-gmle01810087a02a1
gctgcgcagaagagagagaacgaacgaacgaacgagcataacaccctttaataatctgtggcagtgagtagtgatatgcagcaaggtgatccaacggtcctaagctcgaggcctgctggtggtcgtggcggcggaagcaggcttttaggacactcctccttctatctctgcggcgatctccctctctgccgacctgatgcctatttctctctcaagaccagagattcacggtttgagggtcatgagcgtgtgcgatatagcagagatcagcttttacagctttgagaggctgctgaggtccctgatgatatactaaagattaagcaagatatagaagctgagattttgggtgaaaatccaagttggggccgtgctgaaagcaatcttacttatcaatcacaaaatcggtattctgagccagataaccgtgactggcgtggtcattctggacaacttgctgctgattcagatgagaggtc

SEQ ID NO: 15600 - DNA, 469 bp, Glycine max
  Clone ID: jC-gmle01810087a02d1
gggcatataacgataatgttatttatgaactgacaagttaaacaattactatgtcaacaaaaataagtaaattgagactaaggaaatacaaaaacattggacccctaatgggacaccttcggagaaacatggcacctgattagctaacaggaaaataaaatccatagctttatggttggacttttcccttaaaaaacatttttaagatctcaaaaaatcaaaaataaaattttaaagctttaaaaaaatagctgaaactagaatctccattttataacatcaatacaaaatgcttttactcaaaaagtgaggatgaaggtatggaaatttaaggttgcaaaggaagacaggttcgtccagttacagaaattttgattcacttgagcatactctggcaggccttaatatcagatgtttgagcatccaacacggtttgcccagatgcagatctaatggcccccaccacact

SEQ ID NO: 15601 - DNA, 529 bp, Glycine max
  Clone ID: jC-gmle01810087a03a1
gctaaagctccaagtatgatcttacaatccttcaaaaattctgtttctttgtgtgtgtatggtgaggataacttaattagtgatcatgaatatgtcacgccttactttactggctctaaattgcacagctttctagctggtcataatatcaccattactgatggcattgacaacactagcgcaactttgctatttacaaagttggcatattgtgatcttctcaagagaaactttaagcagatgtctaatgttatgcgggtggctcctgcggataacgcgagtctatggccacaacttcattatgtcccgtgtcataatctggacatgcaagaagcttatcttgactatctcgtaaatgtgttacgagaattgtatttgcacagtccagaggaagctcgccaattgagaaggaaagctctctctcgtattgcatggctgcaaaaagctgatgtgcctaccatagcacagattgaagagttccattcgatgcagaggatgatgaatgctcctgcatcaaatgataatattg

SEQ ID NO: 15602 - DNA, 513 bp, Glycine max
  Clone ID: jC-gmle01810087a03d1
aaacacactcattgcacatagtaatgcgctttatttaagtgaataaaatattacatactagttcacaaatgcaaaaggacactcatcaaccagatatttgagactcttacagttctcaagaagtcgcgtcagcatagggttagtggcgttagaactcagaatttcattcttaacgccaaaaagaacagccagtaaagctactggaaaaggatcaactctagtaagaaaaacaattctcttacctctcccaagtgctgagcgaatccttttgttgatatctgaggagcgattgttaactgcagaactaatccaagcagtggtgggtaaaccaccacgtacactaccacatgtaacatttacaacgacagcttctgaaggtaattgacttacaggataaagacaattcacaaaaattggtgaccaagaatccactggaaaatttccatcacagaattcttgcgtgttagccaacacaagcttatcatcaaaaacaatcttgtttggaaaagcttt

SEQ ID NO: 15603 - DNA, 580 bp, Glycine max
  unsure at all n locations
  Clone ID: jC-gmle01810087a04a1
gggaagggctcaaagtctggggcttcaatgacctgtgctggttgccagggtactggcatgaaggtgtctattaggcaccttggtccttctatgattcagcagatgcagcatccttgcaatgagtgtaagggtactggagagacaatcaatgacagagacaggtgccaacagtgcaaaggagagaaagttgttcaggagaagaaagtacttgaagttgttgtggagaagggaatgcagaatggacagaagattacattccctggtgaagctgatgaagcacctgatacagtcactggggatattgtctttgtcctacagcagaaggaacacccaaagttcaaacgaaaggccgatgacctttttgtagaacacacattgtctcttactgaggcactgtgtggcttccagtttgtgctggctcacttggatggccggcagcttcttatcaaatctaaccctggggaggttgttaagcctgattcatacaaggcaataaatgatgagggaatgccaaactaccagaggcacttnctgaagggacagctctacattcatttctcagtgcattttctgataccct

SEQ ID NO: 15604 - DNA, 322 bp, Glycine max
  Clone ID: jC-gmle01810087a04d1
gttaaatattttgtcggacaaaaaaatcagcgagggtgggaagaaaaaaaaaaaaaaaaaaaccacaaaagaagaaaaccccacaacaagcgggaaaaaaaaagaaaaaacaaaaccaaaagaagacaaaacgggcaatgacggccgaggaccgcgcaccactgtctgaacaccacgcagcaaaaccagctcctgcaaagccgcccgctgaggagccgggcgcctcctcaagaaggccgccggctgacaacatgaaggggggggggctaccaacactcaagcacaagcgtggataacaacggcggaggaagccctgggggaa

SEQ ID NO: 15605 - DNA, 516 bp, Glycine max
  Clone ID: jC-gmle01810087a05a1
cagcaacacaactccacttaccccctggattccgattccaccccaccgatgaagaactcgtcgttcactatctctgccgcaaatgcgcttcgcaagaaatcgcagttccaataatcgccgaaatcgatctctacaagtacgacccatgggaccttccaggaatggctttgtacggagagaaagagtggtattttttcacgccgagggaccgcaagtacccgaacggttcgcggccgaaccggtccgcggggaccggatactggaaggcaaccggagcggataaaccggttggcaaaccgaaacctgttgggatcaagaaagcattggttttttacgccggaaaagcgcccaagggagtgaaaactaactggatcatgcacgagtatcgtctcgccgacgtggatcgttcggttcgcaaaaagaacagcttaaggctggatgactgggtgctgtgtcgaatttacaacaagaaaggtgcaattgagaagcagcaaccagcaccgtcaccaccgagtg

SEQ ID NO: 15606 - DNA, 536 bp, Glycine max
  unsure at all n locations
  Clone ID: jC-gmle01810087a05d1
ccacacaatttatttaatatcaaactattaattgcgactagatcatgtaaacagttggattcatcatgttcatatatgaatgcttctcttttttgtttttttgtttttttataataataatcatctacgcgcaccagcacggacacactcacggacattcactcagtctcgtgcttccatgcaatgcagcaggcacgtcaaaaatgcatcatgcacacacaaagcaaagaacgacgtcgtgccgtctcgtgcgtgttgatttcagaagggcctggagaggtacatgaagatatcctggagcggcgacatctgattattcccgagagtggcatccatgtaattatacgaaaactcgctgttgccctgcctcttccgctcgctctgcacctcgctcgcaaactccgncgacaccacctgctccgaacagctcgactccgtcgtgtgcagccgcggcaccgagtctgaagcctcgaagtacaggcaatccgccgccgtatactccggcttcacgtcttccatttcgtaacattcaattt

SEQ ID NO: 15607 - DNA, 495 bp, Glycine max
  Clone ID: jC-gmle01810087a06a1
ttagattggtgaccaaattgttgaatgaatggggttggtgttagaagcagttttccatgtgggttttgattttcatgtgctgaagacttcataactcactgtaattgatagtggtaaactgtgaactcagttggttataacttgctaacaggcagaaagttgttgaagtccctcaattgtgcttccctgcatcctttcccaaagtctctgtctggtgcaatggtttatataactgagtgggacaagtttgtggagcaatccattgagctgttccgtgcagatcctgattctacacggtacgtcatgaagtacaggcactgtgatggaaagttggtactcaaggtcactgataaccaacagtgtctaaagtataagacagaccaagcacaagaggctaagaaaatggagaaactgaataatatgttctttgctttgatggctcgtggtcctgatgttgatctatcagaagtcactggaaaagagcaaatggatgct

SEQ ID NO: 15608 - DNA, 427 bp, Glycine max
  Clone ID: jC-gmle01810087a06d1
gggcccttaaaaaattggggccccaaactaatttatggaggggggaagttcaagcaacgggcggacaaattaaaaggggaacatgaactggagagaaataactaaattttggaatccccaaaaatgccagagatcaaaaattgggacttcaaaacttaaatatataaacctctcatcataagaatttggcgaaggaatcattagggggggaaaatggcactactcaaccttaggggggcccgggattcaaaaaaccattttgtttagcaaaaggccaagttatgggttccttcctcatcctttttggggtgggtgagcatccatttggtcttttccagggacttctgatagatcaacattgggaccacgggccatgaaaggcaagaacattttattaagtgtctccaatttcttaacctcttgggct

SEQ ID NO: 15609 - DNA, 578 bp, Glycine max
  Clone ID: jC-gmle01810087a07a1
gttccaaacttcttcttggaatgtcccttcctaaataaccctcaaacaaaagccaccttaacatctcttctctgaaaattctctttagagagatagagagatagagagagagagaaagaaattaagaaaaaatggcagcctgcactgtctactcaacacaatctctgagcacaaattgctccatctcaaccccatcaaagacacagctgagtttcttccaccaaaagcaggtagttttctggaggaacagcaacaggggcaacagcagcagcagaagaagctatgtgataacatgtgcagcaggtgactcacagacagtggtgattggtcttgctgcagactcagggtgtgggaagagcaccttcatgaggaggctgacaagtgtgtttggaggagcagcagagccaccgaagggtggcaaccctgactcaaacacactcatcagtgacaccaccactgtcatatgcttggatgattaccactctttggatagaactggcagaaaggagaagggtgtcactgccctagaccctagagcccatgattctgatctcatgtatgaacaagttaaagctctt

SEQ ID NO: 15610 - DNA, 419 bp, Glycine max
  Clone ID: jC-gmle01810087a07d1
atcaacataactgaatctcagcctcacttttttttctcggataagtacatacatacatacatatgtgtttttttcattaattatgatgcagaacagcctaataacaatagacaaaataacatgaaacacagtgaaattgtggaaaacatgaaagaagaaagaaaatgatgattttgatgagaactaatgcaatttgactgcgtcgctcggtcgatatgtatatatattattatggcaggttcaattcaattcctaagcttttgcagccactggagtctcagccttggtggctattagctgctcatataaatctcttatcttcaaaccaactatggtttggaagagacctgttccattgttgctgccggggaaatcagcatgcttcaacatctgttgagtaacctctccatagaactttg

SEQ ID NO: 15611 - DNA, 550 bp, Glycine max
  unsure at all n locations
  Clone ID: jC-gmle01810087a08a1
cacctttgttcactcttcttctcttgcggctagggttttagcgcagcttcttctagatttaaggaagatgggtaaggaaaaggttcacatcagtattgtggtcattggccatgtcgactctgggaaatccactaccactggtcacctgatttacaagcttggaggcattgacaagcgtgttattgagaggtttgagaaggaagctgctgagatgaacaagaggtctttcaagtatgcctgggtgctggacaaacttaaggctgagcgtgaaagaggaatcaccattgatattgctttgtggaagtttgaaacaacaaagtattattgcacagttattgatgcgcctggacatagggatttcattaagaatatgattactgggacatcccaagctgactgtgctgttcttatcattgattcgaccactggtggttttgaagctggtatttccaaggatggacagactcgtgaacatgctctgctttcattcacccttggtgtgaaacagatgatttgctgcttgtacanaatggatgctactacacccaag

SEQ ID NO: 15612 - DNA, 357 bp, Glycine max
  Clone ID: jC-gmle01810087a08d1
ggaaccctacaaaaagaaaggggacatttaaaaaaccaaaggaacacaacgcaaaaaagtcctgaaactcggtgggcttaaaaaaaatggaatcgggggttccgacaaacacaacccattaaaacccagataaataaaagcaattttgcccccggggatcaaaaacccagttttgggaacaacagttgccaaaagatgggggggacttaaaactttgtccgaaaaacaagcttccttgaaaagaagaccccagggtcccgaaaagaaacccacctttattggacccaaaattccctgatgaaccagcccggaggattcacttttttttttgggcaaccttggggaccctggttccgg

SEQ ID NO: 15613 - DNA, 393 bp, Glycine max
  Clone ID: jC-gmle01810087a09a1
gtggacgccacccatcttgctaattgctagctgtcgctcacgccttgatgcatcctcaaggacaacatcatcttaaacaagcagcagctattggagccagccaggcaatatatgatggtgggttccagaatgttgcagctgcacagcaaatgatgtactaccagtaacacacttcggttctcttgatgtattggggtttaatgctagctatatattctgccctgtgcacattgattcgtgttaaactctagggagccttttctttttacttttttacccgacggtagtgttgtagttacacctaccatattagacaattatgagtaaacatttgtatgggtttgtatcatgtatgcggttttctacttaatagtggggagtgtttatgatttt

SEQ ID NO: 15614 - DNA, 393 bp, Glycine max
  Clone ID: jC-gmle01810087a09d1
aaaatcataaacactcaccactattaagtagaaaaccgcatacatgatacaaacccatacaaatgtttactcataattgtctaatatggtaggtgtaactacaacactaccgtcgggtaaaaaagtaaaaagaaaaggctccctagagtttaacacgaatcaatgtgcacagggcagaatatatagctagcattaaaccccaatacatcaagagaaccgaagtgtgttactggtagtacatcatttgctgtgcagctgcaacattctggaacccaccatcatatattgcctggctggctccaatagctgctgcttgtttaagatgatgttgtccttgaggatgcatcaaggcgtgagcgacagctagcaattagcaagatgggtggcgtccac

SEQ ID NO: 15615 - DNA, 525 bp, Glycine max
  Clone ID: jC-gmle01810087a10a1
attcggctcgaggagaagttgagactgttgatgatgactcacatcatggcaaaactcaagatgattcatctgcagtgcaaactaatattgctgaatcatctataaaaaatatgggtgatgacaagagagatcctttacaagcacaaacttataatcaagatttggaatcttctctgatggataaagaagctgttgtggacacacaaactctggatcgagacatggttgggagtgatgcacatcatctggataaacccctttgttcaatccccacagaagaaaatttggaagggggtgtagttgaaggtcttgagactgggttaagtagtttagagggttccttaacaatggaatctgttgctgcttctggctcgccgaaagttgaaaaaaccagtgaagatatgtgtttcagtgctctgtctcagaacaatgtaagtgaagatgtaatgttgcttaacgatgtggaaatggatgaccagtctgcaccaaatacatgtgtattgccaaaatcttcaagtaagatga

SEQ ID NO: 15616 - DNA, 515 bp, Glycine max
  Clone ID: jC-gmle01810087a10d1
ggatctgaattgtgttgagcaggtgatactgtcacgttgtttgcatcaagcagagaggcagttcctgtaaagatactttgcaaacctgtactggaagtagagacaccagaagtaacattctttatgccagaggaaggaggcagagatcctttgactgatcctagcttaattgtatctgaggcaggtgatgcagaaatctgggggctattgtcagttacaggagttggagaagcaatccatggccctcgaaggggggtttgggacatccaaggtgtgttatgtccaagaaaattcctcacaggagtagtttgataaggatgtaatggagtaattgcctgtggataatccacgacagaacctcttgcaatggcactagattgcagggaatcactacctagacctagagttgatagactccaaagtggagatgaaagaggtattaaggggtttacaattggtggagtagccttgctgctgagtcgaccaagtggcgaagagataccttttccttgagc

SEQ ID NO: 15617 - DNA, 537 bp, Glycine max
  unsure at all n locations
  Clone ID: jC-gmle01810087a11a1
cgggaatgcaacacatgcatgcaccacatatgggtcctttttcacctataggtgttggcatgcaaatgaggttaggagtgggttgtggaatgggcatgcctgatgctaatgatattgagtcctctagatttattcaagtgccccaaatgcaaggaactcatcatcctagtcagggtcaccccattccaatgccacatgctcccatcttttctttcccaggagaaccttttatcaacccatcaactttaggacttgtggaaactgtggataaggcttcttcagcctttggcttaattaaggatcagattccacaacttgcacagaacaccaacaacggttgtaattcaacaaatcagatgtcaacagtacagtgtgaagcaaccattggtggatttgaacactcaattgtggtacttaatagtggtcatgcaacttcggtaaatgacagaggagctattaatcccagtgcagaagataacccttatcattgatanatctagcatgtattactagatgctcgtgataaatatacgtgtt

SEQ ID NO: 15618 - DNA, 540 bp, Glycine max
  unsure at all n locations
  Clone ID: jC-gmle01810087a12a1
ctcgagccgattcggctcgagcaaacacaacaacactctctcttctcgctcttggcttttcgctcttcactcactctcattcattcatttccaccgttcatggatccagtaagcgtgtggggtaacacgcccttggcgacggtggatcccgagatccatgacctcatcgagaaggagaagcgccgtcaatgccgcggaatcgagctcatcgcctccgagaacttcacctccttcgccgtcatcgaggccctcggcagcgctctcacgaacaaatactccgagggcatgccgggcaaccgctactacggcggcaatgaatacatcgaccagatcgaaaacctgtgccgctcacgcgcccttcaagccttacacctcgacgcccaatcctggggcgtcaacgtccagccctactccggctccccggccaacttcgccgnctacaccgncgtcctcaacccccacgaccgcatcatggngctagatctcccctccggcggccacctnacccacggctactacacctccggcggaaagaagatc

SEQ ID NO: 15619 - DNA, 543 bp, Glycine max
  Clone ID: jC-gmle01810087a12d1
acatcaaaataattcatttctagggaaaagtatcagaaaaacaaaataacagattagtttataattgatttgccaatcatattgcacgacaacaactcgaaattctttaacaaaggcagtctgcaagctttagcccgaactaacatacctcctttgttaaagcactaaaaaacacatcctcaatgaaatctctttcaatactaatctacaacaacttactaagataccttgtacaaaatacaaatacattaaaaaatccaaaaaacttagatgcaatcactttggtgttttggacattgttctccaaccaaaattaaaatttcacttatataaatatgcaagccttcaatagaaattttataacttactttcgaactctgataagagaacagtactaaaattacgtaagaaaattcatctaagttctgcgatgataaaaaagaaaaagagagagagagagagaggatatagtcctagcctaaggaaaatcattttataaatctataaatgagatctgtttccaattgagttagttaagcaaga

SEQ ID NO: 15620 - DNA, 592 bp, Glycine max
  Clone ID: jC-gmle01810087b01a1
tggtgatcatcttgctactggtgatcgaggtggtcgagtggttctctttgagagaacagatacaaaagatcatggtggatcacgaagggatctggagaggatggactattctattggtcggcatcctgagtctcgctcaaaacagagagtcagagtcatgagccagagctcgactatgttaagagttctggagactgaacagaccatcaacagaatcatatggagccaaacagctaatgacgccctgatccttatttgtacatatgataaaacgatcaacttttggaaggttcaagaatagaatgtcaagaagatttctgagatgaatgctgacccttcaaaatctatggggaatggatctattgctagttcatgcaattcaagtaagtctaggccatatcttgtaaatggaggatctccagatagatacaattatataagcaatgacttttcatttccaccaggaggcctaccatcactaagattacccatggtagtaagtagccatgaaaccagtttagttgctcgatgtcgtagagtgtatgcacacgctcatgattatcacatcatttctatttcaaataacagcgat

SEQ ID NO: 15621 - DNA, 569 bp, Glycine max
  unsure at all n locations
  Clone ID: jC-gmle01810087b01d1
gaaacatgtcaaattaaattccaacacaaaattaatcaataaaaaaatgatgcactgcaggtttcaactgctccatcccacagaaatatctgggcaaaaaaagaaaagaaaaactacattttttaatctgaatcctggtggcagatattgaaacatcctttagtatctgttgtaggagagctacaatcacattttcttcttcacttgcaagccaaacacaatttgaaacattgattgcaccttctctttcagaagaagatacagaaatagagggaaagaatattaggattgaaaggaggggaagaggaaaaaaaaagagatgctgcccatccagtaacaaaataaggtctcctgccaatccaggaatttcaaaacagccacttctggatcctttttctaaaagctctctgaagggcacttgtagtgtgagagttaatagtgtatatgtatcctccaacccagtgtggttggtaagatgggaaaagaagaagccttctccacagcantatgatgtgaccatgcagatacacattgcgccttcaatcatctctctttacgcatagtacatg

SEQ ID NO: 15622 - DNA, 586 bp, Glycine max
  Clone ID: jC-gmle01810087b02a1
ctgagctgctgcttggacagcctctgttccctggtgagagtggagctgatcaacttgttgagatcatcaaggttctgggcactccaacaaggtaagagattaagtgcatgaaccctaattatacagaattgaaattcccacagattaaagcacatccatggcacaagatcttccataagcgcatgcctccagaggctgtagatttgttatcaggactactacaatactcccgtaacttgcggtgcacagcttttgatgccttgacgcatactttcttcgacgagcttcgtgatccaaatactctcttgccaaatggccgattccttacaccactatttaatttcaaatcccatgaactgaaaggcgtcccatctgagattttggtgaaattggttccagagcatgcaaggaagcaatgcccgtttctaggctcgtgaagtgttgtttccatatgagaatgctgcgctttccttctctatttaatatgatacttttgctggtatctatattggataccgctgccctgtaatagcagatttagagatacatgctactcattatcacccaacccccgatggttatgtag

SEQ ID NO: 15623 - DNA, 535 bp, Glycine max
  Clone ID: jC-gmle01810087b02d1
gattataatataacatcgatcactttcacttaaggagtttaatatttgtccagacaagcaccaagacttcgtcccaagtcgtcctaaagagtggaaaaataaacatatgcccagacaaggccattacaacttccaaccaccacgctaagcataactaaattaaacaacaacccatcattgtctcaacaaatacaaatattgatgcaacatttagataattgcagacattttgtcctctattgtatgttacaatctgctgtgatacaggaaacagggtattctacataaccatcgggggttgggtgataatgagtagcatgtatctctaaatctgcttttacagggcaaccgaatacaataaagataccaacaaaaatatcatattaaatagaaaaggaaagcgcagcattctcatatggaaacaacacttcacgagcctagaaacgggcattgcttccttgcatgctctggaaccaatttcaccaaaatctcagatgggactcctttcagttcatgggatttgaaattaaatagt

SEQ ID NO: 15624 - DNA, 294 bp, Glycine max
  Clone ID: jC-gmle01810087b03a1
gaaagatcaatttaggcctactaatgggatattggcgctttaactattcggcaaccacttgattgccaatactatattactccgtcatcccttgactttatatgcttaaagccgttcgcttggtagcaatgatgactagcccatgggccatacctgtcgcatatgtaatactgggcgagagcccctgtacttctgttgagggctcgacatctgtaggcacacacagtggcaggagagaacgactcagggatgcacgatggcaaacaaccacggcgaggtcttcgcattcccaca

SEQ ID NO: 15625 - DNA, 490 bp, Glycine max
  Clone ID: jC-gmle01810087b03d1
gaaaaacaataaaaattcctttcttttccaactaaaaacaccacaagtacattgcttttcatttgaaagctaacatttcaccaaaacaatactacattgtaattgtaaaaaaatccaatcaaaagataaaagcagagactaccttaatatagttaattccatattttgaagaagatgcatgcacttaaagccagtgtagtagatttaatagtatgagagcttggcaatctgcccttgtccttccttaagaaaaggccttggtatattgggaaattgatgagaaccaaaaacccacacaatagaacttgcaatgccattttctcaccagtcaaagcaactttgcaaaggactaactgtttataacggctagtaagcaaaacaaatggagtaatgcaagtgttgctagtacagtgaaaaatggagaagaggttccaaactccatgacctcgttcttggtacgttgggaaacatcatcatcttctacaatctt

SEQ ID NO: 15626 - DNA, 520 bp, Glycine max
  Clone ID: jC-gmle01810087b04a1
caatttcagaggcttgatggcagtacaaaagctgagcttcgacaacaagcaatggatcatttcaatgcacctggtagtgatgatttttgcttccttctttcaacacgggcaggaggtctgggtatcaaccttgctacagcagacactgttataatatttgattctgattggaatcctcaaaatgacctgcaggcaatgagtagagctcatagaattggacaacaagaagttgttaacatatatagatttgttacaagcaaaagtgttgaggaagatattctggaacgtgctaagaaggaaatggttctggaccacttggtgattcaaaaactaaatgcagagggtagactggagaagaaagaagccaaaaaaggaggaagttattttgacaaaaatgagctgtctgcaatcttacgatttggagcagaggagctctttaaggaagaaagaaatgatgaagaaagcaagaaacaactcttaagtatgaatatagatgagattcttgaagagcagataaaaa

SEQ ID NO: 15627 - DNA, 502 bp, Glycine max
  unsure at all n locations
  Clone ID: jC-gmle01810087b04d1
caagaatctcatctatattcatacttaagagttgtttcttgctttcttcatcatttctttcttccttaaagagctcctctgctccaaatcgtaagattgcagacagctcatttttgtcaaaataacttcctccttttttggcttctttcttctccagtctaccctctgcatttagtttttgaatcaccaagtggtccagaaccatttccttcttagcacgttccagaatatcttcctcaacacttttgcttgtaacaaatctatatatgtcaacaacttcttgttgtccaattctatgagctctactcattgcctgcaggtcattttgaggattccaatcagaatcaaatattataacagtgtctgctgtagcaaggttgatacccagacctcctgcccgcgttgaaagaaggaagcaaaaatcatcactaccaggtgcattgaaatgatccattgcttgntgtcgaagctcagcttttgtactgccatcaagcctctgaaa

SEQ ID NO: 15628 - DNA, 526 bp, Glycine max
  Clone ID: jC-gmle01810087b05a1
gccgccggtgctgagctcttcgccgccggtggtcggcgcggcattcgcatcaatggctgggtgatcgagactcggaggcactccatactcaactcttccacactccaagagtcaaactctcttcctactcactgctaagctttctcaggaactagttctcaaacacaaacccaattattttttttatcagcttcaccgttcatttcactgtaaactgcatcaatgttcttcaactttaaggaatctgcagtcaaaacaattaaactctcctttaaatatcattttttgcacatccagagatacagttatgtgaatgtgtatatgaagtggaaaaaggattcatactatgactcaattgagcacatccactactccgttcagctcaagcctatcattgccctcaaaaactgcattgtccgggatcccaatggctgcattcctatctctgcagtgtcaaagaggggattagagttagatgttcccatgaaggttgcagggtttatgaggcagtatccatccatctttg

SEQ ID NO: 15629 - DNA, 574 bp, Glycine max
  unsure at all n locations
  Clone ID: jC-gmle01810087b05d1
aaaataaagaatgtcacacaacaaaatcaatcaacttcaactatgaggcatatcggaattacacaatttcaagggcaataaagagaccatatctacaacatggtagcaggacaaaagtaatcaagttagaaaaggcttgaaaacatgttatgactcgccaaaaaataaatatgatgttatacctcaaggctacgatatcactagatgtgctggtgctaccattttcaacttatgcttattatcagctacttgtttctttctctgttggtaaaaatttcatgtttaccttaagtggtctggtataaattttcacgcaacctgttccaaagagcaacttgccatctcatgtcccttttcatctatatcatttgaatcgatatccaattttgcattactattagaaaatcgattattcaccctcctgttccttaaaatcacttctgatttcttcatcaacttgatgtatttcttcctgaccctcaacagaggatgcttctcaatagcagatttatggctgtaagcttcctttagaatgactgtacangttttgttcctgaaagatagataaaacata

SEQ ID NO: 15630 - DNA, 538 bp, Glycine max
  Clone ID: jC-gmle01810087b06a1
ctacacttcattagtttcacttaacatctcttgcttaaaccatgaggtgagtttatctgcattagagcgtctgcttgggaggtgtcggaacctgcggaccctccgtctcaatcgtgccgtgccccttgatagactacccaacctacttctccggtgtcctcagctggttgagttaggcacaggagtctattcaactgagatgcgaccggaggtcttctcaaacctggaagcagcattttctggttgcaagcagttgaagagcttgtctggcttttgggatgtgcttccatcctaccttccagctgtctaccccatctgctccaggctaacatcgctaaacttgagttatgctattattcaaagctctgatcttattaagcttatcagtcaatgcccaaatttgttgcgattatgggtgctggattacatagaagatgctggtctttatgcccttgctgcatcatgtaaggatctaagggagttaagggtgtttccgtctgagccgtttggtttagaaccaaatgtttcattgacagaa

SEQ ID NO: 15631 - DNA, 555 bp, Glycine max
  Clone ID: jC-gmle01810087b06d1
gcattagaatacgaatattattcattgggaaggctaacaatgacaaatgtgtccaacatcctactacgaaagacaaagttaacatacaaataaattgaagcccgcaaatattatagtatgaagaataaaataactgcatctaacgcacatacaacaacaacacagtttcagactctttgtaaatcagtaaaattggcatcccgtagctcagccaaagtgtaaaatgaatggcaatcgagctcaagctttctgtgtaagctctccagtaccaagctcaaccacaagccataactgcaagtctgcaactatatatatatatatatatatataagccaggcaacagtaaattcactagagaatagcatactgagcatgtacctgccattctagatatcacaaaccaaagtggcattagatttccttgcctcaatccaccgcgtgatcactcaagccttagtgaagaatcatcttccattgtccacacaaaaccaggcatgtccaaccttggcccagcaacagtcctgtatatataaagcttctaacaggacaatcatc

SEQ ID NO: 15632 - DNA, 524 bp, Glycine max
  Clone ID: jC-gmle01810087b07a1
cacctttgttcactcttcttctcttgcggctagggttttagcgcagcttcttctagatttaaggaagatgggtaaggaaaaggttcacatcagtattgtggtcattggccatgtcgactctgggaaatccactaccactggtcacctgatttacaagcttggaggcattgacaagcgtgttattgagaggtttgagaaggaagctgctgagatgaacaagaggtctttcaagtatgcctgggtgctggacaaacttaaggctgagcgtgaaagaggaatcaccattgatattgctttgtggaagtttgaaacaacaaagtattattgcacagttattgatgcgcctggacatagggatttcattaagaatatgattactgggacatcccaagctgactgtgctgttcttatcattgattcgaccactggtggttttgaagctggtatttccaaggatggacagactcgtgaacatgctctgctttcattcacccttggtgtgaaacagatgatttgctgctgta

SEQ ID NO: 15633 - DNA, 412 bp, Glycine max
  Clone ID: jC-gmle01810087b07d1
gggaaccccacaaaagaaaaggggacattaaaaaaaccaaagcaacaaaaggcaacaaaggcctgaaactcgcgggggttaacaaaaaggtaaacgggggttcccacaaacacgacacattaaaccccagataaataaaagcaattttgcccccggggataaaaaacccagtttggggaacaaccgttggaaaaagagggggggaacctcaaactttggccgaaaaacaagctgcctagaaaagaaaaccccaggggcccgaaaagaaccccccctttatgggaaccaaagtcccctggggaaccagcccgcacgagcaactttttctttggggccaccttggggaccctgggtccggggggaacctttttatcacacgtgttggcgacccccacagaaacaggttgaccca

SEQ ID NO: 15634 - DNA, 542 bp, Glycine max
  Clone ID: jC-gmle01810087b08a1
caacatccgctgttccaatggttccaagttttccgttcagattggcctcgattccaccgtcagatccttcaaggaggcggttgctcacaattgtgatatatcctctgatcaacagcgcctgatttacaagggtcggatcctcaaggatgatcaacccctccaaagctacggtttggaggctgatcacactgtccatttggttcgtggtttttctccttctaacaccactggtgggactaatagtggtggtggcgttggtggaaataccacaactgccaacacgagaggtgctggtgctaatgagggtgggggtttaggagggccaggatttggagcttcaccgtttcctggacttggtggtaacaatgggatggagggcggtggcctcaatggcttatttggagcgggctatccggatcttgaacaaatgcagcaaccatttttgtcatatcccaatttaatgagagatataatgaacacacctgctatgcagaatttaataaataatccagacatagtgcggaaatcttatatgaataacc

SEQ ID NO: 15635 - DNA, 489 bp, Glycine max
  Clone ID: jC-gmle01810087b08d1
atctatgaacccaatccttgcaaacaggcaagttagaattacatgtatatggtacaaaaggctttgtactttcttgtagctgaaggtataattaatcattggatatttgagcattggatataatactaaactctggatatcatgtaaaatgaaaaaaaaatcaatagatttgtttgaacataactccatgacgaaaatcaaagctaaatggacaaatatctcacaccagattctagtgtttgggatttaattgctagtcttgtgtccctaccacctgctactgtccggggttccccaaaagccgctcaactgctgcatgtacgttccctgatgtagcaataagagcccttatgttctcttgcgtgtcaaagaaccccatctcttgaagctgagaaagttgggtggcatacaattgctccggtggctcatttgatctgttaggaacagccaggctaccagcttcaagtccaccaaacatgcttgataaca

SEQ ID NO: 15636 - DNA, 479 bp, Glycine max
  Clone ID: jC-gmle01810087b09a1
caccaccgagaccttggtcatgggagtggcacctgttaaggctcaatttgagggtgctgaaatgggtgtgcccgctgagaacgatggctgcaaatgtggaccaaactgctcctgcaacccctgcacttgcaagtgaggtgttgggagagcaagcttcaagcagagatagcccttaattaggaataatgataaactattaatgtgtagctaaaaacttatgtattatgtctgagatggttttcgtgcactctggtgttttgtgttaaacaaacatccttagaataaagtggtcatgtcttgcctttcagcaagttcaagtgttttggacttgtgatgggtgtgttaagctcatggttgcttatttttttctttattgtaatgtccggaaactggtcgcttctggataaagttcggctaatctgaattatgaatctctgcttataatattaaatactattactggaaaaaaatgctgggcc

SEQ ID NO: 15637 - DNA, 334 bp, Glycine max
  Clone ID: jC-gmle01810087b09d1
tttgtttttttttttttttttttttttttttttttttccagtaatagcatttaatattataagcggagattcatagttcagattagccgaactttatacagaagggaccaattaccaaacattaaaaaataaaatgagggaagcaaccatgagcttaacacacccatgacaggggcaaaacacttgaacttgctgaaaggcaagacatgaccactttattctaaggaggttggggtaacacataacgccagagggcacgaaaaccatgacagacataatacataagtgtttagctacacattaataggagatcattatgcctaattaagggcta

SEQ ID NO: 15638 - DNA, 509 bp, Glycine max
  Clone ID: jC-gmle01810087b11a1
tacaacttagcagcagaattgtttttgtcttgtattcatcccttaattgtttattgggtgatcaattttataagaatccatgaaaacttttaaaagtgcccttggaccatttttgagcttttatctgatcaaccatactagtggagctaccagcctgtctaaaggtcatctgtcataggggagcacctgcagggttccatgatgatcctctaaagagacccacccaagttggttatggttctcttataatcatgctggtagcctgttggtgtgacccatgaaatgtaaatatggtataccataggtgtatgtgttggcgagatcttaatgggatgataacttgattttactcctctcctctactttatagggtgctttgggagcatggcctctgaggatcggttgagccagtctgagcttctatatcatttgtagagggacccatttaaatgggtattctgtaggcaaaagcactggaaagaccctaatgggctgataacctgactatg

SEQ ID NO: 15639 - DNA, 413 bp, Glycine max
  Clone ID: jC-gmle01810087b11d1
ttttatatattttttttttttttttttttttttttttttttgattttttttttttggtttattaattattttttttatgtttaattttataacaatatagattaatttacaaataaaattaaaaaaaagaaaaataaaatataaaaaaaaagaaaaaaaaaagacaaaaaaagaaaaaaaataaaataaaaaaaaaaaataaataaaaataaataaaaggcaaaacaaaaaaataaggagaaaaataaagaacacaataaaaaaaaaaagaaggaagaagattaataaagaagaagaataaaacgaaacagaagtattaaagagagaaacaaaataagccaaaataggaaggatcaaaaaacaaaacaaccctcaaaacaaaaagaaaggaaaaaaaaacgacagaaacagaa

SEQ ID NO: 15640 - DNA, 428 bp, Glycine max
  Clone ID: jC-gmle01810087b12a1
ggttcacttacaaatgacaacctctcccccttttataggtttcaagggaaagttctagatacataaagaaagatttcatatacttcaagggaggattctacatacttctctcaactacttagttctacatgcttcttccaattaaatattacttctacttatctctacacttttctagaactttctttgaagtagtaacacaaatttaaatgggtctaaaacttgattaatgggttaaaccaagtttatattattcaacatagcaacattgagtttgcagcaactaataaaaccattacacactttacattagtacgttttagatatcagtttgtaatatggtaatcagagcttcaaagccgtgttaatggcttgtgatcctgaaaattatgctttgatgctgctgaacatggaagaacatgttcgtg

SEQ ID NO: 15641 - DNA, 482 bp, Glycine max
  Clone ID: jC-gmle01810087b12d1
gcactaataaacaaaactttaaaaatattaatgtaatttttctcttaaaaataagtaagatttacaaataattatacccatctttaataatgaactggataaaaattttcttttaaatcatatacttaatcattgggtgggtactatagaatttgagatagtagcattagtcgtagaggaaccagttgaagcagagatatctctgtggggccttaaattcgtcaactgaataaagagaggcatagaaggtctcatatgctcaagtaagtgattgccactgagtaggactactacttcagacatggatggcctcattgcagctgatgattgagtgcacatcaaagcaatgcctatgattttcttcacttcttctgcatcataactattagggtctaagcttttgtccactaactccaagtgcatgcctctcacatataacttccaagcctggtgtagtcaaaaccaagggtcatatagtaaaa

SEQ ID NO: 15642 - DNA, 530 bp, Glycine max
  Clone ID: jC-gmle01810087c01a1
tcggctcgagaacagaatgggcgtcgtggtgatcgacggcagcaccgtgcgcgacttcgtgaacgacgaaaccgccttcaccaagagcgtggacgagcagttctcggcgctggacctcaacaacgacggcgtcctctcgcgctcggagctccgcacggccttcgagtccatgcgcctcatcgagacgcacttcggcatcgacgtttccacgccgtcggagcagctcgcgaagctctacgactccatcttcgacaagttcgacggcgaccggagcggcgccgtcgaccgccgcgagttccgcgacgagatgaggaagatcatgctcgccatcgacgacggactcggatcgttccccataaggatggtcctcgaggacgatcccaatagtcttcttcagaaagccgcggatcttgaagcctccaagacctgaaatccaaacggtgacgttttgagttcggttcggtaatagtaattgattgtgctatcgggcgtacactttgctattcttttcttaaataaaaggggttatg

SEQ ID NO: 15643 - DNA, 582 bp, Glycine max
  unsure at all n locations
  Clone ID: jC-gmle01810087c01d1
gataagttaataacagtgtcccttacattatacacagaacggaacctcagtttcgaaacacggtctctacataaacccttttatttaagaaaagaaaaacaaagtgaacgcacgaaagcacaatcaattactattaccgaaccgaactcaaaacgtcgccgtttggatttcaggtcttggaggcttcaagatccgcggctttctgaagaagactattgggatcgtcctcgaggaccatccttatggggaacgatccgaggccgtcggcgatggcgagcatgatcttcctcatctcgtcgcggaactcgcggcggtcgacggcgccgctccggtcgccgtcgaacttgtcgaagatggagtcgtagagcttcgcgagctgctccggcggcgtggaaacgtcgatgccgaagtgcgtctcgatgaggcgcatggactcgaaggccgtgcggagctccgagcgcgagaggacgccgtcgttgttgaggtccagcgccgagaactgctcgtccacgctcttggtgaaggcggtttcgtccgtcacgaagtcgcgcacggtgcttgncgcgatcaccacgacgccca

SEQ ID NO: 15644 - DNA, 554 bp, Glycine max
  Clone ID: jC-gmle01810087c02a1
gtcgcccctcgcccgaatccacacgtcacgatggtcgctgtagatagtgcaaccctgggttttccccgcatgggtcccaatcgcgagcttaaatttgctcttgcaagattttggcgcaaccagattagcgaagatgagcttttccaggtggcacatgccgtggaagaagccaattggcgcaaacaaatcgacgcgggagtgagtcgtgtgggagtgggtctcttttcgctctacgaccacgtgctggactggacttattacctgggcctcgcccctgagcggtttgccaaggtacccatgggtctgtcgcaatatttcgcgatggctcgtggcgtcgaaggcatccccgcccttgacatgaccaagtggtttgactggaactaccactatgaagtacccgagcttagtgccaagtccacgcctaaggctaatttcagctcatatttgagcaacatgaagcgagctctggctatagttggcaccaataaggcagctcctattatactcggccctcttacatacttggctctgagcatgtatgacggtgcttctct

SEQ ID NO: 15645 - DNA, 588 bp, Glycine max
  Clone ID: jC-gmle01810087c02d1
aacaacacggaaaaccacacctttattattcagattatccaaggtggcgagacatcctgctactaaggtctcggcaccttggccatgcctctacgacatgtcaagtgagcgaagctactgtagcaacttggcgcaaaattcgtcgataaaatctagtgagcttcccgtcttctcacggaaaatggcgaccatcaagcttacaacgtagcacggacttcgagggtagcatccaccatgttgcggagagcagcaatggtctcaggccacttgcgcgtcttaagaccgcagtccgggttgaccacgacttgctcggcaggcaggaggtttaagaaactcttgagcttcttgacaatctcctccttgggcggcaccacaggcgagtgaatatcgtacgtgccggggccaaggtcgcgcttgtagccgatagacttgaactcacgaatagtctcgtcatccgaacgagcgttctcgatcgagttcacgtcggcatcgatagcgtcgatggcgtgcatacagtccgcgaactcgcaatagcacatgtgcgtgtgaaatgagggctcgtttttgcaacaccagtcgacagacgga

SEQ ID NO: 15646 - DNA, 570 bp, Glycine max
  Clone ID: jC-gmle01810087c03a1
caagattccttttgttcctatctctggttttgagggagacaacatgattgagaggtccacaaaccttgactggtacaagggtccaactctgcttgatgcacttgaccagattagtgagcccaagaggccctctgacaagcccctcaggcttccccttcaggatgtgtacaagattggaggtattggaactgtgccagtgggacgtgttgagaccggtgtcttgaagcctggaatggtggtgacttttgcaccaactggactgacaactgaagtcaagtctgtggagatgcaccatgaatctcttacagaggcacatcctggtgacaatgtgggattcaatgttaagaatgttgctgttaaggatttgaagcgtggttatgttgcctcaaactcaaaggatgaccctgcaaaggaggctgctaacttcacagcccaagtcatcatcatgaaccaccctggtcagattggacatggctatgcccctgtcctcgactgccacacttctcacattgctgtcaagtttgctgaactcatgaccaagattgacaggcgatccggcaagaacttgag

SEQ ID NO: 15647 - DNA, 530 bp, Glycine max
  Clone ID: jC-gmle01810087c03d1
gaacactacaaatagaaagttgacatttaataaaccaaagcaacacaacgcagcaaagtcctgaaactcgctgcgcttaacaaaaatgtaatcaggggttccgacaaacacaacacattaaaacacagataaataaaagcaattttgccaccgtcgatcaagaacccagttctgggaacaacagttgcgagatgatggtggagacttcaaactttgtccgaaaaacaagctacctagaaaagaagacacaagagtacagaaaagaaaccaacatttattgtaaccaacatcccctgatgaaccagcccgcacgattcacttcttcttctgggcagccttggtgaccttggctccggtaggatcctacttatgaacgtacttgatgactcccacagtagcagttagacgcatgtgcctaacagcaaacctaccaagtggaggatactcggagaaagtttcaacaaccatgggtttggttggaatcatcttaacaaaaccagcatcaccgttcttcataaacttgggctcct

SEQ ID NO: 15648 - DNA, 548 bp, Glycine max
  Clone ID: jC-gmle01810087c04a1
ggcgggtataagattaaagattcaacaatggcctctgcttctgctactcttctcaagtcatctcctgttcttgacaagtgcgagtgggtcaaaggccagacccttcgccaacctctcgtgagatgtaacccttgctcagcatcagctctcaccatcaaagctgcttcctatgctgacgagctcgtcaaaaccgccaaaacagtggcctcaccggggcgtggtattttggcgatggatgagtcaaatgcaacctgcgggaagcgtttggcatctattgggttagagaacacagaagctaatcggcaggcataccgtaccctacttgtgacagtacctggtcttggtgaatacatctctggtgccattctctttgaggaaactctctaccaatccactgtcgatggaaggaagatcgtcgacgtacttgttgaccaaaacattggtcccggtatcaaggtcgacacgggtttggtgcccctagctggttcgaacgatgagtcatggcgccaaggtctcgatggacttgcgactcgctcagctgcatacta

SEQ ID NO: 15649 - DNA, 510 bp, Glycine max
  Clone ID: jC-gmle01810087c04d1
gaagtccaagattcgtaattgattggctagaagttcattaagtagaaaaggtacaagtaataatcatcattaaaaatagtgtccaagactatataaaccacaaacacaatttagacaaattaatgttggatccttgggttactgtagcatgtgtggcaagatgatcttagtaggagtaacctttgacgaacattccccgagtggcttcctcagattcaccctcggcagtgtactttccaagctgagcgagtgagttggacttggcacggaaaaggagtgcatcttgagcagccttcacgttctcagggagtccaccccatgtcttcaagcaggtgttttggagagctctggcgtaggagaaggacacgtgccatgggttaggagactaggtcatagcattcaagttcaaggttgcttcaacctcagatagtccgacagacagaaacatgattccagggacagcaggtgggattctcctgtgaaggagctcgagggtgtaatcagcaactt

SEQ ID NO: 15650 - DNA, 560 bp, Glycine max
  Clone ID: jC-gmle01810087c05a1
atcgtcttctagggtaaccacagcgccactcgaacaagtgcggccattcccaacgcttctcttcctttctaaggggagtctgaatcccgtgagttttcaatatgacgtcgttcttgaagcctgagaatgctctgaaaagggcggaagaattaatcaatgttgggcagaagcaggatgctttgcagactctccatgatctcatcacctcaaagcgatacagagcgtggcagaagacacttgaaaggattatgttcaagtatgtggagctttgcgtcgacatgcgaaaaggccgttttgcaaaagatggtcttattcagtatagaattatatgtcaacaagtgaacgttagttcactggaggaggtcataaagcattttatgcagctttctaccgagaaagctgaacaagcccgtagccaggcgcaggcactagaagaagcccttgatgctgatgatttagaggccgatacaaggccagaggacctgatgttgagctatgtcagtggcgagaaaggaaagacagactgatcgggagactgtgacccatggttaagtttcttt

SEQ ID NO: 15651 - DNA, 531 bp, Glycine max
  Clone ID: jC-gmle01810087c05d1
cagcttcctggagtaatgcttgtgcttcttcattttctctctcctctatctccctgaggatcctctgatttttcctctgctcaaactcagtggcaagccttctttgttccgcttcttcagttattttcagcagtcttagcctcttcgactcctcctcccgttccatttcaagaagctgtcgttcttgttcttctttccttttctcaataattgattttcgagcaagaagcctcttgtgttctttggccacaacctctgtcaaagagggaagtaaagctccaagttttgatgatctcctatcaggaggataaatcatctgtcttgctttatttaattgttcagcaaaattggccaagtgatcccttaagccatcagactcaagactctttttgcaaaaaatcacagcatttttcatgtggtcaactctcatcgatacaaacttctgcttaacagcatctaccgaaaccttttccacttgagagaaatcaaagaaggggatcatccccgataggtttcaatcttcatagattg

SEQ ID NO: 15652 - DNA, 544 bp, Glycine max
  Clone ID: jC-gmle01810087c06a1
ccgattccgattcgctactctttcttcttcttccttttttattgatcctctctgcgatcacgaattttcccattttctccgtttcctcggcgaccaaacggaggagaagaacgcagttctgaaaacgattggaaaatgctgggaactgcactgcaattcagcggcgttcgcggcgaggatcggttttacattccggtgaaggcgaggaagaaccagaatcagcggaaacagagtcacagagccaagaacaacgaacctgaaaacgcggatttagcttcgaagaacaaagtcgatgtctctgaaaatagcaataacaatagcaacatcaaaagcaagagcgatagtaatctcaaccaatctctgaaaccaactctttctccgtccgtagaggctgtcagtaatatcgataggttcttggagtttacaacaccgtcagttcctgctcagtatttctccaagacaacgatgagaggatggaagttttgcgatgtggagtatcagtcttactttacattgagtgatctgtgggagtcttttagggagt

SEQ ID NO: 15653 - DNA, 518 bp, Glycine max
  Clone ID: jC-gmle01810087c06d1
agcaatctctatgaattcattgcttcatattggcttcatctttttgtgctgcttaggcatatcacaagaatccacaattaggcagtcctcgcgccatcacaatctctacagatggatggacttttatcaagtttgcaccaagcaatgaacacagaaattaaggctcagttttagccaaaagcaggaaagacatgtcgtcttatgcagttcatctatggtatgtgccatgtgatttaaagaactgaaaatccgggtgatgaacctgaactagccttaaccagttatcggcagcctgcaagagggaactcacttgttgagattcactaactccttttttcatccaaatagacccctttaacttataggaagccattgcaaaagtaggcatagaaatctttggtacaacatccatctgactgggataaaccagtgttggagcatgagtacgaccacttcctgtcaagggtgtatggagtgtatggtacgttagaaagcacccatctaaatcttttaaaagt

SEQ ID NO: 15654 - DNA, 506 bp, Glycine max
  Clone ID: jC-gmle01810087c07a1
cagataacactcaacaataatcgaaatcgtgttttcctatgatacaagggagcgacgaggtgcacggaattggatccctgagcgcaacaataagaaaatccccaaaaggaaccctaggtggcggaaattcaagtagcatagttatagcaagagtaataatactaaaaaaagactcaataatcgtcatcactcaaacatcgatttagaaagaaagaaaagaaaagacaaaaaaaggagatagaaatagatccttcctagcacaagaaagaaaacaccaagtttatatccgagggattgattaaccgacttatctgcaagggtgaaatctcaatcgcgattcttcaagcgttcgagacgctggttcaagtggtcgatcctgacgacgaggttggagacggagtagaggagccagtagaagaggagtgcggcggcgatgaggagggcgttgcgttggctcttcatgatagatttctggtggcgaaagtgctcggaaggggtgcaggaat

SEQ ID NO: 15655 - DNA, 549 bp, Glycine max
  Clone ID: jC-gmle01810087c07d1
agaggccataatggttattctcctcaccatcccgggcctggaagctctccgaaagggtctgatcgcggtgacccggaaccttctgaagccgttcctctcggtggtgcctttctgcctgttccttttcatggacatatattggaagtacgaaaccaggcctagctgtgagggagattcctgcaccccttccgagcaccttcgccaccagaaatctatcatgaagagccaacgcaacgccctcctcatcgccgccgcactcctcttctactggctcctctactccgtcaccaacctcgtcgtcaggatcgaccacttgaaccagcgtctcgaacgcttgaagaatcgcgattgagatttcacccttgcagataagtcggttaatcaatccctcggatataaacttggtgttttctttcttgtgctaggaaagatctatttctatctcctttttttgtcttttcttttctttctttctaaaatcgatgttgagtgatgacgattattgagtccttttttagtattattactcttgctataactatgctactt

SEQ ID NO: 15656 - DNA, 406 bp, Glycine max
  Clone ID: jC-gmle01810087c08a1
gaggatacctgatgacactctgactgggaagggcgctatcggcgtgtatatgcttgaatgagccgacatgcctcgttgagacgtggataaactatcttcgatacatgcctgaactgggtggtgaatcactggcaggcatgagagcaaccaggagaactgccatcatgtattagccattgtaaatgaatgcgacagtgatggcagcagtggcttggagcatcatgggagcaagctataccgtgagaacagtgttggattagagccatgcctgtggcttgctgattagctaagcatgcatgaatggtgtaccctagaaggcgagagatcagtgtacctgagcattactcgcttactgtctgacccgagaatcacggagcacggtgatttccgcgtgcatcattatgga

SEQ ID NO: 15657 - DNA, 454 bp, Glycine max
  Clone ID: jC-gmle01810087c08d1
acatgcaacaatttaagcaaatcgataagaccagtctatcaaatgtgcatgagcactcgatcagtgagcaagaacgcactatgtcaagggtggcaagaaataatgtaactatatagtatagtatacggatcgataccttatatatcacagagcggtcattaaggggccttagctgatgatgcgggctagttccctttagacgaaggaacttatccatcattgtcttactgggcgagcttgaccctaggaattctgagggcagaggtagtattgagagtgatgcctagaaaagggaccgttctcacgggccagactgaagcaatgcttaaagaaacgctgtttacacaacatgctgaggctccacgaaatttcgcgagaacgagattgcactcgccttgaggggaatcaaacccctcagcgccactcatccgttgattctatgacatcagacgga

SEQ ID NO: 15658 - DNA, 490 bp, Glycine max
  Clone ID: jC-gmle01810087c09a1
cttttcttctatccaacctgaaaccctcactgctaccccaaaccaaatcaaaacccattcctcaaacgccttcaccatcatcagcaaaacccacttctcaaagtccttcattgttcttcttcacttcatctgctccactttccgcactccaaagttccactgcacaggttgctcaggggcacacaccaacaacaggtgccagagacgagcttcagcagcagaaggatgagttttacctcaatcttggccttgctgtcaggaccctccgtgaggacatgcccttcatcttcgtcaaagacctcaattatgacatttacagggatgatataacattcaaagaccctttgaatacatttactggtattgagaagtacaaattgatcttctgggcattgaggtttcatggtaaaattttgttccgtgagattgctctagatgtgtataggatatggcagcctttcgagaacgtgatattgatcaggtggaacct

SEQ ID NO: 15659 - DNA, 511 bp, Glycine max
  Clone ID: jC-gmle01810087c09d1
gcaagagaaacaaaataattcttaattataaaattttgattatagcatatagatctatctcatctgtgtaaactcaccagacataaaaaccttcatttcctccaacatcagaatgggaaacttgcactcttctgcatccctgcctatctatatacactctgtcctttgagaaaaaccattgtatgctattgaccaaatttcatcatatctaaccaatctattacaacctatagtatatatcatctagggaacaatttactaagtggtcactatgaacatgtagccatacaatcttgtggtagcaacctctcttcttgatccacagtgtccttaacagcatgataaaactctaaccatgaagaagagttggaatccaaaggaccccatgaaaatgttagatttggacttgcagggcaagcagtaaccaaatccaaaactgaaactggtttgagggtctgtggaaagttgaatgctaaattatctacttgggttcataaattttcccatttcg

SEQ ID NO: 15660 - DNA, 498 bp, Glycine max
  Clone ID: jC-gmle01810087c10a1
gtttcttacaaggctctactctactgcttcaccttctgctctagaaaattcagtggtgatacatggcttcggctactctctctgtagccaaaccagcccttcaggcaaatgggaaaggcttctctgaattctctggcctccgcagctcatcaggcttccttcccttttctagaaaatcttcagaggatttccattctgtcattgccttccagacctatgcagttggaagcagtggaggatacaagaagggtgtgacagaagcaaaactgaaggttgccataaacggatttggaaggattggaaggaacttcttgaggtgctggcacggtcgcaaagactcccctcttgatgtcattgccatcaacgacaccggtggcgtgaaacaagcctctcaccttctcaagtacgattcgatcctcggaaccttcgatgctgatgtcaagcctgttggcagcgacatcatctctgtcgatggaaaggaaatcaaagttgtctctg

SEQ ID NO: 15661 - DNA, 484 bp, Glycine max
  unsure at all n locations
  Clone ID: jC-gmle01810087c10d1
caaggtaagaattttattgcacaatgagaaggcagagaaaattgatggttctgtttctcagtacaagttttagaatgaaaaatgaagcaccaagtgtttgtagtggtagtagtagtagtagtaagcatacaaaactacaatggcatggtacatacatataataattgaattaccaattcagaatttgatggctctcacttccacttgttggcaacaatgtcagccaaatccacaaccctttgggagtagccccactcattgtcataccaagcaatcaccttaaccatgtcatctcccatgaccatggtcaacgatgagtcaacggttgaggacacatcagtgcacctgaagtcaacagacacaagtggctcatcacacacagagaggattccctggagctcattgnctgcactctctctgaatgctgcattcacttcttctgcaaaggtcttctttgagacctgaacaacgaggtccaccactg

SEQ ID NO: 15662 - DNA, 576 bp, Glycine max
  Clone ID: jC-gmle01810087c11a1
gaagactctccgcaggcttgctcagaaccgtgaagctgccagaaaaagccgcttgcgaaagaaagcgtatgtccaacagttggaaagtagtcgtttgaagctgacccaactagagcaagagcttcagcgagctaggcagcatgggattttcatatctagctcgggtgatcaagcacatacattgagtggaaatggggcaatgcaatttgatgcagaatatgcaaggtggctggaagagcagaatcgacaaattaatgagctgaaagctgctgtaaactctcatgcaagtgacactgaacttcgcatgatcgctgatggtatattggcacattatgatgagatttttaggctgaaaggtgttgcagctaaggctgatgttttccatttgttgtctggtatgtggaaaacacctgctgagaggtgttttttgtggcttggtggttttcggtcatctgaactcctcaagctgctggttagtcaattggagcctctcacagagcagcagctgatgggtattaccaacttgcagcaatccttccaacaagcagaagatgcattatctcagggcatggaagc

SEQ ID NO: 15663 - DNA, 392 bp, Glycine max
  Clone ID: jC-gmle01810087c11d1
gggggggaaaaaaaaaagcccttaaaaaattacagggggccattttttcaggaaaatttaacctttttggcaccaattttgtttttaaaccggcccaaggaaccccttacctcgggggtcccaaggggcccccaaaacccccccggaaaatttggaaaggggtttaaggcccaatttttggagggggggggccccagaaaaataattggccacacttttaaccgggcccctaaatttttggggggggccaccccgggggaactgggggccccccaaccccaaaaggagccttgtttaaaagggggggcccccccctttggggaagttttcaatttaccgggcctttggtaaaaaatttggtgggaaaaaatggccccccgtgaaaagaaccc

SEQ ID NO: 15664 - DNA, 494 bp, Glycine max
  Clone ID: jC-gmle01810087c12a1
ctcgactatactacggagatggaaacgttgaggccatgttcgccacgcttgatcctttacacgatatgctggagcgcggtccggaaactctgcgagaaatagctttccaacagtcctttggcagagatctgcaagacgcccgcgagtcatgtcgacgcttccagcagtatggcgaactgaacgacctgaatcaagcttgggatctgtactatcagatattcaagcggatagcgcggatattaccgttcttcttcatcctcgagctgcagcaagtttcgccgaagctgcttgctgcaagagacctagaactggctgtcccaggcacctatcactctggcaagcccatcatccgaatcagcaagtttgcagagtctctagacgtgctcacatcgaaacaacggccgtggaagctcaaagtagcaggcagcgacggcaaagaccatgccttcttgctcaaaggacacgaagatctacgacaagatgaaagagtcatg

SEQ ID NO: 15665 - DNA, 437 bp, Glycine max
  Clone ID: jC-gmle01810087c12d1
gggaaagaaggacccaaagctttttcgggatttatgacttatacactttgggttttaaaaacaagtttgggggccgcatgatgtaaccaccgacaatttataattggaaattggaagtttttggacatttcttaagcaagccccattttgggtttgacacgaccaaatttgttaccagaaaggccaccattcaataaaagtttgacacaaatttttcaccggcgttgactgaaaaatgagcttttgcacttggtcgctgacatccaaaacttgtgtaggcttgaaatcccttcctggcaatttttggtggactcgatctacgacttggagaaccccttgattgagggccttattcgtttttggatccaaaggattacttttattcacgcccacttgttttgatgtaccaagcttattgggccccggtccaccttttt

SEQ ID NO: 15666 - DNA, 530 bp, Glycine max
  Clone ID: jC-gmle01810087d01a1
cctagaagtattttgtacaaaagtgaaaccctcaaggaacaatttccgagcttttgttcaagaggaggtaccgaggccacctcctccggtcatttcccgggaacctgaaccagatctgggtggtggagatcctcgttctaaagttgaagatgatctagatattggtgaagacctgttaaagatatcacagcgtcggaatattgaagaaattgacgaggacatccggagcagagggagcattggacctccccataatacatctgaagttgattcagttctgggttcagatcgccgggccccaacaattcgatccgaagcaaggcactcgagtgagggacgaagtgaaagctgggaaattgcgtccgaggtcctttccaattcaaatgtaactgaaagcagaagctatgctgcatcaaaggaggtgcgccaaaaacttgggggttctttttgagatgtggggttacttagatattaaagatggaaaaggacatggtgtctgatcagattataggattgggaattgaattgat

SEQ ID NO: 15667 - DNA, 560 bp, Glycine max
  unsure at all n locations
  Clone ID: jC-gmle01810087d01d1
gaaaaaagacactattgctttgtctctcgaaaattacacacatttctattctttccaaaagagctaagcttaccacaaaaaagatcaaataagtttttgtacttaatgcctcaatcaattcaattcccaatcctataatctgatcaaacaccatttccttttccatctttaatatctaagtaaccccacatctcaaaaagaacccccaagtttttggcgcacctcctttgatgcagcatagcttctgctttcagttacatttgaattggaaaggacctcggacgcaatttcccagctttcacttcgtccctcactcgagtgccttgcttcggatcgaattgttggggcccggcgatctgaacccaaaactgaatcaacttcagatgtattatggggaggtccaatgctccctctgctccggatgtcctcgtcaatttcttcaatattccgacgctgtgatatctntaacaggtcttcaccaatatctagatcatcttcaactttagaacgaggatcttcaccacccagatctggttcaggttcccnggaaatgaccggag

SEQ ID NO: 15668 - DNA, 531 bp, Glycine max
  Clone ID: jC-gmle01810087d02a1
tgaattttgattctagcaagcagagcttttgtcaattttctattgaccttctcggtggaggaattttagtggacaaaactggagattggatcacacttatacaaaattctccaattagtaacttgttgagagttgctgcttggaagaaaggctgtttaatggttaaaattgtgatgtctgggaatgcagcagtcaaaaggagtgattgggcctcattggtacaagtgtttttaacaaacagcaacagtacagagcatttcgatgcatgtaagtggacaaaatcggaaccacattcctgggaattgatcttcccaatagaggtatgtggtcctaataatggttttgaaatgtggagttctgagtgggcaaatcaaacttcatggcacttgagtttccttattgacaatcccaaacagtctacagtttttgatattctcttgggaatttctcaagattttgaaattgctggtaatactcttatgccagctttctctgttccacaggctactgccagatcttctgaaaatgcgg

SEQ ID NO: 15669 - DNA, 529 bp, Glycine max
  Clone ID: jC-gmle01810087d02d1
aaaataacacacacttcacacatcattacgacaattaaaagaggtgtggaaattttcaaatagacagagcatactcaaagagggtcatgtctaatttcctttattgaattaaacaaacgaacaaacgaaagaaaacacaaattccagatcatgcagaggattccgcattttcagaagatctggcagtagcctgtggaacagaaaaagctggcataagagtattaccagcaatttcaaaatcttgagaaattcccaagagaatatcaaaaactgtagactgtttgggattgtcaataaggaaactcaagtgccatgaagtttgatttgcccactcagaactccacatttcaaaaccattattaggaccacatacctctattgggaagatcaattcccaggaatgtggttccgattttgtccacttacatgcatcgaaatgctctgtactgttgctgtttgttaaaaacacttgtaccaatgaggcccaatcactccttttgactgctgcattcccagacatcacaatttt

SEQ ID NO: 15670 - DNA, 536 bp, Glycine max
  Clone ID: jC-gmle01810087d03a1
tggagccattatcaaaggagtttcgaatcactcacatggaaatgataaaaggaatcaaggggcatggctattatgatgaacttgttgtccccataattgagaatacggcctacgagtatcagctcacggaatcttttgctaaagctattgaagactacccaaaagcaacagcagtgcttgttcgcaaccatggggtatttgtctggggagactcatggatcagtgctaaaacacagtctgagtgttaccattacctctttgatgctgctctcaaacttcatcaaatgggattggattggtcaactccaaatcacggtccaatacaaagtgcaagacggggtctaagtattgctggggagtcaaatgtgtcagttaaagcaaggaaatctaatggtgacagtgatccattgccacgttgcgttgatcttgacattgaaggaactactactcccatatcatttgtttccgaggttctcttcccatatgcccgtgataatgttgggaggcatctatctctaacatatgatacccccgag

SEQ ID NO: 15671 - DNA, 555 bp, Glycine max
  Clone ID: jC-gmle01810087d03d1
aactcaacgcaaaatacattacattacattattttaattttttttaattacattattttaattaagaagtgaacgttacactattcttagtaatgataacacatttaatgtcattccagaagactgcaattggtcttagatctccgagaaggatttgattgtcttgaagccatgattgtcagggaggggtccatttccaggtcgaatagaaattatcacctccaaacctgcagccgttgcagctgtggcttcttgatatacatcagtgacaaataaaatatctgatggtttttcaacaccgagtgactcagaaatttcaacataactgcgtgtctctcttttgttccccactgtagtgtcaaaaaacccagataaatattttcttaggtccccatggttggtttttccaaatattagcctttgagccaatctgctaccactagaatatatgtatacctttatacccaaggcgtgccacttttctagagcttctggtacatcatcataaactattcccttcaattcattattctcatagccaggtttgcatatatg

SEQ ID NO: 15672 - DNA, 597 bp, Glycine max
  unsure at all n locations
  Clone ID: jC-gmle01810087d04a1
ctgaaaactggcattgttgggagaacaggaagtggtaaatccactctcatacaaacacttttccgaattgttcagcctacttccggccaaattatgattgacagcatcaacatctcttcaattggacttcatgatttgaggtctagactaagcattattcctcaggatccaacaatgtttgaagggactgtgagaaataatctggaccccctggaagaatacagtgatgaacaaatttgggaggccttggataagtgtcaacttggagatgaagttagaaagaaagaaggaaagctcgactccaaagttaccgagaatggtgagaattggagtatgggtcagaggcagttggtctgccttggcagggtgctgcttaagaaaagcacggttttggtgcttgatgaagccactgcatcagttgatacagctacggataatttgattcagcaaactcttaggcaacaattctctggctctacagtaattactattgcacatcgaataacttctgttctacacagtgatatggttctgcttctcagtcaaggactcatttgngagtatgcccaccccacaaggatgatagagaataagtca

SEQ ID NO: 15673 - DNA, 372 bp, Glycine max
  Clone ID: jC-gmle01810087d04d1
ataagttctcacaatgggagaacttttgaaacatattaattcgagttgactaacttggacattatcaaccttgggaacaatatcttttttttaacagggcgcattgccgttggcctacacattcttggaatgcatccaaataaatttgagtttatatttcagtttgtataatcttcccttttgaaaagttcttccctcacccttgtaaagagacttgaggattccacagccgattaaaagccttattttataaaatacctttttctatatgggaaccccgaaaaaccatggtaacccccaaaatttcgacattgtcaaaaaacttggggtactgtgtgtttcaaacaagggtcatcaaatttctcaaaactg

SEQ ID NO: 15674 - DNA, 517 bp, Glycine max
  Clone ID: jC-gmle01810087d05a1
cggctcgagattaaatgtacagtctctttcttcatagcatttggaaatttggctgatgacaccatcaattttgaggcttttccccacaagctggtgcagtttggagagattcaggaaaaagttgtattgaaattttcacaagaggaatttcttacagcttggtcaactcaggtgcgtcctgcaacaactctgttggctgatgggtgtccatatttgtatgctatggtgcatgatagttcagtgtctacaataccaggtgattttgtcattggtgttaagttgacaaccataaacaatatgtgtgcatatgggctcaatcctggtatttcaggttctcgtcttttgggcaccattcctcagtctatttcacagcaaactgtttggaatcaaatggcaacagtgagaacaccattgaattttgattctagcaagcagagcttttgtcaattttctattgaccttctcggtggaagaaatttagtggacaaaactggagatgggatcacacttatacaaa

SEQ ID NO: 15675 - DNA, 337 bp, Glycine max
  Clone ID: jC-gmle01810087d05d1
gtaggtagctcagtacagtgctactattgtttttcacaagtgcttgaaaattcatgatataattttcaacaacaaaagaataagcttacaaattcgaacatgggatgggacaccggtcgtcatgtggaatattacggttcaaaaatgcgcataacacattctaatttaaattttctgatgcttctaataaccaaggttgtttgataaagttacaaatccatctctttatataaaattggggtgcctaccaaaactttatggggtggtgtggtgtgggtggtagatagtgatgtatatacttttgaacgtgctttataaatttcctttaatatgcttc

SEQ ID NO: 15676 - DNA, 559 bp, Glycine max
  unsure at all n locations
  Clone ID: jC-gmle01810087d06a1
cgacactagatgaatataggaagcacattgaaaaggatccagctctggagaggcgattccagccagttaaagtgccagagccaactgtcgatgaaaccatacaaatactgaaaggacttagagaacgctatgaaattcaccacaagctccgttatacagatgatgctctcgtagccgctgctcagctgtcacaccaatatattagtgatcgatttttgcccgacaaagctatagatttaattgatgaagcaggttctcgagtccggcttcaacatgcccagttacctgaagaagcaagagagcttgacaaggaggtcaggcagattgtgaaggagaaagaagaatttgttcgcaatcaagactttgaaaaggctggagagctaagagacagagaaatggatcttaaggcccagatatctgcacttatagaaaaaggcaaggagatgagtaaggcagaaagcgaggcaagagatgaaggtcccatggtgactgaagttgacatacaacatattgtctactnctggactggtattcctgtggagaaagtctcaactgatga

SEQ ID NO: 15677 - DNA, 505 bp, Glycine max
  Clone ID: jC-gmle01810087d06d1
acaaaacaacttgctttcaataaattaaaattgttcacaatgcaacatatcaagggtaggaccaacagaaataatgtcattttttcattccacccaaaccttgctgtgttcattatgttatgggcaaacgtggctgaggccatcagcattcaattaaaagcttgatgtctattggcaacttaaacaaactattgctatgttttcttttaacaaataaaagagagaaaaaaatacaactcaactaactaagacaaccacgttacacaggaagagcttcttctaatgaatctggggcaccactactaccgttgagcacaatcacattaccatcggagtcagcatcaactataactgagtcaccctctttaatctctctagcaagcatcttctcagccatgctgtcctccaaaagtcgcattatagctcttcttagaggcctagccccataactcggattatatccttcgtcaaccaccctctccctaaatctttctggtactgagag

SEQ ID NO: 15678 - DNA, 215 bp, Glycine max
  Clone ID: jC-gmle01810087d08a1
ctcgagccgctcgagccgattcggctcgaggttattagttgtttgtattcacgcagaataatgataattttcaggacgaacgtaggggtagagttaaatccaaactaacacaaggagctcttgacactacattcgtcctgaaaattatcattattctgcgtgttattagttgtttgtattcacggataaagttggaataccagatgagttatacc

SEQ ID NO: 15679 - DNA, 215 bp, Glycine max
  Clone ID: jC-gmle01810087d08d1
ggtataactcatctggtattccaactttatccgtgaatacaaacaactaataacacgcagaataatgataattttcaggacgaatgtagtgtcaagagctccttgtgttagtttggatttaactctacccctacgttcgtcctgaaaattatcattattctgcgtgaatacaaacaactaataacctcgagccgaatcggctcgagcggctcgag

SEQ ID NO: 15680 - DNA, 502 bp, Glycine max
  Clone ID: jC-gmle01810087d09a1
ggctcgagtttgaccccagcaaacagcaagagagaaatggaagcagcatcggccacaattctgctactgatactaattcttgctctgatatgctcatggaaggttctgaactggctatggctgagaccaaagagactagaaaaactgctaagagagcaaggttttcgtggcaatccatacacccttttctttggagactccaaggagtttctcaagatgagaaaggaagccgtatccaaacccatgaccctctctgatgacatagtgccacgtgtctctgcctatgtccaacatagtgttaacaagcatggtaagaattcttttatctggtttggaccaatgccaaaggtgaccatcttagatccggagcaaatcaaagatgtatttaacaagaactatgacttcccaaagcctaatttgaatccacttgtcaagttactagcaactggccttgcaagctatgaaggagaaaagtggagcaagcacagaagaataatcaacc

SEQ ID NO: 15681 - DNA, 105 bp, Glycine max
  Clone ID: jC-gmle01810087d09d1
aataactatgtgacaaaaaaaacaaaaaaccaaacacacaaaccaacaaaaaaaaaaaaaaacaaacaaagggaaaaaaaaacaaaggaacccgaaaaagagaaa

SEQ ID NO: 15682 - DNA, 529 bp, Glycine max
  unsure at all n locations
  Clone ID: jC-gmle01810087d10a1
aaaagccttagccttccctacaactccaaacacaaagacatcatcatccatggctgcctccgtctccactgtcggagctgtcaacagagctcttttgaacctgaatggttctggagctggagcttcagctcccagttcagccttctttgggaccagcttgaagaaggttattgcctcaagggtccccaacagcaaggtttccggtggaagcttcaagattgttgctgtagaagagaagaaagagattgaagagacccagcagaccgacaaggacagatggaagggtcttgcctatgatatctcagacgaccaacaagacatcacaagaggaaagggtttggttgactcccttttccaagctccacaggatgctggaactcactatgcagtcatgagctcctacgagtacctcagcactggacttcgccagtacttggacaacaaaatggatggattctacattgctccagcttttatggacaagcttgntgttcacatctccaagaacttcatgaccctgcccaacatc

SEQ ID NO: 15683 - DNA, 540 bp, Glycine max
  Clone ID: jC-gmle01810087d10d1
aaaggaaaaggcaccaaattcaatttaagtggacactgtaactcaaaattatagaggaagacggtccaatatgaaaaatatagtaagatcatctcaaacttagcatcttctctttgcacctaagacattgagaatgctaagaatgttacacgcaagttccatcacaacttctagcacttggattagtacaacaaccttcacgaacagaaatatttacttgccaagtttgctttgcctccaattcaagactggaagaaagttcccctctgaatagcatcctcgttagcatttccaagagcagcctcgttcaagtacttgtcagccaattggactctcttgacattctcttgttcttggacaagcatattaccatacagcaagagcttctccagagtcatcttgggctgctcaaaggttggaggtccatcttttgagttcacaagcttcttcccaacactgtcaacaccaacaccagaaatccacttcctcacttcatcatcatatactctggccctcagtgcaccaaagaaatcaatggat

SEQ ID NO: 15684 - DNA, 496 bp, Glycine max
  Clone ID: jC-gmle01810087d11a1
ccctaattaactggcgggctgtgtcgctgtggaggtcgagcttgtgaaacaccagttccggttagtccagctgtcttctccggccgtggttagcttgatgcttggctacgtttaggaaactgtatttggaaaaaaggagatctaactgcagcaaagaactgcctcagtcttgcattagacaagaatcatttccagaatatgtgacatagtgctgccacaggcattgacctgcacagatgcatactttggtcagcaaggactaaccgtttgttgataaattcaagaaaatgccacttcctttaggacatacaaactaaagtgaactaagcacattttgtctggggaaaacttaagcaaggaactttatgttcgaaggttgaccctgctaccctggatttgaatatgctggtggaggaacactggagtgttgtctctgatgggaccacttcgaatcatatctaaagtatcttgatgaattatgtagcgcctgttatgc

SEQ ID NO: 15685 - DNA, 582 bp, Glycine max
  Clone ID: jC-gmle01810087d11d1
aggtgttgaactcaatgaattgtataattaattagcctttcatccaactccaatggatgaaaatctcaatatttgatttatggatcctattcagacttgagttttggataagacctatttagtattatttaatacacatcattattcattatgaatctttttctttagtcttttttttccttgactaacgattggaaaatctatctctgcaatgacagagaacctgtctcagcacctccatgagaaaccacataacaataaacaactccaagcataacaggcgctacataattcatcaagatactttagatatgattcgaagtggtcccaacagagacaacactccagtgttcctccaccagcatattcaaatccagggtagcagggtcaacattcgaacatgaagttccttgcttaagttttccccagacaaaatgtgcttagttcactttaatttgtatgtcctaaaggaagtggcattttcttgaatttatcaacaagcgggtagtccttgctgaccaaagtatgcatctgtgcaggtcaatgcctgtggcagcactatgtcacatattctggaaatga

SEQ ID NO: 15686 - DNA, 573 bp, Glycine max
  Clone ID: jC-gmle01810087e01a1
tcatggggttcttctagttggttatggtgaaggtgcatatgctcccattcgttttaagaacaaaccttactggatcattaagaattcatggggcgagagctggggagagaatggatattacaagatctgcagaggtcgaaatgtgtgtggagtagattccatggtctcaactgtagctgctatatatccatccagccattaaatacaaagatatgcctgattgtggttgtgatgtgatactggactaaggggagtttgtataaatatttatgttgcgaactttatcatttggtactggtaaaattatctccgtataggatcaggaaactgctaagaccatgttgtttatgtagtatgtaatttctgtatgtatgcttgacatatacaagtgggaaatccaaggaaatgtgtggtcctaaaaatggtgcacgataagcaactctctatggagattggcggtgtgggctgtttcaaactgcaacaggagaatacttgccactgattatgtctcagttattgcataattaaactaatatacgtgccactgtcaatgttgcttcttatggatgtgta

SEQ ID NO: 15687 - DNA, 569 bp, Glycine max
  unsure at all n locations
  Clone ID: jC-gmle01810087e01d1
agggatcccgcaattttggcattttgaagtcctaagtccatagaaatttttatacatgcacaaactcaaaggtaaacgaatcaaaggtacagaagcaacttaaacattttggtatccttttgggtatggcactaccacatccataagaaccaacattgacagtggcacgtatattagtttaattatgcaataactgagacataatcagtggcaagtattcccctgttgcagtttgaaacaaccccaccccgccaatctccatagagagttgcttatcttgcaccatttttaggaccacacatttccttggatttcccacttgtatatgtcaagcatacatacagaaattacatactacataaacaacatggtcttagcagtttcctgatcctatacggagataattttaccagtaccaaatgataaagttcacaacataaatatttatacaaactccccttagtccagtatcacatcacaaccacaatcaggcatatctttgtatntaatggctggatggatatatagcagctacagttgagaccatggaatctactccacacacattt

SEQ ID NO: 15688 - DNA, 593 bp, Glycine max
  Clone ID: jC-gmle01810087e02a1
ggtatgatgaaattgtgaaggaagtctcttcctacttgaagaaagtaggatacaaccctgacaagattccttttgttcctatctctggttttgagggagacaacatgattgagaggtccacaaaccttgactggtacaagggtccaactctgcttgatgcacttgaccagattagtgagcccaagaggccctctgacaagcccctcaggcttccccttcaggatgtgtacaagattggaggtattggaactgtgccagtgggacgtgttgagaccggtgtcttgaagcctggaatggtggtgacttttgcaccaactggactgacaactgaagtcaagtctgtggagatgcaccatgaatctcttacagaggcacatcctggtgacaatgtgggattcaatgttaagaatgttgctgttaaggatttgaagcgtggttatgttgcctcaaactcaaaggatgaccctgcaaaggaggctgctaacttcacagcccatgtcatcatcatgaaccaccctggtcagaatggaaatggctatgcccctgtcctcgactggcacacttctcacattgctgtcagtttgctgaactca

SEQ ID NO: 15689 - DNA, 440 bp, Glycine max
  Clone ID: jC-gmle01810087e02d1
ggaaccctacaaaaagaaaggggacatttaaaaaaccaaagcaacccaacgcaaaaaaggcctgaaactcgctgggcttaaaaaaaatggaatcggggggtccgacaaacccaacccattaaaaccccgataaaaaaaagcaattttgcccccggcgatcaaaaacccagttttgggaacaacagttgcaaaaagaggggggagacttaaaactttggccgaaaaacaaggtacctaaaaaagaagaccccagagtcccgaaaagaaacccacatttattggaaccaacatccccgggggaacccgcccggacgagaaacttttttttgggggcaaccttggggaccttgggtccggggggatcctttttttaaacggtcttgaggacccccacaggaaccgtttgacccctgtgcctaacaggaaacctaccaaggggg

SEQ ID NO: 15690 - DNA, 542 bp, Glycine max
  Clone ID: jC-gmle01810087e03a1
caaaatcaccttagcaaatgcactgaagctcggaaagtcaaagattggaaagttatattaaaggaatcacaggctgcaatatccttgggtgctgattcagctccactggtctattgtttacatactgaagccttgctgaagctcctaagacatcaagaggcacacgctacctacgagaaaatgccaaaatttgaccttgattattctaacaaattatttggcccggttcgtagtgcttacctattgatgataggcacacacatttacttggcaaccggcaggtttgaggatgcagtgatagcatctcagcaagcatctaagttagatccaagtagctttgaggtgaatgcagtggtaaggagggccagagcagtggcatcagccagaatgagtggtaacttactcttcaaggcatcaaaattcacggaagcatatgctgtatacaatgaaggactagagcatgatccatacaactcagttctgctatgcaatagagcagcatgtcgttctaagctaggtcaattcgagacagcaattgaaga

SEQ ID NO: 15691 - DNA, 481 bp, Glycine max
  Clone ID: jC-gmle01810087e03d1
gaaaaattaaagactgctcaaacatccaaagtattaaaaaaatcaattactaacacaaagaatcacttttctatacatttttctacaggttttaacaatggtatgcttcgtctttggtttcctctgccttgaaattcaggtgactaaatttatgaaggaaatataatcagcttgatttatttggggcatcttcatttccattctgaaaaatctaatcttcatcatttcttgcgccatatgttgggattccaagaagtgcgatcaccatcaggtgctatataatttaactaatttttccaacaagtcgtggttgctgcctggaatttctttaacccttgatccattcttggatattttaaaagctgggatgcagttcacaccttctgattttgccaagtaagggtggtcttcaatctcaaccttaagaaaattcactgatggaaatctcttgcaggtttgctccaacaccaataacacttgt

SEQ ID NO: 15692 - DNA, 560 bp, Glycine max
  unsure at all n locations
  Clone ID: jC-gmle01810087e04a1
gctatagtgccacccatctccagcaaaccgcatgcaatttcaggttcaagcttgccctatcaaactgtatcccagttttctcctgcagttgtgggatcatcaacttctatccatacagaaacatcagcaccttctctcctaaccccaggtcaattattgcagcctggaccaagtatagtttcttcagctcagccttcacaagcacctcataaggatgttgaagtggttcaggtatcgtcaacatcatctcctgagccatctgtgccagtttctgctgaaactcaaccaccaatactgccattgccagtaacttcacggcccagttacagacccggtgtagctcctatccaaattcatcatggctataattatagaggacgtggaagaggaaggggaactgggggtttgcacccagtcacaaaattcactgaggattttgatttcacagcaatgaatgagaagttcaaaaaggatgaagtatggngtcatcttggtaaagtaagtctcattcaaagaaaaagattgggaagacaatgcctttgatgaagataccaagatga

SEQ ID NO: 15693 - DNA, 532 bp, Glycine max
  unsure at all n locations
  Clone ID: jC-gmle01810087e04d1
ataattggaggaatatcaatcatttcccaccccagcacaaatgaataacagaaatgaatgagcaactagtagctaacatgcataaaaaaaaatccggcaataaattagtctaaacttctgcctggtgatatatgctgatataaaatggtgtacaaacatctttacaccaaaccaagtgactttggtagaggagtaacaagagggtagcataacaggaaaaaagtgtcctacttattctgcgaagcaaaacatataacaggcaacacaacaatgaagcattatctctaacatagttacgatgcttttaggggaggctacctaggctcttgttctccaccatgtccatgactaaacattaactgccacctacaaagtgcgactgggcatgccacgtcccctccctcgtccattatagccgtaccctnctnctcttccataataaccacctcgggtacgtccaccacggccagggccacggcccccacgaccaccacggtgcctcacaaaatcaccaaacgtctcagtatcaatc

SEQ ID NO: 15694 - DNA, 520 bp, Glycine max
  Clone ID: jC-gmle01810087e05a1
tattgccaagcgcgtgcaaatttatgtgtcatgatgctgtcgtaccttcattctcgtgggatatcaggaatttaaccggctgtacttgatatcgctcggcaagattttgcactggcaaatctgatttctcacgcgaatcttgcagtttgaggttcttgagtggttgactgaatatcgtgcaatcacatctaagccatgggacgaataagcatgaatgagcaaatcaagtgacgtcttcaagcggacaattaatgacgttctggtcgatagatgggtacattgtgagcaggacgttgacatctaattgattcagtattaggagatagcgatttgagcacctaacttggcttgccgaaaagtcatcatgtgctccttcagatgtgcttggacaccgcagtgagtgcgatcgaagcagcacgcatgtccaatcgtcgaaaactgcagtgctacaagcttttggtccaatcacgtcaagtttacgatccacaacagcaaaatcattcgttctcgacagcgcacg

SEQ ID NO: 15695 - DNA, 336 bp, Glycine max
  Clone ID: jC-gmle01810087e05d1
gcgaggtggaaaggagtatgaaccgatatgattgttccgtctaatcaacctggatgttctagttcttgcttgcttcctctccctcgtcctgaagtcccttgaacagcgtcgtcttgtcgttgcgcagatggttcagttcatcaatgatagacgtcagtaattggttcttggcatccatctttagccgtccattattcatcatcgacatcttcataatctctagtgcctccttgtccggatggtcagccgggataaccacatccatctccggtagtttaatgtcatcaatgtggcccgtgtgacccatacgagcaaaagcttccttcaaaatcttat

SEQ ID NO: 15696 - DNA, 393 bp, Glycine max
  Clone ID: jC-gmle01810087e06a1
ctttttcccttgaaagctcaaaattgttcatgaaagcttcgtttccgattaacaattctttgaataatagagactttactttctgaggttttaacccctttaaggctttccctaacttgaggctgtgctcatttgctgagagttttgctgcaaggacttgacacaaattgtgtaaatgtctgtggcttttaccaacctctcttggtggttgtggagtggaaagcatcaagagccaagaatcccaaatgggccttctataaattcttcggccgattcaaatttgtgggaatcggatgttttgaggtttcctttggttcaggcgaatgtggggtcctcatctagaaaggtgaagcgcaaatggcatagtaggggggagaggaaggtggataggga

SEQ ID NO: 15697 - DNA, 526 bp, Glycine max
  Clone ID: jC-gmle01810087e06d1
ccaaataaacgcttacaagaaactccaataaccttgaatccccaaagggaaatgctattatcttttagagaaacagagaaaagactagaggcttttgattattaacgggcctatacaaaacagtgctaatttaactatacatccaagcaaactacaaaaaacacacatatatacacataagtacacccatgttatacaaaatttatatacagttatgtacaaatttgagtacatgatcaagcattcaaacaattaccatatttacatgaacgaattgcaagttccaaaagtcacacttcaatacagctctcaaattcagtcacgatgtttggactctcgaatcaaaggaagaagagaggacaacagcatttgcacatcattctcagtgccaaagcatcacaactgctttcatacttggcccatatctgctcctcatagatttgaattaaccaagactcgaccttaaccaatcatattctgacatcacatcaatgcctctttcttttttttacaatatttacattat

SEQ ID NO: 15698 - DNA, 544 bp, Glycine max
  unsure at all n locations
  Clone ID: jC-gmle01810087e07a1
catgaaagacgcaggtgccctgggaggcaagacagcacgagcctgcgatagctgcgtaagcagaagggcaaggtggttctgtgcagcagatgatgctttcctctgccatgcttgcgacactttggttcattccgcgaaccagttagcaagcagacacgaaagggttcggcttcaaactgcatcctctaaggcaaccacaaccactacgcacgcatggcacagtggattcacacgcaaggcaagaaccccgcgtcacaacaacagcaagcactttgcgctgcaacagcgtctcaaacacgaagttctcttcaacaacaccagtgttcttcccctcgtgccggagctcggaggggaagaacaagaaccggtggttgtggacaacgatgaaacggaggaacagatgctgtgtcgcgtgcccgtgttcgacccttttgatgtgagaaccgatgacttggatagcttttctgacatggatttttctgaatttgctgctgatgttgaaggccggcttgacanagaagacgatgaaataagtgcgtatgtg

SEQ ID NO: 15699 - DNA, 559 bp, Glycine max
  unsure at all n locations
  Clone ID: jC-gmle01810087e07d1
aacagcatcagcattgaacaattgaatttctaatgagaaacaatgaaaaggcttccaaaattggattacaaaaggcttaaacctgccgagaaagatgatcattaattagtactaattactaaacctgctagagatatatatagacagaaatatcccaagcaacaattctagtaaaattaacctgacccagtaatattatttactagtattaatataatgcaggctatatatacatacatatagccaaaccaagtattaacccaaatttgtagaaaaagcaaagatggatccgttaactgatgattgatatcagtggtaagcaggaaaagcattggctccaacaaagcatgtcctcttcacaaaacgacctttcattctaggccttttctctgcgttcaacttccttacttcatatcttatcttctttgcaaacaaacgagtccttctcttctctctatacctcgacactcttgcttctcttccaccatctaggtgtccccttaagcttcttccttctncatctacaccactcanacccaaggagaagtcataatcagag

SEQ ID NO: 15700 - DNA, 586 bp, Glycine max
  unsure at all n locations
  Clone ID: jC-gmle01810087e08a1
ggacaatcaaggtatcagctgttactgatcaatctggaatgcaagaatttggaggaaatactggtgattttgatgatgatgaaggaggtggcatgtccttgaatgcatgttctcgagcaatgctcatgcagaagttggatcgtagtggtactgcatcaagcatggttggttccctcggtaattctgttgtcaacaacacaggtcttaatctaccagcgacaggaaacatactcgcagctgcgcctgttggtgaattggcaggtggaggtctccaaatacccacggctacaattccttctattgatacaatcggtgttgcaagtgaatgcttaatgttaaagaatatgtttgatcccaaagatgagattgaaccagattttgatttggatattaaagaagatgttgaagcagaatgctctaagcttggaacgttaaaacacatatatgttgacaagaagagtgctggttttgtctacttacgatttgaagatacccaatctgcaataagtgcacagcaggcctcgcacggaagatggtttgctgggaaatgatcactgcangcttcatggtgcctcaatcatatgag

SEQ ID NO: 15701 - DNA, 612 bp, Glycine max
  unsure at all n locations
  Clone ID: jC-gmle01810087e08d1
cgactcacaaagaaagatggtcccatcattgatcatacatcaaaactttgtgattgccatcagccaaagtttgaattacatcgatgtttctaggcatcacaaaacccttgttccaatcaataacactgccaaaccacaacagtaataccataataggacgcttaaatcaaaccaacacccccgaaaattttatgaaagtagtaactgcagcttttacaaataagcaccttttaacttcccaagacaaatgtgcatagctacatctatctcaaaagaagccgttatataattctaaggatgactatttctgccacgagattcctgatttagcataaaccggggatttatctgctgtctgggaatttatcctcatatgattgaggcaccatgaagcttgcagtgatcatcttcccagcaaaccatcttccgtgcaaggcctgctgtgcacttattgcagattgggtatcttcaaatcgtaagtagacaaaaccagcactctttttgtcaacatatatgtgtcntaacgttccaagcttagagcattctgcttcaaacatctctttaatatccaaatcaaaatctggttcaatctcatctttggggatcaacata

SEQ ID NO: 15702 - DNA, 555 bp, Glycine max
  Clone ID: jC-gmle01810087e09a1
gcaagatgcattaaatgatgcattaaaagaagaaattcagcatttgaaagcactgactggacaagttatgccaaatggaggaccggtaaattttgcttcatttggtggggggcaacaattctatcccaacaatcaggctatgcacactcttttagctgcacaaaagtttcaacaactccaaattcattcccaaaagcagcatcaacttcagcagcaacagcaatttcagcaacaacagcaatttcagcagctgcaacagctgcaactgcagcagcaacaacaactgcaactgcagcagcagcaacaacagcagcagcagcaacaacagcagcagcagcagcagcagcagcagcagcagcaactgcaactgcagcagcagcagcagcaacaggaacagttatatcaacaaatgggggacatgaatagggaggggacacacctcatcaaatgtacttcagcggcagaggattttagagactacaaattgctttctcttcatcactttacccttgtgtttagagtttgttaggtcacagtcattatatttctattcat

SEQ ID NO: 15703 - DNA, 505 bp, Glycine max
  Clone ID: jC-gmle01810087e09d1
ctgagaataatttttaaaattgtcatagcaaatatagaaatttaacattaacaacctaagagaaacttaaaaggaaaccccctctactaaacaccccaggtgtttcgttggtatcctagtttaggagtacatatggcaattccggtggaaattgcgagacaacgtgatttttaatctaaacagaccacttatgcaggcatagccataggcaaaagcaattgtaagacttaacaaacataaatccgccccgcatattcataaccaaaggtgccaaagaattttacatagccaagatccaatgcataattctcaatctctaactaggactatctgtaccgtttcatgaataagaaatataatgactgtgacctaaacaaactctaaacacaagggtaaagtgatgaagagaaagcaatttgtagtctctaaaatcctctgccgctgaagtacatttgatgaggtgtgtcccctccctattcatgtcccccatttgttgatattactg

SEQ ID NO: 15704 - DNA, 508 bp, Glycine max
  Clone ID: jC-gmle01810087e10a1
gcaagatgcattaaatgatgcattaaaagaagaaattcagcatttgaaagcactgactggacaagttatgccaaatggaggaccggtaaattttgcttcatttggtggggggcaacaattctatcccaacaatcaggctatgcacactcttttagctgcacaaaagtttcaacaactccaaattcattcccaaaagcagcatcaacttcagcagcaacagcaatttcagcaacaacagcaatttcagcagctgcaacagctgcaactgcagcagcaacaacaactgcaactgcagcagcagcaacaacagcagcagcagcaacaacagcagcagcagcagcagcagcagcagcagcagcaactgcaactgcagcagcagcagcagcaacaggaacagtaatatcaacaaatgggggacatgaatagggaggggacacacctcatcaaatgtacttcagcggcagaggattttagagactacaaattgctttctcttcatcactttacc

SEQ ID NO: 15705 - DNA, 506 bp, Glycine max
  unsure at all n locations
  Clone ID: jC-gmle01810087e10d1
ctgagaataatttttaaaattgtcatagcaaatatagaaatttaacattaacaacctaagagaaacttaaaaggaaaccccctctactaaacaccccaggtgtttcgttggtatcctagtttaggagtacatatggcaattccggtggaaattgcgagacaacgtgatttttaatctaaacagaccacttatgcaggcatagccataggcaaaagcaattgtaagacttaacaaacataaatccgccccgcatattcataaccaaaggtgccaaagaattttacatagccaagatccaatgcataattctcaatctctaactaggactatctgtaccgtttcatgaataagaaatataatgactgtgacctaaacaaactctaaacacaagggtaaagtgatgaagagaaagcaatttgtagtctctaaaatcctctgccgctgaagtacatttgatgaggtgtgtcccctccctattcatgtcccncatttggtgatattactgg

SEQ ID NO: 15706 - DNA, 500 bp, Glycine max
  Clone ID: jC-gmle01810087e12a1
cgctccaccacttattttttttaccccacccaccaattatcttctcttctcttcctccaaggtaatcccttccctctccaataatcaaacaatctcacttttttcttttgatacattcaatctcaaaaatcgttttaaaaatggcaatggcagcccaagccatggctcaattccgtttctctcctctatcttctcattaccgttaccattaccagtacaattaccattccaccccttctttcccgtccccgcgacgtcacccccgcaaccaaaggctacacctttccttctacggcggagacagaggcggaagcggcggcggcggaagacgaggagattccgatggaggaagacgcgactacgagaagaacgtgggattgggagttgtgggaatggtgttaaacggatggagatcgagagtagcagcggacccacaattaccattcaaggtgtctatggatgaactggtgcgagtgagtgcagcggaggctggtgacatg

SEQ ID NO: 15707 - DNA, 527 bp, Glycine max
  Clone ID: jC-gmle01810087e12d1
gaaaaacaacactatattaagtaaatgaagtggccgtgaaaaagatgcaaatgaaacaagagctaataaaaataaatagtgcatttaattgttggttctctcaggacaaggtggcacgtcatgagtaattccaaagtactagacccaaagtaattaagagtgtttaggaacaggaacaggaacaggaacagcagcagcagcagcagcctgagagccggtgaacctagcgagcatgacaaaggtcatccctccagcaacgttgttgatgaatctaagagccaaaacagagaacttgaagagcaaaggaggaagccatttgtccaaaagaaactccacaccgttcagagtctggtacctcacattgctgctcacacccatgtgcgccgcccaagtgaaggcgttcagaaccatagggggagacttgttcgggctctggaacgtcgggtccaccttcttcctcgtcgcgatcagcccattcgatatcgctgttcctacaagcccggcgccaagccccaccagcgcgaaca

SEQ ID NO: 15708 - DNA, 542 bp, Glycine max
  Clone ID: jC-gmle01810087f01a1
ggctcgaggctagttttgatggtttgattaccaagcaagttatgagcaagatggcagaaatgataaacagtctttgtggtggtgatgaaaaattgatgcgtgaaaggacacacctgctgttggcttgttgttcaagaatggcaatttgtaagaaagatgtttggagatttgaatgtggaatcccttctggatttccgctcacagttatttgtaatagcatttttaatgcgatgctcattagatatagctatgaaaaattactgcgccaggctaaagctccaagtatgtttttacaatccttcaaaaattttgtttctttgtgtgtgtatggcgatgataacttaattagtgttcatgaatatgtcaagccttactttagtggttctaaattgaaaagccttctagctggtcataatatcaccattactgatggtattgacaaaactagtgcaactgtgcaatttagaaagctagcagattgcgattctctcaagagaaactttaagcagatgtctaatggtttgcgggtggctcctgaggat

SEQ ID NO: 15709 - DNA, 568 bp, Glycine max
  unsure at all n locations
  Clone ID: jC-gmle01810087f01d1
aaacacactcattgcacatagtaatgcgctttatttaagtgaataaaatattacatactagttcacaaatgcaaaaggacactcatcaaccagatatttgagactcttacagttctcaagaagtcgcgtcagcatagggttagtggcgttagaactcagaatttcattcttaacgccaaaaagaacagccagtaaagctactggaaaaggatcaactctagtaagaaaaacaattttcttacctctcccaagtgctgtgcgaatccttttgttgatatctgaggagcgattgttaactgcagaactaatccaagcagtggtgggtaaaccaccacgtccactaccacatgtaacatttacaacgacagcttctgaaggtaattgacttacaggataaagacaattcacaaaaattggtaaccaagaatccactggaaaatttccatcaaagaattcttgtgtgttagccaacacangcttatcatcaaaaacaatcttgtttggaaaagctttacctgctccttgtaaacccaacaaatcaatgctcaacagtagatcaatattatca

SEQ ID NO: 15710 - DNA, 442 bp, Glycine max
  Clone ID: jC-gmle01810087f02a1
attctttctataataatctccatcaaaacctcccgaagattattatagaaagaatgggaaaaagaaaagcagattgcttcaactgctggtaataaggaggattcatacacgaatgtatacaaaaatcttcgggaggttttgatggagatttaggtgggcctggatacagttggtcgttttagatcccgggtagaatatttacattattatttatatatgaaatgtaaggacatcctgccattcaggatatgttgcagttgtatgccttgaatgggcttttacataaattttgctgagcaagtgttagattcttgtgcgggatggcaatattgtgaattttagatattgcattcatataactgaaatttggcggttatcattatctgtcagcaaatgctcgcactcagtctttttcactttgttttaaaaaaaaaaaatcaaa

SEQ ID NO: 15711 - DNA, 425 bp, Glycine max
  Clone ID: jC-gmle01810087f02d1
aaaacaaagtgaaaaagactgagtgcgagcatttgctgacagataatgataaccgccaaatttcagttatatgaatgcaatatctaaaattcacaatattgccatcccgcacaagaatctaacacttgctcagcaaaatttatgtaaaagcccattcaaggcatacaactgcaacatatcctgaatggcaggatgtccttacatttcatatataaataataatgtaaatattctacccgggatctaaaacgaccaactgtatccaggcccacctaaatctccatcaaaacctcccgaagatttttgtatacattcgtgtatgaatcctccttattaccagcagttgaagcaatctgcttttctttttcccattctttctataataatcttcgggaggttttgatggagattattatagaaagaat

SEQ ID NO: 15712 - DNA, 555 bp, Glycine max
  Clone ID: jC-gmle01810087f03a1
cattccaaagacagtaacgtaaacaagaaaggtaaaggtaagtctgtagatagtagggggagtaactccagagagaaattagcaaataactttttaagcactgtacatcagctacaggcaaattataaatcttcagaagagaaagcggaggtgctatcaaggggtgattaccgcagtgacggaggcaaattaaaaatcgagcagcggattgatatgaattctggtcgtcaacctacgatgaagcttggtgggaagactgaaacatcaaacgacagtttatctaatcaaagtaaagacgatgggggtggtgggaacaagcaacgcaagaaaacttctaagttcctgagagtacgccttggtgatggttctgtttcagcccttcttgatcaatcagatcctggaacaacagacggctcagaaggtaacaaggatgactctggaggagggcctcctgtgcgaggtgtttggcgaaaagggggaggtcataaactattttcctagttttgcttcaccgtgaattttgaacgtgaagtatcaaacgcagttgaactaact

SEQ ID NO: 15713 - DNA, 490 bp, Glycine max
  Clone ID: jC-gmle01810087f03d1
aagaaacagggccactttcgtacaaagcaaacagtacaattggcatatgagcaggtctttgatcaaaatcaaggtataccccaaaaaccaaaaaaaaaaaaatacgagcccattctggcaatggcgtttggcctttaacaaaacgtcaaagtcacattccagcttgatatactttaaatcttaaatccgatataattcaataacctaagctaaaaccaaattcacatgttcatattgcagttcaaccacggctttagccggccagttagttcaactgcgtttgatacttcacgtttcaaaatcacggtgaagcaaaacttggaaaatagtttattacctcccccttttcgccaaacaccttgcacaggaggcccttcttcagagtcatccttgttaccttctgagccgtctgttgttccaggatctgattgatcaagaagggctgaaacagaaccattactcaggcgtactctcaggaacttagaagttt

SEQ ID NO: 15714 - DNA, 522 bp, Glycine max
  Clone ID: jC-gmle01810087f04a1
ggctattcagtttcaagtgaagggaagcatcctagaagatctagtacatctgcttatggttccaacgagaaacaagtttgggttcaaaaagcaagttctggtacctagagtattttgattgtgataagcttgctgacttacagttttggagcatccatttgctagctgctggattctgtctctttttggttgacagattcttacaagtaaatgagtgtgtggttaaaaaaaattcttttactatacaagagaggaaagtactatgatgcatttaatttggcttaaaatattcagacataacttcattgaagatgtttccttagttcctgtttccttagttcctatatcatttagctgtctgccaaatacaattgggcgcttgaaatgatcctggaaagtttttggaccatctttgctcactactttgaagcaacattccatggatgtcttttgttgacaatggagtttctcgtagagctcagacacctaaataccatagatggtgtgctactaaggataaat

SEQ ID NO: 15715 - DNA, 553 bp, Glycine max
  unsure at all n locations
  Clone ID: jC-gmle01810087f04d1
accatgaacaaaaaatcttgattatgtcaacatcaaataaaagttatccaacagccgaattggacgtaaacttcaacagcataacttggtttataaatttaaaacttgcgccgaaggcagcaattcacaaaattgacaatataatcaagaaccgacaatgtaacagctacgttacgctgagaaatgcaacaccatactgtacaatgatattttagacgtaaattatccacacagtaataactcccgcaagacccttatttatccttagtagcacaccatctatggtatttaggtgtctgagctctacaagaaactccattgtcaacaaaagacatccatggaatgttgcttcaaagtagtgagcaaagatggtccaaaaactttccaggatcatttcaagcgcccaattgtatttggcagacagctaaatgatataggaactaaggaaacaggaactaaggaaacatcttcaatgaagttatgtctgaatattntaagccaaattaaatgcatcatagtacttatctctcttgatagtaaaagaattttttta

SEQ ID NO: 15716 - DNA, 557 bp, Glycine max
  unsure at all n locations
  Clone ID: jC-gmle01810087f05a1
agatttaccgctatgctttccacaatattgttaccacttgttctatgtcttactctccttgtgcttctcttgttcttcatccgcaatctcagaaccttcaagaacccaccccttcctccaggtcctaaaggccttccaataataggaaatttacatcaatttgatagttccattctttatctgcagctatggcaactctcaaagaaatatggccctatattttctcttcaattagggttaaggccagccatagttgtttcctctcctaaactagccaaagaggtactgaaaaaccatgacctagagtttagtggacgacctaaattacttggccaacagaaattgtcctataatgggtcagagattgcattttccccatacaatgaatattggagacaaattagaaaaatttgtgttgtccatatctttagctccaagcgtgtctctagcttttcctctataagacattgtgaggtgaagcaaatgataaaaaaaatatctgggcatgcctcttcttcgggtgttacaaactngaatgagtcactcatgtctctctc

SEQ ID NO: 15717 - DNA, 492 bp, Glycine max
  Clone ID: jC-gmle01810087f05d1
ataacaacactaaccaaaaagtcaagtatagcacattaaaatttcttgatagaacattataacatgcattattttattattttgatcacaaagtccatctagtagttatatatggctcctagtcttggcacaaagacaaagatcgttcttcttgtgttgggtgagtcctggcaatacttgaacatcaatgtcttcctttatcatcccttgtggcaattcccaatcaaaggaatgaagaagattagcaagaacaagttctaatatcacaactgccataggtaaacctgggcaacttctgcgacctgatccaaaaggaattagttggaaatcttgtccacgaaaatctacgtcgctatccaagaatctttcgggaataaactcttgaggatttttccaagattcgggatctctatgaataacccaagcattcacgtataatattgtcttagctggaattcgatagccatgtataatgcactcttcatttgattc

SEQ ID NO: 15718 - DNA, 528 bp, Glycine max
  Clone ID: jC-gmle01810087f06a1
gtcggttccctcccaggcacttgccgcttttatgttgcctcaggcaaacatttccagcttgagactaagattcatgtcaatggaaagaagagtacatctggcaacaagattacaggcattcagttttctcagaaaaaccatcagagagttatgattacatctgaagattcccgagttagaatattggaaggcactgaatttgttcagacatataaaggccttccaagatccggaagtcagatgtctggttcatttacctctggtggagaacatatagtttcagttggaggggactcgcgtgtgtatatttggaacttcaatgacttgggaaacgcttcttccaaacagacaaaatccaaatattcctgtgagcacttcggctctgaaggggttactggtgcattaccttggtcttgcatgagtgcagaagaacaaagtggctcttgcaatgatcttgcccaccattcatcgtcacaacaccaactagaggcatctcatggcgttagggagtctgaacgattttctttc

SEQ ID NO: 15719 - DNA, 538 bp, Glycine max
  Clone ID: jC-gmle01810087f06d1
aatctatacctatcgtataagttaactaatattcacaaaaataaatgttacaatataaaaaaggctcatgattccggtggcctgactctacaagcagaccactctttaatcggtgacatactaaagtgtaaatgtacaaactcgtggaacatgtcaacaatgtttgacatctatatcatgaatttagtaatgatgcatacttctaggtgagcatctaactccatgcttcgatctttttctgcaggttattctagtaatccaaggccttgaaattcttctatgaatgtccatcttttaccagacaaagaaagatcctatgtttcttgcaaagtcactcatatgaagacaaaaccaaagagccttgaatgcaaaagtaccaggttattctgcacctcataaatccaagacaatgtcctaaagcctaatgggaagtccaaagttgtggaatgtcttgatggttccatcacaaccagctgccacaatggatagtccccatgtttctgatacatgtttttcatgggaaggatctttggtacat

SEQ ID NO: 15720 - DNA, 580 bp, Glycine max
  unsure at all n locations
  Clone ID: jC-gmle01810087f07a1
gatatttgacaggttcatcatcataaccttcaatgaaaagaaatggctgaggcaagcattggcagcaaaagcagcagatggtctttacagggaatgacagctctcgtcaccggtggatccaaaggaatcggatatgctatcgtggaggagttggcacagcttggagccactgtgcacacttgcgctcggaacgaagctgaactcaatgaatccttaaatgaatggaacacaaaaggatacagagtaactggttccgtctgtgacgtggcgtctcgtgcagaaagacaagacctcatagctagagtctccaatgagtttaatggcaaactcaatatccttgtaaacaacgtgggaacaaacgtaccgaaacatacccttgatgttacggaggaagacttctcatttctgataaatacaaatcttgaatctgcttaccacctaagccagcttgcacatcctctcctgaaagcttcagaggctgcaaacatcatttttataatcctcattgctggtgtgctatcaataggtataggatcccactatggtgcaacanaaggagcaatgaacccactgactaaaa

SEQ ID NO: 15721 - DNA, 504 bp, Glycine max
  Clone ID: jC-gmle01810087f07d1
gaaaataaaataatactttattattaaaattaaaattgattacatgatgattggatcgtggacatacaaatttattcccaacaaattccccctcccaaatgatatagattgaaccaagggactttcagctatttattctcaatactaatataaaaactagcaacgtatgcatcagaccttgctcttaacatagtttatataaaaatgctaacaacacattatcttatacactcttttcaatacattttttttattgcttgaaattttttagatatcacaaaaatatatgggtcctagatcttattttcatgattttgtaattttttattatttgtaacttatggtagaatatgtgtcaagagaagtgtgttagagagtgtgttggtagtacttctctaatttatatagagaccattcactgttaatccaccatcaacacaaatggtctgtcctgttatgtaagaggctgcaggtaagcagaggaatgccaccaatgaagacact

SEQ ID NO: 15722 - DNA, 569 bp, Glycine max
  Clone ID: jC-gmle01810087f08a1
aaaaaattaaaaaaaaacatcaaccgaaggggtcatttctcccaatccgctagcttctgctttctgtcttccagtgcgtgaaggatacgatgaacatcatgtctacccaccagtgtagttggcctgtgagaattcaggatcatcctgacaaaggaagtattaacaaggctccattttccagaggatcggaattccttaatgttggataccatgctcaaaaatatggccatagtgccagaaaatgtaggcccatttttgccagttcagtgagcaacagtatggatccttctgattcagatgacactgataagaaaaaacctcagaatggtgaaatgggaggagtgaatagtgaaatgcttagagagagtctcgagaaaatagttggagaagatgattccacgtttagtggatttgaccttgctactcttatcaggaacaaatatgggaggtcttatgatgtacagttgataaagaaggaattcatgggaagaaatctccttgcgatgaatgtcatgtggagtacatggagcagtatctccaatatttttttgctattagagatctttccc

SEQ ID NO: 15723 - DNA, 548 bp, Glycine max
  unsure at all n locations
  Clone ID: jC-gmle01810087f08d1
aatatgaatgttttttcttatattaactcattttacatcgaacaaaggaaaaaaaaagaagggacgaaccaaaaatatatttgcctaggcctgatgctaagttgccaacagaaacgttagagaagcttctgtagatgttgttaagatccaagtataacaaattccaaattaacgaaattcacaaaaagtggtggtcctgcatgcgcgctatggactttttcttcactggaatctggaatccattgactaaataagatttcaattcagcaatgcattctatttgtagatccactcgttggaacgagcacccgactcatccatatctataaaaatgcttactgcctgcagcaaataatacgacattcgaatgtacactgaccattgtttttttcttggcaaccacttatttatgggattattgtcagtataaaacttcaaaattacacttgtagaatttttcgttctagtttgagtgttagaaactatttgggtaagcttctntaaaaatactaagaaaaaaaaaataagaaaaaaagaatgagatgaac

SEQ ID NO: 15724 - DNA, 546 bp, Glycine max
  unsure at all n locations
  Clone ID: jC-gmle01810087f09a1
ctcgagccgaatcggctcgagctcaaatgcgaaatggacaagcaggaatacacggtggccgaaatagatggctggacaaggcacatactctgacctttgagacgaacggtcgagccgtcctggctggagaacacagcccgatcgatgcgcttatacctaccatggtcatggattatgcttcacaggtccctgttgatcgatctgtatatgacgaagaggaaggttcgggatggtctagagtcgattttgtagtcgacgaggcgttgaagagggagattgtcgattgcgaggggaggaacaaggcgatcatcgaggacagcgatgcgaaagagctatggtttggagagtacggcgcggagtggatcaagaagaacgccaaagtcgcgcccgacgcgtatattcagcaagtcttacagctggcctggtaccgagatcaagggtatgcgaccgcaacatacgaaaccgcatctacgagattgatgcagcacggacgtacagatgtgattcgaacactgagtcangagagtcgaggctttgtcagggcat

SEQ ID NO: 15725 - DNA, 495 bp, Glycine max
  Clone ID: jC-gmle01810087f09d1
agctcactaggccgccgtttttttttttttttttttttttttttttttttttttttttttttttttttttttttttcgtcataagcatgcttaaaaactacagtttccccttgacctttgggccggcctttaccacttttcgcatatctttaaaagcttggacttttcgatgcttgaatctcgccgggtgggtcttttaacaggtccatttactttaaataccaaacttgatcatataagggccagcaggggaattcgttccgtatccgtcaggccagaccgtaccaaatcctgttcccgggaatttcgctccggcagggagaccactcgtcgaaagcttccattcttgggatttggaatacaagccatcctcaaataattgatgcgggtaatttccccgaagcatcacctttaggcccatcatgggtcgatcccagccgtgacccgttgagcaccgcttggtcaaagcggtgtgagcggtacatgactcgacta

SEQ ID NO: 15726 - DNA, 564 bp, Glycine max
  Clone ID: jC-gmle01810087f10a1
ggcaccagcttgaagaaggttattgcctcaagggtccctaacgtcaagatttcttctggaagtttcaaaatcgttgccgcggaaaaagagattgatgagaaacaacagacagacaaggacagatggaaaggtcttgcctatgatgtttcagacgaccagcaagacatcacaagagggaagggtttggttgattccctcttccaagctccacaggatactggaactcactatgcaatcatgagctcttatgagtaccttagcactggacttaaacagtacaacttggataacaacatggacggtttttacattgctcctgcttttatggacaagcttgttgttcacatcagcaagaacttcatgaccctgcccaacatcaaggttcctctcattcttggtatctggggaggcaaaggtcaaggaaaatccttccaatgcgagcttgtctttgccaagatgggaatcaaccctatcatgatgagtgcttgaaagttggaaagtgtgaatgcaggagagccaagcaaactgatcagacagagataccgtgaagccgcagacatgatc

SEQ ID NO: 15727 - DNA, 358 bp, Glycine max
  Clone ID: jC-gmle01810087f10d1
agaaaggaaaaaaaccaaagactttaacctgggccccattgaaaaagggaccccagggacccaaaatttttccgggataccaacccattttgaacaaaaaagcttttttttgtatagaaaggtttagcttgttccccggggaaaattgctaggttcctaggggggtttaaacgagggcccactacaactccggggatgggggctaaactgtgggcgttttgggtacgaagcaacctgggggaccgggaagggacacgtggtgagctgttttcccaaaaaaaggcccccaggggggggaaattcgctgggcatccccaaaaggggccctttaaaagaccttgctggcccagtgaccctt

SEQ ID NO: 15728 - DNA, 516 bp, Glycine max
  unsure at all n locations
  Clone ID: jC-gmle01810087f11a1
gttgcctcccaccctgactgaagaaaaatttcgccagtactttgagtcttatgggaatgtaactgatgtagtagtcatgtatgaccagaatactggacggccacggggatttgggtttatttcatttgatactgaggatgcggttgatagggttttgcacaaatcatttcatgatttaaatggtaaacaagttgaggtaaagcgtgcacttcccaaggatgccaatcctggggcaagtggtcgtatgatgggtggtgctggaggtggtgggtatcaagggtatggggcatctggtggcaaccaaaatgcatatgatggtcgtatggattctagtaggtatatgcagcctcaaagcgctgcaggtggattccctccttatggttcttctgcctacagtgctcctgggtatgggtatggtccagctagtaatggcattggttatggtgcatatgggagttatggtggtgccactgctgngtatngtggacctgctgctgcacatatgggaatcctaat

SEQ ID NO: 15729 - DNA, 578 bp, Glycine max
  Clone ID: jC-gmle01810087f11d1
aaggtgaaatatgatactatagcttaaatgctgcaagaacaaacaaatccagatcaactaaaatcataagcaagcaaattaaagctacacgcagaaacaaatactaaatagaaagtagcatctagtatctcttcaaccatactacttattataaactaggaaagcgggtactgcaaactactgggattcaagcaacccaaccagtcccattgtgtattgacattgatctttgagccactccattgctgctggaagaattcattgtgacctcatgatttaagacttttaaaagccagggatcctcaagttgaagtttaagatccagcaagagattcatctaccaaaattactgctgttgggcttgtcgagactgagcacccccatagccaacaccataaccaacttgcccaccattaccttgaggagtcccataatttccagatgcatgagtttgttcagatctccaagctgcatttccataacctgaatttccatttgcatccccatagcccccacccatatagttgccactgccaccactacttggtagtcactaccaccagaagcactagcattat

SEQ ID NO: 15730 - DNA, 461 bp, Glycine max
  Clone ID: jC-gmle01810087f12d1
aagtctataaaatgtacaagtttcttgataaaacaaagatcttcacacaatacatatattcaaaacactaaaatgaaaagatgaataaacctatctgcatccgcctccccccatttcccagggcgacttcaattttctacacttacaaacatggcatccctttttcttcccttgtggcttcactctaatcttgtgataggatgctggaataaatccttggccatgtttaggaattaattcacacataatatggaattcttcaccttttgccacacattgaatggtatggcatcattgtagaaaaatctcacaattgctaaacaagtttcctctctttcattcctcttatacaagaaattgattgtggcttgggtgctcatacccttttttctaaaaatatttccagacttctcaacatcaaccactttatggctcttttttcttttttcactaatttcaag

SEQ ID NO: 15731 - DNA, 523 bp, Glycine max
  Clone ID: jC-gmle01810087g01a1
gtgacttcacctcaacgtctatgcattgtgacagagtttctcccgcgtggaagcttgtgccgcttgttacacagaaacacatctaaacttgactggagacggcgagttcatatggccttggatattgcacgaggtgtaaattatcttcatcattgtaacccacctatcatccacagagatttgaagtcatcaaatcttctagttgataagaactggactgtgaaggttggagattttggtctttcacgtcttaagcatgaaacatatctcacaactaagacaggaaggggcacgcctcaatggatggcaccggaagttcttcgtaatgaaccctctgatgagaaatctgacgtttacagctttggagtaatattatgggaaattgcaactgaaaagataccttgggataatctcaactcaatgcaggtgattggagctgtaagattcatgaattaacggctagagattccaaataatgttgatccacggagggctactataattgagagctgctggcatagtg

SEQ ID NO: 15732 - DNA, 400 bp, Glycine max
  Clone ID: jC-gmle01810087g01d1
gggggtcaaaccaatttttttcccttttttttcgctcccttttggccaacttttaaaaaggggggcaaacctttgcatagaaaaggcccatggggggggggaacgaccccggtggcaagacttcaaacccaacccccccaattagttggagaaactttaaaaggccccttgggaaaaataagggggctaacccaattcctttcaaaaggtgggcaatccccaccttttttttaaggtttatccggccatttccctttttggggcttaaaaataccttaacaaaggggggggggctcccggaaccggtcctctacaggggtccaaaaccccctgttcggactggggaccaactcatttactcccgccgctttgggaaaatatctgcgaaaaaattgtttag

SEQ ID NO: 15733 - DNA, 590 bp, Glycine max
  Clone ID: jC-gmle01810087g02a1
cctcaactcatgaaaataatgcgagctactctttatactcataatgagtggtttaaacttcaaatgtggaaagatcgttttgaaggtcttttgaggcttgattccttgaaggaagccaacactcccttccttgcaccagtcactacatccaaatcgtatgctgatagctgcacaaatggatcttctcaggccacagtatcttcagggaccaggatgtcagaagatggtagtagtccaactcaagcatcttcaagggatgtcatctgtgacgaaggtgcaatacttaaagtaatggagtttttggctttgcctagggctgatgccatacatctgcttgcacagtacaacggaaatgcggagacagtcattcagcagatatttgcgtaggcgttgtgcacgaaatcgggtttgttatttagaagaaaggtcaaattatttttttcaatattatttgattcaaatttgagaattttttctataccccttgtacatatagctgcacagaggatatcactgcaacgtttgaaacccgaattgacggaaactactctctgaaaagatctcttaatattggctcagttttaatgaga

SEQ ID NO: 15734 - DNA, 439 bp, Glycine max
  Clone ID: jC-gmle01810087g02d1
ggaaaccccccaaaaaatatttaaaaaaaaacaaaattttaaaaaaaacggggggaaaaataaaaaaattttttacagaggggggtttccggaaattggggtttaaaacggggcagggatttccttttgggggttttttgtccaggggggtaaaaaaaaattcccaaatttgaaacaaaaaattttgaaaaaaaaaattgggccttttttttaaaaaaaaaacccgatttccgggaaaacgcctacccaaaaattgggggaaagacgggttccccatttccgggggactgggcaaacaaattttggggaatacccctggggaaagccaaaaacttcttttctttaaggatgggcccttttaaaaaaaggaaaccccttgaaaaagcttgggggggaccaccaccaattttggaaaaccggggccccaaaaaaactgggg

SEQ ID NO: 15735 - DNA, 564 bp, Glycine max
  Clone ID: jC-gmle01810087g03a1
ttgcagagttgaattccgaaagaggaatggcgaagcacgaggagcttcctatcccgattaacaataacctagaacccgtctatggcggaggttccgcactcgaagaagctcagcttcgtttcgataatttgaagtccaaattcgtcgaaatcttcggtcatcatcctcaaatcttcgctcgctcacctggaagagtgaacttgattggggagcacattgattatgaaggttattcggtgctgcctatggcaattcggcaagacacgatcgtggcgattcggaaaaatgaggcggaaaaggttctcaagatagctaacgtgaatggtgaaaaatattcactttgtacttatcccgccgatcctctccaggaaatcgacttgaagaaccacaaatggggacattattttatatgtgggtacaaaggtttccatgactatgcaaagttgaaaggagtgaatgctggtgaacctgttggacttgaagttcttggtgatggaacagtgccgacaggttctggactatcaagctctgcagcgtttgtctgctcatccacaattgctatta

SEQ ID NO: 15736 - DNA, 571 bp, Glycine max
  Clone ID: jC-gmle01810087g03d1
gctggatgtcttactgtcacatttaaatgaaaagcttataaaccaagcatataatatcaatatattacaacaagcactgtagcatagcatcatgttgctatcagttaatgtctacaagcgaaagcaaatggaatggttgcatgcacctgataatagaaatgtaaaatcagagtttcaaactccattcatctgtaactgaaattttctagggttaaaattactcttcaacatttggctcttatccctttgcactatcaaaactcaatcaattcttctagaagctatgaactcctaacttagattcgaagatacgacatccttgaaagcatgaaccctcttggcttctgaatacacatgagcagctctctgatgcaacttgtattgctttgcaacttttaacacttctaaataagctgcattattgttcaaaaatgaagtcagcttttcccctgtaactgcttcaatttcttcagctgtatatggttcttccttcaaatattcctttacagcaagtacaggatcagatgagttataaataccagcaaatgatacgcataacccttcaacatca

SEQ ID NO: 15737 - DNA, 550 bp, Glycine max
  Clone ID: jC-gmle01810087g04a1
caggctgggtcttgctctgaacttctccgtgttttactatgagattcttaactctcctgatcgggcttgcagccttgcaaaacaggcttttgatgaggctattgctgaattggatacattgggagaggagtcatacaaggatagcactttgatcatgcaactgctacgtgataacctcaccctctggacctctgacatgcaggacgatggtgcagatgaaattaaagaagccgcacccaaaggtgacggggaacaaaattaaacataccatactctctgcttattagtcattgaacttcccttctgtaatgttttcaaagggagaaggtgttgaatgctaatctcaatgttactgagattttgggcattcgtgttcttcgttatgaattgtggatgtactgggctattttagtttgtccttccatttatacgcgtttctgaactgcctattttcttaatgacactgaaatttccattatgatgcatgttagaatattacccagatgttgttctctttagcaaacttcgtatggctcattattttaggatg

SEQ ID NO: 15738 - DNA, 410 bp, Glycine max
  Clone ID: jC-gmle01810087g04d1
agaaatcatactttttatatcaaacacttttccatgaccccatgggcattgcactaaaatagcgatcaagaacaacaaaaccctacctaaacatagtgaagttgaaaacccttacaacaaaaaacacgttaaaatcgatcagagttatgattccgaggctttagaataaaaacaaatgaaaggggtcacacctttggattctaaaataatgagcaatacgaagtttgctaaagagaacaacattttgggaatattttaaacagcatcataatggaaatttcaggggcattaaaaaaatgggcggttcaaaaacgcgtttaaatggaaggacaaactaaaatagcccagtgcatccacaattcataacgaagaacacgaatgcccaaaatttcaggaaccttgagattagc

SEQ ID NO: 15739 - DNA, 535 bp, Glycine max
  Clone ID: jC-gmle01810087g05a1
gaatgaagcggctattcttgcagccaggcgtgacctcaaggaaataagtaaagatgagatctctgatgcgcttgaaaggatcatagctggacctgagaagaaaaatgctgttgtctcagatgagaagaagaaattagtagcctatcatgaggctggccatgctctagtgggtgctttaatgccagaatatgaccctgtagccaagatatcaattattcctcgtggccaagctggtggtctcacattttttgctcccagcgaagagaggctcgagtctggattgtacagtagaagttaccttgaaaatcagatggctgttgccctgggtggaagggttgccgaacaggttatttttggccaggaaaatgtcaccaccggagcatcaaacgacttcatgcaagtttcacgagtggcaaggcagatggttgagagatttggattcagcaaaaaaattggacaagttgccattggtggacctggtggaatccattcttgggtaacagatgtcatcgcaaaaggatactccatggcaact

SEQ ID NO: 15740 - DNA, 364 bp, Glycine max
  Clone ID: jC-gmle01810087g05d1
cagccgaaaaaccatatttttaatttattaatggcgtaagctgctgggcaaatggttttttccccttgaattggataaaaaaattatggatttttacggggcacaagtcaaagcgtattttatggcccaaacataattctgggacttgggtgtatgattatgccacataaaattcggcttttccatcaaggaatagacccaggaacttttcaccatccacagtttctttttctatgaaaagttgagcaagcttgggaaggatatcaaggggagtagagataatatgggttgcccaaaaaaaggctttttttaccagttccctgacttgcgaatccactacatccgaagttgccatggagtaatc

SEQ ID NO: 15741 - DNA, 574 bp, Glycine max
  Clone ID: jC-gmle01810087g06a1
gccggcgcccctgtctacctcgccgccgtactcgaatatctcgcggctgaggtaattgccgcaattagtcgttcatttcgaattcgattttgaaattatctccctatgtgattagatctagggtttcgtaatttcgattagattcatttgccctaattgaatggtttgaacattgttttaggttttggaattggctggaaacgctgcgagagacaacaagaagactcgaattgtgccgcgccacattcaattggcggtgaggaacgacgaggagttgagcaagctactcggtgacgtcaccatcgctaacggtggcgtcatgcctaacattcacaatcttctccttcccaagaaggctggtggatcatccaaggctgctgctgcagacgatgactcttaaataggggttctttttccgagaaaagttatcgaatttattctctttggattctctctgtttttgcagttattcagtttttgataattgcgttctgtagatgcagttaggttttcagtcactgatgtgaatagagaacgctctttctcttcaagaaagattgctggaatttaaatc

SEQ ID NO: 15742 - DNA, 498 bp, Glycine max
  Clone ID: jC-gmle01810087g06d1
ccaacaatctttcttgaagaaaaagagcgttctctattcacatcagtgactgaaaacctaactacatctacagaacacaattatcaaaaactgaaaaactacaaaaacagagagaatccaaagagaataaattcgataacttttcacggaaaaaaaacccctatttaagagtcatcgtctgcagcagcagccttggatgatccaccagccttcttgggaaggagaagattgtgaatgttaggcatgacgccaccgttagcgatggtgacgtcaccgagtagcttgctcaactcctcgtcgttcctcaccgccaattgaatgtggcgcggcacaattcgagtcttcttgttgtctctcgcagcgtttccagccaattccaaaacctaaaacaatgttcaaaccattcaattagggcaaatgaatctaatcgaaattacgaaaccctagatctaatcacatagggagataatttcaaatcgaattcaaatgaacgactaa

SEQ ID NO: 15743 - DNA, 533 bp, Glycine max
  unsure at all n locations
  Clone ID: jC-gmle01810087g07a1
caagaagttgtattttggcatccccgtggcttcaagaagagaatctcaatggaggcccaggagctgaagcgcgtgttccagatgttcgaccgcaacggcgacgggagaataacgaagaaggagctgaacgactcgctggagaacctgggcatcttcatctctgacaaggacctgagccaaatgatccagaggatcgacgtcaacggcgacggttgcgtggacatggacgagtttggggagctgtatcagaccataatggacgagcgcgacaatgaggaggacatgagggaggccttcaacgtcttcgaccagaacgccgacggcttcatcaccgtcgacgagttgaggaccgtcttgtcctccctcggcttgaagcaaggaagaaccgtccaagactgcaaggccatgatctccaaggtcgatgttgatggagatggcatggtcgattacaaggagttcaagcaaatgatgacaggcggtggattcactgctctcacttattttctntcaatcatctattccccatatatctt

SEQ ID NO: 15744 - DNA, 541 bp, Glycine max
  unsure at all n locations
  Clone ID: jC-gmle01810087g07d1
gaaaatagaatcaacctttctcgactcaaaacttgaacaagaagaaaacacaaacagatcttgtgacagtagcagtagtctcccgatttcaagggtcttcctcccccaaaaaaccaaagacataataaagttgtagcattaccagggcaagaggcgctcatctcacttatggagccaggtttgctaactcccaaaaaccaacgactaacacattggaaaacacaagcacacacacacgtacacatacctaggacgagatgagatgaattgatctaatcctataccacaccatccatggtccgaaaccatgacaatcacaataatcctggtgatcctgattgaaagtaagttatatgtacaagaaagatatatggggaatagatgattgaaagaaattaagtgagagcagtgaatccaccccctttcatcatttgcttgaactccttgtaatcgaccatgccatctncatcaacatcgaccttggagatcatggccttgcagtcttggacggttcttccttgcttcaagccgagggaggaca

SEQ ID NO: 15745 - DNA, 582 bp, Glycine max
  unsure at all n locations
  Clone ID: jC-gmle01810087g08a1
caaattcggggctttcatcaattacacccttcattcgcttcattccacccttcacctgaaaaaaaaaaaaaacaaacaaacaaacaaaaaggagtgcaaaccatgggcgatgcaattgatttgtccggcgacggaggagtcattaagaccattgtcagaaaaagcaaagccgatgctgttggtccaacagaaaattttcctcttgttgatgttcattatgaaggcacacttgctgatactggtgaagtttttgacactacacatgaagataacaccatcttctctttcgagattggaaagggcagtgttatcaaggcttgggaaattgctgtgaaaaccatgaaggttggagaagttgcaaaaataacttgcaagccagaatatgcatatggcagtgcaggatctcctccagatattcctccagacgcacaacttgtttttgaagttgagcttgttgcttgtcggccaaggaagggctccagtttgggaagtgtttcagaggagagggctaggcttgatgagctgaagaagcagagagagctagctgctgctgccaagaggcagagangacgaagagagaag

SEQ ID NO: 15746 - DNA, 461 bp, Glycine max
  Clone ID: jC-gmle01810087g08d1
gaaaatgacatagggaacttataattcccataaactttattacggatccaacccttattattacaaaattgctgggataaatcaattagctacatttaaaagggaccaaaaatggggcccatataattagacaaaagcctttagccaaagcagcttttcatttataaaagggtttggatggcccaaaggggaaatagggaaaaaccgaaaagggtaaaacacaaaacttttggatgggcatcatttcccaaactcaaaaaaaggttggcaaacttcccactttggtttacctttaccctttccttgacctttttgggcttaaaactggggttgcacacgtgcgggaaccactggtttggcttcttcactcttcttcttcacttcccttttggaagcaacagctaactttttttggtttttcaggtaataaagcctagccctttctttgaaaactttccaaa

SEQ ID NO: 15747 - DNA, 508 bp, Glycine max
  unsure at all n locations
  Clone ID: jC-gmle01810087g09a1
aaaagacccggtagattttgtacttcgtttttctttgatgaaaaaaaaataaattcgtaaacgtagaaaaaaattcatcaaagaaaatactctatccatagtagaggaaaaaaatgaattgcagggatggaaaagccgtatgcatcaatacgcagaaaatgcttgtacggttatttaatattatttttgcccatttttttattttcttatttgtatttatcccttttacctttatttgggaataaggataatctttaccaatataggagaaatcattatcaaaatctttatcaagataagggaaatacttattaagttataaaatcagggtaatgatccaccaacccgctagttctttttatgaggcacaaacgggagaatttatcctggaagcggaagagctactgaaaatgcgtgaaactatcacaagggtttatgtacaaagaacgggcaaacctttatgggttatatccgaagacatggaaagggatgtttntatgtcagcagc

SEQ ID NO: 15748 - DNA, 504 bp, Glycine max
  unsure at all n locations
  Clone ID: jC-gmle01810087g09d1
aattaatgttattgttaacttgtacagttcacactctttggctctacccatccaatatttagtttagtaagtagattttttcacaatgaaatctagttatacagtaacggtatttaattatgaaaatttgctgggtagctgaccttcttattccgttcgtccaaaatccatcaaaattcattcattaaggacatactttatctttaattgaaatagtattttctccgcttaacgggtaactttatatttgttttgttaccgatgggaaagtccttctcatcttaaattgtaaattaagactattgggtttgcaccaatcgaaaccataaatttgatacaagatagaagaatgtaaagaatgtatatatataagttaagatagtctgaatgggaaaactacattcacactatcttaaccgatcaacaatactgaaaaaatgaaattgggtttttcttcttagtatatgatcntgacgagtcgcacatacaccctggtacacgttc

SEQ ID NO: 15749 - DNA, 551 bp, Glycine max
  Clone ID: jC-gmle01810087g10d1
tgccgaactcttaccactacaagtacctgtatagacgagctcatctgttcagaggccgaccttcggcctttgattcttgattgtagttggaaacaatgacatagtttaactcgagcgaatgtcaattgaacatataatttaagtaatgactaaaacgctagttgtggacaataaaattcattcatgtccactttactcaaattagggggcaaaattttaattccagatttggaatttcagattttaagttttggaacctcggcagttaacatgacaactatatatggatgtttacaaggtccgggggtcccccaaccggattttaagaaatttccataactttataagaatttaccacaactatatttgccttcaaattcatttgaccattcaccatttcatgccacggctacactgtttgtatctttttctttttagaggatatcattttatgcaccatggatatttcaaaatctttttgtgtcaactgtttcctcaaagattcaatcaccatttcactttgcttcaattgttgattgagggcttcaatt

SEQ ID NO: 15750 - DNA, 559 bp, Glycine max
  Clone ID: jC-gmle01810087g11a1
ggcttcacaactctttgcttacaagcagtggctccacatgttgcagctcgagaacctgtgtctgcaactcagaaacaaaaaccagtcatttccaaatctctttccagcatccttaccctgggacccatgcaggggaaggctgcttaagaaaagtcatagcaaagctaggaagaggaagaatagtaacagaagatgtgtgattacaaagtgtgctgttgcttttgctgtgggattaggcctcgctggtgctggtttgcttcttggatggacaatgggatggatgtttcctcccttataaaggacattgactaacatcaattgcaggcttctgctatgcttttctggaatttgagttctgttgttgagctgataagattgacacgagtggatatatgatgttaaacatgggatccgttgccatcattgggaaatactcctcatacatttgagaccattagttgtatatatttaacatagtgtagaaagatccacctattggaaaaaggggttagttgtggtgtagtgcagaatgaatacgtttggtagatttgatatattt

SEQ ID NO: 15751 - DNA, 462 bp, Glycine max
  Clone ID: jC-gmle01810087g11d1
aataaaggactacatatggccttgtacatatttcaagtagttcaagtagctaagtacaatttgatatttaaagcaaaaaatatttacaaatctaccaaacgtattccttttgcactacaacaacaactaaacctttttcctatagggggatctttctacactatgttaaatatatacaactaatggtctcaaatgtatgaggagtatttacaaatgatggcaacggaaaccatgtttaacatcatatatccactcgggtcaatcttatcagcacaacaacagaactcaaattccagaaaagcatagcagaagcctgcaattgatgttagtcaatgtcctttataagggaggaaacatccatcccattgtccaaccaagaagcaaaccagcaccagcgaggcctaatcccacagcaaaagcaacagcacactttgtaatcacacatcttttggtactattctt

SEQ ID NO: 15752 - DNA, 535 bp, Glycine max
  Clone ID: jC-gmle01810087g12a1
gccaaatgcaccatcttaaaaaaaaacaaatatatatttgaaaaaaaagaaaaaaatgcatgccatcatcatcaaccattcctggtcctgatcctaaatagggttagggtttatgcaatcgaactccagcgacggtgcatttgtgcgtaatcgatggcgaatcgcacggatccagcagcgaagagcataagagggacgaaccctcagaacctggtggagaagattctccgatcgaagatctaccagaacacgtactggaaggagcaatgtttcgggttaacggcggagacgttggtggacaaggccatggagctcgaccacctcggcggcacctacggcggcaaccgcaaacccacgccgttcatgtgcctcgtcatgaagatgctccagattcagcccgagaaagaaatcatcatcgagttcatcaagaacgaggatttacagtacgttaggattctcggtgctttttacttgcgtatcactggatctgacattgacgtctatcgctacctcgaacctttataccatgactatc

SEQ ID NO: 15753 - DNA, 548 bp, Glycine max
  Clone ID: jC-gmle01810087g12d1
cttcttcttcttctttggctcaccatcctcaagtccatctccatgtcttctaggacttacactactccgagcatgtctctttctgtagtccccgccatcatgttccctgtgatccctacttctacttcgactccttgagtgactccttcgccttccacggtcacgatccttctctcttctctcccgctccctaccctctctctcacgaccataatctttttcttcccttagacggtatcggtccctatccctatctctgtctctgtctctgtctcggccacgtccccgctctcgatcgtaatctctatcatagtctctgtcatagtcacggtccctgtgtctatgactatcacgtcttttgtccctgtctctttccctagtagggcttctcccacgatattggtccttctcataggccctatcttcaatctcatcaacaggctggtcattatcctctttctcttcttcctcctcaaaatcttcttcaagtgcacttcttctaggttctaatgaacccagagattcaagagtccacctcttctttacgc

SEQ ID NO: 15754 - DNA, 574 bp, Glycine max
  Clone ID: jC-gmle01810087h01a1
aaagactttgcgtggcacccacaagaaggccacacagtcaccaccaccaccacccatttctcccggtgcgcgactcactttatttttattcatccttccttcctaacagatccgatccccgatggcggcggcgtcgcggcggctccgggacctgcagtcctcggcggggaacaagatctgcgtggactgctcccagaagaaccctcagtgggcctccgtctcctacggcgtcttcatgtgccttgagtgctccggcaagcaccgcggcctcggcgtccacatctccttcgtccgatccgtcaccatggactcctggtcagacatccagatcaagaaaatggaagccggcggcaacgacaaactcaacgccttgctcgcccagtactccatgcccaaagaaactgacatcgtcacgaaatataacaccaacgccgcttctgtgtaccgcaaccggatccaggccatcgctgagggacgtccctggcgcgatccgccggtggtgaaggaaaacctctccgtcgaaaggggaaaccgtcgctgacacatacgcggaggaacaacgattctggatggg

SEQ ID NO: 15755 - DNA, 461 bp, Glycine max
  Clone ID: jC-gmle01810087h01d1
gagggaagggcactcataaaattttaagcattcaaattaagaggctacatttgtgaaatttccctgcctttaatgtttaatggcactacccaggcaataatgcttttaaaaatggatatttgggagattagcccatttttggatactatctgtccaactgaacattcccaaaaattaccaatgaaaagggaatttttaacaaacgatggaaaggctaaaaatgggtttggggttaaaaaggaacaaggggattaaaagttgtagctgaaaatcgagtatcatgtttggttggaggcacccttgtttggcctgcatgccatcagtgcgaaaaccacagtaatttttagcaacttgaggaacaaatcacgaaactggtaatgaaggccaatcacccctggggtccaagaagtcttacaagtcataattggtttcaaatattgaccttgaaattttagagaaag

SEQ ID NO: 15756 - DNA, 594 bp, Glycine max
  Clone ID: jC-gmle01810087h02a1
ccttaaccaactcatctcaagatttagcgctcttggactttccaccaaggacttggtcgccttgtccggtggtcacacaattggacaagcaaggtgcacaaacttcagagcccgcatctacaacgagaccaacatagaaaccgcatttgcaaggactaggcagcaaagctgccctagaacatcagggtcaggggacaacaatctggcaccacttgatcttcaaactccaaccagctttgacaactactacttcaagaacctcgttcagaagaagggtctcctccactctgatcagcaactgttcaacggtgggtccaccgactccattgtgcgtggctacagcaccaacccgggcaccttctcctctgatttcgccgccgccatgatcaagatgggagacattagtcctctcactggctccaatggagaaatcaggaagaattgtagaaggattaactaatttaattcagtcttgaatattaagggtcctacacatacgcaagcaatttaattgcgtttattagttgttaaaacatgttttggttgtattttggattcctagtgtagtttccgtgatcaatgccgtctacttta

SEQ ID NO: 15757 - DNA, 510 bp, Glycine max
  Clone ID: jC-gmle01810087h02d1
gaagggaaaattaaaaagcaaactccgttcttgataaatgcttgataaaggattttttttttccctacaatatagttaaggaaaaagtaaaaaagaaacaaaaataaagggaagtagaacacactaaagtagacggcattgatcaccgaaactacactaggaatccaaaatacaaccaaaacatgttttaacaacttattaaacacaattaaattgcttgcgtatgtgtaggacccttaatattcaagactgaattaaattagttaatccttctacaatttttgctgatttcttcattggagccagtgaaacgattgatgtctcccatcttgatcatggcggcggcgaaatcagaggagaaggtgcccggattggtgctgtaaccacgcacaatggagtcaacggacccaccgttgaacagttgctgatcagagtggaggagacccttcttctgaacgaggttcttgaagtagtagttgtcaaagctggttggagtttgaagatcaagtg

SEQ ID NO: 15758 - DNA, 559 bp, Glycine max
  unsure at all n locations
  Clone ID: jC-gmle01810087h03a1
cagatccttagcttgcaaaacagttacatcccttctggagaatctagacaatgatcacaaagttgctgctagtgcttgtctaattaaagacttcaacatatatcctcttttgcttgattgtcttataaatggcaatgaacaagtggcagctgtggcaacagatgcaataaaaaagttagctggttttcctgaaggcatggaaattatctttccatctgacaaaggagatgatacagacctggagattatagcatcacaatgttcatcactgggccgagttcgggtactggcattagtggtgaagcttttctcagtatctaggtcagcagcgtctaccatttatagtttaaatctacttcaattgttggaagcagaaatcagaaatgcagatgatacccttgtaactctaagtgttttggagcttatatatgagttagcagagattgaacatggtacagaatttttgtcaaagactagcatctttcaattgctttcgtcaatgatcagccacaattctatggaatcnaatttaagatcaagagcaatgatgataagtgga

SEQ ID NO: 15759 - DNA, 497 bp, Glycine max
  Clone ID: jC-gmle01810087h03d1
aagctaaattatagctgaatgcaagttcagtatatatgccagttagtagacaatgtaattgttgacaaagactactacttcacacatgcaacacacatccaaagccaaaaagaatatctatttgctagagttgacaaaagccattgaaatataatacactaaaaaactatgattaatatactcattccatcaagtttcaacatttgagggggaaaaggtttttgttctataacactccacattgtatttgagaagagaaaaaaaactgctccattacaggtattgcttgaccactcaggtgtgaaaactaaaatctatcagccgttatcacagcaggttgagcttcaacatgccttttaacaagatatggacccattccaacagcttcctgaaactttgcagctattcctgcaaaagcaggattagcagaaactctactagacactgtcaatgatttgtgtattgccttgcagcagttatatctgccttccatacct

SEQ ID NO: 15760 - DNA, 406 bp, Glycine max
  Clone ID: jC-gmle01810087h04a1
acgagggattttatcctattcaaactataggagtgcctgggctctacatctcaatccagatattgacattggatgggtacaccctttagtcggagtggtcaaatggtctcatgatcatggactgctagctcgcattgcttgttcatgatcgaattagccgatcgacttgctttgacatcgtacatgaacgtacgatttcgcacatgctgcgcttgagattggtatctatccatatatgcaaactgatcctactagttctggtcccgaggcccgtgcgcttgagacagaaagtctctgctacgcatcgaccaaggagctgtgcctgtactagatgtagctatgtccccggtctagatgcctaatatatactgcgctgtgatagcacatgctcatgatactgatgtgc

SEQ ID NO: 15761 - DNA, 419 bp, Glycine max
  Clone ID: jC-gmle01810087h04d1
agttattccgatattcggacgcatcaacttgttatgaaatcacatggatagcctctactcgtgtcctagctcggctaagagctagatttgcctcaattgtgggactcttgccttccgccttattcaaattagctgctgctatttcaagagtacgctgtgcttcttgtggatcaatgtcactacccttatccgcatcatttactaaaacagggatctcattattgcatattctagcaaaaccggccatcagagccatcgctaaccattggcctttaagaagacgtattctcaaaatacctatatatacgggtgtggcaataggcgcatgattgggtaatactgcaatatgtacgctcttagtagagcaaatgagggccattcactttcgaatccgagacaattctattgggggtcagtac

SEQ ID NO: 15762 - DNA, 472 bp, Glycine max
  Clone ID: jC-gmle01810087h05a1
tgcaattgaagttgaagtcttgcccttctctcttcaactccaaacacaagacatcatcatccatggctgcctccgtctccactgtcggagctgtcaacagagctcttttgaacctgaatgggtctggacctggggtttcagctcccagttcatccttctttgggagcagcttgaaaaaggttattggctcaagggtccccaacacaaagatttcctctggaagcttcaagattgttgctgtagaagagaagaaagagattgaagagacccagcagaccgacaaggacagatggaagggtcttgcctatgatatctcagacgaccaacaggacatcacaagaggaaagggtttggttgactcccttttccaagctccacaggatgctggaactcactatgctgtcatgagcttctacgagtaccttagcactggactttggcagtacttggacaacaacatggatggatttta

SEQ ID NO: 15763 - DNA, 479 bp, Glycine max
  unsure at all n locations
  Clone ID: jC-gmle01810087h05d1
aagtggacactttaactcaaaattatagaggaagacagtccaatatgaaaaatatagtaaaatcatctcaaacttggcatcttctctttgcacctaagacattgagaattctaagaatgttacacgcaagtcccatcacaacttctagcacttggatcagcacaaccttcaggaacagaaatatttacttgccaagtttgctttgcctccaattcaagattggaagaaagttcccctgttaatagcatcctcgttagcatttccaagtgcagcctcgttcaagtacttgtcagccaattggactctcttgacattctcttgttcttggacaagcatgttaccatacgtcaagagcttctccagagtcatcttgggctgctcaaaggttggaggtccatcttttgagttcacaagcttctttccaatgccgtcaacaccaacaccagatatccacttcctcacttcgncatcatataggc

SEQ ID NO: 15764 - DNA, 522 bp, Glycine max
  Clone ID: jC-gmle01810087h06a1
tgcaattgaagttgaagtcttgcccttctctcttcaactccaaacacaagacatcatcatccatggctgcctccgtctccactgtcggagctgtcaacagagctcttttgaacctgaatgggtctggacctggggtttcagctcccagttcatccttctttgggagcagcttgaagaaggttattggctcaagggtccccaacacaaagatttcctctggaagcttcaagattgttgctgtagaagagaagaaagagattgaagagacccagcagaccgacaaggacagatggaagggtcttgcctatgatatctcagacgaccaacaggacatcacaagaggaaagggtttggttgactcccttttccaagctccacaggatgctggaactcactatgctgtcatgagctcctacgagtaccttagcactggacttcgccagtacttggacaacaacatggatggattttacattgctccagcttttatggacaaacttgcttgtcacattaccaagaact

SEQ ID NO: 15765 - DNA, 511 bp, Glycine max
  Clone ID: jC-gmle01810087h06d1
aagtggacactttaactcaaaattatagaggaagacagtccaatatgaaaaatatagtaaaatcatctcaaacttggcatcttctctttgcacctaagacattgagaattctaagaatgttacacgcaagtcccatcacaacttctagcacttggatcagcacaaccttcaggaacagaaatatttacttgccaagtttgctttgcctccaattcaagattggaagaaagttcccctgttaatagcatcctcgttagcatttccaagtgcagcctcgttcaagtacttgtcagccaattggactctcttgacattctcttgttcttggacaagcatgttaccatacgtcaagagcttctccagagtcatcttgggctgctcaaaggttggaggtccatcttttgagttcacaagcttcttcccaatgccgtcaacaccaacaccagaaatccacttcctcacttcgtcatcatatagtctggccctcagtgcaccaaagaaatcaatggat

SEQ ID NO: 15766 - DNA, 473 bp, Glycine max
  Clone ID: jC-gmle01810087h07a1
acaataaaataactactttaaaaggtttatttcttttagagaaaatataaatataaatacaacagatttctctaaacaaactaataatgttcttttgttgcgtgcgttgaaaaaaaaaaaacgatacatcgttccaatgttttttctaaagaatgtgacttgcgccttttaaactttgaaacaatgccataacatgcaaccacatgtcagttagttgctttaatggacatcttaatctcatctttgaagaaatattttaagagaaaaaagttacacaaattgtctgtaactaagtttccgatatcgtgttttgttgtttagccttttcagcctcaatcttccgtagcattgatgaactcagcttaatttcacctgattcttcagagaccaaatctacaacttcaatctttaactgtgaaaggcctctttcagctcttcttctgtttatagccattcctcccggtaatgtctct

SEQ ID NO: 15767 - DNA, 202 bp, Glycine max
  Clone ID: jC-gmle01810087h07d1
aaaaaaaaaaaaaatattataaaaagaattttttatataaaaaaaatataaaaaataaaaaatctaatattataaaaaaaaataaaaaattttttttgtggccaagaataaaaaaaaaaaaatacccataaaaaaacgatatttttaaaaaatagagtagtatctcttctaaagtatttaaaaaatcaatatttaaacaacc

SEQ ID NO: 15768 - DNA, 472 bp, Glycine max
  unsure at all n locations
  Clone ID: jC-gmle01810087h08a1
cgacaacaatgtgggattcaaggggtttgctataccaaaagatgtacaaggcaaagttgcaaaatttgatttccatgggcagccagcagagctcaagcatggaagtgttgtgattgctgcaatcacaagctgtacatatacatcaaacccaagtgttatgcttggggctggtctcgtggcaaagaaggctcacgagctaggtttgcaggttaagccatgggtaaaaacaagtcttgctcctggctctggagttgttacaaaatatctactcaagagtggcctgcaaaagtatctaaatgaacagggtttcaatattgttggatttggctgtaccacatgtattggcaattcaggggaactagaccaatccgttgcttctgctatctctgaaaatgacattgtagctgctgctgtgttgtctgggaaccgtaattntgaaggccgtgtgcatcccttgacaagagctaactac

SEQ ID NO: 15769 - DNA, 158 bp, Glycine max
  Clone ID: jC-gmle01810087h08d1
gtcaaaaaattgccttcttaagaagggatctttcctatttattgaatttattctcatttctctcacattttattaccaccactcaaaacgtgtacacgcagtggcaacatagtttaacatttcccatcagccatgacttcactgcttaatgaggttcc

SEQ ID NO: 15770 - DNA, 523 bp, Glycine max
  Clone ID: jC-gmle01810087h09a1
gcttctttcttcctcaatgcagctgtaaagcagccagatgggacatacaggactttggcaagcggtcaggtggtgcagatccacccttcttctgtattattccggcaaaaaccagagtgtgtgatatttaacgaattggtccaaactaataacaagtatgtccggaatttaaccagagttgattacctatggttaaccgagctggctcctcaatattatgctatgcacaattaaattcttgatgttgccactaaacaggttactagattatttatctgttgaaacatatcagtgcaagcctcagactatgccccgccactggtttatggatcttttcataatgactgttttttatttaaggggcttatctttggcattcggtaacttttggatgcctggtatgtggagatgccactgaatcatataatgacaagtacttctttctgggttgttatcacgttattttctcttgagcagctatggccactaagactgagggaaaagtatgtggtggtagggtgca

SEQ ID NO: 15771 - DNA, 506 bp, Glycine max
  Clone ID: jC-gmle01810087h09d1
cagactaatcatacatacaattcatattctaaaagtttaagccatgatcatctacatattagcactactaaggaattgtgcattttaaaatgggatagaaatagaattgaacttttataaacaacatgatagtctgtactcaattccgttgttcaattcaccacatcaatgaggtcacaactttaaggtgcaccctaccaccacatacttttccctcagtcttagtggccatagctgcccaagagaaaataacgtgataacaacccagaaagaagtacttgtcattatatgattcagtggcatctccacataccaggcatccaaaagttaccgaatgccaaagataagccccttaaataaaaaacagtcattatgaaaagatccataaaccagtggcggggcatagtctgaggcttgcactgatatgtttcaacagataaataatctagtaacctgtttagtggcaacatcaagaatttaattgtgcatagcataatattgaggag

SEQ ID NO: 15772 - DNA, 587 bp, Glycine max
  Clone ID: jC-gmle01810087h10a1
tttctttctcccttcttccttcacatccattgctctctcttctctcacccaacaaaaactcattccttttaagcacaatagaagaagaagaacaacaacaacaacagcagcatatctcagatatcatcatggccgttgaagcgcgccatctcaatctcttcccttctcaactcatcaccaaccggcaagtgatggattctggtgaggcgaatatgatgaacatgtacaacaacagcactccgattggtggttactcttcgtttctgccgttatccggcgccgtcacggagacggcgcttccgtcctcggttttcaaccattctctcgccaacgccggcaaatccgaaagcggcgttacctacaacaacaacaacaacaacaacaacgtttctgtttctcccatgtcgagaaagcgttcccgagataataacaacaattacggttacaacaacaacaacaacgattcattttcgtttctcgccaagacgtttctctccagatccagcagcagcaactcgacatcgagcattaatcatgcaacgcatggagaagtgagaatggagattgatgagaagaggagaagcaag

SEQ ID NO: 15773 - DNA, 514 bp, Glycine max
  Clone ID: jC-gmle01810087h10d1
atgagattgagttgagacaaagagatgattctcattaaggtcctagagtcctatcttatccaaaaattaggacatgttaacatgcacactagcagtcttataggatttacaaatgggacaaatgtggagtgaagacccacacacagtacacaagcacaaatgacggcacggcaaaatcagcacacaagactcttccttcctacagttcctgcacaacctcccattaccaccaccctccttatccttcacccctgcgcaccccgctaacgtgcgccaaccccccgtttccttttctaaaccgtcctcctcggtgctcccgcagcaggactcggcgtcgtccatctccgcgccgccgcacacggtggcgccttcgccgacgtcttcctccgccgccattccgccgcgctgcgcgagaacctgctctaaattacaccgcagagcattcgctgtggcttcgttggtttccgctatgttacgccacacctgattctccatgcagagatgcttcactttc

SEQ ID NO: 15774 - DNA, 275 bp, Glycine max
  Clone ID: jC-gmle01810087h11a1
gctccatattctgtgacaactagagggatacgcaattctacttcaagctgcaaacgaatcaagatgatgtgagattttgagtaggaagatagtctataactcaaccttacctcaccatttttgcttatttctttaccaaatttatggacataacaagattataccacatgcttcctacaatccttgctttgtgtagcctcaaagtacagtgagttttggtttggtttatatataaagctcatcttaattgagtttgtcttaaaaaaaaaaaacaa

SEQ ID NO: 15775 - DNA, 260 bp, Glycine max
  Clone ID: jC-gmle01810087h11d1
aagacaaactcaattaagatgagctttatatataaaccaaaccaaaactcactgtactttgaggctacacaaagcaaggattgtaggaagcatgtggtataatcttgttatgtccataaatttggtaaagaaataagcaaaaatggtgaggtaaggttgagttatagactatcttcctactcaaaatctcacatcatcttgattcgtttgcagcttgaagtagaattgcgtatccctctagttgtcacagaatatggagc

SEQ ID NO: 15776 - DNA, 541 bp, Glycine max
  unsure at all n locations
  Clone ID: jC-gmle01810087h12d1
tttttttttttttttttttttttttttttttttttttttttttttttttaagcagtcaaggggatccagctcaattggtttagcagggtgcgtgagttattggaaactccttgacattggctttgatttctatggataaaaaaaaaaaacccactaagcaatgatgtcaacaaaagtttggcgagctcaaatactgccattgcccaagtgggaaaaaatcccacgattacaaaccagaagttgcccgtcttagttggctcatttgtacagaattaaacacttggattcatcaaaaacgtttcttcgaaacatgcttttatatgcctatagggtagaggcaattcaaaccccaactttgttaatctttgaattgcaattcctacattccaagaacagcagcagcactaccaatccccctatagcacctagccgtaggtacaacacagcagtgagagggtttcattattagcgctgccaccattcacatgcaaagtaaaccaccaattcaatcctttcactatcaccctcttnctcgactaac

SEQ ID NO: 15777 - DNA, 516 bp, Glycine max
  unsure at all n locations
  Clone ID: jC-gmle01810088a01a1
cctagagttgatttttgcatccatcacagcacataatggcaaaccagttccccgaatctttagctcccagcgaggaggacgttcaacgcctcttggctacacaggcccacatcggtaccacccgtttggaggccgctatggagagatacgtctacaagcgtagctctgatggcgttcacttgatcaacgtacgcaagacctgggagaagctccagcttgccgccagagttatcgtcaccatcgaaaaccctgccgacatctgtgtcatctcttccagaccccagggacagagagccgtcctcaagttcgccagatacaccggtgctcacgctatcgccggacgttacactcccggttcatgtcatcaaccgtgtccaggatagattcctcgagccccggtttctcgtgctcaccgaccccagatcagaccaccagcccatcaaggagtcttcttacgtgaacattcccaccatcgctatctggcacactgactcctncatcaactacgtggacatc

SEQ ID NO: 15778 - DNA, 466 bp, Glycine max
  Clone ID: jC-gmle01810088a01d1
agagagttgattttatctttttgatccgatttaagcgactcaggttcccgaagacaacaatttactgttgggcagtggcctcagcggcctcccagttggcaccagcggaaggggctccctcagcagcccattctccctcgtgagcgggggtgttccagtcctcagcgttgtaagttccgtagatgggctcagactcggtggcctcaccggcggcggtgatctcggcagccttctcttgctcggcttgctcctcggggttgcggaagaggaaaaggtcaaccatgacgtcccagggggagccacgggtgatggtgttgcggaggtagttaacctcacgtgcaagcaaccaccacatcagaccgatagcctgaggagacttgttgttgcaaggaatgacgatgtccacgtagttgatgggggagtcagtgtggcagaaagcgatggtgggaatgttcacgtaagaaga

SEQ ID NO: 15779 - DNA, 540 bp, Glycine max
  Clone ID: jC-gmle01810088a02a1
cggctcgagcttggaataactggtcctgagggacatgctctttcacggcctgcagtgttggaaggagaggcaactgcccgtgctattcgtttagctgattttgtgaacactcctttatatgtggttcatgtaatgagcattgatgcaatggaagaaattgctaaggcccggaaatcaggacaaagggtaattggagagcccgttgcctctgggttagcccttgatgaatcttggctttggcatcctgactttgagactgctgcaaagtatgtcatgagtccccctattaggaaacgaggacatgataaggcccttcaagctgccctttcaacaggagttttgcagctggtaggaactgatcattgtgcctttaattccacccagaaagctcttggaattgatgacttccggaaaattcctaatggtgtcaatggtattgaagaaaggatgcatttggtatgggatatcatggtggaatctggccaatatctgtcactgactatgtctcgttgacaagcactgaatgtgctagaatcttca

SEQ ID NO: 15780 - DNA, 355 bp, Glycine max
  Clone ID: jC-gmle01810088a02d1
aaaaaaaaaagggaaatgtaaaaaaaggggggaataaaaaaaaaaaaaggggggggaaaaaaaaggaaaaaaaaaaccgggaaaggggcccccaaaatgggggggggccaaaaatgggggggggcaagtttttaaaaaaaggggggggggttttaaaaaaaaattaggggggaaaaaaaaaaaaatcctgggggggaaaggggcccaaaaaagccccctttttttggggggaaaaaaaaaagggggggggaaaaaaaaaaaacacccttttttttaaaaaaaaaagggggggaaaaaaaaaatgttgggccccccgccctaaaaagggggacattttcccaaagggggttaaaaa

SEQ ID NO: 15781 - DNA, 534 bp, Glycine max
  Clone ID: jC-gmle01810088a03a1
ctcccccttttatttgaggaggttgtttgagcgcatgggtgcaacctatatcaaattgggtcagttcatagcatcagcgccaacgctgtttccacctgagtatgtacaagaattccaaaattgttttgatagagctcctcctgttccttttgaggaaattgaatctatattgcgcaaggaattaggaaagccattagaaagtgtttatgaatacattgacccaacacccattgcttctgcgtctatagcacaggttcatggagcaaggctaaaaggctctagggaggatgtggttataaaggtcttaaaacccggaatagaggacatattagtggcagatcttaattttgtttatgttgttgctaggatattggagttcttgagtcctgaaataagccgaacatcactggttggtattgtcaaagatatacgtgagtctatgcttgaagaagttgacttttacaaggaggctgcaaatattgaggcttttaggagatatttagaaacaatgggacttactgggaatgcaacagc

SEQ ID NO: 15782 - DNA, 470 bp, Glycine max
  Clone ID: jC-gmle01810088a03d1
aatagtgaaggaatattctattaaggatgttgaattccatcccgagaacttgcaaagaaatgtcccaaccaaatgagcttggctctcacatgacaactatggattattttatttatataccaaagtaatcatacaaataaaatattttgaactaagatggggtacatctagattttgtgtaccaactccttaaaaattgtctctataccctgcttctgctattggaagcactggaaatcctctgatcctgaagcatgttcaagttgggagccagcaaccgtgtgtaccggtcaaagtacaagagctgtttcaggagaagagcaaattctctatgaaacttcaatccatatgattcactaacccgaaccacatcaagaaagagtgcattcatctgcctctcatcaacaactatattagcagcaacagcagttgcatttgtggctggttcagttgtagttgctacaactatt

SEQ ID NO: 15783 - DNA, 524 bp, Glycine max
  unsure at all n locations
  Clone ID: jC-gmle01810088a04a1
ctcccccttttatttgaggaggttgtttgagcgcatgggtgcaacctatatcaaattgggtcagttcatagcatcagcgccaacgctgtttccacctgagtatgtacaagaattccaaaattggtttgatagagctcctcctgttccttttgaggaaattgaatctatattgcgcaaggaattaggaaagccattagaaagtgtttatgaatacattgacccaacacccattgcttctgcgtctatagcacaggttcatggagcaaggctaaaaggctctagggaggatgtggttataaaggtcttaaaacccggaatagaggacatattagtggcagatcttaattttgtttatgttgttgctaggatattggagttcttgagtcctgaaataagccgaacatcactggttggtattgtcaaagatatacgtgagtctatgcttgaagaagttgacttttacaaggaggctgcanatattgaggcttttaggagatatttagatacaatgggacttactggga

SEQ ID NO: 15784 - DNA, 437 bp, Glycine max
  Clone ID: jC-gmle01810088a04d1
aatagtgaaggaatattctattaaggatgttgaattccatcccgagaacttgcaaagaaatgtcccaaccaaatgagcttggctctcacatgacaactatggattattttatttatataccaaagtaatcatacaaataaaatattttgaactaagatggggtacatctagattttgtgtaccaactccttaaaaattgtctctataccctgcttctgctattggaagcaatggaaatcctctgatcctgaagcatgttcaagttgggagccagcaaccgtgtgtaccggtcaaagtacaagagctgtttcaggagaagagcaaattctctaggaaacttcaatccatatgattcactaacccgaaccacatcaagaaagagtgcattcatctgcctctcatcaacaactatattagcagcaacagcagttgcattt

SEQ ID NO: 15785 - DNA, 517 bp, Glycine max
  Clone ID: jC-gmle01810088a05a1
gatccatatcaggccttacgagtttttgagagcatacgaaggtaccaaagacgaggagacaggtgaaagggcttcttttgatctcaacaaggcatattcaagctgtgacctttttcttctaagaacctccagagagcttgaaggagactggttggattatcttgctggtaattacaaggttcctgtggttccagttgggttgcttccaccatccatgcagataagggacgttgaagaggaagacaataaccctgattgggtcagaatcaaggattggttagacacacaagagtcgtcatccgtggtttatattgggtttgggagcgagttgaagctgagtcaggaggacctcactgagttggcacatggcattgagctttcaaatttgcctttcttttgggcattgaagaaccccagcttaagatcttggctcatggagcaattggagggtgcatgagtcactgtggctctggctctgtgattgagaagggtcattttggcacgtgcttgtgactct

SEQ ID NO: 15786 - DNA, 278 bp, Glycine max
  Clone ID: jC-gmle01810088a05d1
aaatattatgttttaaaaaaaaataaataataaaaaaattagaaaattaaagacaaagaaaaacgttatgaataaatacaaagaactagaaccaaagcaaaataaaaagaaaaagaaacagaaaccggatcagaaaaacaactaaagaaaaacacaaagaggacaagaaagctgccagctggacaacggtaaaccctgcaggagccctagatgataagcaaagacccggggaaacaaacccgatgactaaaggacgaaaccatcacaccaacagaaac

SEQ ID NO: 15787 - DNA, 460 bp, Glycine max
  Clone ID: jC-gmle01810088a06a1
tgcaattgaagttgaagtcttgcccttctctcttcaactccaaacacaagacatcatcatccatggctgcctccgtctccactgtcggagctgtcaacagagctcttttgaacctgaatgggtctggacctggggtttcagctcccagttcatccttctttgggagcagcttgaagaaggttattggctcaagggtccccaacacaaagatttcctctggaagcttcaagattgttgctgtagaagagaagaaagagattgaagagacccagcagaccgacaaggacagatggaagggtcttgcctatgatatctcagacgaccaacaggacatcacaagaggaaagggtttggttgactcccttttccaagctccacaggatgctggaactcactatgctgtcatgagctcctacgagtaccttagcactggacttcgccagtacttggacaacaacat

SEQ ID NO: 15788 - DNA, 447 bp, Glycine max
  unsure at all n locations
  Clone ID: jC-gmle01810088a06d1
aggacaaaaggaaaaggcaccaaattcaatttaagtggacactttaactcaaaattatagaggaagacagtccaatatgaaaaatatagtaaaatcatctcaaacttggcatcttctctttgcacctaagacattgagaattctaagaatgttacacgcaagtcccatcacaacttctagcacttggatcagcacaaccttcaggaacagaaatatttacttgccaagtttgctttgcctccaattcaagattggaagaaagttcccctgttaatagcatcctcgttagcatttccaagtgcagcctcgttcaagtacttgtcagccaattggactctcttgacattctcttgttcttggacaagcatgttaccatacgtcaagagcttctccagagtcatcttgggctgctcaaaggttggaggtccatctttngagttcacaagc

SEQ ID NO: 15789 - DNA, 372 bp, Glycine max
  Clone ID: jC-gmle01810088a07a1
aaagcgttggccatggcaaacatgattgtggcttccaccaaacctctggttccagtctgcaccagttcccgttcccccacacccaaagtgcccattctccaaatttcactccccaaagccccaaccttgaaactgaaactcccgatttcaaagccccagacgctgtccctgcttggagggatagcaccactggtcttgggcaaaccttccttggatgagaaattggaaaaagcgggtctcttggtcttaaacctaacccttccaatattaaggggggagtttctgctgaagatggttgccttggacaagatatgtctcaccccgctggggaaattcatggacgagagggacgcggcgatcagggagaagctg

SEQ ID NO: 15790 - DNA, 417 bp, Glycine max
  Clone ID: jC-gmle01810088a07d1
aacctgaatctcggattttacattgaaaagtattgcgattacagaatagacccattcaaaagtggaaactgtgaatcctttggtgaggggattgaaatgaaaattacacagacatattaagcagtgggaagaaccttattaacaatctcctggctaagggctgcgatctgggaatcaagggacttgatggtttcttccttttgattctccaaggcagccagagccttctgtagtatatacttcagtctattcctcccctcagcaatcttttgttccacctcagcctgcgtgtccttcttgatcgtgttcagcgccgccgctatctcggcccgagaagccgccatgacagcattggccttctcctacagctgcttcacctcctccgacgtgtccttcacgctgctcagcttctccctg

SEQ ID NO: 15791 - DNA, 510 bp, Glycine max
  unsure at all n locations
  Clone ID: jC-gmle01810088a08a1
caactacaaaggttgctgtaggagataagatattgaagtagtgctaagtgcctaacacctgcagtgaacaatggcctctgcatcagcatctcttctcaagtcttcacttgttcttgacaagtctgagtgggtgaagggacaaacacttcgccaaccttctgctgcatcagttgtgagatgcaaccccaccaccccatcaggcctcacaatcagagctggttcctatgctgatgagctcgttaagaccgcgaaaacagtggcttcaccagggaggggtattttggccatggatgagtccaatgctacctgtgggaagcgtttggcttcaattgggctagagaacactgaagctaaccgccaggcgtaccgtaccctccttgtgacagttccaggacttggtcagtacatctctggtgccattctctttgaggaaactctctaccaatccacaactgatggcaggaagattgttgacgtgctcctcnaacaaaacattgttcccggtattaa

SEQ ID NO: 15792 - DNA, 450 bp, Glycine max
  Clone ID: jC-gmle01810088a08d1
gattgccgagattcaaccatgttatattgagacaatcaatcaagtacacaactcacagcaaaaaggtttataagctgtaaaggtacatgtaaccataaacaaaaatagtctccaagactataaaaacattacattttagacaaattagtcttcttccacttcatcctccgtcaacacctactacaactgctggtgttgctgctgcctaacatgtatcatattcactacaaacattttagtaggagtagcctttgacgaacaactccttcttggcttcctcagattcaccctcaccggtgtacttcccaagctgggcgagcgagttggacttggcacggaaaagaagtgcattttgtgccgccttcacattctctgggcggcctccccatgtcttcaaggcaatgttttggagggctctggcatacgagaaccacacgtgccacgggtttg

SEQ ID NO: 15793 - DNA, 195 bp, Glycine max
  Clone ID: jC-gmle01810088a09a1
cgcctgcaatcacaccatggcgacaacattagatcacgacaagctctccgatgaacaccaacagaccgagaatgtcgaggagaagatctcgccttcatcgggcagaggtgagctggaaacgcataatatggatcttgaggagaaggaagctgcacgtgtgctgagaaaggtggatatgagactcgtcccaatgct

SEQ ID NO: 15794 - DNA, 291 bp, Glycine max
  Clone ID: jC-gmle01810088a09d1
agaccatcaaaaaagatatcgctccttttaattgcggcattcaaaaggatgcggctacgctaaacacctctgatcggatttatggctccaagggatgggtaaccgttccacttactctagccaaaacatgggctctaactggcaagcctatgttcctgggatacattgtcatgaaaaatccctaatacacattcctggcaaacgcctccccatgttttcaaaattcttgacatgggtaagacgtatgtaccacacatggcgcatctaactttgagacacaagttaaccttg

SEQ ID NO: 15795 - DNA, 428 bp, Glycine max
  Clone ID: jC-gmle01810088a10a1
tgcacgcatagatagacattcacatcgatgcctcgatctacgctacgtaatcggctagagaaaggtctgggcagaggttttcttctaccttgctgagaacaatgtcctttttgagggtattctccttaagcctagcatggttacacctggagccgaggccaaggacaaggccagtcctcagacagttgctgattacaccctcaagttcctgcacaggagaatcccgcctggtgaccctggaattatgtttttgtctgggggacaggctgaggttgaagctaccctcaatttgaatgccatgaaccaatctccaaacccgcggcacgtgtaattctcgtatgccagagccctccaaaacactgtcttgaagacagggggaggccgcccagagaacgtgaaggcagcacaagatgcactctctttccgtg

SEQ ID NO: 15796 - DNA, 347 bp, Glycine max
  Clone ID: jC-gmle01810088a10d1
gccgagcttaaaccattttggtatatattgagacataatcaagtacacaactcatagcaaaaggtttattaagctgtaaaggggcatttaaccataaacaaaaatagtctccaagactataaaaacattacattttagacaaattagtcttccacttcatcgtccgtcaacacctactgtaactgctggtgttgctgcctaacaagtatcatattcactgcaaacatcttagtaggagtagcttttgacgaacaactccttcttggcttcctcggattcacccttaccagtgtacttcccaagctgagcgagtgagttggacttggcacggaatgcgagtgcatctt

SEQ ID NO: 15797 - DNA, 345 bp, Glycine max
  Clone ID: jC-gmle01810088a11a1
ggacaaggagggaatccccccagaccagcagaggctgatcttcgccgggaagcagctcgaggacggacgcacccttgctgactacaacatccagaaggagtcaactctccacttggtgttgcctcttcgtggtggtatgcagattttcgtgaagattcttacgggtaagactattaccctcgagggggagagctctgacaccattgacaatgtgaaggccaagattcaggacaaggaaggcatcccaccggaccagcagaggctgatttttgctggcaagcacctcgaggatggaaagacccttgctgactacaacatgcagaaggaatcaacccttcaccttgt

SEQ ID NO: 15798 - DNA, 460 bp, Glycine max
  Clone ID: jC-gmle01810088a11d1
gggatattagagtactattattaatgggacacaattgagttcaacacaaaccgaacttattttcaagggacattattacagacccattaaacatcaaagttcttcaaatgttttgggaacacatccaacattacacaacgagcttaaaaccccccacggagacggaggacaaggtgaagggttgattccttctggatgttgtagtcagcgagggtccttccatcctcgaggtgcttgccagcaaaaatcagcctctgctggtccggtgggatgccttccttgtcctgaatcttggccttcacattgtcaatggtgtcagagctctccacctcgagggtaatagtcttacccgtaagaatcttcacgaaaatctgcataccaccacgaagacgcaacaccaagtggagagttgactccttctggatgttgtagtcagcaagggtgcgtccgtcctcgagct

SEQ ID NO: 15799 - DNA, 321 bp, Glycine max
  Clone ID: jC-gmle01810088a12a1
ggacaaggagggaatccccccagaccaggacaggctgattttcaccgggaagcagcttgaggaccgccgccccctttctgactacaacatccagaaggagtaaactctccactgggtgtctcttcttcgaggtggaatgcagatcatcttgaaaattcttacgggtaagactattacccgtcaggaggagagctctgacaccattgacaatgagaaggccaagattcatgacaaggaacgcatgccaccggaccagcataggctgatttttgctggcaagcaccctgaggatggaaggaccctcgctgtctacaacatcca

SEQ ID NO: 15800 - DNA, 492 bp, Glycine max
  Clone ID: jC-gmle01810088a12d1
gggatattagagtactattattaatgggacacaattgagttcaacacaaaccgaacttattttcaagggacattattacagacccattaaacatcaaagttcttcaaatgttttgggaacacatccaacattacacaacgagcttaaaaccccccacggagacggaggacaaggtgaagggttgattccttctggatgttgtagtcagcgagggtccttccatcctcgaggtgcttgccagcaaaaatcagcctctgctggtccggtgggatgccttccttgtcctgaatcttggccttcacattgtcaatggtgtcagagctctgcacctcgagggtaatagtcttacccgtaagaatcttcacgaaaatctgcataccaccacgaagacgcaacaccaagtggagagttgactccttctggatgttgtagtcagcaagggtgcgtacgtcctcgagctgctttccggcgaagatcagcctctgctggtct

SEQ ID NO: 15801 - DNA, 466 bp, Glycine max
  Clone ID: jC-gmle01810088b01a1
cgacaccttggtagagagagagtgaattaggaattaggaaacgttcgaaattgggtcgtaaattaatgggttgagccgagttggttggtggaaggaagaaataaagaaatcaacaaaggcagacaaagagcttaggaaaagaagaataagaatggcgtggtgagaaagatgaaggtccgttcggaaagggaaaagacgaaagttgtgattaggcatttgtccccttctctcactctatccgatttcttcccaacacatcgattctcacttcgatattcgctacaattggttctccttccgtcccagcaacaacagtcacaagcgtcagatgcattcccgagcctatatagacttcaagtgtcccgatgacgttttcgagttcaccgagttctttgatgggcacgtttttgttaacgagcggtgtgcccagtataaagtgatagttgagtatgcaccttctcagcgt

SEQ ID NO: 15802 - DNA, 516 bp, Glycine max
  Clone ID: jC-gmle01810088b01d1
atgcagacccagaaacattacatgcataccactgtcagcagcaggtttctgacgaatatattccatcaggggtgtgacaataggtgtttccttgctggccccgggaaaagatacaatataagaatgaggccaatgatactgaaatttgtcttcagataaatcctcatgaccacatttagcctagaagccagtactaagatcctctaaaacacatttaacaatagaactaatgtagaaacaacatacaccaccataacattaggcaatggcagatgagcacataatgtcagagacagaaaagtgatcatggtgttggttctaatgcttatttatcaattcactttgaaataagtgtaaatcaaatacagttggtgaacaaataactaaccagcttgctcagcttcttttctttccaattggatctctgcactaggaagatgctcttgaggttttgcaattagtttgagggactcaagataatttgatctgtcttatgaaatttaaaaaaataaatat

SEQ ID NO: 15803 - DNA, 327 bp, Glycine max
  Clone ID: jC-gmle01810088b02d1
aaatggaataaaaaaggccaaatttaaaacaattaaaagtttggttaaataaaccggaacccaaaaaaaaaaagggggattccttgggccttagggtcccaaagggggatccccatgaaaaggtaaatcctggtgggggacctacccctttggtaaaaggaaaattggtctgttaaaccttttagcccaaatgcaattaaatgccaagggggctaattcttaaagcctaaatgggggggccccaaaaaagggccccaaacccccgggatgaaaaacccaccccataaaatttcaagggggccccccaatatatatagggcaccccaa

SEQ ID NO: 15804 - DNA, 386 bp, Glycine max
  Clone ID: jC-gmle01810088b03a1
ctcccccttttattagaggaggtggagggagcgcatggctgcgacctatatcatagcgggacagtgcatagcgtcagcgccaccgctgctcacaccgtgagaggtacaacatttccatatgagataagagagacctgctcccgttccttaggaggaaatcgtgtctatgttgcgcaaggaattccgaaagcgattggaacgtgattgtgactacatagacccaccacccattgcgttggcgactatcgcacaggttcatggagcaaggctaagaggctcgagggaggatgtcttctaaaggtccaagacccggaatagaggacatattagtggcaggtcctaaccatgttcacggtggtgctaagctatcggagttctggagtact

SEQ ID NO: 15805 - DNA, 333 bp, Glycine max
  Clone ID: jC-gmle01810088b03d1
catacagttggaatattatatcaacgatgttgagtggcatgccgagaacttgctaggcagtgcttcctccacatgagcttgagctcttacatgactaactatgagattaatcatatcgatctaccaaaggaatactccaaatccagtatatgcaactgatatggggttcatagaagattttgcgtaccaactgcttaacaattgacgctataccctgattctgctatgggaagccaaggtaatgctaagatcctgaagcatgttcaagtcgggagcctgcaaccgagtgtaccggtcgaagctcaagagctgtgacaggagaagagcccactc

SEQ ID NO: 15806 - DNA, 461 bp, Glycine max
  Clone ID: jC-gmle01810088b04a1
cttccattaacgggtggtgcctctcttccatctccccagccaaaacctctctcaagaaggccacattaggcccttctgtcttcgcaaccgttagcactccttcttctccttcttcttcttcttcttcttccttcccttctctcattcaagacaggcctgtctttgctgcccctgcccccatcatcaccccaactgtgagagaggatatggcaaaggaatacgagcaagctattgaagaactccagaaattgttgagggagaagagtgaactcaaagccacagctgctgagaaagtggagcagataacagcttctctgggaacatcatcatctgatggcatcccatcatcagaagcctcagacaggatcaaagctggtttcattcacttcaagaaggagacatatgacaagaatccagctttgtatggtgaacttgccaaaggccagagccccaagtttatg

SEQ ID NO: 15807 - DNA, 507 bp, Glycine max
  unsure at all n locations
  Clone ID: jC-gmle01810088b04d1
aactgcaatgcgactgtatttaaaactttgaatcttcatacaatttagcattgcttatataattaactaagattaatttgtcatctctctcggtgttgcgggctatataaagatcaaggttgaataatgaaaattttgttacaagaggatttccaaactcttatcaaaagaagattttccgacatgcataaacgcagttcatagtttcatatatatatatttttataaatatcatatggtgatgaaggtggctaggcctcttcattgcagatacacacgacctctaagcatggcccctatagcttccaatgcagaatggtggccacatctttaacttagggaaccaagatgaggtcattgataatggttgatgttcatacggagaaagaggatgcaaggccaaactgaaggccccagagctcaaaagatcccttaacaaagtcatagtatcctccttttagtgacaatgtctngttcaccaagccatctttaacaaatgggatgtta

SEQ ID NO: 15808 - DNA, 513 bp, Glycine max
  unsure at all n locations
  Clone ID: jC-gmle01810088b05a1
cctttattcatcttcacatatatctctcagctggctgaggcataattcttcttatccgtcaacatacccacattgtcactcacgacatcgagcagcgctcattcacactctttaaccctaccttacccatttagccgagatccgcaatgccttccatcaaatctttcgctgccgtcactttggtcgctttgttacctgctgtgcggggacatatggccatctgggatccatgcgtatatggagtcaacgatggggacagtaacgtccctcccctcgctggaatgtcttttgaccaatggtggttccacggtaaaatcaatgataaaccatcctcagtctgtacactcgttccaggcggaaacatcaactttgaaatctcatgttccaaatggcacacttcactcaccggaaacactggaaccgacgcttgtccaaatgacgctggcgcttatcacgctggaggaactacaggangtcaatccggttggngggggaataacgaggacaatttac

SEQ ID NO: 15809 - DNA, 584 bp, Glycine max
  Clone ID: jC-gmle01810088b05d1
cgtacgcatgcatccacctgggagctacgtaacatagataaacctatcataacccctaagccttggtgtgagccctgctcctcttcttgtgtcctcgcttcctgtttcggttcctcttttgctttcgagtgcatccctcgtttccaccagttccggtcgatccggtggggctggccgcaccgccggttggggacgcagcgtagactggccagttggggtcgttgacggtagaagtggtgggtcgaggtcgtcgtcgtcgagaggatgtggaagagggtgaccagtcaccttgtccactggcggaagttggaccggattgaccattggtggtggtttcgttgactggtgcgggagagtttcctcctcctccggcaccgaaagcaccagtttgagcaccgtttgtccatccccaagcagagttgtaagatggtttggtagcccattcgggagagtaaccgacattgttgatatcgttcgcccaatacatgggttgagtaggaccgtcgatcttcccctttctaggttcgacaggttgagggatagcacccgtggttcccgcctgaacgtacatctgaaagcgtcat

SEQ ID NO: 15810 - DNA, 556 bp, Glycine max
  Clone ID: jC-gmle01810088b06d1
gccgccctttttttttttttttctatttttttttttttttttttctattttcattcgaattcattttatttatatattaatattatattcaaatgaaataaaaagatatgaaaagatactaattataagaatttgaaagtgaaattataaagttattaaatgattaatcaatttttttctacctgttcctgtagtaaaaagagttccatctgttcttgaatagcttccttcaaaaggacttctgcttccccagtgaatgtcttggtagaagatatgatttctttgaattgaggtttattcgtgtttaagtaagcacgtaactcaacaagaaatttccttacctgtccaatttctaatgaatcaagataaccattcgttccagtataaatagttattatctgttcttccacggtaagaggagctgattgggattgtttaagcaactcgcgcaatcgttgacctcttgctaattgattttgagtagctttatcgagatcagaagcgaattgcgcaaaagcttctaattctgcgaatcgtgctaattccaattttaatt

SEQ ID NO: 15811 - DNA, 369 bp, Glycine max
  Clone ID: jC-gmle01810088b07a1
gtggtaaaacctttcacttctgttatcattttctctcttctgccttatcttcctcagtttccactcatcaagtttcaatcttcctttgaataagcccaaatttgattgtatgaaccagcagctttttgctggtgcaaaatcgaatcgttgaactgggaaagtataaccctgtgttatcctacaccttgcactccaaactccaacaccaattggttggtgatggaggataataatagcaggagcacaaaatggacctctgtagagaacaagctgtttgaaaatgctcttgcagtgcatgatatggacaccccagatcggtggcacagagtggctgagatgattcctggaaagacagtggttgatgtgata

SEQ ID NO: 15812 - DNA, 583 bp, Glycine max
  Clone ID: jC-gmle01810088b07d1
gcgatctataaccacgatgctgaatttccttaatttttctcttctattgacgctgatggggcttctgtggaagcctgccattcgcaggatctgatgttcggttcagtgtggacgcgttcgcattcaatctccattctacctttaaaacaatgctgccgtgaatcacaccaccaccgtctattcttctgggttcgatctgctatgtacggatgcagatgatactgtgctggagctgccttgtgttccaataaaactgtttgtcaaaagcatagattacaagttgcagcaaatccaaatctacgaccctcaaaattgccttcccagggaactcataaaactcggcaattcctctgttgctccatttaaattccaatcatttggtgggaataatgtttccttcttgcgctgcaactcaatgtcatcatcatgcccaattttgcaactcgcatatgatgaaggtgactttattgatcctgaaataatatcttgcaccaaggtgagtgatgttttctccgtccagtggcaagtgaataatcacttggcgaacgcggtggttatggaatggtccaagcctgactgcagt

SEQ ID NO: 15813 - DNA, 556 bp, Glycine max
  Clone ID: jC-gmle01810088b08a1
tgtcaataacaatagagataacagagcagggtcacagagactagaaagagaacagaagcgagcaggggctttgctagaaaatgctgaaagatgcctgaatacatgttggagaaaagtgagtgtttgtccagaggatgatataaaggattagagagaaccgaacagagcaggttgcagaggtgggtaggaaaatgctggaaatcatcagagaagaacggtgtttgtccagggagacaacacaaaattaggtcactgaaagcatagggtttcagtttgaaccttttgctttaatgaaaggggatgagaaattatgtgtctgccccctaaacagctgtaaatgatgttatttactgcggcgaaattggatttttgttgctgttacctgtcataccacctgcatgttgctacacaaaccactatagtggtggtgaccgctgcattgccaagctgtaatgcagattcttctctgtagcgtcaaattgtgtgacagtgacaccatgccatgatagtggcatgatctaacactattgacatctgtggatttgtgtgtagtatg

SEQ ID NO: 15814 - DNA, 572 bp, Glycine max
  Clone ID: jC-gmle01810088b08d1
aaagatcggaccaacaacatgcttgcatggatactcaggctcgctgcagaccatttgtattcagtgtaatacgtaattaaaaaacaaaaaacaccatatacaaaaggaaacaaacttgtcttatggaaactatgtatctaggcattttcccatcagatacataactaacaagaaggtcttacaaacaaccccaacacatcactgttgcacacaaccactcaaaaaataacacctccaaaattaaaaacaataaagaaaaaataaatgaaggcacgtgagattcagatgaatgtgagcttggtgcttccctaaacgcactctccataactaacacacaaatccacagatgtcaatagtgctagatcatgccactatcatggcatggtgtcactgtcacacaatttgacgctacagagaagaatctgcattacagcttggcaatgcagcggtcaccaccactatagtggtttgtgtagcaagatgcaggtggtattacaggtaacagcaacaaaaatccaatttcaccgagtaaaaacatcatttacagctgttaaggggcagacacatatttc

SEQ ID NO: 15815 - DNA, 410 bp, Glycine max
  Clone ID: jC-gmle01810088b09a1
gggtggtgcctctcttccatctccccagccaaaacctctctcaagaaggccacattaggcccttctgtcttcgcaaccggtagcactccttcttctccttcttcttcttcttcttcttccttcccttctctcattccagacaggcctgtctttgctgcccctgcccccatcatcaccccaactgtgagagaggatatggcaaaggaatacgagcacgctattgaagaactccagatattgtggagggagaagagtgaactcaaagccacagctgctgagaaagtggagcagataacagcttctctgggaacattatggtgtgatggcctcccatcatcagaagcctcagacaggatcaaagctggtttcattcacttcaagaaggagaaatatgacaagagtccagcttt

SEQ ID NO: 15816 - DNA, 464 bp, Glycine max
  Clone ID: jC-gmle01810088b09d1
gcgggctatataaagatcaaggttgaataatgaaaattttgttacaagaggatttccaaactcttatcaaaagaagattttccgacatgcataaacgcagttcatagtttcatatatatatatttttataaatatcatatggtgatgaaggtggctaggcctcttcattgcagatacacacgacctctaagcatggcccctatagcttccaatgcagaatggtggccacatctttaacttagggaaccaagatgaggtcattgataatggttgatgttcatacggagaaagaggatgcaaggccaaactgaaggccccagagctcaaaagatcccttaacaaagtcatagtatcctccttttagtgacaatgtcttgttcaccaagccatctctaacaaatgggtatgttagaaggtttccaagggaaacattcacagcttccttctcacagtgtgagcacaac

SEQ ID NO: 15817 - DNA, 325 bp, Glycine max
  unsure at all n locations
  Clone ID: jC-gmle01810088b10a1
gcattcttaacacctactacctcactcactcatcaatggcatcaacaatatcagcaatggccatgatcaacgccaaatgcgtcaacccaaagttccccaaccccaccaagctcgtaccatcaaaaccttcccttcaggtcaaccttgcaaagggcctaatagcctcacccgaaaacaccaaactttccactgcgacagcaatcgcaggagcaatattcacaaccctcggaacctgcgacgccgctttcgccgttcaacaaatagccgacatagcagaaagcgacaaccgcggtctggcactgttgctgnccataatttctgcaat

SEQ ID NO: 15818 - DNA, 415 bp, Glycine max
  Clone ID: jC-gmle01810088b10d1
acatgaaaactattagtatgatcatatgatgataattgatatcccacagcatttaattaagccccttccctatttaaatttcacaaacattaaatcactgggatctcatcctgttgagctggttaagagcaggctgcaagatgttgtaaagaacccaagcaattgccggcgtaaccacacacaggagacgctgccccctggtgtcgttcgaggcagcttcagccatcgccgccacttcagaagccgccgccgtcgatgcatgcggcgcagccaccaagccagccaagccgccaagccccaacccaatgatcacgcctttggtgctgcgcatgcggttcagttggttcagcgccggctgcagaatgttgaacagaacccaccctattgcaggaattatgggcagcaacagtgccag

SEQ ID NO: 15819 - DNA, 444 bp, Glycine max
  Clone ID: jC-gmle01810088b11a1
agcaaaacaagataagtgctatattgttgaaactctcatcaagccaagtggagaagctgaagaagaaggctaatgaacaaccttcaaaagaaggggtaagaccttatagcagatttgaagctatttcttctcatatatggagatgtgcatctaaggctcatcacgctcatgcatctgatgagaatcaccaaccaactgtagttatgtttagtgttgatattcgcagtagattgaatccacctctccctcataattattttgggaatgctttggcaaaaacagtgacacctaagtgtagtgtgggagatatcttatcaaacccattaagctatggggctcaaaagataaaggatgcggtttatgcggttacatatgagtttataaggtcacacttaagtgttgttttagggcaagagcaatttgataacataatggcttctttct

SEQ ID NO: 15820 - DNA, 353 bp, Glycine max
  Clone ID: jC-gmle01810088b11d1
gagaaaaaagcccttatgttatccaattggtcttgccctaaaacaacacttaagggggaccttataaactcatatgtaaccgcataaaccgcatcccttattttttgagccccatagcttaatgggtttgataagatatctcccacactacacttaggggtcactgtttttgccaaagcattcccaaaataattatgagggagagggggattcaatctactgggaatatcaacactaaacataactacaggtggttggggattctcatcagatgcatgagcgtgatgagccttagatgcacatttccatatatgagaagaaatagctttaaatctgctataagggcttacccc

SEQ ID NO: 15821 - DNA, 460 bp, Glycine max
  unsure at all n locations
  Clone ID: jC-gmle01810088b12a1
gtttcttacaaggctctactctactgcttcaccttctgctctagaaaattcagtggtgatacatggcttcggctactctctctgtagccaaaccagcccttcaggcaaatgggaaaggcttctctgaattctctggcctccgcagctcatcaggcttccttcccttttatagaaaatcttcagaggatttccattctgtcattgccttccagacctatgcagttggaagcagtggaggatacaagaagggtgtgacagaagcaaaactgaaggttgccataaacggatttggaaggattggaaggaactntttgaggtgctggcacggtcgcaaagactcccctcttgatgtcattgccatcaacgacaccggtggcgtgaaacaagcctctcaccttctcaagtacgattcgatcctccgaaccttcgatgctgatgtcaagccctgtggcagcgacat

SEQ ID NO: 15822 - DNA, 475 bp, Glycine max
  Clone ID: jC-gmle01810088b12d1
caaggtaagaattttattgcacaatgagaaggcagagaaaattgatggttctgtttctcagtacaagttttagaatgaaaaatgaagcaacaagtgtttgtagtggtagtagtagtagtagtaagcatacaaaactacaatggcatggtacatacatataataattgaattaccaattcagaatttgatggctctcacttccacttgttggcaacaatgtcagccaaatccacaaccctttgggagtagccccactcattgtcataccaagcaatcaccttaaccatgtcatctcccatgaccatggtcaacgatgagtcaacggttgaggacacatcagtgcacctgaagtcaacagacacaagtggctcatcacacacagagaggattccctggagctcattgtctgcactctctctgaatgctgcattcacttcttctgcaaaggtcttctttgagacctgaacaacgaggt

SEQ ID NO: 15823 - DNA, 514 bp, Glycine max
  unsure at all n locations
  Clone ID: jC-gmle01810088c01a1
gtgatggctttgaatttgccttctcccgcccaagtgaagcccttatttttctcttcaaataactccacaaaacttccaggtagcttttctttgaagagaaaagatagtgacacaacagtagagagacgagtttattgctctgccgctgctcaatcaccaccaccagcatggccaggaacagctattcccgagccttctgatttcaagacatgggatgggcaaaaacctatttctgtcttaggatctacgggttcaattggaactcagacactgagtatagtggctgagttcccagaaagatttaaagttgtgagccttgctgctggctctaatattactcttcttgctgaccagattaaaacatttaagcctgaagttgttggtcttagaaatgagtctctaattgatgaactcaaagaggctttggctgatgtggatcacaaacccgaaatcatccctggagagcanggagtcattgatgccgctcgtcaccctgatgccaccactgtagtta

SEQ ID NO: 15824 - DNA, 157 bp, Glycine max
  Clone ID: jC-gmle01810088c01d1
tttttttttgtttttatttttttttttttttttgggtttttttttatttattgattttgggcataggttttttaacattttattagcaccacttttaacgtagtctggcagtggcttcatagtcgagcaggaccctatagtcaacacctctaggggg

SEQ ID NO: 15825 - DNA, 447 bp, Glycine max
  unsure at all n locations
  Clone ID: jC-gmle01810088c02a1
ctgatggcaggaagattgttgacgtgctgcttgagcaaaacattgttcctggtattaaagtcgacaagggtttggtgccccttgcaggttccaacgacgagtcatggtgccaaggtttggatggtctagcctctcgctcagctgcatactacgagcaaggtgcccgtttcgccaaatggcgtactgttgtgagcatccccaacggtccctctgctctggcagttaaggaagcagcctggggtctggctcgctatgctgcaattgctcaggacaatgggttggtcccaattgtggagccagagatcttgcttgatggggagcatggtattgatagaacttttgaagtagcccaaaaggtctgggcagaggttttcttctaccttgctgagaacaatgtcctttntgagggtattctccttaagcctagcatggttacacctggagccg

SEQ ID NO: 15826 - DNA, 556 bp, Glycine max
  unsure at all n locations
  Clone ID: jC-gmle01810088c02d1
gccgagcttaaaccattttgttatatattgagacataatcaagtacacaactcatagcaaaaggtttattaagctgtaaaggtgcatttaaccataaacaaaaatagtctccaagactataaaaacattacattttagacaaattagtcttccacttcatcgtccgtcaacacctactgtaactgctggtgttgctgcctaacaagtatcatattcactgcaaacatcttagtaggagtagcttttgacgaacaactccttcttggcttcctcggattcaccctcaccagtgtacttcccaagctgagcgagtgagttggacttggcacggaatgcgagtgcatcttgtgctgccttcacgttctctgggcggcctccccatgtcttcaaggcagtgttttggagggctctggcatacgagaatgacacgtgccacgggtttggagattggttcatggcattcaaattgagggtagcttcaacctcagactgtccaccagacaaaaacattaattccaggacagcaaggggaattctnctgtgaaggaccttgagg

SEQ ID NO: 15827 - DNA, 496 bp, Glycine max
  Clone ID: jC-gmle01810088c03a1
agttgatacgttcaataacgatacttcaatttttgcatgcttactttccacaagagctggtggacagggcttaaatttaacaggagctgatacagttgtaattcatgacatggattttaacccacagattgatagacaagccgaagatcgttgccatcgaattggtcaaacaaagcctgtaaccatacatcggctggtgacaaagggaacggttgatgaaaatgtgtacgagattgcaaaaagaaagctagtattagatgctgctgttctcgagtccatggaggagattaatgaaggtgaattgcccgagaagaccatgggagagatattgtctgcaattttattgagttaaaatattgatctaagaaaaacagtttaatttatcatcacttcattcctatagttccaatcttgaattaatctgttgatttgggatagaagagaactggctgcctacaaattggcaagaatgcggtaccagtattgatgtacatta

SEQ ID NO: 15828 - DNA, 362 bp, Glycine max
  Clone ID: jC-gmle01810088c03d1
aaaaatggaaaggggaaggcctcattagggccccaagaaaaaaaaagggcccacaaaattggaaaaccccccccaaactttttaaaccaaaccccccatgggttataagggcccaaaaaacggggcccccattttgcccaatttgggggcccccagatttttttttccccaaaaaaaccgatttattcaaaaagggaccccttggaaagaaggggggaaaaaaaaaaccggttttctaaaaccaaaattttaacccaaaaaaatggccaacaaaatcccccccaagggcttcttgggcaaatcccccttataaaaaccccccaggggccctaaaaccagggtctttaaaaccaaccttcttt

SEQ ID NO: 15829 - DNA, 606 bp, Glycine max
  unsure at all n locations
  Clone ID: jC-gmle01810088c04a1
gtaggctcaatcacgctgctgagtacttcacctcagtatggaacttctctaaacttgtatctgagtgtgcaccatgctctggcatggacacaccaagtgtgttgttgtgttgtgtcttgtttgtatttcctattcgtgttcttttacattcttgcagacctaattttatcattttgactatcccaatggaataaacaaactccttgaattctcttcggtgattttacaggaaggatggtatgatgaccgacctcgatcctttcttatctatgcaccttctagaacagcagtggtttatgccctagcagatgaagctgaacctgccctagcagatgcaactgaaccagagccagttgatcttgatgacaagcttctgggatgaatgttacgagtgcacaaaggcatggatgcagtaaacccctagtcaaactagccaaccagcgtctgatggtttaaccgncactggaacatcaaagaaagcagatttttgaagtggaatangtgaagcgctagttcatctttagtgaggcangagactagcctcgaatctagacatgtgccttgctaggtatagtgtgatgcacaccatcttctattttactttta

SEQ ID NO: 15830 - DNA, 462 bp, Glycine max
  Clone ID: jC-gmle01810088c04d1
tttatttttttttttttttttttttttttttttttttttttttttttttttttttttttttttttttttttttttttttttttttttgatttttgttattattttatattaataatatttatatattaattttttaaaaagaaaaaaaaaaaaaaaacaaaaaaaaaaaaaaaaaaaaaaaaaccgggggaaaaggaaaaaggggccccccccataagaaggggggaggaaaaaagagtattctataaaaacgccagacaaaagtgaaaaaccccccaaaaaaaaaacccggggggggaaaacacaaccaagaacaaaaaaggggggaccacaaaaaaaaaaaaaaaaaaaaaaaaaaggggggggacataaaagaaacccccaggaaaaaaccccccagaaaaaacccccgggaggggccccccacaaaaaaagggggccccccaaaaaaaaaagggccga

SEQ ID NO: 15831 - DNA, 512 bp, Glycine max
  Clone ID: jC-gmle01810088c05a1
ctccgcgccgccatggagaacaccggtattctctgcgccgtcatgctcgacaccaaggggcctgagattcgaactgggtttctcaaggacagtaagcctatccaactgaaacaaggtaatgaaataaccatttccactgactatgacctaaagggtgatgagaagacgatttgtatgagctacaaaaagctgcctgaggatgtgaggcctgggatggtcatactctgcgcggatggcaccatatcatttacagttttatcatgtgacaaacaagcgggtttggttcaatgccgatgcgagaactctgccactcttggtgagaggaagaatgttaatttgcctggagtgatagtggatctgccaactttgacagacaaagacaaggaagatatcttggcctggggagttcccaataaaattgacatgattgctctttctttggttcgaaaaggttctgacctggtggaagtcaggaaagttctgggaaaacatgccaagacattatgctcatg

SEQ ID NO: 15832 - DNA, 513 bp, Glycine max
  Clone ID: jC-gmle01810088c05d1
gctacgaaaaggcatacacttctcaattaaaacaactttagaccgtagaattcaaaatccagaagtggctagttttttggttcaccaaaagcctcatacaaaatcttaacaaatgaaagcaggtggctgctcgccacaatgataaggcaaatgtaacaaaaaaaaaaaaaaaaacagtaatataagatatgtgaaaaacaggtaacccatcctgataaatgcttgattgaagtttgcatccaatgtagatatgaagaggtataacgagacctcttttgcaccatctaaaaaatttgccaaaaacagcagaagaattccctgtaatggggtgatcatttcacagtcaagatcttgatgacagaagcagtgcccacacgatgaagtgccacaaccgaatccccgttgtggcagagacccttggacttggcatgttgcatggcgaattctattgcttcttcagttgtttcagcatgagaagctctagcagaagctgcactcaatacgggaaccaac

SEQ ID NO: 15833 - DNA, 508 bp, Glycine max
  Clone ID: jC-gmle01810088c06a1
attcttcaagattcaggtactgcgtttcggaagcagacacagatggctcgtacgaagcaaaccgctcgtaagtccacaggaggaaaggctcctaggaagcagcttgcaaccaaggctgcacgtaagtctgcaccaactactggtggtgtgaagaagccccaccgttatcgtcctggtaccgttgctcttcgtgagattaggaaataccagaagagtaccgagcttttgatccggaagctccccttccagaggctggttcgtgaaattgctcaggacttcaagactgatctgcgtttccagagccacgccgtgcttgcattgcaagaagctgctgaggcataccttgttgggctctttgaggacactaacctgtgtgccattcacgccaagcgtgtaaccattatgcccaaggatattcagctggcaagaaggattcgtggtgagcgtgcttgagttggtggttggaaagatgaagatgattggtggctgcggttggtgttttgttttc

SEQ ID NO: 15834 - DNA, 544 bp, Glycine max
  Clone ID: jC-gmle01810088c06d1
aacttaaacgagattagatggcaactgaatgttgtccaatacagtttctaaagtggctgcaacatcccgcaggtaaaaactaaaacagaagcattctaacacatacatatgtccaaaaatcaattacaagccaattttcttaaaggaagaaaacacagtcacggacacttagcagtatttgcctatatcccaattaatgctactaccagcagaaaacctaccctccctaacaaccccatctattgaataaaaaaaggaatctgaaaaacaaaaacaccaaccgcagccaccaatcatcttcatctttccaaccaccaactcaagcacgctcaccacgaatccttcttgccagctgaatatccttgggcataatggttacacgcttggcgtgaatggcacacaggttagtgtcctcaaagagcccaacaaggtatgcctcagcagcttcttgcaatgcaagcacggcgtggctctggaaacgcagatcagtcttgaagtcctgagcaatttcacgaaccagcctctggaagggggagcttcggat

SEQ ID NO: 15835 - DNA, 359 bp, Glycine max
  Clone ID: jC-gmle01810088c07a1
cttaatttgaaataggaaataatttatgataaatgcaaactttgaatttttaattgagaagactcgattttgaattttcagtctcgtctgtttttttttttttggtaaaacgaggaatcgctgcgattcttgtgtgaaattagtgagagtttgttcaatgcacgggttctaattttttgtttaattgttgcaggtcggctgctctctgctgctgctgtctgacggatgcgtgcttctgagaggagaagaggttgctttgcacaaattggattggaaactgtgttttgactttgaatatcggcgctaggttttattattctatgtagatttacatttcgtggatatgaaatattgcttcg

SEQ ID NO: 15836 - DNA, 359 bp, Glycine max
  Clone ID: jC-gmle01810088c07d1
cgaagcaatatttcatatccacgaaatgtaaatcaacatagaataatcaaaactaacgacgatattcaaagtcaaaacacagtttcaaatccaatttgtgcaaagcaacctcttctcctctcagaagcacgcatccaacagacagcagcagcagagagcagccaaactgcaacaattaaacaagaaattagaacccgtgcattgaacaaactctcactaatttcacacaagaatcgcaacgattcctcgttttaccaaagaaaaatgaacagacgagactgaaaattcaaaatcgagtcttctcaattaaaaattcaaagtttgcatttatcataaattatttcctatttcaaattaag

SEQ ID NO: 15837 - DNA, 548 bp, Glycine max
  Clone ID: jC-gmle01810088c08a1
tgctcgtgaagcagtaaatgaagttaaagtggtgactgactcaagctggaataaccttgtgattgcaagtgagacccctgtgctggtagagttttgggcaccgtggtgtggtccatgcaggatgatagcgcctgttatcgatgagttagcaaaggattatgctggaaaaattgcatgctacaagcttaacacagatgattctccaaacatagcaacacagtacggcatcagaagcataccaacagttctgttcttcaagaatggagagaaaaaagaaagcataattggcgccgttcccaaatctacactgtccgcaacagtggaaaaatatgttgaattataaactgagaaaatgataaacaattgcatgcattacagtgctagaattgaagggatggaatgggagaagtgacaatagtgacattgcaaatttcattctcttcaattcttttccattccttaaatggcaatagatagtgtttgtttataagtttaaagaccatctcttcttctgggatttgacaattttaagtaatactttgtctctt

SEQ ID NO: 15838 - DNA, 536 bp, Glycine max
  Clone ID: jC-gmle01810088c08d1
aagagtacaagtattacttaaaattgtcaaatcccagaaggaaagatggtctttaaacttataaacaaacactatctattgccatttaaggaatggaaaagaattgaagagaatgaaatttgcaatgtcactattgtcacttctcccattccatcccttcaattctagcactgtaatgcatgcaattgtttatcattttctcagtttataattcaacatatttttccactgttgcggacagtgtagatttgggaacggcgccaattatgctttcttttttctctccattcttgaagaacagaactgttggtatgcttctgatgccgtactgtgttgctatgtttggagaatcatctgtgttaagcttgtagcatgcaatttttccagcataatcctttgctaactcatcgataacaggcgctatcatcctgcatggaccacaccacggtgcccaaaactctaccagcacaggggtctcacttgcaatcacaaggttattccagcttgagtcagtcaccactttaacttcatttact

SEQ ID NO: 15839 - DNA, 411 bp, Glycine max
  Clone ID: jC-gmle01810088c09a1
gcaaaggcatttgctgatgaaattggaattcctttcatggaaactagtgctaaaaatgccaccaatgttgaacaggctttcatggccatggctgctgaaattaaaaacagaatggcaagccaaccagtgaacaatgccaggcctccaacagttcaaattcgaggacagccagtgaaccagaaggctggttgctgctcgacttagaaagagacgaagtatttgtggtctcagacgtttacatgtgtctcagtggcatgtaaaactagcttttcacatattgctttcatatgaagattgttcgtcatgatttgctccttatcgttaagtcgttgttaaaacttccattctttttctatgtatttgattttaaaagaaaataacatttgtacaaaattaggaatattggtgaat

SEQ ID NO: 15840 - DNA, 411 bp, Glycine max
  Clone ID: jC-gmle01810088c09d1
attcaccaatattcctaattttgtacaaatgttattttcttttaaaatcaaatacatagaaaaagaatggaagttttaacaacgacttaacgataaggagcaaatcatgacgaacaatcttcatatgaaagcaatatgtgaaaagctagttttacatgccactgagacacatgtaaacgtctgagaccacaaatacttcgtctctttctaagtcgagcagcaaccagccttctggttcactggctgtcctcgaatttgaactgttggaggcctggcattgttcactggttggcttgccattctgtttttaatttcagcagccatggccatgaaagcctgttcaacattggtggcatttttagcactagtttccatgaaaggaattccaatttcatcagcaaatgcctttgc

SEQ ID NO: 15841 - DNA, 332 bp, Glycine max
  Clone ID: jC-gmle01810088c10a1
ccaagatcttctttgtattgctgctatgtctaatcatagcatcttcttctgggtttgtgaattgctctgatgttgagaaggaggaaaagattggaatatttgagctcaagaaaggtgacctttctttgacggtcaccaactggggcgcttcaattttgtccctggtgattcctgataagaatggaaagttgggtgacgttgctcttggatatgattctgataaggattacagttatgatacaacatattctggagctactgttggcgcggttgctaacagaattggaggagctcactttactttaaatggaatctattacaaattaattgct

SEQ ID NO: 15842 - DNA, 482 bp, Glycine max
  Clone ID: jC-gmle01810088c10d1
aaacaaaattctgcatcactcatgcagagtcaaaatatcaatgaaaagcaacaaatccaaaccaaaacatgtttagagaaacagcttggaaggttctgaagctgccacaaattattagactaaccatgggactctaattattcattctaaggggggcccaagtttggatgaaatccagagctataaatgctacactgacttaccgtggcatattaaaaatgggggaaagctcactcctcctatctcactttgaactaatgtacggatttttggtggaaaacttaaaaagcatataatgcttgtaaggcttttcttgggtcacaattgttgaagggaaattaggatgattcactgaatcagggaatgcttgagactccaaacatagtcctgcatgagcattgtacacatatccaccttttcccttcaaatccttgatatagttaccagtgtaaaattgcaaaccaggagcatttgtgaacaac

SEQ ID NO: 15843 - DNA, 416 bp, Glycine max
  Clone ID: jC-gmle01810088c11a1
gcaaagtgattgattccagctccaatggccttgggcaccaacgccttgatcggaaggaaggttcttgtctcacccccaacccccaaaacaaccaaatcatctactccgctacaattccttttcaagagaagcatcttaaatgctcacaattcacaagctgctctagctgcccttatcttttcctccgcgagcctctctgtgaccccacaagcccttgccgctgataacgtcacccctccccctgtaattgaagcccaacagagccaattgaacccctccaactcatcctgccctttctcacagaacctcctgcttacagctccaaagccacaagcctactccgacctccccgaaggcaccaactggcgctacaacgagttcttgaacgccgtcaagaagggaaagactagcgagtc

SEQ ID NO: 15844 - DNA, 472 bp, Glycine max
  Clone ID: jC-gmle01810088c11d1
gtgctaattgttttttctccttgaatttgataaaataattattgattcttacagtgtacaagtcagagcgtattttatagtacaaacataattctgtgacttgcgtgtatgattatgcaacatataattcggcttttccatcaatgaatagactcatgaactctttaccattcacagatgctttttctatgagaagttgagcaagcttgcgaaggatatcaatgtgagttgatatagtatgtgttgccctagaatatgctctctctaccagttccctcacttccgcatccactacatccgcagttgccatggagtaatccttttgcgatgacatctgttgacccaagaatggatttccaccaggtccaccaatggcaacttgtccaatcttttgctgaatgcaaatctctcaaccatctgccttgccactcgtgaaacttgcatgaagtcgattgatgctccagtggtgaca

SEQ ID NO: 15845 - DNA, 433 bp, Glycine max
  Clone ID: jC-gmle01810088c12a1
gccaaattacagaaattgcaatgggccatctgatctttgtcacccaacaaatatatcattttactcacagccgagctctctaccagctagcctgagttgtgttaaccagcataatgtggctgctgaaacacaggcatatagccagccattgccccagtcaaatatcattcagggtttcgatcaaaattgtatccaagttagtcgtgctccttcaagttatgtggcacacccaaatagcagtcagcatggaaaagagcctcaaataagaagtcaaaatggaaatgccagtggaattactacacaatgtggaacagtaagtcaagatacttgccaaccacaaccacatgaagagtcaccaagggaaactgctggaaaattttcagcatttgactcaagttggatagataatactggtcaaagcattctacaaagc

SEQ ID NO: 15846 - DNA, 501 bp, Glycine max
  Clone ID: jC-gmle01810088c12d1
gaatcatagaacaccacttctaaattattgacagttttactcgctttgatcttgtgtttgcatccattactctcatgggtacatatgctaggcaaatgccctaagacttgtcatcactacatgcaaaccaaattaagaaaaaactagcctagcctatgctgtttatgcatcaactacggcgattagtgattagggaacatctaacatattaagctctaaacacaagttgatgagcctcaaaataaaagctgtcaaatattactcagagctgaacacttccgttgtagcatcattcaactgtcaaccaattctgcacacttccattgaagattgcaatgtgaactataggtattggcaaagtcgccttaaactcatttaccataaacccatgttcatatcaattgagtaaagatctggagatggtatattcatatcagatggtaaaaccccatctgttaacactggaaaagggtttttttccaaaacccagtcatctaaatc

SEQ ID NO: 15847 - DNA, 454 bp, Glycine max
  Clone ID: jC-gmle01810088d01a1
ctgatggcgcgacgaccgcagcagacactgctgaccttaacattgttcactctgatcaaagccacacgacggcgctggggccggttgcagagttccgacgacgagtcctagccccaagattccgataagctaccgtgtcgctcagctggatactatctgcgatgggcccgactactcaaatgtccagatgccagaaagcttcttcacaaagccattggatagacacatgagcgacccagtcccgtaccaaggctcctacgctgtaacccgttcatgacaacgggtagcccaccgtagtcgagcctctgaacgtgatagcatgctaccatcgtattgacataacccttgacgacaccaaagatgttttggcagaagacttcgtccaccgcgttgacatcaccggacacatgagagtcgtcgtcctcaaggatactatggaacctcatgattccaa

SEQ ID NO: 15848 - DNA, 335 bp, Glycine max
  Clone ID: jC-gmle01810088d02a1
ctcatgatgtgccgaacgtcgctgcgttatgctcgcccactctcgagaccgttctcactgtcttcgctgcttctgtcaccggccgcatgctcgaaccaccttcactctctatactctccttatggagccctctcaaggtctgcacattgcgcccagctacgggactggccatgcccatggcgccgctttgtctgcataggtacaagtgcctgagactttcgacgacacgaaggaggacgactgtgctgatggctgcacggacaccaacacgcagacgagcagcaagcctaagaaaggccaggcctcattgcctctcagagggacaggacgagatc

SEQ ID NO: 15849 - DNA, 250 bp, Glycine max
  Clone ID: jC-gmle01810088d02d1
tgtgaccaacgctgacggcgtccggaatccgtgtcgacgagctcaatcgtactaggcggcggccgccctttttttttttttttgtcttttttattccttttagatctatattgtgacattttaatgcccccaaggaatatctaatgggatctttggcggtagaggcacatttatccatggacaatactaagccgggggactatattatcttttgatgccatacgcaaacatttggcactgaaagatccga

SEQ ID NO: 15850 - DNA, 517 bp, Glycine max
  unsure at all n locations
  Clone ID: jC-gmle01810088d03a1
gccctggaaaaaatcaaagaagagttgatgctgttgggctttatttctctgctactgacaataacacaaaatgggatcatcagaatttgtgttccagtgggttggactcaccatatgcttccttgcagtctaaaggataaagaaaaggaagaatcaacaaaaaccacatcacattttcagacatttttctctttctctgatatttctggcactgctaggcgccttttagctgagagtgagagtgagaatgaggatcaccaaccagcaacaggagaaaaactttgtgctaggaagggcaaggttcctctattatctgtggaggcactgcaccaccttcatacctttatttttgtcctagctgtggcccatgtcacattntgtgttctcactggtgtctttggagggttaaaaatacgtgagtggaagcactgggaagactctattggcaatgacaataaaaatgaaacacaaccagttttggaaccaacagtgactcatgttcaccaacacgctttta

SEQ ID NO: 15851 - DNA, 418 bp, Glycine max
  Clone ID: jC-gmle01810088d03d1
actcccttagggcatttcttttgtataataagcttttgttgaaaatctatctatccttgataatgttatgatggcatcctaagttatccaccacattatgtaaaaacataaaaataaaaggcaacattgggggggttcattgctgatttgatactaagcaaaattacaattaaaaatatttaatatggggccaaaacatttttttgtacgtgggtacattttggctacgggatatccacattccacactcattcggatccatcatttcttgggacaataacattggcttttgaggcaaattccctcctgaacactgatcctagttgaattccagcacctgcacgagaactttcttggccaaagaggctattatcacctctttggccttttttctttgccttttgtgcccaacctacaa

SEQ ID NO: 15852 - DNA, 543 bp, Glycine max
  unsure at all n locations
  Clone ID: jC-gmle01810088d04a1
ggacaagcaagtgaatgaacacctcaggtcccttgtattttttcacgacaagaagtgtaggatggaaaattgggacctagtgaaaggtgtttttgtcgagttcaaattacttagagttctagatcttgaaggaattaaggggctgaagggacagtcattgcctaaagaagtgggaaatcttttatggttgaagtttctgagtctgaaaaggactcgcatacaaatactgccatcttccttgggaaatttggagaatttgcaattcctaaatttgcaaactgtcaataaagtgagctgggattcaaccgtggaaattccaaatgtaatatgtaagttgaaacggttgaggcatctatatcttccaaattggtgtgggaatgttactaacaacctgcaactagaaaatttgaccaatttacagacattagtaaattttcctgccagcanatgtgatgtaaaagatctattgaagctgaaaaaactcagaaaggtagtactgaatgaccctagacattttcaaanatttagtgaaagttcagtccc

SEQ ID NO: 15853 - DNA, 512 bp, Glycine max
  Clone ID: jC-gmle01810088d04d1
catccatagaagatcaggtaatctttattatttccttaaataagaggggttttctcactaaatatgagttacaagctagtttcgcattacactcggaaaatctattctaaaaacaatcttgcaaatataaaagcatattaaataagtgtatctgaatccatcaagacacaatgcaaagtacgaacatagaggcccaccaaatggatgggatatgcttctggaagttaagggtttacatggaaccttagcttctggaagcacgagaggagaggatattgcttcaatccttagttcaaaaatacaatagatggcacatgttggactttgtggtaatcctccccagcagttccaagcctggtcttgaatgatttaggcatccatctgatttctagctcccgaagagtagtgataaattttagtccatcaggaaccgtctttaaattgttgcaatcagatatgctcaaatcggtaagattgggcatggcttgatcctctattgtccactgatgtaa

SEQ ID NO: 15854 - DNA, 524 bp, Glycine max
  unsure at all n locations
  Clone ID: jC-gmle01810088d05a1
gaagaatgttgaggtgttctgctatgccttgagtgttaatgatggtactgaatggaggcaacgtattcagtctgaagcagagcactttgtagatgtatctgccatgtcatcggatgcaatagcaaaaatgattaatgaggataagatacatatccttgtcaacctaaatggttatacaaagggtgccagaaatgagatatttgctatgcaacctgcacccattcaagtttcatatatgggattccctggaacaactggggctacttacatagactacttagtcactgatgagtttgtttcaccactacggtatgcaaatatatattcagagaagattgtacatctaccgcattgctactttgtaaatgattataaacagaaaaatcaggatgtgttagatccaaactgcccacacaaacgatcagattatggtctacctgaggatacatttatanttgcatgcttcattcaactttacaagatggatcctcgaatatttaatacatggtgtaatattcttaaac

SEQ ID NO: 15855 - DNA, 547 bp, Glycine max
  unsure at all n locations
  Clone ID: jC-gmle01810088d05d1
aaaaagccaaacattttcttttataaataagaataagtcacattgttttactctcttactactacggggtagtccaccgacggtgatgagtacgtcacgaattttctcttttactaatccgaggtaaggtaatacatcatcaacaatgagtaactaaatagcccatcaacattttgagtaactacgcctcaacaatgtgggtaactacgcctcttaattttctttatctacattcccgtctaattcctacgtctacctgtcataaggacattctagatcattttcagtgaccttaaaatgctgtggacgttgaccagagcaatgcagattccacattttaaaatatgatctctcaagattcctcacccaacgggccgtgtcaaatagagggcaagtcatgcgtacagctttaagcttattagtaagagcctgaagcttcggccgattcagagccaatgagactgctctatcttcatactcttccatgctgctaacaatcatctncttccctaagccagtggcaagacagagtgacccagcaacccta

SEQ ID NO: 15856 - DNA, 512 bp, Glycine max
  unsure at all n locations
  Clone ID: jC-gmle01810088d06a1
ctcctcttcacacattttctgtgcgctctaacaaacattctcgttcacactttcagattgtgtgaagatgggggcgggtggccgaactgatgttcctcctgccaacaggaagtcagaggttgaccctttgaagcgggtgccatttgaaaaacctccatttagtctcagccaaatcaagaaggtcattccacctcactgtttccagcgttctgttttccgctcattctcctatgttgtttacgacctcaccatagccttctgcctctattatgttgccacccattacttccacctgcttcccagccctctctctttcttggcatggccaatctactgggctgtccaaggttgcatccttactggagtttgggtcattgcccatgagtgtggccaccatgcattcagtgactatcagttgcttgatgatattgttggccttgtcctccactccggnctcctagtcccatacttttcatggaaatacagncatcgccgtcaccactccaacactg

SEQ ID NO: 15857 - DNA, 540 bp, Glycine max
  Clone ID: jC-gmle01810088d06d1
aacagaatacggtaacaacttggattcaagaactggaacaagaataagcttctccacagtcttgagaaacttggtcgacatgcaccgattgcaaaccatggtgcaataatcaaactgttcagagaggctatatcttattctgtaaacaaaaccgctatgcaactgtctagatacttactaccaacatcagggttcaacaaaattattcccaataagcaaccatgatactaaacagtcacaagggaaagttcaaagaagcctcggctacattaatcatcacaacttattgttgtaccaaaatacacctttgctctcggtactttgatctggctccacataaatacactctcttgcctctctccacattgccttgacaaatggagtctcatcaaaccgataatactctcccaaaatgggttttattgcctttgtagcctccattgcatgataatgtggcattgtggagaacaagtgatgtgctacatgagtgtctgtaatattatggaagaccttgttcaggattccataatctctatccac

SEQ ID NO: 15858 - DNA, 450 bp, Glycine max
  Clone ID: jC-gmle01810088d07a1
gtctggtggacagtctgaggttgaagctaccctcaacttgaatgccatgaaccaatctccaaacccgtggcacgtgtcgttctcgtatgccagagccctccaaaacactgccttgaagacatggggaggccgcccagagaatgtgaaggcggcacaagatgcacttcttttccgtgccaagtccaactcgctcgcccagcttgggaagtacaccggtgagggtgaatctgaggaagccaagaaggagttgttcgtcaaaggctactcctactaagatgtttgtagtgaatatgatacatgttaggcagcagcaacaccagcagttgtagtaggtgttgacggaggatgaagtggaagaagactaatttgtctaaaatgtaatgtttttatagtcttggagactatttttgtttatggttacatgtacctttacagcttataaaccttttt

SEQ ID NO: 15859 - DNA, 502 bp, Glycine max
  Clone ID: jC-gmle01810088d07d1
cattgattgccgagattcaaccatgttatattgagacaatcaatcaagtacacaactcacagcaaaaaggtttataagctgtaaaggtacatgtaaccataaacaaaaatagtctccaagactataaaaacattacattttagacaaattagtcttcttccacttcatcctccgtcaacacctactacaactgctggtgttgctgctgcctaacatgtatcatattcactacaaacatcttagtaggagtagcctttgacgaacaactccttcttggcttcctcagattcaccctcaccggtgtacttcccaagctgggcgagcgagttggacttggcacggaaaagaagtgcatcttgtgccgccttcacattctctgggcggcctccccatgtcttcaaggcagtgttttggagggctctggcatacgagaacgacacgtgccacgggtttggagattggttcatggcattcaagttgagggtagcttcaacctcagact

SEQ ID NO: 15860 - DNA, 523 bp, Glycine max
  Clone ID: jC-gmle01810088d08a1
ggctcgaggtgggttgccatcacaagcctttgagtacatcaaatacaatggaggacttgagacagaggaagcatacccctacactggaaaagatggtgtatgcaaattctcagctgaaaatgttgccgttcaagtcattgactcggtcaatatcaccttgggtgctgagaatgaattaaaacatgcagttgcatttgttcggccggttagtgtggcctttcaggtggtgaatgggttccatttctacgagaatggagtttacactagtgacatttgcggtagcacttcccaggatgtgaaccatgccgtccttgctgtggggtatggagttgaaaatggcgtcccatattggctcataaaaaattcatggggagaaagttggggtgagaatggctacttcaaaatggaattggggaagaacatgtgtggtgttgcaacttgtgcgtcttatccaggtgtggcataaatagcataagaatatggtccctggtgactaccaccttgtcatgcttcagagtttaaa

SEQ ID NO: 15861 - DNA, 463 bp, Glycine max
  Clone ID: jC-gmle01810088d08d1
gttaaatagtgcaaagtagcaaagacatgctatcttaattcttataactgataattaaagcggggcgcatcaatacaatacaatacaatatgtaactatgaactatcaatatatgatcgttatttatgtctgtgatacacacaattcaggccatgatattcttacgtgatttacagcaacttctaacttatttaatacatcataccaacccaactaggagcaattttcattatacaatgacacttatctttaaactctgaagcatgacaaggtggtagtcaccagggaccatattcttatgcaatttatgccacaactggataagacgcacaagttgcaacaccacacatgttcttccccaattccattttgaagtagccattctcaccccaactttctccccatgaattttttatgagccaatatgggacgccattttcaactccataccccacagcaagga

SEQ ID NO: 15862 - DNA, 534 bp, Glycine max
  Clone ID: jC-gmle01810088d09a1
atcctggaccatcacccccttcacctgtgaagccgccaaatgtctgtgacaactactacagctgtgctgatagtgctacttgttgctgtatttttgagttcggaaatgcttgcttcgagtggggttgctgtcctcttgagggtgcttcctgctgtgatgaccactacagttgctgccctgcagactatcccatctgcaacacttacgctggaacttgtctcaggagcaagaacaacccctttggagtgaaggcattaaggcgtactccagcgaaaccccattggaccttcggacgtaagaacaaggtcagcagtgcttaagcagtttaaggaaatgtgaacgtgcagaaggagccaatgatgaagtaaaagggaagacgaaggactaaagcaccagctggatgcacttcccccttcttcacataatgctgcacgtaacataaagatctttaccattttattatgatacaaaatagataatgttctgtatcaaaattcagtcagacattggctctgtacatagggttatattatc

SEQ ID NO: 15863 - DNA, 462 bp, Glycine max
  Clone ID: jC-gmle01810088d09d1
aagcaaattaaaatagcatgggaatttgggacaaatccaaatattgctgctgcattggcacataatctacagaaccttgaaaactaacagcaatcaaatatgttcgccatttggaatttgaatacaaataccgggcattgataatttaaccctatgtacagagccaatgtctgactgaaatttgatacagaacattatctattttggatcataataaaatggtaaagatctttatgttacgtgcagcattttgtgaaaaagggggaagtgcatccagctggggctttagtccttcggcttcccttttacttcatcattggctccttctggacgttcacatttccttaaactgcttaagcactggtgaccttgttcttacgtccgaaggtccaatggggtttcgctggagtacgccttaatgccttcactccaaaggggttggtcttggtcctgagacaagtt

SEQ ID NO: 15864 - DNA, 448 bp, Glycine max
  Clone ID: jC-gmle01810088d10a1
ggaataattatacataaattttggatttcgcacgtagctagctacagaagacaaaggagccttgagtctcgagatcttgtcagatcggaacgcaaccgcaactgccaccgagattgctttgtgtgttatgggaagggaagttactggcatacaggttatggaaaagaagccaaatggtgccatagcggcttcaaatggcagtttaagtgatagaatgcgtgtttctcccaaaattgcagcaatggttcaagcaatggatcatgagataaaggaatctgctgaagctaattcgtttgagaaacatcacgagaggaaagatagtttgagtgccaaaaacacaaaattaaatgctggcttgccagaagaggagaatgagaaatctgatcaggttccaagcccctctgcttcacagccatctgatcaggttacttgaaagcatgtcacccat

SEQ ID NO: 15865 - DNA, 476 bp, Glycine max
  Clone ID: jC-gmle01810088d10d1
aaaggaatatatttcatataaatttccctaaccatgtctggagcaatctgaggatatcaaatttcgtacatcggtacatacatcttacattaactattttttatatataaaacaatgctgccgatataacttacaaaacatatacacttccaagtttaaaaaaaaaaaaaaaacaagcaaatcacataaaaatgtcagtccggatgaaaagaaaattaggccattttttctgcaaagtatccatctgttaagacaatgaaggctattttcctctcagctggaggtcagtaaaatcctgggaagctcatgattggaccgatatgtccgcatttgtctgctcagtgattttaggaggagctgtttttgataccttatccagttttggtcgttctttggttttgctagtgccattgctgttgcgtccagtgaccaggtccttgttttttggagggacaaggctatccatgtttgggtta

SEQ ID NO: 15866 - DNA, 434 bp, Glycine max
  Clone ID: jC-gmle01810088d11a1
ttctgaggctaccatcgccaaacgaaggagctatgcgaataccatcagctatctgactcctccagcagaaaatgcaggactgtacaaaggtcttaagcagttaagtgagctcatctcctcataccagtccctcaaggacactggccgcgggccacaaattgtgagctcaattatcagcacagctagacaatgtaatcttgacaaggatgtggaactgccagaagagggtgaagagatcccagcaaaagatcgcgaccttgtggttggaaaggtgtatgccaagatcatggagattgagtctcgcctgcttccttgtgggctccatgtcattggcgagccaccctcagccttggaagcagttgcaacactagtgaacatagctgcacttgatcgaccagaagatggtaattcctctcttccatcaatactagctg

SEQ ID NO: 15867 - DNA, 418 bp, Glycine max
  Clone ID: jC-gmle01810088d11d1
gatacaagggaatcattctttatttattaaactgggagcaatttttgacatgttggtttggaatttgcaactgcccaaaggaacatgatccctgaaaatgattaaaattccagccgggaaaaaggagagaggagcaaaatcacattaaaaggaccccattaacaactttcaattcagggggggaaaaaagctccagatccaaagaaggcctagttaaaaaacagttaatgtttctgctgtgcatctcaattatcacttcagcgatcaatgccttctattttggcttacacttctgagtacaactgcctgagcttggcaatggtggcttctgaagtctcccagcaaccgcgtacattggcttccaagaatgtctgcaccagcttcctaaaggagtttggatttgtgctcattagcttct

SEQ ID NO: 15868 - DNA, 546 bp, Glycine max
  Clone ID: jC-gmle01810088d12a1
atctatctatctatctccatcttcatcactcccatggacaacgacacaaacacaacaccaaccaccacctcagaaccacaaatagcacacgattttcccggtctcatccgtgtcttcaccgatggtcgcgtccaacgcttcaccggaaccgacgtcgttccaccctccaccactccccacattacatccaaagacatcacactcctccaccctcactccgctactctctccgcacgcctcttcctcccaacaccacaaaccaccagccgccgcaacaacaacctccctctcttaatctacttccacggcggcgccttctgcgcctcctcccccttcaccgcaaactaccacaactacgtcgccacaatcgtcgccgaagccaaagtcgtcgctgtctccgttgactaccggctagccccggagcaccctattccggcagcgtacgaggattcatgggctgcactacagtgggtggcgtcacaccgtaacaaaaatggacaagagccttggttgaatgagcatgcagacttcggtagggtttttttg

SEQ ID NO: 15869 - DNA, 382 bp, Glycine max
  Clone ID: jC-gmle01810088d12d1
aatgggaaaaaaaaaaaaattaaaccatttttgggctttgggacgggacaatgggttatttaggtcaccatcaggcatttacttaaccaaaaaggaaagggtaaatgggcccagggcactttggggcatttggaaacttcaaatgggggaaacaaaacgaattccccaaaacataatggaaggaaatcgggcatgacccaccccccataatttagggggaattaaaaaaagaccaaacatgggtataaaattgaaggggggtggcctttggtgaaaaaaaaagccaagcgtttgaacaaacactgggccttatgacccgccaaatcatagggaggaaacccatgaccctccccaaaaggtttttaaaatttcaccaaaccca

SEQ ID NO: 15870 - DNA, 351 bp, Glycine max
  Clone ID: jC-gmle01810088e01a1
tgtgattgtgctaaatatcagtggagcaagcctgctagtgatgtaatctaagcgtgacctctggatctgactgtggtagattttacttttctttcaatggctataaaatcacagaagatactcagattgcatcaacagttgctactagcagtccagatttgggtttgttaactcggtattttcttaacgattaacgaaggtccagtatcatgtggcatggctactgttgtctttgcttccaaggtatagttgacaaaatgttaactcggtcattgtaagagaagttttgattgttgtaaacaattttggggcctggttacttcatcaagtttatatctcacatttccaagt

SEQ ID NO: 15871 - DNA, 351 bp, Glycine max
  Clone ID: jC-gmle01810088e01d1
acttggaaatgtgagatataaacttgatgaagtaaccaggccccaaaattgtttacaacaatcaaaacttctcttacaatgaccgagttaacattttgtcaactataccttggaagcaaagacaacagtagccatgccacatgatactggaccttcgttaatcgttaagaaaataccgagtttacaaacccaaatctggactggtagtagcaactgttgatgcaatctgagtatcttctgtgattttatagccattgaaagaaaagtgaaatctaccacagtcagatccagaggtcacgcttagattacatcacttgcaggcttgctccactgatatttagcacaatcaca

SEQ ID NO: 15872 - DNA, 464 bp, Glycine max
  unsure at all n locations
  Clone ID: jC-gmle01810088e02a1
ccttctcacacttcccccaattcccaaaccaaactctgtcttttcttctctgtacggcactctctcttccggcgttctgggggtcgcatcgccggcgattccccactctgcttctctcttcacccttcaattcaaccctctcgtcttcgcttcactgattccctcttcgaaaatgcttccgatcgcttgctagggttttccttctcccaaatctccgtctccgaaagaaccctgtaccttttcttcctccgattaatcaacttcctagttatggctattcgtgtaactttttccttttcgggctacgtcgcccagagcctcgcctcctccgccggcgtgcgcgtcgccaattcgcgatgtgtccaggaatgctggatccgcacgcgcctctttcggggcgccacccagaagacggatctagattcctncgnnncgcgcggagtccgcaatttcgccaggcccaa

SEQ ID NO: 15873 - DNA, 453 bp, Glycine max
  Clone ID: jC-gmle01810088e02d1
ctccccgcacttcagcaatagaaatacatctcagatggcactaatgaacgcttaatggtattattaggtcatcgacaaatttgtatcaatgaataagatattcatcccaaactgtgtgcaaagtcagctcaagctaacaatttagaacaaacgaccgtatctggaaaccttcatcaccttcacaaagctgcgggaatcatgtcaagaaattgccacaggtttgttaccaggtgggagtttacgatgggtatcagtgtcagatgccttggatggaggccagtaccgaaacatggacctaccaacaatgttctcaaccggcaggggaccccagttatgagaatcaaagcttttattccgattgtcgcccattacaaacacatatccttctggcacaaccattggatccatcttataagctagagcctctaatacaaaatcttgttcttcagcagc

SEQ ID NO: 15874 - DNA, 519 bp, Glycine max
  unsure at all n locations
  Clone ID: jC-gmle01810088e03a1
cttctctctccaccatgcaccaagccatttcccacagaagcttcatccccatagtagcacgtggcatgccacacgcaggaggaatcaaagaatccaatggcacctatccatccaaagctgccacaatggtatcggagaacgcggtggtaatcattggaaaacggggatgctgcatgtgccacgtggtaaaaaggttgttacaaggtctgggagtgaaccctcccgtgtacgaggtggacgaggaccacgaagccgccgttgctctccacctgtccccgcagggcgccgaaacggtgcagtttccggcggtgttcctggccggcaagttgttcggaaggttggaaagagttatggccactcatatctcaggtgaattggttcccatcttgaaggatgctggtgccttgtggctctgactcttactctagctacctncatcttttttttctacatctgctcctttttttttaaacctaatttctcgagtgggaattaattagatatagcgaaataattttc

SEQ ID NO: 15875 - DNA, 516 bp, Glycine max
  Clone ID: jC-gmle01810088e03d1
gatgaacttgtacgtcaacatcaactaattgaaacaaaatgtacaatatctctcttccagacttttcaacacaagggagttgttaacaacgcagtttctcatcttgcccagttaagagacgcaggaaaagaaaaataaaacacaaaaaaggagggaattgaacctaagaaaattaatttcgctatatctaattaatttcccactcgagaaaataggtttaaaaaaaaaagagcagatgtagaaaaaaaagatggaggtagctagagtaagagtcagagccacaaggcaccagcatccttcaagatgggaaccaattcacctgagatatgagtggccataactctttccaaccctccgaacaacttgccggccaggaacaccgccggaaactgcaccgtttcggcgccctgcggggacaggtggagagcaacggcggcttcgtggtcctcgtccacctcgtacacgggagggttcactcccagaccttgtaacaacctttttaccacgtggcacatg

SEQ ID NO: 15876 - DNA, 476 bp, Glycine max
  Clone ID: jC-gmle01810088e06a1
tctggctaaaattctctgcattttcttcgtcacaacaacccttctctgattcgtcttcaatttttgtttccaaaaccttaggtcttgctctgtcgctcactgtgatctttttccccaatttgttccatttagcgttgttgtcaatttgcaaaatcaggtcagatttctgtgtttgtcgtttctgataatctggagtggagctaggtcaagatgccgtgggtttccttgtttgtggatcacaaaagaaattgtgttcgcttggtggtgttttttcgtgtgattctgtaatttaattagctcagtcctattaggttgcgaagcaactcttttcattaggttgctctccttttcatttccaaagctgttggggggactgaggatgtactttgcggtaacaataaagagataccaagctgtgaaggaagttggacaaattaaaatgagtgttggagttattggatacaaccaattgatgc

SEQ ID NO: 15877 - DNA, 461 bp, Glycine max
  Clone ID: jC-gmle01810088e06d1
atcagccatataaatttttagtacattcataacataacattaataataaaaattgagttttggggctataagaaattagccaccttagaaacacagttaaacacaacctataggttcatttgtgacagggttttcttacataaccagaataagtaaaagggcagacgtcatttattactcaaatagcatggcctcttctcattaggatggctagcaaggcaaaaaagggtgctattcatagaaggtaacaaacatagctggggatgtagtcaactgttgcaacagcatatgactaacttacattttgcatgggtcaaccctgaattgttcaacctgaactttgagagacttgaggtatttaacagctttatttaaaaccgccacagaatccatttgagtaccttcataaggcacaatcttttttaacattgtcaccatcctctttatctactggggcttcc

SEQ ID NO: 15878 - DNA, 523 bp, Glycine max
  Clone ID: jC-gmle01810088e07a1
agcaattcgaattcccaatccaaaaccctaataccttcaaagaacctagtagtgaatcagtgatggcacctaaggcagagaagaagccagcggagaagaagccggtggaggagaagaagtcgacggtgggagacaaggctccggcggagaagaagccgaaggccggaaagaagcttccgaaggagggaggagccggcggagaaggggggaagaagaaaaagaggaacaagaagagcgtggagacatacaagatatacatattcaaggttctgaagcaggtccaccctgacattggtatctcaagcaaggccatgggaatcatgaacagcttcatcaacgacatcttcgagaagcttgctcaggaatcttccagacttgcccgctacaacaagaagcccaccatcacttcaagggagatccagaccgcggtcaggcttgtgcttgccggtgaactggccaagcacgccgtttctgagggtaccaaggccgtcaccaagttcaccagctcttggacaaaatatct

SEQ ID NO: 15879 - DNA, 517 bp, Glycine max
  Clone ID: jC-gmle01810088e07d1
cataaacaaccattccttttatcaaattgctcctatatgatcaattctaccaattccatacacagaggatcaacccaatcctaattcttcacttacaaattaaaaaccaaaaagctaccagttcaaacctaaacatagggtcgctagatctaacagatacacatgaagcaaaacaagagcgaggtaaacaaagttaagatattttgttcaagagctggtgaacttggtgacggccttggtaccctcagaaacggcgtgcttggccagttcaccgggcagcacaagcctgaccgcggtctggatctcccttgaagtgatggtgggcttcttgttgtagcgggcaagtctggaagattcctgagcaagcttctcgaagatgtcgttgatgaagctgttcatgattcccatggccttgcttgagataccaatgtcagggtggacctgcttcagaaccttgaatatgtatatcttggatgtctccacgctcttcttgttcctctttttcttcttcccccct

SEQ ID NO: 15880 - DNA, 524 bp, Glycine max
  Clone ID: jC-gmle01810088e08a1
ctactactacttttcctccacaaaatgatgctcagaatcaagagggttcccactgtcgtttccaactaccaaaaagacgacgctgcagactctcctcgtcccgtcggaggttgtggtcggaattgcctcaaagcttgttgccttccagatgcaaagctgcctttgtatgctttcaagaaggctaatggaaaggatttggccctgcatgcatgcgccggggagcctcccctcacattcctcgactcacttcttcttggagagtgggaagatcgcatgcagagaggactttttcgctatgatgttaccgcctgtgaaaccaaggtgattcctggtgaatatggtttcgttgcccagcttaatgagggtcgtcacctcaagaagagaccaactgagttccgagttgacaaggtccttcaaccctttgatgaaaacaaattcaactttaccaaagttgggcaagaagaggtcctcttccaatttgaagctagcgaggatggacaagtccaagtctttccaatgctcca

SEQ ID NO: 15881 - DNA, 476 bp, Glycine max
  Clone ID: jC-gmle01810088e08d1
catccttaagaactactacaagaacaaacagataactgaatttattatttctcagagtcaagtcaagcattatgatacatcataccccaaaacaccaacaacagtactcaggtgagcagttattacatcgtactttcacatgaacgcgtcataaaggcagataaaagcaaatacatacaacacaggaccttaaggctcaagcacagcacaatactatgtgacttaaacggtgacacaattcagcaattattcttaaagcactacggatttgctgaatttgttcataattttagagccttgttagtgtagaatcacacattcttgtgaaccagctaccaccacagtagggtgttcgcttgtgctgactgcatcaacttctttgacactttcaacgttgacatcctccaattcaccacagccaatggcttcaaaaataagatcattgacttcttgaaacctctcttgagagagggaca

SEQ ID NO: 15882 - DNA, 314 bp, Glycine max
  Clone ID: jC-gmle01810088e09a1
atccatctttgccttctgcatgttggttctttgtaaacagatcctgcgaaagaagaataatattgaatatttgcttgggttgaatccctgggttgaagcgttgcagacatcacggttattctaagagtgtctcgctctctcattcatgtgccaactgtgaccacggaggacatgttgcttaactgccaccaacccttctccgcacggtgggcgtcgagctctgccttctgctggtgggaaaccctcagactagctcttcttagctgggggcggtgctgcagccttctcactagttcgtaaatctaaagactttc

SEQ ID NO: 15883 - DNA, 440 bp, Glycine max
  Clone ID: jC-gmle01810088e09d1
ttcgtccttttttttaaatttttgttgttatttacaaggactaacaggttcctgcatgattcatgactcgctgtatgaaagccacgatagccagacgcgtcaggcattgtgacacataacggcccataattccgacagcagtacttacatgagcggtctttatgtcgccctttgcctgaaagtgtcgtagaggcgactgcaagcgtattcactttactcacacaaccttacggttcaaggccaaggcaatgcgctgacttaaacggtgaccctttgcaaggattgttcttgaaacactgctaactccctgtatctgggcaacatccactagacatgatgctgtaaaaccacacattctcgtgaacctagcaccatcacatccatggggggatccattgcgcagactgcatcatctcatgatttgacactgtgtacattga

SEQ ID NO: 15884 - DNA, 498 bp, Glycine max
  Clone ID: jC-gmle01810088e10a1
gtttgagtttgagtttgagttgagtcctcagtgaatgatatttgtgactgaaaaggccaaaaacatgatcatgaggaagcacaacaacccactttggtttgtggtgttcttgtttccctcttaggctccttttggtgaacttcagagtgcaaagttggttggttggtgggttggtgtggttgcttcattttctaggtgcattttggtttctctctttttgtcatggctggtggacggagacaacagaggctcaacaagtcatgcattctcctcatagccattgcaagaatagaaaggtttgcattcaagggggtggcatccaacttggtgacttacctaactgatgttgtgaacttgagtaactcatctgcagcaaagatggttaacagttgggttggatttacttccataatgccattgctggtggcaccaattgctgacgcatattggcacaaatattccaccataatggtttcatctttcctgtattttgtggga

SEQ ID NO: 15885 - DNA, 467 bp, Glycine max
  Clone ID: jC-gmle01810088e10d1
aatacaattactgttattcaatatcatgtcaagtagtccaacaaactttagcccaaaaggaatatgggaagataacacttgaaaactaaagaggaacaaaaaaaccctctcaatattcactatttgaatcactcttcttatggtaatatctacacaagagtgcatacaatagcaagctcactgtacttaaccatgctagaagccaatagtaactgtccaagtgtgcttcaaccatatcatcacagaaccagcttggtattccctttgaacttgtgtacacttcaactagtgtaatcaacagtgcactcacaaagcttccaaccccaaaaacacttgtatacaaggcaatccccattgtcctcatattcctgggaacttcaccatagaagaactcttgcatgccaacaactgtgaaaatgtctgagatgccaagaagaatgtactgtggtagcagccaaaaaatactt

SEQ ID NO: 15886 - DNA, 455 bp, Glycine max
  Clone ID: jC-gmle01810088e11a1
tacaaaggttgctgtaggagataagattgcagtagtgctaagtgctaacacctgcagtgaacaatggcctctgcatcagcatctctgctcaagtcttcacttgttcttgacaagtctgagtgggtgaagggacaaacccttcgccaaccttctgcatcagttgtgagatgcaaccccaccaccccatcaggcctcaccatcagagctggttcctatgctgatgagctcgttaagaccgcgaaaacagtggcttcaccagggaggggtattttggccatggatgagtccaatgctacctgtgggaagcgtttggcttcaattgggctagagaacactgaagctaaccgccaggcataccgtacccttctcgtgacagttccaggccttggtcagtacatctctggtgccattctctttgaggaaacactctaccaatccacaactgatggcaggaa

SEQ ID NO: 15887 - DNA, 466 bp, Glycine max
  Clone ID: jC-gmle01810088e11d1
gccgagcttaaaccattttgttatatattgagacataatcaagtacacaactcatagcaaaaggtttattaagctgtaaaggtgcatttaaccataaacaaaaatagtctccaagactataaaaacattacattttagacaaattagtcttccacttcatcgtccgtcaacacctactgtaactgctggtgttgctgcctaacaagtatcatattcactgcaaacatcttagtaggagtagcttttgacgaacaactccttcttggcttcctcggattcaccctcaccagtgtacttcccaagctgagcgagtgagttggacttggcacggaatgcgagtgcatcttgtgctgccttcacgttctctgggcggcctccccatgtcttcaaggcagtgttttggagggctctggcatacgagaatgacacgtgccacgggtttggagattggttcatggcattcaaa

SEQ ID NO: 15888 - DNA, 475 bp, Glycine max
  unsure at all n locations
  Clone ID: jC-gmle01810088e12a1
tctgaacgtgttcgtgcattccaagccaaggttgcaacttactagctagctatgtcttcttcatacgggggataccattctcaatcctatgctccatctgcgccagaacaacctccatattccaattataatcacacttcttcttctacatcaaattcatcgtcatccagttttccagcagggacgccccaggacgtgattcggagctttcagatggtggatagggaccgaagcggcttcatcgatgagcgtgagttgcaccaagctctctcttctggattccaccacttcaactttaggaccattcgtcttctcttgttcctcttcaagaatccacaccaacccctcacaattggaccaaaggaatttgcagcactctggagttgccttggtcattggcgaggaatatttgagaggtacgataaagacaggagtgggaaaattgatccattaaaactcanagatgctctgtatg

SEQ ID NO: 15889 - DNA, 506 bp, Glycine max
  Clone ID: jC-gmle01810088e12d1
aaatataattgagtgtattcatatcaataaatatttttacaaatgtttacaactatatgtaaagaaaaaaatgtttaaatacatacattcttctatatacacactttcaacactcacctacttatgtttaatcacttttcttgccacaaaccccttagctatatataggtaacttgttggtaaaaaaaatgtaaatgaatgagatgaatgtgaagtactctgtatgaaagtgagtctagcattactggaacataaatgaatataacaaatcgttgcaccttaaaaatttcttcgcaatcaaagtcaaaaaataatcaattgaatgtggcaccaaagaacttggaaatcttgacgacgagcatcgcttatcaatcataagatacaaggaaaggaaggaccatagtcataaaggcgtcgtatgaaagtgtagctgaacccgtataccgtgtatccttctccttgaatttatcagtcagacccttaataatcatcccacactcgacaaa

SEQ ID NO: 15890 - DNA, 532 bp, Glycine max
  Clone ID: jC-gmle01810088f01a1
atctgactcagttctatcaagatttagctaagccaacaaaggctcaggaatgtataaataagatgctacaaattgatgggaggtttgcaagagctaatcatttgcgtggccttctgttccatgcaatgggtgagcacaggctatcaaggatttgacaatggggttgagcattgatggcagcaacattgaatgcttgtatttacgtgcttcctgctaccatgctgttggacaatacaaagaagcggtcaaggattatgatgctgcattggatttggagctggattcaatggacaaattcgtgctccagtgccttgctttttatcagaaagagattgctctgtacacagcttcaaaatttaatggtgatttttgctggtttgatattgatggggatattgatgctctttttaaggaatactggtgcaagaaattgcatccaaagaatgtatgcgaaaaggttttcaagcaaccttctttacgcgagtctttaagaaagggaaagcttaaaagcaagagtttactattaccaagc

SEQ ID NO: 15891 - DNA, 493 bp, Glycine max
  Clone ID: jC-gmle01810088f01d1
gaaaaaatattagaaatccataactttattgtataattgttaacatatggttacaatgaaacaaggccgtcacagttaacatgcaattagctaacatggttatagtttacaagagatcaatcatcagaagaaaagttcaaagcagaaataactgaccctgttgttgcaaaagttgaagcaatatcagggtagtctttccatgaggttgtcaccttcagagatgggtacagccacgttttaaccgaatccacgaacgagtttggatccaagttcaaaatggcttcccagtcaacctgaaaaccctgtgggatgcttcctgtgaactccatgttggcagcaagtaacaaacccagcataactataaatccaaccacagcagatcccctagacagtggcataaagttataccagtaatatgtcatccttaaaattgcatctagcacgttttcaagcgtgtcaaagtcagtagacccattagtttcaccacagtaag

SEQ ID NO: 15892 - DNA, 526 bp, Glycine max
  unsure at all n locations
  Clone ID: jC-gmle01810088f02a1
gcgcttcaaggcgtctcgtagggctaatccgcctcacgagggtcaccaacggcacgtgcctttggggggccgaggccccctactgctggtcggcaaacggacggcgggcgcacgcgtcgcttctagcccggattctgaccacaaaacgctactctagactctagtagtagcagagtagcatcatcgtcatcatcaaaccttggtgaatcaaaaagaaaattagaaggaaaagatgttgttggggaagagacctcgtcctccaattatgaagagaacaacaagcatgtcggaaataaccttcgatctgaacacgtccttggacgatgatccgaacaactccgtgaagggaccaggaggagatgggcctnctgttgggctcaacggtttagatcagaacagggtttgggccatggtttcacccagaaaccaccatagaaggcaatattccgaggatacccctggcttcttgcgcgtttgctatctctgcaaacgccgtttagtacccggccgtgacatcttcatgtac

SEQ ID NO: 15893 - DNA, 507 bp, Glycine max
  Clone ID: jC-gmle01810088f02d1
aagctaagggcatgagcatataggaataataataatgatattgcatcatcaatccttgtttggatgccacaattaactacaaggcaaccacggtttcgcctttagtattagtagtaacttgagacccagaattaggctttgccgcaacttgtttctttgatgatgccacacgacacttatcttttctctcatcatgcttcatctgctgttcacggcattctgaactgcagaaagcactatcacctttgtacatgaagatgtcacggccgggtactaaacggcgtttgcagagaaagcaaacgcgcaagaagccaggggtatcctcggaatattgccttctatggtggtttctgggtgaaaccatggcccaaaccctgttctgatctaaaccgttgagcccaacaggaggcccatctactcctggtcccttcacagagttgttcggatcatcgtccaaagacgtgttcaaatcgaggttatcttcgacatgcttggtagtctcttcat

SEQ ID NO: 15894 - DNA, 474 bp, Glycine max
  Clone ID: jC-gmle01810088f03a1
tgcaattgaagttgaagtcttgcccttctctcttcaactccaaacacaagacatcatcatccatggctgcctccgtctccactgtcggagctgtcaacagagctcttttgaacctgaatgggtctggacctggggtttcagctcccagttcatccttctttgggagcagcttgaagaaggttattggctcaagggtccccaacacaaagatttcctctggaagcttcaagattgttgctgtagaagagaagaaagagattgaagagacccagcagaccgacaaggacagatggaagggtcttgcctatgatatctcagacgaccaacaggacatcacaagaggaaaggggtttggttgactcccttttccaagctccacaggatgctggaactcactatgctgtcatgagctcctacgagtaccttagcactggacttcgccagtacttggacaacaacatggatggattttac

SEQ ID NO: 15895 - DNA, 481 bp, Glycine max
  Clone ID: jC-gmle01810088f03d1
aggacaaaaggaaaaggcaccaaattcaatttaagtggacactttaactcaaaattatagaggaagacagtccaatatgaaaaatatagtaaaatcatctcaaacttggcatcttctctttgcacctaagacattgagaattctaagaatgttacacgcaagtcccatcacaacttctagcacttggatcagcacaaccttcaggaacagaaatatttacttgccaagtttgctttgcctccaattcaagattggaagaaagttcccctgttaatagcatcctcgttagcatttccaagtgcagcctcgttcaagtacttgtcagccaattggactctcttgacattctcttgttcttggacaagcatgttaccatacgtcaagagcttctccagagtcatcttgggctgctcaaaggttggaggtccatcttttgagttcacaagcttcttcccaatgccgtcaacaccaacaccagaaa

SEQ ID NO: 15896 - DNA, 426 bp, Glycine max
  Clone ID: jC-gmle01810088f04a1
gaagaaaatacagcactctgaacaaaaagcaacggaaccaaccaaaaaggattcaaagggcaacaaacaagaaggcacagactcagagtcagagcaataccaaaacgaagaaaatcaactccacacgctttcggaaccatcaccatccttctctctccgttcccgcaaatccccttcgccaccactccactccctctctgactcccccatctccgatgcccacctctcccctgcgccgcagaagccgccgcccgattcctcgccggactcctcgatctccgacggccacttcacgatcggtgaacagcgcctctccccggcgccgccgaccgtggtgacggctcatcggttgaaggtggagcccgcggtgttgaccagggtcgatcccggcgccgaagagggtttcgtgaaagacgtcgaacaagc

SEQ ID NO: 15897 - DNA, 551 bp, Glycine max
  Clone ID: jC-gmle01810088f04d1
aagcttaataccatctcaataatgcaaaagttcatatacaagccagttcagcaagctgtaaatccacctgcatctatacaaattaaagttgacagagaaataaagtgagtttcccttctgtacaaagtgagtcagtctgccttctgaaaatatgggacgattttcaatcgagaaaggataaagcttaatccagtatctcagataagagtttgcacacctcacacatagtacttgtataaattatgtgaaccttacaacaatagaaccagagacaagagaggctaaggcaaaggccacaaaagcaaccaaggacaaagccacagatgcatttgccatgtaggggaacttgtcctcaccccaattggaaacccaatcataagctctagtggcagctgatgatgatgctgacattagaaggtatgtcaagatctgatccagcgcgaaagtgaaataaccccttagctggtgctccaccaagtgctttcccgttgcaaagtaccgccaagatcacatatctgcaacgcggaatgcacaaacccaataacattcac

SEQ ID NO: 15898 - DNA, 335 bp, Glycine max
  Clone ID: jC-gmle01810088f05a1
atttgttatgaaattgttttggcatattatgggcacgtaccatatgtgtatgtatatacacggggcaggtatttttgcacgcaacaacgtcaaagaagcaagcaatgcaattgaagatgaggaatattgaatggtggatgagaaaacgacgcttgccgctagggtttaggcagcgcgtgcgtaactatgagaggcagcgttgggctgccatgcgtggggttgatgaattcgagatgactaaaaatctccctgagggattaagaagagacatcaagtaccatctttgtctagacttggtgagacaggtgcctatatttcaacacatggacgatctg

SEQ ID NO: 15899 - DNA, 538 bp, Glycine max
  Clone ID: jC-gmle01810088f05d1
aataatgcatgcattttttctttattttctaccaataagatcaatcaaaacaataaaattcgacacctgtgtgccacatccatatatatcatgttctcaaaagtcaaaatcatcctgattaggctttggggaggttaacaaagctgtgtagaggcgaagcttgtcctctccgatggaagaagaccgtgacaaaggtctcctgggccttataaaggacaatgaagtcaaagtcaacctatgcttgtacctcctccatgccaattgaatggccacagcagcccaagttctccaccctggtgagtaataccttgcacttctcttcaccttttccttaacaaatgtgtacctgaaatgttgtgtcacatacttcacgtcctgggcttcaaggccgaacgcctcggtggtttccaacgtgatgagtgtggatgaagacggccgaaggcgttctatgaaaggcctctcaacaccacgaaaggagctcgtccccactgaaagtttctggacctaacatgcaacaactcttcacaccatcccttag

SEQ ID NO: 15900 - DNA, 497 bp, Glycine max
  Clone ID: jC-gmle01810088f06a1
aacagactttgcgtttctcctcagcctcttaaaaccaaacagattttattctctcaaatggagagtccccattcactgtctccctcttcctcctccgacggcgtcggcttcgagacggaggagccgcggacgccgttggccgtgcgccgcgcgctgcagctcctcaactccggcgatcccgacctgcgcctccaagctgctcgcgacatccggcgcctcacgaagacgtcacaacgttgtcggcgccagttatcccaggctgtcggtccactcgtttccatgctccgagtcgactcgcccgagtcacacgaacccgctctcctcgccttgctcaacctcgccgtcaaagacgaaaagaataaaatcaatattgtggaggccggtgcattagaaccgataattagtttccttaagtctcagaatctaaatctgcaggagtctgcaactgcatctttgctcactctatctgcctcttcaaccaacaaaccaatcattag

SEQ ID NO: 15901 - DNA, 513 bp, Glycine max
  Clone ID: jC-gmle01810088f06d1
gtaaattcttacaccagtttttactacttgtatgtcattttatacaccagtttctttacaagccaactacaaaatcctgctctttaccaatgacaacttagtttattgacacttaccagtcactcgatacctccacaatggccaggactggcatccttcactatgtattattattccttcttcttttttttcttttttttacgttttctactatggaaatttacctcacaaaccgcaattgcaaagacaaaaaaagtgaaaaaaagacagttggccagcggcaactatcattttgaagaaacttcagaagcagcacagccagctataggaagatcacttggggtgcatacaagagccctttgctgtaaatgtctcagactctgttccatactgacttggaccatctcagccagcatcttctttgccttaccagattgatcatcgccatcaatctgagatatgatgttgcatactatattctcaagggtatcaggttgaatttcagatctcgga

SEQ ID NO: 15902 - DNA, 504 bp, Glycine max
  Clone ID: jC-gmle01810088f07a1
ggaaatagattgtttgccataggtattgctttcgcaaaactgaattcatattttacatatcgtctcctaaatggtgctattagcaacctatcatatcatacattctttttctttcctaagtagtctactgctaaacaagacctaaagttgctgacaaaaagcatgacatttcatacctcattttcaaaccatgtttgtctttcttcctcttatttgtttctatatgcatttgaagttgagatattttgatcagattttcatattttatttcttcgttgtcagattttactttcctatcgctgtaactagtattttccttgagttggtttatatagattgcctttgtgcttgattgttttttacttccccttctaatttggaactaacttatttttccaatatcaatgatattatgcaaatcaagccaaataatttttttggatttgttatcatacaaattcttgttttttagaaagaatttaagttatatacttttaaaatact

SEQ ID NO: 15903 - DNA, 540 bp, Glycine max
  unsure at all n locations
  Clone ID: jC-gmle01810088f07d1
gaaaaacataatcagacccttgagtacccaaatacaaaattcttgaatcattcaaattccttttaattctaacattgagacagcattacctatacatagcaacatcacaggaatattgtaacaaacaataattttcttaaaaaccgtctctctctcacataataataataataataataataataataataataataataataataatatatattcagttaacaaaccaagaattcattaatgcacatactacaagcaatatttgtagaacctatcaaactatacagcaatttaaggtcagcgccagtggcaattgccatgacgcattatttcagatttcacctgtcccaagaggctgccttgaggtatctccagaggcccaagcttgataatctttctcaagctgcttaagacaaatttataacaacaagtcagtctctttagaatctataatttataaagaaccaacggaccggaatgaaatcaatggaaaagtattccctaaaaagtttctttcaatcttaanaacacagctcggta

SEQ ID NO: 15904 - DNA, 535 bp, Glycine max
  Clone ID: jC-gmle01810088f08a1
cggctcgaggaaagttggagtgttttctcgtttgctgtgctcagctccttatggagctctcactctctccaacttcacatcgagttccttccacaattcccactttgaattccgctaaactatcatccactaaggccaccaagtcacaacaacctttgttcttaagattttccaaacacttcaactcaattgggttgcaccatcacagtcacagatgctgctcaaatgctgttcccgagagaccccagagacccagttccataagggcttgcactggagttggagcttctggatctgatcgtccattagctgaaagacttttagatctgaaagatgcttgttggagatttttaaggccacatactatacgtggtacagcactaggttcatttgctgtggtggcaagagcattgattgagaacaccaatttgataaagtggtctcttttattcaaagctatctgtggtctttttgctctgatttgcgggaaatgttatatagtcggcatcaatcaaatctatgacattagcattga

SEQ ID NO: 15905 - DNA, 414 bp, Glycine max
  Clone ID: jC-gmle01810088f08d1
ataaaaacaatgcaaaatattgtccgtgtaacattatgaaatatgttaatggcattacatcaaagtaaaagcaaatagtatcacacatttatatacaaaaatactcattaaaaaaatagctagtttactaattgatacttgagacaacaaagaagatctctctaactatgcacgtatgcaccttttcccaagaaaaatgtagcaaggcttgctatatgaaaggaaatattgcatactcagcatagaacagattccatatgaatcgatagaatcctgatattgcatccttggtataatttgcttggtctaatatccatgcctggtaaatcaagcttattgcaaaaatcgtatgagccggtatgagtaaccaacgcctgaaagcctgaggcatataaattgctgccaaaacagaaa

SEQ ID NO: 15906 - DNA, 429 bp, Glycine max
  Clone ID: jC-gmle01810088f09a1
gtccatccaaatcttaaaaatattcagtgaagatcaacctcaatggcatctcttggcgtgcgaccagttcttccccctccattaacttccatctccgacccacctcctcttttcgatggcaccaccaggttgtacatcagttattcttgcccctatgcacaacgtgtgtggatcgctaggaactacaaggggctacaagataagatcaatttggtccctattaaccttcaagacaggccagcttggtataaggagaaagtctaccctgaaaataaggtgccatccttggagcacaatggcaaggtgttgggagaaagtcttgatttgatcaaatatgtagatgcaaactttgaagggacacctttgtttcccagcgatcctgccaagaaagagttcggtgagcaattgatatcccatgttgatacattc

SEQ ID NO: 15907 - DNA, 591 bp, Glycine max
  unsure at all n locations
  Clone ID: jC-gmle01810088f09d1
aggataataataccatattggtcattatatcatattgatcagtgatcacaaactggtacataaacattattatgacatcaaacaaacaagctgaaaaatgaacgtgattatgacttcaaactatcctgcaactctggcagataaacacaaccgacatttgactgcagatgcatcccatcccgtgaatgaaaggacgctatatgggcagagtctacattttagaggaagcctgcagcaatacaacgttcactgttgaggcaggaagcgtttcttgaaaagatcaacgatctcctgaggatcgactctagtctcggtataagcatttagcttattcaactcctcaaaccatgttgcaagtttaggccttccttctgtgatgtcatgtttgaacacctcagcaaagacaatttggaatctttcaacaaatggaatataagcaatatccaccaaactgaattggccaagcaagaatggcccatcatcaaatntaccaagagcattctncaagtattcaaaagcgggactggcttgtgtacagcatcccctttcaatgaaacgaacaggtctttgctgatgtatcaacatgggata

SEQ ID NO: 15908 - DNA, 463 bp, Glycine max
  Clone ID: jC-gmle01810088f10a1
agcactttaacattcctttctctaacctcgttcccactctcatattttcccttctgctgatattcagctaaactaagtcaataagatgactcagggaaagatagttgaagctgcagaagctcataaaacacttgaggatttcgatcctccaaagaagcgcaaaaggaacaagtatgcttttgcttgtgctgggctggcctccatgacttccatcttgcttggctacgatattggagtgatgagtggagcagccttgtacataaaaagggacctgaaagtgtcggatgtgcaaatcgagatcctgctcggaatcatcaacctctactctttgataggcttatgcctcgccggcagaacctccgactggataggtcggcgttacacgattgttttcgccggcgccatcttctttgtcggagcacttctcatgggtttctcccccaactattcctttctcatgttc

SEQ ID NO: 15909 - DNA, 529 bp, Glycine max
  Clone ID: jC-gmle01810088f10d1
accctgcgcccgcagcctcaacgggaagatctcagaactataaacccacgtgatgggacccgcaccaatggagaacgtggccacgtaagccaacaccatggctatgctcaatgcaacggcccacattagtttcctctcggagtgaccaatgatcgtgaggctgatagcgagcgtgaggagagagagcaccatgcccccgacactagacaacaacaacggacgacgacccacgcggtccaacgtaaaagtagccgccaagatgaaaacggttttgacgaatccaacggccacggttgcaagaagtttatgcgtgtcgtctttgatcccagccttctcgaagatcctggggctgtacaaaacgacggcgtctacgcccgacgcttgttggaagaagtgaatcccaagggcagcgattacgatgtgacgaattgggggcgttggatagaggaagagttctttccatacgccttcacctgtgcttcgtttggttacctgaacgacgtcgtcgttgcaactcttcgggatccct

SEQ ID NO: 15910 - DNA, 229 bp, Glycine max
  Clone ID: jC-gmle01810088f11a1
gatgaacgtgtttttgcatctcaagccaaggctgcaacttactacctagctatgtggtcttcatacggcggactccaatcttattattatgctgcttctgaaccagaacacacttcagattgcaagtataatcacacttcttattctacatcaaattcatagaagtgcaggctttccctcatcgacgcccgatgacgtgatacggagctttcatattgctgatgaggac

SEQ ID NO: 15911 - DNA, 290 bp, Glycine max
  Clone ID: jC-gmle01810088f11d1
aactgattcgagattagatggcaactgaatgttggccaatagggtttgtaaagtggctacaaccgggctcaagtaaaagcaaagacagaaacgtccaaacacatacatatgtccagagaccctctggaaaccccatgttacacaggatgaatcaccagtcaggggccacgcggcatcactggatctaggcaactcaacgcgagcattgagctaactctaacgtgtgaacgcgagggtcgcagcgagtccgcggatcaccaatgactggaataccgccgagcctgaccaat

SEQ ID NO: 15912 - DNA, 464 bp, Glycine max
  unsure at all n locations
  Clone ID: jC-gmle01810088f12a1
tgaatttgagagacgccggataacaaaggaagatgtacgagagcttatataccgagagactttggagtaccatccgaagatgttgaaggaatttctagaaggagcagagccaacaggtttcatgtatccaagtgctgtggatcacttcaagaaacaatttgcatatcttgaggagcattacggcaaagggggaactgttgctccgcctgagaggcaacatgcatcattaccgagaccttgtgtgttgtattcagaccactcaatgcagaacacatctgaggttgcagatgatctatccaaatgttgcatcaaagaagttgagaaacaacccatagaaaggagtagtgctatccctatgtctaggcttcctttacaagcaccgcaaaatattcaaggtgttgctgcaaggccccgaaaggttgttggttcagtaatgcgttacaacaactgtggngtagcagtga

SEQ ID NO: 15913 - DNA, 477 bp, Glycine max
  Clone ID: jC-gmle01810088f12d1
gaaacaaggagttaccattcattgggaaccaacacttcatttcttttgttacaccaaattaagttactaaccccaaagataccccatggagaaagggacaagagaatatgactttggcagtttggctataagttcttttaaaaaaaaaatacattatcttggtattggtactcaagtaatactatagggtaaaagtaacaacttcccattctgcaatgaagcaactgggggtctgccttcaagttcatggcttttcagatctttcatgtactctgttattaataaattagagtgcaagaaaatcatcaattagaccacgagaaccctttaaatttgaccatgcaaatagcgtgaattagaaatcatcctctagatacttcaacattaggacttgagtcccttgagctcttccctttggtacttcgaatgtgaaatttcagttcagatgatcaagattaggtgtagcacatgaaactc

SEQ ID NO: 15914 - DNA, 513 bp, Glycine max
  Clone ID: jC-gmle01810088g01a1
gttgaagttcaacatgaacctctgggtggttatatttcttcctataaaaagcagatagaagttcctgcagctgaagcctcaattgaagctactgcccaaggcattgcatcaatgctttgtgcccatggtccagaggttgaatggagaatttgcactatttgggaagctgcttatggcctgattcctacaagttcctcagctgttgatcttcctgaaattatagttgcaaccccgctacaaccacccatactgtcatggaatttgtacatacccctactgaaggtcctggaatatcttcctcgaggaagcccatcggaggcatgtcttatgaaaatatttgctgctacagtggaagctattcttcagaggacatttccacccgagtccactagagaacaaaacagaaaatcaaaatacctagctggcattggctctgcctcgaagaaccttgccatggcagaacttcgtactatggttcattcactcttcttagaatcatgtgcatctgtagag

SEQ ID NO: 15915 - DNA, 347 bp, Glycine max
  Clone ID: jC-gmle01810088g01d1
aaaagagagaaaaaaagaaaagcctgcctgatcatacattaatccaaacaattggaaatgacttccattacaagctaaatcaacttaagctttacccaaaatgggacaatttagaaaaggacctggttacagggtttttcggtactggacaaaactggtctattgagagccgactcacaagcaagttcagggggaaacttagtttagctaccgtacattcctgatacaaaatgagctttttataaacatacttgaattttgactgggggttttttcaacaggacttgccgaattttgcttatttgcaaacccggttagtcaaaaagccttttaataacctttttttt

SEQ ID NO: 15916 - DNA, 290 bp, Glycine max
  Clone ID: jC-gmle01810088g02a1
atggaatctgggtctagcgaaggagaagaggtgcagcaacgcgtgccgttgagggagagagtggagtggtcagatgttactccggttcctcaaaacgacggccctaaccctgtcgttccgatccagtacactgaagagttttccgaagttatggattactttcgcgccgtttacctcaccgatgaacgctcccctcgcgccctcgctctcacagccgaagccgttcaattcaactccggcaactacactgtgtggcatttccgacggttgttccttgagtcgctaaaagt

SEQ ID NO: 15917 - DNA, 415 bp, Glycine max
  Clone ID: jC-gmle01810088g02d1
aattagttctaaaaatttttaagcatcctgaaaaaacttggggatcatttccccttgaagtagtttcacctttttaaagcccccggaaatttctccacgagctttaattttcggggggggctttaagggcttcaagggggtaaagcacttgagactttttaatagcttttaggccccccaagaaaggagaccttgttttgacaaaattttttggattccaagcaaaattggaaaaaagggcttctttaagtagttctgggcaataattaagttcattttcccatcctcctagggtttgaagagccccctgtttatgaaaccatgcatgataatgttgggcatcaacggacagtttttttttggggaacccgagcccattgtttctagcttcaggacctaacttttgggcaaccca

SEQ ID NO: 15918 - DNA, 451 bp, Glycine max
  Clone ID: jC-gmle01810088g03a1
ggtttgaggaatttgcttggcgaagagtttgcgaggagcaagtggaggggttccacgaggttgctgcttctggatgaacgctacgcgggtcgcggcatggaggagttgcctgaggcaattaaggctgttttgaaggagtatgcagaaaagagtacaaatttgacgcttgagctagttagatgcaagctgacactattctatgattactggcagatgactgaggtcttggaggccttgctgcctgagggtatgattattccttctgcttttgagactgttggtcatatagcacacctgaatttgagagacgaacatttaccatacaagaggctaatagcaaaggttgtgctggataagaataagccaaggataccaaaccgttgtgaacaagattgattcaattcaaaatgagtacaggaccatgcagcttgaggttatagctggaaaccac

SEQ ID NO: 15919 - DNA, 570 bp, Glycine max
  unsure at all n locations
  Clone ID: jC-gmle01810088g03d1
aaaaaaataaataaatactcatgttacatatatacacaatatcaattttagacagctaatgcaatggaacaaaatttactacatgcaatgaataaatattgtttaggtatcaactgcagcagtatcagcaaatgctacacttttagggagaataaacgatgcgcacaacatccattttccaggagcaacaagtcgtacccgtcgcatgtctacgttgaccgcaacttctagcagcgcaattcttattctctcgtgaaaatcaaattctggatctcgtgctttggagaatccataaacatggatcaatggcaaagtatattccccatccttgggtctatttttgtatattccccgaaatgcatctagaaattctgcagcttcacttggcaagttcataaccacttgtgtgatggactgagaaatatcactgtcatacatagctttaatgaacctncttccatccatgttaaagacctttatcttcctctcaagtttgtttagaacacaatttctttccagatactcaacttgcataaaggtttaagtcatttagcaaaacacgcttaacta

SEQ ID NO: 15920 - DNA, 495 bp, Glycine max
  Clone ID: jC-gmle01810088g04a1
ctcgagccgaaacattaaagactatatggccgaaaagcttggcatagagaaaagcaaaattgatgacttgtccaacctcctctacaagaactatggaacaactatggctggtttaagggcaattggatatgactttgactacgatgaatatcacagttttgttcatgggagattaccttatgagaatttgaaaccagacccagttctgaggaacctcttgctgagcctaccctataggagactgatcttcacaaactcagacaaagtccatgcagttaaggcactaagcaggctaggattagaagactgctttgaaggaatcatatgctttgagacccttaatcccatccacaaaagcactgtctctgatgatgaagatgacattgaatttgtggggggttcaggcacaaccaatccaaccacaaaaaaaagatgctagcagctttcaaatctttgacatcattgggccatttgctcaacccaatcccacacagt

SEQ ID NO: 15921 - DNA, 522 bp, Glycine max
  Clone ID: jC-gmle01810088g04d1
gttcatcaatgatctaagcagtcacagatgtctccacagcaagcttgccaggataagcaacttctgattttatgtcatcttcccatagttctggcactgcctccctaaggttgtggatgctttctaatgcataatctgctcctttaattctctgagattttccaaccagcacagtgtgaagacccacacgttttccagcttgtgtgttgcggacactatcctcaaagaacaaagttctttgtggattaaggttggctatcttgagggccaactcaatggcattttctgatggtttgcaaataattggtgtctttggcaaaactgtgtggggattgggttgagcaaaatggccaatgatgtcaaagatttgaaagctgctagcatcttttttttgtggttggattggttgtgcctgaaccccccacaaattcaatgtcatcttcatcatcagagacagtgcttttgtggatgggattaagggtctcaaagcatatgattccttcaaagcagtcttctaatcct

SEQ ID NO: 15922 - DNA, 356 bp, Glycine max
  Clone ID: jC-gmle01810088g05a1
cagattttgccaagaaacaccagctgtgttatccacatccccttacatgccaagaacacattggtcacagacaatcttaacctttcgagaacctattgcaatgggatttggaaaaggaaacaggggtaaaccagaagcaatcggcactgaggtgtatcctgctacgaagattgatttacgtgtcagcattgtgcgttctactgagcatcgcagcattgatatatctttagaagctgctggtgttgaacctgatggtcagaaacgtagttggcctgctcagctttttaatatgcaggaggatgcatgacaccagtcgccacagcaccaaagatcattgtgcagcagtttttcttgtt

SEQ ID NO: 15923 - DNA, 433 bp, Glycine max
  Clone ID: jC-gmle01810088g05d1
gaaatgaatgaccgattttaattggaaaacagtactgctcgcaagttttgtcaaatacataaatatgaattggagaaacattacattttctatgtaataggaccggccgggtagagcctagcattcaacgagcaagcaaaagtagctatttctagtgaacaaaaataggaacctaaatgttagcaattacagctgtaacattccaaaactgattttaactagcagccaacaagaaaaactgctgcacaatgatctttggtgctgtggcgactggtgtcatgcatcctactgcagattaaaaagctgagcaggccaactacgtttctgaccatcaggttcaacaccagcagcttctaaagatatatcaatgctgcgatgctcagtagaacgcacaatgctgacacgtaaatcaatcttcgtagcaggatacacc

SEQ ID NO: 15924 - DNA, 409 bp, Glycine max
  unsure at all n locations
  Clone ID: jC-gmle01810088g06a1
gggtgtgcccgctgagaacgatggctgcaaatgtggaccaaactgctcctgcaacccctgcacttgcaagtgaggtgttgggagagcaagcttcaagcagagatagcccttaattaggaataatgataaactattaatgtgtagctaaaaacttatgtattatgtctgtgatggttttcgtgcactctggtgttttgtgttaaacaaacatccttagaataaagtggtcatgtcttgcctttcagcaagttcaagtgttttggacttgtgatgggtgtgttaagctcatggttgcttctttttttttttttttaatgtttggtaattggtcgcttctgtataaagctcggctaatctgaattatgaatctctgcttatcgtnttcaaaaaaaaagcactttaacttatc

SEQ ID NO: 15925 - DNA, 384 bp, Glycine max
  Clone ID: jC-gmle01810088g06d1
aatattataagcagagattcataattcagattagccgaactttatacagaagcgaccaattaccaaacattaaaaaaaaaaaaaaagaagcaaccatgagcttaacacacccatcacaagtccaaaacacttgaacttgctgaaaggcaagacatgaccactttattctaaggatgtttgtttaacacaaaacaccagagtgcacgaaaaccatcacagacataatacataagtttttagctacacattaatagtttatcattattcctaattaagggctatctctgcttgaagcttgctctcccaacacctcacttgcaagtgcaggggttgcaggagcagtttggtccacatttgcagccatcgttctcagcgggcacaccc

SEQ ID NO: 15926 - DNA, 445 bp, Glycine max
  Clone ID: jC-gmle01810088g07a1
ttgtgaactcaaaagatggacctccaacctttgagcagcccaagatgactctggagaagctcttgacgtatggtaacatgcttgtccaagaacaagagaatgtcaagagagtccaattggctgacaagtacttgaacgaggctgcacttggaaatgctaacgaggatgctattaacaggggaactttcttccaatcttgaattggaggcaaagcaaacttggcaagtaaatatttctgttcctgaaggttgtgctgatccaagtgctagaagttgtgatgggacttgcgtgtaacattcttagaattctcaatgtcttaggtgcaaagagaagatgccaagtttgagatgattttactatatttttcatattggactgtcttcctctataattttgagttaaagtgtccacttaaattgaatttggtgccttttccttttgtcct

SEQ ID NO: 15927 - DNA, 445 bp, Glycine max
  Clone ID: jC-gmle01810088g07d1
aggacaaaaggaaaaggcaccaaattcaatttaagtggacactttaactcaaaattatagaggaagacagtccaatatgaaaaatatagtaaaatcatctcaaacttggcatcttctctttgcacctaagacattgagaattctaagaatgttacacgcaagtcccatcacaacttctagcacttggatcagcacaaccttcaggaacagaaatatttacttgccaagtttgctttgcctccaattcaagattggaagaaagttcccctgttaatagcatcctcgttagcatttccaagtgcagcctcgttcaagtacttgtcagccaattggactctcttgacattctcttgttcttggacaagcatgttaccatacgtcaagagcttctccagagtcatcttgggctgctcaaaggttggaggtccatcttttgagttcacaa

SEQ ID NO: 15928 - DNA, 442 bp, Glycine max
  Clone ID: jC-gmle01810088g08a1
ttgtgaactcaaaagatggacctccaacctttgagcagcccaagatgactctggagaagctcttgacgtatggtaacatgcttgtccaagaacaagagaatgtcaagagagtccaattgggtgacaagtacttgaacgaggctgcacttggaaatgctaacgaggatgctattaacaggggaactttcttccaatcttgaattggaggcaaagcaaacttggcaagtaaatatttctgttcctgaaggttgtgctgatccaagtgctaaaagttgtgatgggacttgcgtgtaacattcttagaattctcaatgtcttaggagcaaagagaagatgccaagtttgagatgattttactatatttttcatattggactgtctttctttatattttgaagtaaagtgccacttaaattgatttggcgcctttttcttttgtcct

SEQ ID NO: 15929 - DNA, 445 bp, Glycine max
  Clone ID: jC-gmle01810088g08d1
aggacaaaaggaaaaggcaccaaattcaatttaagtggacactttaactcaaaattatagaggaagacagtccaatatgaaaaatatagtaaaatcatctcaaacttggcatcttctctttgcacctaagacattgagaattctaagaatgttacacgcaagtcccatcacaacttctagcacttggatcagcacaaccttcaggaacagaaatatttacttgccaagtttgctttgcctccaattcaagattggaagaaagttcccctgttaatagcatcctcgttagcatttccaagtgcagcctcgttcaagtacttgtcagccaattggactctcttgacattctcttgttcttggacaagcatgttaccatacgtcaagagcttctccagagtcatcttgggctgctcaaaggttcgaggtccatcttttgagttcacaa

SEQ ID NO: 15930 - DNA, 449 bp, Glycine max
  Clone ID: jC-gmle01810088g09a1
ctaatgcaacacccttgaatgttgtatcttctcctggtagcatgaatgacagtatcaagcagttaactgctgaggcttctgatttggattcaactgcaacatctagattcaagatgccaaggattgaggctaatcattcccttttggaagaaattagggaggttaatcagcgacttattgacacggtagtagacataagtaatgaagaagttgatccaacagcagctgctgctgctgctgaagggacagaagggaccattgtcaaatgctcttacaatgctgtggctctcggcccgagcttaaaatcccaatatgcttcagcacagatgtcaccaattcaacccttgcacttgcttgttcctacaaattattctaattgttcccccatactcctagacacgtttccagctgaatccagtaaggagaatgaagatctttctgtcaaagcg

SEQ ID NO: 15931 - DNA, 462 bp, Glycine max
  Clone ID: jC-gmle01810088g09d1
aatcataactacaatttaattatgagcatctggaagtgttattcttctgcagaaattacgggccttactgttgagctactatattagttattaacaaagccttggtgaaggcaatttgattcaagtcacacaaatcttactacattgagcgtcttaggcagcggcaaacatcgcaatttgagcgtaaaaataagcaagaaaatgggatactaactgaatacacaattcactgaaacgagaccaatttgacctgatgcatgatcgcttttcacctgcacccaaaaactccgtatccaatgattgacacaagttttggcaaatttaagaggaaaaaagatgtttgcatggaacggcaaggatcatcatgtggtcaagcaattctcccaagtcccatacttagagctgaaactcccaccaccggtctgttgtgcatgctcagaaataacaatgcgagcacaaaca

SEQ ID NO: 15932 - DNA, 94 bp, Glycine max
  Clone ID: jC-gmle01810088g10a1
gttttgagggagacatttgagttgatacgtaaaacccttgtaaatgcatgatgtaaagatggaaagttcaaagcgttgttttacgtatcaactc

SEQ ID NO: 15933 - DNA, 94 bp, Glycine max
  Clone ID: jC-gmle01810088g10d1
gagttgatacgtaaaacaacgctttgaactttccatctttacatcatgcatttacaagggttttacgtatcaactcaaatgtctccctcaaaac

SEQ ID NO: 15934 - DNA, 469 bp, Glycine max
  Clone ID: jC-gmle01810088g11a1
gggatgtatgcatcaaaggagaatgtaactggcttctgtcgttcgtctcagttgaaagtagcagacttctcatttaattttttagttggtaggatacccaaatgcttggagtatcttccaaggttaagctttcaagggaattgcctccagggtcaggagttaaagcagcggtcttctatacagtgtgcgggtgcctcacctgccagtgccaagagccagccagtggtgaatccaaatcaccaacctgctgaatatgtgtccaagcatcacagagcatcgaagcctgtttggcttttggctctagaaatagtaactggaactatggtgggctctctctttctgggtgctgctcttgctgcttttcagagatgtaacaaaaaatcatctatcattattccttggaaaaaatctggaagccaaaaagatcatacagcagtatatatagaccctgagtttttgaggatgtgag

SEQ ID NO: 15935 - DNA, 572 bp, Glycine max
  Clone ID: jC-gmle01810088g11d1
ttttttttttttttttttgagcttcgtaaaaagtaacccttattacatcataatataggtaccgtaatctccctggtctctgataaacacgtaggtgaatgggtccgggacgaacaccacaatgcccggtataatgcacaaaagaaaacactggtccaatacaatcttgttctattttaacaatttctggacttccactagtccgctagtgctatacaacgagaccttgtcgtgcttaagcctaacagaaaccctttttgagcaatcatttacagtagaaatgaaattgaggagtaaaatgaaaaaaaaaaaaaaaagtaatcagaaaaagtataactgctgtgtatgtctctgctttagtgtagatctgttaattttgagttttgactacattacgataaaagtgcaagttcagcccaagccaaagatgatgacttgagctccacgcttactgatgtgtcaattctgctctccagcatgctacataattctcgcatagatgggcgcacagttgtatcaggattgacacaaagagttattacctcgcatatcactttgagggcttcatatct

SEQ ID NO: 15936 - DNA, 487 bp, Glycine max
  unsure at all n locations
  Clone ID: jC-gmle01810088g12a1
cggtgcccttaattggtccctcttttccaaaccccaactgggtatcacaaagtttccaaattgaacgcaaaaacggaaatttcttcctcaaatgccttctgggtcgctcttctttgcatccagattacgaagtttttggtcgccagtaaggtctgtgattcaagtgctattttagcattttttttttttttcctggacggtgagggtcaacttgcatgcacatgttagtgaaaaaccacaataagggggatggatctaagtccctcgccgatacactggcgaaatggaaagaatataatgcttggctggagtctaacaatgaagctgagaagccggctaggaaggtccctgccaagggatcaaagaaagggtgtatgaaaggaaaaggagggcccgagaactcacgctgntactacaagaggagttaggcaaggacttggggaaaatgggttgctgaaatccgagagccaaacagaggaagtaggct

SEQ ID NO: 15937 - DNA, 515 bp, Glycine max
  Clone ID: jC-gmle01810088g12d1
gttgtcaagagagtctaacttagttgattaaacaagatacatgaattagtctaactcagtcggttaaacaagatgcgtaagtcattgttacaaaaaactgcagataaatatgactgaggcagctacaattgtgaactcaatgcagctacaaagactaaaagtcttgatgttgtgactgcaattgggttgccaatcctagcacaacctaaccatccattgctaatccaaagcacttgaaatagaaatttacattagcaaggaaagtagtagaaatttcaataacccgcactagcagggaaacaaagactagataacattatccaaagtaaaatagacacaagaaactagtcatctatcatgcatggcagaatacatttcacatcttacaacatgacaagatatccagctgcattaggtcaattccagaagaatggaacacttctcaaccaagtgaattttacaacagctaatctccaggtactaatagcaagatccattcatcctaagctaatcca

SEQ ID NO: 15938 - DNA, 492 bp, Glycine max
  unsure at all n locations
  Clone ID: jC-gmle01810088h01a1
cttggtctttctagaaatttagatcatccttcgtcaccagggttatggactagaaatttagaccgtacttcttcacctttgttatggactagaaatttagactgtccttcttcgccagggttatggactagaaatttagaccgtccctcttcgccggggttatggactagaaaattagatcgtccttcttcaccggggttatggacgcagccaacagtggctgggataaattcaagaagcattaatgattttagtttgggattgacatctcgaaaaggcggcttagaacttgtgagtggaagtaaatctgctatcgtgactaatacgacagtcgaaattgtggttcctgatgatactattgactgtgtatacggngaaaatggtcgcaatttggttcgtctgagacagatatcgggtgccaagggttgatatccatgaacctcgtcccggaacaagtgacaggattattgtcatatncggtacaccagatga

SEQ ID NO: 15939 - DNA, 451 bp, Glycine max
  Clone ID: jC-gmle01810088h01d1
aatgaaaggcttaacgatactttgttatgcactaatgaatcaagttattgattttaaataactacacttacgccactaaccacggatgactgtttgggaataatacaaggctggatattacatgatttcaggtggagagaaaaaggaagcgaacaaaactaaataatggggccattggagagaggggatatgtcatgagccactaagaataaatgcttggagaaggctctgcgctgcttgggtttcatctggtgtaccggatatgacaataatcctgtcacttgttccgggacgaggttcatggataacaaccttggcacccgatatctgtctcagacgaaccaaattgcgaccattttccccgtatacacagtcaatagtatcatcaggaaccacaatttcgactgtcgtattagtcacgatagcagatttacttccactcacaagttct

SEQ ID NO: 15940 - DNA, 513 bp, Glycine max
  Clone ID: jC-gmle01810088h02a1
gtcgagcttcaaactccgtctttccgaatcctctctttgtgattgtgttctgttctgcttcctaccgcgatagtttctcttctgaagcatggccatggcggtttctgcaattggttttgaaggtttcgagaagaggctggaaatatcctttttccagccgggactttttgctgaccctgagggaatgggtttaagagctcttgcaaagtcccagttggatgagatacttacaccggctgcttgcaccattgtttcatctctcagaaatgatcatgtcgactcctatgttctgtctgagtccagtctctttgtttatgcctacaagatcatcatcaaaacctgtggtactacaaagctactgcttgcaatcccacccatattgaaatttgctgaaatgctttccctcaatgttagatctgtgaattacaccaggggaagtttcatctttccccgtgctcagccctatccccatcgcaacttttctgaggaagtgctattcttgatggctacttt

SEQ ID NO: 15941 - DNA, 494 bp, Glycine max
  Clone ID: jC-gmle01810088h02d1
gcacgcatacaaagtgatttattaaaatccattcgatgttcaaatggtaatagtagaacaataaaaggtccaaacgccctaacaatggtctaacataaaagggaaaaaacaccaaagaaaaacaatcactgtctggaaaaccggacttattttcgcaaggacataataaagacacttaagaaaactactcttcttcatcttcctctttccagcacttcagagttgatctaggtgaaccacagtcacaagtcttggcaaatttttggtagacaagagaaccacccattccaagcccttcgtggctcctctcttcgcgacagtatcccttaacatccagaaaacacgtctgatcaaacaacttgcttgcaccatccacatgaactgcaacagagaactcagttgggagaaaacatgccaataccctcttaaccatttcgttcagattcaccactttgaagtcatacccaacagtctcaaagcttgcataactgaaa

SEQ ID NO: 15942 - DNA, 488 bp, Glycine max
  Clone ID: jC-gmle01810088h03a1
gctctttcgtgcaatccactgttactgaacttcccttctttgcttccaaggtgaggcttgggacggttggtgtggaggaagttctgggcttggggcacctctcagattttgagcaacaaggcctcgaaagccttaagcctgaactcaaatcatcaattgagaagggaatcaaatttgccaaccagtaattgaacatgttatcacatacatgtctggtaggttactggatattcctttaagaaccaaatcaaattttgcattctcagaaccattgatgtattgttgtcggcagtggtgtggcggttttgatgttttatttagtgtaggtatacgccatggtttaataattaaagtctgagaactgtttgttgccaaagggattgaacgatcttaaaaccaggtttaggatttggcattccattaataatggtcccttttaactgtatggtttcacttaatgtaattgcagggtgttgtaccctttattc

SEQ ID NO: 15943 - DNA, 407 bp, Glycine max
  Clone ID: jC-gmle01810088h03d1
gaataaagggtacaacaccctgcaattacattaagtgaaaccatacagttaaaagggaccattattaatggaatgccaaatcctaaacctggttttaagatcgttcaatccctttggcaacaaacagctttcaaactttaattattaaaccatggcgtatacctacactaaataaaacaacaaaaccggcacaccactgccgacaacaatacatcaatggttctgagaatgcaaaatttgatttggttcttaaaggaatatccagtaacctaccagacatgtatgtgataacatgttcaattactggttggcaaatttgattcccttctcaattgatgatttgagttcaggcttaaggctttcgaggccttgttgctcaaaatctgagaggtgccccaagcccagaa

SEQ ID NO: 15944 - DNA, 500 bp, Glycine max
  Clone ID: jC-gmle01810088h04a1
gtgatatatttgtacaaatgatttcggaaaccaaattaatcatcaaaacaatttggcggccagaaaggagagtgaaatgtgatgaaatcctaggatagactcgttaaagatttgggaatagaatgcagggaattagtgttttttgagttgtaccatgtacacattaacaacagtatatagatgaaactttttccttcaagtccctttttgtgtatctgtgcgttgatgttttttgtgatcgttaattagttaaaagatcacctcatttcatttttgatgtaccgaggagatgcttgaacaccaaggaaactaggggtggagaaggccacaaagaagaatcattctatttaaagtcagcctatcagtcaggttagttgatgcctggtcctaaaggttcaaaacattcctttgggggtagctgatgggtgtctccttacaaattctcagcgtttaaagggaggcatagctgaggtgtatacccgtcgaggtttatgaagagc

SEQ ID NO: 15945 - DNA, 448 bp, Glycine max
  Clone ID: jC-gmle01810088h04d1
ggccccaacaggtaaagctttaacaggtgaacaaataccaatttcacaatgaaagacattttagcaacacctttgtcacgaacaataagcagctaaaccttgggtcatgatatgaccgacccatccgctttatggttcataaggctctataggggatgctcaacaagggaggttacagaaaccaagggggtacaaaaaataaaatagccaattggagagcgatggatcccatggtctcctattacatttaaatcgcaaatccaggccaactttgaaaaactactgggtttgattatttttgagcagagtttcaaaactccggaaccttatcacaggcctgggggaatacattttaagcttttcataaacctttgacggggatacacctcaactatgcctccctttaaacgctgagaatttgtaaggggacacccattaggttccccca

SEQ ID NO: 15946 - DNA, 447 bp, Glycine max
  Clone ID: jC-gmle01810088h05a1
aaaaaaactaccctcgatccatgcctcaaaagggttgataataagtaaaaaaaatcaatgaattcatgataaaacccttctgcgtttttttattataaatttttttgtcaataaagggatcaaggggttgggggatcaaatggtaaagttcttttgttggtaaattggaggattagaaacatgactattgctttccaattagctgtttttgcattaattgctatttcatttattttattgattagcgtacctgttgtatttgcttctcctgaaggttggtcgaataacaaaaatgttgtattttccggtacatcattatggattggattagggtttctcgggggtattcttaattctctcatttcttgaggctctttttattctagatcaaaaacgaaatgaccccctccccaaaatttttttggtttgtcgggcacattaaaaagg

SEQ ID NO: 15947 - DNA, 546 bp, Glycine max
  Clone ID: jC-gmle01810088h05d1
ttttttttttttttttttttttttttttttttttttttttttaagaaaaaagaaagttctaattattaataaattatatctatatatatatatatacagatagatattctatatcttttatcttaattaatatttgacccctccttataatgggtgatagttttctttatttttaggaacttatccattccttttttaatgggcccgacaatccgaaagaattctgggggaggggtcatttcgtttttgatctagaataaatagagcttcaagaaatgagagaattaagaatacccacgagaaacactaatccaatccataatgatgtaccggaaaatacaacatttttggtattcgaccaaccttcaggagaagcaaatacaacaggtacactaatcaataaaataaatgaaatagcaattaatgcaaaaacagctaattggaaagcaatagtcatgtttctaatcctccaatttaccaacaaaagaactttaccatttgatcccccaaccccttgatccctttattggcaaaaaaatttataat

SEQ ID NO: 15948 - DNA, 445 bp, Glycine max
  Clone ID: jC-gmle01810088h06a1
caacaacgtaccttcatacagatgaggactgttctcaaggttgtggataactcgggggctaaaaaggtgatgtgcatacaggcattgaaagggaagaaaggggcaagattaggtgacacaataatagcatctgtgaaggaagcacatcctaatggaaaagtgaagaaaggaaaggttgtatatggggtagtggtgcgtgcggcaatgcaaaaggggcgttgtgatggcagagaagtcaagtttgatgataatgctgtggtgcttgttgacaagcaaggccaacctattggaaccagagttcttggaccagtgcctcatgagctaaggcaaaagaagcatgtcaagattcttacctttgcagggcacattgcataaatgagaaaaaaggcttgccttgagttttgttatgaaatcaatgtcacatctaccatttttatattggata

SEQ ID NO: 15949 - DNA, 511 bp, Glycine max
  Clone ID: jC-gmle01810088h06d1
aggcaagaaaccaaatcatatactagttatttaagtagaagccttctacacctgttttactcctcataaattgataaagaactcaaacttgcacatcacatcaaaatatccaaatataaaaacggtagatgtgacatttgaattcataacaaaactcaaggacagccctttttctcattcacgcaatgtgccctgccaaggtaagaatcttgacatgcttcttttgccttagctcatgaggcactggtccaaaaactctggttccaataggttggccttgcttgtcaacaagcaccacagcattatcatcaaacttgacttcactgccatcacaacgccccttttgcattgccgcacgcaccactaccccatatacaacctttcctttcttcacttttccattaggatgtgcttccttcacagatgctattattgtgtcacctaatcttgcccctttcttccctttcaatgcctgtatgcacatcacctttttagccccccgagtatccac

SEQ ID NO: 15950 - DNA, 488 bp, Glycine max
  unsure at all n locations
  Clone ID: jC-gmle01810088h07a1
catttccattaaaagagagaaaaaaaataaagagaaattttacaaaaatgccttcctcttccaccaccatagtctccaaatgcgtgatccaccccgaccagaaatcaaacatgaaacccttgagactctctgtttctgaccttccaatgttggcatgtcactacatccaaaagggcgtgttactcaccgccccgccctcctcttttgacgacttaatactttattttaaacacactctttctatcgcgctctctcactttcccgctctcgagggaaggtttgagaccgattccaacggttacgttaatattgtatgcaacgacgctggcgttgattttattcatgctaaagcaaaacacctaactctagacgccgtcgtttcgccgtccctcgttgatgttcacccttgcttcaaggaggagttgtttgcttacgacatgactatctgctacgccggccacaacacacccctcngcggcgttcaggtg

SEQ ID NO: 15951 - DNA, 585 bp, Glycine max
  unsure at all n locations
  Clone ID: jC-gmle01810088h07d1
acaaaacagctaaacgaaaactccaaattccaaaagcctattttggcttcaacatattttccttttattttccaatttccatttttcatcatcgtcatcatcatccatattattatttatttattatcatttcgtcctagtattggtcacctgaaaaacctccccggaatcacgttcagaaaaccattatatcagtagggccaaccaccgaaacacccaaacacagccttagataaaaaaaacactgagaccccaccctgcgaacgtttgacctttgaccaacacaaaacgacgcccacaccccatggtactattgtcgtgcaatcacccaccttccctgtccttaatttcatcaccgacttatattgttttttcactccctcgtcgagttttcactatcactactactgtgcagcaacttaatgaacaaacttattcaaacgacctgcgttacgtattgcataaactccatgtcgttttcgagccccgacatggtggccggngccaaaacgacctgcaaatcgacgcttgcgttccctctctcctggaacgcnggaatcttcgcgactngtcgtttccactcga

SEQ ID NO: 15952 - DNA, 526 bp, Glycine max
  Clone ID: jC-gmle01810088h08a1
atttcgtccacatgagtgtgctattccttgtccatttttatttggtccacgtaagtgtgctattttcgttaatgaatccgaatccgatcaatcaactttcctccacgacttgtgttgtggtcacgaacgtgttttcaagatttcatattaaagttactgatccgtgagacttgtgttcatttaatgcagagtccctaggaccataagacatacaaaattgaaaccacaagtccctaatggctaaagattagccccacgtcttccctcaacttttgcccttttcacccactgccacgggcgatatataagtttttagaaaatgaaaatttaaacatctaaatgcattgagtttatctcattcgaaatatttgtaattttatgaaaaaaaaatgttttatttatcactttaaaaaattaacataatattatttggttttaagtatttttcaataaatatataagaagagcatttataaatgataattaattaaatacttttcaaaattaaaattattttgaaatataa

SEQ ID NO: 15953 - DNA, 448 bp, Glycine max
  Clone ID: jC-gmle01810088h08d1
gaaacggtgggaatatgcatgcatttagaattgttaaacacaatagcaataacttttttccaacatcttttaataattctctaaattattaaataaaattgttgactatttttatattgtcctaatatatgaaatatatatttttttttataaacttattgctaaaaagacattgaaaagaatacagtacatgatattatccgtccaataatcaacagcgaaagtataaaatattgcaaccaattaaagaaaacaacagtcaattatcaccagcgtcatctattatctgttattaggtgcatgcgatgttggttgtgtttcatacagctggattcattttgtagcaatgatagttcacttgtttataaattaaactaagaaatgattggagggtaagcgaacttggggctacaaaccaaccatagccacggccattatactgtagtct

SEQ ID NO: 15954 - DNA, 475 bp, Glycine max
  unsure at all n locations
  Clone ID: jC-gmle01810088h09a1
aacaaatacaatcaaagaatcttctttgctttctctcctttgcactttccttctcctcgtgattttttgtttgcatcaaagggagaaactgggagacacagaagatgagagagataattagtattcatattggacaagctggaattcaggtggggaattcatgctgggagttgtattgccttgagcatggaattaaccccgatgggaccatgcctagtgacacctctgttggcattgcacacgatgctttcaacaccttcttcagcgagaccggattcggcaagcatgtgccaagggctttatttgttgatttggaacctagtgttattgatgaagtaagaactggtccttacagacaactctttcaccctgagcaattaatttctggcaaagaagatgctgctaataactnttgcaggcgacactacactgttggaagagaaattgtcgaactatgcctcgatcgtatcaaaaa

SEQ ID NO: 15955 - DNA, 463 bp, Glycine max
  Clone ID: jC-gmle01810088h09d1
aagtaatgaaaattgcagcattcctacgctgtcctttattttgctctttcactgaaacttacaaataaaccattgctgctcatgaggaaagcaattgtatcacttaacactttaacatgaaacaatagtaagaacagagctagcacacaacagaaaaatgcttaaaattcaatggacaaggacagacattagacagagaaaagaagggagatgtaggtaaggtagctggtgaaaatgttgatgaatgattgactctatttcgagtaatcgtcgtgttcttcttattcttcttcttcgccttctgctccaacctcttcatagtccttttcaagagcagcaagatcctcacgggcttcagagaattcaccttcttccattccttcacccacataccaatgaacaaatgccctcttggcatacatgaggtcaaacttgtaatcaatgcgcgcgaaaacctcagcaa

SEQ ID NO: 15956 - DNA, 465 bp, Glycine max
  Clone ID: jC-gmle01810088h10a1
ggtacctcctaggataaggctttttcttcagtacttgctcttggtggaacaaccttgtaacaatggcttcctcagttacttcctcttttcgcatcagcaatttgaagtcggtttttgttggtgagactaataaactcagagtttcaagtgttcctggtgctcatgttggtttcaatagaaagactgtagaatgtaaggaatcacgaattgggaagcaaccaattcctgtgccatccaatgtcacagtcaaattggaaggacaggatatacaagtgaaaggtcctttgggtgaacttgcattaacttatcctcgagaagtgttggttgagagggaagagtcagggactctaagggttaaaaaggcagttgaaaccagaagggccaatcaaatgcatgggctttttaggacacttacagacaacctggtgattggagtatctaaaggctttgacaagaaacttcaac

SEQ ID NO: 15957 - DNA, 485 bp, Glycine max
  unsure at all n locations
  Clone ID: jC-gmle01810088h10d1
actcggttaaaatatttccattgctaacaaatgaggaaaaacaacaggagataaatgaaaaaggaaaattgaaaccccccattacttcttcttccctgcttttccttcctttctccttacaatttcatcagcatatttgacaccctttcctttgtatggttctgggggtctccacttcctaattgaagcagcaaactggccaacctcagatttgtcatacccactaactgtgattctggtgttttcctccaccttcactttgaggccatcagggattgtcatcttaacaggatgagaaaatccaagattcagcacaacttcgtttccttctaccatagcacgataaccaacaccaacaagttgaagtttcttgtcaaaacctttagatactccaatcaccaggttgtctgtaagtgtcctaaaaagcccatgcatttgattggcccttctggtttcaactgcctttntaacccttagagtccctg

SEQ ID NO: 15958 - DNA, 466 bp, Glycine max
  Clone ID: jC-gmle01810088h11a1
ggaagttggaagtcatggcagcaacattgatggcagcaacaacaagttctggtactcttaaagcaactcctttccttggccaaggcaagggtgccaatgccaatgctcttagggatgttgtctccatgggaactgggaagtacaccatgggcaatgatttgtggtatggaccagacagagtgaaatacttgggacccttctcagctcagaccccttcatacttgaaaggagaattccctggggattatggatgggacactgctggcttatctgctgacccaaaagcatttgccaagaacagggctcttgaagtgatccatgggcgatgggccatgcttggagcactatgatgcatcaccccagaggtgctagaaaagtggttgagagtggacttcaaggagccagtgtggatcaaagctggagcccaaatattctgcgaaggtgggcttgactatgtgggaaaccc

SEQ ID NO: 15959 - DNA, 501 bp, Glycine max
  Clone ID: jC-gmle01810088h11d1
gcttcagacaaaactatattaacaaacaagagacatccgaggtttaaattgaaccttagtccttaagaagtacactaatccaacaattattgtgatcatataatctacacataaatcacaaaggtaagcacgagggatgggatcatagggattagggaagaagaagtcatatacattttaagaccctggggaaaacttagtggcatagacccaagcattgttggccacagggttgtctaggtggtccaaaaggttctccaatggaccttttccagtgacaatagcttgaacaaagaatccaaacatagagaacatggccaaccttccattcttgatctccttgactttgagctcagcaaaagtgactgggtcatcagctaggcccagtgggtcaaagtactggcccccagggtagaggtcattgccctctcccaccccatcaagcccattgatgcggtacccttcaacaaggcccattaggataacttggaagcccagcac

SEQ ID NO: 15960 - DNA, 379 bp, Glycine max
  Clone ID: jC-gmle01810088h12a1
atgagaatcatttatttagcgaaaaaaatacttatttgattttttctacaaaattttcttgagccagcaagagtcacacatcataagaccgtgatctttaagcaggacaaaacaaaatctatcaaggaagccatatattggtatccaaattccaaacttgtgttgggtttggttccttgagttgagaggagtgaaaaaatggatcacagtgcggatgctcaacgcacggacctgatgaccatcacccgtttcgtgctgaacgaacagtcgaagcacccagagtctcgtggcgatttctcaatcctgctcagtcacattgttctcggctgcaagttcgtctgctctgctgataacaaggcgggtcttgctaagcttattg

SEQ ID NO: 15961 - DNA, 483 bp, Glycine max
  unsure at all n locations
  Clone ID: jC-gmle01810088h12d1
ctaaatcacaaaacattaataacttttcttaacatatacatgacatgtgtaacaattagataacaattgcttgtgagtagcgaaagacaaagatagctttcttccagcttcattcctatttttcatcagcagagtaaagagccttgatttcctctacatcttcatagctaccaaggaatatgggagatcgctcgtgcaacttctttggaaccaaatcaagtgccctttggttgccggtgaaagcctgtcctcctgcttgttccatcaagaatgacattgggaagacttcatagagtacacgaagtttcccatttggactctttttatcagccgggtacagaaagatacctccataaagcaatgtgcggtgaacatcagcaaccatgcttccaatatatcttagggactttggtgatgaaccatcttttggatacttgcagttntccacatacatggtagtagggccatcccagtttttagcat

SEQ ID NO: 15962 - DNA, 493 bp, Glycine max
  Clone ID: jC-gmle01810089a01a1
aaacatttttcttttccttcgaactccaattccctcaccagaacacggtcaccattgttttccctttcaacaacattcgccatcctttcgcgacgaagagaaaaaaaaatggggtgttagggtttcgattctctgcgacgctctccgcattgcgctaccctgcaccttcctcaccatatcgcgcgcctctctcactcccctactgtttttccgctccccaccccctctctctgtgttgcgaaaattagggttcataggtttggggctaattcttcttccgatttcgaaccgagcgcaatcgtaaagagagaaaatgtacgctgatcgcgtggagggtggagcaaggaggccagtgaaggaacgccttaatgatgtgaatggtgtcagtggctctactcgccagcagcagcagcgtcaaatcactgggcagaggtcaaggcaagatgacaagtgggaacatgatctttttgacaatgacgaacccccgatcact

SEQ ID NO: 15963 - DNA, 485 bp, Glycine max
  unsure at all n locations
  Clone ID: jC-gmle01810089a01d1
gccgcaagcatttcaatttaaatcacttgaaacaaattagttcatccatgtttgactttgcattttgatatcaacctcggtgttgaaaagtatcatccattctgttcctagcattacatcatttgcgcttgaggcatccaacagattgattcaaaaggtaaactctcaaatccattaattgcattataagagagtttcaggagattgacggggtttagcaaaataaacaccaaaattaacttgattaatgtctaaaaagtaagggaaaatattaaaaacgaaaataatcaaagaactatgctattacacttggtttttagatcctgatctcctcccaccaccatccagcttagaaaatcaattccataactaaatgttagactntcgactccagtgctaaaagtatcttctttcttggtcccattggtatgcccatagccttgagatcttcatcagtcatatgatngagaagctgcatatcaact

SEQ ID NO: 15964 - DNA, 385 bp, Glycine max
  Clone ID: jC-gmle01810089a02a1
ctgtcatcgtgtcgttcaccgataagatgtcgtattcaaggagatcaaggtattctcgttctccttctccatacaagcgatacagtaggtctgtgtccaggtctctctcaaggacaagctccagaagccgttcaaggagtttatcaagagatgcagaaaatccaggaaacaatttgtatgtgacaggattgtctcctaggatcaccaagagagaactggagaaacatttttctgctgagggaaaagtgatagatgtccatctggtagttgatccttggacaagggaatcccgtgggtttggctttgtgacaatggagactcttgaggaggcagatcgatgtgtaaagtatctgaatcgctcagtacttgaagggcgtgtcatcac

SEQ ID NO: 15965 - DNA, 406 bp, Glycine max
  Clone ID: jC-gmle01810089a02d1
ataccgggtaatcgggcaatcatctatttataaaaaatgtaaacattagggagaccatatcatctgaacatcagaaaagacaacacagaaaatacaaagtctaaaagaagataatggcaaaataaaaatggaactaaaccaagggaaagttcgaaattagataatctatactgacagtacataatttgaatcctacatgaaataggatcaggtggtttttagacaagccttgaacggatccaaaccaaaactcaatctagaactgcatataccacactaaaatattatccactataatcctatgatgtcaagccatataggaccaacaaatttcaagttgaaggagaggtagaccttggagtatttgacctcgatactgatcttgaacttgcactcacactcgggc

SEQ ID NO: 15966 - DNA, 551 bp, Glycine max
  Clone ID: jC-gmle01810089a03a1
ttattttctgcgtcaattttgctgaaaaccttaagtgggtatcctgaaaacactagattttcgattcgtttggtaagcggatttttaggtttgattattacgtttttctgttcttgttggatatggaagttttcggtgattggaagctttcaagcgaatctgggagcgtcggaattggcatctagggaagttggattttgcaatcttaagaacaatttaagggctttgaatgatagagttagttttggtaggaataatatacggtgggagaaggctgggattagcttcactttgagggctcttcagactgaacccgttagagaggagaagaagccttctgggattggaacaagatccaaaatggcaaatggtttaagattatttgtggggcttcccctagatgcagtttcttatgcctgcaattcaataaaccatgctagagcaatttcagctggcctaaaagctttgaagctcttaggagttgaaggtgttgagctccctatttggtggggaattgttgagaaagatgccatgggacaatatgactggtc

SEQ ID NO: 15967 - DNA, 545 bp, Glycine max
  unsure at all n locations
  Clone ID: jC-gmle01810089a03d1
aacaaggaaaagggatcctcatattatgcttacaaaataacctgtcctcaatctcatcccatgcactgatgcaagggtagtataataataactaattgttatatacatgattatcatagattacaaattttacaacccattaggctgcttgcatgctcacagttgaatcacggctcataaccacggcggattcagcacctacttcctcctcagcaggtagatcatctgaatgcagttccggttgcttaaggctccggacaaactcagtgaacaaaggaaaatgctctggagagaagaatgatgctcccattctatgatatgtgaacaagtccaatacattatctccagataaattcttcttaatttgttcaaacccccctggaacaccagattcagacgaattttgacctgaaacctgaacctcatgctttttgcaagcttccataatttgtgcaagtagcaactcagggctagaatggttttcctttggtgggtcgcgtccgaaaggtccatgccaggtaatataatttntgacgagttccgag

SEQ ID NO: 15968 - DNA, 518 bp, Glycine max
  Clone ID: jC-gmle01810089a04a1
tctgattttcagttccccagagacgaagatgtctctccggcgtggagtccctctttctctgttggtcctcttcctcctcctggtatctccggcggcgaccttggccttccgcaagaagcacaagatcccgggggccgatcaaaaccatagtggagatagtgatggagaaccgctccttcgaccacgtcctcggatggctcaaatcctcccggcccgacatcgacgggctcaccggaagcgaatccaaccctctatgagactcctccccctcctccgccacaatccccgtcactgacgacgccctcttcatcgacgccgaccccggccactccttccaggccattcgcgagcaaatcttcggttccaacgacacctctgcagaccctaccccaatgaacggcttcgcccagcaagccgagtcaatcctcctgggcatgtccaaaaccgtcatgagcggtttcaaaccccacaccctccccgtctacactgctcttgcaaaccaattcggtttattcgac

SEQ ID NO: 15969 - DNA, 557 bp, Glycine max
  unsure at all n locations
  Clone ID: jC-gmle01810089a04d1
gtatcagaagtcaaatatttaggaaatacaataaatatttatagaagtttctctattttaagaataatttatcataaataaaatcattactggtaaaattcttttcaatttaagaacaatcaaccactaaaatggtgatcaataactgatcgttcatgtagaacaaaattaatcaattatctgactaaattgttcttaaactgaaagtacttttactaagaacactcgtaatttttttcctaaacattatggtgaatatgctaaatatataccatatttacagcggtatagtgaaagaatcagtaagattctactagtttgtggtgatctccctcagcaactctgcttgtgagggaaggcctcattgtgacaatggctgactcattagccccagctttaagagcagcctttgcagcttccaggaacctcttcaccgcgtcttcggcgtacctgtttgcttctttcactgtcatagttttaccaatgtttggataggaatngagtacataatcaccattgagctgagatgcaagctggattaattccacttggaattc

SEQ ID NO: 15970 - DNA, 421 bp, Glycine max
  Clone ID: jC-gmle01810089a05a1
ctatctatccagatagaaagccttaaaattgcacctcgtctatgcttcactctgggatccgtggtgaagagcattatgagccttcgcagtgagccctacatattttacctcgttactattaactttcgggcataataccaattctttgctcggaccccttatccgctgattatcgtttaaccgcgctcggagctctacctcgcgtgcgtcgactatggcagcctctgttacttgcgcatgtcagtactcggatcgaccgggtactatgtctgattatcagcaacatttactgggtcaaggtggattctctttggggacttatatggtcctcctgcactggtctggactagagtcggttatatagttggacctactggagcagcttcgatcctaaaactgaggtgcacattgatgatatgac

SEQ ID NO: 15971 - DNA, 386 bp, Glycine max
  Clone ID: jC-gmle01810089a05d1
atagctaataagcataccaatcatcggacactgtaattagtcctgaattcacattggtggcctatacttaggcactaaaggcattaaaaacgctactaagcctgaaacgcatgatatttgactttaatcaacactctacatcctgctgccctcagcatcagtcctcgtgctcctccagtgggggcatgtcagtatcatcttcacctgcattcactggaacgctgagctcaagcttgaacattctggggatcccgttcacaaaagcgatgggctaccataggctgataccagaactgatactagcagtatctatctgtaccggtgcagggatcttcacgggattggcatacacggctgcatgagcgctcttactgagctccttcatg

SEQ ID NO: 15972 - DNA, 601 bp, Glycine max
  Clone ID: jC-gmle01810089a06a1
catactctgacaaccagcctggtgtgttgatccaggtctttgaaggtgaaagagcaaggactaaagataacaatttgttgggcaaatttgaactttctggcattcctcctgcccccaggggtgttcctcagattactgtgtgctttgacattgatgccaatggtattttgaacgtctctgccgaagataagaccactggccagaaaaataagatcactatcaccaatgacaagggtagactgtcaaaggaagatatcgagaagatggttcaagaggctgagaagtacaaatctgaggatgaagagcacaaaaagaaggttgaggccaagaatgctttggaaaactatgcatacaacatgaggaacactgtgaaggatgacaaaattggtgagaaacttgatcctactgacaagaagaagattgaggacgcaattgagcaagctatccagtggctagacagcaaccagctcgcagaagcagatgaatttgaggacaaaatgaaggaattggaagcatctgcaatcctatcattgccagatgtaccaagtggtgctggtcctgacatgggtggtgctgtgctggggcagtcgatgatgatatg

SEQ ID NO: 15973 - DNA, 355 bp, Glycine max
  Clone ID: jC-gmle01810089a06d1
aaaaaacaagggggatccccacttaaggaaaaaaacccaaggccccaagggggtaaacgcccgtatgaaatccccgggggaaaaaaattacgcccccccccacaaaaaatcttaaaaggtaaaactcaaaaaaaaagccttaaaaacggttaaacccgaaaaaggggggaaagcccccccccctttagccccctccccaaaatggggggcccgcccccttttccccgagggggggcggaaatatatcccggggggccccaaaaccagccccccccgggggggggcccccccccccgggggacatctgggccaaggagggggggccaaggccttccaaacccccatattggcccca

SEQ ID NO: 15974 - DNA, 575 bp, Glycine max
  Clone ID: jC-gmle01810089a07a1
ggaaattgagatccaaccatgcttggctcctttgaggaaaggaggattatgtcagagaagagatctgaaagtttgtccatttcatggatctatcattcctcgagatgatgaagggaggccactcaatgagaattcttcagatggcatgaatattgatttaaggactgatttagtagagcagttagcaaaacaagcggtgaaaaatgttcgtgaaagagatcaagaggtggcaaggaagagggaaattgatgaacagtcactgaaacgtgcaaaactagctaaagttcgggaacacaatgaagctgttttacgggatgctgctttggcttctacatcaagatcagccatgcttggagaagatggggaggcaactaatgaagataaactgtctgccagagacaagaagcaaagtctcgcttccatgctgcgaaagaaagtaacatcaaaagatagaatagctcagaaacttttaagttcacgggcaagggttactgcagataggcagcatgtgtcatgtgaagatgccaaatatagagaagccttcccaaatcaatgtgaactgggtataatctttg

SEQ ID NO: 15975 - DNA, 366 bp, Glycine max
  Clone ID: jC-gmle01810089a07d1
aagggggaacaaaccccagggaaatgggaatcggggattattgcccaactgggaaaccctggggcccccccaaaaggccaaaaattttccaaaaaaggggggaaaaaaatttaaaaaaaaaaaacgggccaaaaagggggtccccttaaacctttggagccaaaaggggccctaaagggccgcccccaaaaaaaaaactttgccaaaaaataaaggaaaagagggaaaattgggttgggttaacccaagggacccaaaaaaccctatggggctgacccccaggcaggggtttcccccaaaaaccggggtttctgaaattggggtcaaagttcaaaaaaatcaaaccagctcaacaaagattttccc

SEQ ID NO: 15976 - DNA, 549 bp, Glycine max
  unsure at all n locations
  Clone ID: jC-gmle01810089a08a1
gccgaagatgagggtgaggatggtgaggacggtgaagaagaacaagctgtgattggattatggagtggcattgcttggttggtagggatgactgtgttcattgctgtgttgtctgaatatgtggtggatacaattgaggatgcatcagattcgtggggtttgtctgtgagctttctcagcataatcttgctaccaatagttggaaatgcagctgaacatgcaggagcaatcatatttgctttcaagaacaagctggacatttcattgggtgttgcattgggttcagcaactcagattgccatgtttgtggtcccattatgtgtaatcgttgcttggataatgggtatcgatatggacctgaacttcaacctcctagagacaggttcccttgcgttggcaataatagtcacaggcttcactttacaggatgggacttctcactacatgaaaggccttgttctcctgctgtgctacattgctattgnggcatgcttcttcgtacaaagaacacccttaataatcaagctgatgttactaacatcacactta

SEQ ID NO: 15977 - DNA, 530 bp, Glycine max
  Clone ID: jC-gmle01810089a08d1
aagcattaatagaatttttatttctcacacaataaatacaagagattctgcaaactgaaaaagggatttcttactaaagcaaactcaaacaagaacaacttccactcatttggcatctaccgtagtagaacaggatcaaaagcagctctctgatagaacacacgtatgtattatattgaacatcttgcacagtggttcatttctcacagctattgcaacttaaaatacttgcaaagcttctgcaaattccaaactttctttttctcccttctttatggatatgacaaagtgatcagatcatgaaacaataatcaatccattgaatttgaatctgatttttggtttggatcgatgccaccattcttcatcttaggaagggacaacaaataggccaaagcctactaattaagcgcttaaaactgcattagtggttggtttaagtgtgatgttagtaacatcagcttgattattaaagggtgttctttgtacgaagaagcattgcccataacaatgtagcacagcatgagaac

SEQ ID NO: 15978 - DNA, 452 bp, Glycine max
  Clone ID: jC-gmle01810089a09a1
gcggtgaatctgaacgaaatggttcagagggtattggcatgtttcctcccaactgagttttctgttgcagttcatgtggatggtgcaagcaagtcgtttgagcagacctgctttctggatgttaagggattactgtcgtgaagagaggagccacgaagggcttggaatgggtggttctgttgtctaccaaaaattcgggaagactagtgactgtggttcacctagatcaactctaaagtgctggaatgaggaagatgaggaagagtagtttccttaagtgtctttattattctgtccttgtgaaaataagtctggttttccagatacgttattgtttttctttgatgtctattttagcttctgatagagaccatttgggcatttagacctttattgattctattaccatttgaacatcgagtggattaataaatcactttgtttgcgtgcaa

SEQ ID NO: 15979 - DNA, 449 bp, Glycine max
  unsure at all n locations
  Clone ID: jC-gmle01810089a09d1
gcacgcaaacaaagtgatttattaatccattcgatgttcaaatggtaatagaaacaataaaggtctaaatgcccaaatggtctctaacagaagctaaaaaagacaacaaagaaaaacaataacgtatctggaaaaccagacttattttcacaaggacagaataataaagacacttaaggaaactactcttcctcatcttcctcattccagcactttagagttgatctaggtgaaccacagtcactagtcttcccgaatttttggtagacaacagaaccacccattccaagcccttcgtggctcctctcttcacgacagtatcccttaacatccagaaagcaggtctgctcaaacgacttgcttgcaccatccacatgaactgcaacaganaactcagttgggaggaaacatgccaataccctctgaaccatttcgttcagattcaccgn

SEQ ID NO: 15980 - DNA, 449 bp, Glycine max
  Clone ID: jC-gmle01810089a10a1
cggaaagagagagagaagctagagagagaaagagaccaatctaattagtgtacaataaacagagacgctgtgtgggtgtggctctggttgtactagacagagggatagcctatgctgcactaaagcccacaccgtcaaaccttacgtctcatcattgcctcggctctggaactcaattggcctgaaccatctcctgctcacatgcctctcatacgctcaggctaacataccgctgggactccgtcacctggggacatgtacttgagctcgaccattcctctctaatcctccattacctgacacactatctcatgttacccatgcttgcagatgactgttaacgtcacatcctatccgattcacaacactatcatcataccctatgatgctgccaccatccatggagaacacgaatccattgatgctgccgctctacatcaatgctctct

SEQ ID NO: 15981 - DNA, 525 bp, Glycine max
  Clone ID: jC-gmle01810089a10d1
cttcatatatgtattgtgtaataaagtaccaagtcaagcattttacttgtcacaacatcaccgtgtatctaaaatcacaaaagatagcaatgtgaagcctcattgtagtctcctgattacttctcttcacttcaaaccttagataagttgggaacagtggcaaacaggaccttccaggcagaactagagattattcccacttgcaaaaaaagggttcaggtgaagagagattacactgtcaatgaaactccgggcagaaattttctcatataaaaaaagattgaagcatagataagcacaacaaactacgaaaattggagatgtgaatggacatgtgcataatggagttgcagattcttttgaagttattcaaaagcaaggtgcgtgtatgggttgctaaaattctcaaggttggccatggtttattcaagatcaaagggatggccacataaagattatatgatcacagacaattggtgccatgtgtgctatagacccgaatgtggagctgggataattgaaaaa

SEQ ID NO: 15982 - DNA, 463 bp, Glycine max
  unsure at all n locations
  Clone ID: jC-gmle01810089a11d1
cattcgaattcattttatttatatattaatattatattcaaatgaaataaaaagatattaaaagatactaattataagaatttgaaagtgaaattataaagttattaaatgattaatcaatttttttctacctgttcctgtagtaaaaagagttccatctgttcttgaatagcttccttcaaaaggacttctgcttccccagtgaatgtcttggtagaagatatgatttctttgaattgaggtttattcgtgtttaagtaagcacgtaactcaacaagaaatttccttacctgtccaatttctaatgaatcaagataaccattcgttccagtataaatagttattatctgttcctccacggtaagaggagctgattgggattgtttaagcaactcgcgcaatcgttgacctcttgctaattgattntgagtagctttatcgagatcagaagcgaattgggcaa

SEQ ID NO: 15983 - DNA, 517 bp, Glycine max
  Clone ID: jC-gmle01810089a12a1
attcaattccagaggccaagtgctaaggaacttctcaaggaccgttttattcggaatgctaggaagagttcaaagctttcagaaagaataagggagcgtccaaagtaccaaataacggaagatgaggagacacccagaaatggtccaagtgggatgggggaggcatcaggtactgtaaaggtggcaagagattcaagaggtgaagaaaataatcgacccagggatcagggtaaaaccctgaaaagtgctggatgggacttcagcattggtggatcacagggtactggaaccttccgtaatgtttctcgaccaccgcagtttagagataagaaaactgaagcttcacataatcagctgacccaacgaaaagctccagagaggggctatcaaggggtatctgtcaatagaagtgcacttaatgagtcacttgaaagttcctttggaagagatcttagagcttcccaccatgatgagcatctggataatcatcttggagatgatgaattatctgggaatg

SEQ ID NO: 15984 - DNA, 525 bp, Glycine max
  Clone ID: jC-gmle01810089a12d1
ttgttgttttttttttttttttaattcgtaaattggcttattatcccactttgcagagagaactatcagaaaatacaaatcaatgtagattttgttacaaattgcatgtaactgagaaaaccctcatacagcattactgtcgccatcactatgagaaaaaaataattaaaagaaaaggtaaatttaataataataataataataataataataataataatagaacatagaacaacaatttgttacaataatatatgtacaattaattgagagaaaaaaaaaaaggcataaatagagacaacacacaaattggtatcttgtaacttcaaactctgctcaagatgggtttagatcccgtgaggtttggccctgccatcttgagagaagaaatcttgctagtgggcttaaattgctattcgaattatgttccttggtttgacggttcttgctgttatcagcctccgcattttgggtttcttcagctgacttggtcttgctgaatagatggcctgacagtccctgcat

SEQ ID NO: 15985 - DNA, 354 bp, Glycine max
  Clone ID: jC-gmle01810089b01a1
ctctgcttttgctagtggtactgtcttagctttgattctctgttctctgttttgttctgtttcgcgtattgtcttcatacaggaacttgaacaatgaagaatgcaaagggcaagggagcagcaagggcctcaaaagaatcactgaagcccgttgatgaccgaaaggttggaaagcggaaggcttccggtaagcctgggagaagtagtgcaccaaagaaggagaagaaggccaagaaagaccccaacaagcctaaaagaccacccagtgctttctttgtgttccttgaggagttcaggaagacctttaaggctgagaatcctaatgtgaaggctgtatcagttgttgggaaagct

SEQ ID NO: 15986 - DNA, 479 bp, Glycine max
  Clone ID: jC-gmle01810089b01d1
gatcagaaagaaattatattacttaaagcaacccatgtaaggctacaatgcacaaagagtgattcaggtacgatagctaagtgagggaagctcaagtagttggtagagtatatcatgccaacaaaagaagaaattcttttctaccagcacaaatataaaaaagtagcctagtatgcacaatcagaatatataatagcctccttcacaaacaaaacatcataaccaaggttttggacatcaatctcagtcatcatcttcatcgtcctcttgctcctcatcatcctcttcctcctcctctccactggcatcatcttcatcattcacttcagatttggacttgtctgattcttcatcatctgcggagcttgcctgctttttatcataagctttgataagtttttcatactcagctgtccttttcgcagccttggcttcatatggagctttctcagcactggacaaggatttccatttctctc

SEQ ID NO: 15987 - DNA, 365 bp, Glycine max
  Clone ID: jC-gmle01810089b02a1
cccaaagtgtgaggccgcccctggttgtggtgaatggaagaggccaacgaagaggaatccagcttataagggaaagtggagtgctccttacatcgataaccccagttacaagggcatatggaagcctcgcgagattccaaaccctgaatactttgaactcgcaaaacctgattttgagcctattgctgctattggcattgagatttggacaatgcaggatggcatcctatttgacaatgttctgatagctaacgatgataaagttgcagaatcctatcgggagactacatggaagcccaagtttaccgttgagaaagacaaactgaaggctgaagaggaggcggcaacggggttcagatggtatt

SEQ ID NO: 15988 - DNA, 507 bp, Glycine max
  Clone ID: jC-gmle01810089b02d1
gcgttaaaaacagaatccattaatagaaaaataattgtacaacttcaactagctcaaacactcgagtctccaaaaacaggagaagatctacacccctgaagcaaataatcttttccttttcttaaaaggaagaaaaaagaaaatactgaaaacagagtgcacctaaaatgaaactaagcccaaaatttatctgtggtgatgatgatactaaacagggcgccactttaaaataaagattcaaccatttcaagtttctcgccttggcctccgacgcgcagcattagatgcttcctctttctgtttctccttctctttgttttcttcattctctccactaccttggttattggaagcttctgtgcgttctggtttcttctccacctttgcaggtttcttgccaccaaatatgagtctgaagaaaattgacacgaagacaaccacaacagctacaagaattccaattgtgagatttggctgtttctcagctttctcaatgagatcgaaatc

SEQ ID NO: 15989 - DNA, 570 bp, Glycine max
  unsure at all n locations
  Clone ID: jC-gmle01810089b03a1
gctcgagcggctcgagggagaattgctgaggtgaaggctaatgaaaggaggaaagctctggaagagatcttgtatgcattggtagtgcagaagttcatggatgctaatatttctttgataccctctgtaaccccagatctttctgggaaggttgatttgtggccaaatgaagatggtaaacttgagctgcttcactcacacgaagcatatgagatgattcaaaaccacctggctctcattctcggtaacagagctggagatttaacatcaatagctgaaatcagcaaattcagggtagggcaggtctacgcagcatcagtgatgtatggttattttcttagacgagttgaccaaaggttccagttggagaagacaatgaaagttcttccaaatgcaacagaaaaagagaatagtgctcatcaaactacaatggacaatgcaagacccagtattgaagaggacacttctcaagtgatgtctcatcctgaagtatctacctggcctggtggtgatgtccgtcccggtggatttggctatggtgtaaaggcaaccangttgcgtaactacgtg

SEQ ID NO: 15990 - DNA, 482 bp, Glycine max
  Clone ID: jC-gmle01810089b03d1
aactagaaaataagcttccctttattagtgaaatccagagccactaccactacagtatatacatattaattagtgaaacaatatttggacttttaacaccgaagttacattcaaatttactccatcagtcagtaccaacacactataaactatgccttgtgatgtatgagagcaaacagaactcaaaaggacaactgaatgcacgaggttccctcccacctggtgggatctaaaaaggatacacatataaagatttactcagttcaacacaaaatggtaccttgagtccacatagctctcaacatcccagagaaaagaaccaaatgtcacagcctctaaaacaagcttctttaaaccaccaaagctaattttgatgttttcatccttagagactgcccctcaggtgttacaacaatttcaggtcttccaaacaatgcttctgtgtgcttctcgatgatgctgacagcctctttggatctaat

SEQ ID NO: 15991 - DNA, 526 bp, Glycine max
  Clone ID: jC-gmle01810089b04a1
gctcgagcggctcgagggagaattgctgaggtgaaggctaatgaaaggaggaaagctctggaagagatcttgtatgcattggtagtgcagaagttcatggatgctaatatttctttgataccctttggaacccccagatctttctggtaaggttgatttgtggccaaatgaagatggtaaacttgagctgcttcactcacacgaagcatatgagatgattcaaaaccacctggctctcattctcggtaacagagctggagatttaacatcaatagctgaaatcagcaaattcagggtagggcaggtctacgcagcatcagtgatgtatggttattttcttagacgagttgaccaaaggttccagttggagaagacaatgaaagttcttccaaatgcaacagaaaaagagaatagtgctcatcaaactacaatggacaatgcaagacccagtattgaagaggacacttctcaagtgatgtctcatcctgaagtatctacctggcctggtggtgatgtccgtcccggt

SEQ ID NO: 15992 - DNA, 555 bp, Glycine max
  Clone ID: jC-gmle01810089b04d1
aactagaaaataagcttccctttattagtgaaatccagagccactaccactacagtatatacatattaattagtgaaacaatatttggacttttaacaccgaagttacattcaaatttactccatcagtcagtaccaacacactataaactatgccttgtgatgtatgagagcaaacagaactcaaaaggacaactgaatgcacgaggttccctcccacctggtgggatctaaaaaggatacacatataaagatttactcagttcaacacaaaatggtaccttgagtccacatagctctcaacatcccagagaaaagaaccaaatgtcacagcctctaaaacaagcttctttaaaccaccaaagctaattttgatgttttcatccttagagactgcccctcaggtgttacaacaatttcaggtcttccaaacaatgcttctgtgtgcttctcgatgatgctgacagcctctttggatctaattgttgcatatctttgagtggatcaccatcaaaggacatcacgagttacgcaacctgggtgcctttacaccata

SEQ ID NO: 15993 - DNA, 568 bp, Glycine max
  unsure at all n locations
  Clone ID: jC-gmle01810089b05a1
tctcaagcaaccatggcaatggcaacccaagcctctctcttaaccccacccctctccggtctcaaagccagcgaccgcgcctccgtgccatggaagcaaaactccagcctctccttctccagcccgaaagcccctcaagttctccagaacaatcagagcagcagccgccgacgagaccacagaggcaccagcaaaagtagaggctgcaccggtcgggttcaccccaccagaacttgacccaaacaccccttccccgatcttcgggggcagcaccggcgggctcctgcgcaaggcacaggtggaggagttttatgtcattacgtgggactcacccaaagaacagatctttgaaatgcccactggcggcgccgctatcatgagggagggtcctaaccttctcaagttggccaggaaggagcagtgcttggctcttgggactaggctcaagtccaagtacaagatcaagtaccagttctacagggtcttccctagtggngaggttcagtatttgcaccctaaggatggtgtttaccctgagaaggtcaacgccggacgccaaggggtgggt

SEQ ID NO: 15994 - DNA, 489 bp, Glycine max
  Clone ID: jC-gmle01810089b05d1
agcgaaaaagaagtgtaaaattaaggtacagagtttaagcaatatttgtggcataataaaattgacaataggtacatgatatcacatgagaatatatagcatataaaggaagcacgggggatgatgatgatgaagatagagttgtgtgctcacaaatcatagggctgcttgccagtgaacttgacctcaataggactaacattcttaccaatagacctgaagttttgacccaccccttggcgtccggcgttgaccttctcagggtaaacaccatccttagggtgcaaatactgaacctccccattagggaagaccctgtagaactggtacttgatcttgtacttggacctgagcctagtcccaagagccaagcactgctccttcctggccaacttgagaaggttaggaccctccctcatgatagcggcgccgccagtgggcatttcaaagatctgttctttgggtgagtcccacgtaatgacataaaac

SEQ ID NO: 15995 - DNA, 593 bp, Glycine max
  unsure at all n locations
  Clone ID: jC-gmle01810089b06a1
tggatccctacaagcaccggccatccagcgccttcaattctcccttctggactacaaattctggtgctcctatttggaacaacaactcctctttaaccgttggagctagaggtccaattctgctggaggattatcatcttgtggagaagcttgcatattttgatagggaacgtatcccagaacgtgttgtccatgccaggggcgctagtgcaaagggtttctttgaggtcacccatgacatttctcacctgacatgtgcagatttccttcgagcccctggagttcagacgcctgtaattgttcgtttctcaactgtcattcatgagcgtggtagccctgaaaccttgagggaccctcgaggttttgccgtgaagttttacaccagagagggtaactttgaccttgttggaaacaaccttcccgtcttctatgtacgtgatggcatgaagtttccagatatggttcatgctcttaaacccaatcccaagaaccacatccaggagaattggaggatccttgacttcttctctactttccagaaagccttcacatgttcanccttttatttgatgatttgggtgtccacaagatta

SEQ ID NO: 15996 - DNA, 411 bp, Glycine max
  Clone ID: jC-gmle01810089b06d1
tttttttttttttttttttttttttttttttttttttttttttttttttttttttttttttttttttttttttaccattacagcaggaaacatgcccaaaagggttataaataccaacaaatacaaacgggtttttttgagaaaggtcaaactaggtacaatcatgggagttttgggccccctcaacattattttgcaagaaaagggttattcttttcagggaatccaaaatcccatccttatcgtcctttttggacgtttgcaactttaacaatcttttcggaggtgggaacaacattaaaattttggccccgtgccttaaagaaaaattattttttggcctaaaaaacggtcaatctgaaacccgtttgattttcaaaaactggggatcttatgggttacccgggggtt

SEQ ID NO: 15997 - DNA, 492 bp, Glycine max
  Clone ID: jC-gmle01810089b07a1
atcgagaacatacgtgattgtagggctgtcttagcaactacttcagatgatggcatattaactccacatcagcttaccactgacttcaagccaaatttacctcaggaggcagaacgcataacacaatccagagggagggtattttgtatggaagatgaaccaggagtgtacagggtctggatgccaaatggtaaaacaccaggactagcaatatctagagcttttggagaccactgcatgaaggactttggactaatctccgtgcctgatgtcacacacagaaaaattaccaccagggatcaatttgtcatcttggcaacagatggggtatgggatgttatatccaaccaggaagcagtgaagattgtttcagcaacgtcacataaagaaaaagctgctcaaaggcttgtgaaatgtgccatacatgaatggaaacggaaaaaaagtggcattgcgatggatgatatgtcagctatgtgcctcttctttcac

SEQ ID NO: 15998 - DNA, 476 bp, Glycine max
  Clone ID: jC-gmle01810089b07d1
acacttaaccacaaatgtcattttaattgataagtttatatacaagtctatatgtatttctgtgttacaacttacaaggaagctgtaatgaactgtttaaccacccaacattttttaatcaacaattttgatggctggggggagttgatgagagggggaagagtgaaagaagaggcaaatagctgacatatcatccatcgcaatgccactttttttccgtttccattcatgtatggcacatttcacaagcctttgagcagctttttctttatgtgacgttgctgaaacaatcttcactgcttcctggttggatataacatcccataccccatttgttgccaagatgacaaattgatccctggtgggaatttttctgtgtgtgacatcaggcacggagattagtccaaagtcctttatgcagtggtctccaaaagctctagatattgctagtcctggtgttttaccatttggcattc

SEQ ID NO: 15999 - DNA, 546 bp, Glycine max
  Clone ID: jC-gmle01810089b08a1
aacataggtgattgtagggctgtcttagcaactacttcagatgatggcatattaactccacatcagcttaccactgacttcaagccaaatttacctcaggaggcagaacgcataacacaatccaaaggggagggtatcttggatggaagatgaaccaggagtgtacagggtctggatgccaaatggtaaaacaccaggactagcaatatctagagcttttggagaccactgcatgaaggactttggactaatctccgtgcctgatgtcacacacagaaaaattaccaccagggatcaatttgtcatcttggcaacagatggggtatgggatgttatatccaaccaggaagcagtgaagattgtttcagcaacgtcacataaagaaaaagctgctcaaaggcttgtgaaatgtgccatacatgaatggaaacggataaaaagtggcattgcgatggatgatatgtcagctatttgccttttctttcactctttcccctctcattaactgcccccagccatcacaattgctgattaagaatgttgggt

SEQ ID NO: 16000 - DNA, 492 bp, Glycine max
  Clone ID: jC-gmle01810089b08d1
acacttaaccacaaatgtcattttaattgataagtttatatacaagtctatatgtatttctgtgttacaacttacaaggaagctgtaatgaactgtttaaccacccaacattctttaatcaacaattttgatggctggggggagttgatgagagggggaagagtgaaagaagaggcaaatagctgacatatcatccatcgcaatgccactttttttccgtttccattcatgtatggcacatttcacaagcctttgagcagctttttctttatgtgacgttgctgaaacaatcttcactgcttcctggttggatataacatcccataccccatctgttgccaagatgacaaattgatccctggtggtaatttttctgtgtgagacatcaggcacggagattagtccaaagttcttcatgcagtggtcttcaaaagctttaaatattgctagtcctggtgtttaccatttggcatccagaccctgttcactcct

SEQ ID NO: 16001 - DNA, 474 bp, Glycine max
  Clone ID: jC-gmle01810089b09a1
tggttggaaggatgctgtaccattttaacacagccactaccaccaccctctctcacgggtctgtttgttgcctgaaatccttataatcagagcactccgaatttcccgcaaagggtgcacgcttcctcgtatcattgctcagtgccttacagcgggttgagagcacctgctttcatagatgcaattatctggtctactatgggaattggtcaacccttttatttgctgatgaagatgaacccatagggttcagttcttcatcaatatgatgttgacaacacccctggtgtcactgctgatgttagccacatggacactggtgctgcgggtcatggctttctggggcagctacatctcgagagtgcactcactggcatggacttggtaatcatacctgctggtgtaccaaggaaacctgtgatgacaagagatgatttatttaaataaatgctggaattgtgaggaccctttgtg

SEQ ID NO: 16002 - DNA, 548 bp, Glycine max
  unsure at all n locations
  Clone ID: jC-gmle01810089b10a1
gttgcatctcttcttcatgatgaaagattgcctcccttagattggaaaacgaggcacaagatagccatcggaactgcacgaggccttcactacttgcataaaggttgcaagaggaggataatccaccggggacattaaggcttcaaacattttgttaacaaaggattttgaaccacagatatctgattttggactagcaaagtggcttccatctcaatggactcatcattcaattgcccctatagaagggacatttggacatttggccccagagtactacttgcatggagttgttgatgagaagacagatgtgtttgcctttggtgtgttcttgttagaagtaatctctggcagaaaaccagtggatgggtctcaccaaagcttacatagctgggctaaaccaattttgaacaagggagagatagaagagttggtggatccaaggcttgagggggcttatgatgtgactcagttaaaaagttttgcctgcgctgcctctctttgnattcgggcatcttcaacttggcgacctaccatgagtgaggtat

SEQ ID NO: 16003 - DNA, 495 bp, Glycine max
  unsure at all n locations
  Clone ID: jC-gmle01810089b10d1
cacatccacaaaaaaaaatgttattagagatttgattagataggagtagcataaccacatgaactcctctctatgaaatttgtatatatacaagcaattgaaaaaggcatgtgactcttgattaagtacttccaatggagtcaagtaaagacattgaaaaggagctgtcatattcatattccagatcctcaaaaccccagaactcctcttcttgctctttttcttcctctggcattttccacttctctatatccgtctctccttcctccattatctctaatacctcactcatggtaggtcgccaagttgaagatgcccgaatacaaagagaggcagcgcaggcaaaactttttaactgagtcacatcataagccccctcaagccttggatccaccaactcttctatctctcccttgttcaaaattggtttagcccagctatgtaagctttggtgagacccatccactggttntctgccagagattacttctaaca

SEQ ID NO: 16004 - DNA, 124 bp, Glycine max
  Clone ID: jC-gmle01810089b11a1
atttattgccataggccgagggctctagaggtattgatggacctttgtattccaaatgttttgatgagttcttagcggtcgatgggatgatggtaccgtacggagttccatttaaaggaacatg

SEQ ID NO: 16005 - DNA, 312 bp, Glycine max
  Clone ID: jC-gmle01810089b11d1
aattcgaatacaggctatttatataacaatgcaatgtgcacttgaaataaatacatattaatggatactaagtatcagaatgcgtgtgtgagataataccgttattcagtgattcatgaagcatcactaacctgtacctgtagttaaaagagttccatctgttcttgattagcttacttctaatggacttatgcttactcagtgattgactagcaagaagatacgataatatatgatcagaggaatagtcaggtttaagtaagcgcgtaactcgacacgacactcccttagctgtccagttactaatgactc

SEQ ID NO: 16006 - DNA, 449 bp, Glycine max
  Clone ID: jC-gmle01810089b12a1
cttttgctttcttcttcttctattgtcacacatacacatctactccttccctcatggctgagcaatcttacaagtccatttacgatttcacagtcaaggttcggtattttgcttctaaaattgctgcctgctcatacccaactgttgtttctctatagttgcctgaaaagattgtggcttgctcatgcccaagtgtgtctacactcgaatggcttgatgggtgagtgaagatgatctaggaaatatgagggcacactatgatgacaattatatgtagcaggttctgattttgtattttttgtatttcaacttttatggagatcaatgaagctctctgatctaggtctcttttcaattgattgatgatattgctgattgcaggatctagatttaggttccctaacactgttattgtggtcttcatggaaaatgaatcgagttcggattat

SEQ ID NO: 16007 - DNA, 541 bp, Glycine max
  Clone ID: jC-gmle01810089b12d1
ttgttgtttttttttttttttttttgttttttttttgcatccaaatatattattatttcatggtttgggtaacagagcgagaacaccaatttatacttatggggcaattcaaaattcaaatacacgagatacattaagaacttttcagggcatatattaacttaagatccatatcgctacttgcccttagaaggcaccggacagattccctatgtcctcaggacattagatatgtatgaatcaaatcttactattcaagattgcaaaagcttctgtatgactttctcgattttcagaggtgaggtggtcggtgcatatatgtccacaagcttacgttctttggttactaagaactctgggaagagccacttgataccatcaccaaagattccccctttctgatgcttttgaaacttataaagaggggctgcattcttcccattgacttcaaccttatcaaagataggaaattcaaccttgaaccttgtgcaaacaacttgctgaattgcttgattgctttccggatcctgaccagcaaact

SEQ ID NO: 16008 - DNA, 260 bp, Glycine max
  Clone ID: jC-gmle01810089c01a1
acacaagctcttcaaagctactactgacaaccaaatggatttctcgggaatctccaacacaagtgtgaccactgacgcccgggccgatgccttattggaatgcacattcactaaactatatttcatgtctggctcccgcacacaaacgaccacaaatgacattacctatattcataaccactgaggactaccgcaatgcatgcatgtcagctctcaccaagacactgagagaggatggactgtatactacctggaccatc

SEQ ID NO: 16009 - DNA, 318 bp, Glycine max
  Clone ID: jC-gmle01810089c01d1
aagatgcattgttattcgttattcaggattgtagtccaagcactgcatccaagcttacaggatgatgaatgctcatcttgcaaggactgttgggaatggtgatatatatcatacagactttgcgggggagcagatacaagggctttgcgacttgattgcattgagactcctgtgctctagtgggtcatgagactggtgcactgtacttgtgcactgtcggcaaatactacgattccgatctatacaggatagcctgcatctttagcctcatgatgctacttgatagactgacaagcatttgcgactcattcatttgcc

SEQ ID NO: 16010 - DNA, 451 bp, Glycine max
  Clone ID: jC-gmle01810089c04a1
ctcgagccgaactcttcgaatgtctagctctgagagcacaaacgcgagaactagaacagcgtcatggttggccaccgcatcctttgatatcgatgtcccagaggccaaggctgcgcttatataccggcgtgaaaccattcacgcacgttcttgagccattccagctgggacggtccaccgcggcggttccctctcgtcacgggcacatgcgggagggatcggaacgtgggggtgacggacacttggagggcccggaagacttggcctacggacgctagctcacagtgtacgttcataccgggtgggaggacgagtcagatcaagcgagacacggtgaatgacttggaggttgactctgaaggtgtagatagggtcatcacaagacgaacgtcagttgaactaactgtgaaccgctatggcaaacttatctatgctgatgcctaaaagggac

SEQ ID NO: 16011 - DNA, 517 bp, Glycine max
  Clone ID: jC-gmle01810089c04d1
gctaactaaatgccattgctcttatataaaaatatatataacagattcctgaatggaatttccacatgatgacactccagaaactaaacattctcacatcatgacactccagaaactaaacattgatccgtgcatgcataaccttacgagatgttcactgatgctcaaactgcggggagagcaagatatggctcatcatctaaacgggttacacagggggcgagaatggaaccagcttatatatgactcccaattttaatcgcactggtcaatgctaattggggatcataataatgcgcatgtggttatgcttataaatccacgactagaactgctacattctgtccagagagatagactccctacatagctatgtgacattgcccaagccttgctaatgaaagggtatgtatatgccaattccaattcgggagaaagggccgtgaacattgcaatgcaatagtgcccttgaccatcatcatgaatgcaatcaggcatgccatgcagggcacagaac

SEQ ID NO: 16012 - DNA, 584 bp, Glycine max
  unsure at all n locations
  Clone ID: jC-gmle01810089c05a1
caaaatcgaaaatctagagcaaagtgattgattccagttccaatggccttgggcaccagcgccttgatcggaaggaaggttcttgtctcacccccaacccccaaaacaaccaaatcatctactccgctacaattccttttcaagagaagcatcttanatgctcacaattcacaagctgctctagctgcccttatcttttcctccgcgagcctctctgtgaccccacaagcccttgccgctgataacgtcacccctccccctgtaattgaagcccaacagagccaattaaacccctccaactcatcctcccctttctcacagaacctcctcctcacagctccaaagccacaagcctcctccgacctccccgaaggcaccaactggcgctacagcgagttcttgaacgccgtcaagaagggtaaagtcgagcgagtcaggttcagcaaagacggttccgcccttcagctaaccgncattgacggccgtcgcgccttcgttattgtccccaatgaccccgacctcatcgacatcctcgccatgaaacgcgtcgacatttcccgtcgccgaggcgaatcccccaacag

SEQ ID NO: 16013 - DNA, 521 bp, Glycine max
  Clone ID: jC-gmle01810089c05d1
ctccttgaatttgataaaataattattgattcttacagtgtacaagtcagagcgtattttatagtacaaacataattctgtgacttgcgtgtatgattatgcaacatataattccggtttttccatcaatgaatagactcatgaactcttcaccatccacagtttctttttctatgagaagttgagcaagcttgtgaaggatatcaatgtgagttgagataatatgtgttgccctagaatatgctctctctaccagttccctcacttccgcatccactacatccgcagttgccatggagtaatccttttgcgatgacatctgttgacccaagaatggatttccaccaggtccaccaatggcaacttgtccaatttttttgctgaatccaaatctctcaaccatctgccttgccactcgtgaaacttgcatgaagtcgtttgatgctccggtggtgacattttcctggccaaaaataacctctttggcaaccctttcacccagggcaacagccatctgattt

SEQ ID NO: 16014 - DNA, 499 bp, Glycine max
  Clone ID: jC-gmle01810089c06a1
tcaaagtttcttcctttctctgatatttgacttctctgacacatttggcgccttgtagagcgtgtcatggcaagaaggtggtatggttaaagactttgaggttgctgagcgtggctccttctctgggaacggactaccaagaccgtcgaccatcagcactcattgatgctgacgagctcacaatgcggtcctttcacagggctctcattgctgaattcattgccactttgctcttactctacattactgtgctcacagttatagggtacaagcaccagactgacctcaacgaaaatggtgaaatctgtggtggtgttcgcattcttgtcatcgcatgggccttaggcggcatgatccttatccttagatactgcactgctggagatctcatgggagtacattaacccagctggtgacatttgcgctgtttttgactcgcaaggtgtctttgatccgagccatcatgtacatggtggctcagtgcttacgtgctatctga

SEQ ID NO: 16015 - DNA, 450 bp, Glycine max
  Clone ID: jC-gmle01810089c06d1
aaaattaaaatttaacattttccataaatatatgttgggtacagagatgacagctgaagagaatcactctaaagaacaaaatgactctctaaagggaggaacaccacagaggaaagtgcataaggcgtcaccctgtcatgaaagagactctgatctacacttatccacaatctcgaagacatgatcgagagggtcaaagaaacgttgcaaaacacaagccaaaagcattcccaattattattaaacttgccatatcaacctgcatctgtccaaatcgtctttccactagagccatcatagggaagagaaggacgactcaagtatgggggttacttctgaatgatccaagagccttagctgcacctgctcttaagatgaactgatggtataaggctgcaatggctgccgcataaatggtactacccacaagatccaatggtcatcccatgg

SEQ ID NO: 16016 - DNA, 394 bp, Glycine max
  Clone ID: jC-gmle01810089c07a1
cctcggggaattccaattccacattttcaagaaataaggaggcaaaaatgttcatatatgaattggaattatttgttttcttattaggcctatcctgaagccaaaggaaatgagatcggaattcctcggggaattccaattccacattttcaagaaataaggacgcagacatgttcatatatgaattggaattatctgatctcttattaggcctatcctgaagccaatggatatgagatcggaattcctcgtggaatgtccaattccacatttacaagaaatactgaggcaaaaatgttcatatatgaattggaattattagtgatcttattacgcctatcctgaagccaaaggaaatgagatcggaattcctcgggggtaccgagctcgaatt

SEQ ID NO: 16017 - DNA, 292 bp, Glycine max
  Clone ID: jC-gmle01810089c08a1
caagatcttccccttcacggagaccaaggcctgtgacgtcttctgcgcaaacttaaaaagctgtttctttttctcgatcctactgcttctctttttagcaactgttgctctgctctacgttaaggacaagcaagttgaagcaattcctctggatgatgccactcaaccctcttgtttctttcagcttttcggtgctctgaaagagctcaagagaccgatgtggatgctgatgctggtcacagctgtgaactgggtggggtggtttccttacttccttttcgacactgactga

SEQ ID NO: 16018 - DNA, 529 bp, Glycine max
  Clone ID: jC-gmle01810089c08d1
gaacattgtaaaaagtagcatttcccttattatcattaattgatgtaaagtcttaaactaagactcatccttaatcaccacattcctctgaacactgaaacagactaaaattatataagagggaagggtcttccaagaagttccaaccactgcaattatgtacaatcacaccaaactctgcaattactatgttcagtgggtgctacaaaaggttacaaatgtagcacttggtgggtctattacataattacacaccagcttcaaatcaaaagagactatccaatttttcctcttttattactggttttttttttctttctattaaagcaggggacaaaactgaaacatgcaaaactccattaactagtgaaagccccctgccatcatgcttgaagccttggcctcatcagctggctttggagttggcagcaagacaatcgccattatggcgctcaacgcggctgccgcagcacccaccatgaaagccggcaagttgccaccaccaaacaaggaatcccatggaccactt

SEQ ID NO: 16019 - DNA, 506 bp, Glycine max
  Clone ID: jC-gmle01810089c09a1
cagcgatggcacagaagagattcatcatcgaggtcgagaaggcgaaggaggcgagcgaaggaaggccttcgagaggacctgtctatcgtagcctcttcgccaaggatggattccctgctcctatcccaagtctcaatagttgctgggacgtttttcgattgtctgttgagaaatatccatcaaatccaatgcttggtcgccgggaaattgtggatgggaagccgggcaagtacaagtggctaacatacaaagaagtatatgaccaggtgatgaaagttgggaattctatccgcagctgtggttatggagaaggtgtaaaatgtggtatttacggtgctaattctgcagaatggattatgagcatgcaggcttgcaatgctcatggactttattgtgttcctttatatgataccttgggtgctggggctatagagtttattatatgccatgcagaggtctcaattgcatttgcagaagaaaagaaaatacctgagctattgaagaca

SEQ ID NO: 16020 - DNA, 524 bp, Glycine max
  Clone ID: jC-gmle01810089c09d1
aaaataaatgacgtatccatatataactactcagcgtatatacagtcaccaaaaggaaacaattgaacggagacaaacaccatcacatacagaaaataaattatctcccaaatcaggtctcaggcactgggtttacttccactcttatacatgttgtcaatggcattctgatagtatttaagcaactgtggcctcttcttcttgtatgttggagtgataaggtcacgttccatgtcaaatggaattgagtcaaggtgaactgcttttataaactcaaaacctttcaacttcttttccttcgcaatctttgagagctcttcaattatgtaactttttgctcgagcatcttcacagagagaattgaagtccatggatataccattttcttgggcccaatgttcaagtgcttgcttactggggttaacaacagccacaaggaaggcctcaaaactgtttccataaacccatatagattcaatagaagaaacttgaccgtaaatattctccagttttcgacagcaaca

SEQ ID NO: 16021 - DNA, 465 bp, Glycine max
  Clone ID: jC-gmle01810089c10a1
cgacgaggaattgtacaagatcgagacggtgcccgcgcgcaacagcatgtcggtttccgtcttggggcgggaagagcccaccgtgacggatctcgagacgaccgagcgcgagtggcgctactattgggattcctacgtcttgacacacaaaaccgagggcttgtctcatcgcgtcgacgaacccctactcaagcggaatctgggcgatttagagggcgctcacctcgagcgctctgatggtctggcctgtcgcattgcattcggcacatacaagatgtttgcagtggaagacagcgaagactactttcaccaccggtgtgcgccgtcgtccgaggcagacaaggaggcgcaaagaaagaggttggacgaggtgacggcgcgtttgatggcccgagttgtatgatgtcattgtactcttcatgtatcgagttgtccgttctctaaaagaattagctcagaactttt

SEQ ID NO: 16022 - DNA, 482 bp, Glycine max
  Clone ID: jC-gmle01810089c10d1
ggcggccgccctttttttttttttttttttttttttttttagagaacggacaactcgatacatgaagagtaaaatgacatcatacaactcgggccatcaaacgcgccgtcacctcgtccaacctctttctttgcgcctccttgtctgccttgggcgacggcgctcgccggcggtgaaagttgtcttcgctgtcttccactgcaaacatcttgtatgtgccgaatgcaatgcgacaggccagaccattagagcgctcgaggtgagcgccctctaaatcgcccagattccgcttgagtaggggttcgtcgacgcgatgagacaagccctcggttttgtgtgtcaagacgtaggaatccacatagtagcgccactcgcgctcggtcgtctcgagatccgttacggtgggctcttcccgccccaagacggaaaccgacatgctgttgcgcgcgggcaccgtttcgatcttgtacaattccttcgcg

SEQ ID NO: 16023 - DNA, 584 bp, Glycine max
  unsure at all n locations
  Clone ID: jC-gmle01810089c11a1
agtgacgcaagtgaaatggtattttctattgcattatctggtatttgtattatctttaaatcaagtgatccttgattgaagaacctctgtcactgggttgttttcattacagaaagagatgagcctttatgcaattcagggtctttgccatctttaagtaaacgccatcaaatttgaagtgatggcatgatacaatattgagcttgcattgatttttggtggcaaattataaatgtttctgttgaatatcgtatttttagttgaaaattccatattcactacagtttacagttgtaagactaaagaacaatgacttggttattttgcaaccaactagagaagttgaaaagcttgtaacagtcatgtgnggagtgaggtattttgtnttgtgttgctaaccatgagcatggtatatattttggttagtgagccattagctttttgatttgtcaaggcacacttgtagtatcgttgcagggcttgttggatcatatagccctaaacataattgactttagtttgcaggatttggtacagtaacacttncgttttaaaatacttatgtctacgagttgctttcttct

SEQ ID NO: 16024 - DNA, 548 bp, Glycine max
  unsure at all n locations
  Clone ID: jC-gmle01810089c11d1
aacaaactcaatttaaaataatgcttcaattattttccacaatttacttcccataagccactttagcagctggcttccatttgctactttggttagaaaaataaaaatgaatataaaacagactaaaactactagggagcagaaaataaacccttagcacattgtacactggtcaaagttgatcaacaaagtgaacacttattgggattttatggctattattttcagctttaaatacagacatcgtacatcattgaggattgcctggaatagatcatgttcagcattgatgatgaataaaacgattatcatcaaagtcatgcatctacgacactttattgaatcctttttcacctgcacttgccattccatacttcatacttcgtgaaccaatccgtataaatcatccatagtaataattcagtaagtatcctaataaacacgagctttaggagggaatgattccacctcatcatccaacgtattcatgtgcaccggcctgtaatctaaccgcaccttctcattatcccaatatctgcanatcaata

SEQ ID NO: 16025 - DNA, 453 bp, Glycine max
  Clone ID: jC-gmle01810089c12a1
atcggattcatctgtttctgattctagttcctctagtgatgggaaacaccagaagaggaggagaaataagcacaagcatgggaagaagaggaaaattggacgaaagcagcggaagagaagccagcacggtagaactaagaaatcaagacacatgtctaggcggagctctgaggattcaagtgatgcacatagtgatagcgctagtggcagtagttctagcgatgagaaagctgatcgtcatgcctgaggtcgtaaagcacctgctgacaataaagcccaaagaaatctagacacaggaaagcaattttccaacccttcttgtcaaaggcaaactattcctgaacaaacaatggatcccaaggtaagaagaattgtggacaagcaatcacatgaagaaggtgaattctctgcagagaatggtgcatttgtgaataacaagcatgatactcaagc

SEQ ID NO: 16026 - DNA, 532 bp, Glycine max
  Clone ID: jC-gmle01810089c12d1
aaacacaaacggcagatccaatttacgacgcatcattcaagttttggctcttactaaaagtaacatgatagaacgggcgttgttaagctaatgcaacacttaactcttcttgagacttgtaatataatggatagcaatttcaggtccagctgggacttgagagcataatacctagctaccttgagccagaatcaggactggcatctccataagaaactaaacccttttggccggatgcagagctggatctagacctgctacgaggtacagaagtgcttttatcatatcggtttggtggtgtggcatcaggggatctggagtgagaagagcctttgctcctagatttcgacctagacctcgacctgcccctgtctagcagtccttcgtcacttcttggaccaagtctggatatgaatctgccacttatcagaggcagcctgtcttctggactaggactacgtcttggactcctgctgcggtcacgctctctaaaacgctcacgcactggactgccagagatgctcctactcct

SEQ ID NO: 16027 - DNA, 447 bp, Glycine max
  Clone ID: jC-gmle01810089d01a1
aaaaatagcaacaaaaacaagaaaaaaggttacctctttcaattttatcccttgttgtgagcttaattcaatttctgctcacacataatgggcttatccagaaaaggttcaggcgtcaaaggaattttgttactaggaataaggttactgtcatacatgccgtggcaattccagtacaaccagctccggtggaaagtgcggagtatagaaaacagctagctgaagactacggtttcaggcaagttggagagccgcttccagatgatgttactttaaaggatgtcatcaattcccttcctaaggaggtctttgagattgatgatgtgaaagcatggaaatctgttctgatatctgtcacttcttatgcactgggtctcttcatgatttccaaagccccctggtatcttcttcctctggcttgggtatgggacaggactgcaataactg

SEQ ID NO: 16028 - DNA, 503 bp, Glycine max
  Clone ID: jC-gmle01810089d01d1
agaccataatgtgcgatatgcctcgtgctaattgatgcattaaacaggtttatgatataatatacttccaacgtgatgacaagaaccccactgttcagattaccataacatctactttaacctaatgaatgcttctcgatgacttgaccttggataatccgcaacttggtaatataattaccctaatacgtgaactttgagagcagcaagcaattttttcgttatacatgatatgaaaaatactagtagaactatattaaacaagatcgaaaatgtaaaaagaaaatgaatggcatacgaacctaatttgatacataaaaaatttcatatgagaaaaaaagccagtttgggcataattaagcataatcaggcatggtttccttcaaaaatgtaattggacgagaatcttcaggggcaaagtcgtcgaaggcaacataattttgctccttgtcgtacacatgacacactgtcatgaatgcttcatcaatctccatttcaactag

SEQ ID NO: 16029 - DNA, 366 bp, Glycine max
  unsure at all n locations
  Clone ID: jC-gmle01810089d02a1
aaaaatagcaacaaaaacaagaaaaaaggttacctctttcaattttatcccttgttgtgagcttaattcaatttctgctcacacataatgggcttatccagaaaaggttcaggcgtcaaaggaattttgttactaggaataaggttactgtcatacatgccgtggcaattccagtacaaccagctccggtggaaagtgcggagtatagaaaacagctagctgaagactacggtttcaggcaagttggagagccgcttccagatgatgttactttaaaggatgtcatcaattcccttcctaaggaggtctttgagattgatgatgtgaaagcatggaaatcntgtctgatatctgtcacttcttatg

SEQ ID NO: 16030 - DNA, 466 bp, Glycine max
  unsure at all n locations
  Clone ID: jC-gmle01810089d02d1
caatccaatgtgccacacgccacgtgcttttttatccatcagacaactttataatataatattcttccaacgtgataacaagaaccccactgttcagattaccataacatctactttaacctaatgaatgcttctcgatgacttgaccttggataatccgcaacttggtaatataattaccctaatacgtgaactttgagagcagcaagcaattttttcgttatacatgatatgaaaaatactagtagaactatattaaacaagatcgaaaatgtaaaaagaaaatgaatggcatacgaacctaatttgatacataaaaaatttcatatgagaaaaaaagccagtttgggcataattaagcataatcaggcatggtttccttcaaaaatgtaattggacgagaatcttcaggggcaagttcgtcgaaggcaacataantttgcttcttgtcgtacacatgacacac

SEQ ID NO: 16031 - DNA, 595 bp, Glycine max
  unsure at all n locations
  Clone ID: jC-gmle01810089d03a1
gcaagagggacgactgtaatggtcgatgagaacaccatgggtgaaggaggtcagctggatgaagccgctcttaggaacctgcaatgtttgatagagacgttgcactcacagactctgcgatacgaatacccgtacatggacgatctgaaaatggactgcgaacttcggcttctcgtgttcagcgaagcaaagagcttgatacccgtggacctgaacgtagcgatagttggtgggctgaaacccttcgatgatgtagacttggaaaagctcgcatcttaccgatcttatctggcgtttcacggacgcgttggttcgaaggtcagcatcccagatgagacggcagaatacattcagacggagttcgcccactataggcagaaagctggacagaacgatattcagcaagccacaaatcagttaaagtgtcggctcaaaatcgccagactccttgcgcagagtcacacgggacacgttgtcaccgttgacatctggcaaagggctgtatgcatacacgaggatattgagagccgttctctaccacgtncgagtttcgagaatcatagatgtatataactttaagcatctataagatcta

SEQ ID NO: 16032 - DNA, 512 bp, Glycine max
  unsure at all n locations
  Clone ID: jC-gmle01810089d03d1
agaatcttatagatgcttaaagttatatacatctatgattctcgaaactcggacgtggtagagaacggctctcaatatcctcgtgtatgcatacagccctttgccagatgtcaacggtgacaacgtgttccgtgtgactctgcgcaaggagtctggcgattttgagccgacactttaactgatttgtggcttgctgaatatcgttctgtccagctttctgcctatagtgggcgaactccgtctgaatgtattctgccgtctcatctgggatgctgaccttcgaaccaacgcgtccgtgaaacgccagataagatcggtaagatgcgagcttttccaagtctacatcatcgaagggtttcagcccaccaactatcgctacgttcaggtccacgggtatcaagctctntgcttcgctgaacacgagaagccgaagttcgcagtccattttcagatcgtccatgtacgggtattcgtatcgcagagtctgtgagtgcaacgtctctatcaaacat

SEQ ID NO: 16033 - DNA, 596 bp, Glycine max
  Clone ID: jC-gmle01810089d04a1
gcaagagggacgactgtaatggtcgatgagaacaccatgggtgaaggaggtcagctggatgaagccgctcttaggaacctgcaatgtttgatagagacgttgcactcacagactctgcgataccaatacccgtacatggacgatctgaaaatggactgcgaacttcggcttctcgtgttcagcgaagcaaagagcttgatacccgtggacctgaacgtagcgatagttggtgggctgaaacccttcgatgatgtagacttggaaaagctcgcatcttaccgatcttatctggcgtttcacggacgcgtcggttcgaaggtcagcatcccagatgagacggcagaatacattcagacggagttcgcccactataggcagaaagctggacagaacgatattcagcaagccacaaatcagttaaagtgtcagctcaaaatcgccagactccttgcgcagagtcacacggaacacgttgtcaccgttgacatctggcgaagggctgtatgcatacacgaggatattgagagccgttctctaccacgttcgagtttcgagaatcatagatgcatataactttaagcatctattagattcta

SEQ ID NO: 16034 - DNA, 481 bp, Glycine max
  Clone ID: jC-gmle01810089d04d1
tttgtttttttttttttttagaatcttatagatgcttaaagctatatacatctatgattctcgaaactcggacgtggtagagaacggctctcaatatcctcgtgtatgcatacagccctttgccagatgtcaacggtgacaacgggttccgtgtgactctgggcatggagtctggggattttgagccgacactttaactgatatgaggctcgctgaatatccgatctgtgcagctttctggctatagcgggcgaactccgtgtgaatggattctgccgtctaatatgggatgctgaccttcgaaccaacgcgttcgtgaaacgtcagatatagatcggtcagatgcgagctattccaagtctacgtcatcgaaggggtgtagcccaccgactatcgctacattgaggtacacgggtattaagctctatgctacgctgaacacgataagtccaagttcgtagtccatttacagattggccat

SEQ ID NO: 16035 - DNA, 59 bp, Glycine max
  Clone ID: jC-gmle01810089d05d1
aaacacacttattggacaaagtaatgcgctttatttaagtgaataaaattttccatact

SEQ ID NO: 16036 - DNA, 201 bp, Glycine max
  Clone ID: jC-gmle01810089d06a1
gtagctttactggctgttctttttggcgttaagaatgaaattctgagttctaacgccactaaccctatgctgacgcgacttcttgagaactgtaagagtctcaaatatctggttgatgagtgtccttttgcatttgtgaactagtatgtaatattatattcacttaaataaagcgcattactatgtgcaatgagtgtgttt

SEQ ID NO: 16037 - DNA, 201 bp, Glycine max
  Clone ID: jC-gmle01810089d06d1
aaacacacttattgcacatagtaatgcgctttatttaagggaataaaatattacatactagtttacaaatgcaaaaggacacttatcaaccaaaattttgagacttttaccgttctcaagaagtcgagttagcatagggttagtggcgttagaacttagaatttcattcttaacgccaaaaagaacagccagtaaagctac

SEQ ID NO: 16038 - DNA, 525 bp, Glycine max
  Clone ID: jC-gmle01810089d07a1
gaattcggctcgaggcaagaagatcatctgaagcttgaggaagcctgtgttatggtgaatggagatgaaattcaattacctcccaaagaaggtggtaatttaaatactaaaaagaaaaaggcacggcaaaccttttctttgtctaagaagtctgcaagaaagcaagagtataaggagcttgtagcatggcatatgaacagtgaaaaagtaaagggagattgcatgaagaatttagatccaactttaccacaagaacaaaacatattactgcttcctagtatgtctgaaccagaatgggagcttctctaattctaaatgccaggatgatcaagttgtgttgatacacaaaagccaatcctacaagtttggattcactcataagtccttgtggagattaagatgcccaactggaaatttaagatgctgaaatgatataaattcatacaatacttatgctatctttagttctttcctagcttctgaacttttctacacacactctttctttttcctgctcacagaaaa

SEQ ID NO: 16039 - DNA, 470 bp, Glycine max
  Clone ID: jC-gmle01810089d07d1
attctattagacattctcatttcaatggcctaattacaggtacccttttctattttctgggagcaggaaaaagaaagaggttgtgtaggaaagttcaggggctaggaaagaactaaagatagcataagtattggatgaatttatatcatttcagcatcttaaatttccagttgggcattttaatctccacaagggcttatgagggaatccaaacttgtaggattggcttttgggtatcaacacaacttgatcatcctggcatttagaattagagaagctcccattctggttcagacatactaggaagcagtaatttggtttggtcttggggtaaagttggatctaaattcttcatgcaatctccctttactttttcactggtcatatgccatgctacaagctccttatactcttgctttcttgcagacttcttagacaaagaaaaggtttgccgtgccttttttctttta

SEQ ID NO: 16040 - DNA, 104 bp, Glycine max
  Clone ID: jC-gmle01810089d08a1
aaaaaaaaaaaaaaacaaaaaaaaaaaaaaaaaaaaaaaaaaaaaaaggccggacgacgcctaaacgctctgccagaccctggaattactaccgctccggtccc

SEQ ID NO: 16041 - DNA, 61 bp, Glycine max
  Clone ID: jC-gmle01810089d08d1
cttgctaactcacgcgatcatgcgacattatagacttattattgcgtaccctaaattaaaa

SEQ ID NO: 16042 - DNA, 496 bp, Glycine max
  Clone ID: jC-gmle01810089d09a1
atgttactgtgttacatttgtactctggaaaatatcatgtgcaggcaatcaactacaataatttcactatccgagtggttgatccaggagtcgatcaacaaacaaattgctcctcccttcctcgctaattccttgtctcgctccaatttcactgatacttacagtgatatttacaacatggatccataccaagctggtcaatattcaggtcatcggaatttatttatttgttatcggtaaagattagttgttagttttcatttatgatgaaatccacgactttttcattctcaattctttcaatacttaggtcgtagtaattgggacaggcttgctttccagcatatagtgtatatgaattgtagcaatccagtgactcagaatgggaagtatgtggatactgcttcatacgtcaactgggactccaaagacaattacatatacgctattgctggtgacttaaaagcagaggactttcagttggttgtcacgtaaa

SEQ ID NO: 16043 - DNA, 513 bp, Glycine max
  Clone ID: jC-gmle01810089d09d1
aggtccataaaaaatattatttaccattaattttcataaaacaagaaggtcacgtatattaacaaaaaaaaaaaagaattcatattaacatagagcactctgaataaaaaagtctttttatgttaagtttcactcactccctaatgaatccccgtcccaataattaagctcctggctgacagagtcgaaaaagcagttgtagtagtagcagccgtgtttacttggacagtgctgctcacatatgaggcgcatccatgaaatctcaaatccatagactagccccgtgtgcatggcagagtaggaataattgtttgtatccaaaccccaccaagatgtcagagcaaccagctttacgtgacaaccaacttggaagtcctctgcttttaagtcaccagcaatagcgtatatgtaattgtctttggagtcccagttgacgtatgaagcagtatccacatacttcccattctgagtcactggattgctacatatcatatacactatatgctggaaagc

SEQ ID NO: 16044 - DNA, 500 bp, Glycine max
  Clone ID: jC-gmle01810089d10a1
ctcataacacaaagcacaaagcaaagctcatccttgagttaaaaaatggcagcagcttcttccatggctctctcatccccatccttggctggcaaggccgtgaagctgggcccatcagccccagaaagtgggaagggtgagcatgaggaagaccgtcaccaagcaggtctcctcaggaagcccatggtacggcccagaccgagtcaagtacttgggcccattctctggcgagcccccgtcctacctaaccggtgagttcccaggcgactacggctgggacactgctgggctttccgcagacccagaaaccttcgccaagaaccgtgaactcgaagtgatccactccaggtgggccatgctcggagccttgggctgcgtcttcccggagttgctgtcccgcaacggggtgaagttcggagaagccgtgtggttcaaggccgggtcccagatcttcagcgagggtgggctcgactacttgggcaacccaagcctgatccacg

SEQ ID NO: 16045 - DNA, 573 bp, Glycine max
  Clone ID: jC-gmle01810089d10d1
gtaaaaagcaagtaacattaagttggattcggatacacaagataattcacattatctgaagtacttcaccaaacacaaatctaaaaactctcaaaagtcatttcgttctttgacgctcactttccggggaccaaagttggtggcataggcccaggcgttgttgttgacagggtcagcaaggtgatcggcgaggttctccaatggaccctttccggtgacaatggcctgaacaaagaagccaaacatagagaacatggccaatcgtccgttcttgagttccttcaccttaagctcagcaaaagcctctgggtcatcagcaaggcccaatgggtcgaagctgccacctgggtagattgggtcagtgacctcaccgagggggccaccagcaatacggtaaccttcaacggcacccattaggataacttggtgtggcccagatggcgaggatgctctgggcgtggatcaggcttgggttgcccaagtagtcgagcccaccctcgctgaagatctgggacccggccttgaccacacgggttctccgactttaccccgttcgggacagcacctcgggag

SEQ ID NO: 16046 - DNA, 525 bp, Glycine max
  unsure at all n locations
  Clone ID: jC-gmle01810089d11a1
gtgagcacttactattctgtgagcaatggctttaacactagacaaaaaatctgttggtacctttttcatgcttttcttgacatgcatatgtcgtgcctcgtcacgcactctctctgagtcttccattgccacacagcatgaagagtggatggccatgcacgaccgtgtttacgctgacagtgcagagaaggacaggcgccagcagatattcaaggagaatttggagttcatagagaaacacaacaacgaaggaaaaaagaggtacaatttaagcctaaacagttttgctgatttgactaacgaagaattcgttgcttctcacacgggagctctctataagccaccaactcaactaagggtcgttcaagattaaccacagtcttggcttccataagatggagtgtcggtgacattgaggctagcttggattggagaaagagaggagctgntaatgatattaagaaccaaggcagatgtgggagttgctgtgcattttcagctgtggcagcttgtgagggaatcaac

SEQ ID NO: 16047 - DNA, 508 bp, Glycine max
  Clone ID: jC-gmle01810089d11d1
ggtagtcaataaatttttctcttaacgaatataatgtggtaaacatatgatctgatctaagatcatgatctcatagatgctacgtacattgcagcattacataaggattactggtggattaattaacttaaataatatttttttattttagggtaatgtgctctaacacatatttaaagaaacggataagaggcttgcatgttaatgccgcaaagaccttgagggttaccagtgtccctcataagcttcatgtaaccaccctcaccccaacttttgccccatgaattccttatgagccagtattttccctcagcctcctcaccatacccaacaatggtaactgcatggttaagttcagttccacactcgccactgaaaactcctcctgagtaaaactgaaacccttgtcccttggcttcaaggagcaccgagacaggttgagaggccactgcagttagaagttgctcctcgttctggggagttacactttggtaacctctgatctgaa

SEQ ID NO: 16048 - DNA, 518 bp, Glycine max
  unsure at all n locations
  Clone ID: jC-gmle01810089d12a1
tgttcgccgccgtggccaccgtcgcgatggcggtggccgcgtccgacgccgacgacatcctgatccgtcaggtggtgccagatgttggcgaagccgacgaggaggacaacctgctgaacgccgagcaccacttcgcgagcttcaaggccaagttcgccaagacctacgccaccaaggaggagcacgatcatcgcttcggcgtcttcaagtccaaccttcgcagagccaggctgcacgccaagctcgacccctgcgccgtccacggcgtcaccaaattctccgatctaactccggccgagttccgacgccagttcctaggcctcaagccgctccgctatccggcgcacgcccagaaggcgcccatactccccaccaaggatctccccaaggatttcgattggcgagacaaaggagccgtcactaacgtcaaggaccaaagggcgtgtggttcgtgttggtctttcagtacgacgggtagcgtngaaggagctcattatctggccactggtgagctcgtg

SEQ ID NO: 16049 - DNA, 564 bp, Glycine max
  Clone ID: jC-gmle01810089d12d1
ttgttttttttttttttttttttaggaccacacatttccttggatttcccacttgtatatgtcaagcatacatacagaaattacatactacataaacaacatggtcttagcagtttcctgatcctatacggagataattttaccagtaccaaatgataaagttcacaacataaatatttatacaaactccccttagtccagtatcacatcacaaccacaatcaggcatatctttgtatttaatggctggatggatatatagcagctacagttgagaccatggaatctacttcacacacatttcgacctttgcagatcttgtaatatgcattctctacccagctctcgccccatgaattcttaatgatccagtaagggttggtcttaaaacgaatgggagcatatgcaccttcaccataaccaactagaagaaccccatgatccaaatgcttcccacagatgtatgagcatgagacgccaccaacatatgtctgcataaaaactgcattgatagcaactgcaagagggccattctttactaggtttgcagcaatttgttcttcat

SEQ ID NO: 16050 - DNA, 365 bp, Glycine max
  Clone ID: jC-gmle01810089e01a1
aacagagcaaatgcaaatctttgtgaagaccctcaccggaaagaccatcaccttggaggtcgaatccagcgacaccatcgagaatgtgaagcagaagatccaagataaggagggaatcccacccgaccagcagcgattgatcttcgctggaaagcaacttgaggatggccgaaccctctctgactacaacattcagaaggaatccaccctccacctcgtccttcgactccgaggaggaatgcagatttttgtgaagaccctcactggcaagacgattaccctggaagtcgaatccagcgacaccatcgagaacgtcaagcagaagattcaggacaaggagggaattcctcctgaccagcagagac

SEQ ID NO: 16051 - DNA, 494 bp, Glycine max
  unsure at all n locations
  Clone ID: jC-gmle01810089e01d1
gtgtgtacattatttactgtcctcctctcaatcgaagaacgagatggagggtggattccttctgaatgttgtagtcagagagggttcggccatcctcaagctgctttccggcaaagatgagtcgctgctgatcaggtgggattccctccttgtcctgaatcttctgcttcacattctcgatggtgtccgatgactcgacctccaaggtgatggtctttccagtgagggtcttgacgaagatctgcattcctcctctcaatcgcagaaccaaatggagagtagattccttctggatgttgtagtccgacagagttcgtccatcctccaactgcttgccagcgaagatcaatcgctgctgatcgggtgggatcccttccttgtcctggatcttctgtttgacgttctcgatggtatcgctggactcaacttcgagggtgatggtcttgccagtcaatgtcttgacgaagatctgcattcctnctcgcagtctgagc

SEQ ID NO: 16052 - DNA, 568 bp, Glycine max
  unsure at all n locations
  Clone ID: jC-gmle01810089e02a1
atttggatttgcagatttgaaggagatagcgtctcttatcgagaccggttcgtactcgaaggaagttcgtagaattgctcgcgctgttcgccttacaattgcgttgaggcggaaattgacagcatccgctatctcttcttttctcgatcatgttctcactcctggctctgaagttcacgccaaattgtctgcgtatcttcccaaggatgatgatcatgagatggaagtggacgctgcaacatctgcgattcaaaccccagccaaacacttgttgcccgagctagaaatctactgttacctgcttgtactcctttttctgattgatcagaaaaaatacagtgaggccaaagcttgttcctcagctagcattgtttggctgaagaacataaacaggagaactgttgatgttattgcatccagactgtatttttactattcgtatagctatgaacttatgggagatcttgctgaaattcggggcaaccttcttgcattgcaccgaattgccacccttcgccatgatgagcttggtcaggaaacacttcttaatgtgntacttcgtaactac

SEQ ID NO: 16053 - DNA, 534 bp, Glycine max
  unsure at all n locations
  Clone ID: jC-gmle01810089e03a1
gtttcctcgattggttgatctgctttctgggccatgttggtgtcgatgaggaggatcatgttcagaggcatccacagtgagttgtagaatagaagcaaaaagagaagttcttggtggcgatttcttagattggtcttcttctgtgggtgtgagtgggtgtgagttttgactgtgttggaaaaagaaggcttttttttttttctttttaatgttatgagaggcattattcttggtgggttttgtgaggggtggctttgatttgcctggattttgatatggngtgggtgttttccttggtttggatcatccaacaaggagggcagtggtggtggggttgagggtagaggaggttcccaacaaagattcttcttttaaggaagctgcttctgttgttcctcagtctcaccttcccagcagggttaactcagataaatcaaaatcacgaaatggcgctgatattaagaaggacacaccggtttcaaaggatggcccaacggcccatattgctgcacaaacatttacatttcgagagct

SEQ ID NO: 16054 - DNA, 522 bp, Glycine max
  Clone ID: jC-gmle01810089e03d1
caactgtgtactgttttccttcacatgatgatgactaacaaactaccagaatgacgtgggagaacagtcataattggattcaagaggcgaacaacaagttgcttcggtgttcctgagtctgttcagtcatttgtagcatcaaagctacccatggcgtttgccttcttcttctctctccagttctcgccccacacttttgcctctgcaaccgcgcgctctctgtccaggtcgcggttccatggagtctctctggttcttgcagtatttacagggctgtctctctgggactcctgcctttcattatcatccaatccccattttctccctgaccccccaccgatgtcaatcctgcctaactcggtcgcggcactcggatccctgctgtctctcttcctgaagtcgggtgagtttctgtgggtggaaggggagccgagccggcggtcagggctgtccacaccgtctgccatgctccttctgtcatccctgatcctaggggttgatgggccaaccctgttggattga

SEQ ID NO: 16055 - DNA, 573 bp, Glycine max
  unsure at all n locations
  Clone ID: jC-gmle01810089e05a1
gtctgaaatttggagtgttttttcgtttgctgtgttcagctccttatggagctctcactctctccaacttcacatcgtgttccttccacaattcccactttgaatttcgctaaactatcatccactaaggccacaacgtcccaacctttggtcttaggattttccaaacacttcaactcaattgggttgaaccatcacagttacagatgctgctcaaatgctgttcctaagagaccccaaagacccagttccataagggcctgcactggagttggagctgctggttctgatcgtccattagctgaaagacttttagatttgaaagatgcttgctggagatttttaaggccacatactatacgtggtacagcactaggttcatttgctttggtggcaagagcattgattgagaacacgaatttgataaagtggtctcttttgttcaaagctttctctggtctttntgccctgatttgtgggaatggttatatagttggcatcaatcaaatctatgacattagcattgacaaggtaaacaaaccttatttacctatagcttgctgagatctttct

SEQ ID NO: 16056 - DNA, 485 bp, Glycine max
  Clone ID: jC-gmle01810089e05d1
atgaaatatgttaatggcattacgtcaaagtaaaaggaaatagtatcacatttatatacaacaatactcattttaaaaaaataatgatagctagtttaccaattgacacttgataaacaaagatctctctaactatgcacgtatgcaccttttcccaagaaaaaagtagcaagggttgctatatgaaaggaaatattgcatactcagcatagaacagattccatatgaatcgatagaatcctgatattgcatccttggtataatttgcttggtctaatattcgtgcctggtaaatcaagcttattgcaaaaattgtatgagctggtatgagtaaccaacgcctgaaagcctgaggcatataaattgctgccaaaacagaaacaatataattcaccagcaaaattccagaaccaaggaaagcaatgttccgaactcctaattttgtagcaaaggttgatatctgatacttgcgatcacctttaaca

SEQ ID NO: 16057 - DNA, 576 bp, Glycine max
  Clone ID: jC-gmle01810089e06a1
gaaactctctctctagaaaccctattgcacgttttgcaatcgaactcgacaatggccaacagcaacctccctcgaagaatcatcaaggaaacgcagcgtttgctcagtgagccagcaccaggaattagtgcctctccttctgaagagaatatgcgatatttcaatgtgatgatccttgggccaacccagtcgccttatgaaggaggagttttcaagttagaactatttttgccagaagaatatccaatggctgctccaaaggttaggtttctaacaaaaatatatcatccaaacattgataagcttggcaggatttgtcttgatattctgaaagataagtggagtcctgcccttcagatccgcactgttctactaagcattcaagctctattaagtgcaccaaacccagatgatccactttctgagaacattgccaagcattggaaatctaatgaggctgaggctgtcgaaacagcgaaggaatggacccgattatatgctagtggcgtctgatgatagggttcaaactcatggctccaaaataacaattgtaacccatttatattggaaatctag

SEQ ID NO: 16058 - DNA, 514 bp, Glycine max
  Clone ID: jC-gmle01810089e06d1
gtaaaaagtataattatttcttctctcataagtactaatagagaaatttccaacatgccctaaccaatcaaatctttgaatgattcattgatgagtaaagagaacagaaactaattcacaaattttggcctttgatgttgagaataccaaattacttcacagtcgatgattgaagcacgctctaaattgttagataggtaaatgatcaacgcatatattcatacaaattcaaacataaggcagctttcaagagaagaaattaaaaggtaactggaaactgcgaggaatattaattccaatagttcataaatcaattcctctagatttccaatataaaatggttacaattgttattttggagccatgagtttgaaccctatcatcagacgccactagcatataatcgggtccattccttcgctgtttcgacagcctcagcctcattagatttccaatgcttggcaatgttctcagaaagtggatcatctgggtttggtgcacttaatagagcttg

SEQ ID NO: 16059 - DNA, 487 bp, Glycine max
  Clone ID: jC-gmle01810089e07a1
tgcgggtactgacacaacacacacggccttggagtggacaatgtcagagctgttaaagcacccaatggttatgcataaattgcaagacgaggtgagaagtgtggttggtaacaggactcatgtaactgaggatgatttgggccaaatgaactacttgaaagctgtgatcaaagaaagtcttcgtcttcatcctccacttccattaatagtccctaggaaatgcatggaagatatcaaagtgaagggctatgacattgcagctggcactcaggtattagtgaatgcttgggtaattgcaagagacccttcatcttggaaccaacctctagagtttaaaccagaaaggttcctcagcagttcagtagacttcaaaggacatgattttgagcttattccgtttggtgctggaagaagaggttgtcccggaataacgtttgccacatatataattgaggtggtatttagcaaccttgttcaccaatttgat

SEQ ID NO: 16060 - DNA, 512 bp, Glycine max
  Clone ID: jC-gmle01810089e07d1
aaaaacctcaatatatatattcagtctttctgcttgtctaatcaattctcccacactttttccattgaaggcaaactgaccacaaaatcattctggtcctcactttctgcataaatttccccatcgctgctattcctcaaccaacgactaatgtgctcctcaattgcttcatctatggaagataaaataaaattaaattaaaaaactaacaactatgaagaatatacttttcagactccccttgaaccaaatttcattagtagtttaaaacttgcacatacaacatagaagaggcatatgtgatgtgtcacaatatgtgaaatttttattctttttatcataacttcttcttctggtcattgcatatcaatttctctgatatgcagttgctactgcaagtagaggagattttctatgaacagcaaggccagctgtttcagacatgtccaagtccttccctgcagccccaccaggcaatgaccaatcaaattggtgaacaaggtttgctaata

SEQ ID NO: 16061 - DNA, 496 bp, Glycine max
  unsure at all n locations
  Clone ID: jC-gmle01810089e08a1
ctgcactctgcacaatgctttccctctccgtccctcctctcaacctcaaacccataacacccaatgacctctttctctcatcagcctctccctcacctcaccgtcgctacttcgtgaaacccatcntcgncgtcctcaactcatcttccttcaagaaacctgagcagcctctgctgccgcagcatcaagtctaccagcccttccgccctcccccgtctcccctcccctcgcaattcggcaccctcgacatcgccggccgaatcgacatcctcgccaaccgcctcggcctctggtacgagtacgcgcccttaatcaattccctaatccgcgaaggcttctcccctccgacaatcgaagaaaccaccggcatctccggcgtcgagcagaaccgnctcatcgtcggggcgcaggtccgcgactgcctcgtacactccaaggccgaccccgacctnctcgctgccttcgagaccggcggcgccgagctcctctacgagat

SEQ ID NO: 16062 - DNA, 508 bp, Glycine max
  Clone ID: jC-gmle01810089e08d1
aaaagaaaccactcactggattaaccacatgaatataacgtacaaagagaaaacaaaaacgattaaatccttctattaagtatggaaaacaaaagaaagttgcatgtaattcccaaattaatagaaccttattttgcatgacacaaaaaacaaaggcaggggattgagctgagttaactagcaattcttgaattgagaaaaccatatatatatatatataatggggtgttatcgctattctttagcaacttaatcattcccttccctttgatttgagttcactcccagtcttcgtcactcaattcatcattttcttctttgggaggtctaacaaccaataacacagttcctaaactctgagtgaaacccttttccttcaatcccgaacccctctcgacctttaaacccttaccatgagcattcacaagataaaacccatcattggcacccacctcttttttactcctgtcagccaccaccaatataggcttcttcttataccacctat

SEQ ID NO: 16063 - DNA, 534 bp, Glycine max
  unsure at all n locations
  Clone ID: jC-gmle01810089e09a1
acagattataaatagctgcaaccactttggttgactcatacaggtcccttggagccacttgtcctgtattgaaaatccattttgcttcatttcattccctcacatagtgtttttttctttccatggaaaaacttgttgggtctgctgagaattcatgttgaaaaaggtgtaaatcttgccatcagggatgtggtgagcagtgacccttatgttgtcatcaaaatgggaaggcagaagctgaagactcgggtagtcaagaagaatctaaatcctgaatggaatgatgacttgaccttgtctatttcagaccctcatgctccaattcatctacatgtgtatgacaaggacacatttagcatggatgacaaaatgggggatgctgagtttttcataggtccatttattgaagcagtgaagatgcgcttgtcaggtctccccacaatactatagttacaaaagtgctacctagcagacanaactgtttagctgaagagagtcacataatgttgaaagatggcaggttgtccaaacatg

SEQ ID NO: 16064 - DNA, 425 bp, Glycine max
  Clone ID: jC-gmle01810089e09d1
aacatgttaactaaggagattctaattaagtgcaacatttttctgggacatttcttggacattattacacaagactagcagtagcagataattcaaaggtttaaattacagctagggaaactacatttcccattctttttcactaactactagtactaggaattgcaataaccccgattacaaaccaacatattgaacaattttaagttatgccaacgagataaaaggattggagaaattaaagcataaggggctgctgcctgctggtttatgaggctgcaaatctaatttttacaatatggcaaatctaagaaccatgtttgggactgggatctatagatgtcttgaaccaggaatgtcaatccaatgcaactggagctccacttccccactcttaacatttcttaggctaagaaccatgtttt

SEQ ID NO: 16065 - DNA, 470 bp, Glycine max
  Clone ID: jC-gmle01810089e10a1
gttctagatcgcgagcggccgccctttttttttttttttgttatctcttcacttgttaaaggggaataggaaattaattaatgtgattgaatccttatcctgtaggtttttaaaaaaaaaaaaaaaaaaaaaccgaaaaaaaagacaaataaaaaaaaagaaaaaaagaacaaaaaaacaaaaaaaaaaaaaaaaaaaaaaaaaaaaaaaaaaaaaaaaaaaaaaaaaaaaaaaaaaaaaaaaaggggggcccccccaataagaaggttcaacaccctgaaaaaaactcagccccggatcaaaagggcaaccaaaatttcctaaataggactgcttataaacaattgtgcaaaccaggaggaaaaactctcctaaggggaaaaattatttcccataaaattgcccccactgactagaccctgaaccaaaaagcaaaagaccggggtacccaaaggagagacaccacccaa

SEQ ID NO: 16066 - DNA, 295 bp, Glycine max
  Clone ID: jC-gmle01810089e10d1
actaaaaaagtaaaagttatatgacattaaaaaacccaccggaggggaggaagccgaggaactgaaaaaagccacagacccaacaaaagggggaaggaaaaaacaaaaaaaaaaaagggggggggcctgcgaaagacaaacgccgggacaaaacaaaagccggacccaccggggcgggggacgaacagacccaaacgggggggcaaaaaaaaaaaaattcgggggccgggattaaagcaaggggggggggaaaaaactcgggaaccaccaataaaataacaggaagggaaaaaga

SEQ ID NO: 16067 - DNA, 491 bp, Glycine max
  Clone ID: jC-gmle01810089e11a1
ctcaagctgatattggggtgttggttatttctgctcggaagggagagttcgaaactggatacgagagaggtggacaaactcgtgaacatgttcagcttgcaaaaacgctgggtgtgtctaaacttcttgatgatgtcaataagacggatgagcctacagtgcagtggtcaagagaaaggtatgatgaaattgagtcaaagatggttgcatttataaagcaatctggatacaacgtaaaaaaagatgtcttgaagataccaatttctggtctaatgggtgcaaacatgaaaacaagagtggataaaagtgtatgtccatggtggaacgggccttgcttatttgaggcacttgacgctattgaagtttcactgcgagatcccaaaggtcctttcaagatgcctattattgacaaattccaagacatgggaactgttgctatgggcaaagttgaatctggcagtgttcgtgagggagattccttgatggtcatg

SEQ ID NO: 16068 - DNA, 527 bp, Glycine max
  Clone ID: jC-gmle01810089e11d1
caaccaaaattccatcacgtttactaggcaacatgaatcattaaaacaaatcacaatatcactatcaaaactaaatatgctagtcaactgcgactaggacacttgcttaaccgctgttgggctaatagtcatcagattccacagctaataagacagattgatttaaaaccatctattttcaaattatatctcaagagtagcacggttggaagcagccaaccgcaaaatactgaagcatccaagccttgtaaggccgtatacaagtacatcatgggcaccagcggcaacaaataactcttcactgaataccaccccaagtaaaagcaaaataaatcccgaaatgaatatatggtaaacttgatgctgtcaattatgcctcaaagctgccactccattaatttgggcaggaattcccgtcctcaagtcaaaattgttacaaattcacagaccagtgacttttcccacagcaacagtttttccttcagtgcgaagagtgaacctcccaagttggggaaaatcagagaact

SEQ ID NO: 16069 - DNA, 508 bp, Glycine max
  Clone ID: jC-gmle01810089e12a1
aatggagtcaatacacgagcctcatccttccgctcccgcttctcttcatcggaaacactagaatgtgaaccataaaaccagagcattgtatctgccatgtctaaacacacaagccttagttttatctatgtattttcctcagaatacgatcctaaagatcttacaaattcacaattcttgggattttaggtgtgactgacactcacacacacaggacaaccaaagcattttatgttccatgtctaaacactgaaatggcgtacatctgtacgtgcatcactgagacccccacttgtaagcttgctaggcggctactttcctatacctggaagcaggcaatagcattcccttccgtgcagcaaaacccggtgattgggggagtcacgaaaagggtatgggattctagggttttggtggcggggccgggtggcgcaatggaaaccgacaagttgccttctgatgtgagacagcgaacgatggatgctgtggatgagtgtggagggagaat

SEQ ID NO: 16070 - DNA, 551 bp, Glycine max
  unsure at all n locations
  Clone ID: jC-gmle01810089e12d1
cgaaactctgacgtataaaacataaatacaaaggcaatgccaatttaacttacattgattgtcctatagaaactttcactattcctcttttatagatcacattacaaattttatcacttaaattactggatctaagagaaatgaattaagattgatactgaaccagtaaaagctgcaatataccagggctaaatccaatgctttcacagaaggcagcctagatgctgtgctaaaattgtcaatacatggatggtaaaatgtaggctcaacgccctgtataacagattaacagttgacccttaatcagacctctctagctcccgaaattttttatcccattcgcgagcttcatactcttgctcaagtaagtccttgtcagtactatacacaatttgatcctgtcctatgactgtcttttcggccatgtcccgagcactgaaaagcttctgccttagtgaagtgtcaggtaattcaagaacttgtgcacactgctgcctagctttgnttctcttttcgatatcagcattctttttccgaataaaaaaccaccg

SEQ ID NO: 16071 - DNA, 494 bp, Glycine max
  Clone ID: jC-gmle01810089f01a1
taaatccatatcctcccccaaagtctttgtcttctccgcccccactctcccaccccacttacatacacactctcccactcctccgagccggtcgagttgaatcggtgagtcagtgaccgagttgaaccatgtcggacgaagagcaccatttcgaatccaaggccgatgccggagcctccaagacctatcctcagcaggccggaaccatccgcaaaaacggctacatcgtcatcaagggtcgtccctgcaaggttgttgaagtttctacttccaagactggtaagcacggccatgctaagtgtcactttgttgggattgatattttcactgccaagaagcttgaagatattgtgccctcttcccacaactgtgatgttccccatgtgaatcgtactgattaccagttgattgacattgctgaggatggatttcttagcttgcttactgaaaatgggaaccaccaggatgacctgaagttacctacagatgagagt

SEQ ID NO: 16072 - DNA, 482 bp, Glycine max
  Clone ID: jC-gmle01810089f01d1
aaaacaaaaataatttgatagtcgtattttatcaaaaaaatatcaagacaacatcgaaacagagaaatgttaaacagtttctgtcacatccataaacacagttgataaaactagtctgacttagagtctccataactccggggtttaacaagatcatacaaaaatatataacttttgcataaatgaaaacagcaaactaccagcaattgaggctagttctttggcccaatatccttcagtgcacaaatctgctcctcacccattgcagacataactgacacaacaaggtccttaccctcagcaaacccatcctttatctgagtaagcagactctcatctgtaggtaacttcaggtcatccttggtgttcccattttcagtaagcaagctaagaaatccatcctcagcaatgtcaatcaactggtaatcagtacgattcacatggggaacatcacagttgtgggaagagggcacaatatcttc

SEQ ID NO: 16073 - DNA, 568 bp, Glycine max
  Clone ID: jC-gmle01810089f02a1
taaatccatatcctcccccaaagtctttgtcttctccgcccccactctcccaccccacttacatacacactctcccactcctccgagccggtcgagttgaatcggtgagtcagtgaccgagttgaaccatgtcggacgaagagcaccatttcgaatccaaggccgatgccggagcctccaagacctatcctcagcaggccggaaccatccgcaaaaacggctacatcgtcatcaagggtcgtccctgcaaggttgttgaagtttctacttccaagactggtaagcacggccatgctaagtgtcactttgttgggattgatattttcactgccaagaagcttgaagatattgtgccctcttcccacaactgtgatgttccccatgtgaatcgtactgattaccagttgattgacattgctgaggatggatttcttagcttgcttactgaaaatgggaacaccaaggatgacctgaagttacctacagatgagagtctgcttactcagataaaggatgggtttgctgagggtaaggaccttgttgtgtcattatgtctgcaatggtgagg

SEQ ID NO: 16074 - DNA, 450 bp, Glycine max
  Clone ID: jC-gmle01810089f02d1
aaaacaaaaataatttgatagtcgtattttatcaaaaaaatatcaagacaacatcgaaacagagaaatgttaaacagtttctgtcacatccataaacacagttgataaaactaggctgacttagagtctccataactccggggtttaacaagatcatacaaaaatatataacttttgcataaatgaaaacagcaaactaccagcaattgaggctagttctttggcccaatatccttcagtgcacaaatctgctcctcacccattgcagacataactgacacaacaaggtccttaccctcagcaaacccatcctttatctgagtaagcagactctcatctgtaggtaacttcaggtcatccttggtgttcccattttcagtaagcaagctaagaaatccatcctcagcaatgtcaatcaactggtaatcagtacgattcacatggggaaca

SEQ ID NO: 16075 - DNA, 245 bp, Glycine max
  Clone ID: jC-gmle01810089f03a1
acttgcggctcgagcaacattgaaaccgcgattgaacagcttccggttctcggcgaacgggagagtagctgcctagctgcaggaatcgattagtgattgtgaagatgcggagagacaacggtgatagctaagaaggttggctttgagatgattgatgcatttgctgagtcacaggggattcctatggacactgtcctttcaaaggccttttttgaaaaaggtttgttgggaaaatccgtgttttt

SEQ ID NO: 16076 - DNA, 508 bp, Glycine max
  Clone ID: jC-gmle01810089f03d1
aatgcgtgaacagttatcccacccttgtgcactcgagtatgcaaaatgcacattacagagacaggatccaaaataaaacaaatcgagatggaaaaaagttggtcataaaccattttaaaagctatatctatctctggaatgttacaaaattaagccaatttccaatcgcttaagttttacacatattgcaacctataaagcgaagaactaatcatacttataatgcaattttccatcacggaatcctatcaaactggtaaattctgcactcttaggtgcttatacttttgttctttgttgaatctttttgcactcactgccaaacctttggataaaaggagcttcaaggcatcaaccccctcttgcaaagcctcatcaattcgttgcctagctgttacattaaacttttgaagcaaaaatgctttaggatccatttgcccaggaggactcccaatcccaattctcagcctaggaaattctctatttcctttgaagtgatagatcacac

SEQ ID NO: 16077 - DNA, 584 bp, Glycine max
  unsure at all n locations
  Clone ID: jC-gmle01810089f04a1
ctctaatagtaatagtaatatacataagtaacataaccaatggaagcgcgtgcaggagccaatcagcgtattgcaagaatctctgctcatcttcagcctccaaatttccaggaagggagtgatgttcttcttaagagtgctgagtgcagagcatagggtggggcacctggattcaaagttgcaattttgggggctgctgggggaattggtcaacccttttctttgctgatgaagatgaacccattggtttcagttcttcatctttatgatgttgtcaacacccctggtgtcactgctgatgttagccacatggacactggtgctgtggttcgtggctttctggggcagcaacaacttgagagtgcactcactggcatggacttggtaatcatacctgctggggtaccaaggaaacctgggatgacaagagatgatttatttaaaataaatgctggaattgtgaggactctttgtgaaggaatngccaagagctgncccaatgcaattgtcaacttgattagtaatccagtgaattccacagttgctattgctgcagagttttcaagaaagccgtacatatgatc

SEQ ID NO: 16078 - DNA, 496 bp, Glycine max
  unsure at all n locations
  Clone ID: jC-gmle01810089f04d1
agtacaaaaggctgatattttagtatctttctgagattattaagcagttccactgatgtcaaatccgttatcatcagcaattacggatgacaccaaaaatttagagtactattcttaagaagaagaaaaanaatctatgaacaaagagaagcattacacatggtccttatatataagagacaaaaactagtttttccttatcacatttattttctgatgaactctacacccttctggatgcttcctgctaactctctctttgccttttccaatccaatcctttcatactcattcaggggacccagttgataaacctcttctgctccagcacgacctagacgtaccttggttgcaaagaagggaagttccgtaacctgagaatcaacaaaagcacactccactaccccagcttctccttttaagccacggaggcatgcaccagcaaacttggcagctgcatatgccattgatagtgttgcagaacctgtcccagctt

SEQ ID NO: 16079 - DNA, 555 bp, Glycine max
  Clone ID: jC-gmle01810089f05a1
gttccttctctcgagacgatccggagggatgggaggtcctggtggccctggatttcctcttgcttttggtcaatccaaagccaagtttcaaatggaaccaaacaccggagtgacatttgatgatggtgctggggtggatgaagccaaacaggactttatggaggtggtggagtttttaaagaagcctgagaggtttactgctgttggggctcgcattcctaaaggagttcttcttgttggtcctccaggaactgggaagaccttgttagccaaggctattgctggtgaagctggtgttccatttttctctatatcaggttctgagtttgttgagatgtttgttggtgttggtgcttctcgtgttcgtgatttgttcaagaaggcgaaagagaatgccccttgcattgtctttgttgatgaaattgatgctgttggaagacaaagagggactggaattggtggagggaatgatgaaagagagcagaccctcaaccaacttttgacagaaatggatgggtttgagggtaacacatgtttcattggcgttgcagcaac

SEQ ID NO: 16080 - DNA, 521 bp, Glycine max
  Clone ID: jC-gmle01810089f05d1
agacgtaaagaaactacaaatttttacactaaaaacagtttctcttttatacatactctctgttgtcatttgtcaacactacaaaaaatgaaaaagtaaggtagaatctttaatcattcacaaatatggagcaggctgcagagggcattctgtattctaagataatacatatgaaagatgttacatatataggctattcaaacagtggctggtactggagttgaaggagcaacacggttttcagctggaatttcaacaaactcagacaatatagcacggaattcatctccgctcagagtctccttctccagaaggacttccacaatcttgtcaatggcctcacggttgttccttatatgctccagtgcaatttcatatgcttcatctgagatcctcttgatggcagcatcaatgtcttctgcaagcctctctgacattgagttccttgccatcattctcatgatgacatccccaccttgtgctgatggttccataagtgaccaaggaccaatatcagacat

SEQ ID NO: 16081 - DNA, 570 bp, Glycine max
  Clone ID: jC-gmle01810089f06a1
gttccttctctcgagacgatccggagggatgggaggtcctggtggccctggatttcctcttgcttttggtcaatccaaagccaagtttcaaatggaaccaaacaccggagtgacatttgatgatggtgctggggtggatgaagccaagcagggacttatggaggtggtggagtttttaaagaagcctgagaggtttactgctgttggggctcgcattcctaaaggagttcttcttgttggtcctccaggaactgggaagaccttgttagccaaggctattgctggtgaagctggtgttccatttttctctatatcaggttctgagtttgttgagatgtttgttggtgttggtgcttctcgtgttcgtgatttgttcaagaaggcgaaagagaatgccccttgcattgtctttgttgatgaaattgatgctgttggaagacaaagagggactggaattggtggaaggaatgatgaaagagagcagaccctcaaccaacttttgacagaaatgggatgggttgagggtaacacaggtatcattgtcgttgcagcaactaacagggctgacat

SEQ ID NO: 16082 - DNA, 541 bp, Glycine max
  unsure at all n locations
  Clone ID: jC-gmle01810089f06d1
agacgtaaagaaactacaaatttttacactaaaaacagtttctcttttatacatactctctgttgtcatttgtcaacactacaaaaaatgaaaaagtaaggtagaatctttaatcattcacaaatatggagcaggctgcagagggcattctgtattctaagataatacatatgaaagatgttacatatataggctattcaaacagtggctggtactggagttgaaggagcaacacggttttcagctggaatttcaacaaactcagacaatatagcacggaattcatctccgctcagagtctccttctccagaaggacttccacaatcttgtcaatggcctcacggttgttccttatatgctccagtgcaatttcatatgcttcatctgagatcctcttgatggcagcatcaatgtcttctgcaagcctctctgacattgagttccttgccatcattctcatgatgacatccncaccttgtgctgatggttccataagtgaccaaggaccaatatcagacattccaaatgtggtcaccatct

SEQ ID NO: 16083 - DNA, 556 bp, Glycine max
  Clone ID: jC-gmle01810089f07a1
ctgcactctgcacaatgctttccctctccgtccctcctctcaacctcaaacccataacacccaatgacctctttctctcatcagcctctccctcacctcaccgtcgctacttcgtgaaacccatcttcggccgtcctcaactcatcttccttcaagaaacctgagcagcctctgctgccgcagcatcaagtctaccagcccttccgccctcccccgtctcccctcccctcgcaattcggcaccctcgacatcgccggccgaatcgacatcctcgccaaccgcctcggcctctggtacgagtacgcgcccttaatcaattccctaatccgcgaaggcttctcccctccgacaatcgaagaaaccaccggcatctgcggcgtcgagcagaaccgcctcatcgtcggggcgcaggtccgcgactccctcgtccactccaaggccgaccccgacctcctcgctgccttcgagaccggcggcgccgagctcctctacgagatccgtctgctcagcgcctcgcagcgcgtcggcgtcgcgcgcttcctcgtcgagaatcgct

SEQ ID NO: 16084 - DNA, 521 bp, Glycine max
  Clone ID: jC-gmle01810089f07d1
aaaagaaaccactcactgtattaaccacatgaatataacgtacaaagagaaaacaaaaacgattaaatccttctattaagtatggaaaacaaaagaaagttgcatgtaatcccaaattaatagaaccttattttgcatgacacaaaaaacaaaggcaggggattgagctgagttaactagcaattcttgaattgagaaaaccatatatatatatatataatgtggggttatcgctattctttagcaactcaatcattcccttccctttgatttgagttcactcccagtcttcgtcactcaattcatcattttcttctttgggaggtctaacaaccaataacacagttcctaaactctgagtgaaacccttttccttcaatcccgaacccctctcgaccttcaaaccctgaccattagcattcacaagataaaacccatcatcggcacccacctcttttttactcctgtcagccaccaccaatataggctcctccttataccacctattcaccttccacggg

SEQ ID NO: 16085 - DNA, 391 bp, Glycine max
  Clone ID: jC-gmle01810089f08a1
atgaatttgaggctattgaatcccttgatactgctcgtgaaagggcagaaactcgtgctgagtcattgcgtaatgagcgtatttcagcaaaggcaggggatggaaaggtcaccctatcttctttagctgcagcactcatcgtcaggaaagctgtctggactagatttgcatcaactacatattattttgaaggttgatcttcacggatctattgaagctgtcagaaatgctctggagattctaccacaatacactgtcactctgaagttcttgtcggacgcatcaggtgatgtaaccacaactgatgtggaccttgcagttgcaagcaaggccatcattttgggattcaatgtgaaagcaccaggctctgtgaaaagctatgctgagaaca

SEQ ID NO: 16086 - DNA, 438 bp, Glycine max
  Clone ID: jC-gmle01810089f08d1
aaaaaaaaaaaacgccgtttttcccttggcttataaggggttgtttcaagttttttagggataaggcatttaaactttttccccttttaaaagggccttaaactgcttgactttggtaacaacacttttacagccaacaggggacaaattcttttgaaccttaattaataaccagggggcccctcaatatcaatttagtgatgggggaattggaccctttccactttcaaaaccctaatgggggagaatactttgggttttcaactggaacctgaaaagcatttgcactgggctgaaacacaagataggacccaatttcataagggaaaaccaaatggtttattttaaaatgcaaactcttctccctacaaaaacgctgacattgatgcttcagcctttaaaagggtgcttctgttctgaactggtttgaaaacttaa

SEQ ID NO: 16087 - DNA, 558 bp, Glycine max
  Clone ID: jC-gmle01810089f09a1
ttcttttcttgttctccttcttcctttcccaaccaaaacatttcttttgtgttatttactgattcctctcagcattcagcaatcagcatcattattacttttccttgtagccatatcaatttgttttctggttcaaaaaccaatatgccttatgcctttctctctttctagctttattttcctgtagaagtaagtaatttacagtttgttctattttctcagtgatttataatcagaaaacaagggacagccacacagaagttatcttgaatcagaaaacatgatgctaagaagctcttcaacaccagttcttggatccctcctctcatccttcccagatagtcctaacaacaatattcactcagaaacctgtcatgcacttaaacactttccaccaaccagtgtcccacaaccttatcacaaacttacttgccaccaaacccggtcctatgcatgtggttcttctccaatctctccctaattggtgagcttgaaggcaaaacaaaggctttagaagagtccaatctgatgggaacttgcaagacttggcctactttt

SEQ ID NO: 16088 - DNA, 487 bp, Glycine max
  unsure at all n locations
  Clone ID: jC-gmle01810089f09d1
gcaagcaatcagcaaaatatcgtattacctattcaacaataacattcaatccttcctgttccttctatcgtcaagacccttaataacatgaaatattctccatggtcataatactgcacctacaacttccacaaccataactgtgatccctgattcccttgcgaaaaacaagaacagaatagttagcctgtcaaatttccgttcatatttaggtcttctagaaccttttctcgagcgttcaagctggcttttggaacatgttctgattccatcttaatagcaccgtgtaaagttgcttaaattgcagtgcctttgatgcaacaaaccaacatacaagtactagtagtcccaaataagccacgttgattaattaaaagggtggtcgcttgtcttagtgctactacacatgagnttatgcattcagttatttactgctttctcaacagctacaacattggcttcaatataagaacttgtttacatcatg

SEQ ID NO: 16089 - DNA, 544 bp, Glycine max
  Clone ID: jC-gmle01810089f10a1
aaataaggcaataacttttgttgcttgtactttttgggtttagggttttgcaccccctttagctaaaacacacaagtggcaagcctatgttcaacttcaactccatgcctctccaattctgaacatttctaaatttccgattatataaatccaaacataaaaacaatgtcttcttcgtgtctgagtggagccgggggaagaacctatggattcgatttcgaattcgttaaatctccgtcttcatctactttcacatcacacacatcttcttcaccttcctcaacgatctccgaatcgagcaattcgccgctggcaatctcaacgaagaagcccagaacgccgcggaagcgacccaaccaaacatacaacgaagccgcggcgcttctctccacggcgtacccgaatttgttctccacgaagaacttgaaaactcagggcaaaggcaaaggcaaattctcgaggcccacatcggagaatctcgattacgattcttcggagctgttattgccgttcagagtcttcgacggaacggcgtcgtgttttc

SEQ ID NO: 16090 - DNA, 543 bp, Glycine max
  Clone ID: jC-gmle01810089f10d1
gaagccataacgcgaagaagagaatcaagtgcaatagagtcttaggcaatttgcttggactacttccgtcgcttatctcatccagcaatttcccccatatcttctagtgaaggaaggaagaagaacccaaaaagtaaaggttacaaaaatatagataaactctcttttccttttaatcttatttttattttttattcttaaaagaagagtcccaaaaaagcatgtgctttcctgctcctagatactatcatctgtgtgcatttgagctagaattgagcctcctaacaaatcgtcccttcattctgggccgtcgatctgcgttgactttcctcacctggtacctgatctttttcgagaagaggcgcgttcgccgcttctccttgtagcgcagcacgctagcttctctcactcctccattgtcccacaacaaatcaatttgcgacaaccgcgcagtgacgtcattttccgggacgtcggcgagggggctatcgtcggtgaacggtgttccgctgtcagaccaagcgtttcgaacgccgtcgtaat

SEQ ID NO: 16091 - DNA, 521 bp, Glycine max
  unsure at all n locations
  Clone ID: jC-gmle01810089f11a1
ctttttcatcttcttcctcctctcataccaccttcacttccatgaagccacaacatcaatatcaatgacaacaacagtttccaccgatttcctccccctgttcaacccccaccccaaccgcaccaattcccattctaattcccgtacactcccaattctcaatgaaaccaccaacatcaaccgcactctctcttccgtttccaagccccaaacccataccctcgatttcaaagacacccatctcctcaaatccctctcccgatcctgcaaagccggcaacttcaacgagtccctctacttgctgcgccacctcgtcaacaagggccacaaacccgacgtcgttctgtgcaccaaactcatccacgggctcttcacttgcaaaaccatagacaaagccattcaggtcatgcacatgctcgaaaaccacgggcaccccgacctcatcgnctacaacgccatcatcaccggcttctgcagagcccaccgaatcgattctgcataccaagtgctcgacagaatga

SEQ ID NO: 16092 - DNA, 454 bp, Glycine max
  Clone ID: jC-gmle01810089f11d1
ggtaattaatcagacaaattaagctgtctggacacatcaagcttgcaaaatgttttgtacaatcgttcaaatgaatgttcacaaatagcatccatattaacaagggtggtagccaagtccctagcattatttagacaccccccaaaaccaatcccttcaatcaaaaaagtgtaagtagtttcatttggccgacaccctttggccaccattgcagccaacacctcaatggcatcactaactctactcactttgcacaacccaagaagaacaatgttgtaactaacaacacttggcttacactcactactctccatctccatgtccaccaacaactcaatgggctcatccaccattccatctctgcacaaacaagatattagcgaattatacgtaatcccatcaggatcaacacccttgtccaacatctccaaaatcattcctaatgctctaactt

SEQ ID NO: 16093 - DNA, 531 bp, Glycine max
  Clone ID: jC-gmle01810089f12a1
ctcgcggttattatcctacttgtcagaaacttgcacttcactacacagtttagaagtgaatcaatccatccgagatggtgagactttggtttcagcacgtggaattactgaagtgggtttcttcagtcccggaaattcaacaagacgatacttgggtatatggtacacaaatgtatcccctttcacagtagtgtgggtggctaaccgaaatacacctctagagaataaatctggagtgctgaaactcaacgaaaaaggggtccttatgattttcgatgctgcaaacagcaccatttggtcgtccagcataccaagcaaagcaaggaataatccaattgctcatctcttggattctgcaaattttgtagtgaaaaatggacgcgaaaccaacagtgttttgtggcagagttgtgattatccaagtgatacattgatcccaggaatgaagattggagggaacttggaaactggtgaagataggttcataacatcttggaaaagtgctgatgatccagccgtgggagaatatac

SEQ ID NO: 16094 - DNA, 628 bp, Glycine max
  unsure at all n locations
  Clone ID: jC-gmle01810089f12d1
atgcacatgcatatangccgtccggatcnattgcaggaattacaggctcagctaatcggcggccgccctttttttttttttttgatgagcataatttgcaatttacttcagttataattgtctcattgtaaaaggcaggaaccgttggttctggcaataatttctctccattcaacattggaaccactgatgacatatctggtctgtgttctggtcttctttgtacacataataagcccacttgtatgcatcgtatgacttcaaatggtctacattgttcttctaacactttatccaataggtctagtgccctctcttctacccataatctccatgcatgtccaagaagattatggcagtgttctgggtctgaaaattccctgtttttcttcccactaacaatctctagtattattacaccaaaactaaatacatctgatttcaccgagaaattcccacgtacagcatactcaggaggcatgtaaccgtaagttccaaccaccctattggtctttgcttcaaattgatcttccaaaaatgatcgagccaagccaaagtcggatatcttggggtcccaatttgaatccactaaaatgttgctagttttaagatctctatgaataatcct

SEQ ID NO: 16095 - DNA, 531 bp, Glycine max
  unsure at all n locations
  Clone ID: jC-gmle01810089g01a1
ttctctacccaatgatgtcttctttctcctcgggtcaactttttgtctgttcactgtgtcaaaaggaaaaaaaaagcaccgatagggtctctcaaatatggaacgatattggggagaccgaagtggagaaagatcgaatgctgatggaattggagagggaatgcttagaagtatacaggagaaaggttgatgaggctgttaacaccaaagcacgctttcatcaaacagttgccgccaaggaagcagagcttgcaacactaatggctgcgcttggcgaacacgatattcattcaccgattaagacggagaagcgatcagtatccctgaagcagaaacttgcatccatcacaccttgggttgaagaattgaagaagaaaaaagatgaaaggttgaagcaatttgaagatgtaaaggctcaaatagaaaagataagtggngagatttttggattccattctgtcaataatggcttgagcagcacaacagttgaggatgatcaggacttgtcacttaggagacttaatgaatatc

SEQ ID NO: 16096 - DNA, 517 bp, Glycine max
  unsure at all n locations
  Clone ID: jC-gmle01810089g01d1
aaacttggggaggggaatcaggctctgaaccacaaagggaagcataagacattgtatcttccttggatatagccacaaagttcagtggtgcagtagacaatcttctcatttccttaaaatatccattctgacggccagagtaggaccgcggtgtcagtagttcagatgttgttccaccacttagggagttacgacggggtgtaggaggcatagatccattgccatttgcgcggtaactattagtctttctaaagctgttattttttcttggactaggtttagaaccatacatggcttccttttgatttaggagtagatcttgcatcttcttaaggtccctatgtcgtctcttatcttcctctttctgttgtctggccagtttataatcatccaatattgacaccaaacgtaccccatcatatagaaaatgagtcttcttttcatcttcccaggctaatgttntgtttataagattgtcaaccatagctggaantttgcctatagttattctagcatg

SEQ ID NO: 16097 - DNA, 219 bp, Glycine max
  Clone ID: jC-gmle01810089g02a1
gctgttgtctctgagactcaccccttcaccttctgcttcgacttcatcgcttcctgcagcacttgctcactgctccaagctatgtgagtttcaaccgcggaagaagaagaaggtgtgtttccacgcgcctaggcttgcggtgcggtgtgtgaaagccctcgcgcagcgaacccgtgatactatcgacgatggagagactcggactgggttcaccacacc

SEQ ID NO: 16098 - DNA, 421 bp, Glycine max
  Clone ID: jC-gmle01810089g02d1
gttattgaccaaataatccacttttggattataccattttattaagggaaaaaagagttccaactcttatttcaaaatttttgcaatcaaaaacttggatattctgattgtctgagaccaaaactaacatgagtatacctatattctttttatacaacaacaaccctaatatacacttttttttttaaccaaaatcagtcgtgggggatttttcaaaatctagttggagttttttttttctgacttaacctggtggattctttgacgtagtttaccccgggggtcatttattttccaaaggccatgtcccaatattacaggggagtttattccccgtgtgataatgggagccaaaattttatcagtttggatccactcccaacctaagtatattgccaacaatcctttcagaaatggggaa

SEQ ID NO: 16099 - DNA, 530 bp, Glycine max
  Clone ID: jC-gmle01810089g03d1
ctcaacctctgcttgcaccttcttcaagttctccatctcctcctccatggctgttttctcttgtttttgtctcttcttatgctccagtaatgatgtatcagaatctttaacagagaaaaacatgggtcccagcttagccagccactggggctccaccgctgttgcacactgcatgtactcctttgtggtcaggattaactcatgataaactacatactcaggagtgcaacccataccatagagagcactactgggatgaagatgacatggcatcccgttcctgcagttaacatactcccccacaccctttaatcttgctgaattgtggaagtatgcagaacaaattgctttcctgacaatgtcagtatccggccaacatgaggttaaggggatctttaaagtcttgagaatatcaagcagctgggatctaacctctctggcctttcttaggcctttaacatgcaaaaaatgatcattgcaccaatcacctctgtaatcatgttgtttccattgctgataaacgttgtaca

SEQ ID NO: 16100 - DNA, 375 bp, Glycine max
  Clone ID: jC-gmle01810089g04a1
agaactggttatggcacgcgctatcatgggtccacggcaagagctatcgttaatgaagtggtgcccacatcggcatcaaaggacagcatgactctccatgacgagggagaaaacttgctgaaatcgcttaaaacgatgccacgtgctttcatgaatgactcagcttccttgatcaatacatggatgacaagcacagagtgctaatagcgtgtgcccttaacagacgtgggggcatctactcagcttaatgaggaagagtgggggatcacactgcatcctatgctgggcttaatgctgagtgtggatgcaccagcagatgtgacgtgaacatgcaaggactaatggagaacatgctgcacgtgacatctgtcatca

SEQ ID NO: 16101 - DNA, 135 bp, Glycine max
  Clone ID: jC-gmle01810089g04d1
aaaaaccaatgcatgctccgtactcaaatcatacctctcccgctacatggatggaccctctgggcactgttggacgacatcctacaatcatgatgtcactaaaatctgaaacattcaagatcatgtgaacgcact

SEQ ID NO: 16102 - DNA, 106 bp, Glycine max
  Clone ID: jC-gmle01810089g05a1
gatcttccttgtatggtttgtgcactaggaaaatttgatggacattcatttcgtatttattatggaatattaacataattgacttaattataaaaaaaaaaaaaga

SEQ ID NO: 16103 - DNA, 91 bp, Glycine max
  Clone ID: jC-gmle01810089g05d1
ataattaagtcaattatgttaatattccataataaatacgaaatgaatgtccatcaaattttcctagtgcacaaaccatacaaggaagatc

SEQ ID NO: 16104 - DNA, 106 bp, Glycine max
  Clone ID: jC-gmle01810089g06a1
gatcttccttgtatggtttgtgcactaggaaaatttgatggacattcatttcgtatttattatggaatattaacataattgacttaatcataaaatactagcataa

SEQ ID NO: 16105 - DNA, 112 bp, Glycine max
  Clone ID: jC-gmle01810089g06d1
tccttttatcttttttttataattaagtcaattatgttaatattccataataaatacgaaatgaatgtccatcaaatattcctagtgcacaaaccatacaaggaagatcctt

SEQ ID NO: 16106 - DNA, 566 bp, Glycine max
  unsure at all n locations
  Clone ID: jC-gmle01810089g07a1
ctttagagagatagagagaggaagaaagaatggcagcttgcactgtctactcaacacaatctctgagcacaaattgctccatctcaaccccatcaaagacgcaactcagttttttccaccaaaagcagggtagttntctggaggaacagcaagaagggcagctgcagcagcagaagaagctatgtgataacatgtgcagcaggtgactcacagacagtggtgattggcctggctgcagactcagggtgtgggaagagcaccttcatgaggaggctgaccagtgtgtttggaggagcagcagagccaccaaagggtggcaaccctgactccaacactctcatcagtgacaccaccactgtcatatgcttggatgattaccactctttggacagaactggaagaaaggagaagggtgtcactgcccttgaccctagagccaatgattttgatctcatgtatgaacaagttaaagctcttaaggatggaattgctgttgaaaaaccaatctacaaccatgtcactggtctctgggatccccctgagctcattaaaccccccaaaatctt

SEQ ID NO: 16107 - DNA, 477 bp, Glycine max
  Clone ID: jC-gmle01810089g07d1
ggctcaatcttgtatcaacataactgaatctcagcctcgctttttcttctcggataagtacatacatacataggggttttttcattaattatcatgcagaacagccctaataacaattgacaaaataacatgaaatagagtggaattgtggaaaacatgaaagaagaaagaaaatgatgattttgatgatgagagaactcaatttggctgcgttgctcgatcgatatatgtatatatattatggcaggttcaattcctaagcttttgcagctactggagtctcagccttgctggctattagctgctcatatagatctcttatcttcaaaccaactatggtttggaagagacctgttccattggtgctgccgggaaaatcagcatgcttcaacatctggtgagtaacctctccatagaactttgtagagaggttgcttaggtggctctcaacgtatattagttcatctagtctggcaa

SEQ ID NO: 16108 - DNA, 551 bp, Glycine max
  unsure at all n locations
  Clone ID: jC-gmle01810089g08a1
gccaaaaatccagacacagagatacagtagctagagaaatggaagagtggagcgagcatcctaaactatcattgagtgaagggaaaagagtaaataattaaataaataaaaaacattagccttgtctcagcacaaacgtgaaagagcatganatgtgatttcaattactacaaccatgtcagcggcactctcccgagagattattcatatgacgaaactgccatcgctccccacaacgtcaatccctaactaactaccaacacccgtttcgtttcgaagacctgcaaccactatggtcggcggcggtgggaaccgaccggaggcggagcggtggctctacaccgccaacaagctcctgagcgcgcgtgacctgcacggcgcgcgctccttcgcgatccgngcgcgtgagtcggacccgacctacgaggcctcggagcaccttctgacggtgatcgacacgctcctcgacggcgagtcgcggatcaacgaccaccaccgcgattggtacgggatcctncaaatcctgcgctacaccaccaacatggaccaca

SEQ ID NO: 16109 - DNA, 517 bp, Glycine max
  Clone ID: jC-gmle01810089g08d1
aatcctcctcaaatagttcaaaaccaaagtaaggagattattgccgcaaattattatataatttaacagtgacaagaattcactatagctcagcatcattttgtgcatcgagtacaaacataaaagtaacaacatctaaattctacaacaaccaggaaagaaaaaaaaaaaaaagcatctacaagactaatgacccttaaccttatcatctgccacaacattgagaatgggcaagctactgaggaactcgtcaaggccttcaaaaaaaccaatcccttcaatattatcctcagcatgtccagcagcattcccttcgcggtcgcgcactccacgggaaggctcctccacctcattgctgaactccacattcaaatccaacttccccaagttcccagcaccccgccttctcgaaccacccaacgcagccttcttactagactccccccttgcaccagccggcacagtagaggcaacattagcatctgcactagcaccagttgcagcatcaccagaaccc

SEQ ID NO: 16110 - DNA, 505 bp, Glycine max
  Clone ID: jC-gmle01810089g09a1
aaattctgtgccttcgccttacaaacaagcatcagcaacactctactgttcaccgtatctccatcctctatcgttgacgcctttgtagcacgaagaaaagcacagtaactgagaggacacgatggtgaagcatagcaggaagagtaagagcacgacggcttcgttgaagaagaggtacatggacatacggaaggtgagggagcacaacaggaagaaaacgaaggaggcgaagaagcttcgcttgagtgggaagaagaagggtgagaaggaccctggacttcgcaacgattggcccttcaaggagcaggaactcaaagcgcttgaagctcgaagggcgaaggctattgaggaattggagcaaaggaaagcggaacgcaaggagagggctcggaaaaggaaattgggcttgctagaggatgaagataactccgattgagtgacatggatatgttaaaagagagtaatgattttagtactgatgggaagactagagatagctcagata

SEQ ID NO: 16111 - DNA, 488 bp, Glycine max
  Clone ID: jC-gmle01810089g09d1
gggtaaaaatccggaaacaaaattgcataatcatatgcctcaattggacacaaatgacctatccaaaattttgttcgtgacatcccaaaataatatatacataatggatcaacagcagcgatttagaatctttgaaacaaaaattgaagttaagaggaacccttatatcatgtttaaataatggctgtgttggcttgtgcattcattttccccataaactatggcaagtccatttaccccatcactcattcataggcacctgagagctgacttgttcatcgacatcctgactcttgctctcttcagcatccattgtcgctcccttttggaagtaatcaactttgaagtcataatcaccatccatgggatccgatgaggctacagctttcttggcctttttccttttcttcttctcagcgcgcctcattcttgctttaagcataccatctgcggcatataagttttcattttgcctggcaacttcactg

SEQ ID NO: 16112 - DNA, 479 bp, Glycine max
  Clone ID: jC-gmle01810089g10a1
gaaaagaactgaatatgaaattgacagtggagatgaagaatcggattgaagttgtcgctgttagatagagacagagtgacctcggagtttgctaaggaattgcaccctatggatgtgataaagacgccatatatctcatctcgaccaattccgaacgtgcaggctgaccctctcgttcttctcagcattgacgtcatcttcatcagtgtctccaatgacacttgcaagcgcctcttcggcctcttgctctgctcctgcttctcaggctccgtcaacgccatcaaccgcttcgccgtgccctttggagaagatgacaccgatcctagcatctgggctcttgaccacatttaccatgaacttatgttttgcatggcttaaagcgtaagtgcagatgagcacgctgtggtgaggtatggaactggtccagacctgctcgagactgatcgtgacgttctcgggttaattgatgacgatggtcc

SEQ ID NO: 16113 - DNA, 333 bp, Glycine max
  Clone ID: jC-gmle01810089g10d1
gaagagtaaaattcattaagcaccggaacattatacaaggatcgttatgccatgttaggtgtacgttctttactcctagcaaaaatagaaaaaaggtgtaactaatattaaatccacgtattctaatgacatttagagctccggccataacaaaccgcttaaaacttatgcagctgtacttggcactgtaactgttttcgagtcttgtgcccgttcatgtcccttgttgagcatcgtgttggttatcaaattgtggagtgctttcacacttctaaggagagacgagaggtctattaccagcagcatataatcggattccactgcgaaagcctt

SEQ ID NO: 16114 - DNA, 507 bp, Glycine max
  Clone ID: jC-gmle01810089g11a1
gaagcatctaagtgagatacacagtagttaggtagcaagcataagtgtctaaccttagaaacatatctgctacatatcgtgtgcattttggaattgtgccactaaaattctattcatctatggctgcctcatcttatgctatgcaatcaatccttgcaaaccctatgatccgcatttccagcgggtctagggagaaccattttggtgttcctgcttatcacatgagaaggaatgttggcctgagagttaggtccatggctgaggaagagcaaccaagtcagcctgcgaccccagttacaccaccaccagcagaacccaaaccacagccagtctctactccttcaccaaaggtgagcaccaagttttctgatgtgttggcgttcagtgggccagcacctgagaggatcaatggaaggttggccatgattgggtttgtgggtgcaatggcagtggaagtagccaaagggcaaggtgtgtttgaacaaatatccaatggtggtatcccat

SEQ ID NO: 16115 - DNA, 480 bp, Glycine max
  Clone ID: jC-gmle01810089g11d1
gaagataaagattactagttgaatttcttttattaacaaaaattaataaaatactaatgattaatattttttgataaaaaaaaatgataattttatatgctgattaaataaaggcaccaagtacaaaaagagattggtctttctaaccacgaatgacttaagaccattttggtgtgcattcatgactgaattacaccaaggtaccacccttaacatactcagtaaaagccagagcaaccaaacccaacatagcaaatctcccattccacagttctgcatctgaggacatgaaccctttggacttagactccacgctgatcccttggaagagtggaatcaaggaagcaagggtaaggaccacacttgttcccaagaaccatgggataccaccattggatatttgttcaaacacaccttgccctttggctacttccactgccattgcacccacaaacccaatcatggccaaccttccattga

SEQ ID NO: 16116 - DNA, 483 bp, Glycine max
  Clone ID: jC-gmle01810089g12a1
gaagcatctaagtgagatacacagtagttaggtagcaagcataagtgtctaaccttagaaacatatctgctacatatcgtgtgcattttggaattgtgccactaaaattctattcatctatggctgcctcatcttatgctatgcaatcaatccttgcaaaccctatgatccgcatttccagcgggtctagggagaaccattttggtgttcctgcttatcacatgagaaggaatgttggcctgagagttaggtccatggctgaggaagagcaaccaagtcagcctgcgaccccagttacaccaccaccagcagaacccaaaccacagccagtctctactccttcaccaaaggtgagcaccaagttttctgatgtgttggcgttcagtgggccagcacctgagaggatcaatggaaggttggccatgattgggtttgtgggtgcaatggcagtggaagtagccaaagggcacggtgtgtttgaac

SEQ ID NO: 16117 - DNA, 449 bp, Glycine max
  Clone ID: jC-gmle01810089g12d1
gaagataaagattactagttgaatttcttttattaacaaaaattaataaaatactaatgattaatattttttgataaaaaaaaatgataattttatatgctgattaaataaaggccccaagttcaaaaagagattggcctttttaaccactaatgacttaagaccattttggcgtgcattcatgactggattacaccagggtaccacccttagcatactcaggaaaatccagagcaaccatacccaacgtctcaaatttcccattccacagttctgcatctgaggacatgaaccctttggacttagacttcacgctgatcccttggaagagtggaaccaaggatgctagggtaaggaccacacttgtatccaagaaccatgggataccaccattggatatttggtcaaacacaccttgccctatgggtacttacactgacattgtaccc

SEQ ID NO: 16118 - DNA, 392 bp, Glycine max
  Clone ID: jC-gmle01810089h01a1
ggggtactcttagtttaaagcttggtggccatgcttctgcagtggtggatagggaagttgcaagctgggacggtacgaatgggaagaaaagtagagtgtcgggaagtacttcaaatcgagctgtttgtcaggtggaggactgcagtgctgatctgagcaaagctaaggattatcacaggcgacataaagtttgtgagatgcactccaaggccagtagggcgcttgtgggaaatgcaatgcagagattctgtcaacaatgcagtaggtttcacctgcttcaagagtttgatgaaggaaagagaagctgccgaagacgtttggcagggcataataaacgaagaaggaaaacaaatcatgaagctgttcctaatggaagttcattaaatgatgat

SEQ ID NO: 16119 - DNA, 495 bp, Glycine max
  Clone ID: jC-gmle01810089h01d1
cacacaagtattacactaaaatataatatcctgccaaataaagttttaagtagagttgcatctacatacattgtacaaggatggccattaaggataacaaatacgtaaataatattgcacagtttagctaatacaaagaaccagtccctagaggaaatctcggtcattcagtctatgaacgcatccttacattgcctatcaagttttattgagttgcaagttaatgaaccttagcttgttccaaagtccaaattctcccacctgaagggtcggaacatacatataacttcgggggagcttttaaacagaagggccacacagacacagacagcggctattgccaccattgagagcattgcaggtctgtataccaaagacctgcctactgcagttctgcaagaaattctcttgtcacaaagcttacagtgcccttggccacgtattacttcagcctttccaatctcaaaggtagtggataactcattttgcttctcg

SEQ ID NO: 16120 - DNA, 530 bp, Glycine max
  Clone ID: jC-gmle01810089h02a1
ggggtactcttagtttaaagcttggtggccatgcttctgcagtggtggatagggaagttgcaagctgggacggtacgaatgggaagaaaagtagagtgtcgggaagtacttcaaatcgagctgtttgtcaggtggaggactgcagtgctgatctgagcaaagctaaggattatcacaggcgacataaagtttgtgagatgcactccaaggccagtagggcgcttgtgggaaatgcaatgcagagattctgtcaacaatgcagtaggtttcacctgcttcaagagtttgatgaaggaaagagaagctgccgaagacgtttggcagggcataataaacgaagaaggaaaacaaatcatgaagctgttcctaatggaagttcattaaatgatgatcagacaagtagctaatctgtgattagtttattgaagatactttcaaatatgcattctgacaggtcagatcagactacagatcaggatctactaactcatattctgaggagtcttgctaggcagaatggtgagcaaggg

SEQ ID NO: 16121 - DNA, 494 bp, Glycine max
  unsure at all n locations
  Clone ID: jC-gmle01810089h02d1
cacacaagtattacactaaaatataatatcctgccaaataaagttttaagtagagttgcatctacatacattgtacaaggatggccattaaggataacaaatacgtaaataatattgcacagtttagctaatacaaagaaccagtccctagaggaaatctcggtcattcagtctatgaacgcatccttacattgcctatcaagttttattgagttgcaagttaatgaaccttagcttgttccaaagtccaaattctcccacctgaagggtcggaacatacatataacttcgggggagcttttaaacagaagggccacacagacacagacagcggctattgccaccattgagagcattgcangtctgtataccaaagacctgcctactgcagttctgcaagaaattctcttgtcacaaagcttacagtgcccttggccacgtattacttcagcctttccaatcttaaaggtagtggataactcattttgcttctc

SEQ ID NO: 16122 - DNA, 547 bp, Glycine max
  Clone ID: jC-gmle01810089h03a1
aaagccgtgtttgttgggtgttttggaggatctgctttgttttgctgtgttcagtggattgtgttaaaggggttttgaagatttttgttgaagttgaaaaatctgagagttttttggttgaagttctggctcccatggctgctcaattgcaaaaatctgcagatgaaatgaggaagaagcttcatggtgattcttcaacggttgaactcaataattccaattcggttccttccaagggtgcaagttccccttctgatgcaagatcatgtgtatcatccataggggatgcttctggtagtgttaaggaagtcgatgtggatcatgagtacttgtccacagatcagggcgttccttatcctgccggcggctattacggttactactatccaggttatggtggtttctatggagagtcagacaaccaagggtactatgttggtgccgatgccgtggatcttcagtaccctgtcatgcaagcagatcatggttcttatgtctatctcgtgccaggatttcagactggctacccttcatactatcatcctct

SEQ ID NO: 16123 - DNA, 543 bp, Glycine max
  Clone ID: jC-gmle01810089h03d1
cattacgcaataatgcgcggagtatattcaaattgaaataatgcaaggtcagagagttcccaactccaataattttccacatggaacccatcattctcaacatattattattgatgagctgtccaaattgggccatttgttatgttgttaaaatcggtaactgcaactacaagaaaaataaaattgaaaataccaagaacaaaggaagaaccaaactgagcttattatgtgcaaagaaagattaaaaaaaaaagtaaatgacacgtgcttttcatagcaccctgtaacagctatctcaccgggtccattccacttccaaagactttcttcctttgtagttttgtacaattaggaatgcagtcaccatttgcccggataaaaattattattattttttctttttctttttcttttctccctttctaaagcatcagcagcagcaagaatttttggtttagaacttaaaatttgaattcattagcttttttttttcttacttttggtccacgtggcacatcgccacaccatcggatcggcatgctg

SEQ ID NO: 16124 - DNA, 580 bp, Glycine max
  Clone ID: jC-gmle01810089h04a1
tgtcaacagagctcttttgaacctgaatggttctggagctggagcttcagctcccagttcagccttctttgggaccagcttgaagaaggttattgcctcaagggtccccaacagcaaggtttccggtggaaagcttaagaatgtgctggaaaagagaagaaagagattgaagagacccagcagaccgacaaggacagatggaagggtcttgcctatgatatctcagacgaccaacaagacatcacaagaggaaagggtttggttgactcccttttccaagctccacaggatgctggaactcactatgcagtcatgagctcctacgagtacctcagcactggacttcgccagtacttggacaacaaaatggatggattctacattgctccagcttttatggacaagcttgttgttcacatctgcaagaacttcatgaccctgcccaacatcaaggttcctctcattctttgtatctgcggaagcaagggacaaggaaaatctttccaatgtgagcttgtctttgccaagatgggaatcaaccccatcatgatgagtgctggagagttggaaagtggaaatg

SEQ ID NO: 16125 - DNA, 541 bp, Glycine max
  Clone ID: jC-gmle01810089h04d1
aaaggaaaaggcaccaaattcaatttaagtggacactgtaactcaaaattatagaggaagacggtccaatatgaaaaatatagtaagatcatctcaaacttagcatcttctctttgcacctaagacattgagaatgctaagaatgttacacgcaagttccatcacaacttctagcacttggattagtacaacaaccttcacgaacagaaatatttacttgccaagtttgctttgcctccaattcaagactggaagaaagttcccctctgaatagcatcctcgttagcatttccaagagcagcctcgttcaagtacttgtcagccaattggactctcttgacattctcttgttcttggacaagcatgttaccatacagcaagagcttctccagagtcatcttgggctgctcaaaggttggaggtccatcttttgagttcacaagctttttcccaacactgtcaacaccaacacccgaaattcacttcctcacttcatcatcatatactctgggcctcagtgcaccaaagaaatcaatggatt

SEQ ID NO: 16126 - DNA, 542 bp, Glycine max
  Clone ID: jC-gmle01810089h05a1
gtctttgtaagaaaactatccgttttagcgttagaaattcttttatggtgttagcatgattttgaattgcgattgcggtcgtggcggtggttgcgttacggtaagtcagaaaacctttatagttcaaggtaatcgcgggaaaatgtggattgcaattgcggcattacaggagtcaaaatactttgatattgcggttgcaattgtggttgcaaaacgctatttaaaaccatgggtgttagcattagaatcaaaacttaacttgtatgtatgtgtagggactaaaactcaacagttttctgaactaaaattaaaaaagatcaaatgattaatagcttaacctattttgttgatctatgattgttccttcagtttttgatactggtaccctctaatttgagtgttttcatgtttttctgcagagtctcgtgctataatgaggtattatgcagaaaaatacagatctcaaagcgttgagttgctgggaaaaaccatagaagagaggcgtctagtggagcaatgggtgaagttgaagcacacaactt

SEQ ID NO: 16127 - DNA, 231 bp, Glycine max
  Clone ID: jC-gmle01810089h05d1
gaaaaggacaaccccccccctggtgccttcaaaaggggaactcgcaaaaaaccacataggtgggggaaaaacatgcccaaaggggaccaacagaaaagaaggcccgaagataatgtttaacaaaaagagggggcttccagaaggcgggaaaaccctgatagaaggaggcctacggggactgttcccccacgaatccccaacaggcgcgtattcaaaaaaaaaaaatttacc

SEQ ID NO: 16128 - DNA, 424 bp, Glycine max
  Clone ID: jC-gmle01810089h07a1
ctcgagccgaatcggctcgagcgaagaagaagaagcactgtgattctgattctctctccgtcgttgcaactggtgcctccgtcgttttcatccctaaccccacaccttcgacgccctattatgatatgatcgcagattagtgggcaagggctgtgggtgaggatgaatttgcaacatattgggcagcctaaatcatctaatggatatggtcatcagaaatctgaaaaagaaggggcaactaagtctgataataagctcccatctgtaaagtcaaattctagcagcagattagcaggagtagtgactggcaataaaggtggtggttatagggagtccttcacatgatcgattagtatatttaacaacatgccttattgggctgcatgtggaaagttccagtgaaaaatggaatctatatactctg

SEQ ID NO: 16129 - DNA, 424 bp, Glycine max
  unsure at all n locations
  Clone ID: jC-gmle01810089h07d1
atcgaaatcctcccataagccgaagatattcttgtcatttgaaactcttcaagccatccactcagttcattcttttcaagcagagagaagttgtcaagaatgcattcaactataagtggtcaatgatcccgtcccttatatggcatctcagggaggtaacttggcatgtataaaacttgcctaggatgaccaagaagttgtccatactgtggtccatttggatgaaaatatggttgggatggcatttgtgccgcttgtggattatatacgactggttgtggccctgcaaaagtagtcccaactccaatacccatggacatggctggcatatttggtatggtggatacagtagctgggaaatagaaggaaccatcagacatgggggagcggngcctagcatgtgattgagacggaataaaactct

SEQ ID NO: 16130 - DNA, 546 bp, Glycine max
  unsure at all n locations
  Clone ID: jC-gmle01810089h08a1
tccaaatgcatcttgattacatccacggctaatttttccccaacttgattgaaaaatatttctggatcttttcttttctaagatttcttgcttgaatacactgaaatgtctgttacacctatttttatttttcgaaaaagtattttggaaattctgcattaggaacaaacgtgctactactccagtaagtgcttttaatggtttttgtgaaacttcacttgctgataataccatttggaattttacttccagctggagaaagaggcccttgtaaagggtgttccaattggacaggctcttgatatagacattccccctccacggcccaaaagaaagccaaacaatccttatcctcggaagaccaggattggtaccacatcattacatagtggagcaaaggatggaaaactcaatttagttgaatcttcacatgttaatcaagcactggacttgaaaaaagaaccacttncagagaaacatgatttagacgaagggctaacaactgtaaaagaaaataaggatgagaaccacgcanaagtatttact

SEQ ID NO: 16131 - DNA, 534 bp, Glycine max
  Clone ID: jC-gmle01810089h08d1
agtaaaagagcgtacacagtaatttaatacggtacacacatctacacgacaagtttcgtgagctgcagaattagaaataaacatacaatataggtacaccgttggagggataaagaaatgatatgcaaaaaaccaaaggttgcctttatgttactgcatatatcaaacctcaagtcgaagtctccccttccaaacgtattctcttacaaccttgctcttcaccttgattgctgcttgctccaaccctattttccttggcctccatggaacatcttttgtagggtttaaaacctgttcgatgagtcttaagctttccttgtccaagccctatggttaacagtccctcgttattttctacaaatagcaggtttttctgcatcgcttcataattagaactgcatttcttgccgtcaagatcttcatctttgtcatctatgttttgcttgttatcattggcgttgtccatttgatgatccgtattcttcaaagcatgaggaggtgaaaagctttgatgcaacacctctctggagaaca

SEQ ID NO: 16132 - DNA, 595 bp, Glycine max
  unsure at all n locations
  Clone ID: jC-gmle01810089h09a1
ccacaacccttcttatcaatacttcaatttggatgagaaagacatctggattggctgtggcagatggcctttcaaaccttttaaagtgtcgcctctcagctacaattagatgtctttctcatccaagtgcacatgtccgagctctgagtatatcagttcttcgtgacattttgcatactggttcaatcagatgtagtcctaaacctcggagattaaatggcacccacaacccttcttatcaatacttcaatttggatgccgttgactggcaagctgacatagaaaaatgcttgacttgggaagctcacagccgactttcaaacggattgtctattaactttcttgatatcgctgccaaagagttaggctgtactatttccatgtgaaatgaaatcatccatcttagtctgtgacaattttttgctagacttatagaaaaagaaaaagaanactgaagttattgatatgcttatggaactaacgggtttgcaaataagcataattctgctagtcctgttaaaaagagctgcaatcataattctagtatgccatagaaagctcattttggatcatgcatgtactctagctaaactag

SEQ ID NO: 16133 - DNA, 439 bp, Glycine max
  Clone ID: jC-gmle01810089h09d1
aaaagaaaaaaaaaaggaaatcctgcctgaacatactttaatccaaacaattggaactgacttccatacaagctaaatcaacctaagcttaacccaaaatgggacaatgatggaaaaaaggacctggttacaggcgtttttcgttactgtacaagtctgttttatccagagcagagtcacaagcaagttcaaggggaaacttagtttagctagagtccatgcctgatacaaaatgggctttctttaaacctactaaaattttgattgcagctttttttaacaggacttgcaaaattatgcttatttgcaaacccgttagttccataagcatatcaataacttcggtgttctttttcttttcctataagtctagcaaaaaattgtcacagactaaaatggatgatttcatttcacatggaaattgtccagtctaactttt

SEQ ID NO: 16134 - DNA, 563 bp, Glycine max
  Clone ID: jC-gmle01810089h10a1
ccacaacccttcttatcaatacttcaatttggatgagaaagacatctggattggctgtggcagatggcctttcaaaccttttaaagtgtcgcctctcagctacaattagatgtctttctcatccaagtgcacatgtccgagctctgagtatatcagttcttcgtgacattttgcatactggttcaatcagatgtagtcctaaacctcggagattaaatggcacccacaacccttcttatcaatacttcaatttggatgccgttgactggcaagctgacatagaaaaatgcttgacttgggaagctcacagccgactttcaaacggattgtctattaactttcttgatatcgctgccaaagagttaggctgtactatttccatgtgaaatgaaatcatccatcttagtctgtgacaattttttgctagacttatagaaaaagaaaaagaaaacagaagttattgatatgcttatggaactaacgggtttgcaaataagcataattctgctagtcctgttaaaaagagctgcaatcataattctagtatgtttatagaaagctca

SEQ ID NO: 16135 - DNA, 441 bp, Glycine max
  Clone ID: jC-gmle01810089h10d1
aaaagagagaaaaaaggaaatcctgcctgaacatacattaatccaaacaattggaactgacttccatacaagctaaatcaacataagcattacacaaaatgagacaatgatggaaaaaaggacctggttacaggcgtttttcgttactggacaagtctgttctatccagagcagagtcacaagcaagttcaaggggaaacttagtttagctagagtccatgcatgatacaaaatgggctttttataaacatactagaattatgattgcagctttttttaacaggacttgcaaaattatgcttatttgcaaacccgttagttccataagcatatcaataacttcgggtttctttttctttttctataagtctagcaaaaaattgtcacagactaagatggatgatttcatttcacatggaaatagtacagcctaactttttg

SEQ ID NO: 16136 - DNA, 515 bp, Glycine max
  unsure at all n locations
  Clone ID: jC-gmle01810089h11a1
aaaactcagcacaacacccctcccaaccctctttttctcttaatttctcatcatatcatatctattaatcttacacatatattaagacatagatataattgttttcgttttatttttccttgcatgggctgttaaaataagatgtctcgcacgtgctcacagtgcggcaacaacggccacaactcgcggacatgcaccgacggtggcgccgacgcttcctgcggcgggtctcccagggagaacggcatcatgctgttcggcgtaagagttatgaccgaagctaactcctgcttccggaagagcgccagcatgaacaacctctcacagtacgacgcggaatccaacgccgncgacgccggctacgcctgcgacgacgttgttcatgcctacggccgcacgcgcgagcgcaagcgaggtgttccttggacggaggaagagcataggttgttcctgttagggttacacaaagtcgggaaaggagattggagaggtatttctcgaaacttcgtgaaaac

SEQ ID NO: 16137 - DNA, 525 bp, Glycine max
  unsure at all n locations
  Clone ID: jC-gmle01810089h11d1
caacggtgagcatgaaatattccttttgtctaatctaagcaatattttaatgaccccagtggcattacacagaccaatcgcttatcaagagtacccggtgccctatcatttcacggtcacactcccccatacatatagaaacaagaatccctcaacagctagagaatatgacaacccatcttttttaattcaactaaacctgtacactgaaaccagcaattaaattgcctaattacctacataacctaattaccatacatatctctttatttgatttttttctaatcataattaccatcatactcatttaattctaatatcctctccctcctacctatatcatacatctttcgtaataaacaaatctccaacacatatctcttagattttttccctgttggatacatgcccgattttgtaacattaatttacatacccaaattaactactaagaccatacttaataagttaatgactctcatttgntctttggttccttcttttcaagcaacgctgatgatacta

SEQ ID NO: 16138 - DNA, 482 bp, Glycine max
  Clone ID: jC-gmle01810089h12a1
cagttattgtcaccagtatgcatggaggctctgaaaatccacaatccatcattgaatctttgttcaagaagctcatggcggatgctggtgaagggtgcaagtccttgcacctttctgacacacagtggtagtaagcgaagagggtttggcaaagtaagagttactgctgaagactcagtttctccctctgagaccattgcagatgactattatgaagttcttggactgcttccagatgcgacaccagagcagatcaagaaggcatactacaattgcatgaaatcttgccacccggatttgagtggaaatgatcctgagaccacaaatttctgcatgttcatcaatgaagtctacacggtgctcagcgatcccgtccaacgcatgatttatgatgaaattcatggctactctataacttcaatcaatcctttcttggatgattcaagcccaaaggatcatgcctttgttgatgaattcagctg

SEQ ID NO: 16139 - DNA, 322 bp, Glycine max
  Clone ID: jC-gmle01810089h12d1
ttgttgtttttttttttttttttttttttttttttttttttttgttttttttttttttaaaccgagcacactggaaccataattatgattttataaacaagcttttttatattttccaaagaattcctatgggtcatacattgaaaaaaatgtacctcaaatggagcagctgcttaaacaattacgggttgcttaacgcgaaaaaacaactcatggggttaacttaggggggtatcaaagaactgagtacccgggcctcaagggttttgtcaaaggtgaaagaaatgccgttcacttgcacttgccgaggaccgtcactgga

SEQ ID NO: 16140 - DNA, 428 bp, Glycine max
  Clone ID: jC-gmle01810090a01a1
gagagagaaagagacgtgtgttgttggtgaagtttttgagaagaatatggaacgatgtggcggaatggtaacggggtcgcatgacaggaacgaacttgttagagttagacacggctctgactgtgcgtctaaacccttgaagaatttaaatggccagatgtggcaaatatgtggcgacaccattggattaacggctactggtgacctatctggtgcttgccatgagagtggcttgccactttgtcattcttgatacgagtatgagctgaacaatgtgagccaagacttgtcctcagcgccagactacattcacaggtggccaagatggtgctgaagtggagggagatcatgatgacgaagacgatgctgttgatctagatcacgggatcaactatggccaagggtacaattccatgtcggggatgctc

SEQ ID NO: 16141 - DNA, 204 bp, Glycine max
  Clone ID: jC-gmle01810090a01d1
ttgtcgtcctttttttgtaaaaaactgtgtatgataattacattactcatcaacaatggtacatcagatcacactattttaggacaaagcatgtcttaaggttcatcctttacttcattgcattccaaacgcacacctagaaagaatcatcaactaatgtgtaatacgtttctctgtcactctatctatatctactccatctat

SEQ ID NO: 16142 - DNA, 482 bp, Glycine max
  Clone ID: jC-gmle01810090a02a1
tgctctcttcttctcactgatccgcattgccgttcaaagtggtcttatttgaaaaacacttgggcgttggtgcaaatgtttgcttcgttaattttctctggggacaacaggctcactgagaaaacaatttttacttgcagagatttggacatcttggttgtttattatacaatagcaactcaatttagaaaatttctaccgcattacattaggtggcatctgtataccttgttgatctacattctcccatcttttctcactgctgaaattaaatataagcggaatttgagtaatattcatatttccgtcttattttacgacggcagatacaaattctggactaaacacgagaaaaatcttgctttgacagaagaggaaaagatggaggtgattagaaatagaggcattcctgctgatgttcttgcaaagcgagctcatgaatttgaaaaacatgttgctcatgaaagcctcaaggatcaaat

SEQ ID NO: 16143 - DNA, 431 bp, Glycine max
  Clone ID: jC-gmle01810090a02d1
aaaaaaacccccactttacacattattaccacaattaaaagagggggggaaattttaaaatagacagggcattcttaacaaggggggcatggctaatttcctttattgaattaaacaaacgaacaaacgaaagaaaacccaaattccaaatcatgccgaggattccccattttcaaaaaaactggcaatagcctgtggaacaaaaaaagctggcctaagagttttccccgcaatttcaaaatcttgggaaattcccaagagaattttaaaaactgtagactgtttgggattggcaataaggaaacttaagggccctgaaatttgatttgcccacttaaaactccacattttaaaacccttttttgggccacataccttttttgggaaaatcaattcccacgaatgggggtcccattttggccacttacatg

SEQ ID NO: 16144 - DNA, 533 bp, Glycine max
  Clone ID: jC-gmle01810090a03a1
tgaactcaatctttatattagatttcagagtggacagtgagatgataataataatggtggaacacagataaatcaaattataactagagaatggcaaagcttaatggcatcatagcatgaattggtagtttacttgcgtgataaggtttttgaacattaatagtcactcttctcctccccttctctctctattgctaaataatggtaatagcttctttagctaatattaatatcacatgttcaatgaaattgcttttatttaacatttagcaccaaatagtgttttatagatatttaacagttgatctttattgtgtttattttttgcgtgatttaatgtgtgaatggatggttctgagggaagataactttttaaattacagggtgggatgtccaatgaactatacaacactattgcccgcgtaactgatgggatatatgaaggcattgctattggaggagatgttttccctggttccacactttctgaccatgttttacggtttaacaacatgccacagggtaaaaatgat

SEQ ID NO: 16145 - DNA, 596 bp, Glycine max
  Clone ID: jC-gmle01810090a03d1
catcaagagaaatataattttaaaaatgaccaagttctctctttatgaaatttaatacaagttacaaatggaagatgacttttcaccaatagatcgtacaacactagtctaacagctacaaaaccactccagcatatttcagatgtgcatgatttcccaaaagattgctaatttgaagcatgccaaagttcttacagtcgcacaaaactttctcactttgtgtagagaacatcctcccatgggtgacggtaaagtggttgcttcaatcgcttttggtcaaaggtgtgcccaatcagaccaatggagcgtgccagcacaaagaggccattcagatagccaatctccacaatttcatcaatctcttgtttggtgaacattccactaccagcaagaagatccaagaaaagagatccaattgcaccatctacgttaagaactaaattatttgcctttgtgagcgtgtaggtctcaacttgaacagcatattccatgtatttcacagaaggaaaatgtgtgcgtgcaaacttctgtagcagctcaactctcttatcttggtggccctattcttgatcctgtgccctattcctggcacacga

SEQ ID NO: 16146 - DNA, 460 bp, Glycine max
  Clone ID: jC-gmle01810090a04a1
caggctcaaggttatcaggaaatgttcaataatttgggtgaactgctgtgcaccatcactgggtttgactccttctccttgcaaccaaatgctggtgctgctggagaatatgccggacttatggttattcgtgcatatcatttggcaaggggagaccaccaccgcaatgtttgcattatacctgtctcagcacatggtacaaatcctgctagtgctgctatgtgtggaatgaaaattgtctctgttggaactgacgccaagggtcacattaatatacaagaatcgagaaaggctagccgaacacataaagacaacttatctgcacttaatggaacatatccttgaactcacggtgtttatgaggaaagatcgacgaaatttgcacgattattcatgatcatggacgcccaagttatatggatggtgccaacatgaatgctcagtgggactcacaagccca

SEQ ID NO: 16147 - DNA, 497 bp, Glycine max
  Clone ID: jC-gmle01810090a04d1
atacaattcgtttacatgaatcaaattcattttttcacattattgtgacagataggcctaaaatacattcctaaaataaaatagcagcagcaattatacgaattacttttttttgtttcctgtggttggatgaaacttaagagcagtggattatcatcattatcacatatgatgaagcaatattcaagaggtgcaagaactgtatgaataggaataagagtttatgtacaacgggaaatgaaaatagttgtcatttgaacacactatgctgtggcagcagcttgttcttcaacagcctgtgatgctggcagaagggtgcaaatcaagttgcggtcaccgtacacattatcaacacgtcctgtggtaggccagaactttgaagcacggagccaaggagctgggaaggctgcatattccctggagtatggttttgtccatgcatcagccatgagcagtgatggtggatgaggggcgctcttaagtacattttgtgtaat

SEQ ID NO: 16148 - DNA, 392 bp, Glycine max
  Clone ID: jC-gmle01810090a05a1
ggatattctcttatgctgattcacaaaggcacagacttggaccaaactatctgcaacttcctgctaatgctcccaagtgtgctcaccacaacaatcatcatgaaggtttcatgaatttcattcacagggatgaggaggttaattacttcccttcaaggtatgatcctgttcgtcatgcagaaacgttccccatacctcctgctatctgcagtggaaggcgtgaaaagtgtggaattgagaaggagaacaactttaagcagcccggagagagataccgatcttgggcacctgacaggcacgatagatttaatcgccgatgggttgatgctttatctgacccacgggtcacccatgagatccgcagtgtctggatatcttactggtctcaggct

SEQ ID NO: 16149 - DNA, 307 bp, Glycine max
  Clone ID: jC-gmle01810090a05d1
ggtaaacaaaaggcttttaaaaagataagcaaaataggaaaaaagaaggataaaaagggacagaaataagaactggggagaaagccaagacccaacaaatggaagcaaaaacacaatgaaaagggcgacattgagaggaagaacaaataatacaaaaaggggggggggcttacgcacaaaaggaaaggacaagcaggtacaaaagaacatagtagggggtctggacaacaaaaaacctgggaggcgggccacaaacaaaaaagggggttatcacgggaaaaccaagggcatctgaaggcaccaaaaa

SEQ ID NO: 16150 - DNA, 476 bp, Glycine max
  Clone ID: jC-gmle01810090a06a1
ccaatatattccattctctctgtgtatttccctacctctcccttcaagatgcagatcttcgtcaagaccctcaccggcaagaccatcacccttgaggtggaaagctctgacaccatcgacaacgtcaaggccaagatccaggacaaggaaggaatccccccggaccagcaacgtctcattttcgctggaaagcaacttgaggacggccgtacccttgctgactacaacattcagaaggagagtactcttcacctcgtgcttcgtctccgtggtggcatgcagatcttcgatgagacactcaccggcaagaccataaccctagaggctgaaagctccgacaccatcgataacgtcaaggccaagatccaggacaaggagggtatccccccggaccagcaacgtctcatgttcgccggaaagcagctcgaggacggccgcaccctcgccgactacaacatccagaaggaatcaaccct

SEQ ID NO: 16151 - DNA, 452 bp, Glycine max
  Clone ID: jC-gmle01810090a06d1
ggacaattaatcatttcatatttcacacattcataacaaacgttggtgggatattagagtcctattattaatgggacacaattgagttcaacacaaaccgaacttattttcaagggacattattacagacccattaaacatcaaagttcttcaaatgttttgggaacacatccaacattacacaacgagcttaaaaccccccacggagacggaggacaaggtgaagggttgattccttctggatgttgtagtcagcgaggggccttccatccttgagctgtttgccagcaaaaatcaacctctgctggtccggagggatgccttgcttgtcctgaatcttggccttcacattgtcaatggtgccagagctcttcacctggagggtaatagtcttacccgaaagagtcttaccgaaaatttgccttccaccacggagacgcaacacccagtgg

SEQ ID NO: 16152 - DNA, 428 bp, Glycine max
  Clone ID: jC-gmle01810090a07a1
aagacagctcatgaatctgcttcttcttggtgccatttcactcccctctgctggaatgcttattccctacacctacttttttgtccctgcaggttcaggttcttcagctggtggtactgttgccaaggatgctgttggaaatgatgtaattgcagagaatcggctcaaggcacatggacctggtgaccggaccctggcacatggattgaagggagatcctacctatcttgttgtggagaaagacagaacccttgcaacatatgcaattaatgccgtgtgcactcaccttgcatgtgtcgtgccatggtatcaagcagagaacgagttcatctgcccttggcatgggatctagtacaatgaccaatgaagtagtcgtgagaggacctgctcccttgactctggcattagcacatggtgatatagatgat

SEQ ID NO: 16153 - DNA, 574 bp, Glycine max
  unsure at all n locations
  Clone ID: jC-gmle01810090a07d1
tccttttttttttttttttacacggtaaaaagtgacccgttcaggttcctttccatcttagcttcagttcacaaaatatcaatttgattacaaaatatatttatgcattaatacaaaacagaatgtttgaatttcatgtttaaatatacatgacaacagagggacggctttaaggagtctaagcccaccatggagcatcacctgttctgaaatctgtttcaacccaaggaacaaacaccaccttcccatcatctatatcacaatgtgctaatgccagagacaagggagcaggtcctctcacaactcttccttggtcattgtactgagatccatggcaagggcagatgaacttgttctctgcttgattccatggcacgacacatccaaggtgagtgcacacggcattaattgcatatgttgcaagggttctgtctttctccacaacaagataggtaggatctcccttcaatccttgtgcaagggttcggtcaccaggtccatgtgccttgagccaattctctgcaattacatcatttncaacagcatccttggcaacagtaccaccagctgaaga

SEQ ID NO: 16154 - DNA, 384 bp, Glycine max
  Clone ID: jC-gmle01810090a08a1
ggcaggcaaacctttgtgaaggcgctggaaccctttgttaattggctggaggaggctgaagaggaggagtaagtgtggtggaggttcagggctgaagaaattaccttgtctttcagctcttgtaccatttagctaagatatttggctcgaattctcttaaattcggttctgcctagtagtactgattatcttttaattcgtatttgtgttgtgtttgactcctcctactcctccatcgggctctcgggacatattcatggagcctgtgtgttttccgcacgccactgtgatatgttatacgggcgcatcactgtattctgagtgaccatcccaataatgcgcgggtctcacattcctgatgaactgctagttcagtgcttgact

SEQ ID NO: 16155 - DNA, 406 bp, Glycine max
  Clone ID: jC-gmle01810090a08d1
aagagtaccaccaatagaattagtcaagcactgaactcaaagtttcaacagggataagagtaccacccattattgaaataatcactcaaaatacagtaatgcacccgtataacatatcaaagtggcgtgcggaaaacacacaggctccatgaatatgtcccgagagcacgatggaggaggaggaggagtcaaacacaacacaaatacaaattaaaagataatcagtactactaggcagaaccgaatttaagagaattcgagccaaatatcttagctaaatggtacaagagctgaaagacaaggtaatttcttcagccctgaacctccaccacacttactcctcctcttcagcctcctccagccaattaacaaagggttccagcgccttcacaaaggtttgcctgcc

SEQ ID NO: 16156 - DNA, 565 bp, Glycine max
  Clone ID: jC-gmle01810090a09a1
ccaagaagtcccccttctccgtcaaagtcggcctagcccagatgctccgcggcggcgtcatcatggacgtcgtcgacgccgagcaggcccgcatcgcggaggaggccggtgcctgcgcggtgatggccctggagcgtgtccccgccgacatccgggcccagggcggcgtggcccgcatgagcgatccgcagctcatcaaggatatcaagcgggccgtcaccatccccgtgatggccaaggcccgcatcggccacttcgtcgaagcccagatcctcgaagccatcggcatcgactacgtcgacgagagcgaggtcctcaccctcgccgacgacgccaaccacatcaacaaacacaacttccgcatccccttcgtctgtggctgccgcaacctcggcgaggcccttcgccgcatccgcgagggcgccgccatgatccgcaccaagggcgaggccggcaccggcaacatcatcgaggccgttcgccacgtccgctccgtcatgagcgacattagggttctccgcaacatggacgacgacgaggtctttacctttcgccagaacatcgc

SEQ ID NO: 16157 - DNA, 510 bp, Glycine max
  Clone ID: jC-gmle01810090a09d1
ctaaaatccaattaacacggttcaaaacaccgaaaactaaaaacataaccttattataatatataagaagcaactaaaacccttaatagtccaaattgaagcgccacagagaaacaaatctgagaattattattcatttcattcagagcgattggcgaacctctcaaccttgtcatcggtcaaattgataccaaccatggcttcacccaatccgcagctaacctccgccaaaatctcagggtcgctgtagtgagtcacggcctgaacaatcgccctggcgcgcttcgcgggatcgccgctcttgaaaacgccggagccgacgaagacgccgtcgcagccgagctgcatcatgagcgcggcgtctgcgggggtggcgactccgccggcggcgaagtggacaacggggaggcggccaagctgcttggtctgcatgacgaggtcataaggcgcagcgatgttcttggcgaaggtgaagacctcgtcgtcgtccatgttgcggagaaccctaat

SEQ ID NO: 16158 - DNA, 540 bp, Glycine max
  Clone ID: jC-gmle01810090a10a1
catgaccctgcccaacatcaaggttcctctcattcttggtatctggggaggcaagggacaaggaaaatctttccaatgtgagcttgtctttgccaagatgggaatcaaccccatcatgatgagtgctggagagttggaaagtggaaatgcaggagagccagcaaaactgatcaggcagagataccgtgaagccgcagacttgatcaagaagggaaagatgtgtgctctcttcatcaacgatcttgatgcaggagctggtcgtcttggtggaaccacccaatacactgtcaacaaccagatggtgaatgccaccctcatgaacattgctgataaccccaccaatgtgcagcttcctggtatgtataacaaggaagagaatccccgtgtgcccatcatcgtcaccggtaacgatttctccacactctatgcgcctctcatccgtgatgggcgtatggagaagttctactgggcaccaacaagggatgaccgcattggtgtctgcactggaatttttcgcaccgattcaattcctgaacagga

SEQ ID NO: 16159 - DNA, 540 bp, Glycine max
  unsure at all n locations
  Clone ID: jC-gmle01810090a10d1
aggacaaaaggaaaaggcaccaaattcaatttaagtggacactttaactcaaaattatagaggaagacagtccaatatgaaaaatatagtaaaatcatctcaaacttggcatcttctctttgcacctaagacattgagaattctaagaatgttacacgcaagtcccatcacaacttctagcacttggatcagcacaaccttcaggaacagaaatatttacttgccaagtttgctttgcctccaattcaagattggaagaaagttcccctgttaatagcatcctcgttagcatttccaagtgcagcctcgttcaagtacttgtcagccaattggactctcttgacattctcttgttcttggacaagcatgttaccatacgtcaagagcttctccagagtcatcttgggctgctcaaaggttggaggtccatcttttgagttcacaagcttcttcccaatgccgtcaacaccaacaccagaaatccacttnctcacttcgtcatcatatactctggccctcagtgcaccaaagaaatcaatg

SEQ ID NO: 16160 - DNA, 620 bp, Glycine max
  unsure at all n locations
  Clone ID: jC-gmle01810090a11a1
attaggagctttaccggtcgtgaaaagtataaaagacgactatgggcaaccggtgcactagacaacccatctgtgactgtgcaggaaatggtgatgctgtcaaccagtgttttaagtatcaagtggacaataagagggaaaccaaaatctgtgttaggaggagatctgataattagagttacttccaaatttactcttaaccaaattagtggccaagtcattgagcatgaagaattctgggacttatcagcttcatctgctagtgctcaggcatttttctggacatcacgtgctctctttgctgctgttgaatctgtcaaagatttgggtgacagtgctaagaatttgagtagtaaaatgtcaaccaaaaaagagaacttggagatgtatccagatccttcaggtgatccaaccaagttcttccagagggacgacagttttcaacaggatgcataccagattgcactactcctggcagttatctatttggtggtacaatttctaaggacaactatgtaaagctagcctgccattttatcaactgaaaacttgatgtcttgttttccaagagttatcattatanagtgtgactatcagcttataataaaaaaaataaaaag

SEQ ID NO: 16161 - DNA, 528 bp, Glycine max
  unsure at all n locations
  Clone ID: jC-gmle01810090a11d1
atgagctgatagtcacactttataatgataactcttggagaacaaagacatacaagttcagttgataaaatggcaggctagctttacaaagttgtccttagaaattgtaccaccaaataaataactgccaggagtagtgcaatctggtatgcatcctgttgaaaactgtcgtccctctggaagaacttggttggatcacctgaaggatctggatacatctccaagttctcttttttggttgacattttactactcaaattcttagcactgtcacccaaatctttgacagattcaacagcagcaaagagagcacgtgatgtccagaaaaatgcctgagcactagcagatgaagctgataagtcccagaattcttcatgctcaatgacttggccactaatttggttaagagtaaatttggaagtaactctaattatcagatctcctnctaacacagattntggtttccctcttattggccacttgatacttaaaacactggttgacagcatcaccatttcctgcacagtc

SEQ ID NO: 16162 - DNA, 494 bp, Glycine max
  Clone ID: jC-gmle01810090a12a1
tgaagaatgaaattgaaaagtgaagtttagagatggaagaagaaaaagcagcggcgtactacgacgagctggcccgtaagggcgagggagctgcgaggttcaagcaaggtctaggcttttcctcttcagcaccaaacgacgacgttccaaaaccctcctcctccttcctctccaaattcgtcaaagcctcctccgagtcggagaagcaagcgcagctccaatccatccacgacaagcttaagaaaaatccctcttccgagtctagggtttcgagcagcgacagaagcaggagcagagaaaaacgtaggaaaaggagcagaagcggagatagatacagggaaacgcggaggcgaagcaggagtagagagagacatagggatagtgaaagagggagacggaggagtagaagcgtttcttctcgcaagcaacgcaggtcggagaaagacgcgaattatagagggaaagtcagtgaaacgaagaaagggaagaatgct

SEQ ID NO: 16163 - DNA, 389 bp, Glycine max
  Clone ID: jC-gmle01810090a12d1
caaagaggaataccatttttctaaacccattggcaagctttccctttaaatatttaattatgaaactggcattacacaaaagacaaagggggtttaacacatcatccggatttcctttttgaaaacgataaacggtaacacacagcttacctaactagggatattggaggctggacaataagggcaattgcataggaacctgatacaagtggtctccagggttaaagcccattttacaccatttagagcccgggcaatgcaaaattgaatgctttaaacatggttaaagctcaactccatgcagctttcagccaacttttttatcataagcataaactttaagggggcaaattttaagctggacaaacccgatcacgccaagacccctt

SEQ ID NO: 16164 - DNA, 512 bp, Glycine max
  Clone ID: jC-gmle01810090b01a1
ctttagtatgaggcaccaaagctccaaggctcaggctttgtatgaacattgcaaaaccatcttatcgccctctggatcaccccctgcttcgtcccaagctgtgcagaagctttcttcgattctggacactattcaacctgctgatgttggccttaaagaagaaattgcagacgatgatcgagggcatggattttttggcgctaatgcacttagtagattagctcgatgggctcaaccaataacttatgtagacattcatgaatgtgatagttttacgatgtgtatattttgtttccctactgcttcagttattcctctccatgaccatcctgggatgactgtatttagcaaacttctctatggctctgtacatgtgaaagcttatgactgggttgagcctccctgcatcatagaaagcaaagaaccaggatatgctcaagtaagactagcaaagttagcaagtgataaggtctcgaatgcaccgtgtgatacatcagttttatatcccaaac

SEQ ID NO: 16165 - DNA, 578 bp, Glycine max
  Clone ID: jC-gmle01810090b01d1
actaaaagtattaccatacttgattacggctacacaggaatccgttttgtacataccatatttatgataattattacaaaacaattatgcttatattaatgtgcagggacagaacatctataacttgtaacaatgagggaacatggtatgaaacacaatagccactggtaactatagcaaagatttgttgttccaagctaatgagaaaatgcagatttatttacgaaaatctttgctcaaaatatgcatgcagcacaaggaggcacaaatcaaccagaacattccatgcatcagcattttagatcctcttgtcactagctttcaggagcaaaatgggataagtatattttcaggcattaatatcatccacccttcacagcaggaaacaagcaattgcttttaaatccaagcaagcagagctaaagctgaatagctggaccagcatataccacctggcgcatataaagatcactaggtgattctaactctgtgagccatgcatattactactcttccccgtcacatataggtgcatctgcaactgagaatgctgaataaggataatcatgatagcatgt

SEQ ID NO: 16166 - DNA, 536 bp, Glycine max
  Clone ID: jC-gmle01810090b02a1
ctcaatttttctctcaaccggcccaatttagcataagcccagcatggccaccgcaacagcagcagccacctcgtccttcatggggacgcgcctcctggaggcccactccggggcggggcgggtgcaggcccggttcgggtttggcaagaagaaagccgccgccccgaagaaagtttccagggggtcgggctctagctccgataggcccctgtggtatccgggcgccaaggcgcccgagtacctggatgggagccttgtcggagactacggattcgacccatttgggctagggaagcccgccgagtacctgcagttcgagttggactcgctggaccagaaccttgcgaagaacgtggctggggacatcattgggaccaggaccgagctcgcggacgtgaagtccacgccgttccagccctacagcgaggtgttcgggctgcagaggttccgcgagtgcgagctcattcactggaggtgggccatgctcgccactctcggagctctcactggtgagtggctcactgtgttacatggca

SEQ ID NO: 16167 - DNA, 550 bp, Glycine max
  Clone ID: jC-gmle01810090b02d1
aacatcaagcagaagcatttctgcttagcctctccaatttcacgttacaagtttttcacaagtactactaatccagctatgtagaaaatgtttaattacaacccaaagccgaagaagaagaaaaagacttttacaatataactagaatgaccaggcacaagaaagactattcttcttcttttgcttcttcttaagaggaggatgagaaggtgtcaatgatggttgtgtggagtgggtcactcaagtgggtggcccagttgttgagcgggcccttgccagtggcggcagcttggactgcaaagcccaagaagcccaccatggcgagacgggcgtgcttgatctccgccaattgaagggtggctttcttctctggatctgaggccaggcccagtgggtcgaagtaactgccacctgagtacagcctcttttctgggtccagctctgcgttcctctggaactctatgtagccaattacgagaacctcgatccagatcagtgtggtgattgagaatggagtggttgccctaggtatgatgaacctttcactagc

SEQ ID NO: 16168 - DNA, 515 bp, Glycine max
  Clone ID: jC-gmle01810090b03a1
ggttcaggaaactatgcctctgctttgtatattgcatctgtgaaagccaatgcagtggaaaaggttgagactgagcttctgcaatttgttgaggcagtaaagaatagtcccatattttcacagtttataagggacttgtctgtggctaaggatgttagagtgaaagttatccaggatatttgtggggaagccaagttttcggatgttacaaagaacttccttgttattgttgctgagaatggaaggcttaaaaacatagacaccattgcaaagagatttgcacagttgtcaatggcatataagggagaagtgcaagcgactgtgaccactgttgttcctcttccccctgaagaggaaaaggcattgaaggagactcttcaggaaataataggttctggagcgaaagttcatcttgaacagaagattgatccaagcatacttggtgggctcgtgcttgaatttagccaggaggtctttgacatgtccattaacaccagggcatcacagatggagag

SEQ ID NO: 16169 - DNA, 579 bp, Glycine max
  Clone ID: jC-gmle01810090b03d1
agagtaaagatatattcatcattaattaaattatagtacccatccaacggctacatacaacttcatcttcctttactttgtagtacgaagcatcattattaggtatccagattacgacagatgcacccactaattaaaatctcaaaatgccaaatcaaaacacattcagatacactgaaatgacaatgaagcataacaagaagttggaaagaggtagcttttatttgcaaaatgatggcattccatcccataaaaatctacatgcacacaatttataatgaacaagaatgtaatacttctttctttaaaccatgataacacagattgtcaggagagattatagtcttctagatgttggcaatggacacaggctctcggaggatcctatccatctgttgtgccctggtgttaattgacatgtcaaagaccttctggctaaattcaagcacaagcccaccaagtatgcttggatcaatcttctgttcaagatgaaccttcgctccagaacctattatttcctgaagagtctacttcaatgccttttcctcttcagggggaagaggaacaacagtggtcaca

SEQ ID NO: 16170 - DNA, 445 bp, Glycine max
  Clone ID: jC-gmle01810090b04a1
cagaaaaacaagtagttgagaactaagaagaaggaaatggcttcctcaatgatctcctccccagctgttaccaccgtcaaccgtgccggtgccggcatggttgctccattcaccggcctcaaatccatggctggcttccccacgaggaagaccaacaatgacattacctccattgctagcaacggtggaagagtacaatgcatgcaggtgtggccaccaattggcaagaagaagttcgagactctttcctacttgccagacctcgatgatgcccaattggcaaaggaagtcgaataccttctaaggaaaggatggattccttgcttggaattcgagttggagcacggtttcgtgtaccgtgagcacaacaggtcacctggatactatgatggacgctactggaccatgtggaagctgcctatgtttggctgcactgatgcttctc

SEQ ID NO: 16171 - DNA, 293 bp, Glycine max
  Clone ID: jC-gmle01810090b04d1
attaattaaaaaaaaaaaaaaaaaaaaaaaaaaaaaaaaaaaaaaaaaaaaaaaaaaaaaaaaaaaaaaaaaaaaaaaaagaagaaaaagaaaaaaaaaaaaaaggaagggaaaaaaaagataagaaaatatggaaaagactaagaagcctaaaggccagggggcaaagaagcagaaaaagtgaaattggggaatggtaaaaaagccaaggatccagatgaaaccatggaggcatgggggtttaaccttttgaacttataaagaaagctgaaaaccaggaaagaaggaaaaca

SEQ ID NO: 16172 - DNA, 479 bp, Glycine max
  unsure at all n locations
  Clone ID: jC-gmle01810090b05a1
ttcgaattcgcgttaccatgttcagcagcaacaccaacaacccaattctgggttacttcgatttcgctctgcccctaccgcgaatttcaaacaacaaggcgaagttgctgccaatactaatgggaacgcatgggagggctctgaaccatttttgagattcttgaattccggggacacccacgatacgacgtcgtcgcctaccttacgagaattcgtggataataaggtttctaataatagtaaacctgcgaaggagtcatcagcatcatcacctctgagtcgcatgaattcccaacaggggtatagcgcttctatgttaccctctcggagtactggaacttcagctatgatgttgggttctatgggaatcgatcaaagtgcgaaaagcnttgattgcaattctctcaggcaaagtagcttccctgctggccatttctctaacaacatctactttcagaacgggtatgatgctatgaaag

SEQ ID NO: 16173 - DNA, 566 bp, Glycine max
  unsure at all n locations
  Clone ID: jC-gmle01810090b05d1
gtcaacaaattaacatttaactggataatctactatgaacacgaccggattgaagcgaattacacttggtattgaacggttttgtttgggattattatataagggccctccaatcgacatgactttgttgcaatacaagcaagttggccagatgagactaacatttgctccccacatcattcatgtaatagaccctaaatgtcaaaattcaaatgatattttttgttcataaaatgaaaccctttaaaacgacttctgtttttcgtctttatctttcaagttgaattgaagcccgtgttgattacttgatttcaacctatttgctattttgagtgtaacaatcaatcttttacgtcaaattctttaaccattcccggaatctctgtttaagtatccatccaagcgtggagtacctcatggcttattcggtcatacctgcatcactttntaatttcttcaaacaacctggcagccctaacaataaaatgagaaaatcaaagtatctctgcaatattgaattgctcttcataaaaaagaatagtcaatgttcattttatttatatcta

SEQ ID NO: 16174 - DNA, 469 bp, Glycine max
  Clone ID: jC-gmle01810090b06a1
gcagcagcaacaatgagtgtggggaatggtcttgcggctctggccaaccacctatcagatttcccttcaaactcatcaagggaattaaagatgaatgtggttatccggggttttgtctatattgcactcaaaaacatgagactatgcttgctctcttctccgtaaaacttcaagtcagttacataaactacgaaaatcatgaaattgtgttgaatgacccggaaaattgccttccgcacaagtttctgcaaatcaacgattctcttattcatccttacaaatttgacgatgaagctaaaacaagtgagttgagcttcttcaactgctcttgagttgagcatcaacacctgagaaactaccagcagtcactgtcagactcacaagacatgatctcctgtccgatttatgctactgatcttgatgacagcgtgctcagtttggacctaacatcctgtaccaaaatgttcga

SEQ ID NO: 16175 - DNA, 533 bp, Glycine max
  Clone ID: jC-gmle01810090b06d1
caaatattaaacatcatttatatatatatatatatatatatatatatatatatatatatatataaaagaataattgattaattataataataatttactttattttcatacatttgattcaaacacaacaatatttccttgaggagaaaacaaaatatgtgtaaacactaatcatctcccgttgtaaataaatcaataagttaatttctcattcttgaattacttccaattccaaaggtagtcttgccgaagtcaatccactaggaatagtggaagtggatgagtgaaatggattaggaggaacagttaataggtcttcctctttactttccaacatttgtatgacagattttatggatggccggttcaatggctgccactgaatgcaccaaagtccaacaatggctagttctcttgcaattttaacatcaccttcatcctcaacatggatatgtacatctccatgaactaggtcatgcatccaatctgggtacaacacatggaaatcttctgcagaagacgtgtctacattc

SEQ ID NO: 16176 - DNA, 346 bp, Glycine max
  Clone ID: jC-gmle01810090b07a1
gaacaagtggtgaacccatgggaagtttccgccaaaggcaaaatcgattacgacaaactcattgaccgtttcggttgccagaagctcgacgaagccctaatttcgcgtctcgagcgcatcacctatggcactccccacgtctttctacgacgcggcgttttcttcgcccaccgtgatttcgcggagattctggacgcgtatgagaggggagataagttctacttgtacaccggacgcggaccttgctgtgaagccttgcatttgggacactcgattcccttcatgtgcactacgtattggcaagacgtgtctaaggttgcttcgggtatacagctcactgatgatg

SEQ ID NO: 16177 - DNA, 467 bp, Glycine max
  Clone ID: jC-gmle01810090b07d1
gtcacaaaattgcaggggagctctgatttcaaattgaaattgacaatagcataatccattatagcattttatagaacttcattcatacgctaagcaactcgagccaaatcaaaatgcaaagtcactaagatggcaatgttcttccgatctattttttttactcaactaagggcttacttcagccgaactaagtttcttggcatttgaattatcaggtggtggcaaaaaaaaggtacacatatatagcaataccgttgcatagaaaacccattttcatgttgagaaacaaaataaatccagttatccagtgatctccgagcaatatttgggcagacgaaggtaggataatttcagtcaaacatgtggggaagtggtctgatagccataaatgcatccaccatctcttcagtcacagaagcccgagctctgcgatgcctctccactagttcagtcaaaacttgaattag

SEQ ID NO: 16178 - DNA, 285 bp, Glycine max
  Clone ID: jC-gmle01810090b08a1
ggcagttgaagcaaggaatccatattttaggttgggttacaacagcttgggtgcattcgcaaccattaaccatctccacttttaggcatattacttggctcttccttttccaattgagaaggcccctactaagaaaatggccaagttaagcggtggggcgataatatctaaactgttaagctattcagtccgaggccttggctttgagggcgggcatacactagaggacttaacaacagctgttgcagaaagctggatgtgccttcagcacaacgacatacctta

SEQ ID NO: 16179 - DNA, 477 bp, Glycine max
  Clone ID: jC-gmle01810090b08d1
tttttttttttttttttttttttttttttttttttttttttttttttttttttttttttttttttttttttttttttttttttttttttttttttttttttttttttttttttttaaaaaggaaaaaaaaaaaaaaaatttttaaaaaaaaaaaaaaaaaaaaaaaaaaaaaacccaagaagggggaaaaaaaaaaaaaaaaaaaaaaaaaatttttttgaaagcaaaaaaaaaaaaaattccagacacggggagggggcaaaaaaaaagggggcccccctttaaaaaaaaaaaaacccaggggggggggaatattatataaaaaaaaaaacaaaaaaatataaaaaccttttgtaaaaaaaaaaaagaatttttaaaaaaaaaacccacgggggggggggggggggggggaaaaaaagattaaattcaaaaaaggggggggggggaaatattatccaacccggagggggggggggg

SEQ ID NO: 16180 - DNA, 533 bp, Glycine max
  Clone ID: jC-gmle01810090b09a1
gatggaaggaagctgaaacagtgaaaaacagcaacaacgaccaccctgtctttgttttttgtttgttgagttgaaactttagagaaagtgaatagtgatatggaggcaaagggtgtgcggttcttagcgtatcaatcaatattttcgagcgttggatctggggacttcgatggggtgaagaaactggtggaggaagtgaagaaggaagaagggtcatcgctctctgatgtgatgtctcttcagaacgatgctggagagactgcgctatacatcgctgcagagaataatctgcaagagatgttcagcttcttgctcagcatctgtcactttgaggtcgtcaagattcgctccaaggctgatatgaacgcctttcatgttgctgccaagcgtggcaatctaggtttttttttttatttttcatggaataagttcttcttacggatgttgctattaattcagttaaatcatttacatatgatagaatcggaaagtcctaatgtttcaaccagaattgcatagccatactagctcat

SEQ ID NO: 16181 - DNA, 506 bp, Glycine max
  Clone ID: jC-gmle01810090b09d1
attacatatacataaatctacaagttttgattattaattataatcacatacagcctgaaaccaaaaactgcaaactcaagatgaatgatgaaatcccggtgagctaacattatcacttggcagtagtataacagtttcagttaaaaggttgaaacatttctcttgattcttgactcacagggcatagatcttctcaatgtcagaattgtattcatccaaatctgatatatttgcagagtaagaccatgagaaagatttgcttccacttgctctcttgatgcgtctctgggaatcactgcggaaaatgccgaaatgttgtcgaaaaacaaagtagcacatgcttgctagagtgccaactagaacaggtacccccaaaagggtgatggtgatagccatccatgttttctttccaacaacctcaaaagctattgctagaaaagcaccacaagtgcaagcacatgcagcccacatcaacttgttaaccaccgacacaatctgcttttgag

SEQ ID NO: 16182 - DNA, 576 bp, Glycine max
  Clone ID: jC-gmle01810090b10a1
attaaaaactcaatatcaaattctttgtcccacaaaagatggggttcactcccacaagtactgcaacatgctttctcataatagcacctctggttgtgctatggtgttggaagctactaaagtgggtgtggctgaggccaaagagattggagagagcattaagggcacagggccttcaggggaatccctacagcctcttgattggggacactaaggaaatgtacacagtgctcatgcaagctgccagatctcaacaatctacaagttcttttctctctaaggataaggatgcagcaccacatatcacaacctttaaccatcacattgtcaacaaattcggcaagaattcatttttttgggaaggtaccaaaccaaaagtggtaatcactgaccctgagcaaatcaaagaagtcttcaacaagatccaagactttgagaaacccaagttgagtcctattgtcaagttgttgggctctggacttgcaaatttagaaggcgagaaatggcgtacacatcgaaagattattaaccctgctttccatttagaaaaattgaagggtatgctaccaatatttc

SEQ ID NO: 16183 - DNA, 542 bp, Glycine max
  unsure at all n locations
  Clone ID: jC-gmle01810090b10d1
aggaaataaaaatagcattcaatataataaagaggtttccctctataaatacaagagattagaacataagaaaggaatggagataattaggtgtgcaggatacaaattaatagatgacactacaacttatgtaagatgatatgagcaccaaattttggattaagagtgagcacagtgactggagcatgtgcataggtaggagaaagctcaaatgagaagcgttgtaagagtaatgacaaaaccaacttcgcttctaataaagcaaaattttggcctaagcacactctaggaccccatccaaatgggaaaaacacaacttggccttttgttgcctttgctactccttcagcaaatctttctgggttgaactctgtagcatcatcaccccaaatatcacgatcctggtgaatcaatagtattggtaaggaaacttgcactcccgcaggtagggaaaggtttccaagtttcacatcattcttgatcgctcgagcaaaatataattaaaggtgggtatanacctaagaacctcgtataaaatcatg

SEQ ID NO: 16184 - DNA, 520 bp, Glycine max
  Clone ID: jC-gmle01810090b11a1
gttgaagtcttgcccttctctcttcaactccaaacacaagacatcatcatccatggctgcctccgtctccactgtcggagctgtcaacagagctcttttgaacctgaatgggtctggacctggggtttcagctcccagttcatccttctttgggagcagcttgaagaaggctattggctcaagggtccccaacacaaagatttcctctggaagcttcaagattgttgctgtagaagagaagaaagagattgaagagacccagcagaccgacaaggacagatggaagggtcttgcctatgatatctcagacgaccaacaggacatcacaagaggaaagggtttggttgactcccttttccaagctgcacaggatgctggaactcactatgctgtcatgagctcctacgagtaccttagcactggacttcgccagtacttggacaacaacatggatggattttacattgctccagcttttatggacaaactttgtgttcacattaccaagaacttcatgacc

SEQ ID NO: 16185 - DNA, 507 bp, Glycine max
  Clone ID: jC-gmle01810090b11d1
aagtggacactttaactcaaaattatagaggaagacagtccaatatgaaaaatatagtaaaatcatctcaaacttggcatcttctctttgcacctaagacattgagaattctaagaatgttacacgcaagtcccatcacaacttctagcacttggatcagcacaaccttcaggaacagaaatatttacttgccaagtttgctttgcctccaattcaagattggaagaaagttcccctgttaatagcatcctcgttagcatttccaagtgcagcctcgttcaagtacttgtcagccaattggactctcttgacattctcttgttcttggacaagcatgttaccatacgtcaagagcttctccagagtcatcttgggctgctcaaaggttggaggtccatcttttgagttcacaagcttcttcccaatgccgtcaacaccaacaccagaaatccacttcctcacttcgtcatcatatactctggccctcagtgcaccaaagaaatcaat

SEQ ID NO: 16186 - DNA, 614 bp, Glycine max
  unsure at all n locations
  Clone ID: jC-gmle01810090b12a1
cacgggctcgttggtgagccgccaccacacttccaccacaaattcatattattccctgtgcttcattcagtcccttgagattgggaagcattggtggctagctaagcgaagctaaaaccaaactcttcagcagtttgtttttgcttagcttcttcttctgcttttgctttctccaccaccacaaccaccatgtattctgccactgcctacaacactttcttccttctctcttgcttccttctcttctgtctcctctcagctccttcctgtgtttccatgttctctggtaattgattgtctctcttcttatttattgctggcctggttcttcttttttctctttcattgttgtctgtctcagaaacataaaagaaaagcaaaggtttttgagtttttgggtggcgtgcaaagacacccttttaaagattcagattcctttttcatgatgttagcacaagatctcctttttttcttctctctctcagatttcgatgcaacagcacctcaactgaacccagaanaggcacacttaaccgaacaaaacgccatttcagcgtggtgacnggtgagattctcccgtttctgcgcaccttgatctctccgagcaccaacgc

SEQ ID NO: 16187 - DNA, 468 bp, Glycine max
  Clone ID: jC-gmle01810090b12d1
gacactggcaaagaacatgcataacaacttggagccgtttcctgataacaggataactaaaaccaaaaattcaattacaaaactataagacacaagcaactaaaagaaaagagttaactcatgaattaactcaataaattaacctataattacaagctataatatctatttattgctttacacagttaccgtatcacttatgataggttttccagaaatgacaaggttgctaaaccagctgcccagacatcattatctagcacatgctcttgtggagagtgacttatgcctccgcgacaacgcacaaacagcattcccacctttgttaagtgagatattgccattgcatcatgccctgctccgctcattaatgttggcacttcatcctgaatgtcaccctccatcttcttgagtgcagaataagctgctgacttgagctgtgaacttagatccgaatcacaaatcaca

SEQ ID NO: 16188 - DNA, 482 bp, Glycine max
  Clone ID: jC-gmle01810090c01a1
aaagggtgttccaattggacaggctcttgatatagacattccccctccacggcccaaaagaaagccaaacaatccttatcctcggaagaccaggattggtaccacatcattacatagtggagcaaaggatggaaaactcaatttagttgaatcttcacatgttaatcaagcactggacttgaaaaaagaaccacttgcagagaaacatgatttagacgaagggctaacaactgtaaaagaaaataaggatgagaaccacgcaaaagtatttactcttctccaggaggtaccctgttcctctgtatcttcagcaaatgagagttcaataacaatgtctgtgccactgggaaatccatgtgccttcaaggagattacaccttgcgtgaaagaggtaatagcacgagatgaaaaaactgaatcttttgtcactgctgaacctgaaaatgggaagttggagatcaatgatgggaaacagactaatg

SEQ ID NO: 16189 - DNA, 511 bp, Glycine max
  Clone ID: jC-gmle01810090c01d1
ttgttgttctttttttaatgtttcttatctaagtctatttagcggagttataaacagcattaacatcatacaaagattgtaaaagagcgtacacagtaatttaatacggtacacacatgtacacgacatgtttcgtgagctgcagaattagaaataaacatacaatataggtacaccgttggagggataaagaaatgatatgcaaaaaccaaaggttgcctttatgttactgcatatatcaaacctcaagtcgaagtctacccttccaaacgtattatcttacaaccttgctcttgaccttgattgctgcttgctccaaccctatttaacttggcctccatggaacatcttttgtagggtttaaaacctgttcgatgagtcttaagctttccttgtccaagccctatggttaacagtccctcgttatattgtacacatagcagggttttctgcatcgcttcataattagaactgcatttcttgccgcaagatctgcatctgtgtcatatat

SEQ ID NO: 16190 - DNA, 501 bp, Glycine max
  Clone ID: jC-gmle01810090c02a1
ccaaaccttttgcatgggctcggcgtgcacttgtatggtctggagaagcttacttatcttatagtttaggtgctttatctgtttttggttttattgcttgttgctttgtctggtttaataataccgcttatcctagtgagttttacgggcccactgggccagaagcttctcaagctcaagcatttacttttctagttagagaccaacgtcttggggctaatgtaggatctgctcaaggacctacaggtttaggtaaatatctaatgcgttccccgacaggagaagttatttttggggaagaaactatgcgtttttgggatttgcgtgctccttggttagaacctctaaagggtccgaatggtttagacttgagtagactgaaaaaagatatacagccttggcaagaacgccgttctgcggaatatatgactcatgctcctttaggttccttaaattccgtgggtggcgtaactacagagattaatgcagtcaattatgttt

SEQ ID NO: 16191 - DNA, 602 bp, Glycine max
  unsure at all n locations
  Clone ID: jC-gmle01810090c02d1
atgtatctatataatcgaattgaaattacgattctatcaaatctttttatttactttttttttttttaagaaaaaagaaagttctaattattaataaattatatctatatatatatatatacagatagatattctatatcttttatcttaattaatatttgacccctccttataatgtgttatagttttctttatttttaggaacttatccattccttttttaatgtgcccgacaatccgaaagaaattctggggaggggtcatttcgtttttgatctagaataaatagagcttcaagaaatgagagaattaagaatacccacgagaaacactaatccaatccataatgatgtaccggaaaatacaacatttttgttattcgaccaaccttcaggagaagcaaatacaacaggtacactaatcaataaaataaatgaaatagcaattaatgcaaaaacagctaattggaaagcaatagtcatgtttctaatcctccaatttaccaacaaaagaactttaccatttgatcccccaaccccttgatccctttattgacaaaaaanttataataaaaaaacgcaaaaggttttatcatgaattca

SEQ ID NO: 16192 - DNA, 495 bp, Glycine max
  Clone ID: jC-gmle01810090c03a1
ctcaagttcagcctcaaatttaattatgaagccaaaacaatccctcaaagagcccaattctatgggaggttcggagtctcaaagtcccaactctttgaacccctcaccgaatgaccagccgatattggaaagagcgaccacaccagaggctaacccaccttcctctataaagaatcacattttattttctgcaagaaatgaggaagaaaaagcggagtgggtgtcactcatacaattcgcaataagagatccgagaaactggaacatcattcaaagtaatttcaaccgcgcacacaagggtcgtcaaggactgcaaggctagggcggttggggaggaagatcccaacggtttgattttgaatttggagaggtcgatctacaacttaatgggctctttggtcacagagctaagcgaagctcggactgagcagcaatataacgaccaaagtgcgtcattcgcacaactagaagaaagagaattgacaaagattcaag

SEQ ID NO: 16193 - DNA, 481 bp, Glycine max
  Clone ID: jC-gmle01810090c03d1
cgattaatcacttcatttacacatgcaaccccggtgatgccgatgcaacatcctcagggttgttcaccccacccacacggaacgcgacacaagtcgggtgatcgaattttcctggaaattcagcatagctagggggttgttttgggccgatattttgttccatataagttctgcacttggatgttattttgatgcaatagttcagcagtgcgttgacgatgagttgaggtgtcggctctgccatctgcttgatcaacatcttgagctggtctgttctgaattggctctttaattcatcggcgcgtctgtgtgattcaaatgccttccagttgtcaccgtttaactctgcggagacatccctcggcttcaaaccgtgttgttgggggtcaaaattgtcgtgaactccatcagagcagatgaatatgatatctccatggtgtacctcgaaaaagtataacttgaggttgcgaaggtccggagc

SEQ ID NO: 16194 - DNA, 451 bp, Glycine max
  Clone ID: jC-gmle01810090c04a1
ttatcatctttctttttttcttcatctcttatatttcacctttattacctttatcgaaggaaaaatgagcaacataagcatggtagaggcaaagctgccaccagggttcaggtttcatccaagagatgaagaacttgtgtgtgattacttgatgaagaaggtggcacacaatgattcccttctcatgataaacgttgaccttaacaagtgtgagccatgggatattcctgaaacagcttgtgtgggagggaaggagtggtatttctatacacaaagagaccgtaagtatgcaacagggctacgcacaaatcgtgccactgcttcagggtattggaaggccacagggaaggacaggtctatccttcgcaagggcacccttgtagggatgaagaagactttggtgttctatcaagggatggcacccaaagggaaataaactgagtgggtcatg

SEQ ID NO: 16195 - DNA, 468 bp, Glycine max
  Clone ID: jC-gmle01810090c04d1
aacaagaagaagaaaaaaaaatcatccactaactaaaattaactacaaatatttataagtttcgattacaagtcccattttcctaatatattgggacacatcatggatgggtatacattaatagctaaaacaccacaagtaaaacataaatattcaccatgacttaaaacaatggattgattttatcttcccccttaagcatttttttctaggtttttttcttcattttttttcccatggtggcacaggggaagagggtttaaggactgaagtcccacatcagtaattgttccacatgtggggcatccccacttcagataagtaactctctgaacttccttctcctaagcttggtgacccttttaggctttggttaagtggattcctttccatctttgtgatctgattcaaaacagcttttaacatttttctgtcacatgataaagggtctaagcaataacccaaatt

SEQ ID NO: 16196 - DNA, 465 bp, Glycine max
  Clone ID: jC-gmle01810090c05a1
atcgttttgcagccatggaaacaggcatagcatgctacactcgcgggcctttcttgcctagtgtttcttccaagcactctccaccttccatttctccatcttttggcttgaggagtctgaaatcaagctctttatttggagaatcgctaagagtggcctccaaatcaacaataaaggtttcaaagacaaagaatacttcactcgtgaccagatgtgaaattggtgacagtctcgaagaattcctcacaaaagcaacaccagataaggggttgatcaggttgttggtgtccatgggagaagcattgagaacaatttccttcaaagtgaagacggcttcatgtggtggaacacaatgtgttaatacttttggggatgagcagcttgcagtggatttgctagctaatcagcttctttttgaggccttaaattactctcatttctgcaagtatgcttgctctgaagaaa

SEQ ID NO: 16197 - DNA, 517 bp, Glycine max
  unsure at all n locations
  Clone ID: jC-gmle01810090c05d1
accaacataaatttactttgttattatagtgattaacagaaatatgtgactaaattgcaggtacttgtctgaagatatagcatatatctttttttctaaaagcagataaaatagacaatgaattgcaggtttaacagattaagcagctgctccaacagctacaccatccttgagcctggatttaccatacagggtttcttcaaaccggatgatctcattcttggatccataagcaacttgagttctctcatcaatgttagtgatgactttgtctagcacagactgatgaccatcactgctgtaacctccggctttttcaatcaagaaccccaacggagctacctcaaacaacagtctcagcttggctttggctgatggtgatgtcacattggtgaagatgcctttttcttttacaataatctggttgacatctggcaccattcctcccgtgtatctcaatgtgtacttttcattgacatagtaatcgatcaacttagcatanatcgggttgtcagat

SEQ ID NO: 16198 - DNA, 394 bp, Glycine max
  Clone ID: jC-gmle01810090c06a1
cgccgatcttcaatctctgagccaatcgcttcccgatgcatcttaccatggtttgctacgcagggtttttgttactttaccagtctgacttcatattccgatcccctcaatgaagccgaagattccgagttgctttgctcacgaagattacattgcgtgatctgattctgccatggtacattagtagatcggattaatatatatgatattttcgcttttgtggttctgaagattcaattgcgtgttgaggaccttgcgaagcttgcagaggctgcacctggtcgtcgctctaaaggtgaagatatgagtgctgaggttggagatagcaatccttatagtcggcttatggcacttcagagaatgggtattgtggacaactatgaaaggatacgcg

SEQ ID NO: 16199 - DNA, 577 bp, Glycine max
  Clone ID: jC-gmle01810090c06d1
atgattgaaattaatttagatagactgtaattatggtcaataatttgaaattagttttcctcaattttaaaacaaactgatgctaagttgaactggcttacttgaacaatgatgacagtttgaactttgaaatttcaaaagtttttttttctaaaaataaaaataaaaacaaaaactttgctgacactatgcagaattaatggcttcaagttgcctacgaagatcttcaaggtcgtcattgtcaactaatggagcgtcaagagttgccttatgaaactcgtcagcagtaggaagttcatgtgtgagaccttccggcagaacatctgaacttctggtatccggactatccagctcaatatcatcaacaacacttatattccattcattttcttcatgaagtggcacttcctcagttgatggtgcttcagcttccatttttgctttggctgcagcatctcttgctggttttgcaagcatgtactcttcctgtctttccaaacaagctacatttgaacattgagggtttggcttcatttgcatagttgggaaaaaatccttaagagaatatatcccaaat

SEQ ID NO: 16200 - DNA, 382 bp, Glycine max
  Clone ID: jC-gmle01810090c07a1
catgctcagaaattctttacaaagttggagaaagaggcctttgtaaaaggtgttccaataggacaagctcttgatatagacatcccccctccacggccaaaaagaaaaccaagcaatccttatccacggaagaccaatgttggtgccccaacattacatagcgaagcaaagcatggaaagcctctcatttcaatcgcatcttcacatggtaaacaagcactggacttggagaacgaaccacttgcagagaagcataatgtcgacctaaggccaacgactgtgaaagaaaattaggaccgaagctgcttaaacgtatttaccattatccaagaggcaccctgttcatcctgatcttgcgacaaccagaattcaacatgaatat

SEQ ID NO: 16201 - DNA, 492 bp, Glycine max
  Clone ID: jC-gmle01810090c07d1
aaatgctcaaacggtacttaatgtttcttgtctaagtctattttagcggagtttttaactgcagtaacatcaggccaagaaagtaaaaagtgtgtatgtagtaatttaatatggtacacagacctacacgacaagtttcgtgagctgcagaattagaaaataagcaatacagacaatgaacaaggaaacttagaaatatatgcaaaactagagattttctttgtgtggttgcatgggaatatcaggcatcaagttgaagcctccccattcaagcgtaatctcttgggacctttttcttcaccttggatgcaggctgttccgatcctgttttcattggcctctaccgaacatcttttgtaaggtttaaaccctgttcgacgagtctttagctttcctggtccaagacctatggttagcagtccctcctcctcattggtatctttgacaaatagcagatttttctgcaccccatcacaaatagaactgcatttc

SEQ ID NO: 16202 - DNA, 563 bp, Glycine max
  Clone ID: jC-gmle01810090c08a1
ggttcacaatttggtttatgctgaacactttctcaccaccatcactgtgattctactgatacaaacgaaaaagcttgattctttccattcatggggcgtgggctccgaaggatgaagcagcggaaagaaacaaaatctttggattttgatggtgggtgtgaggccgatgaggccaaaaaaacgaccaatttcgccgaaaacaatgatgacgtggcagggggttcttcttcttcttctgatcgagaaggcgtgagaaagaagcttggcgaaaaaggtaaaaaggataaagaggatgtgaaagagaaggagatgttagagggcgatttgatggacaagaaagatgatgttcaagacgaaaatcgcggtagaaaaagaaagatgtttccgaaggatgacggtgagagtgaggccgatgagggcaaaacggtgatcaagtttgctgaaaagaatgatgatgtggcaggaagttcttcttctgctcaagagggtggaaggaaaaagtaagtggataatgaagacgtgaaaaagaagaagaaatagatattagagggcaatttgttgga

SEQ ID NO: 16203 - DNA, 511 bp, Glycine max
  Clone ID: jC-gmle01810090c08d1
gagcatgcatgtaatcatgaccttgaaagacaaactcccactcaattggatctgcaccacctacaagctgcccattacgaagctcccggcaacagatgagacaaagatcaaaagagcattttgtacagcttctgtggtaatcaaatattgatgttttgcagttgtcacagtacacacgctcggcttttgcataatctgtctttactatatttagctttgagaccgagagcccttgcatcttagcttctatctcattctcaatcatttgttcttcatccaactgccttaaatacggaagaagtacttgcagcaaatgcatagagtgttcaatcttgtcatcttcatcagtatttgctttgcctttcatttttttaataggttcatcagatctcaagcatgctttgcagttgcaattaccacagcacacaggacattcctgagcaatatcctcctctttcaaatgaggataccaatttcttaaacagggcaagcaatatcttttccgcttaca

SEQ ID NO: 16204 - DNA, 271 bp, Glycine max
  Clone ID: jC-gmle01810090c09a1
caaaggcattggttatgagcatctaagtttggcagcagaaattttgatcaccctatggtgagccattttgctcaagaatttaagacgaaaaacaccaaggatattagtggaaaagccagagccttgaggatgtagcaaacaccatgtacaccacaaccctggactgacttctacggtgatcaaaccaccccaaacgtcgattccctgtaacaaggtattgacgaccacacatacctatcccgtgcctgctctgaaaaacctcgcatgggtt

SEQ ID NO: 16205 - DNA, 496 bp, Glycine max
  Clone ID: jC-gmle01810090c10a1
cttcaatcctttcgttattctcttattcatccttctcttctgaataatccagatctctttctgcccttttctccgtcacgcttttcgtgaccggatctgtatggatttgatccagatctacacgccgatggtggttttggccgggtctttcatagatctggtgcgtagaggctcagatctacggtaccgaggtacaacagagaatcgatgacaagaacgcagatccgacggtagatccagccgattccgcttgttcgatcgctacagacccctgtatcggatcattaagcagcgtgtctcgcgcgttctacacgtgttgccgatctcggatgttgtaaaattagtttatgatgtgaagctatggagtggaaaatatgtggatgtaggagatttcgggatgaatggcctcaaaacgctttgtcgtttgtggttattgagtcctgagtgatcttgtcatccgacctttgccatgacaggtgcgcttgcatggcaggtc

SEQ ID NO: 16206 - DNA, 565 bp, Glycine max
  unsure at all n locations
  Clone ID: jC-gmle01810090c10d1
aaaacaaacaaacatacatactgaataacttgataccaagaaaaaatatcattctatgcttgtgtaaagagccgaagttatcttcaccttaaagaattgtagaagcctaaccagattctttgtaaatccacgatatttcttcaaaaataccttgacaaccacaatgatattgtcatagcagaagtcatatagcgtcttcacattgatattccaatcatcgccagaagatttacaatgttaatgacctaattctgcattacaaatgttgtcgcccgaatctgaacttcttacaagtagataattgtacaattatacaaagcccccgcaatacaaatggcccatcttatttggatacaagtaaccggagtttaccaaatcaagtaagatgaaaaagggaacaatttacatgacaattacaacagtatagcttcacaatttctataaacagtaaaattatgcataaggaagtcgcagcaggcagctaatatgaaatgaagacaattattaataaattccttggctcgattattntcactatgaataccgtatattagattcatgaaga

SEQ ID NO: 16207 - DNA, 501 bp, Glycine max
  Clone ID: jC-gmle01810090c11d1
attactgatgatgcataattcaatataaaggcagtggagcaactgtgtaattgtacactgggcactgtgttatataaattaggacctaaaaaaggctatattttgtttgtatactagagctacttaagccagaggtaattagaaaaaccattcacaaggtttgctcattcttcacttgtccaaacagcaattatgcaggatggtaattgcacctctctaaagtaaaatgcctttctcctttctcgtggcacttggaagatcaatcaaaacttaaaaggcttagcctaagtttggttttctgttattgtctgaatggctgagagagacacatgcatggaactttcttataggccactggaacggttggcatactcttgaactaatgccccaaagagagatggcctttggagcaagttggctggtgaatcaaattctttggcccgccctgcatctacaactagaactctatcacagtccattactggtggtattctatgagca

SEQ ID NO: 16208 - DNA, 626 bp, Glycine max
  Clone ID: jC-gmle01810090c12a1
cttggtgatgtggttaaggttatggggttccataattcagctccagaaataaagttcgttcggcgtagcaatcttctgcttagcatcaacatagacaagaacacagagaaagatcttcaattggctgtggaatcagcatcacaattgttggcagaggagaaattggaagtagttgactacactagccacatagatttatccaaagagccagggcactatgtaatcttctgggaaataagtggtgaagcatgtgaagaagtgcttggtggatgctgcaactgtttggacaagtcttttggtgatgctggctacacaagctcacgcacagtcaactgcataggtgccctcgaactccgagttgttcggagaggaacattccagaagatacttgagcattcccttgcactatgagctgctgtgagccagttcaagacatcaagatgtgtaggccctacaaacaccaaagtgttgcaaatattgaatgaaaatgttgtcaagaactatctcagtactgccttcaattgagttgtaagaatagctatatctatctatctatctatatatagatatatctatatagttccctttctcaattgataaaaactttgccttgttttctacttttc

SEQ ID NO: 16209 - DNA, 392 bp, Glycine max
  Clone ID: jC-gmle01810090c12d1
gaaaagtagaaaaacaaggcaaagtttctattcaattgaaaaagggaactatataaatatatctatatatagatagatagatcgatatagctcttcttacaactcaattgaaggcagtactgtgatagatcttgacaacattctcattcaatattagccacactttcgtgttagtagggcctacacatcttgatgtcttgaactggctcacagcaactcctagtgcaagggaatgctcaagtctctactcgaatgttcctttacaaacaacttagagttcaagggcacctatgcaggtgactctgcgtgagcttgacgtgccagtatcaacaaaagacttgtccaaacagttgccgcatccaccaagcacttattcacttgcttcaccactt

SEQ ID NO: 16210 - DNA, 456 bp, Glycine max
  Clone ID: jC-gmle01810090d01a1
ggttgctgtccttttccttgcacttatgatagacagactacatcattacataagagaactgcggattcgaagaaaaggcatggaagctgtgaagaaacaaaccagagggactgaagatgggaaagttgcaaattcagaagaaattaagtctgtggaggaagaaagagccagattgagagctgaacttagccgccttgaatctgaactacagtcaaaaacaaaagacgtagatggtgctgaagccaatatagctgctctgagaaaacaatctgaggggttccttcttgagtatgatcgcttacttgaggaaaaccagaacctccggaaccaactacaatccttggacaggaaattgtcacattcaggttccaagaagaatatgtaagaaaattgcaggtaagaatggcttcttttgtatactcttaaggaattccatggcagtttgttgataacagc

SEQ ID NO: 16211 - DNA, 370 bp, Glycine max
  Clone ID: jC-gmle01810090d01d1
gcagaaaaaaacaaatcagcactatattttctgttatcactaaaaaaaaattcacaatttgtcaaaacaaaattgaaccaaattcaactcaaaagtgaaaatcgtgttcctttaggagcaagcttccggggattgacaatgtggtatcaacaaactgccatggaattccttaagagggtgcaaaagaagccattcttacctgcaattttattacatattcttgttggaacctgaatgtgacaaattcctgtccaaggattgcaataggttgcaaaagttctggttttgcttaacaaagcgatcatgcttaagatggcacccctcaaattgttttctcacagcatctgtactggcttgagcaccatttacc

SEQ ID NO: 16212 - DNA, 511 bp, Glycine max
  Clone ID: jC-gmle01810090d02a1
gcgcgtaagagtaggagtaggagcacgtaagacagagcagagaagattgtttcaaatttcaatgcaaagggcgttgcaatcgatcaacgatctacagttgcgggacccaccaaactaccaactacagctccagtggcagcgccgcactcgtcttgtctcaaacaaatgcaacaagcggttattcttatagttattgaggaggagtagtacttataagaggaagcagatttgattctgattctaatttatttgattctttattatttataaattgaaaagaaagtcacgctggcggtgaagaacgtttctgcggcggccgaggaggaggaacacatgacgctgatttccgatgttgagaaccttgcggatgccgaaatccccgacaccgcacatcaaattagcaccgattcatggtttcaagtggggttcgtgctgacgacgggaatcaacagcgcgtatgtgcttggatattctgggaccatcatggttcccctgggttgggcagggggtg

SEQ ID NO: 16213 - DNA, 544 bp, Glycine max
  unsure at all n locations
  Clone ID: jC-gmle01810090d02d1
actgaaagaatataatgcatttaatcataaatccgcaaaaacatggtacgttttggagtctaaatcaataagtcgcagggctgcaatagccgccgcagcagacatgagggcaaagaaacaaatattgatccaatgccagagcttttgggtggatgttagtttgttctcatttgtcactaggtacatatggtttgcaaggataaatgtgaggggaaatgtgctgatagctccagtgaggctcatgaaatctccaagaaatggcaacagagctgatacaaatgtgtttacagtcaggtagccacctcttaccaagactcgaaatgacaagttcttgaaagccagggcactccctttgatcccatatttggtatccaaatactcatacattggacttgcaaatatatgcaatgcaatgactgattgaagaaaggctgcaatattggccatggccttagcccaaactggaccattcacatcactcatcanataggttgctgttgaagatccataagcccagtatcctgcaaggttaccagatataatg

SEQ ID NO: 16214 - DNA, 522 bp, Glycine max
  unsure at all n locations
  Clone ID: jC-gmle01810090d03a1
ggattattatgatgatcttctctctacacctttgttttctcgaagtctcaacttgccttgtcggatttcccacctgttccggtcaccaaacctccttctctggtcactccctcagattcaccctctctagtctctagttcccaacaacaaactccaaggttccacactacataatacactttaacggggaaacaaaccagaaaaaagtgtcgtgtaggtaaacacattatggggcatttttcctcaatgttcaatgggttggcacggtctttttcaatgaagaaaggaagaaggaatgggaaatgtggggggagggaaagctgctgaagcaatggcaaaggaagctaagaagaatgacatgatgttgtgtagctctggcattgttcatgtcgatggttcaaacaactttgcctncgttttctccaaaagaggccagaaaggagtgaaccaagattgctgcatggtgtgggaggaatttggatgccaagaggacatgatattctgtgggatatttgatgggca

SEQ ID NO: 16215 - DNA, 552 bp, Glycine max
  unsure at all n locations
  Clone ID: jC-gmle01810090d03d1
aaggaagaaacaaatttaccatgcacttttaatcaacttatgttaattggaccaaaggtacatcaagccaacatcatcaagtatgacatgatcgaccagcccattttacacgataataatctattttaatgtggcaacctggctaacttgccctgttgaaagggaagaagagtgaaagaagagacaaatagctgaaatgtcatccacggcaatgccccgtctctagcgtattcatgcatgcanccgacactccaccaaacgtttagctgccttaagcttatctgctgctgaagatacaatatccactgcttctttattagagattacatcccaaaccccatcagtggctagcacaacaaactggtctctactagttatatttctgtgtgttacctcaggcacagaaataagaccatgccctttgatgcagtagtcaccaaaggccctagacatggctagtcccggagactcttcatccggtaaccacaccctatgcacccctggctcgtactataagcagaacacacgcccctggcactgaattattctctc

SEQ ID NO: 16216 - DNA, 444 bp, Glycine max
  Clone ID: jC-gmle01810090d04a1
caaggagcaggtaaagcttttccaaacaagattgtttttgatgataagcttgtgttggctaacacacaagaattctttgatggaaattttccagtggattcttggttaccaatttttgtgaattgtctttatcctgtaagtcaattaccttcagaagctgtcgttgtaaatgttacatgtggtagtggacgtggtggtttacccaccactgcttggattaggtctgcagttaacaatcgctcctcagatatcaacaaatggattcgcacagcacttgggagaggtaagaaaattgtttttcttactagagttgatccttttccagtagctctactggctgttctttttggcgttaagaatgaaattctgagttctaacgccattaaccctatgctgacgcgacttcttgagaacctgtagagtctcaaatatctggttgatgag

SEQ ID NO: 16217 - DNA, 525 bp, Glycine max
  Clone ID: jC-gmle01810090d04d1
aaacacactcattgcacatagtaatgcgctttatttaagtgaataaaatattacatactagttcacaaatgcaaaaggacactcatcaaccagatatttgagactcttacagttctcaagaagtcgcgtcagcatagggttaatggcgttagaactcagaatttcattcttaacgccaaaaagaacagccagtaaagctactggaaaaggatcaactctagtaagaaaaacaattttcttacctctcccaagtgctgtgcgaatccttttgttgatatctgaggagcgattgttaactgcagaactaatccaagcagtggtgggtaaaccaccacgtccactaccacatgtaacatttacaacgacagcttctgaaggtaattgacttacaggataaagacaattcacaaaaattggtaaccaagaatccactggaaaatttccatcaaagaattcttgtgtgttagccaacacaagcttatcatcaaaaacaatcttgtttggaaaagctttacctgctccttg

SEQ ID NO: 16218 - DNA, 465 bp, Glycine max
  unsure at all n locations
  Clone ID: jC-gmle01810090d05a1
gttgaatctcttgggaacaggatacaaaatgagggtactgtggcatactatttgttattggacaaccgattccgtgtttccagtggctatcttggagctgagtttcaagagaccatggattccggttttaatcaaatgcaaaactcttcagttgttggaaaccgttttccaggctacttggagtatccgggagtaggatcgaggcaacagttccctgttgaaaggaaatgggcccttgggcttcagtctcgagcccatcctcgtgaaataatgactgaggtccttaaagctttgcaagaattaaatgtttgttggaagaagattggtcactacaacatgaagtgtangtgggttgctggcattcctggtcatcacgaaggaatggttaacaataatgtagataataataatttctttggagatgattccaacatcattgagaatgatgctggttctacttcaaat

SEQ ID NO: 16219 - DNA, 359 bp, Glycine max
  Clone ID: jC-gmle01810090d05d1
acggaagggccccggggaaaaacacaggacaaaacattaaaacatgagaaaaatgacattacatttatagaacaacaaagggtaaattggaaaaattaaaaaccgcctaaaaatcccttcccaaggggaacaggaatttacaggacttgggtgaaaaccaaaaatatatcaccgggagatggggggaaattctggtaaaaacattccccaaaaacttaactgggctggtaaaattaaaatcatcaagggaaaggaaaacctagatgaacaccattgttaaccaagccttaaaatggggtcaatataagggttacccccaaaaaaacgggtaaaaaacacaggataagctttgaccgaaa

SEQ ID NO: 16220 - DNA, 530 bp, Glycine max
  Clone ID: jC-gmle01810090d06a1
gtcttatttatcacgagaatcaatctctgtcgagatttaagggaataaacaattctaatcatggttgttttgcaaagtgtaatccttctactaagtcagaagtatcatgtgattcattttcacatggggtacttgatatccttcaacgtgccattagtcaggctgagaatgatttcttgtacatggttgagcaggaaatggaggaacgtcctgatttagtttctattggatcttgtgttttacttgtgcttcttcacggtaatgatttgtatacacttaatctaggtgacagcagagcagtattggcaacatgcggtacagctgatcggatggataagagtgagagactcaaggctatacagcttacagataatcatactgttgataataaagttgaaagagctagacttctggctgatcatcctgatgatcccaagattgttatagcaggaaaggtgaaaggtaaattgaaagttactcgcgcttatggagttggctacttgaaaaaggttagttagtattctcttaca

SEQ ID NO: 16221 - DNA, 547 bp, Glycine max
  Clone ID: jC-gmle01810090d06d1
gaagaattggcaaatcttaaatgcaagttgatgcctttgaagtcctctgattcatccctagcatgattacaattacggtcacgtcgtcatggtacttccttctccttccagctggaatattcatcaactcttccatgctcagacctgcatgagtgttacttagccaaccaataatcatgtaatataacaaataaacatttacattgatgcaaataaaattaaatttagcattagatcttgaaaatgaccggcagaatcagctgctctagctacaagctgttctatgagaaactttgctggatcaccaaaaggattgttcaagatataagactccacaagctttactgcctcatcattgctgaagaagtcaaataaaccatcactccctactataacaaattgatcggaatttgagattctatggacattcaatgatgggttagcggatatgtatggtgggcttttaagatcgtgaactcgaaggattcccatcaaagcatcattcagacttttctgcatgagaataaaataagaaaatcaaatctat

SEQ ID NO: 16222 - DNA, 343 bp, Glycine max
  Clone ID: jC-gmle01810090d07a1
cgagatactcgcaccgatcaaaacggtgcgtttgacgaggaaccgcgacgaggatgctaagaccatgaaaagtttgctgaaacatggtgacctggttgtgtgccctgaagggaccacgtgtagagagccctatttattaaggttcagccctttgttttcggaactgtgcgttgaaataatccctgtggcaattgattgtcacgtgacaatgttccatggcacaaccgcaggaggtcttaagtgcttggacccatttttcttcttgatgaatcccacaccttcttactctggtcaggtgctagaaaaagggtcacctttcattaccggtagtcatggtatcaat

SEQ ID NO: 16223 - DNA, 476 bp, Glycine max
  unsure at all n locations
  Clone ID: jC-gmle01810090d07d1
ggccaaaaaataatgacaacaagcaagggaagtcatttttgccgtattttccttgtctatgttttccatcacaagggcattgctaattattagtgatttaaacaaagcatgagcaaaatcaaaaccctattaactatttaccactctttgtggtcgaaactataccttcattaccggccaaaatcaagtacttgtcctttctattaagttgagtgcattcaaattccaaggccttcccaatttgcgtttgcacgtgattagccactgcaaatcccgcataatcgccattgataacattactagcggtaatggaaggtgacactttctctagcaactgaacagagtaagaaggtgtgggattcatcaagaagaaaaatgggtccaagcacttaagacctnctgcggttgtgccatggaacattgtcacgtgacaatcaattgccacagggattatttcaacgcacagttccgaaaac

SEQ ID NO: 16224 - DNA, 565 bp, Glycine max
  Clone ID: jC-gmle01810090d08a1
caatattattctcctcattccttcatttttaaacctagctccatctccctccactcaccataacatggcatcagaagcaaatgctgccaacaccaacttctgtgtaaatgttagcaacaatggctacattagtgctaatgaccccttgaactggggtgcggcggcggaggctatggctgggagccacctcgacgaggtcaagcgcatgctagaggagtaccggaggcccgtcgtcaagctcggtggagagaccctgaccatctcgcaggtcgcggcgatcgcggcccacgaccagggggtgaaggtggagctggcggagtcctccagggccggtgttaaggccagcagtgactgggtgatggagagcatgaacaagggcactgacagctacggcgtcaccaccgggttcggtgctaccttccaccggagaaccaaacagggcggtgccttgcagaaggagctaattaggtttttgaatgctggaatatttggcaatggtacagagtccaattgcaccctaccccacacagcaaccagagcagctatgctagtgagaatcaacaca

SEQ ID NO: 16225 - DNA, 557 bp, Glycine max
  Clone ID: jC-gmle01810090d08d1
tgcgcgtcgcggaccagtccggattaattcccgggtctactcggcggccgcccttttttttttttttttcaagagaaaacatccttcacatggaaggccatgtattgatatttgcacgcaaagctacggcaaacaaatggaattctattacattatgaattacaagttccttgcatggcatacatcaaggaaaactgggaagtcgttgtatgtggattgatttgccacagccttatatagacaaaccaaatgcttaatatcaacacaaacacgtgtacagaaaagaaaccactcttcaagaaaacagaaaatgagaaaaactaacatattggaagaggtgccccattccactccccaaggcattccaaaagtggatcaatgatcttcccttggcacaaagcagtgaacactttgtcacactcttcacccggtgagataaccctttcaccagttagcaatgctgtccccaacttctctctgacaaacttgtacatggggtaagacctgcattccttgatcttgtttggaattgcacattggtcattctcatatgcaac

SEQ ID NO: 16226 - DNA, 579 bp, Glycine max
  Clone ID: jC-gmle01810090d09a1
tatttagaacaggagatcagttttgaacaagttgaaggggactttgattcattccggggaaaatggatttttgagcaactaggaaatcatcacacactgctaaagtactctgtggagtcaaaaatgcgcaaagatactttcctttccgaagccataatggaggaggtcatttatgaagatctcccatcaaacttgtctgcaataagagactatattgagaacatgaatgcatcaaaatcttctgaagtttgtgagcagaatacgaattcagggcaacaaattgtttcatcaggctctcaaaaagatgacaactctggttcaactgaggaagttcctcattgcgacgttcgatgttcatctcagcaaagatctaaagtgccaggcttacagaggaatattaaagtactagaatctgaactactgaaattcattgcagaacatggacaggaaggatttatgccaatgaggaagcaactccgtttgcatggaagagtggatattgagaaggctataactcgcatgggtggattcagaaagattgcaccatattgaacctttctttggcttacaaacaccgaa

SEQ ID NO: 16227 - DNA, 506 bp, Glycine max
  Clone ID: jC-gmle01810090d09d1
aactcgatcactcttttactcaaaccaattcatgtcaaactgttttagttttgtaagccacttttgtgtgtcttgaggaatacatggtgtcttcatttcactatctgtatgatcactcctcttatccttagcaaggttgtcctgtctgctccgttgtcttaccttgagcgacagaaggcgagaaacctcgtgtagtccaccccacttttccagtgcacgtgcaatatcatatcgccctgcacgttcaaatgactttctactgggcataaatgaagggtctatgccccagctcctttgaaaccgacttatctcttcctgcaaattttcaagattgtcccagtaacccttaggtttccggtgtttgtaagccaaagaaaggttcaatatggctgcaatctttctgaatccacccatgcgagttatagccttctcaatatccactcttccatgcaaacggagttgcttcctcattggcataaatccttcctgtccatgttctgcaatga

SEQ ID NO: 16228 - DNA, 526 bp, Glycine max
  unsure at all n locations
  Clone ID: jC-gmle01810090d10a1
aacacaataaaattgattgcaccactgttaatcgtgctgatttagatactgaagaaggcacttatgtggctcctacacttgatgggactccagaattacctaacctgtacaagaattccaatgccaatcaggagccattcactcggaatactgctggtgtatggggttatatttttcaaataacttttcagacttgtgcaggtgctgtagtgctcactgacgttgtattctggcttgtcctttatccaacatatctgaacaccaaagatttccatctgcattttatggatgtttgtttgcactcccttaacgctgtattcctcctcggtgatgcatcattgaattgcatgaggtttccagtgtttcgatttgcatattttattttgtggacggctttatttgtgatttttcagtggatcattcatgcttgtgtttcattatggtggccctatcctttncttgacttgtcatccccatacgcncccttatgggtacttggtgtgggtgtaatgcacatttcatgcta

SEQ ID NO: 16229 - DNA, 399 bp, Glycine max
  Clone ID: jC-gmle01810090d10d1
gaaacatatatttgattctacataggatgaattaatcaatgtatggggatattatggaagatatcatatacatggttagaccagagaacttttatcaattccatcttaagtagcatatactaatacacatccccacaattaccttcgcacaaaaatgatagtcctctaaacactttggggggaggggaggggaaatggtaagaatggtatatttgatcacggttcatcgggccaatcagtagggtcgtcgccttcatagaacaaaccatttacgatttggtcaattacggaatcgatgaatgcgttgcagctgacggtgaagattcgaccaacttctgtttcagcacttgagaaccatgcaaagagtggtgcccaagttactgcacccaaacacacccc

SEQ ID NO: 16230 - DNA, 562 bp, Glycine max
  unsure at all n locations
  Clone ID: jC-gmle01810090d11a1
cggctcgagatctgtttctctgctcttattcctatctttctttgccttctttgcaccctctgaatctcacgacaaagtctcgttggaattgtactacgaaagcttatgcccctacagcgccaacttcatcgtgaatcacctcccaaaaatcttcaccccagatcttgccccaatcgttcacctcaaactcgttccttggggcaatgccaaactccgtgccaacgccacctttgactgccagcatgggccatatgagtgcttgctgaacacagttgaagcctgtgcaattcacatctggcctcaactcagcaaacattttcctttcatctactgtgttgaggatctggtgtttcagagtaagcgtgaggaatgggaatcttgttttgagaaactggatcttgattcggaacctattaatcagtgttataatagtgaacatggaaaacagttggagctacaatatgcagctgaaacaagtgctctggagcctnctcacaagtatgttccttgggtagttgttgatggagaaccactctatgaggattatgagaacttcttaagc

SEQ ID NO: 16231 - DNA, 472 bp, Glycine max
  Clone ID: jC-gmle01810090d11d1
atagaattgcacttacttttttttttctctctctatatatattgtacttaagtacctcatacacatacacatcatggttttattttttttatgagagtacgatatggttttatgtgcatcacaagttctatttgcacttttggagggatcaacacaactacacacaagataacacgaacaaactgctactaaatgcagcattggcacatctaaaatgcactgccaagattcatctagtgcatccatgatgcaatggttgacctcactttttcccatgttagcataatcccactgtccttgtagcaaaccgaatgcttaggctttgcattcacttctcttaggtatgatgcttgggtgcaactttggggtgtaacagtgcctttataagccttacaaagatagcttaagaagttctcataatcctcatagagtggttctccattcacaactacccaaggaacatacttgtgag

SEQ ID NO: 16232 - DNA, 468 bp, Glycine max
  unsure at all n locations
  Clone ID: jC-gmle01810090d12d1
cgtgcaaggaaaaaacaataatttttgattaattcaggatagcaaaggggacccaggcatatcaagccccaactatttattttgaccgtccacaaaagtcccaatcaaattcgaatcaactgcatttaatatacaggtattttcctttcacatgggtatacaaaagagaatgctaatgcttcagatggatgtatacggggttcctcatactgctggcaaaaatgatcttgagaatacatgcagcaccatggtttcaagggatagtttaatcccatattttggctagcatttccacctaatagatagcctatccaattcctgtacaaatcagggacacatcaatggctgcatagcctggcgtaatcaatgtaatgtaaccttagattgctaccctaagcagactgataagtgacctgatctgccgtagttgtgtcatatntggcatgtgcctcgggggtatcttcttac

SEQ ID NO: 16233 - DNA, 448 bp, Glycine max
  Clone ID: jC-gmle01810090e01a1
gtcactttagttgttcttcgaggacagtacccgcaacatacaagctggaaaacgtgtggggcttcacactgtgctggttagtcattggaatctttgttatttagtagaaacttacttgcttctagaaactattattggttgcattgtaatttgtccaaatccaccaatgtactattttttttttgtacaatgatcgtactcaggtttggtttgaatctacgatcgcatgtatatttctccaaactacctcatgcatgttattgatggttgtattttaatttgtctaaatccactaatgcatttttttatttagtatacaatgatcgcattgaggtttgaatttaggattacatgtatatttggccaaagtccctgaggcatgttattataggttgcattttaatttgtccaaacccaccaatgtaccaatttgaggctatattactca

SEQ ID NO: 16234 - DNA, 470 bp, Glycine max
  Clone ID: jC-gmle01810090e01d1
ggtactattctcgcccgtgtctgatgccggaccctatctactaattaccagctcactaagctgactccgccctggtcgtccttttttgttggtgtgtcgggttttcaattttgattaaatgaacaatttcgaaggggcttaattaatttcatgcacataataataatctcaagctgtgactgatgtctccacagctagctttccagggtatgcagcttctgatcatatatcagcctcccatagttcaggcacagcctccctaagggtgtgaatgctttacaaagcataatctgcatctttacatctatgtgatgtaccaacctggattttgacagatcaatgagccataaagcctcaaattggtacattggtgggttcggacaaattaaaatgctaccagtgtttacatgcctaacggacttttgacatatctacatgaaattctaaattcaaaccttaatgcgatcatt

SEQ ID NO: 16235 - DNA, 485 bp, Glycine max
  unsure at all n locations
  Clone ID: jC-gmle01810090e02a1
attccagacatgaagcatagtgacttgagtacctcgggaacctcaaagcaaacctattgcttgatatacatttgcatgaccatgttgagacactttatgatcaaattcgtcacaaagcccttatccagtacacactcccatttgtgtctgttgatttgaacatgatggctaatgcattcaagacaactgttgcgggacttgagaaggaactagaagcattgattactgataatcagatacaggctcgaattgattcgcacaacaaaattttgtatgcacggcatgcggatcaaaggaatgccacctttcaaagggttctggaaactggaagggaatttgatcgtgatgttcgttccatgttactgagatcaaatcttatcaagcatgagttcaatcttagagcattaaggaaactntgattatggactgatgataatgggaccaagttgctattttactttntaatatagcaggcgtttatcaac

SEQ ID NO: 16236 - DNA, 607 bp, Glycine max
  unsure at all n locations
  Clone ID: jC-gmle01810090e02d1
cttctgagagctcattataattaccagaacagagaattcttaagacagatcatgagaatgttttcggaccatcaacactcaattcttgcgcaacggagtcaccaaaaatgaggtgcaggttaaaaacaggaaatgaagatcttgtgacgaattaattgagaaattatgaaagagtatatacaaaagaaaccataatatgccgttaaaatgtttgcacaaaaatgtacgtttgcaaccttgattcactccagaatcctgcttcgttagagttgataaacgcctgctatattaaaaagtaaaatagcaacttggtcccattatcatcagtccataatcaaagtttccttaatgctctaagattgaactcatgcttgataagatttgatctcagtaacatggaacgaacatcacgatcaaattcccttccagtttccagaaccctttgaaaggtggcattcctttgatccgcatgccgtgcatacaaaattttgttgtgcgaatcaattcgagcctgtatctgattatcagtaatcaatgcttctagttccttctcaagtcccgcaacagtngtcttgaatgcattagccatcatgttcaaatcaacaga

SEQ ID NO: 16237 - DNA, 516 bp, Glycine max
  unsure at all n locations
  Clone ID: jC-gmle01810090e03a1
acaagcttcaccatcaccatagccaacacacccctcaacattcaatacctacgatcttcactttcttctcccaatgaaatccatcttgctgagttacccttcaactccacccaacacggtttgccacccaacatagagaacaccgagaagctccctctcactcacatagcaaaactctttctttcaacactcagcctcgaagctcctcttcgctccttgatatcacagatcacagaacaagagggtcaccctccactttgcattatatctgacgtgttccttggctgggttaacaacgttgcaaagactttaggtattaggaacctaagcttcaccacttgtggtgcttatggaactttggcctatatttctatctggtccaacctacctcataggaaaacagactctgatgagttccatgttccggggttccctcaaaactacaaattccacccgacccaattggcataatntctaagagcagctgatggcactgatgagtggtcacagtttttc

SEQ ID NO: 16238 - DNA, 524 bp, Glycine max
  Clone ID: jC-gmle01810090e03d1
aatatccattgaccatctatattgttttaaaatcatcaatcaaaaaaagtgaacttttgatctccacagtgacatgatcaaagtcaagtgttaaagattgcttagcagtttcaaaagtatgcttacacaagcaactttattattattcaaattccaaattctaaatgtagcaaatcatacagccttgttgggtgataaaatggttgtaacaagatcatccattgctctcacagaagaccccttttctttacctttctctggtatggcctctctcatgtgagctgcaatctcattcgccttctccttcatctcctttcccttcccttcttgctccatagctatttctataaccttcttaacctgctccccagagatcacagtttccacagttcgagtgagctcaatagccacacccatttccttcaccaacatcttcacattgtatgcttgttcagcagctagtggccacccaatcataggcaccccatagctgagactctccaacacagagttccatccacaat

SEQ ID NO: 16239 - DNA, 486 bp, Glycine max
  Clone ID: jC-gmle01810090e04a1
ctctcactctttctccacctttcttgctttcttctccttcctccatttcctatcttcattcctaccaatgactgacatcactgatgatattgctgaggaaatctcctttcagagcttcgatgatgactgcaggttgcttggtaatctcctcaatgacattctccagcgtgaagttggcaccaacttgcttgacaagatcgaaaggactcgagtccttgctcagagtggttgtaatatgaggcaggcgggtattgtaaacatggcagagatgcttgagaagcagttggcttccgagttatcaaagatgacactagaagatgctttcacccttgctcgtgccttcagccattatcttactttgatgggtatagctgagacccaacatagggttcgtaaaggagggaatatggcacaaattgccaaatcttggcatgatatatttaaccagctggtgcagggtggagtccccccagaagaactttatga

SEQ ID NO: 16240 - DNA, 486 bp, Glycine max
  Clone ID: jC-gmle01810090e04d1
ggaaaaacttaattattttgcatcacattcttatataacagtatatctgagtacagaacaaaccattcaccattatggctatgataatctttccttagcaaacctattataaaacaagggtgaacatatgtgaattgtggaaggcttgtacaatatagtccttgagaagcaaggtcaacctgtattcttcatccctgcagcaatcccatttatggtgataagcaaagcatctctgatcttacggttgtcatcatcacgtcttaacctcttgagtatctccacctgcaacatgttcaagggattaaggaagggaagtctattctcaattagcctcctcaagctcctattattctgctgaagtttctcgtgcccactaataaccatgacaaacttttcagctgtcatgagctcacttcttagttcatggccaagctcttgcctctcctttgacacaaggacttcatcatagtgcttggctataggaat

SEQ ID NO: 16241 - DNA, 346 bp, Glycine max
  Clone ID: jC-gmle01810090e05a1
ccgtttcattcgtcacttcgcgcgtctccgactcttctcgctagtatccactggtagatgtaaattttcacagaaaccgcctcaaaatctgaagcaacgctcgatcccaaaaatgcgttggtcgacggcgttctccgttttatgcctaggtgtgtttttgcaggtaccatgggtggcttcagtttcgatgccgactttcaactgctacgctttcgacaattctagtcgcattgttgatttcaggggctggactgggtatcttttcgagtctgatcaaaagcaaggttctgatttggccgtgcgattctgcaaagatgtggagagtagatcacagacggtaggatat

SEQ ID NO: 16242 - DNA, 490 bp, Glycine max
  Clone ID: jC-gmle01810090e05d1
ttttttttttttttttttttttttttttttttttcatgctataactaccctttatttacttctagatgtgaatttgggattacaaataaatacatcggactgaggcttcaaaaccaccctaaatgagttgatccaaataacatattttggcagaagaaattcccaaaaattagatataacatggtgtcggactgtcagaaaacaaagcaaaatgagtagcggcacacattcaaatggcaccatattttctttccgttggtctccatgcagcacctgcaccttgagaaggaccaggaggacgttcccaagaggtttcactgccaaatgcactattgatgtcttctggccgtgagtagccttgcccagctccactaactgtctctaagcacgcagaaagaattgtcatgccaggcaatgcatcaattccacgctggcgttccacttttggcttggaaatgaacccttcacaacaaaagagtgttgaagagac

SEQ ID NO: 16243 - DNA, 535 bp, Glycine max
  Clone ID: jC-gmle01810090e06a1
atcacatacatgatgatacgttcatcctcgtcactcttcactccccccactttcttcgatttctgaaatacctaacaaaacaaacagtcccagaaacaatcattaaactcccaaacttcgttttattcccactcaccactcactctctaacctcaattttttcaaattaaagtttcctcctttcactgctccaatctccccctctgtgatctctcacttcaaccacgagatgctcaaaacttgcgcttttcaagtttgccactttcgttcgaattctcgagaaagcaaagtattttaaatttgtggagaggcttgtaatgctgaatgctgatgccaccagtggagtatggatgaattctgcaatggatgatatgaatttgattcagcaaacccagaggcatcacttggttgtgagggagattggcgaggagattgatttagaaataggagctggtgaagatgacccgtcatttggtaacgctactctgattggtgcaccaatgcgggaatcttctgtagaagaacatggagagag

SEQ ID NO: 16244 - DNA, 441 bp, Glycine max
  Clone ID: jC-gmle01810090e06d1
acaaggaaatatgctttggcaatagtgtgtcatcctatcattgacaatttccactgcagcatcaacaatgatctggactattcagtgaatgcagatttccaaccatagtgctaattggttaacatcagtctttggatgcattcaaaactttgcgatatgaacccctatatagagccttgatcagtcatggcttgagcaatggttagaaaggcagagatgactgctccatgtaccagagcctcagggctttctttttgataaccaaaatcagttgcagctttcatagctctctgataagtctgcttcattgcttcctgcaatttagattcaaagtcctctggtgaccagtgcatcaaactgcattcatgattcagttcaagttcttcagccacaaccccttcagcaccggcagccattgcaggagcaatgagaacactagct

SEQ ID NO: 16245 - DNA, 564 bp, Glycine max
  Clone ID: jC-gmle01810090e08a1
actatttgagatttatggacccacataattccaaggaattggttgataagacaaaagaaaggtattggggccctgttgatgtgtatgttgggggtgctgagcatgcagttctccatttactgtatgctaggttctggcacaaggttctttttgacattggtgttgtatccaccaaggagcccttccaatgtgtcataaaccaggggattattcttggagaggtaatttcaattctttctgcatgaaaattaggagaaaaaataactaactgtgacaagtttctaattgcttgagtggcaggttcaatatatgacttgtagagatcaagttggcaatctgatatctgctgattcaaccgacatgttgaatgaacataaactagaaataattcctgcagaaaaggtcatgaaatctggggattcttttgtcctgaaagaacatcctgatatacgtttatttgcccgcgcccacaaaatgagtaaaagtaggggaaatgttgttaatccagatgatgttgtctctgagtatggtgcagattctcttcgattatacgaaatgttcatg

SEQ ID NO: 16246 - DNA, 558 bp, Glycine max
  Clone ID: jC-gmle01810090e08d1
agcctagtcatgatctattcccgggttatctagttatctgacgaggctactagtctgcggtcgtccttttttttttttttttacaatcaacaatgacggtccataaccagatatatacagtaaataaaatacaaccattataggtgctaaaatgcactctgtttatgtgatggtgttttaaataaaaattggttaggcatcaagagcatgaaatgatcaaagcaagccggaaaaccaggctgcctctcttttattaagttatgcacctcttaaagcggagtataaattaacagtcatagaggtgaatacttgcccagctgtcactttccattcaacagaagcataactcttcggccaaagacaccttctttacatatgctttagttttaaagcggcggatgcagggccattaccaagttgaccaggcacagcatatatttaacggttgatcgttgcttccagtataaacggacacgagtgaaagcagctactgtacaccaaccttaatgtttttacgggccaaaacaacgttcaaaatcttgccaggaacgtaaattc

SEQ ID NO: 16247 - DNA, 549 bp, Glycine max
  Clone ID: jC-gmle01810090e09a1
cttttccaccagaaacgcgtttcacaatcaagagaatttcgcacatcgtaacaacccaattcatcatttaaggtaggtatgcgtctctgtcatttaacatttgttagacttagactctataattgaacatcacttggcttggcagattcaccatttatgtgttctgttgtgtgtgtatgtagctcacacatacaattgtagttcagtccaattcttcaccatcaaattatgttgtcacctgaaccctgtgatccgaactttctgctgtgtctacccgatgatgtgtttggcatggtgtcacggttcctcttgcccagagatgtttgcaatctcagcctctgctgcaagagtctctatgctctttcatcctctgaaaaagtgtggttccctcagtgttacatggtgggagtggtgccccaaaaagaccttgttgagtggagagagggtgtctcatcttaccaggcactttgcccgttccttttgagtgttaaaccattgcttgggatatgggttcatcagaaccctgagcttggtaacccttgctatgtc

SEQ ID NO: 16248 - DNA, 480 bp, Glycine max
  Clone ID: jC-gmle01810090e09d1
attaggatgatcttttgatgtatattagtttttaatatttgtgtaacaagcaactgcgtatacaactgtagcagagaagctaatactttactacaaaaatagctaatattactttatctttgatcttaaaaaaagggcagtaacaagaaaccaacaacaaaaagtgtattgtgtgacaaccaacagcaatgcaactccagcaataaacaacagccgccaagaagtttatgatcctcttgttaaactgttatgataggaaatagggcacaaaatccatgtagtgccaaaacaaaaaatataccagtgttgtctttaccttggtgaaggcgaccaagtggaagcaccaggaaagcctgtaaacacatttgagtaggacttggtcaaatatgaaaaattgttgatgggaggcagagaaggtattctttctcctttcttcaaaagatcttgcaagtcaagtctctgaaagtcaagacagcccta

SEQ ID NO: 16249 - DNA, 572 bp, Glycine max
  unsure at all n locations
  Clone ID: jC-gmle01810090e10a1
ctccacttcatatatattcgcgatttctcttccaccgtgaaaccctagacccgactgcgagcgcggagccaagccatgtccctcaaccgcctccgccctctcctccctccgatccctctccgcctccaccgccgtggcccccgccgcctcctgccctccagtccatactacccccaccggcatgatctatgaccgcgctgccgaggccgtgaagtgcaagctccggctgctcgagaaccccgacccccgatttctcaagcacgggtgcccccggtcgaccctctcggaccacacgcgcatgctctgcgaccccgagacgcgcgtgaccacgcttcacaacggactccgcatggncaccgagttcaccctgagcgcgcgcaccgtcaccgtcagcgtctggatcgacaccaggtctcggatcgagaccgacgagactaacggcaccgcgcacttactggagcacatgatcttgaagggcacccagaggcgcaacgcgcgtgagctcgaggaagagatcgagaacatgggaggacacctaacgcctacgctccagggagcagaccactattatg

SEQ ID NO: 16250 - DNA, 551 bp, Glycine max
  Clone ID: jC-gmle01810090e10d1
aatcaaaacaccattttcgacaaggaggaataattgcgaaggatgccaattacatcactgacaacagcatacttattactgcaaaattgttacaaaatagaggcccataacaaataaatgaaaaacagaggcataaatgttgtaaattagaataaaacattatgccagacctcccatgaagttgaaatgaggcaaaaaaaaaactataatgaactaataacggttccagtaggttctacgtctgaaccagttgtaatcaggcaaacgctgaataggacccatggcagcaataacaacatccttgtcatagataaatcgattggcaacacgtttaatcgtactggcatcaacagcatcaattctagcaaacaattcagcaaacgggattcttcgaccatatgtgagtaactgacggccaatatcttcagccaccgggcttgttccatctatgtgtagtagcagtgaagatttcaactgattacgagcacgtgtaacatcatcttctgaaacgcgataagccaacttggttgctcatacattatagcataaga

SEQ ID NO: 16251 - DNA, 533 bp, Glycine max
  Clone ID: jC-gmle01810090e11a1
cggctcgagtcgcaaaggacccaaagaacgtcatctacgtcatcagtggacgcgacagaaccgcactgaatgagtggttcaagggagtgccagtggggttcagctgtgagcatggctgcttcttcaagatgtacccaggagcggaggggaaggatcactgggaagacgtcggcagcgaattggatctctcctggaaggccactgtcggcagcatattcgacgattacaccgatcgagtcccagggtctcatgttgaggccaaagagatttgtctgacgtggcactaccgcaacgctgaccccgagtttggagagaatcagaaaaatgaattggtgctgcacttgcagtcactggcaggactgcccattgatattctgttggggaagaaggcagtggaggctcgtcctcagggaattcacaagggcagtgtggtgaagagagtcatgtccatgctcagtgatgctgattttgtattgtgcattggtgatgatgtcaccgatgaagacatgttcgaagaaactgtggaacacgag

SEQ ID NO: 16252 - DNA, 496 bp, Glycine max
  unsure at all n locations
  Clone ID: jC-gmle01810090e11d1
aatgaagaattgtttattttcacaaacaagaaaaacctaacaagtgtcactgagatgctttcgctaaatctcccaacagatccaacactgattcctgctcatcgaaataatagccagcaaatgtgggctttttgccaacagttatcgtaaactttccttcagaatctggcttctcgtgttccaacagttcttcgaacatgtcttcatcggtgacatcatcaccaatgcacaatacaaaatcagcatcactgagcatggacatgactctcttcaccacactgcccttgtgaattccctgaggacgagcctncactgccttcttccccaacagaatatcaatgggcagtcctgccagtgactgcaagtgcagcaccaattcatttttctgattctctccaaactcggggtcagcgttgcggtagtgccacgtcagacaaatctctttggcctcaacatgagaccctgggactcgatcggtgtaatcgtcgaatatgct

SEQ ID NO: 16253 - DNA, 544 bp, Glycine max
  Clone ID: jC-gmle01810090e12a1
tgcaattgaagttgaagtcttgcccttctctcttcaactccaaacacaagacatcatcatccatggctgcctccgtctacactgtcggagctgtcaacagagctcttttgaacctgaatgggtctggacctggggtttcagctcccagttcatccttctttgggagcagcttgaagaaggttattggctcaagggtccccaacacatagatttcctctggaagcttcaagattgttgctgtaaaagagaagaaagagattgaagagacccagcagaccgacaaggacagatggaagggtcttgcctatgatatctcagacgaccaacaggacatcacaagaggaaagggtttggttgactcccttttccaagctccacaggatgctggaactcactatgctgtcatgagctcctacgagtaccttagcactggacttcgccagtacttggacaacaacatggatggattttacattgctccagctgttatggacaaacttgttgttcacattaccaagaacttcatgaccctgcccaacatcaa

SEQ ID NO: 16254 - DNA, 409 bp, Glycine max
  Clone ID: jC-gmle01810090e12d1
tagtcctttttttttttttttttttttttttttttttttttttttttttttttttttttttttttttttttttttttttttttcaaattaaaggggcccctttaccccaaaatttttggggaaaaccgccccttttgaaaaatttggaaaaaacacctcaaactgggcatttttttttggccccaaaaacattggaaactttaaaaaggttccccccaagccccataaaaacttttacccctgggaccagcccaaccttagggaacaaaaatttttcctggccaagtttgtttggcccccaattcaaaattggaaaaaagtccccctgtaaaaagcacccccgttggcatttccaagggcaccctttttaaagtacttgccagccaatgggactttttggacattcttt

SEQ ID NO: 16255 - DNA, 497 bp, Glycine max
  Clone ID: jC-gmle01810090f01a1
tctggatcagcaaaatgcatttctgttgaccttcctggtcatggaaaatcaatattacatggtgtaaagggtgctggtgaagaaccattgttgtcactggagacaattgctgatttggtgcataaattaattcatcacattgctccagaaaaagttacactagttgggtattcaatgggcgcaagaattgcattgtatatggcactgaaattttgcactaagacaaagggtgctgtattaatatctgggagtcctggtttgaaagatgaattatctagagaaatgcgtactgctaaagatgattctagagcacttgcagtcattgcacatggtttagaactttttgtcagttactggtatgcaggagagctgtggaaaagcctaagaagtcatccccattgcaatcgaatcattgctagtcgcttgcagcatgatgacatgcagaatcttgcacagatgctgtctggataagcatatgaggcagtcgtcatgtggga

SEQ ID NO: 16256 - DNA, 540 bp, Glycine max
  unsure at all n locations
  Clone ID: jC-gmle01810090f01d1
gcttgtctaagccatttatcttcaactgatgtaaaatatcaatcactaataagaaaatcaatgattgatattaatatatatgcataacaaatcaagcatttgtcggaatatcaacacaagtatatcaaaatgaacaccatccttagtggtacgggcattatctgaacaaagctcgatacttggataagaaataatggagataaagttccttggaaagagaggttagccctttgtcatgacacaaatcaaaagaaaatacaggaaaaaaacaagggacattctataaaagtacaaactcaatattccattcccaacccttccgattattccttccttctcccagacccttccctcccattccattttattttttaagccctaatcaattcaccagtttcacttatccttgccacgtatgcaaggttgttataaccttttataacacanaaaggttttgcttcatgttttgatcctccaactggagaatacaactttcatattcttgtcaggaatcgtcctatgggcagcattagtggaaga

SEQ ID NO: 16257 - DNA, 542 bp, Glycine max
  unsure at all n locations
  Clone ID: jC-gmle01810090f02a1
caaacagaaaggtgttcgtgcagacttgattggttccatcatcactcattatgcctccatatggctccctgacctctcttcctctgctgaaaatggtgtcaccactcacttccaatcccccgaaagcgtcacaaattcatggatgaagaagaggttctttgtggaaaccttggtgagtgttctgcctcctgagaaggattctgtcccatgcaacttcctccttcgccttctcagaaccgccaacatggttcgtgttgacgccacttatagaggtgagcttgagaaccggatttcgtggcagctagaccaagcttctctcaaagagctcatgataccctccttcagccacacgtgtgggacactcttggatgttgagctagtcctcaggttggttaagaagtttatgagtttggaccgcgatggtgctgctttggttaaagtggccaagttggttgattgctacctcgctgaagctgctgtggatgccaatatgacctngtctgagttcattgcacttgctggagctcttccagtcattcaag

SEQ ID NO: 16258 - DNA, 363 bp, Glycine max
  Clone ID: jC-gmle01810090f02d1
cacgcacggttcgtagctgagcgaacaacggaataattaccggctcaataagcggcggccgcccttttttttttttttttttttttttttttttttttttttttttttttttttttttttttttttttttttttttttgtgtaatttgttttttatttctatctattattgaaagaataacaaaaaatagggggtgccccccaattacatagaaaagtggcaaacggaaaacacacatgctccaagaatatgtcccgagagcaccaccgaaaaaagaaggaggaggtaaaacacaacacaaatacccaataaaagatgggcagtactactaggctgaaccgaaggtaagacaacccgaggggg

SEQ ID NO: 16259 - DNA, 100 bp, Glycine max
  Clone ID: jC-gmle01810090f03a1
cggctctagatcgcgagcggccgcccttttgttctgtatttttttttttttttttgggtttgtttttttcttgtgattttttttttttttttgaaaaacc

SEQ ID NO: 16260 - DNA, 429 bp, Glycine max
  Clone ID: jC-gmle01810090f03d1
aaaaacaagaatgaaatacacgcactatgactatgatttagagcgacatgcagttccaggggagacatttgtacaagagggaccaccaattaggagcatcactccatatgcaaaaatgtaccccaataacatattcactagaattgcgaagtacacactgggtacctgactatgctccgtgagcactagggccgaagtagaagacccaaacaccactcaagctctaattccaagatgctcactaccactacgcaaagccgaattgaacagaccatgggccagagatcttacctaggtggttcaagagctaccaaagatggtacattcaccaggtttgaacttatagcacactcactactcctattgagcctactgcaggcaattaacaaagggttccagcgccttcacaaagggttgtctgtccttgaa

SEQ ID NO: 16261 - DNA, 531 bp, Glycine max
  unsure at all n locations
  Clone ID: jC-gmle01810090f04a1
gtgcgtgtacggagttctgctgcagagtccgcgggtcagaacattgatccacttcttgataataattctgagtccatgaaatttgaggtcaaggatttttcttttcttcctaaaatgatttctgagagacatgaggagtatctgtatcttaagctggttcaggacatcattgctgaaggtacaactaagggtgataggacagggactggtaccttgtcaaaatttggttgccagatgaggttcaatctgcgtggaaactttcctcttctaacaactaagaaagtattttggcgaggggttgttgaagagcttctttggtttatcagtggctcaacaaatgccaagtgttggtttgacagagcgggaggagggtgacttgggacctgtttatgggtttcaatggaagcactttggtgccagatatactgacatgcatcatgactactccggccaagggttngatcaacttttagatgttattaacaagataaagcgtaatcctgatgatcggcgaatcattctctctgcatg

SEQ ID NO: 16262 - DNA, 594 bp, Glycine max
  unsure at all n locations
  Clone ID: jC-gmle01810090f04d1
aaaaacaccggctttatcttaaacatcgagtttcagatccctcaaaagtacaatagagcgtgtaccttggaaaggaaggaaattaagttaatctaaatcaccttagaggcataacaggtggagccagagaattcccacttaagtaacagtatttatgcgatgaagtatgtgctacgatatgttctttaattgtacacagatttaacataatcttcctaaggttgtgcctcatttcaaaaagcagaaacaacctgaaggagtgagaatccccagattttagacagacagcttcatatcaatcttctggtgaggatcatagcctatgagcttgaaatcagcagccacaaaagaatctatatctttcttctttggatttatcttcaaagttggaaaaggctttggctggttatggagctgctcctgcaaaggcctcacgtgattgcggtaaatatgagcatccncaataacatgaataaaatcaccaggaatgagatcacaaacatgagcaatcatgcatgtcaaaagggcataagatgcantattaaatggaaatgcccagcccatatcagcagatcgctgatacattngacatga

SEQ ID NO: 16263 - DNA, 445 bp, Glycine max
  Clone ID: jC-gmle01810090f05a1
aaaatcctaaccttgacacagctgaagtcaacatcaatgtggatcccgatgttgggaaggttactgctgctacctatgaattgaggccattattgcgcatgcttgctgggtcatgtcctgaagttgatttaagttgtggcattaccaagatattggaggagcgaagggaattaagagagctccttaaagatgtcgataccccgacaatattggcatcaaccaggcgacaagcatttaaggacagtttacaacagagaattctcaaatctgagaatattgatgtctcttttgaaactttcccttattatctaagtgatacaacaaagaatgttttgattgcttctacatgtattcatttgaagtgcattggctttggaaaatatgcttctggacctccatcagtgtcttcacgaatattggtatctggtcctccaggttcggaaat

SEQ ID NO: 16264 - DNA, 571 bp, Glycine max
  Clone ID: jC-gmle01810090f05d1
acaagaaataattaagaattattttatttttacgagaaaaaaaaaactcagtatatacaagcaagaataaggggagggagagttggatcagctgggaacctaaattaaacttttttatctcaattgaaatagtcaacaaattctactaatatctgaaaaaatttggagaggatggtgagggttggaaaaaggggaaagaaaacctatgatgatataatacactagaggcagaaccaaagatgggatttccacatcaaacaggtcactgctgaccttgctgcaccctttaggtggtgatagaagaatagcctaagcaagaaatgctatacagagagagagagagagagagagagctttacatgaaatagctcagagatctcatttttcttgatcctccttctccatagaggtcattccattggagtagctcattcatatttgttgactctgatgacacacttgcacacacctgctcatgtgcatatctaaaatcatccatctttaagggacgaatgtcaccgctgctacacaatccaggtaaaggtttgttctcagacaatgctaagcttct

SEQ ID NO: 16265 - DNA, 227 bp, Glycine max
  Clone ID: jC-gmle01810090f06a1
tgggaatcaaccccatcatgatgagtgctggagagttggaaagtggaaatgcaggagagccagcaaaactgatcaggcagagataccgggaagccgcagacttgatcaagaaaggaaagatgtgtgctcttttcatcaacgatcttgatgcacgagctggtcgtattggtggaaccacccaatacactgtcaacaaccagatggtgaatgccaccctcatgaacatt

SEQ ID NO: 16266 - DNA, 553 bp, Glycine max
  unsure at all n locations
  Clone ID: jC-gmle01810090f06d1
aagtggacactttaactcaaaattatagaggaagacagtccaatatgaaaaatatagtaaaatcatctcaaacttggcatcttctctttgcacctaagacattgagaattctaagaatgttacacgcaagtcccatcacaacttctagcacttggatcagcacaaccttcaggaacagaaatatttacttgccaagtttgctttgcctccaattcaagattggaagaaagttcccctgttaatagcatcctcgttagcatttccaagtgcagcctcgttcaagtacttgtcagccaattggactctcttgacattctcttgttcttggacaagcatgttaccatacgtcaagagcttctccagagtcatcttgggctgctcaaaggttggaggtccatcttttgagttcacaagcttcttcccaatgccgtcaacaccaacaccagaaatccacttcctcacttcgtcatcatatactctggccctcagtgcaccaaagaaatcaatggattggccagnggaggtgtcaacaatcttgacaacgtcctgttca

SEQ ID NO: 16267 - DNA, 486 bp, Glycine max
  Clone ID: jC-gmle01810090f07a1
ggagaagcttacttatcttatagtttaggtgctttatctgtttttggttttattgcttgttgctttgtctggtttaataataccgcttatcctagtgagttttacgggcccactgggccagaagcttctcaagctcaagcatttacttttctagttagagaccaacgtcttggggctaatgtaggatctgctcaaggacctacaggtttaggtaaatatctaatgcgttccccgacaggagaagttatttttgggggagaaactatgcgtttttgggatttgcgtgctccttggttagaacctgtaaggggtccgaatggtttagacttgagtagactgaaaaaagatatacagccttggcaagaacgccgttctgcggaatatatgactcatgctcctttaggttccttaaattccgtgggtggcgtagctacagagattaatgcagtcaattatgtttctcctagaagttggttagctacttct

SEQ ID NO: 16268 - DNA, 509 bp, Glycine max
  Clone ID: jC-gmle01810090f07d1
aagaaaaaagaaagttctaattattaataaattatatctatatatatatatatacagatagatattctatatcttttatcttaattaatatttgacccctccttataatgtgttatagttttctttatttttaggaacttatccattccttttttaatgtgcccgacaatccgaaagaattctgggggaggggtcatttcgattttgatctagaataaatagagcttcaagaaatgagagaattaagaatacccacgagaaacactaatccaatccataatgatgtaccggaaaatacaacatttttggtattcgaccaaccttcaggagaagcaaatacaacaggtacactaatcaataaaataaatgaaatcgcaattaatgcaaaaacagctaattggaaagcaatagtcatgtgtctaatcctccaatttaccaacaaaagaactttaccatttgatcccccaaccccttgatccctttattgacaaaaaaatttataatcaaaa

SEQ ID NO: 16269 - DNA, 418 bp, Glycine max
  Clone ID: jC-gmle01810090f08a1
ggcgacggcaagatctcgtgcgccgagctgaaggagatgatggtggcgctgggatccaaaacgacgtcggaggaggtgaagcgcatgatggcggagcttgatcggaacggcgacggctacattgacctgaaggagttcggcgagttccattgcggcggcggcgacgggagggagctccgggaggcgttcgagctgtacgatctggacaagaacgggctgatctcggcgaaggagctgcactccgtgatgcggaggttgggggagaagtgctccctcagcgactgccggaggatgatcggaaacgtggatgccgacggtgacggcaacgtcaattttgaagagtttaagaagatgatgactcgctcgtaggtggtggtggtagtagcactctctttcagtaatgttgccggttcttcgt

SEQ ID NO: 16270 - DNA, 489 bp, Glycine max
  Clone ID: jC-gmle01810090f08d1
aggagactactaatatgcttttaaatattttgtctatttcaatagctactacccttacgaaactgtaatcagtttgttcactttcattacacagatcttagaggaatctgatgagcgttttggagatgaaggtgtaactgaaatagtagagctggtgaagaaaacattgccactgcctctcaatatgaagaaggaagaaatcaccaagggtgacgaagaaaccgcaacattactgaaagagagtgctactaccaccaccacctacgagcgagtcatcatcttcttaaactcttcaaaattgacgttgccgtcaccgtcggcattcacgtttccgatcatcctccggcagtcgctgagggagcacttcttcccgaaccttcgcatcacggagtgcagcttcttcgccgagatcagcccgttcttgtccagatcgtacagctcgaacgcctcccggagcttcctaccgtcgtcgccgtcgcaatggaactc

SEQ ID NO: 16271 - DNA, 506 bp, Glycine max
  Clone ID: jC-gmle01810090f09a1
aaaaaagaatctatataaatataaaaataatatatataaggtacaaatagtaaatcgaggtacccattttatgataaactttccttccatttttgttcctctagtaggcctagtatttccggcaattgcaatggcttctttatttctttatgttcaaaaaaacaagattttttagatacagaaaacaaagtaaaattctggggttttttattccccaattataatactaaattcaaaaaaaggagagtaatgagtataatctttcgctcagacgatgtactgatatattctatggcggaggttcgaagaacaagcaatttattttgggccgttttcactttgttaggttcattggggttattgttcgttgcaatttccagttatcttggtatggatttgttctttatttctgagaaaattagtgatttttcttttattccggactttatttattttccatttattccacaaggggccacgatggctttttatggaatcgcgggtct

SEQ ID NO: 16272 - DNA, 593 bp, Glycine max
  unsure at all n locations
  Clone ID: jC-gmle01810090f09d1
agctaaaaaactttaaattaaaatttgataagtgaatcattttgtcagtcaatcattcattgaatgataaatcactacaagtgatggagatacgcgatttaaataacgaaaaatccaatattttaaaattgtatctaaaatgactggaaaagtggaaacaagaccagatataatttgatcattttgagcaaatccaaaatctttatagacgaaaccaatcactagttcccaaccatgggttgaatggaatcctatacataaatcagttaatagaagaatagaaaaagcttttattgtgtcacttaaattatatataaattctcgaaccaaagagttaataagaacaagttcttgattaccaagaatagaataaccgcttagaataaagaaacaaattatatttgtcgagaagtgcaaaatcgtattcatacgatcttcgttgtgcgttttgattaattggattgtttctttatagattccagtacgcaggttttgtagatgtgtttccggacattcctttaacatgtcatctaagaaaaacagttcttcaaatgctatgaatnttttagaatactctnttctttatatcattc

SEQ ID NO: 16273 - DNA, 540 bp, Glycine max
  unsure at all n locations
  Clone ID: jC-gmle01810090f10a1
aactggaagcacattcacattcacatgcaaaaggaatagctgctaaatgatgaacgccgcaacagcagctaatagcagtgtttattcacagacacagtgcagactactttcctcggatcttcgaagttcgattcctttcttgaatgaacgcaagtcacggttggtggtaagggctggcggtcgtcctcctcaaaatatgtcaaggacgaggatgagaagcagcagcagcgtgtcatacaacaacaacaacaacaagaacaacaagcaccttcgcccgtgtctcttagcctggacgacgtgaaccccgtaggactgggtcgaagatcgcggcagttgttcgatgaggtttggagaaagttctcgggattgggtcagatttctaggacaatacggtcggatgatcaggaggctctggatgcccttctggtccgagaaggtccgatgtgcgagttcgcaatccctggcgctcagaatactactgtactcgntgttggtgccaccagccgcatcggtcgcatcgttgtgagaaagctcatgctc

SEQ ID NO: 16274 - DNA, 474 bp, Glycine max
  Clone ID: jC-gmle01810090f10d1
gtataattccaattttcaaaggaagaatttataaataaattaatttctcaagtcgtagatttgtgctacacaagaatatatatacaggaaaaatagttacatgaatcacttctgcattgatccaatgcagaagtagaagaacgtaggtagcaaatttatgaaatcttctgggaagtattttgtctcaacaagggatgatcaggtattcttctctaagacagagagtgctggtgtcaagtagttatttgctttgtcgggcaagtgtgcaaccagctcataaagctcccttccatcctcagcaatatactcgtaacatacatcaaagcttttgtttcttgcagttgtatcatgtagtgccttcacacatatatcagctacatcagcacagctgatgccctgtgatattctgtttccttgatcaaatattagagcacgctgccctccaggttcttcctgcaatggaccaggacggac

SEQ ID NO: 16275 - DNA, 521 bp, Glycine max
  unsure at all n locations
  Clone ID: jC-gmle01810090f11a1
acaaaagctcctctttctctctcttcgacgagaagaaacggccagaaaataataagtgtgtgacagtgtttgtgttgtgttgttgacctttggaattggaagtgggaatggccatcaataatggtgggggaagcgaggaaggggcattgcagacagtgctttacatgtggggctaccttcccggagctctgccgcagaggacgcccctcttgacgccggttgccgttagggttccgccgtgtgattactcttggaatgatgtttgcggcggtggctgtggattcgctattgctatatctgaatcggggaagctcatcacatggggctcaacagatgatctaggccaaagctatgtgacttctggcaagcatggggaaactccagagcctttccctcttccaacggaagcctctattgtaaaagctgcagcaggatgggctcattgtgttgctgtaacagaacatggagcagtttatacatggngatggaaagaatgtattccctctgggagggtatttggt

SEQ ID NO: 16276 - DNA, 504 bp, Glycine max
  Clone ID: jC-gmle01810090f11d1
gccagcatactaacttccggtgcatataactttactggacagtttatacaataaaataaaatatacataatggttaagaatgttacataggtggaaaatacttccttccacgccagatatcactcttctagtcttctgtggtgttaaatactggagctagtcacggttattcacacgccatgaaacaatgcaaacatgtatgaagcctatgttatgtataccactgccgtatgttcatatacattgcagaaccactatctaacaattgggtcaagagcctctgataaaccatgacatcaagtgggggactcggccagaagaagagtatgccaccaaccacaagcaacatttttaggggcacaaccttcaatgatgacttcagaaggaatgtttcggtcaattacgtcaccgaggcccagctgtccatatttgttccatccccagcagaaaacttttccaccctctgttactaaacagtgtggcgagcaccgcaagatatattct

SEQ ID NO: 16277 - DNA, 548 bp, Glycine max
  unsure at all n locations
  Clone ID: jC-gmle01810090f12a1
ggtttctatttagctggagattacacaaaacaaaaatatttagcttcaatggaaggcgctgttctttctgggaagctttgtgcacaggctattgtacaggattctgagctactagctactcggggccagaaaagaatggctaaagcaagtgttgtgtaacaaaaacaagaattgaaagagtcatggtagagtacaggagcatcatttcaactttggcattctttgtctgtggtcaggactcaggagaccttcaactttattagttcatacgaataaagaaaggctcagcttctgaaatttagctcaccgtcgtcaactgtgtgcaataagctatacggaacaaacgacatgtgtcaacttaaagtcagcccattgttttgttatcctccaattttctggatcaatgtttgtattggaaagaaatatgtcattattcaaacttgtttatatccactttttttatttatcaacatttgtcacaacctttcngtgagtagcaaattattcccagaaaggcacattacatatatatatatgcattggatatt

SEQ ID NO: 16278 - DNA, 425 bp, Glycine max
  Clone ID: jC-gmle01810090f12d1
aactgctcaccccacagtaagaaaattttgtatgatggataagataagccaacggctacaccatgacaaacattactactgtcaaactaaataaacgacactaaccgaaatcaaatatcattctcaataatcaataatgtgtgagatcaaatcaaatggcttcacttatcgaggaggggaagggggaggcggtggcaagtttgattttgcaaatcccacccatgcaacaatgccgactgccagaattatccatccaaatatgtcatacttcagatcactggtcttctgtctcttgtgagtctttgtacccgaagcagaagtagaagatccagctgttgctgccgtctgctgctgctgaccaaatccctgcttatggatctctacatgctagttatgagccttagcagccacttacaatgattcgc

SEQ ID NO: 16279 - DNA, 491 bp, Glycine max
  Clone ID: jC-gmle01810090g01a1
caagggttgtgaaagcagagaagtgagatacactaagttatcctcataaatacactctaattaggtggcaagataagtgtctaaccttagtaacattgccacatattgtgttcattttggaattgtgccactaaaattctattcaattcatctatggctgcctcttcttatgctatgcaatcaatcctggcaaaccctttgatccgcatttccagcgggtctagggtgaaccaatttggcgttcctgctttgcacatgagaaggaatgttggcctgagagttaggtccatggctaaggaagaacaaccaagtgagcctgcaaccccagttacaccgtcaccatcagtagaacccaagccacagccagtctctgctccttcaccaaaggtgagcactaagttttctgatgtgttggcattcagtgggccagcacctgagaggatcaatggaaggttggccatgattgggtttgtggctgcaatggcagtgga

SEQ ID NO: 16280 - DNA, 597 bp, Glycine max
  unsure at all n locations
  Clone ID: jC-gmle01810090g01d1
gattaacgaaataattttgatatgtagattaaataaacacacgaagtacaaataaacattggtctctctaatcacaaaggagattaagtccattgtggtgtgccttcatgactgaattataccaaagtactacccttaacatactcagtaaaagccagagcaatcaaacccaacatagcaaatctcccattccacagttctgcatctgaggacatgaaccctttggacttagactccacgctgacaccttggaagagtggaatcaaggaagcaagggtaaggaccacacttgtccccaagaaccatgggatgccaccattggatatttgttctaacacaccttgccctttggctacttccactgccattgcagccacaaacccaatcatggccaaccttccattgatcctctcaggtgctggcccactgaatgccaacacatcagaaaacttagtgctcacctttggtgaaggagcagagactggctgtggcttgggttctactgatggtggcggtgtaactggngttgcaggctcacttggttggtcttccttagccatggacctaactctcaggccaacattccttctcatgtgc

SEQ ID NO: 16281 - DNA, 487 bp, Glycine max
  Clone ID: jC-gmle01810090g02a1
agcttttaacacttttgatggacttgagagtgatgtaatgaatgctctatcctctatgttcccttctctttatcccattggtcctttccctttacttttaaatcaaagtccacaaagccacttgacatctttaggttccaatctttggaatgaagatctagagtgtcttgaatggctagaatctaaggaatctcgatccgttgtttatgtgaattttggcagcatcactgttatgtctgcagaacaactcttggagtttgcttggggtttggccaatagcaagaaaccctttctgtggatcattaggcctgaccttgtcattggtggatccgtgattttgtcgtctgagtttgtcagtgaaacatgagacagaagcctaatagcaagttggtgtccacaggaacaagtgctaaaccatccttcaattggtgtattcttgactcattgtggatggaactcaactactgaaagtgtttgtgctggagtg

SEQ ID NO: 16282 - DNA, 508 bp, Glycine max
  Clone ID: jC-gmle01810090g02d1
gaaatatcaagactaagatattacataccacaataaacaaaacacaaagtggcacttccagggcaccatttctacaatgcagaaaattctagagaagatcaatgaactatcatgataaattaaagcattaagaaaaagaaaaaaagaaaacccttcaatctaacagtgtctaattaagcaacacctccttaattactttgtccaagttcatgtatgaacaaccaccaggcttggtgacctcctctgccttcctctttaactccatgaccttttctctcatcttctttcccttctctcccaccatcaattcattcactagcttctccacctcctctctcttcgcactggtatcaatttccatcccaatttcccactcattgcaaatgtatctacagtttgttggctgttctgcaaaaaatggccaacacaacattggcactccagcacaaacactttcagtagttgagttccatccacaatgagtcaagaatacaccaattgaaggatg

SEQ ID NO: 16283 - DNA, 554 bp, Glycine max
  unsure at all n locations
  Clone ID: jC-gmle01810090g03a1
tgtcttcttcttcttcattttttgggtctctctgtttacaagcttttcagttatggcatcgaaacgcatcgtcaaggagctcaaggatttgcagaaggaccctcctacttcctgcagcgcaggtcccgtggcggaggacatgtttcactggcaggcaacaatcatgggacctcctgatagcccatataccggtggtgtattcctagtttcaattcattttcctcctgattatccattcaaaccaccaaaggttgcatttaggactaaggtattccacccaaacatcaacagtaatggaagtatatgccttgacattctaaaagaacaatggagcccagcactaaccatttctaaggtccttttgtccatttgctcactgttgacggatcccaaccctgatgacccgcttgtgcctgaaattgcccacatgtacaagactgacagggctaagtatgaagccactgctcgtagctggacacagaagtatgccatgggatgatcatgctcctnctttagctgcacanatcatgatnntatgaagaaacannaattac

SEQ ID NO: 16284 - DNA, 417 bp, Glycine max
  Clone ID: jC-gmle01810090g03d1
atataaaaaaaaaaaaaaaaaaaaaaaaaaaaaaaaaaaaaaaaaaaaaaaaataaacacaaaaagacaaacaaaaaaataaaaaaaggggaaaaaacagacaaaaaaagagaaaaaaaaaaaaaaaagtaaaataagaaccccaaaacaagtatgaaagagaaattaaggaggagcgagaaaaacccataccaaagggggggatccaaccccgaaaaaaggataaaaacttaaccaaaaaaaaaatgttcattttaaaaaaaaaaagggtgggcgggtaaaaaggggggggatccacacccagggaggaaatgggtaaaacgacaccaaaaaagggtaataaaggccccacagaactgtaaaaagggaaggcatttacgcccaaaacgggacaaaaggggggggcaccccaaaaga

SEQ ID NO: 16285 - DNA, 488 bp, Glycine max
  Clone ID: jC-gmle01810090g04a1
gtactttgttcattgtgaagcaggttttaattgggaatctgatataggctttggaggttcttccacttccaaggatgctttcaattatacactacagaggatttttcagtgattgagtgagtggatatgaacatggaaggatcttatgattcatcatgcaatggagaagctggtaacgaaagccttcagatcattaaatactctccttataaaccctgcaccatgatatcattatcatcaccttggtttgttctaagagtgttttatgtgagagtgtgtggcattcaggttgatgaatccaccccagagtttctctctctcaaccatattcctcttagtcctgatacccttttagaggtgaatggtgttaggagcagcatttactctgatggagaagagtcttcagttctgagaagggatagagtggataagaaatctgaggaagctacctttgtgaacactgatagtatacgttttaccgggagcat

SEQ ID NO: 16286 - DNA, 473 bp, Glycine max
  Clone ID: jC-gmle01810090g04d1
aaaaaataaactacctcctcaactataaaaattaaaaactataagccacttctggtagcaatattttttttgaccatttacatgaaaacgctttttatgtgctagttacaacctacacaatcaatcacacaatggatgtcaacccatcatgatgacaaaatttaagcatctatgccatcctttgaaacaagaacattctttaaagacttatgaagggggaaaaaaataccactgatggtttgttgccttgaagatatagagcatataagttcaaactcttgaggggtatattatatgaacctcctcttaaaattacgagtagttgcttggtatgagcgtactaacaagctaactcctataccaactcctacacataagccaagcccaattccaacaccaactcttacaccagcattaaaccatgatagttcaccatcttcctcatctacatatattgctctttggcaatacat

SEQ ID NO: 16287 - DNA, 457 bp, Glycine max
  Clone ID: jC-gmle01810090g05a1
gtagatgaggcactgacgttgatggaagaatttgggatcaaaccagatgtagtaacctttagcaccatcatgaatgcatggagttcagcagggcttatggaaaattgtgaggagatattcaacgacatggtgaaggccggtatagaacctgacatccacgcatatagcatccttgcaaaaggctatgtgcgtgccggacagccacgaaaagccgaggctcttctgacttctatgagcaaatatggcgtacaaccaaacgtggtgatcttcactaccatcatcagtggatggtgtgccgcaggcaaaatggatcgtgcatttagactttgtgagaaaatgcatgaaatgggaacttccccaaatttgaaaacttatgaaactttaatatggggatatggagaagcaaaacaaccatggaaagctgaagagttacttactactatggaagagaggggtg

SEQ ID NO: 16288 - DNA, 548 bp, Glycine max
  Clone ID: jC-gmle01810090g05d1
gtacacaacaatacaaaacgaattttatagtgatgtaataggatacacatttcattggcaagtgattactgaatacgagtagcagcagttcaacaattgaaattacaccagcattttgtcaaaattgtaagtgtatgttctgatttctgaagtccatgaatggtatctacagtttttccacctgaactcattggcatggtgtactgtcatggaaacaaccaaatctattcagaaaggatttgtgtttcatcacagtggtaagtcacctcaacaaagtattgacactactctgcaacagtcaaggaatggcctaacaacctgattttgaatctgctgcctacttacaatcagtggttgcactccatatgaacttcttgtgcgaacaaaaaacatggaagtggtaacattccgcatgttgtcagatagtttgactaccattctgcatcttatgtttccattagttgttcttgttggatgagtcaccactacgtcaggtatttgaagcagattagagggagaagcacttgagttctggttcttataaatac

SEQ ID NO: 16289 - DNA, 297 bp, Glycine max
  Clone ID: jC-gmle01810090g06a1
gagttttggttgctccctttttttcggatattcatataaattgagtttggattttcatctcatcacaacttcttcaatcaacacgttgggctttaataagctcctttggattgtggatttatggtttcctatcatttcagcgctcgctagctgagatactgagatcgtgcatcgactagaatactatttactctggaatatgatggcatattaacccactcgaatgatctacatatcctctttaattatgaactcgaaatattatcttacgattgagttggttaacttagcattgcc

SEQ ID NO: 16290 - DNA, 418 bp, Glycine max
  Clone ID: jC-gmle01810090g06d1
ctccaacataatcttatatttaagcatccatcatgggcaatgataaaacatgtatatatagattaacatatccctaaaaatgctaaatcaaatacatatgaatcacaacaaattccattcactattgactaccacattgcttgtctctatattttccttccctcctttttggtagctccctttgataaaaatattcatataaatatgagttcggatttctatatcataacaacttctttaatcaacacatggggactgcaataggcacctttgcattgaggatatttggcttcctatcaatccagtgctagctagctgagactctgaaaactgtgcatataactgaattcacctgattcccaaatatgacggattcctaggcctctcgaatgtttgtcatgccatccctgattttgaa

SEQ ID NO: 16291 - DNA, 510 bp, Glycine max
  Clone ID: jC-gmle01810090g07a1
ctgccattctgtgtaacaggtcatgagaaagataagactgaagccctcggtgaggtgttaaatggcgatcgccttgttagtgctccttatgaacttagtttcaagaaggagaaagactctaaggttgtatgcaagaggaagctcacaaaggagcaagttgctcagttccgagaagcagttaagaaggactattatttccagatgtactatgatgacttgccgatctggggatttattgggacggttgacaaggaagggaaaactgaccctagtgagtacaagtattttctttacaagcacattcagttcgatattcattacaacacagatcgagtcattgaaatcagtgcccggatggaccctcattctgtggtggacctgactgaggataaagatgtagatgttgagttcgtgtacactgcaaaatggaaggaaacagagactccttttgagaagagaatggataaatactcccagtcttcttctttgccacatcactcggagattcac

SEQ ID NO: 16292 - DNA, 557 bp, Glycine max
  Clone ID: jC-gmle01810090g07d1
atatgtaactagctaatcatattaaatggtcatttgcagagaagacaattaattagtacaagctacttcaaataaatttcagtgactacagtaatcaaagttaaatcccatggttccaaaaacttcctcaagtgcaagcctgtgcagttatagagatagcatgacaccaattcatgaatagagtctaagcttctctagtttccaggtacacactatataacctaccttatgacagcaaaagaaaaaaataataacagacccttttctcttctcctaacagaaataatatgaactttaccaacaccttcaaaccccagctactcacacttgatggaccggtatatgtgacgaacaaagagcagggaggcacggaatcctacgctaccgagcatgaggaagaagccatagcagatacaggccatgtaaccaaagaagaacgaagtttgcataaaaccagacatatctgatcgtgcatagtagtaatacaagcaatagccgtagatgaacaagccagttgatccaccacaaagggaaagaccttcaccaccattcatgat

SEQ ID NO: 16293 - DNA, 606 bp, Glycine max
  unsure at all n locations
  Clone ID: jC-gmle01810090g08a1
ttttcaattcatttccattttgagattataatttagattctatctgtttgttttgttgcaaattccttccttcgaagttgagtataaaattctattttatttattcctcttttcataataggtatttcatacacgggattagttaaaatttcatgtaattcagtataaagaacagaaattccagtattgctaaattgattcatgtgatttgatgaagaatggcagcaaatcggtggaatatttttcgataaaattcacggggaaattgaaaatgcttggggatggaaatgaaggaatgtctacactacctggattgaatcagatacaatttgaagggttttgtaggttcattgatcggggcttaccagaagggctttttaagtttccaaaaattgaggatacagatcaagaaattgaatttcaattatttgtagaaacatatcaattattagaacccttgataaacgaaaaagatgctgtatatgaatcgcttacatattctgctgaattatatgtatctgcgggattaatttggaaaagtagtagggacatacaagaacanactatttttgtgggaacattcctttaatgaatctctgggaactt

SEQ ID NO: 16294 - DNA, 510 bp, Glycine max
  Clone ID: jC-gmle01810090g08d1
cacgaggtacgtacagttagaaatttatatttataatttcatattttttgttactgaattgaccatagaccaattccctttttattagggagtattcaatacatccataattctgagtttcatgttactcattccaagagacatgtcagattcagggcatcccaattaaattaaatggaatgacagtttctcattcggaatctgtacaataaaaatttttatcaaatcacacatcgcagtatactagactttctaattcctttagagatttatctaaaagatttgcgatataactaggaagacgtttcaaataccacacatgagttactaggcatgccagttttatatagcccatttgatatctacgtatccgagaatcaataaattctactccgcattgttcacaaaattttgggtcgtcctttttatctctgattactcgataatttccacaagcacaaatcccactttttataggcccaaaaattctttcacaaaataatccatctt

SEQ ID NO: 16295 - DNA, 564 bp, Glycine max
  unsure at all n locations
  Clone ID: jC-gmle01810090g09a1
ccgcggcttcaaccttgtagttattctctttcttcttttttagctatccctctcttgaaaaatctagatctcgttcttccttgatctacgttacgcttttagtgaccggatctgtatggatctgaaccagatctacacgccgatggtggttttggcctggtctttcatagatctgatgcatggaggctcagatctactgtacagagatactgtagataatcgatgagaagaacgcagatccagccgcttccgcttgttcgatcgctacagacgcttgtatcggattattcatgattgattcataagcagcatgtcttcctccggctatagttgttgcagatctcggatgttgtaaaattagtgtatgatgtgaagctatgggctggaaaatgtggatgtaggagatttcgggacgaaaggcctcaaaacgcttcgtcgtttgtggttactgagtcctgagtgatcttgtcatccgacctttgccatgacaggtgcgcttgcttggcangtcaaaatatgttaataaaaaaagttntattggtttaaggagagatcgcacgggag

SEQ ID NO: 16296 - DNA, 546 bp, Glycine max
  Clone ID: jC-gmle01810090g09d1
gtcgaagaacaataattaaattaattcaaggaattaaattaaaacaataattatattgatcaactaaatctaccatatgaaaatttcattctttacttgtaaagagccgaaattatcttcaccttaataattgtagatgtagaagaataatcagaatcttcctaaatccacgtaatttcttcgaaaatgctttgcccaacacaatgatattgtcacaccagaagctatgcggcgtcttccatttgatattccatttatcgcctggagatttacaatgctaatgacctatttctgcattacaaacgttgttgcccgaaattggacttcttacaagtagataattgtgcacaaagccggcaatacaaatgatccatcttatttggagaaaagtagccgtgtttgccaaatcaaataaaaaaagaagggcacaatatagttgatacaatgataacagtacatcttcacaatttctatcaaaaaagacttagtgccaatattatgcaaaaagatgtgacagaacacaggtaatatgaagacacttacaat

SEQ ID NO: 16297 - DNA, 570 bp, Glycine max
  Clone ID: jC-gmle01810090g10a1
caacccttcaatgacgtccatggccactttcttcgcccaaacctccttcccctcccactctctctccaaaaccttcgatacccatttcgcccctgccccgaaagtcaacgtctttgtgaacttcagggcgaggaggcacgttggggtgcgagtttcgaacgcgctgatcgaaccagatggagggaagctcgtggagcttgtggtgacggattttgagagggatttgaagaagggtgaggctctttcgttgccgaggatcaagctctcaaggattgaccttgagtgggtccatgtcctcagcgaaggatgggccacacccctgaaaggcttcatgagagaagccgagttcctccaaacgcttcatttcaactcgctccgactcgatgatgggtcggtcgtgaacatgtcagtgcccatcgtgctggctattgatgatgcgcagaagcatcggatcggtgataacaaaaaggttgctctttttgattccaagggagaccccgttgcaattctcaataatattgagatttataagcatcctaaagaagaaagatagcccgaacttggggaacc

SEQ ID NO: 16298 - DNA, 475 bp, Glycine max
  unsure at all n locations
  Clone ID: jC-gmle01810090g10d1
agcacaaccacattatattacagagagttggcatgcacaattgcaccataagtgcaagaggctgtctaaatgccatacatacagagagaggcaatgtgtccgtgcttgtgcctccccaaagttttaatttattattattattagattgggccagaggatcctcgtgaagtatgtcttagcaggagaatacataagcttaaggtttctcccaatcatgagatatatacattatgatatgatacaagattaagctggaacagcttcctgcactttgccgttgcttgagagtactaagctatcatagtaatcaaccagcaccttccatccaccagggcacataaatccatcaggaggactttctttgctccttgccaatgtgcgcatctttgtgcctgatatgaacaggaagtcctgaggccttgaagggtcaaagaatgccattntaccctgagtcttgtcatatgcagcaaccctg

SEQ ID NO: 16299 - DNA, 574 bp, Glycine max
  unsure at all n locations
  Clone ID: jC-gmle01810090g11a1
acaacggccaactcctgaaggggcgcatcaccgtcaatctcatctggtacggcaccttcaccccgatccaacggtccataatcgtggacttcataaactcactaagcagcgcgccaaacgcgccgcttccatcgactgccacgtggtggaaaaccacggagaagtacaaggggggaggatcctctgcgctcgtcgtagggaagcagttcctacactcggcttactcgttagggaaaaatctcaaagggaaagacgtcctcgcactcgcgtccaagttcaacgaactgaaatccataacggtcgtattaacggcgaaagacgtcgccgttgagggcttttgcatgagccgctgcgggacccacggctctacccgcaacgtcaaaaacgctgcccggacagcttatatttgggttggaaactncggaactcagtgccccgggcaatgcgcgtggncattccaccaacccatttacgggccccagacgccgncgttagtcgcgcctaacggcgacgtcggagttgacggaatggttattaactnggccactcttctcgctgggcaccgtacgaaccc

SEQ ID NO: 16300 - DNA, 389 bp, Glycine max
  Clone ID: jC-gmle01810090g11d1
aacattccaatttttcctctaaaggaatctttgggaaagagggaatttacccgtcttacacgtaacattaaacaaccaaagcagggggttaatagaatctttagaaacacacttaaaaaccgaatccaccaacaactttattatccattcccctggttaaggggttccgttccaaacgaccaatttttacaacccttacccaacaaattgccacgggccaattttcaaaccaggggtttgcatgtccaaacctgcgggtcccacattggtggcacaagggaccttgtttcattcgcaccatgcgcattggagctagccccggttggtttattcactaaaacccgacccggataacccgggttccaaccggttccgaaaacgcccgttca

SEQ ID NO: 16301 - DNA, 507 bp, Glycine max
  unsure at all n locations
  Clone ID: jC-gmle01810090g12a1
gccctgcagtgccgccaaagcaagcctgccctaaaaattgaacagggcagagagcaagggcaagcgagtgaacatgggaacctctgcgaacgctgtcgcaggtggtcgtggcggcgcccctgtccccaaagacgtcgactacgctaattacttctgcacctatgctttcctctaccaccagaaggagatgctctccgaccgcgttcgcatggacgcttacttcgacgccatttttcaaaacaaacgccacttcgctggcaagactgttttggatgtggggactggaagtggcattcttgctatatggtcggcacaagcgggtgcgaggaaggtgtatgcagtggaagcaaccaagatgtcagaacatgcgcgtgcacttgtcaaagcgaataatctccaggatgtagttgaggtcattgagggatcgatggaagaaattaccttgccagagaaagttgatgtgatcatctctgaatggatgggttatnttcttctgcgtgaatctat

SEQ ID NO: 16302 - DNA, 448 bp, Glycine max
  Clone ID: jC-gmle01810090g12d1
tgcggccgccctttttttttttttttttataaaaaagttatacacttaaaaggtggatcaaactttatttgtgtcatacaattatctataattcagtagttaaattcatctacattcaaattaatagaggcacagagaaagagaaagacatacaaggagacgtgtaaatagagttccataatacaagaattgtatgatgaacattaaaaagccatcttgaagacaaagtactgtgcaggtaaaatatacaagcaggaaaggaagtaatatatatctgcatcattttgccgaacagctgcgttctgtacagttatctcttcaacagcaaaacttttttttgtcgaatgtgattatttcctgactatcaatgtatgccagaagttattcttgtctaactaaagcttcatacaaagccttctttggagcgatcagttgcgcttccaatgcg

SEQ ID NO: 16303 - DNA, 496 bp, Glycine max
  Clone ID: jC-gmle01810090h01a1
gtgtagtgaagcgcgaggatttgtggattacatctaaactctggaatactgatcatgctccagaagatgtaccactggcactggaccggaccttgaaagatttgcagctggattatgtagatttgtatcttatccactggcctgctccgatgaagaaaggatcagctggctttaagcctgaaaatcttgtgcaaccaaacatacctaacacctggaaggcgatggaagcactctatgactctggcaaggctcggaccatcggtgtaagcaatttttccaccaagaagctctcggatttgctgctaattgctcgtgttcctcccgctgtcaaccaggtggagtgtcatccttcctggcagcaggacaagctgcaggctttctgcaattccaaaggtgtccacctctctggatattcacctttgggttcccctggaacaacctggcttaaaagtgatgtcctcaagcatcaagttataaatatgattgcggagaaact

SEQ ID NO: 16304 - DNA, 600 bp, Glycine max
  unsure at all n locations
  Clone ID: jC-gmle01810090h01d1
gatgcaaagtttcatcaaaccaggaataaaataaaatttgctcaagtcaacaaaggagtatactgattcacagtttcacagaactctcactcctcgatccattcacttatcaaatttacagatagatttctcagatttcaccatcccaaagttcctcaagggatctgtaggcaccataagtttcatgggcaaatgtggtacccctgagtaatcttgcctgttgaatctcagaaaatttggcgagcaggtcctcaggtatagaccagccaaaaacatcaaaattttcctttattctagtttcgtttgtactcttgggaagaacactatggcccatttgaagtccccagcgaagagctacttgtgcaggcgtcttgcctagtttctccgcaatcatatttataacttgatgcttgaggacatcacttttaagccaggttgttccaggggaacccaaaggtgaatatccagagaggtggacacctttggaattgcagaaagcctgcagcttggcctgctgccaggaaggatgacactncacctggttgacagcgggaggaacacgagcaattagcagcaaatccgagagcttcttggtggaaa

SEQ ID NO: 16305 - DNA, 412 bp, Glycine max
  Clone ID: jC-gmle01810090h03a1
gcatatctatggcagaggcaaaactaaggtatgctgttgttactggagcaaacaaagggataggatttgagactgtaaaagagctggcctcaaatggagtcaaggtggtgctcacagcaagagatgagaaaaaaggccatgaagcctttgagagattgaaagagtgtggtttctctgatttggttatttttcaccagcttgatgtcactgaatctgctagtatttcttcactagtagagtttgttaagaccaattttgggaagcttgatatattggtgaacaatgcaggaatcagtggtgccaatctggatgaagtggaaggatcaacatttatatgggaggaactgactcaaaccaatgagatgactgaaaagtgcctaacacatactactatgggtgcaagaaacaactg

SEQ ID NO: 16306 - DNA, 608 bp, Glycine max
  unsure at all n locations
  Clone ID: jC-gmle01810090h03d1
tccttttttgatttttttttttaacaattaactggaattgatttttatattaccttaaaccaagaatagttcatctcatgttctagaaattaaatttcaccagaagatgacaaataagaactttgacaattcctagcaagaatagaagataatggtcgtacttgcataagggtaaaaaatacgggcaagaggaacattctgtcatgtgttaattcatgtgtctgcatgaatgtatttgcattacatttaaaatcattcagaagtttgacaattcttgcctaatatagaagaggcccgaaggggaaccatcaggcaacagtgccaatttcacaacactagcagcaccttggtcaacggttaagatgccagtgtttttgtttatgtctgttttgacaaaaccagggcacacactgttaatgcacatgttttggtgcttcttggctagaatccttgtgtatgaattcatggctgcttttgagacaatatatgcagacaagaaggttggccaccctttggttgctaatgaaccttcnttgaagtctttgataaactctttgagtacctcgtctattctctcttctgtaagaatatcagcatcatcaagcacc

SEQ ID NO: 16307 - DNA, 443 bp, Glycine max
  Clone ID: jC-gmle01810090h04a1
cggctcgagcggctcgagctgtaatttccatttccacagttactcttgtgaattagcgagatttgaagcgagtgatggctgcgaaggaagagaatcgaatatttgttggaggtttatcctgggacgttacggagcgtcaactcgagcatgcctttgctcgttacggcaaaattctcgaatgccagatcatgatggaaagggatacaggccgtccacgtggatttgggtttatcacatttgcagaccgtaggggaatggaggatgcaatcaaggaaatgcatggacgggaaattggtgatcgtatcatctcagtcaacaaagcacagcccaagatggggggtgatgatgcagaccaaggttacagaagtggctactcatcaggtggtatgggaagctatggtgcttgagatagggtaggacaggatgactgcttcaaatgtggg

SEQ ID NO: 16308 - DNA, 549 bp, Glycine max
  unsure at all n locations
  Clone ID: jC-gmle01810090h04d1
gcagcgataaatcatgcttacttgcattagggaagttagtcaaagcgtcaagcaaacgcgggggaaaaatcaacagggattggcacgatctaaataaggaaacaaactatgaaatccacaatctatgaaactacaatctagcagtagcagttgtcccaaacaggatgtcctacgtaacaagaacaagaactaggtctctaatgtggcttctgcatttggatttcccgttaaaaacatcagcagtagaaatcagtagcgatcaagtgatgaacgagaacccctgcttgggcggtcatatggaccaggtctacccctataactccttccttcatctcgacctgccattccacttccatacctatcagcaccttctcgtggaccactgtaccggtcataccctctttccttgccataaccattttgtgggtagtctgagccagcgccatatcgatcacttgcaaatcgatctccactggttggatacctgtcaccagcatagcggtcgcggctgccatattngtagtcacgggtatcaaaacgatccctatc

SEQ ID NO: 16309 - DNA, 472 bp, Glycine max
  Clone ID: jC-gmle01810090h05a1
gttttcatcgtctttgagaaatgggtgcttcgctatcggtctcggaaaaatccatccatgaattcatggtcaaggatgctaagggcagagacgtgaacctcagcatctacaaagggaaggttcttcttgtagtaaatgtcgcttcaaaatgtggatttacgaataccaattacacccagttaactgagctttacagcaaatacaaagacagaggccttgagatactggcatttccatgcaaccagtttctgaagcaggagcctgggagtagccaggacgtagaggaatttgcctgcacaagatacaaggccgcgtatcccatttttggaaaggtacgtgtcaatggacctgatacagcacctgtctacaaattccttaaagcaaataaatcaggatttctgggttctaggataaagtggaatttcaccaagtttttggctgacaagggagggaatgtcctacggcgtatggt

SEQ ID NO: 16310 - DNA, 598 bp, Glycine max
  Clone ID: jC-gmle01810090h05d1
ctggtgaaatgcagtacataggtttttcatatcatccatatatatagactcttgagtcttgatagacttggtagggactgttccctagcattataataagtgatgcaacttcctcgacactaatacacatgaggccatgaccattacatgcattttaaatgatacatgaaaacacacttctaacacaactcaaaccaatgcccattaattaagttttaaataacgattccaaaacagatttctaatacaacaaacacaaaaaaacctagacatgaaatttttaagaaataatcactagaagaaacatctacaaatatacattccttatgtttcaatcatcttcaacaagagcaccaatttgaagtgattgtagagtttttcaagcctcccccaatgctctcttgatgtcattttcaatggaaaacggtgaggtggttgaaccataacgccggaggacattcccttccttgtcaaccaaaaacttggtgaaattccactttatcctagaacccagaaatcctgatttatttgctttaaggaatttgtagacaggtgctgtatcaggtccatttgcacgtacctttccaaaaatgggata

SEQ ID NO: 16311 - DNA, 432 bp, Glycine max
  Clone ID: jC-gmle01810090h06a1
caatgacccccagcaacaactcttctgcatcttcaaactcccttttggcttttctaagtgctgtgattctttctttcatctttatcttcaggtcctaaagcatactcgtgattccctccattatcacctttgagattgggacagtagattggcatacacccaattctgcattagagacgcgatgtctggacgagtagttggatccagtgatgcatctacacagatacttgagcaaagctatatgctgtggtgcagatttttactatggagtcaaatgccagttatgacgtctggcattcacattctacacatagaatacagcatgagctgtggcctctagatccaattgatccacagaaggcaaagtctacatggcgtgaggtttggcatccactttctgtggtctcatggttggctacctacaatggtcat

SEQ ID NO: 16312 - DNA, 537 bp, Glycine max
  Clone ID: jC-gmle01810090h06d1
ccataagagataactatttcttgttccaatatcaacatttaaacctgttatttggagaagagggaacacaaatcatgaccatctttcaattcaagagaccatctagcactctaataggtttctaaataggcaagtacccaatagaaaccaccctattaagagtagagagaaggatagtaacccaagtaagaagggccatccaaccataaaaacacctaagcaaacaaccacaacataaggcagaaaagaccttacaattgacctgaaatcaacccagtgccccttaaatattaccaaagctcctacattcaccatgttccaattcattgatccaccataacacagccgattcagacagttggcaacaaacgagtggcagttgcaagtgaaaaggttgtgagttttgttctcaaaataccgcaaacttgtctgtaacgcatcgtcccatgcgattgcagtaccatactcggcatgcaggtaaccgtgcttgcatgtatgtgcagataggttaggggggaagcaacactgtctacgatc

SEQ ID NO: 16313 - DNA, 517 bp, Glycine max
  unsure at all n locations
  Clone ID: jC-gmle01810090h07a1
cgattccagacatgaagcatagtgacttgagtacctcgggaacctcaaagcaaacctattgcttgatatacatttgcatgaccatgttgagacactttatgatcaaattcgtcacaaagcccttatccagtacacactggcatttgtgtctgttgattcgaacatgatggctaatgcattcaagacaactgttgcgggacttgagaaggaactagaagcattgattactgataatcagatacaggctcgaattgattcgcacaacaaaattgtgtatgcacggcatgcggatcaaaggaatgccacctttcaaagggttctggaaactggaagggaatttgatcgtgatgttcgttccatgttactgagatcaaatcttatcaagcatgagttcaatcttagagcattaaggaaactatgattatggactgatgataatgggaccaagttgctatnttactttttaatatagcaggctgttatcaactctaacgaagcaggattctggagtgaatca

SEQ ID NO: 16314 - DNA, 179 bp, Glycine max
  Clone ID: jC-gmle01810090h07d1
tggtcgtccttttttttaatattcatagagcatctattttgaggtaaaatcatcaatcagaaagagtggacttttgatctccatagggacatgatcaaagtcaagtggtacagattgcttaccagatgcaaaagtgtgcttacacacgcggctttattattattcaactacctaattgt

SEQ ID NO: 16315 - DNA, 566 bp, Glycine max
  unsure at all n locations
  Clone ID: jC-gmle01810090h08a1
gagatacaatgcactaagtttcattttcgttcaagtccgggaactatcatggctgcagtggcatccattcagtgtttcttctagccctttggatggaaagaatcaccttgctattctcattaaggttcttggcaaatggacagaaaagttgagacacaggattactgatgttgatgcacaaaaagattcatctgtcataacaacttcagttgaggggccatatgggcatgaagtaccataccacttaatgtaagtggttacaagcccttttttttttctatgttgcacacataatacatgatagaaaccttggtttagtccttatatgcatatactttcagaccaaagaagattttgagtcaacttatgctatagttcttcaactaatgaaatgattggtcattttgttctcttaggtacgaaaatcttatattagtggctggtggtattggactttcacccttccttgctatattgagtgacattctccaccgtgttagggaggggaaaccctgtcaatcgagaaatattttacttgtttgggcggtgaaaaaatcanacgagct

SEQ ID NO: 16316 - DNA, 514 bp, Glycine max
  unsure at all n locations
  Clone ID: jC-gmle01810090h08d1
acaaggaagctaaaattgcatataaaatatgtctagtgataatgtatatattcacataaggagtaaaattatatcatcccgcttagaattagaacccttctaaggactataggctattatagcaccaatgctacaaagggtcctagaatttgattactgcaatatacaatacacattatatatatgcttttttttagtgaatgcatgtcttccatcttccttttggggaactagagatcaaagctgtgactgtggaaatggaagatgggatngatggcgttgtcttgtcatcctgtgtgacctgatttcttcagcaacacttgtctgaagtgttgaagggccacaaactatgatacccacatcaacaaggccccatttctctgacattgattcataaatttctgcaatatatgtatccagataagtaaatctaggtagtgtgaagaaacaatatatgtatccacaaagggtgcgtatctgaatgcattagtttacacgtaaccttgactacata

SEQ ID NO: 16317 - DNA, 531 bp, Glycine max
  Clone ID: jC-gmle01810090h09a1
ctttacttgtaaaaaagagggacttattagggggttaaaacctttatgttcttcttaaaaagtggggtattaaagtgggaaaaagacacattattaggagcagttttgtaaaacccttacaaatagaaaatttaaccgacatcaattaatagggggcttaattgaaatgtaaaagataacacagaataaaaaaagataaaaaaaaaactaattcaataggaaaacataacaacaattaatagggggtttatttgaacaggtttaaaagattacaaaagttaaaaacaattcaaaaaatgaaatctgacacggtttttttatcccatgttgaaatcaagtaagattcagggacaaacatgatttttctgattataattcagagtttattcaaatctgattctgaactgatttattaccaaatcaaatcaaggcataaattaggaaataattgatacaaaaattaaggacaaacttgcaacacactcctatgttctctctcacattacctatcttgctattattgatctataa

SEQ ID NO: 16318 - DNA, 459 bp, Glycine max
  Clone ID: jC-gmle01810090h09d1
agaaaacttggaaaattagcagccacatgggagcttccaaaattctattgacaaagccaacgtcatatgcaagcatgccttaccgcatttgagacaaacaattatacaatcactttatcttcttggagggtcataaaactaacaattaacaactaacatttgccttaaaaaaatatgtcttcttggaggcttatcaagaaattttagaaacataatcatctggcctcaagacttggttctttgggagcaaatgccatggaagaaaagaaggcccgatgaaagcaattcctagacagagtaaagccagtgccactacccaccaagctttggggggtatgcctaataataggtcatcacatactggcggatcaacagaagaagagatatttgcaaataaaggaaattattgcaatactggagtctggtccaaatctaaaaattatcttataaactaaaaat

SEQ ID NO: 16319 - DNA, 560 bp, Glycine max
  Clone ID: jC-gmle01810090h10a1
caggactgaatgaactaatggagtctaaaggtgggaaaaagaagtctagtagtagtagtagtaaatcattgttctacgaagctcccctcggatacagcattgaagacgttagaccaaacggtggaatcaagaaattcagatctgctgcttactccaactgcgctcgcaaaccttcctgatatccatccagattgatagttcattgcatgcaaccatagttttattaggttttttcttctttgttttcaattaggtttttgctgctctccttcaaactccgtctttccgaatcctctctttgtgattgtgttctgttctgcttcctaccgcgatagtttctcttctgaagcatggccatggcggtttctgcaattggttttgaaggtttcgagaagaggctggaaatatcctttttccagccgggactttttgctgaccctgagggaatgggtttaagagctcttgcaaagtcccagttggatgagatacttacaccggctgcttgcaccattgtttcatctctcagaaatgatcatgtcgactcctatggtctgtctgag

SEQ ID NO: 16320 - DNA, 432 bp, Glycine max
  Clone ID: jC-gmle01810090h10d1
gcacgcctaccaagggatttattaaaatccattcgatgttcaaatggtaataggagaacaataaaagggccaaacgccctaacaatggtctaacataaaagggaaaaaacaccaaagaaaaacaatcactggctggaaaaccggacttattttcgcaagggcctaataaagacacttaagaaaactactcttcttcatcttcctctttccaacccttaagagttgatctaggtgaaccacagtcacaagttttggcaaatttttggtagacaagagaaccacccattccaagcccttcgggggtcctcttttcgcgacaggatcccttaacatccagaaaacacgtctgatcaaacaacttgcttgcaccatccacatgaactggaacagagaactcagttgggagaaaacatgccaataccctcttaacca

SEQ ID NO: 16321 - DNA, 511 bp, Glycine max
  Clone ID: jC-gmle01810090h11a1
aaaccatggaagtctttctgatcgtataatgagctactatggagactcgcctaggggaatggtagaatctgcttttgaatttgcaaggatatgccgaaagttagactatcacaattttgttttttctatgaaagcaagcaacccagttatcatggttcaggcataccgcttacttgtggctgaaatgtatgtccaaggctgggattatccattacacttgggtgttactgaagctggagaaggtgaggatgggaggatgaagtctgcaataggcattggaactcttcttcaggatggattgggtgatacaattagggtttctctcacagaaccaccagaggaggagatagacccttgcagaaggttggcaaatcttggaatgatagcttctgaactccagaagggggtggaaccttttgaagaaaagcacagacattattttgactttcagcgccgatctggtcaattgccagtgcataaagagggtgaggaggtggattacagaggtgta

SEQ ID NO: 16322 - DNA, 457 bp, Glycine max
  unsure at all n locations
  Clone ID: jC-gmle01810090h11d1
aagagattctcattattattgatggctgatggggcaaagcaatacactgttatctgtatacatgttctagctgtcgatttcctcacaacaagctttaattgggatctttctcaaaaggaacttaaaactaggctcaaacttaagcattgagtgttatcttatattacatgtgtacaataattggatatgacaatgctcatcttactatggccttgaatgccaatctcaaaattaagctcttgcttttactcctcggcaggagggtccacccatcgtccatgttcttttattagatcgatcaaggcattggttgcatgctccattgcaattccacgcttcaccacagtcttcccaacatagaggtcaatcttcccgggagtgcctcccacatacccaaagtctgcatcagccatctnccctggtccatttacaatgcatcccatgattgcaatcgaaa

SEQ ID NO: 16323 - DNA, 480 bp, Glycine max
  unsure at all n locations
  Clone ID: jC-gmle01810090h12a1
aaaataagaaagaaaggaagctcaacctctcacaaactcacaccacatccatctttgccttctgcatgttggttctctgtaaacagatactgcaaaagaagaataatattgaatatttggttgggttgaatccctgggttgaagcgttgcagacatcacggctattctaagagtgtctcgctctctcattcatgtcccaactgtacgacggaggacaggttgcgtaactgccaccaacccttcgccgcacggtgggcgtggtgctttgccttctgaaagtggtagcccttcagacttgctcttcttagctggtggtggttctgctgtcttctagcttcttcttaactctgttttctttntactacttttaagctaccttgttttcaaaataacaaaaacaaacactttcttacttcataagatcaccttntcttcatcttctacttctccttcactaaaatgatgctcaaaatcaagagg

SEQ ID NO: 16324 - DNA, 337 bp, Glycine max
  Clone ID: jC-gmle01810090h12d1
gccccggaaattcgcaaaataaaaaacgggctttcccccagggacaaatcgtaaataaggcgcctggaaacgtggaggggggagcagattccccggggcaaagggcccaaaaactgggtcccggggggcgaaaccccccaggggtccccaaccatgggttgaaaggcagcctatccattccccagttaaaagggggggacaaccagctttaggggagccctccaaggaaaggtccagggcgggaccaactaggaaattagaacaagttcgggagggccaagaatagcttggccggcccgaataaacaagcccttataggttgccgagaagtgccggg

SEQ ID NO: 16325 - DNA, 527 bp, Glycine max
  Clone ID: jC-gmle01810091a01a1
gaggtctgaattagtttcgtctcagcaagcgttggcatcttccagaagcaaaatggaggagcaggagcggttgttggaactgcagctgagtgagcttggggagcagagggcaagtgtgatgtcctacatggaaaatttgaaggatgcacagattgaagtggagagtgagagaacgaaactcagggttgcagagtctcggaacagagagcttgaacgggatctgaagatggaaaaggagcttattagtgagttggaggaggagctgaagaaagagagaacttctttggagcaggcagtcaaagaagtggctttgcttcaagaggaattggagaagaaaactgccgagtttagagaaacaagtgccgttcttcaggttaaagagtcagagcttgttgatgctaagctagaaatccagcgtttgaaatctgaaaaggcttctcttcagggtatcttggaggagatagactttgagctttccagtgctaggaaaatgcttggggatgttaaccaggaaatctatgatctta

SEQ ID NO: 16326 - DNA, 526 bp, Glycine max
  Clone ID: jC-gmle01810091a01d1
gtcactaataacttttacattataatataattatattcatatttatttatataaaatgaaatacaagtgcaacagcctcatataagagtttcccatatgagttggcagtagaaacgaaataacatctgcataatcacacaagtgaagtgaagctacacaacaagttcattgcttcactcacatcataacccccatatttatttatttaggtaataacacactcgacagtaaagataaataacaacagaacataaaaaccagaagtacttatatctccctcacttcatcttcgttctcgtcctcactccagcagcatttcagaatagacctaggagatgcactaccatcgcagccttgaacaaatgtttggtacacaactgcaccacctactccaagctcttcagtgctcctgtcaccacagtagtatcctttgatgtctaagggaaatttattaagtttctcaccatgcatgtcaatgtgcaaagcaacagaaaactgtggtggacaaaagcaagctaaaatcctt

SEQ ID NO: 16327 - DNA, 546 bp, Glycine max
  unsure at all n locations
  Clone ID: jC-gmle01810091a02a1
aacgaaacatggcaagagtggtggcactccaacagaaccaactatctttctctaccttagcttcctctctttctgacttcagtggaaccagacttcaaactcaacttcagttcaagagaaagcaatgccatccaaaagggtctttctacgtctccgcatcgagcaccaagaaaatcctaataatgggaggcaccaggtttattggtgtgtttttgtctaggctccttgtcaaagagggtcaccaggtgactttattcacaagaggtaaagcgcctgtcactcaacagttgccaggtgaatcagacagtgattatgctgatttttcttccaagatcttgcatttgaaaggagacaggaaggacttcgactttgtaaaatccagtctctcagcagagggatttgatgttgtttatgacataaatggacgcgaggcagatgaagttgaacccatactggatgctctgcctaatctggagcagtttatttactgctcttctgccggtgtctatctcanatctgatctattacctnacgcagagactgatg

SEQ ID NO: 16328 - DNA, 250 bp, Glycine max
  Clone ID: jC-gmle01810091a02d1
gggtgaaaaaaatcctgacccaaaagctaaaggacttttccccccttcttaggggagcaaatccaaaccgactggtaaagtcccagcgagacccctaaaaatgggatcaaaaagggtatacccaaacaagaattttggcaaaaaattagtcctttgcagcaaaaggaggcctttgccccaatgcccccttccccaagcccaggattaccaaatgcgcttaacccgttacaaggcccaaatatgggtccaa

SEQ ID NO: 16329 - DNA, 568 bp, Glycine max
  Clone ID: jC-gmle01810091a03a1
gtggttgtatgagatctgataaagggccatggcaggatccaaacattttaaagatggttcttagtggtgaagtacaatgttctagacaaatagtaacagtttctaatgatgaggggaccgtgatcgaatgtgataaggcatgttatccaatgccaataagaagtagtgatacatcaacagcagaatcaggatctgaagtcgaagatattacttctcccaaagcaagtgggaattatacaaacccaaggttaactcctgtccacgaagaagcaagattgattggtagggctagtggtttctctgagtatgatgagtatgttcccatggttgacaaggctgttgacctcgggtggaaggagaaacaagtaacaactcaaaactcatatggctcaacagaaaatttcctactgagggctggaaaatctggtggaaactgtgcatatatcttggctgttatcgtgggcttctttgttgccatttttactttggttcgttcattagcacttcgtgtgactaagagaatacaagacacaaaatctgattctgccaaaaatatgcccaagacgac

SEQ ID NO: 16330 - DNA, 519 bp, Glycine max
  Clone ID: jC-gmle01810091a03d1
ggaacgccaaaataaaataaaataaaaatatcaggaatcttataatcaaccaactattacaaacttcagcataacatattctaaaacaaaaagggccacaagcttcccctaaaactcaggtatagataaccagcacgacggttacccaaccatcataactgagacatgctaaacgtacttgagttgcaaatcataaacaaccaaaatgattggaagaacctgaatgttgcaagtggcggcaactacttttttcctattactacgtaattaagaaccatacaattccatatgatcacaaaccatgtgagccgttccttgtatcttgcagcccccagaatttgaaatccagattgttattcaatgtagtacttatttttgaaaggtgcaagtagcttgccagaatgctgatgaatctcacatccaagttcaacctccatcaaacgatggttttcctttgagcgactcattagaaaagaaacccttaaatcatcaccttcactcagatgcatgggaggatgc

SEQ ID NO: 16331 - DNA, 531 bp, Glycine max
  unsure at all n locations
  Clone ID: jC-gmle01810091a04a1
acactatactccggtagccgctgtgttggtgagtgagttgtggtgcttttgaaagatgaggccgattctgatgaaaggtcatgagaggccattgacgttcctgaaatacaacagggacggcgatctcctcttctcctgcgccaaggaccacaaccctaccgtctggtttgccgacaacggcgaacgcttgggcacttatcgcggccacaacggcgccgtttggacctgcgacgtctcaagagattcggctcgactcatcacgggaagtgccgatcagaccgccaagctatgggacgtgcaaagcggcctgcaattatacaccttcaacttcgattccccggccaggtccgtcgatttctctgtcggcgataagctcgccgttatcaccactgaccccttcatggagttgccctccgcaatccatgtcaaacgcatcgctaacgatccatcccaacagatcggggaatctgtgcttctcattaagggtcctcagggaaggattaacagagctatctggngaccccttaacac

SEQ ID NO: 16332 - DNA, 517 bp, Glycine max
  Clone ID: jC-gmle01810091a04d1
aagccaaaaatgcataatttcatttaaaaaaaaaactcttccatattaccaatatataattaaaatgttggttgagaataattaaatgctaacttctaggaaccacctaattttaaccacaaaccatcaggcactatattttgatgttgaaataatctgggtcgaagtggtgcaaccgtacataaccatcttcacctccacttgaaaaactttttccatcagggttaaaagccaatgcattaattggtccaaaatggcctttcacacccccaatttcttcttgaagaatcttgtcaaagaatttggcttcaaatttgccagcacgatgatcagtagttgtaacagctgacgcatcctgaccacctccaataaccacatgatcaagaagaggtgacatcgtaactgcattgacagggcgttccgtgacataagtcttgataagagtcaatgacctagtatcccaaagcctagcagacttatcaagggaaccagtaagggaatgtgaatcatcggcaga

SEQ ID NO: 16333 - DNA, 363 bp, Glycine max
  Clone ID: jC-gmle01810091a05a1
cggctcgagtgtatctgaaacgttgtcttaaggtaagtagattcattgtagatgttcttttactgaaacaaagagaaaacgctgaaatcacctgaaactgaggctaatgaggctcgagatataaatgccctgtgttaaccaaaagaagggggcggatcacaagaagtgacaaaggctccattgaccaaatctcccgctcccgttattcgggcaagacagttcgcctctgagcctgttcaaactggactagttgttatcgactcaacgaaacgcctcggtcggtggcatggcggattaatccttggagccagactttcggcaggagctgtgccctacattacatctgaacttgattgacaggga

SEQ ID NO: 16334 - DNA, 308 bp, Glycine max
  Clone ID: jC-gmle01810091a05d1
aatattatattcaaaggaaaaaaaaagatactaaaagatactaattataagaaaaagaaagggaaaccataaaggccttaaatgacgaatcaatggtttactacccgcgcctggggaaaaagagttccatctgggcgggaaccgctaccttcaaaagggctcctgcttccccaaagaatggcttgggaaaacacatgatttccccgaattgagggccattcgggaaaaagcaagcgcgtaactcagcaggaaatcaccttacccgtccaatgtctaatgaaccaagataaccattcgttccagggtaa

SEQ ID NO: 16335 - DNA, 560 bp, Glycine max
  Clone ID: jC-gmle01810091a06a1
atttgtgggaagaggctgaagctcgacgtgattcatgaaaccgatgtgtataagtgggatcccgaggatttgcctgggcaatctatattgaaaacgggagataggcaatggttctttttctgtcacagagataggaaatatcctaatggtggaaggtctaaccgagcaaccagacgtgggtattggaaagcaacaggaaaggatcgtaacgtgatatgcaattctaggtcagttggagtgaaaaagaccctggttttctacgcaggcagagctcctagtggtgagcggactgattgggttatgcatgaatacaccttggatgaagaggagcttaagagatgccagggtgttaaggactattatgcactttacaaggtttacaagaaaagtggacctggtcctaaaaatggtgaacagtatggtgcaccatttaatgaagaagagtgggcagatgatgacatagtagattttaatattaactcagctgatcaggaagctccaaatgatgctgctgataatgttaatgtaccactgccttttcttgatgatgaaatcaataa

SEQ ID NO: 16336 - DNA, 536 bp, Glycine max
  Clone ID: jC-gmle01810091a06d1
atcgaacaatattaatctaatgctaatgcaggcgttacaacttacaagttacaaccaacaaaagatcattacaaatacaaagacagattccacaagataagatcttatccatgtacaatcaatcttcaaaataaagtgctctccgggttaataaagaacaatatattacatggggccaaaaagaacaaactatataaacttatccaaaaataagattagacaagcataaaaacttgctaaagtttttatgaatcaagttagcaattcaccctgcaaattcctttacagcgccttctcttgaattaaggttcattagaattaccctacaccttatattgcctccagtattcacaaagattgttttttattttgagaatatgttaggacagcactgtttggtaattctggggagatcccagacaacagtcattctgggaggtcccagacaaaatacctagcagcaaaactttggatttacataaatatattcaaggagaaatacttctacctactagtcttaagtttgcaacaaaaac

SEQ ID NO: 16337 - DNA, 488 bp, Glycine max
  Clone ID: jC-gmle01810091a07a1
tgtcaataacaatagagataacagagcagggtcacagagactagaaagagaacagaagcgagcatgggctttgctagaaaatgctgaaagatgcctgaatacatgttggagaaaagagagtgtttgtgcacaggatgatataaaggattagagagaaccgaccagagcaggttgcagaggagggtaggaaaatgctggaaatcatgagagaagaacggtgtttgtgcagggagacaacacaaaacataggtgactgaaagcatagggcttcagcttgaaccttttgctttaatgaaaggggatgataaattatgtgtgtgcccactaaacagctgtaaatgatgctatttactgcggtgaaaatggatttttgctgctgatacctgtcataccacctgcatcttgctacacataccagtatagtggcggtgaccgctgcattggcacgctgtaatgcagattcatctatgaacgtcaaactgtgtgac

SEQ ID NO: 16338 - DNA, 511 bp, Glycine max
  Clone ID: jC-gmle01810091a07d1
tttattttttttttttatttttaaagatcggaccaacaacatgctagcatggatactgaggctcgctgcaaaccatttgaattcagtgtaatacgtaattaaaaaacaaaaaacaccatatccaaaaggaaacaaacttgtcttatggaaactatgtatctaggcattttcccatcagatacataactaacaagaaggtcttacaaacaaccccaacacataactgttgcacacaaccacttaaaaaattacacctgctaaattaaaaccaatatagaaaaaataaatgaaggcacgtgagattcagatgaatgtgagcttggggcttacctaaacgcactctccattactaacacacataatccacagatgtcaatagtgctagatcatgccactatcatggcatggtgtcactgtcacacaatttgacgctacagagaagaatctgcattacaggttggcaatgcaatggacaccagcactatagtggttcgtgtagcaagatgcaggt

SEQ ID NO: 16339 - DNA, 497 bp, Glycine max
  Clone ID: jC-gmle01810091a08a1
gtcagatgtgtttgcgaactgattctctgcataaagtgatggaacgtttggcaagtccaggtgtgaggcggcttgtaattgtggaagctggcagcaagcgcgtagaaggcatcatagcactgagtgacatattcacttgttgcttgcacataacagcatatggctgtggacgtgacaccttaaagtgatataatcgggcctccatgctgttgcctctcacgatgcacctactgatgctgtctatacagaagactgccaactttatttgataagccatacacatagcattgctctcttgcttcattgccttgttttaagattctaggcttgagaaagaggcctgtcaattttagtctgattgccccaaatttattcatctcacccccagtcatgctatgttcaaatatgctgcgctcctgatatcgatacacatgcaaagggagaagtgcacaatgtctgtaaatgtttcatatttgtgaagatacacaaatttcgag

SEQ ID NO: 16340 - DNA, 306 bp, Glycine max
  Clone ID: jC-gmle01810091a08d1
tttgttttttttttttttttttttttattttttatttgacattaattatttataattaaagtgcttacttcaaccaacagccttaaaaactgaaactagtggacaaaaagtggccacataatacaacacatacacaccccttcaagatgattcacatgcaaaatagcgctccactgataagtgcttacgcaacactgaaagaacttgctgtgctctacacaaaaattcttgctcccttaaaggcacactatcgtcttcagcttgaaccttggctatagccagctcgtcgtctaacacagatgctgc

SEQ ID NO: 16341 - DNA, 521 bp, Glycine max
  Clone ID: jC-gmle01810091a09a1
cggctcgagcggtgatcaacggcgccggctgtagtgactccaccttgggcggccacctggcccgccggctggtggaaatacggcgtcacacgactgtgttctctcgttcctcggggacattcaacgctgtacgcctgatgggcacctcttatcgctggagctcatgtcatagcttgtcctttctctgattctaggaaaatgataactgcgccttgcactggtacagggccacattacaagaggcactgtgctcactgatacactgcgtctgcctcacacaacagctattggtcatagctctagcgctcatcgagaactggccgctaatatgcatcgcacggcgtgcccaactacaactattacggcaccagtactatgctccgatgcgccatgggattacccgattgcagacatgagctcaggtgctgtcagaccatttcttgcttgcaggctgtggtgaataacttggaagatgctcatgagttgactgatacagcaatctcaactgcgctgaaagaaag

SEQ ID NO: 16342 - DNA, 499 bp, Glycine max
  Clone ID: jC-gmle01810091a09d1
aaaaagaacgatgctttacttaagaataatcgaaatgaacaaaggtgataaacaaaggtgaacaaaagtgaaagaatttacacaaacaagtggggagtcagtttagcataaatgtttcaagccattaacaaaggtaaattccctacaagggcatcatctcaaatgattctgactttcatagagctaaagggcaactgcagcaatttagtcataggataaattctgaagattactgaggattgggaggacggctattggcagcataaacccttgagccccattcaagcaattctttactggtgtcatccttatgaacaatcacctcaatgaagcatacggagtctttcttgggtcctgtggctgtggcaattgcttcaactagctcctcttcacagaacaccttggcagtccagcatttcccttcaccattggggattgcatgaatcaacccagtgtaattccagttcttaatcacattgtacggtccatcatgaatttc

SEQ ID NO: 16343 - DNA, 445 bp, Glycine max
  Clone ID: jC-gmle01810091a10a1
tccaactccaaggacgaccctgccaaggaagctgccaacttcacatcccaagtcattatcatgaaccatcctggccagattggtaatggatacgcaccagtccttgactgccacacttctcacattgctgtgaagttttctgaaatcttgaccaagattgacaggcgatctggtaaggagcttgagaaggagcccaaatttttgaagaatggtgatgctggtatggctaagatggatccaaccaagcccatggaggttgaaactttctctgagtatcctgcccttggtcgttttgcttgtgagggacatgcgtcagaccgtacctgttggagtcatcaagagtgttgagacgaaagaccccaccggagctcaggtcacaaaggctgacgccaagaagaagtgattgcattttggcaatactgctagcacatgtgatcatcgacgt

SEQ ID NO: 16344 - DNA, 464 bp, Glycine max
  Clone ID: jC-gmle01810091a10d1
aacagttaacaaaacttccttataaattaaatgcaaatttaagacatccctcctcagcagcaaaggaaatggactaaaaccctatggctgcttgtgaatttgaaaatctcagacttttaccatcaaaacaaaaaacagtactcatcaaaaacaaacagcaacgaaaatgttaccgccgatcaagaacccagttttgaaggctacggctacatgaaatcggcggacacttcaaaatataactggtaaaacaaacacctaagactctgcaaagataaactactgtaaaggaacaagtttttttgaaaccacgttgatgatcacatgtgctagcaaaattgccaaaatgcaatcacttcttcttggcggcagcctttgtgaccttggctccggtggggtctttcttctcaacactcttgatgactccaacagctacggtctgacgcatgtccctcacagcataacga

SEQ ID NO: 16345 - DNA, 538 bp, Glycine max
  Clone ID: jC-gmle01810091a11a1
agtgaagatcaggatcttggtaggccaatgagaagaagcagcatggaaataaaaacatcctacactcattcattgggcctcacaagctgcactgagtcaaaggcaagcggttgggctagtgaaagtcttaaccaataccttgaaagaatatgctggaaaaggagtttaggaaacaagcatctttcccccttctgtgtgcacaagagggaactttacttcccatttgatgaagcgagtatgtatcaagagtatcatcaaaggaaacatcatttagttgcaactaacagaataaaattctgcttggatgcttctccaaaacgcaagcttacttctaaagagttcaagagagggacattttctccctgcagttgggattcaaatcagatgtgggagttgaaccctaatgggaccctggtgaatagttattctggcttgtgtgcaacagtagaatctagtgaagatactattaattctggaggcttgcactcttggatcgctacaggaagaaaaggagaaggctacgttgctttcttcaatc

SEQ ID NO: 16346 - DNA, 479 bp, Glycine max
  Clone ID: jC-gmle01810091a11d1
ggggaaaggaggggggactcgttgcaattgagaacaattagtgcacttccatgcacttccactgccgttgataacgttccccgagttatttctatagcatctccactccacacttcactgccctgacaagaactgaagtctctgccaggaagaaccttagccaggtctgatgtttttgcagatattaccctcttctgttcacttagattgaagaaagcaacgtagacttctccttttcttcctgtagcaatccaagagtgcaagccaccagaattaatagtatcttcactagattctactgttgcacacaagccagaataactattcaccagggtcccattagggttcaactcccacatctgatttgaatcccaactgcagggagaaaatgtccctctcttgaactccttagaagtaagcttgcgttctggagaagcatccaagcaaaattttattctgtaagtgcaaactaaatgatg

SEQ ID NO: 16347 - DNA, 457 bp, Glycine max
  Clone ID: jC-gmle01810091a12a1
gcagtcctggagcctatgttgttgattgtgggaatgttatggaggagtttttgccagattcacgaagctacaaacaagatgtggaggaagagaatgatgtgcacggttggacaatctaaaagtcaagatgggattgtgatgatgttccgtcaccaaggggggctgatgaaaaacagacgcacggtaaagtgagctccagtcctgaaattggtggtggatcgtcggagagcacaatcactagatcatcaggaagcaatggaagagatcattattcgggtgcttcgactgatgacaccgattctgaatgggacttccttttggattccatggtcgatgatgaggaacaaagtgatgatgattattctctgtcagattctgatgagactggtggactgatgcatgggcagagaaacatgaacatgcttcagagctgcagaactgtgtgcgagtctgagat

SEQ ID NO: 16348 - DNA, 397 bp, Glycine max
  Clone ID: jC-gmle01810091a12d1
accagagcaaatatccatcatctattactaaattgtcctgaaatgtatgtacatcattttcaccagcacaagagaggatacatttttgtttcagtaaaggaaaaaaatcaggtaatgccataccttctcaggtctatacatcaatctgccgcttctaatctaatttataacaaacaagagcctaatgaagtccattaccctgtcccttgcaatcatatcattctttgtatatgatcattaacaaggtcagacaaagttggaaatactgacagtaaaaatagcattgatcttggtatttcatgcatccagcaagagtacctgtcccatcactgccaagaaggaaaaattggcttgaaatcagattggtgatagaggggctacatggaaccaatcatga

SEQ ID NO: 16349 - DNA, 448 bp, Glycine max
  Clone ID: jC-gmle01810091b01a1
ccatgaactttgcatctttctatcatcacatccatggccacagttgtgaagctccacgttttcccagaaagtttgaaccaacacaaaacgaggttgctcaggagaggctttggctcatgcccttcacctggggtgcttggttttggccataaaaattatgatcagttctctgtgaaagtgtgcagggcttttaggactgaggatggtggggatgtgaaggagaaaaagtttcgaaatttgaagaaaaatgaagagaaaaccaaaagggaaagtgggttttggagttccctcaagtctatcttgctgaggaatttcatggtgggttcaaaatcagatgatgagtatcgccaagctgtggtcaaggtggagggtctcctatcctcgattgccattcaaattggaaggtatattgtgactatgatgagcactggggtcatcctttcaattg

SEQ ID NO: 16350 - DNA, 437 bp, Glycine max
  Clone ID: jC-gmle01810091b01d1
acaacataaaaacccaacttgaattgtcgtaattttcaaacaaaacatctatcaatatttcattcaaatctcaattcaaaattggatttagaattcttaatttgtatatttaaactttcttaaagtaggagttctagcggttgactcgcttttttcacatcgtgtttcattattaagaaacggtatcaccgataaaatacgagcttgatgtatagccattgtcattaatcgttgttgttttaaggtcaatctatttacgcgtctggataatatctctccttgttcactaataaatcggctaattaaacccatgtttttataatcaatccgggcccacgattggatcgggggcaaacgcctacgagaagatcgcttggatttcctaatgagtcgctcagatttgtgcatggcttatctatccctatccaaagatgaca

SEQ ID NO: 16351 - DNA, 577 bp, Glycine max
  Clone ID: jC-gmle01810091b02a1
gacagaggaagcatatccctacacaggaaaagatggtgtctgcaaattctcagctgaaaatgttgctgttcaagtccttgactctgtgaatatcaccttgggtgctgaagatgaactaaaacatgcagttgcatttgttcggccagttagtgtggcctttcaggtggtgaatgggttccatttctacgagaatggagttttcactagtgacacttgtggtagcacttcccaggatgtgaaccatgccgttcttgctgttggatatggagttgaaaatggtgtcccatattggctcataaaaaattcatggggagaaagctggggtgaaaatggctacttcaagatggaattggggaagaacatgtgtggtgttgcaacttgtgcatcttatccaattgtggcataaattgcataacaatatggtccctggtgactaccaccttgtcatgcttcagagtttagagcgtattgctgatgccagtattgatgaatgatgattaaagattagtgtaattggatgataaaaatgctcctagttgggtggcatgatgttaaaataagctagagttgttgaaat

SEQ ID NO: 16352 - DNA, 442 bp, Glycine max
  unsure at all n locations
  Clone ID: jC-gmle01810091b02d1
agcaaaaacaatgctatcttataactgatatttgaagcgggagcattaatacaatacaatatgtaactatgaactatcaatatatgaacgctattatgtctgtgatacacacaattaaggccataatatacttatgtgatttacaacaacttctagcttattttatacattatgccaacccaactaggagcaattttcatcatacaattacacttatctttaatgatgattcatcaatactgggatcagcaatacgctttaaactctgaagcatgacaagggggttgttaccagggaccatattgttatgcaatttatgccacaattggataagatgcacaagttgcaacaccacacatgttcttccccaattccatcttgaaggggccattttcaccccaactttgtccacatgaaatntttatgagccaatttgggacac

SEQ ID NO: 16353 - DNA, 528 bp, Glycine max
  unsure at all n locations
  Clone ID: jC-gmle01810091b03a1
tttccctcagactgagtcctgcgagttgctcatcattgatagaactattgatcagattgctcctgtgatacatgaatggacatatgatgccatgtgccgtgatttgttgaatatggagggaaataaatatgttcatgaggttcctagcaagactggtggtccacctgagcgaaaagaggttcttttggaggatcatgatcctatatggcttgaacttcgtcatgcacatattgcagatgctagtgaacggctgcatgagaagatgaccaacttcatttcaaagaataaagctgcacaaatccaacatggttcaagaggtagtggtgaaatgtcgacaagggacttacaaaagatggttcaagcacttccacaatacagtgaacaaattgacaagctctccctccatgtagagattgcaggaaaaattaacagaatcattagggagtcaggacttcgggaacttgggaagctagaacaagatcttggttttggagatgcanggatgaaagatgtgatcaaatttttgac

SEQ ID NO: 16354 - DNA, 486 bp, Glycine max
  unsure at all n locations
  Clone ID: jC-gmle01810091b03d1
acagcaagtgaaaactttcatccttaagaactacaactacaaggacaaacagttacctgaatttattatttctcgcagcatgaaagccacgatagacagtcaagtcaagcattatgatacatcagaccccaaaataccaacaacactactcagctgagcagttattatatcgtactttcacatgaaagtgtcataaaggcagataaaagcatatacattcaacacacacgaccataaggctcaagcacaaggcaatagtatgacttaaacggtgacacatttcagcaattattcttaaaacactgcagattttctgaatttgttcaaaatacaagagccttgttactgtagaaccacacattcttgtgaaccagccaccaccaccacagtagggtgttcgcttgtgctgactgcatcaacttcttttttgacacttngaacattgacatcctccaattcaccacagcccatggcttcaaaaacaag

SEQ ID NO: 16355 - DNA, 420 bp, Glycine max
  Clone ID: jC-gmle01810091b04a1
gcccgggaaaaacatataacggtctttcgaatctgaaaaactactttcattattttggctacatctccaacgtgtcctcgaagtcgtcgaattttagcgacgatttcgatgatgcgttggaggcagccgttagagcctaccagaagaacttcaacctcaacatcacaggggagctcgacgaccccacgatgaaccaaatcgtcaagccacgctgcggcgtggctgacatcatcaacggaaccacaacaatgaactccggcaagacaaacaccacggattcaccgacgttccacacggtagcgcattattctttctttgacggccagccgcggtggccggtggggacacaagaactaacctacgccttcgatcccgataacgctctcgacgacgtgattaagaccgtgtttggcaacgcgt

SEQ ID NO: 16356 - DNA, 428 bp, Glycine max
  Clone ID: jC-gmle01810091b04d1
ggaactgtatattattattctttaatagaccatcacgcaaaaagaatgctaaggaatgatggtacaaagcgtaccgtatcggaccaaaacgaaatcctatacactacgtatccgtatacccgcgtgcgtatcagaaacgccccccctgtacaaaactcccaaacaaccaaaaaaaaaaaacccgtcctacaaaaactcacacgtgcaatccaaacacaacgaagaacaaaagagagaagaacacaccgcacgtggctcccacgtgccgaacaccaccatcgctcgtgtcgctctcacgcgaagaggtagcaggagtcccagtgaaattagggttggaaccgtagagaacctgaatcccttgtatatcatcttcgttgagctccaccttcctcgtcctcgcggtaatcgtagggtacataatagcatct

SEQ ID NO: 16357 - DNA, 495 bp, Glycine max
  unsure at all n locations
  Clone ID: jC-gmle01810091b05a1
cgcttccttctgattccacaaccgaccttcaaattccggccaccggagttctctctcggttttccgaccggccagccaatctgcaattccgattttgcttagatctctcacgaatcccctttctgcaccttcctagggtttactagacaccatgactctttcggacgacgaggacgagaatctggctcaatttctggaatcagaagtcctctcggaggtatctgacaaggaagaggaaaatgtggaggaaccgaaagcaaagagagcgcgcttagaagaggatgagattactaagcaaaaacaaagttctgattcattatctgcgccgaagaacattgttgtcaacaacggggtggtgcccagaaggattgagactggttatttcagtcaaattccaccggagcttttccatcacatccttaaatttctgtcctccgaggaccttgtttctcgttccctagtttgganggttcttgaattatgctgcatcagatg

SEQ ID NO: 16358 - DNA, 506 bp, Glycine max
  unsure at all n locations
  Clone ID: jC-gmle01810091b05d1
cgagaaaattaactattgcctactgaaattcaactatacattaaagcatacatgatacactattaatataaaagacaacacaaaagcagagttttacaatctgagactaagcaaatattcttcagccatgagaaattgtaaaatatttaatgttaaatactagataggtaaatgatgagacataggatcatccacactactgaaagctcaaagtggggatcagcaaaacctcaatgtagcttcaagctccttttcatcagcacaattgtatcccagtgaataagctcgtgcaaaacggccagatcccataaatggctcggcctcatcagtcacaccaccttgctgctgctcagtatcaggctccatttccgaaggtgacaataatctatcaaaacagtgccccgatattgtacagaccaaaagctcgtttgggggatccataactacttctctacatgtatcgtcacanacatgaactngccagtcttctcacaaataaatacatc

SEQ ID NO: 16359 - DNA, 409 bp, Glycine max
  Clone ID: jC-gmle01810091b06a1
cccatttcaacactcaaagcacacaaaaacaaacctttttcacttcccctgcaaaacccagaattctcggacaaattctgacttctggggtgtgttcaaatttgcacctgaagcagaaagtctcattttttaaacatgagtgcaagtgacaacgcatggggtgaatctgacacaattgagatcacaggaaagatcatggtggaggccataatattcctcttcatggtggttgtctttgtccttgtgctccatctctatgcaaaatggttctggtggagcatggaggaaaacgccactccccagccccgtcaccgtcgtcggcgtcgtcggatgtttgtcttcgcccccggtcaagactcggtgatctatgagactcaccaggttgggcttgacccttcagtactcaagt

SEQ ID NO: 16360 - DNA, 461 bp, Glycine max
  Clone ID: jC-gmle01810091b06d1
gatcgacgtgctcggtggccgccctttttttttttttttttttttttttttttttttttttttttttttttatcttgggtaaaaagaaagggggtcattctaccctggcactacaaagaaacatgttctttacacaatataaacacttaagagtttagaccgttggcttaatgggctccaagtccaagcacaaacattaaaattaaagaaaaaaagattggatataacaagacattacaaagcaaccatccttagccattatgtgcacaaagtattggaaaggaagtagcataacaacgactttttaagagctatccctcaggaagaagaactctcctaaaaataaaaattaatgaataccatcaatcaacaaatttctagctctgtgcttggtccacgtttacagaacttggactggaaggactcaactttttggccctggtcaaaagcctcttgaatga

SEQ ID NO: 16361 - DNA, 552 bp, Glycine max
  Clone ID: jC-gmle01810091b07a1
cccaattcctaattgtttaaacctaattctcatttcttcatcgttcgattcttctcctcctaaagatgcagatcttcgtgaaaactttgaccggtaagaccatcacccttgaggtggagtcctccgacaccatcgataacgtgaaagctaagattcaagacaaggaagggatcccacctgaccagcagagacttatctttgcgggtaaacagcttgaggatggtcgaacccttgccgactacaacatccaaaaggaatccactctccacctcgtgcttcgcctcaggggtggcatgcaaatctttgtcaagactttgactggcaagaccatcaccctcgaggtcgaatcctcggacaccattgataatgtcaaggccaagatccaggacaaggagggtatccctccagatcagcagaggttgatatttgctggtaaacaacttgaggatggaagaacccttgctgattacaatattcagaaggagtctaccttacactcggttcttcgtttaagaggtggcatgcagaatttcgtcaagactttgacgggaa

SEQ ID NO: 16362 - DNA, 514 bp, Glycine max
  Clone ID: jC-gmle01810091b07d1
cgctgaaacgagttcaatacatcattttaaaacataataaacagcagcacttaaaccagagatgcaaagcacaagttcaagggagacactgaacaaacagataagacatatgagaacacttcataaaagggattccccttagcaaccaccacgaaggcgaaggacaagatgcaaagtggattccttctgaatattgtaatctgccaaggtacgaccatcttccaattgcttcccagcaaaaatgagcctctgctgatctggagggataccttccttgtcctgaatcttagctttcacattgtcaatagtatcagagctttccacctccaaggtaatggtcttccctgtcagagtcttcacaaatatctgcatacctccacgaagcctcaacaccaaatgcagagtggactccttctggatattataatcagcaagagtacgaccatcttccagctgcttcccagcaaagataagcctctgctggtctggtggaatcccctctttgtcctgatct

SEQ ID NO: 16363 - DNA, 497 bp, Glycine max
  Clone ID: jC-gmle01810091b08a1
cccaattcctaattgtttaaacctaattctcatttcttcatcgatcgattcttctcctcctaaagatgcagatcttcgtgaaaactttgaccggtaagaccatcaccctggaggtggagtcctccgacgccatcgataacgtgaaagctaagattcatgacagggactggatcccacctgaccagcagagacttatctttgcgggtaaacagcttgaggatggacgaacccttgccgactacaacatccaaaaggaatccactctccacctcgtgcttcgcctcaggggtggcatgcaaatctttgtcaagactttgactggcaagaccatcaccctcgaggtcgaatcctcggacaccattgataatgtcacggccaagatccatgacatggagggtatccctccagatcagcagaagttgatatttgctggtcaacaacttgaggatggaagaacccttgctgattacaatattcacagagagtctaccttacac

SEQ ID NO: 16364 - DNA, 467 bp, Glycine max
  Clone ID: jC-gmle01810091b08d1
gtgctcggtggtcggcctttgttttttttttttttcgctgaagcgagttcaatacataatttcaaaacataataaacagcagcacttaaaccagagatgctaagcacacgttcaagggagacactggccatacagatcagacgtatgagaacacttcataaaagggattcccgttagcaaccaccacgactgcgaaggacaagatgcagagcggattccttctgaatattgctatctgccaaggtacgaccatcttccaattgcttcccagcagagatgaccctctgctgatctggaggtgatccttaattgtcctgaatcttagctttcacatcgtcattagaatcagagctttgcacctcgaaggtaatggacttcattgatacagtcttcacagagatctgcatacctccacgatgcactatgaccaaatgcagagaggactccttctggatagtacaatcagc

SEQ ID NO: 16365 - DNA, 540 bp, Glycine max
  Clone ID: jC-gmle01810091b09a1
ctcgagccctttctatcctacttgctacttcccacttccattcttttcttaaccagctaggatggtgagtgttgaagagattcgtaaggcgcaacgtgcagaaggccctgccactgtcatggctattggcaccgccactcctcccaactgcgggtgtcaaagatcctctcctggctgttacgttcacatgagcttctgcgggcacataaacaggctgatccattccttatctctcatgaggcattgcccgtacatttaccttcgatacacgtgcttaaacgggcagatcctgcaagagaatccgagtgtttgcgcttacatggcaccttcgatggatgcaaggcaagacatggtggttgtggcggtaccaaagttgggaaaagaggctgcaactcacgcaatcatggaatggggtcaaccccagtccaagattacccatctgatcttctgcaccactagtggtgtcgacatgcctggtgctgattatcagctcactaaactattaggccttcgcccctacgtcaagcgttacatgatgta

SEQ ID NO: 16366 - DNA, 470 bp, Glycine max
  Clone ID: jC-gmle01810091b09d1
gtgtaagcttaattgaaaaaatagtataacaagttgttatttactagtatacaaacagaagcatttgcagggcaggggaaaaaaaatcgaaacacaatacgttttttcaaaccggccagccaagaatacatatgaaaaaagaaagatttgttctcttgctcaatatatatgatcagagagtgacactgcggagcacaacagtctcaacggtgagtccagggccgaaaccaaatagcacaccccagtcaagaccttcaccggttgtgccaagtccattttctattgatttcttcctcatttgatccaagatgaatagcacgcatgcacttgacatgttaccatactcgctgagcacatgtctagtagcttccattttttcaggcttcaggcctaacttagcctcaacttggtccaaaattgcgggtccaccacggtgtgcaatccagaagatagaattgtaatcggagatt

SEQ ID NO: 16367 - DNA, 487 bp, Glycine max
  Clone ID: jC-gmle01810091b10a1
ttctcagtctctgtgtttgcggctgaggattccgaacgagtgaccttcttcgtttctcgcaaagtttaagtaatcatgggtaaggaaaaggttcacatcaacattgtcgtcattggacatgtcgactctgggaagtcaactaccactggtcacttgatctacaagcttggaggtattgacaagcgtgtgattgagaggttcgagaaggaggctgccgagatgaacaagaggtcattcaagtatgcctgggtgctcgacaagctcaaagctgagcgtgaaagaggaattaccattgatattgctttgtggaagtttgaaaccaccaagtactactgcacggtcattgatgctcctggacatcgtgactttatcaagaacatgattactggtacctcccaggccgactgtgctgtccttattattgactccaccactggtggttatgaagctggtatttctaaagatggacagacccgtgagcatgctc

SEQ ID NO: 16368 - DNA, 450 bp, Glycine max
  Clone ID: jC-gmle01810091b10d1
aacaaaacttccttataaattaaatgcaaatttaagacatccctcctcagcagcaaaggaaatggactaaaaccctatggctgcttgtgaatttgaaaatctcagacttttaccatcaaaacaaaaaacagtactcatcaaaaacaaacagcaacgaaaatgttaccgccgatcaagaacccagttttgaaggctacggctacatgaaatcggcggacacttcaaaatataactggtaaaacaaacacctaagactctgcaaagataaactactgtaaaggaacaagtttttttgaaaccacgttgatgatcacatgtgctagcaaaattgccaaaatgcaatcacttcttcttggcggcagcctttgtgaccttggctccggtggggtctttcttctcaacactcttgatgactccaacagctacggtctgacgcatgtccctcacagc

SEQ ID NO: 16369 - DNA, 542 bp, Glycine max
  Clone ID: jC-gmle01810091b11a1
gggtcgattgggtccccaagctgtttcttctctgtttctgacaaactttataacccttatcaaacatgagtggtcgcttttctcgcacaatttatgttggcaacctgccctctgatataagagagtcagaaattgaagatctattctacaagtatggccgtataatggatattgaattgaaggttcctccccgccctccatgttattgctttgttgagtttgataatgctcgagatgccgaagatgcaattcggggtcgagatggatacaactttgatggttgtcggttaagagtggagcttgctcatggtggtagagggccatcatcaagtgatcgacgtgatatggagaagacggaagcggatgcttgagaaccaagatctatcccaaccggaggctctgcatgaccccgagcaaccgatacgcgccatgtgtctgcgacaaactacctgaatcggttgattggaggaaggcatgtgctgttcctccagtcaaagaccaaagaagctgtgggagctgatgggcattctcagcaatcggtg

SEQ ID NO: 16370 - DNA, 441 bp, Glycine max
  Clone ID: jC-gmle01810091b11d1
aaaagcgctaataattgtcatagaaactagttaaaaggtacaaagcgctaggctaatgtccaacattttagttttaaaagaaacaacacaatcaccaaactggtaacaatttaccaagaaacagcctaggtacaacaataattttccctaaaacaatttagtccaactcaaatataattccgatactgcccaccagaatgggagaatatcaccagagaaccacaggctttttcagaaactcaaccactacctgacagcacctgacgaggagatccagatcgtgaacgtgatcttggcctagaagatttgattggtgatactgatcgcgatctagatcgagacctagacacagaacgctccaaagatctacttctaactctttttggacttctgctcctgctgggacttctgctgtggctcctagaacgactactctcatac

SEQ ID NO: 16371 - DNA, 459 bp, Glycine max
  Clone ID: jC-gmle01810091b12a1
agaaaagaaaaaaaaaaagaactggactccttcaattagtgcattgtttcttttcttcaaatggtagcaagaagacattgttaatttgagagatggcgagttacgaggctattaagaactttgatgatgatgatgatgatgatgatgatgtggagatggcactcccccatagccagatctctgaatcaagatctgccactgtttcttcccccattggccaaactaccccgcttcacattcacaacattattgaggaacaacgcattatctccaggcaccaacctcaacccaaatctccgcgtctggtttctcttgatgttattcgtggtctcaccgtcgcgctgatgatacttgttgatgatgctggcggactcattcctgcgctcaaccattccccatggaatggtttaacactagctgattatgtcatgccatttttctattattgttggtgtttcg

SEQ ID NO: 16372 - DNA, 533 bp, Glycine max
  Clone ID: jC-gmle01810091b12d1
aaaatataaaactaaattttacattaatatcgtatcgtgtccaatgatgcttactctcttgaaatctatcatttcaaggatataaagtaaaagtacaaattatatcgcagtggtgctattataaacaaacgctgctccatatatagaaaaggtaatgccatcaagagatgtagtgaactctaaactatatccatcatccatgcaggtgacgtcatcaagagattagaagaatatgctacacccgttcttgttcttgatcaaaagattagctccaaaaactcgggtagccatttcttttacagtaaaacatgttcacagtcttactgcatataatcttttatccaatagcatgtttatgtgcctttcttcaagtgccaactccaattaacttgagaatgttattgtgaggacttccccaataaaatccttgaaggaaaattgggaaaacattgcaagcagcaaggatataaatcattaatgcatgcatgcccatccattccataaccaaagtcatgcgacgacatccacagaca

SEQ ID NO: 16373 - DNA, 463 bp, Glycine max
  Clone ID: jC-gmle01810091c01a1
tttcaatttctctctggaccaaaccctcgaatagttcgatttcaaaatccatggcgagaccttccaagctacactcatcttccgacgaagcgctctccaatgcttcgagttcctccgatgaagaggagcaagtcaacgagcagatcaacgaagaggaagacgaggaggagctcgaggcggtggcgcgccctgccagttctgctgacgacgacgacgaagtcgccggcgacaatccgccggactccgatgaagatccagccgccgatgacgctgacgatgaccaggatggggataatgttgatcccgaaattagcaagcgagagaaggcgagattaaaagaaatgcagaaaatgaagaaacagaagattcacgagatactggatgtacagaatgcggccattgacgctgacatgaacaatagagggcaggggcgtctgaagtatctcttgcagcagactgagct

SEQ ID NO: 16374 - DNA, 454 bp, Glycine max
  Clone ID: jC-gmle01810091c01d1
gcaaaatcatttgggacagaaaatattattacgaattgatgatgtcctctgcttctatgagcttatcaaataaaacgacaagtaaagcttctatacagtagtacacagaatcttcaaaatatttgagaacaggatatgacttggactataaagaagcccagtttttgaacttagcacattactgttacctccagtactcatgccaggatgatgctatatttcacatgattccgaacgaccaaaaatcaggtaacgattgtttgcaacattgtcataaacaaaatctctgataaacagaggcacaaattgaagaagaattgctagctgtggaaagggtaagtctatatattccattatcttcagcacggcttctgacttaatataggatctttccttttcaacaagtacaacacttgagatatcatcaggagctcttcctgatcgtctgagtaag

SEQ ID NO: 16375 - DNA, 517 bp, Glycine max
  Clone ID: jC-gmle01810091c02a1
ggtggatcttagctctgatggatctggccaaattccatatgaacttattagggacacacttcagatcagtgatgatgaggtggaactatgggtagttagaggattaactgctaacttaattgactgtaagatggaccaaatgaatcaagttgtagttgtcagtcatcctactgagcgtgtgtttggtcagcaccaatggcaagcactgagaacaaagctagtgacatggaggggaaacattgcaaatgtgatcagtaccattcaggccaacaaaataacggaggatgggtcccaggcagcccaaggcttggtagttcggtgaggacgattgagtgaagcaattatctgagtatctagattttatccaggtggaatttttttatcttaaacagaggataagagtgtaatttgctttgttgcaatttatttttccatttattttagttggctggtgactctaatttgtactaaactttggcagagccattttgattgaagtttttccatttttaattta

SEQ ID NO: 16376 - DNA, 359 bp, Glycine max
  Clone ID: jC-gmle01810091c02d1
aaaaatgaggctgggctaaattaaaaatggaaaaacttcaatcaaaacggctctgcccaagtttagcaccaattcaagtcccccgccaactaaaatacaggggaaaataaattgcaccaaagcaaattacccttttatccccgggttaagataaaaaaattccccctggataaaatctagatccccaaataattgcttcactcaatcggccttaccgaactaccaagccttgggctgcctggggcccatcctccggtattttgttggcccgaatgggcccggccacatttgcaaaggttcccctccatgtcactagctttggtcacagggcttgccattggggcctgccaaacacaccc

SEQ ID NO: 16377 - DNA, 482 bp, Glycine max
  Clone ID: jC-gmle01810091c03a1
atttcacccttttagcatttgtacattcctttcccttccttgaatcgttcttaattgcgagaggggatatcggagaagttgattggcctcccattaattgcaggtctgaatgatctgatggagtctaaagttgggaagaagaagtcgtctagtagtaagtcccttttgtacgaagctcctctcgattacaccattgaagacgttcgaccacacggtggaattaagaagttcagatctgctgcttactccaactgcatccgcaagccatcctgagattccctaggttgtgtgacgacatagcccccgtagtcttgcatctgctatattattctagtctcttcttttcccttttcttgttctcttccttgcccttttgttctctctacctatacagcaagactttgtttctttttgagtcaagatggctggctcagctattggtttcgaaggctacgaaaaaagacttgagatatcattttttg

SEQ ID NO: 16378 - DNA, 485 bp, Glycine max
  Clone ID: jC-gmle01810091c03d1
aacactaaaatagtaactcctcatgtaatgattgtacgtacatatcttgtagtagagtaccaaaaacagatgtgatcactatctgtacattgtacatatcttgcaaactaagggaagattttatgatctaccaagggacaagttagccttgcaatggctttgggagcaaaaagatatcaaaatacaataccccccaacacacacacaactttcttcattacctctctctcttagtttgcaggaacaatacccgcctgcatcacaagctgctcagacaaagatgagaggcgagcaactcttgcttttacctcttcgaaacattcagggttattggtgtcggggatcaaatcgggggctttattaccatcagggacactgatgtagttatcagcttcaacactcatgatagctttgttcagaagttgtcgactcatttcagccagtttttgtagtgcattggtggcagcttcaacttcaagctgagc

SEQ ID NO: 16379 - DNA, 558 bp, Glycine max
  unsure at all n locations
  Clone ID: jC-gmle01810091c04a1
cataaaaaatacttagttaaaaaaacgaaaatactgtattgcaattgtattgcaattcgaaacgaaatatagttcgagatcattgtattatttttgtactatattaatcttaatcttaattggaacgaaatctttcaaaattggatttctaattcttaatttatattttcgttttttcgttcttttctttttcttagattataatccgaaaacaaaagagttaagtgaattaaaaacccaagggaggttcatggccaaaggtaaagatatccgagtaattgttattttggaatgtaccggttgtgataaaaagagtgttaataaggaatcaacgggtatttctagatatataactaaaaagaatcgacagaatacgcctagtcgattggaattgagaaaattttgtccccgttgttgcaaacatacaattcacgcagaaataaagaaatagatcaaattgatcgcttgtgtgttacccttcgaaccaaagaacttaacatgtaaaatgatctatntntcttatctatatagatagatctatctgtattctatcattta

SEQ ID NO: 16380 - DNA, 481 bp, Glycine max
  Clone ID: jC-gmle01810091c04d1
acaacataaaaacccaaattgaattgtcgtaattttcaaacaaaacatcaatcaatatttcattcaaatctcaattcaaaattggatttagaattcttaatttctatattttttttttcttaaagtagtagttctagcggttgactcgcttttttcaaattgtttttcattattaagaaaaggtaacaaagataaaatacgagcttgttttatagcaattgttattaatcgttgttgttttaaggtcaatctatttacgcgtctggataatatttttccttgttcactaataaatcgactaattaaacccatgtttttataatcaattcggtcccccgattggatcgggggcaaacgcctacgaaaagatcgcttggatttcataaagagtcgcttagatttttccatggtttatttatccctattccaaaaatcacatttattacaagaaatactataaaggatttgttttttattctga

SEQ ID NO: 16381 - DNA, 509 bp, Glycine max
  Clone ID: jC-gmle01810091c05a1
ctaggattcccaaggttcaacagttgttgcaggacttcttcaacggaaaggaactttgcaagagtattaacccagatgaagctgttgcttatggtgctgcagtgcaggctgcgattctcagtggcgagggtaatgagaaagtgcaggatcttcttttgttggatgttactcctctatccactggtttggagactgcaggaggagtcatgactgtgttgattcccagaaacacaaccattcccaccaagaaggagcaggtgttctcaacctactctgacaaccagcccggtgtgttgattcaggtctatgaaggtgaacgaacgaggactcgtgacaacaatttgcttggcaaatttgagttatctggaattcctcctgctcccagaggtgttcctcagatcactgtttgcttcgacattgatgccaacggtatattgaacgtgtctgctgaggacaaaaccactggacagaagaacatgattacaattaccaacgacatgggcaggctt

SEQ ID NO: 16382 - DNA, 464 bp, Glycine max
  Clone ID: jC-gmle01810091c05d1
tgctcggcggccgccctttttttttttttttttttttttttttttttttttttttttttttttttttttttttttttcttgtttttttttttttttttttttttttgggccaaaacctcaattgttggcccaggtaaaaacgggaaaaaggcccttaaacaaaaaccaataatctaaacaccacctaaaaccaaaaggccccccgctaactaaaaactccaaggggggctagcaaaaagcaaaaaccccccacgagaatctctacgcaaaccaagctccccaatttggggcccaagcccccttccactggacattgcaaggcccaccccaaccagggggccccccgcattacccacagccccctgggcccaattgggcatactgggctaacaaaagcttgccaagccccttggggcaaccccaaaacgatacgccccaaacaaaggggggcccattgcccctgg

SEQ ID NO: 16383 - DNA, 533 bp, Glycine max
  Clone ID: jC-gmle01810091c06a1
gctctctgttctgctaccgtgctgtgtggtgcttcgattacagcttatccatggacacaacttgcatacgatttgctttaggacccatcctcctccacctcctattcttgtccctccctaacctttccctagcagatgttatttatagtccccttgaactcttcagcatcaactgtggctctaacagtagcttgtccacgcgcgatggtcgcaattggactgcagacatcaaattcctctcagaaaacaaggactcagttgctgctcctgcactcacaccgtctatcctagagggtccttacaccgatgcacgtttgtctcactcccaattcacttactctatccctgtctccacaggcccaaagtttcttcgcctcttcttctactcaacttcctaccaaaacttccatcgctccaaagcctatttctcagtcaaagcaggcccatacaccctacttcaggatttcaacgcttccctccatgctgatgctggtaacgagcctggcgactacttgttcagggagtattcaatc

SEQ ID NO: 16384 - DNA, 540 bp, Glycine max
  Clone ID: jC-gmle01810091c06d1
cttcgtttttttttttgtaaagaactcaaactttcttgattccaaatatcgagtcatggaagcataactacaaaacattcttatttctaacatcttcctaattcacatgcacttctaaatatttgaacacttttctaaacttaaagaacttctagatttctatataggtatctccaaatagtttatctaatttcacataatatataaccaacattccaactatgtttcttattttgaacagtaaacagcaaactcaacctgaacttgaacagtaacttcatcgtcccttgggatcattaatctcagagaaaacattctccgggacgattaacctgtcggattccttactcccatagcttgtggtgttcaacccagtgctgttactataatccgaaagttgtatgctactgtgggtactgctaaacatgtcttcactatcttcataatccccaccactcaccaccaaaggcaccactccattaacagcactatccttgagcttgcagacaaactccaacacccccacgacgtcattcatgg

SEQ ID NO: 16385 - DNA, 551 bp, Glycine max
  Clone ID: jC-gmle01810091c07a1
tggtgctggttctgatgctggagcccttctggtggatgggcttggagatggacttcttttggaagcgccagacaaggattttgaatttattagaaacacttctttcaatttgttgcaaggctgcagaatgagaaatacaaagacagagtatgtctcatgtccatcctgtggcagaacattgtttgatcttcaagaagtaagtgcacaaattcgggagaagacatcacacctccccggtgtttcgattgcaatcatgggatgcattgtaaatggaccaggggagatggctgatgcagactttgggtatgtgggaggcactcccgggaagattgacctctatgttgggaagactgtggtgaagcgtggaattgcaatggagcatgcaaccaatgccttgatcgatctaataaaagaacatggacgatgggtggaccctcctgccgaggagtaaaagcaagagcttaattttgagattggcattcaaggccatagtaagatgagcattgtcatatccaattattggacacatgtaatataagcatacactcaat

SEQ ID NO: 16386 - DNA, 460 bp, Glycine max
  Clone ID: jC-gmle01810091c07d1
ggcactattctaagagattctcattattattgatggctgatggggcaaagcaatacactgttatctgtatacatgttctaactggcgatttcctcacaacaagctttaattgggatctttctcaaaaggaacttaaaactaggctcaaacttaagcattgagtggtatcttatattacatgtgtacaataattggatatgacaatgctcatcttactatggccttgaatgccaatctcaaaattaagctcttgcttttactcctcggcaggagggtccacccatcgtccatggtcttttattaaaacgatcaaggcattggttgcatgctccattgcaattccacgcttcaccacagtctttccaacatagaggtcaatcttcccgggagtgcctcccacatacccaaagtctgcatcagccatctcccctggtccatttacaatgcattccatgattgc

SEQ ID NO: 16387 - DNA, 376 bp, Glycine max
  Clone ID: jC-gmle01810091c08a1
ggctcgcggagtgtcggcatcagaagcctgtgaggacatcaaggacaggggaggactcgagacagaggaagcagacccgtacactgcaaaagatggtgaatgcaaagtctgagctcaaactgttgccgtacgagacactgactgagacactatcacctagggtgccgagaatgaatcagagcatgcacgcgcattggatcggcacggctactgttgcctatcaggtggtgcatgggctccatttatacgagactggagcctacactagtgacacttgcggtaacactcaccatgatgctaaccatgccgcgcttgcatgaggagtcttgagttgaaattggctacacacatcggctcataaaatacttacggggag

SEQ ID NO: 16388 - DNA, 332 bp, Glycine max
  Clone ID: jC-gmle01810091c08d1
gcgtgtcgtccttttttttttttttttttttttttttttggtaaatggtgcaaagtaaacaagacttgctaaaataatcgcaatgagtgataattacagcggcgggcttcaatacattaccatacagttatgcttctatgacctatcgggataacgatcccacttatgtatgacactcccacaattgcggcgctgatccaaacttcgggattggctgcaattcctaaaatatccaaaccctgagtcgcaatccaactaggagcatcgttaagtatgcactgtccattatccgtaaaaactggcgcatgattaggggcgtttgccctaggacc

SEQ ID NO: 16389 - DNA, 482 bp, Glycine max
  Clone ID: jC-gmle01810091c09a1
aaactgcaagcgttgggagaaaggaaggaagaccttatcatctccgaatttcattttcagaagcctctttgggaatcaaatccgaagcatgatgcattgtgcgagcattgtctcggctccgtcctacgcgttcccttttctctctggctccgcttccactactccaactgcgatctcgctcactaagcgcagttggaagccacctccgagcatggcaaaaggcccagtcagagccaccgtttctatagagaaagagaccccggaggccaatcgtcccgaaacgtttctcagaggagtggacgaggcccagtcttccacttcggttcgggcccgcttcgagaagatgataagggaggcccaggacaccgtgtgcagtgccctcgaggccgctgatggtggggcccagttcaaggaggacgtttggtccaggccccgtggcggcggtggcattagcagggtccttcaagacggtgccgtttggg

SEQ ID NO: 16390 - DNA, 523 bp, Glycine max
  Clone ID: jC-gmle01810091c09d1
tcactgctcggtggccgcccttttttttttttttttttttgtgcaatactggcattaaagaagctgccttttgttttcttacatgggattgaggagttacttgtagaaagaacaatggttggcagtaggtatactacatacgcagcctagacatttgtaattttctgcattttcacgctttacgcggatgactctagcaaaatacgtgatttacaatccacctagtacaacaagctaacattctgactcatcataacaagcacttgatatacaccgataaaagaaacaagctcccttattattaaattaaaaagctgacaaattggggggtcaactgatgaattagatccattccttggggttgatgcatgcgtacaagagtttccattcttcgattgcttctttcggtttatgatcgtattcccaccgagcagtcagtgggagagaaacaagtatactctctattctccctacagttctcagtccaaatgttgtacccctatcatataccaaattgaattca

SEQ ID NO: 16391 - DNA, 173 bp, Glycine max
  Clone ID: jC-gmle01810091c10a1
tccatgatgtgcatctttccaaccactgaagatggttgtatagaaaattattgactaggtaaggaaagggatagtgctagttagttagtagttagtacttatacaggacataatttgctaccagccagtggcattatttggatttaacgtgttatactatcattagtccctat

SEQ ID NO: 16392 - DNA, 173 bp, Glycine max
  Clone ID: jC-gmle01810091c10d1
atagggactaatgatagtataacacgttaaatccaaataatgccactggctggtagcaaattatgtcctgtataagtactaactactaactaactagcactatccctttccttacctagtcaataattttctatacaaccatcttcagtggttggaaagatgcacatcatgga

SEQ ID NO: 16393 - DNA, 519 bp, Glycine max
  Clone ID: jC-gmle01810091c11a1
atctatctatctatctccatcttcatcactcccatggacaacgacacaaacacaacaccaaccaccacctcagaaccacaaatagcacacgattttcccggtctcatccgtgtcttcaccgatggtcgcgtccaacgcttcaccggaaccgacgtcgttccaccctccaccactccccacattacatccaaagacatcacactcctccaccctcactccgctactctctccgcacgcctcttcctcccaacaccacaaaccaccagccgacgcaacaacaacctgcctctcttaatctacttccacggcggcgccttctgcgcctgctcccccttcaccgcaaactaccacaactacgtcgccacaatcgtcgccgaagccaaagtcgtcgctgtctccgttgactaccggctagccccggagcaccctattccggcagcgtacgaggattcatgggctgcactacagtgggtggcgtcacaccgtaacaaatatggaccagagccttggttgaatgag

SEQ ID NO: 16394 - DNA, 277 bp, Glycine max
  Clone ID: jC-gmle01810091c11d1
aacgggaaaaaaaaaaattttaacccatttttgggttttgggacgggacaattggttatttagttcaccatcgggcatttccttaaccaaaaagggaatggttaattgccccatgggccttttgggcatttggaaatttggaattggggaaacaaaacgaattccccaaaccctaatggaaggaaatcgggcctgacccacacccctttatttagggggaacagaaaaaggacccaacctggggcccaaattgagggggggcgggctttggggaaaa

SEQ ID NO: 16395 - DNA, 540 bp, Glycine max
  Clone ID: jC-gmle01810091c12a1
cttatataccttagcttttgaagaagttgaatgaaaagagcttttataaaagtgcgtaagttgattttagtttacgtgagaatatcatcttctcatgtaagtacttatagagaagcttatccagagaggaccttatatgcttttcttatgtgaagtataatcctttcttttattctaagaaaataataacagggtcttgcagtggaaaagggcgacatcacaagaggcactggtttcactgctacactgcctctgcctcacacaacagctattgatttcagctctgtgcctgatgtgaaaggttcatcaaagagcttcccaaagcatgaaacgcgacacctttcagaacacaagaatattgccagatgtgctaggtttagtgctgatggaagatttgttgccactggaagtgcagatacatcaataaagttatttgaggtttcgaagatcaagcagatgttgctgccagaggcaaaggatggtcctgtgcggcctgtcatacgaacatattatgatcatatacaaccataaatgatctgg

SEQ ID NO: 16396 - DNA, 472 bp, Glycine max
  Clone ID: jC-gmle01810091c12d1
ggttcatccaatccaactttaagctactttcgtgaaaatatggaatatgaaacagtagtagctgttaagaattgtttgaaagatggagcaaaacaaatcatcagaaatagataatcttccaattccgagagctgaatgcattaactacttctgcaggcaaaaagccttaggctactactagaaattaaagaaaaataaatggaaattcccagagttaactttcaataagtgataactttaattagtctgtaaatgcattcagcctccttcccattaattatacagttttcttgcagaaccgaactgacctatcagttccacaggaaataaaagcagactctattggtgagtgttcaagccagctgggtgcaccaacatgattagaaggccactttgctactttttctggtgtcatcgcatcccagataacgatctcattgctcagttcatctatggatagaataaattcttc

SEQ ID NO: 16397 - DNA, 520 bp, Glycine max
  Clone ID: jC-gmle01810091d01a1
gcaatatcagagtattgtggatgagaaattgaaagagattggacctatgcagcacgcactgggcaagctgcggactacaaataatgccggccggggtggtttgtgttcatctgaggatgaacttaacagtgttatatatagtttacaataccgcatacagcatgagagcattgctttgactgaggaaaaacaaatcctgcgagaaatcaaacagcttgaggggacaagggagaaagttattgctaatgctgcaatgagggccaaattacaggaatctatggggcaaaaagaagccattcaagatcaggttaagcttattggtggggatttggatggagtgaagaaagagagagaagcaattcagtccaaaatcaagcaaattgatgatgcactgaatgccatagacaaggatatccagtctctacaagaggaactgacagctgattctcagaagagggacaaagctactgagagtatacagcagctaagtagacagcgcgaggaggggaacacctatttc

SEQ ID NO: 16398 - DNA, 456 bp, Glycine max
  Clone ID: jC-gmle01810091d01d1
aagtaatgaaaattgcagcattcctacgctgtcctttattttgctctttcactgaaacttacaaataaaccattgctgctcatgaggaaagcaattgtatcacttaacactttaacatgaaacaatagtaagaacagagctagcacacaacagaaaaatgcttaaaattcaatggacaaggacagacattagacagagaaaagaagggagatgtaggtaaggtagctggtgaaaatgttgatgaatgattgactctatttcgagtaatcgtcgtgttcttcttattcttcttcttcgccttctgctccaacctcttcatagtccttttcaagagcagcaagatcctcacgggcttcagagaattcaccttcttccattccttcacccacataccaatgaacaaatgccctcttggcatacatgaggtcaaacttgtaatcaatgcgcgcgaaaacc

SEQ ID NO: 16399 - DNA, 532 bp, Glycine max
  unsure at all n locations
  Clone ID: jC-gmle01810091d02a1
aatatgacaagctgtgcaaggtgtgaattgccgtactcagtaaccaatcttgagaatttaaaagtggtggtatgtgatgaagagacagctgcttcatgggaagcatttgaagctatgcttccaaatctgaagttagaggttcctcgagttgaggttaacttaaactggcttcattcaattagctcttaagacatgtcctgcttcatggaaagcatttgaagctatgctttcccaatctcaagtttgaggttcctcaagttgatgttaactgaagctggtttcattcaatttgctcctatgacctctttctataaaaatgttagaccaatgatcgtaactgtttcatgtgaaataatcttgtttaaaatagggataataaatgtgtattcaagttgctgtagtagtatttgcatgtcgtgcaaacagtactatgctacttgaaagaagttggtgattntatgtgttgtgtgttgtcacgattggacatcttagcataatgatgccaacaaaataattgaactatgataacttc

SEQ ID NO: 16400 - DNA, 462 bp, Glycine max
  Clone ID: jC-gmle01810091d02d1
gaagttatcatagttcaattattttgttggcatcattatgctaagatgtccaatcgtgacaacacacaacacataaaatcaccaacttctttcaagtagcatagtactgtttgcacgacatgcaaatactactacagcaactggaatacacatttattatccctattttaaacaagattatttcacatgaaacagttacgatcattggtctaacatttttatagaaagaggtcataggagcaaattgaatgaaaccagctgtagttaacatcaacttgaggaacctcaaacttgagattgggaaagcatagcttcaaatgctttccatgaagcaggacatgtcttaagagctaattgaatgaagccagtttaagttaacctcaactcgaggaacctctaacttcagatttggaagcatagcttcaaatgcttaccatgaagcagctgtctgttcatcacata

SEQ ID NO: 16401 - DNA, 560 bp, Glycine max
  Clone ID: jC-gmle01810091d03a1
cataaaaaatacttacttaaaaacacgaatatactgtattgcaattgtattgcaattcgaaacgaaatatagttcgagatcattgtatctatcattgtactatattaatcttaatcttaattggaactaaatctttcaaaattggatttctaattcttaatttatatttgcgtattttcgctcttttctttctcttagattataatccgaaaacaaaagagttaagtgaattaaaaacccaagggaggttcatggccaaaggtaaagatattcgagtaattgatattgtggaatgtaccggttgtgataaacagagtgctaatatggaatcaacgggtatttctagatatataactgaaaagaatcgacagaatacgcctagtcgattggaattgagaaaattgtgtccccgttgttgcaaacatacaattcacgcataagataagaaatggatcaaattgatcgcttgtgtgttacccttcgaaccaaagaacttaacatgtcacatgagctataggtcttatctatatggatagatctatctggattctatcatttac

SEQ ID NO: 16402 - DNA, 464 bp, Glycine max
  Clone ID: jC-gmle01810091d03d1
acattcaaataaatatattgggtagaaaatatgaaatttcactagtctacaattcaatgaaggctatacatagtaacatactatgactataagcatcttaatgaagaatgctgattgcagggcagcctatatacatagtacatggggagccaaatgtctgagctaagggtgtcaaatgataattgtttaggtggacatggtgggaaaaaaacagatccactttgtttataacttagactttagattcattctattgtcttgatgatttcaggcaccaattacctgtccacaaaagcaaatgcatttttgcattggcagcaatacatcgtcatgttccaggcaaattgctgcctgtgctggaaagaattatgaaggcacagacaactgaaagtgagaagactgataaccaggtgttctctgtgtacatttccattgcatcagtgaaagaaaaccgggctcgatct

SEQ ID NO: 16403 - DNA, 487 bp, Glycine max
  Clone ID: jC-gmle01810091d04a1
atttcacccttttagcattcgcacattcctttccctttcttgaatcgtccttaattgcgagaggggatatcggagaatttgataggcctcccattaattgcaggtctgaatgatctgattgagtctaaagtgggtaagaataagtcagctagtactaagtccctttggtacgaagctcctctcgattaccccattgaagacgttcgaccacacggtggaattcagacgttcacatctgctgctaactccaactgcatccgcacgccatgctgagattacctacgttgtgtgacgacatagcccccgcagtcatgcatctgctatactattctagtctactcttttgccttaacttgcactcttccttgcccttttgttctctctacctatacatgatgactttgatgctttctgagtcaagacggctggctcagctattggcatcctaggctacgaaaaacgactcgagataccgttgtttgaaaat

SEQ ID NO: 16404 - DNA, 384 bp, Glycine max
  Clone ID: jC-gmle01810091d04d1
gacactaataacttttacattatggtataattatattcatatgtatttatataaaatgaaatacaagtgcaacagcctcatctaagagtttcccatatgagttggcagtagaaacgaattgacatctgcatactcgcacaagtgaagtgaagctacacaacaagttcattgcttcactcacatcataaccgccatatctattcatttaggtaataacacactcgacagtcgagatagattacaacagagcataagaaccagaagtacttatatctccctcacttgatcttcgatctcgtcctcacttcagcagcatttcagaatagacctatgagatgcactaccatcgcagccttgaacaaatgtttggtacacaactgcacc

SEQ ID NO: 16405 - DNA, 535 bp, Glycine max
  Clone ID: jC-gmle01810091d05a1
gtggcacattagtgcatagtgatagtagaattccatctacaaggcggaacaaaaaatttgtgtccatggagaaaaactctgttgattatagtcctttgctttctcctcgaggtgatgaaactgcaatcaagacaacatcttttcttgtgtcagctactaaatggactctcaagactttgatcttggtgatctttgctctatggacaactttcattttttctctccctgcaaagcctgtgaatgagttgttctcaaaatggaatgatctcaaccgtgacactccttttggagtcacaggaagcatttttctggtcttcactgccccaattctcataatcgcatttcttgccatcgcacacctaattcttactggggaggatcagcttcaggggaagaagacgtccaaacttgcaaggtttcgcctatggacatttcctgtgcttgtgaagggaccatttggagttggttctgccacagagcttattgggattgtcctcgatctgctgatggtatctgggctctctatgcttacact

SEQ ID NO: 16406 - DNA, 515 bp, Glycine max
  unsure at all n locations
  Clone ID: jC-gmle01810091d05d1
acaaggaagctaaaattgcatataaaatatgtctagtgataatgtatatattcacataaggagtaaaattatatcatcccgcttagaattagaacccttctaaggactataggctattatagcaccaatgctacaaagggtcctagaatttgattactgcaatatacaatacacattatatatatgcttttttttagtgaatgcatgtcttccatcttccttttggggaactagagatcaaagctgtgactgtggaaatggaagatgggatgatggcgttgtcttgtcatactgtgtgacctgatttcttcagcaacacttgtctgaagtgttgaagggccacaaactatgatacccacatcaacaaggccccatttctctgacattgattcataaatttctttaaagtctggcctggaaccataacgaatgacagttgacttagcantactaacttgacttggagcccttggagtcaaagagccattctgatgaatcttatcaacctttgatca

SEQ ID NO: 16407 - DNA, 474 bp, Glycine max
  Clone ID: jC-gmle01810091d06a1
caatattagtgatttgaaactttatggaatcatatactatgattttgggagaaattttattttattttactatttttatctggggtggggggattctgtcacgtatttgtttctatataactcgatctagattctgattgtcctaatcactttatgaaataattactaatcaatattgtgatattgcgaactcagattgtgggagctgcatcgaaatgtgacttcacggttgatgagaaagagcgtgagaagaatgttgaagacacatatgaggctcttcagtttcttgagaatgagctgacggacaagaagttttttggaggagaggaatttgggttggtagatattgctgctgtcttcatagcattttggatcccaatttttcaggacatagcatggttgccgttattcaccagtgagaaatttcctatactctacaaatggagccaagaattgcttaaccacccttttgtg

SEQ ID NO: 16408 - DNA, 477 bp, Glycine max
  Clone ID: jC-gmle01810091d06d1
acatatagctagtatcattttacatgaaattcaaacagcaataactcaacaagacacaagttgttcaacaaatatccttaaataagtctattttgaagcagaaagactttcatagcgggctttgaagtaggcaaaaagtgggtctctaggaggaaggacttcgtgcacaaaagggtggttaaggaattcttggctccatttgtagagtataggaaatttctcactggtgaataactgcaaccctgctatttcctgaaaaattgggatccaaaatgctatgaagacagcagcaatatctaccaacccaaattcctgtcctccaaaaaacttcttgtccttcagctcattctcaagaaactgaagagcctcatatgtctcttcaacattgttctcacgctctttctcatcaaccgtgaaaacagatttcgatacagcacccacaatctgatttcgcaaatcacaatatgtattagtaat

SEQ ID NO: 16409 - DNA, 533 bp, Glycine max
  Clone ID: jC-gmle01810091d07a1
atgttttctaaaattatatttaatctttttatgaggacattttttttttattgtaatgggttgactttatcttgtaaatcattgcatgttttatggtttattcaatataatgacatttaaaattaattttaaattttaaattagacaaaaaaatattcataaatttattattttaatgttatagtcatttttgtttcttggggtacttccgataaaattagaagtaatagtcactctgagtgaaacagaatggacatgggacatatatatataaacccgagagatcgggtgtataaatttttttacctttgatagagatgcagggcgaagataagagtgaggatggagatgaaaacgtgggatgagatatttatcatcatgctctattatgcatattgataattattacttataaaaacagctgaaacaattataaaaaccaaaacaattaaaatgactgaaacaaaataacaattgctgttcaaggtagtttctaatttctctatataaattaatgccctttatcttacact

SEQ ID NO: 16410 - DNA, 467 bp, Glycine max
  Clone ID: jC-gmle01810091d07d1
attggaatggatccttcaaaatggatattggacatataaagcccctgcaaccttgagaatttttctacataacttggaagctttcccaccaaatgattattgcttacattcaatacaacgactgatgagttaaaaatgttgcttgggagtctaccagtaaatctattatggctcaatatcaaggtctgcaaaccattagggatattcaaaataggtccctcaagcatattggttgaaagtttcaagaattggagtgggtgtccatctgctaatatgttctcaggtatttttccagacaattggttctcggaaagatccaatgaattcaatcagctcatttggcctaactcactaggaattgatccttggatgctgatcccagacaagtttagatattgcaaatttggataaattgaactgatattgctgctaggaatttggccatttacggtattgtccgacacgtc

SEQ ID NO: 16411 - DNA, 555 bp, Glycine max
  Clone ID: jC-gmle01810091d08a1
ctttatatccataataaccagaaagtggcatcaagttataggtatgtttgacatattgttcggttggtccaaagcttccaaatgtaagaaggcgatcaaacgagcccggtgccggctcaggctactcaagaacaagaggcaggcaatagcaaggcaactgagaaaggacttggctgagctaatacaaagtggccatgaagaaactgcatttaaccgggtggaacagcttatgggagatgaaagcttaacagctgcgtatgaattgttagatcacttctgcgaatttatccttacgcaactctcctacatccagaggcacaaggactgtccaaatgatattaatgaagcagtctctagtcttatatttgcttctgcaagatgtggggatcttcctgagctcggtgtcatcagaaagctctttggacagcgttatggtgagaggtttgcaactgcagctgtagagctatcaccaggaaatctagtaaacaaacaattgaaagagaacctgtcagtgaaatctgtgccggatgatatgaagtacagaatggggatgaa

SEQ ID NO: 16412 - DNA, 553 bp, Glycine max
  Clone ID: jC-gmle01810091d08d1
aattcgacgagctaactgctcggtggtcgcccttcgtttttttttttttgattggcaaccttctcatttttcttacagatagtaaaaattaaattgtaatcttacatggatgaaggccaaagaatatttagtgatatctaaaaacaagctcaaatactatttgaatgagtgattcaaaatttaatagggcagtattatacaaatgctgtatatatgcctgctctagttttggtccttactgcggtccatgttttccatgcgctctttcttgagagcagtgaacttggcagcaatgtgatcatagtctggcaacttaggatgaacatgaataggatgtggacaaggacatgaatatgtccttaacatcttatatttgctgtctctgtgcctctcttggggcattgtcatggaccttgaataggtagctactgcttatactattgttgaggaaccaccagtccttggattggaaactttgggagaagcagagattatttgtttcgccatattgtttccattaccagctaggcaatcctgtagttgaatacatgat

SEQ ID NO: 16413 - DNA, 576 bp, Glycine max
  Clone ID: jC-gmle01810091d09a1
gctcgagaataaagcatcaatctaaatcaattcatatctatttatatatgaattaatttataacgtaaacaaattaagagctctgaatcaataaaaactgagaatattgattcacgaaaaaacaaatcaatattcgaaaaaaaaaaagattattaattttaagatatgagaaaggctccattgtcgaattcagacctaaccattaatcgagaagtgatgggaacgacgaaacctgcaaatacttaagattttattaaaaacaaatcttaatgattcattaggtgggatggcggaagaaaccaaaaagcaatcctttttttaggagttgtgccctacattacatctgaatttgattgataataaaagagtaaatattcgcccgcgataattttgattttattgaattttttttttatttttgccaattctatttattctttctaataataaaaaatattctaataactaataataaaaaggaaaataaagattcattagaatattataaaataacatataatagaacagaacatgattcttttagtatatatgtaaaaacaaaaatggttttattat

SEQ ID NO: 16414 - DNA, 474 bp, Glycine max
  Clone ID: jC-gmle01810091d09d1
tggtcggcggccgccctttttttttttttttttttttttttttttttttttttacgttctattatatatatatctatctatattctatatatagatatattggttaggttatcaagtattaatctgaaataaataagaattgctgcttctaatacttataataattactacaaattctaataattactacaaaagggatatatgttagataaaatagattaattaatctatttcacaaaaaaataatgtatccatagcacagtttcgtcttataatacctcgggtgctaatgaaactattttagtgaaatttaactgtctcaattcccgggcgattgcacaaaagattcgagttccttttggatttccttcttgatcaatgacaactgcagcattatcatcatactgaattattataccgttgctacgtttgagttctttacaagtacgtacaattacagctctgatcacttct

SEQ ID NO: 16415 - DNA, 586 bp, Glycine max
  Clone ID: jC-gmle01810091d10a1
gaagaacagagcctcgctgaaaccgaagcgggcctggaaagttgggagcccaacggcgaagacgccggcgatgagagcttcgtcgaaccgccggaagaggccaagctcttcgttgggaacttgccttacgacgttgatagccagaaattggccatgcttttcgaacaggccggaaccgttgaaatcgctgaggttatttataacagggaaactgaccagagtcgcgggtttgggtttgtgacgatgagtactgttgaagaagctgaaagcgctgtggagaaattcaaccgctatgatatcgatggaagactgctgactgttaataaggcttctccaagaggaactcggcccgaacgcccaccacctcgtcgttcctttgagtcttccttatcaatctatgttggtaatttgccatgggatgttgacaatacccggcttgagcaaattttcagtaaacacggtaatgttgtgaatggctcggtagtctatgacagggagtcaggtcgatcacgtggctatggctttgtcacaatgtctgatgagacagaaatgattgatgccgtgctgctcttgatggcagagtttg

SEQ ID NO: 16416 - DNA, 335 bp, Glycine max
  Clone ID: jC-gmle01810091d10d1
ccccttccctattttaattgcataaataataccaaataacccaaaagaaaaaggcaacaccaaatttttccttatttccaatctcgggagtcaggaattacaacttaactttcatttggacattaagttactaacacccaaatccttaaatctaatctgaaattggccccccaaaaagggattttcctttaaacaaaatttgccactatggtatatcctcagcttttaaaaaaatgcaaaaaaactccagcagctgacatggggaactacatttgctaaccctcaaaaggagccccgccttggcctgtccttagcaacactcaccttaattgccc

SEQ ID NO: 16417 - DNA, 564 bp, Glycine max
  Clone ID: jC-gmle01810091d11a1
atctctggtgccattctctttgaggaaacactctaccaatccacaactgatggcaggaagattgttgacgtgctgcttgagcaaaacattgttcctggtattaaagtcgacaagggtttggtgccccttgcaggttccaacgacgagtcatggtgccaaggtttggatggtctagcctctcgctcagctgcatactacgagcaaggtgcccgtttcgccaaatggcgtactgttgtgagcatccccaacggtccctctgctctggcagttaaggaagcagcctggggtctggctcgctatgctgcaattgctcaggacaatgggttggtcccaattgtggagccagagatcttgcttgatggggagcatggtattgatagaacttttgaagtagcccataaggtctgggcagaggttttcttctaccttgctgagaacaatgtcctttctgagggtattctgcttaagcctagcatggctacacctggagccgagtccaatgacaaggccagtcctcagacagttgctgattacaccctcaagcttcttcacaggagaattccc

SEQ ID NO: 16418 - DNA, 484 bp, Glycine max
  Clone ID: jC-gmle01810091d11d1
aagtacacaactcatagcaaaaggtttattaagctgtaaaggtgcatttaaccataaacaaaaatagtctccaagactataaaaacattacattttagacaaattagtcttccacttcatcgtccgtcaacacctactgtaactgctggtgttgctgcctaacaagtatcatattcactgcaaacatcttagtaggagtagcttttgacgaacaactccttcttggcttcctcggattcaccctcaccagtgtacttcccaagctgagcgagtgagttggacttggcacggaatgcgagtgcatcttgtgctgccttcacgttctctgggcggcctccccatgtcttaaggcagtgttttggagggctctggcatacgagaatgacacgtgccacgggtttggagattggttcatggcattcaaattgagggtagcttcaacctcagactgtccaccagacaaaaacataattccagggacagc

SEQ ID NO: 16419 - DNA, 508 bp, Glycine max
  Clone ID: jC-gmle01810091d12a1
cgccctttctatcctacttgcttgtggctgatgtgattcatgtcactcatgctgcagtggcgacagtaagtcaggttgggaataatgaagctgccaccaccttgatgcaaagattttgggattcagccatggccttaaccccaaatgatgatgacgatgatactcgaagtgagggttcgctgaaagtggcttctgagggaggagaaacagggagatccattccttatctttcatcaagcattgccaatacattttccttcaaaatacaagataagacgggcagaatgcacagattcacatgtggtatgcaaactatcacatgctaccaatcagatatttatttgcactttccttctatccatgacagcatataactcatggtttcaatatacgctcgtatatagctctttcatggatacactcgaatatgattggcttgcatgctcattgataggtacggatgtagtaataactaataggcaaactttttttctcagcttttgtttgc

SEQ ID NO: 16420 - DNA, 395 bp, Glycine max
  Clone ID: jC-gmle01810091d12d1
cactcaaatctcattgataaactataaacactgtgatcacataagatcattaacccaataaattcaatcctggtcgattgattttatgaactcatgatgtcagaaaaaatggacagagctgcttgttactgtacacagtctccagggttgatgaggctgcaaatcctaaaattacaagtttacaagcagcaagggatgaccatcccaattttcagaaagcacaatatcaagcaggagcaaaaaaatgctttaaccttttcctcgtatatataaatgtagttgtacaatattttagaacataaagattgccagccgagagctcgacctttcaaaattgaagctaacttcaggttggcctgttcactggcataactggtttcttcatttaatcaaac

SEQ ID NO: 16421 - DNA, 536 bp, Glycine max
  unsure at all n locations
  Clone ID: jC-gmle01810091e01a1
gccccaatttcgctataaaagctctcgattccgacgcagcaaatcaggaatcagttcacgttgggaaaaatgaaagttaccagcaatgggattcgcttaccgccaaattctccgctgccgccaattttccctttctgttactgcaaatgcctcaaatcatactcaatgctcgaaatctgttatcgggaaataaactcgctctctccgctgtcccctggctgggaatgctaactagtttgcttggaaacttgtctctgctttcatactttgccaagaagagagaaaaggaagccatggtagtgcagacgttgggtgtggtttcaacatacgtggtccttgttcagctggcattggctgaaaccatgccgttgccttactttttggctacttcagttgttgtcatctctggccttgttctgaatttcttgaattactttggtatactgaatgctggaatctggcgcttttgggaagatttcattacaattggnggtttatcagtgcttccccaaatatgtggtctacatttgtcccct

SEQ ID NO: 16422 - DNA, 376 bp, Glycine max
  Clone ID: jC-gmle01810091e01d1
gactggcaattcagaagatattgcgaaataacattcaccatagcgtgatagaactatacaatttaatatgtaataatgctcataaatatgcacactctaaacatcacgtacgaagtaggaactcatcaaggaaagaaggccaacattgcacagatgagatcagctatccaagttctagcagctaggaactcatcaaagataattaacgataaatgattaaaaaaaattcctcaccaggtacgcattctgatactacatttccacaataatgaatacaaaggtacttctctcataattctgctagcacttgattcacatttgctgatttaacaagactgattgatggttcgtgtttctcatctctagcaaggaactg

SEQ ID NO: 16423 - DNA, 360 bp, Glycine max
  Clone ID: jC-gmle01810091e02a1
ctcccaatttcgctatacaagctctcgattccgacgcagcacattacgactcgagctgcgtcgtgaaaaatgatagttaccagtattggtatgctctgacggtcaaagtttccgatgccggtaattttgactccctgttactgcgaatgcgtcatatcgtactcaatgccttaaatcaacacctcgaaatatactaagtgtatacgttggcccttggctcggaatgcttactagttggctcggaatctcgattttcatgttatactctgtctaaaggaaaggatgggaagccatgtttatccaccttttccatgacattgcaacctacgtgggcctgaattaattggtatgggatggaac

SEQ ID NO: 16424 - DNA, 400 bp, Glycine max
  Clone ID: jC-gmle01810091e02d1
agactcaagtcaccagtttcgatattggctaggtttttgaaattaaagaaaaaaaaaatacaagattcacaacacaatcttgtttttcgttctggtttgacaacaaattattcattcaggtgaagctcgaaaaatcctacatactccacatacgagcaaaagacccaattaaatcagagataagaacatatcacagaaaagccgggccttaaggtgttatcttaagcctaagcagcagtttgtgttacatttcctattgttttccgatcaaagatttcaatccagtatccatcaggatctttaataaatgctatacctttcattttccccttgcatatgcaaagaggctgtttccggattcgaacccatgaccaacaagtcaccaaggcacaactttacc

SEQ ID NO: 16425 - DNA, 553 bp, Glycine max
  Clone ID: jC-gmle01810091e03a1
gcggtgtttctccgagttgcttcaattgaatggctcttcagcttccaccacttcctggccgtgccatgcgcttcaactcaagcgtgtgctcccttcctgcacgaaaatctagcacctttgccactctgtcacaaccccgaagcgactgggttgaagccactaacagtttcttcgaccaagacaaacgacccatcatgttatttgacggagtatgcaacttgtgcaacgggggtgtgaagttcgttcgtgataacgatcgaaataagacaattagatatgaacctcttcagagtgaaacgggtaaaatcttactcaggagatcaggaagagctcctgatgatatctcaagtgttgtacttgttgaaaaggaaagatcctatattaagtcagaagccgtgctgaagataatggaatatatagacttaccctttccacagctagcaattcttcttcaatttgtgcctctggttatcagagattttggttatgacaatgttgcaaacaatcgttacctgatttttgggtcgttcgaatcatgtgaaatatagcatca

SEQ ID NO: 16426 - DNA, 502 bp, Glycine max
  Clone ID: jC-gmle01810091e03d1
aagttagaactacatatatttcattgaactagtcgttcaaatctaaggatttgttttgtagatatacatacttacaatacaacaacccatttctacttgatattctctaactagccatacaacagatattcggagcctacacaagttagaggttgttagcaaactagcacggcttttggaaggcaagcctggccatcaattgccaagtctgggccacatccaaatcaccaaggactttaaaacccaacaaccccttacttatcctacgcaatatagagcatatgttcattatttccttctattccccgtgcttgcataatcgtccatggttaactgcttgcgcttcttcaaagaagatggactctctgtctgtcttgccaaagcacgcttcgatggggtcatgcttttggcaagtttcttgtctttgcgagcttgtctatccctatcatcatattcttggttttccttttctaccagtcgaatgagggtagtacacctacta

SEQ ID NO: 16427 - DNA, 485 bp, Glycine max
  Clone ID: jC-gmle01810091e04a1
ggccattggtcatggcaactcgaagactttcattgctcctctctcgctctctatcttccacttcttttcaagctgcttctctacttcactcactagggagaaactctggcaagtggggaaactttaacagattcagcactgcagcagcagttgaggatttaatcactccacaagttccaataacatacactaagcatctgataaatggacaatttgtggatgctgcttcagggaaaacttttccaacacatgacccacgcacaggagaagtgattgctcaagttgctgaaggtgatgcagaagatatcaaccgtgcagtatcggcagctcgcaaggcctttgatgaaggaccttggccaaaattgactgcttatgaaagatgcaagataatactgcgctttgctgatttggttgagaaacacggtgatgaacttgcagctctggagacatggaacaatggaaagccttatgaacagtctgccact

SEQ ID NO: 16428 - DNA, 467 bp, Glycine max
  Clone ID: jC-gmle01810091e04d1
gaatggtgcaaaatttatatcctacagcaacagtgtcattacagtatccaagtttgtgtttgagcaattaacaagtgaaaaatacataaattcaactggtataatgttcaggtacctaatcaggttttatcttagtaacatcacattatttattgcatgccattgcctcagcggaaaaagatgatagccacgtaggatttcggtcatagcagtttgagcaattcacaaatcacaaccatgcaggtttcttcactggtgaaaccacagctttcacttgcaggtaattgttgagactgtagatacccttctccctgccaatgccgctcattttgtaccctccaaagggaattgcagcatcaaaaacatcaaagcaattgatccatactgttccaaccctcagtgctcgcatcaaagtgttggctgtgtgcacattcttagtgaaaactcctgcagctagaccatagtgc

SEQ ID NO: 16429 - DNA, 510 bp, Glycine max
  Clone ID: jC-gmle01810091e05a1
gttggaaagtatgagaagaggatcgacgacatcttgaacaagttcgaccctgtcgttgaaagggtcatcaagaagcgccgtgagatcgtgaggaggagaaagaacggagaggttgttgagggtgaagtcagcggggttttccttgacactttgcttgaattcgctgaggatgagaccatggagatcaaaatcaccaaggaccacatcaagggtcttgttgtcgactttttctcggcaggaacagactccacagcggtggcaacagagtgggcattggcagaactcatcaacaatcctaaggtgttggaaaaggctcgtgaggaggtctacagtgttgtgggaaaggacagacttgtggacgaagttgacactcaaaaccttccttacattagagcaatcgtgaaggagacattccgcatgcacccgccactcccagtggtcaaaagaaagtgcacagaagagtgtgagattaatggatatgtgatcccagagggagcattgattctcttc

SEQ ID NO: 16430 - DNA, 491 bp, Glycine max
  Clone ID: jC-gmle01810091e05d1
aatataaggattgatagtttatagtagatgatgtgattcaaaaaaaaaaaaagattgccttaggtagcaaacgaagacaaatgggagatgatacaatgtgcatggaagggcttatatacttcataaaaagtagatgaatgagaccttattgaaatgatgattatcaacacacaaaaagtaaatattacatatgatgatgatgacgatgatcttaattaagaaaggagtttagatgcaacgccgatccttgcaagtggaacacagacaagactatgtgcccttggaacagtgaggccggctctctcttccatgctaactttggcgtcaccacccttcaatatctgtccttgtggacccagcacttgcaagtcgaagcactgaataagagatgcaagaagtgttgccattcccgaagtagccagattgactccagggcacattatccttccagacccaaatgggagaagttgaaaatgttgtcccctaagatc

SEQ ID NO: 16431 - DNA, 524 bp, Glycine max
  unsure at all n locations
  Clone ID: jC-gmle01810091e06a1
gcggcttccaccgcagctatgtcagaaatgcttggaaaccccgtgagcctgagaggcgccaccaggtctgctccatcaccgtctacacctgttactttcaagaccgttgcgcttttctccaagaagaaagcagcaccaccttctccaaagaaaaagcctgctgctgtatcccccgccaatgaggaactcgccaagtggtatggtcctgacagaaggatcttcttgcctgagggtctcttggaccgatcagagatccccgagtacttgaccggagaagtgcctggagattatggttatgacccgttaggtcttagcaagaagccagaggacttcgccaaataccaggcgtttgagttgattcatgccagatgggcaatgcttggtgctgctggattcatcattcctgaggcctttaacanatacggagctaactgtggtcctgaggctgtttggttcaagaccggagctatgcttcttgatgggggtacgttgaactacttcgggaaacccatccccatcaatct

SEQ ID NO: 16432 - DNA, 502 bp, Glycine max
  Clone ID: jC-gmle01810091e06d1
aaagtaaaatgccttgagttttatatagtaagatgtattgtacatttaagagtggagaagaacataaagatgattgatttacagagttggagccctctcaacggagccagcaatcacagtgagcaggttattaccaaaagggtcactgagatgttttgctaagttctcaactggaccttctccagtgacataagcttggaagtagaaaccaagcattgcaaacattgcaagcctaccattcttaatttccttcacctttagaagtgcagcttggtctggatcctttgctaggcccaatgggtcaaatggaccacctggatgaagcttgtcttccaaatccaggccattaattattctgtagtactcagcaccacccacaagaactatctcagcaacaacagcaacaataagattgatggggatgggtttcccgaagtagttcaacgtacccccatcaagaagcaaagctccggtcttgaaccaaacagcctcaggaccacag

SEQ ID NO: 16433 - DNA, 539 bp, Glycine max
  Clone ID: jC-gmle01810091e08a1
attaggttaagagtgaagacacagagagcatagtaatacttactgagtgcttgcagttgctgcgtcgcaaggtaccggcggcgacggagagctatcttctcaatttccgatcactgcattggttctgttgacgagggttttgttctacttgacttgcatacttgatggcgtcaaagttgcagaagttgcagtccgcagcatgtcacgcatctcaatttgtatccagtcgtggaactaactactacaggcaattgctggcacagaacacgcaacacattcaggagcctcctacagtagagaaatgcaacctgctggcaaagcaattgttttacacccgccttgctagtattccgggtcgcaatgagtccttttggaaggaacttgattatgtcaagaatttatggaagaacaggatagagctaaaggttgaagatgcaggcattgctgctatgattggcctggaatgctttgcatggtatagtggtggtgagattgttgaaagggatctactttcaccggttactatgtctaaataatac

SEQ ID NO: 16434 - DNA, 519 bp, Glycine max
  Clone ID: jC-gmle01810091e08d1
ttcgtcctttttttttttttttttttaaaaagcatgacaaaaatgttaaaagaattgcaggagtatcatcactgtggagtaccatcactagctttccaacatgataaaagaacaacacaaggttcatcccgctttcaactacaaggggttattgaggcttatcataacaaaaattgccatgcagaatgcaataatccacacaatgtataaatgaccagagcagttggctttaggagtatatggccctgataaaatctacactttccaagtggttattattagacatagtaaccggtgaaagtaaatccccttccaacaatctcaccaccacaataccatgcaaagcattccaggccaaacaaagcagcaatgcctgcatcttcaacctttagctctttcctgttcttccataaattcttgacataatcaagttccttccaaaaggactcattacgacccggaatactagcaaggcgggtgtaaaacaattgctttgccagcaggttgcatttctctact

SEQ ID NO: 16435 - DNA, 345 bp, Glycine max
  Clone ID: jC-gmle01810091e09a1
aaaatcccttgatttccttccttcaccgcacccacttatatctcttaaattagttttccaatgcagaaagcagggtacggtggcgatggaatatacaggtctctaaggccttgtttggttcttccaaatgaccccaacctctccctcgtctcattcctcttccaaagcgtttcctctttcccatccaaaatcgccctcgtcgattcccactcttcccaaacacttaccttggcgcacctcaaatcacaggtcgccaaacttgcccacggtttcctcaaactaggcataaacaaaaacgacgtcgtcctactgctcgcttccaacagcattcactaccctatatgc

SEQ ID NO: 16436 - DNA, 524 bp, Glycine max
  unsure at all n locations
  Clone ID: jC-gmle01810091e09d1
cgggctatcgtcgaatacggaattggttcgacagctactagtcggtggtcggcggccgccctttttttttttttttatcactcaatcataacttgatataaatattaagtttgttggctattacaacaatcatctcaaaaatcatactactatgatacactatagtgtatatatggaaatttaacttgtaaaatttttgtttcttattttaacattttttctaacttcaaaagaagaaaatttagttcacaaacaccagatgcaaaggaatgctagtataatctggactatggagggattattgcatggttttaattttaaacttgattgggtatatagattaatcttgcaggatgcactgatgcgcgcactcctaattttcaatatatctcagaaattgcttgtccaaaaagaatgtaatatattatattttggatcgtgcttttgcagtaagctctcttctgagaatctttcctgaagctgtcttaggaacattgntgatgaatgttacccttcgcaatttt

SEQ ID NO: 16437 - DNA, 492 bp, Glycine max
  Clone ID: jC-gmle01810091e10a1
ctcgagaaataattagagagagagagagagagagaggatatgggttcgaagaggtatgcgctattgatgtgcggtgaggattcggagtacttggtgaagatgcacggaggcacctatggggtattcatgaagttgctccaagagcaagaggaaaagtgggacctctacaagctcgtccaaggagagttcccggagcagcatgacttgcctctctacgatggctttgtcatcagtggaagctgctatgatgcacatgccaatgacccatggatccttgacctcattgctctcgttatcaaattggactccatgcacaagaagatccttggcatttgctttggccaccagataattgggcgtgcattgggaggaaaagtgggtcgctctcccaatggttgggacatttggtgctaaagctataaacgtgtcatcatctttacccttggctatctcatctcttaagctcccatcacagctttccatttacaaatg

SEQ ID NO: 16438 - DNA, 524 bp, Glycine max
  Clone ID: jC-gmle01810091e10d1
ttcgtcctttttttttttttttttttttttttttttttttttttttgaattagaatgaaaaaattagataattcttgtggaataccggggcattgactgcacccatagtcattgttcataatggataccaacctagcaatagcatggctaacattaggcaaaggccacacgcagcccaagtgttgcttcttctaattaataaaaacccttttacacaataataatatctcaaaaatattatttgtctattcatattgaattgtcagtcacaatcgaccctttaaaaaatcaacgcacaatcttttcaatatctctttatctggctcttgcgatgccgccttaacctttgcatccacagcaaacgcttcctggaccaaatttcgctgaataatacggtcaataaagaacaagagaaggtcataggtgaattccgggtggccttggatgccaaacatgtggtctccatagctaaacatctcaactccagtcatttctgaccaagcaatcacctctgcttttgaggg

SEQ ID NO: 16439 - DNA, 503 bp, Glycine max
  Clone ID: jC-gmle01810091e11a1
atttgcttaggccattggtcatggcaactcgaagactttcattgctcctctctcgctctctatcttccacttcttttcaagctgcttctctacttcactcactagggagaaactctggcaagtggggaaactttaacagattcagcactgcagcagcagttgaggatttaatcactccacaagttccaataacatacactaagcatctgataaatggacaatttgtggatgctgcttcagggaaaacttttccaacatatgacccacgcacaggagaagtgattgctcaagttgctgaaggtgatgcagaagatatcaaccgtgcagtatcggcagctcgcaaggcctttgatgaaggaccttggccaaaattgactgcttatgaaagatgcaagataatactgcgctttgctgatttggttgagaaacacggtgatgaacttgcagctctggagacatggaacaatggaaagccttatgaacagtctgccactgctgaatta

SEQ ID NO: 16440 - DNA, 443 bp, Glycine max
  Clone ID: jC-gmle01810091e11d1
gtgtgaatggtgcaaaatttatatcctacagcaacagtgtcattacagtatccaagtttgtgtttgagcaattaacaagtgaaaaatacataaattcaactggtataatgttcaggtacctaatcaggttttatcttagtaacatcacattatttattgcatgccattgcctcagcggaaaaagatgatagccacgtaggatttcggtcatagcagtttgagcaattcacaaatcacaaccatgcaggtttcttcactggtgaaaccacagctttcacttgcaggtaattgttgagactgtagatacccttctccctgccaatgccgctcattttgtaccctccaaagggaattgcagcatcaaaaacatcaaagcaattgatccatactgttccaaccctcagtgctcgcatcaaagtgttggctgtgtgcacattcttagt

SEQ ID NO: 16441 - DNA, 571 bp, Glycine max
  unsure at all n locations
  Clone ID: jC-gmle01810091e12a1
ctcgagccgaaaaaatgctgccaatggttattcgaatgcaaaacgctgtgaaagaccatctgattttgtcaattttcttcgagaagcgttgaccaatgttataaacaatctgaagaagtcagagaagttgatctcaaatgagatgacacaagggaaaattggaaatatgatctacttggtgtttgacaattttcagcttgttagggagtgggataagagttcaactatattgcccttgctgtttaatctctatgatctgctaaatatgcctgaggtgggtttgatttttatcagcagtacttctccagataccttttactctaacatgggttatgtggagcctatccccatttactttcctgattacacagaagaagatattcgtcatatattattgagaaaccaagtgaaccagaagctatattcctcatttctggatgtatctctgaagtctttctgtggaattactaagcagattgatcatttatctgctgccttaangccactatatgaaaagtatngtgagcccttaagtgattagggaaaggagtngctnctaatcaagaaatga

SEQ ID NO: 16442 - DNA, 476 bp, Glycine max
  Clone ID: jC-gmle01810091e12d1
acttagttcttaatacgttatgatgtattcaaatccaagtaaaaatgttaccgaaagtctacaactcagcattaaaccagcaagatgtcagaaagtattgtctattcccccacattaaacatcatcaaacctggggcattcctttcttttaggacatcaacggtgttaacacaaattttgtgtcatattacaattttatatcagctaagagcatcataatttcaggatctttaccacttacaatccacaatactaaaaagcttcttggagaaatgttaaagacacggagtaataaaccaaatcctaataactccattgtccattgtaaaatactcagtccatccatcccatgaactgccatggtcacaattatccattttaaaccattggtttggcttcaagcattcataggggatttcggacgtttcatgtttgatacactagagaacagtagaggtctatacactcttggcaga

SEQ ID NO: 16443 - DNA, 556 bp, Glycine max
  Clone ID: jC-gmle01810091f01a1
ggccactgctggtgatactcacttgggaggtgaagattttgataacagaatggtgaaccattttgttcaggaattcaagaggaagaacaagaaggatattagtggaaatgccagagctctgaggaggttgagaacagcatgtgagcgggcaaagaggactctctcttccactgctcaaaccaccatagagattgattccttgtacgagggtattgacttctacacaaccattacccgtgcccgttttgaagagctaaacatggatttattcaggaagtgcatggagcccgtggagaagtgtttgcgggatgccaagatggataagagtaccgtccatgatgttgttcttgttggtggttctactaggattcccaaggttcaacagttgttgcaggacttcttcaacggaaaggaactttgcaagagtattaacccagatgaagctgttgcttatggtgctgcagtgcaagctgcgattctcagtggcgagggtaatgagaaagtgcaagatcttcttttggtggatgttactcctctatccactggtttggagact

SEQ ID NO: 16444 - DNA, 545 bp, Glycine max
  Clone ID: jC-gmle01810091f01d1
aggttcaacaaatctatggtgcgcatcatttatttattttactattttttcttctgcatcgggatgacatcacttttagtattcttcctctgcttatatatttctaaatattatttaatattacatcttagtctaactgtgtctatggtttttagacacattaaatctgcaaagtgtgtaaaatggtaagaatggtatatttgatcacggttcatcgggccaatcagtagggtcgtcgccttcatagaacaaaccatctacgatttggtcaattacggaatcgatgaatgcgttgcagctgacggtgaagattcgaccaactctgtttcgagcactggagaaccatgcaaagagtgctgcacaagttactgcacccaaacacaccccaccagcctctgtgattccttcaatgtccatctttctgaacatagagtttcctgtcaccatttccattgtcaccgtcgctgcaaacaccatcatagctagacgaccagagatgatctcaaaatcatgacttttcttagagctctcatatagtcggaaag

SEQ ID NO: 16445 - DNA, 591 bp, Glycine max
  Clone ID: jC-gmle01810091f02a1
tcggatgttcccttgatataatttctccgtatcatttgtacttgaaccctagattggtggtgaagcaatatcagttttggcgtctggttactaatttcttgtactttcgtaaaatgggtaaaatttctgccgttcaccatttagtgaattgttattcatcagatacgggtatttcaatttcagttttaatgtagaaaaagtctcgatttttttttatgctcacatgtttggggcattcttttgctgatgccacctgtgaggaactcattttatttttagtttaggtagatcatgtactaaagtcccccgctcttgggtagttacacttacatatgtatgtgataatgaatattgatcgttggtaaatggggagtgtggacatttttaagcatcatgaatttaatccttacatgatgaaaatcagtaaatcacattacgagagcaatttcattaataaattgtaactgttttcagagggagcactagtgaagaaaggctattgctatagatgggtggtatacctacattttggcaaaaggggtcaatccgattgcccctgactaatcataagagatatgactatggacatga

SEQ ID NO: 16446 - DNA, 326 bp, Glycine max
  Clone ID: jC-gmle01810091f02d1
cttgtattattttttactttgatattttgtatttttctgtttgttgtaagagctctaagtatttttaacctaaagagttggacacgccgatactgtatctttgaaaagccacgaactttctccagaacaccccgacaaaaacaatgggggagacaaagcagaagtcaaatgcccaccgccgagggcactgcaaacagcgggagaagacggaccctgggaacgaccaaaatctgcatcacaacgtggtacgccccctctagactggtgacacgaagggcaccgcacaaaaaaacggggcccccgcatttcaaaaggcccacccgatg

SEQ ID NO: 16447 - DNA, 485 bp, Glycine max
  Clone ID: jC-gmle01810091f03a1
gcatcaaagggagaaactgggagacacagaagatgagagagataattagtattcatattggacaagctggaattcaggtggggaattcatgctgggagttgtattgccttgagcatggaattaaccccgatgggaccatgcctagtgacacctctgttggcattgcacacgatgctttcaacaccttcttcagcgagaccggattcggcaagcatgtgccaagggctttatttgttgatttggaacctagtgttattgatgaagtaagaactggtccttacagacaactctttcaccctgagcaattaatttctggcaaagaagatgctgctaataactttgcaaggggacactacactgttggaagagaaattgtcgaactatgcctcgatcgtatcagaaaattagcagacaattgcactggtttgcaaggattcttgggtttcaatgcttgtggccgtggtactggttctggtttgggatca

SEQ ID NO: 16448 - DNA, 465 bp, Glycine max
  Clone ID: jC-gmle01810091f03d1
catcataaagttttcagtttatcatggtaccattcctatgacaaattaactacagaaacaaattcaagcttccagtaacatctaatgaaatctgaacaaaattttgaaagtaaatagtcaaagctaaatatgcatgcagtttctccccaaagcaggagctaagcacaacaaagtgtgtttgatctactattctcccaagaggatgtatagaacatgaacataacttatgctacctcacaaacctagccacccactcagaaaattggtttagcagctccttccacatctaaacttttcaaaaaagatagatgtacccaagcacagcctacaggaggactagcaaggtggcagctgcagcccatatcaggtaattgttagacttcttccgcttaataatagcttttggaatcgagtccgggcctcttgctcggcccctggacctgatgccactctccttttggacct

SEQ ID NO: 16449 - DNA, 521 bp, Glycine max
  Clone ID: jC-gmle01810091f04a1
gcgaagttgttgcaggttcattatgataagttttggttgattggtgctgcggctacttacgagagttacttgaaattcgtggggaagtttccttctatagagaaagactgggatttgcagcttctgcctattacctctgttaagcctccttctgaatcctatcaccgtcccaggtccagcttaatggattcatttgtaccgtttggtggctttttttcgtcacagtctgatttgaaagctccactgaatagctcgttttattgtgttccccactgtcaccagtgtggggaaaggtgtgaacatgaagtccttgctgcttccaaggaaaggttttgtgcttcttcagctgctgatccgcatcaatctagcttgcctccttggttgcagattgcagaatttggctcaacaaaagggttgaatgttaagaccaaagataatggtgttttgctcgatagtagtgaatctgggccactgcataagaacttagacaagttatcccagcatctgctccatcgagatgc

SEQ ID NO: 16450 - DNA, 507 bp, Glycine max
  Clone ID: jC-gmle01810091f04d1
gaaacaaagaaggcatttgatttaaacatgcaagggataatcacacaaagcactagctgcagattacatattatacacagttaaaacctagacaaacaaacccaacaaaataataggattgaaggctaaattagtttcactatatgctacagctaaattatacatccatacagaaaatagaacatttgctggtttgaattcaatctaaaattatccttgagggaaggtgtacaccagcagcttgctcaggacacgtagcaagttttacaatagaactagcagtgaggttgtaccttctctgtatttctgtaaatccttcacatagaacttcctccacccagttctccacctccgtatcccggtctgagacatattgagctgcaagaaattggtccatgacttctggctggatctgcaatgcacacttggatccgagaattttggtgaagttacttctgatcactttcaacactctatctgcaagagcatcaaaatcatagggttaaa

SEQ ID NO: 16451 - DNA, 462 bp, Glycine max
  Clone ID: jC-gmle01810091f05a1
gtgtgtgtgagagatggttatggcttcgtggaagaagctggtgttgttgttgttgatctttctctgcacttgtaaagcacaggaggaacagagctccaccccggtgtacctgtaccataactgttccggcggcaacaccaccgccaacagtgcctaccaactcaacctgaggaccctcctcacttccctgtcttccaacgccaccaccaccgaattctccaacaacaccgtgggactgggaacatccccgtccgacagggtgtacggcctgttcatgtgcaggggtgacgtgccctctgctctgtgccaacagtgcgtggtgaacgcaacggggcgtctacgctcccagtgctccctggccaaacaggccgtcatttggtacgacgagtgcaccgtgcggtactcgaaccgctccttcttctcacagtggacacgcggacacgtgtcggcctactgaacacc

SEQ ID NO: 16452 - DNA, 527 bp, Glycine max
  Clone ID: jC-gmle01810091f05d1
gcataatacatatattttatttagttgaaaaataagcaactataatacaaagtgttccaaggtttcgtcatttaaaactaggagaaataagtacatggataataatacatattagaacctccaagcgatcaagcttatcgaggatccatttcgctaatcgacatgtcattcacagacattggtattgattgatcgaatggcagctcctttggcatgtttggatcagttccactgtggacgaaaaatgcaggctgcgtaggagttggtagagtaacagtgttactgtctagcataagaactattgttgccattgtgggtctgtcagctggatcttcttggacacacaacaaaccaatatggatgcttctgatgacttcattctgattataggattctcttaatatggggtccatcagttccaaaggtgttccatccttccaaagttgccaagcatagctcaatagatcctcagcaccatccgtttgatagaaagagctattcttcttgccacttaaaatctccatgag

SEQ ID NO: 16453 - DNA, 514 bp, Glycine max
  Clone ID: jC-gmle01810091f06a1
aagcagcctggggtctggctcgctatgctgcaattgctcaggacaatgggttggtcccaattgtggagccagagatcttgcttgatggggagcatggtattgatagaacttttgaagtagcccaaaaggtctgggcagaggttttcttctaccttgctgagaacaatgtcctttttgagggtattctccttaagcctagcatggttacacctggagccgagtccaaggacaaggccagtcctcagacagttgctgattacaccctcaagctccttcacaggagaattccccctgctgtccctggaattatgtttttgtctggtggacagtctgaggttgaagctaccctcaatttgaatgccatgaaccaatctccaaacccgtggcacgtgtcattctcgtatgccagagccctccaaaacactgccttgaagacatggagaggccgcccatagaacgtgtaggcagcacaagatgcactcgcattccgtgccatgtccaactcactcgctca

SEQ ID NO: 16454 - DNA, 495 bp, Glycine max
  Clone ID: jC-gmle01810091f06d1
agtacacaactcatagcaaaaggtttattaagctgtaaaggtgcatttaaccataaacaaaaatagtctccaagactataaaaacattacattttagacaaattagtcttccacttcatcgtccgtcaacacctactgtaactgctggtgttgctgcctaacaagtatcatattcactgcaaacatcttagtaggagtagcttttgacgaacaactccttcttggcttcctcggattcaccctcaccagtgtacttcccaagctgagcgagtgagttggacttggcacggaatgcgagtgcatcttgtgctgccttcacgttctctgggcggcctccccatgtcttcaaggcagtgttttggagggctctggcatacgagaatgacacgtgccacgggtttggagattggttcatggcattcaaattgagggtagcttcaacctcagactgtccaccagacataaacataattccagggacagcagggggaattc

SEQ ID NO: 16455 - DNA, 555 bp, Glycine max
  unsure at all n locations
  Clone ID: jC-gmle01810091f07a1
cagcttttatggacaaacttgttgttcacattaccaagaacttcatgaccctgcccaacatcaaggttcctctcattcttggtatctggggaggcaagggacaaggaaaatctttccaatgtgagcttgtctatgccaagatgggaatcaaccccatcatgatgagtgctggagagttggaaagtggaaatgcaggagagccagcaaaactgatcaggcagagataccgtgaagccgcagacttgatcaagaagggaaagatgtgtgctctcttcatcaacgatcttgatgcaggagctggtcgtcttggtggaaccacccaatacactgtcaacaaccagatggtgaatgccaccctcatgaacattgctgataaccccaccaatgtgcagcttcctggtatgtataacaaggaagagaatccccgtgtgcccatcatcgtcaccggtaacgatttctccacactctatgcgcctctcatncgtgatgggcgtatggagaattctactgggcaccaacaggcatgaccgcatggtgtctgcactggaattttcg

SEQ ID NO: 16456 - DNA, 386 bp, Glycine max
  Clone ID: jC-gmle01810091f07d1
aggacaaaaggaaaaggccccaaattcaatttaagtggacacttttactcaaaatttttacggaaaacattcccatttgaaaaatctagggaaatcctttcaaacttggcattttttctttgcccctaaaacattgagaatttttaaaatgtttcccccaaattccatataaacttttagcacttggatcagcacaacctttaggaaccgaaatttttacttgccaaatttgctttggctccaattcaaaattggaaaaaagttcccctgttaatagcatccttgttaggatttccaagggcagccttgtttaaatacttgtgaacccattggactcttttgacattctcttgttcttggacaaactttttaccataccttaaaaa

SEQ ID NO: 16457 - DNA, 470 bp, Glycine max
  Clone ID: jC-gmle01810091f08a1
ctgcaatgcatgtgggagctatagaaattatcattgatagtttcgcaagtcctgactgcaacatagttggtgcaatgcttttggttgatacttatcataccaatcctgaaaatgcagatcgtagtattgttgttgcgcctttcagaggcggacggcccattctggtggctacatagccgaataccatggtgcagattgaaccagacatgaagttaaggtttcagcttctgagtaccactacctatggtgattttgttcaaggaaaagatctctccatggttaaagttaatgcaggatgtgctgctgttggcttgacatcaagttacactgtaacttcattggtggaatctgctttgcaaaaagacatagggttaattgaggagtattttggaaggactgtttacgttgctcacaacgttaatcagccccaagagaaagatttgacggagggaaatttttccttcgatatt

SEQ ID NO: 16458 - DNA, 398 bp, Glycine max
  Clone ID: jC-gmle01810091f08d1
aaaataacacacacttaacacataattcccacaactaaaaaagggggggaaatttccaaataggcagaccttactcaaccagaggggcatgaccaaggtcctttattgaattaaacaaaccaacaatcgaaagaaaacacaaattccatatcatgcacaggatcccccatttccaaaaaacctggcagcaccctgtggaacacaaaaagctggcataaaaattttacctgcaatttcaagctcttgaaaaattccccaaagaatttcaaaacccgcaaactgtttgggcctggcaatcaggaaactgaagtgccctgaacattgatttgcccacacaaaactccacatttgaaaaccatgtttaggaccccatacctctattgggaagatcaattccc

SEQ ID NO: 16459 - DNA, 503 bp, Glycine max
  unsure at all n locations
  Clone ID: jC-gmle01810091f09a1
gtttctgttcttctcaatttgtttgaatttgtataaacttagcaattttctctgctcaccaagccgttggtttctcagtgctcacgccaaagatcattctttcttcttctgagtacgtgcacagtgaatttgattgaagaatggcacaagatattgctactccaccagttccttttgattttgaactcttggttggtgatcaccttagaactgtcacagcctcatccaacagcagcaggacagacccatggattgaacctgaaaggttgaaactcagacacaggattggtcggtgaccctatggagatgtttggttagcaactcatcatcaatcaactgaagattatgatgagtatcatgaagttgctgccaagatgttaccttcaatcagagaggaacatatgaagactgcattagagaaattatgtgaattatattttcagtgcccaggagcggctagggtgtgctggctacttggaanttcaattttaaatggaaggtta

SEQ ID NO: 16460 - DNA, 472 bp, Glycine max
  Clone ID: jC-gmle01810091f09d1
acattcagtgttggccccgttggcatttatgtataattacaaatttacaattctcaagtgatatgtttgtcccaacaacagcatgatagaacaggttaatattgagatagaaggggtaaaactagcgaccattagccaagttaacaccttctctggaaaagatgttagccactgaagatgtccatgtagggctagcattctggttatctgtataatgactttcactatccattgcattagcattcatgttcctcccaagtttctttccaattgacattcctagtttcacagcagtaagaaagccaaatgcaatcagaacaggtctaactgcccagtggtgatcctctacatgttgatacttctctatcatcttcggacaattcttaaagttaacgacatcaacctcggagggatcagccaagacagttcttggtgcatcccaaaagttcaacatgccttgaaacttgacaac

SEQ ID NO: 16461 - DNA, 474 bp, Glycine max
  unsure at all n locations
  Clone ID: jC-gmle01810091f10a1
ctcttctcctgaatcatatgcagtgcggattttggtccgaatcggtgaatccccaaaatgggtaacagcagaaagaagcaccgtcgtgtgcaagactcgccgtcttcttcatcctcttcgtcctcggactccgaccactcttcgcggcggcggcggcggctgaggcggcgcgagaaggagcggcgcagaaagagcgagggaaaggatgagcgaaggagtaagaagagagacaaagagcgcaaaaagaagaagaggaggctccacgattccgatgactcctactcttcggaggagggggaacacgaacaacctagggttcagcctgaaactgtcttaaccgaaatgatgaaagagtttcccgatgtcggcaacgatttgaaacagctcttgcaaatgattgatgatggacaagctgttgacatacagggtatatcagaaaaatctttagcgaagcgtttganaaagctgatcctt

SEQ ID NO: 16462 - DNA, 482 bp, Glycine max
  Clone ID: jC-gmle01810091f10d1
tggtcggcggccgccctttttttttttttttttaaaaaacaatgtaaattcaaaattcataacataataagatgtatatagttaaatatacaaaataaatgggtactattacaccatttaataactcttaactgaatcatatttttttaaaaattcacagtcaggttaaaagttatttccacatggatagaagctaattctcaaactttaaccgtagatgccgtactatatgaatcacgtgtgcaacaaacataaatacttcggataaacaagcttggtagataattagatatacaccatcaggaaaaagaaaaattcaatttctcaaagaagctcatcaaagatcaaacagatgtgtccaggcaaaagggctcatcatatgaaacgtaaactcaatcaaatcaaaggaagttcctctgaaaatttccagaagaaaaaccttgagataagttcttagtcatgctttctgaatcaaaatttac

SEQ ID NO: 16463 - DNA, 522 bp, Glycine max
  unsure at all n locations
  Clone ID: jC-gmle01810091f11a1
cttcgtccaggagttcaagcgcaagaacaagaaggacttgaccaccaacgctcgtgctctccgtcgtctccgcaccgcctgtgagcgtgctaagcgcactctctcgtcggctgctcagaccaccatcgagatcgactcgctcttcgagggtatcgacttctacacttcgatcacccgtgcccgtttcgaggagctctgcggtgacctcttctcgcacaccatcgagcccgtcgagaaggtcctccgcgactccaagatcgacaagggatccgtccacgagatcgtcctcgtcggtggttccacccgtatccccaaggttcagaagctcctcaccgacttcttcaacggccgtgagctcaacaggtcgatcaaccccgatgaggccgtcgcctacggtgccgtcgtccaggccgtcattctctcgggtgacacctcggagaggacccaggacttgctcctnctcgacgttgcccctctctcatgggtatcgagaaccgacgtggtgtcttcactcccctgatc

SEQ ID NO: 16464 - DNA, 393 bp, Glycine max
  Clone ID: jC-gmle01810091f11d1
gcggaaacaatgcaaagggtcacatcagattgaacggaacgcgaagatacgagtacatgcgggtggtgagggggaatcaatgcgagaaacgaagtgccacctgcggaaagggggtgtgctttttctgaagagtaagatgaagctggagagcgagaccattagtcgagctcctcgacggtggggccgtcgtcgccaccgggagcagcaccaggagcggcaccaggagcaccgacgggcatgccaccgggagcaccgccagctgccgagtagatcttggtcatgatggggttgacctgctcctcgatctccttctgcttgtccttgagctcgtcggtcgatgcggtggtgttgctgtccaaccactcgataccttgcttgacgatcttctcgagc

SEQ ID NO: 16465 - DNA, 545 bp, Glycine max
  Clone ID: jC-gmle01810091f12a1
ctatcttttcaggaatggatgttccagtatcttctctgctttgtgtttttctcttccattttttaacaggaagctttaaggtcaagagggctgaaggatgatacaacttgcctcgttgtagatattattccttcagatcatcccgtgttgccaacaattccaagaaagaaacgtaacgtgctaacttcccttctctttggaaagaaatctcaaaactctacaaacaaaggcaccaataagctttcttctgttggtgttgtggaggaattatttgaagagggttctgcaatgcttacagagaggttaggcaaggattttccatctaatacgaatcctgagattttccgctgtgcggtttgccaagcagatcagccctctgtggacagtttatcaatgaacactgggccttttttccccccagtatctaagccatgggaaggtccattcctctgcacaaactgtcagaagaagaaagatgccatggaaggaaaaaggtctacttggcccttcgagacagcatagtaatatagtattctagcagcata

SEQ ID NO: 16466 - DNA, 443 bp, Glycine max
  Clone ID: jC-gmle01810091f12d1
tactagctagtggtcggcctgtcgtccttttttttttttttttttttagtaatcaaactaatagaagttatctactaaacaacattgcttgttctgtcagtcagtccaacagctgagagcacacgccaaaaacaaacttgcgacaacctccaatagacctaatatggctatctcaacctcattcttacacaccaatgacaatcaccacccaaatgtagaagtaagcatgctcacactgccagagaaaaattatactaatatttactatgctgctagaatactatattactatgctgtctccgagggccaagtagacctttttccttccatggcatctttcttcttctgacagtttgtgcagaggaatggaccttcccatggcttagatactggggggaaaaaaggcccagtgttcattgataaactgtccacagagggctgat

SEQ ID NO: 16467 - DNA, 360 bp, Glycine max
  Clone ID: jC-gmle01810091g01a1
cttgatactgctagtcggataagccttgctatgtgaccatgtactgtcacggaaaatgcagacatggctgctcccattatgctacgccctggaaggacatactgtactgattgaaagcccataactcatactatcaaccaccttcaatccgctagggagttatgcacatccatattgaacactacaccataacaaggcatgcacaactgcacgagagacttgcacccagtggttacgcgctggttgctgcatgacagccatgatcatcatcgaacatggagttcgggccaagaacttgatgtgttgatctgcatacacgcatcatcatcaagacctcgcagcagtaccatgctgatgact

SEQ ID NO: 16468 - DNA, 127 bp, Glycine max
  Clone ID: jC-gmle01810091g01d1
acgaatcatgcgaaatatccttacgaacccaagctctcgtggagtagggcataggatatcaacaaactgactaatcgcactaacaaaggcttcacgtatggggcaacatcatggatagctcaagcct

SEQ ID NO: 16469 - DNA, 393 bp, Glycine max
  Clone ID: jC-gmle01810091g02a1
cctcggggaattccaattccacattttcaagaaataaggaggcaaaaatgttcatatatgaattggaattatttgttttcttattaggcctatcctgaagccaaaggaaatgagatcggaattcctcggggaattccaattccacattttcaagaaataaggaggcaaaaatgttcatatatgaattggaattatttgttttcttattaggcctatcctgaagccaaaggaaatgagatcggaattcctcggggaattccaattccacattttcaagaaataaggaggcaaaaatgttcatatatgaattggaattatttgttttcttattaggcctatcctgaagccaaaggaaatgagatcggaattcctcgggggtaccgagctcgaatt

SEQ ID NO: 16470 - DNA, 493 bp, Glycine max
  unsure at all n locations
  Clone ID: jC-gmle01810091g03a1
gtttctgctttgtttccattccatgtgcaccttatttcctaacactgcaccttctctctctctctcttctctcagttcctcaatgattcacgggctgattcttcttttttgtgatcggcagaaataagagcaccaaaccagtatgcactagaccaaagtgaattactgcaagctcaaacagtcaaccccactcattctccttctattagtgtgggacagaatagtaaacgaaagaagagctatggcactggatttgtcaagagtataggttttctccattcctatattagcaatggttgcagaatcatggtttcgtagtctgtggaaggctcctcggaagcatgatgctaattctgagaaggtggtcattgaagtattagcatttgaaatagcaagctngatgtccaagctagttaaattatggcagtctttgagtgataaacagattgttagattcagggaggaaatcacaaattcagtgggcataagaaag

SEQ ID NO: 16471 - DNA, 442 bp, Glycine max
  Clone ID: jC-gmle01810091g03d1
gaatgtaggaatatctaaacaattaagagggatgagtttcaccttgaacattacattattacaatcatatcctccaagttcaatgcagtcctatatcacagcttgtatgagaaaccacttaaaacgcgcattagttacacaacaacaacaacgggcccgttaggcccgtcatgaataaaaaaaaaagttgcaacaacaacgtactcattttcaaccccatgatgtgcgaagtggtattgacaacgaatttatgattcaccgtactcatttccaaggtagtgtatattttgtactgtagctgcagtgacaatcaagcataactatttcagcagaaaggaccgggtaactgagcttcagtgcagcatcgcaggctttaatttcacgatccaaaaaccaagtcacgtaaagaagccgaaggtgagctgtaaccatggacaacgct

SEQ ID NO: 16472 - DNA, 477 bp, Glycine max
  unsure at all n locations
  Clone ID: jC-gmle01810091g04d1
cgtgcaaggaaaaaacaataatttttcattaattcaggagagcaaaggggacccaggcatatcaagccccaactatttattttgaccgtccacaaaagtcccaatcaaattcgaatcaactgcattttatatacagcttttttcctttcacatggctatacaaaagagaatgctaatgcttcagatggatgtatacggggttcctcatactgctggcaaaaatgatcttgagaatacatgcagcaccatggtttcaagggatagtttaatcccatattttggctagcatttccacctaattgatagcctctccaattcctgtacaaatcagggacacaacaatggctccatagcctggcgtaatcaatgtaatgtaaccttagattgttaccctaagcagactgataagtgacctgatctgccgtagtngtgtcatanttggcatttgcctcggggtatcttcttcataggtggaac

SEQ ID NO: 16473 - DNA, 534 bp, Glycine max
  Clone ID: jC-gmle01810091g05a1
aacaaagagtgtgtgttgtgtggtttggtttggtttttcacttttcttcatctttttgcgagaagacacacacacagagagagatggctacgacgaggattgtggcaaataagaagccgaagactaagatcgtgtgcactctgggccccgcatcacggtcggtcccaatgatcgagaagcttctgcgagcaggcatgaacgtggcgcgctttaacttttcccatgggtaccacgagtaccaccaggaaaccctcgacaacctccgcgccgacatggagaacaccggtattctctgcaccgatatgctctacaccaaggggcctgagattcgatctggctgtctcaaggacggtgatcctatacaactgatacaaggtaatgaaataaccatttgcactgactatgacctaaagggagatgagaagacgattttgatgaactacaaaatgctgcctgaggatgtgaagccacgtatggtcatactctgtgcggatggcaccatatcatttacaggtttatcatgtgacaaacaag

SEQ ID NO: 16474 - DNA, 477 bp, Glycine max
  Clone ID: jC-gmle01810091g05d1
aacaaaaaaaaaaaaaaccagtaatatatgatatgtgaaaaacaggtaaccgatcctaataaatgcttttaattgaagtttgcatccaatgtagatatgaagaggtatatcgagacctcttttgcgccatccaaaaaatttgccataaacagcagaagaattccttgtaatgggggtgatcatttcacagtcaagatcttgatgattgatgcagtgtccacacgatgcagtgccaccactgaatccccgatgtggcagagacccttggacttggcatgttgcatggcgaatactattgcttcttccgttgtttcagcatgagaagctctagcagaagctggactcaacacgggaaccaacccgcggaatataaggctatgtctagcaggggcctaatcactgcatgcccaatcaaagctatcagtcttgagctagggaacaaccacggaaagaattggcatacctggcctgtatttc

SEQ ID NO: 16475 - DNA, 539 bp, Glycine max
  Clone ID: jC-gmle01810091g06a1
aaaacatctccagtgggttcttcttcttctattacaacaacgtcgtccaagaccatgaccatggccatggccacgatcctgctcctgttcacggtcttcgcggtttcatcggccctagacatgtcgataatctcgtacgacaacgcccacgccgacacgtcgcgcagcgacgaggagctgatgtccatgtacgagcagtggctagtaaagcacggcaaggtgtacaacgcgctcggagagaaggagaagaggttccagatcttcaaggacaacctgcgattcatcgacgaccacaactcccaagaggaccgaacctacaagctcggactgaaccggttcgcggatctcaccaacgaggagtacagggccaagtacttgggaaccaagatcgatcccaaccggaggctcggcaagaccccgagcaaccgatacgcgccacgtgtcggcgacaaactacctgaatcggttgattggaggaaggaaggtgctgctcctccagtcaaagaccaatgaggctgtgggagcttgtgggcattctc

SEQ ID NO: 16476 - DNA, 546 bp, Glycine max
  unsure at all n locations
  Clone ID: jC-gmle01810091g06d1
aatccaaataatgctgcattgtcacatagtctacataacctgggaaactaacagcaatcaaatatgttcgccatttggaattggaatttgaatacaaatacagtgcatcaataatataaccctatgtacacagccaatatctgactgaaatttgatacagaatagtatcaatttgtatcataataaaatggcacagagaaatttatgtgaaggtaaaggggaagtgtatcagctggtgttttaattcttcgtctttcatttacttcatcattggctccttcctgcacgttcacatttcctttatctgcttaagcactgctgaccttgttcttacgcccaaaggtccaatggggtttagccggagtacgcctcaatgccttcactccgaatgggttgttcttgctcttgagacangttccagcataagtgttgcagatgggatagtcgttagggcagcaactgtagtggtcatcacagcaggtagcaccctcaagaggacagcaaccccactcaaagcaagcattttcgaactcgaaaatacagcac

SEQ ID NO: 16477 - DNA, 549 bp, Glycine max
  unsure at all n locations
  Clone ID: jC-gmle01810091g07a1
atttgattgatgaagctggtttacgagtccggcttcaacatgcacagttacctgaagaagcaagagaacttgacaaggaggtgaggcagattattaaggagaaagaagaagctgttcgcaaccaagactttgaaaaggctggagagctacgtgatagagagatggatcttaaggcacacatctcagcacttgacgagaaaggcttggagatgcgcatggcagagactgaggcctgggatgaaagtgctatcgtgactgaagctgacatacagcatatagtctcatcctggactggtattcctgttgagaaagtctcaacagatgaatctgatcgcctcctgaagatggaagagactttacataagcgagtcattggtcaggatgaagcagttaaagccattagtcgggctatccgtcgagctcgggttggactaaaaaatcctaatcgtcccattgccagcttcatctttactggtccaactggtgtggngaagtctgaattgctcaagcataggctgatactactttggctcgaagaagctatgattc

SEQ ID NO: 16478 - DNA, 524 bp, Glycine max
  Clone ID: jC-gmle01810091g08a1
ctcctttccatttttcttctcctctctctggtaaccttcctctcctttttaatccaaatcatcgttcttattttttcaaggatatttttgctgtgattgcgtgaatttcgatcaacctttgaagcatcctttgctgcaacttttaggtctcaattttaaggtcaactttctgtgccgggtcgttcaacttgcatctttatcatttgatctattgtttgagttgacgagtgaacttgtgtgacatcatagtttctgtgagagattgcatatctctcaagcttctttatttgataagaagcttgttgcataatagaatcaagagtgaaatcactggtattaaactttctaatttttcttctttcccgttatcactgatggattttcctgtgattattgcgtagattatgataatatgttttttcgaatgtattttgttttttggcatcagtttgtggaaaaattagggcctgattgcatactaaatagtttgataattattctctccagtctctagtctctagtac

SEQ ID NO: 16479 - DNA, 487 bp, Glycine max
  Clone ID: jC-gmle01810091g08d1
ttcgttctttttttttaatcaataatttgtcacaaatgcgtattcatacatataccgtatagaacaaaccaaatttcaaactgagttaagcctttacttactagtacctctttgatctacaaaagggttacattgcctcgaacctaatggaattagactaactatgcatcaattgtgcaccagagtaacattggtataatatgtaactgattataacatacactgaaccagcactcatgggcttgttatgaacgggtggcgctcattagatggaccatctttcttgggaggaacacatgtcagaagatcattggatatggaatacatcaccattgaagaggggtcacccccactactgatctgtgatacacgagaaagtatgctgaatatggtcttctcatacatagatagcgtctcagcctcagcctcacttaattcatgcttgagatcgttgctagcatatgcttactatgatatatctgacttg

SEQ ID NO: 16480 - DNA, 479 bp, Glycine max
  Clone ID: jC-gmle01810091g09a1
ctcgagccgctcgaagcaagtcgacgactccaaccccaaactcctcatcaccgtcccagaattatgggacaaagtcaagaacctcaacctccccgccgtaattatcgatacggaaacagctcaaggactcgtgagtttcgagctggaggcgctgctgaaggctattgagaagcagagggtgacgaagctgtgggtggtgcctccgatcctgcttggtctggcgaaacagagcgtggttggaaactacgatctttcctcgttgaggcgtataggttcgggtgctgctcctctcgggaaagacttgatggaagagtgtggcaagcgttttcctcatgttgccatttgtcagggttatggtatgacagaaacttgtggcattgtttctgtggagaatccaagagtaagggttcgtcatactggctcaaggggaacgctagtttcaggagtcgaagctcaaatgtgagtgtggatacacagaa

SEQ ID NO: 16481 - DNA, 528 bp, Glycine max
  Clone ID: jC-gmle01810091g09d1
atcactcaatcataacttgatataaatattaagtttgttggctattacaacaatcatctcaaaaatcatactactatgatacactatagtgtatatatggaaatttaacttgtaaaatttttgtttcttattttaacattttttctaacttcaaaagaagaaaatttagttcacaaacaccagatgcaaaggaatgctagtataatctggactatggagggattattgcatggttttaattttaaacttgattgggtatatagattaatcttgcaggatgcactgatgcgcgcactcctaattttcaatatatctcagaaattgtttgtccaaaaagaatgtaatatattatattttggatcgtgcttttgcagtaagctctcttctgagaatttttcctgaagctgtcttaggaacattgttgatgaatgttacccttcgcaattttttgaaaggtgcaacctgcttagcaataaacttctgaatttcttcttcagtcagtgaacctattggggtgagcgacaacat

SEQ ID NO: 16482 - DNA, 464 bp, Glycine max
  Clone ID: jC-gmle01810091g10a1
ggtgaagaggagaaaaagactatggagggtttgaagaagagaaagctggagctggacgaagcaggcaacggtgaattggcttccaaggaagagcttcgcttcctcattgaacctctcgctaaaccccagctcgtcgatcttcttgctaaactagggtcccaatatccttcaattgcagaagaaataaaaagtattgcaagtgcagatcctgcccatcgaaagctttttgttcgtggcttggcctggaataccacttcagaaacattgcgtgctgcatttcaagagcacggagaaattgaggaaggagctgtgatctttgataaagtgacaggaaaatcccgtggctatggatttataactttcaaaaatatggaatcaactcagcaagcattgagagcccctagcacgttaattgatgggagattggctgtctgtaatctagcttgtgagagtctaagcggaac

SEQ ID NO: 16483 - DNA, 455 bp, Glycine max
  unsure at all n locations
  Clone ID: jC-gmle01810091g10d1
aaccactcaaacagttgcaaatgatttgaaacttcaaagtcttagagcttaaatgcagaaaagaaatgttactcccgtttaaaatattatgaaaaaaatctaataaaaaaaattatagtcaatattacaagtaataaaaaagaatgtcaaaactctacaagagatcaatagctgcaaagaaaggtcgcagaactgcattaataagtgatggggataggagaggtaactagggtctaaaacgatttgaaaaggaaggcaaagaaaagaaacgagtaccaaaatcatcatctttagttttaaatacattcattgcttgggatagtaataagggttcattcctacagcagcaggcggatccccatgttggtctttctttgcagaaacttgaggataaggaatctgccattgnattggataaagtgaatgtgcagtgggaggagggtttgggataggag

SEQ ID NO: 16484 - DNA, 473 bp, Glycine max
  Clone ID: jC-gmle01810091g11a1
gcagtgctggctagcaacgccatggccattgaagtgttgctgggtggtgatgacgggtctctggctttcgttcccaacaatttctccgtggcctctggggagaagatcgtgttcaagaacaacgcaggtttcccccacaacgttgtgttcgacgaggacgagattcctagcggcgtggatgcagggaaaatctccatgagcgatgaagaccttctcaatgcgcctggtgagacttacagcgttactttggatgctaagggaacctacagtttcttctgttcgcctcaccaaggagctggtatggtgggaaaagtcactgttaattaattattgtctcaagggctcgtctcctacgtctaagttctcatatggttccttcttctaatatttttggtttttctagacgagcttggttgatctttcttgatatggcctatgggatgaatgaacgatataatgcgtttctgtaattc

SEQ ID NO: 16485 - DNA, 439 bp, Glycine max
  Clone ID: jC-gmle01810091g11d1
gaattacagaaacgcattatatcgttcattcatcccataggccataacaagaaagatcaaccaagctcttctagaaaaaacaaaaatattagaagaaggaaccatatgagaacttagacgtaggagacgagcccttgagacaataattaattaacagtgacttttcccaccataccagctccttggtgaggcgaacagaagaaactgtaggttcccttagcatccaaagtaacgctgtaagtctcaccaggcgcattgagaaggtcttcatcgctcatggagattttccctgcatccacgccgctaggaatctcgtcctcgtcgaacacaacgttgtgggggaaacctgcgttgttcttgaacacgatcttctccccagaggccacggagaaattggtgggaacgaaagccagagacccgtcatcaccacccagcaaca

SEQ ID NO: 16486 - DNA, 470 bp, Glycine max
  Clone ID: jC-gmle01810091g12a1
atttcgtccgccctcaaccgccgtgatggccctcgtccgccaccgccgccaccccaacctccgtctccccctcccggagccctccgagcgccgcctccgcttccccctccccctccctcccaccaccaccgacaaaccagcctccggcgacgccattgccgccgccgacctcgagaagctcgccatccttggccacggaaacggcggcaccgtctacaaagtccgccacaaggccacctccgacacctacgcgctcaagatcatccactccgacaccgacgccaccaggcgccgacgcgccctctcggaaacctccatcctgcgccgcgttaccgactgcccccacgttgtccgcttccacagctccttcgaaaagccctccggtgacgtggcgatcctcatggagtacatggacggcggcaccctcgagaccgacctcggcgacagcggcacgttctcggaagagcgac

SEQ ID NO: 16487 - DNA, 468 bp, Glycine max
  Clone ID: jC-gmle01810091g12d1
aattcagaattttaaattctttttatcattggcaagcataatttacgtacaaagggaatgattctcttagactcagttaagaattgaaaacaatagagccgtagataaataattcagaattttaaattcccttttatcataatttacaaaggggatggttctcctaaaactgaaaaggtttgaatccgggggaatatacaccaactcaaaaaggtgattccaagatccaagtcataacaaaaaaacaaccgggtcaacccacttaacatgtatccgggtcattgcacacaaacgggtgggtcaagagctgagccgtcgtccacctttccccggactccttcttgaggcagcactccacgaaatcgcgaaactccggtgacgcggtctcggggaggctcggcgggtcgccgaagcaaattgcacacataagggtagcccagtcgggtctctgacccgcttgaagaaatg

SEQ ID NO: 16488 - DNA, 320 bp, Glycine max
  Clone ID: jC-gmle01810091h01a1
ctcaaaactacagtttttacgaattactgctgcgtgaatgtgcatatatgaattggctacctctatagtcttatctatggctatactgaacccgaggaaatggcatcggaattgctgggggaatagacaatgtccacattatataactaaatatcagacgcagactttgtgctgtcccagtgggaatgatttgaagagctattgcgcctatcctgatgcctaagaaactgacatcggaagttctcaccatagtccaatctctcagatatgataatgccgactgctatgatgtgtatgtgtgcattgtctttatttatgcc

SEQ ID NO: 16489 - DNA, 196 bp, Glycine max
  Clone ID: jC-gmle01810091h01d1
attaggatgatcaccagctgtgtattcttatttaatgaatatgtggcatggaaattcatcgacgaatgccgatcggatcaacttcggttacaggggaggactattaagaggacatatcattacagttcatatatgagcatctgtgaatccgtacttattgaaaatgggacattgtaatgaccctcagaatagctac

SEQ ID NO: 16490 - DNA, 565 bp, Glycine max
  unsure at all n locations
  Clone ID: jC-gmle01810091h02a1
ctaaaaagccagagaaaacaaaacccccaaaatatctctcgctctgaaaccggcatggatttgcagcagagcgagttcgatcgcctcttgttcttcgagcacgctcgcaaggccgcagaagctgaatacgagaagaaccctctcgatgccgataacttaacaagatggggtggagctctattagagttgtctcagtttcagagttttcctgaatcgaagaaaatgacccaagaggctgtttcgaagctagaggaggcgcttgcagtgaatcccaagaagcatgacactctttggtgcctgggaaacgctcacacttcgcaagcgtttttaattccggaccaggaggaggcaaaggtttattttgataaggcagctgtgtactttcagcaagctgttgatgaggatccttcaaatgaactttaccgcaaatcattggaagtggctgctaaggctcctgagctgcatgtagaaatccataagcagggatntggtcagcagcagcaggcggcagcaacagctggatcttctacttctgcttcgggtacaaagacctcagagaaaaaga

SEQ ID NO: 16491 - DNA, 489 bp, Glycine max
  Clone ID: jC-gmle01810091h02d1
aatatacaatgcatatatatatatgtaatgtgcctttctgggaataatttgctactcaacgaaaggttgtgacaaatgttgataaataaaaaaagtggatataaacaagtttgaataatgacatatttctttccaatacaaacattgatccagaaaattggaggataacaaaacaatgggctgactttaagttgacacatgtcgtttgttccgtatagcttattgcacacagttgacgacggtgagctaaatttcagaagctgagcctttctttattcgtatgaactaataaagttgaaggtctcctgagtcctgaccacagacaaagaatgccaaagttgaaatgatgctcctgtactctaccatgactctctcaattcttgtttttgttacacaacacttgctttagccattcttttctggccccgagtagctagtagctcagaatcctgttcaatagcctgtgcacaaagcttcccagatagaaca

SEQ ID NO: 16492 - DNA, 450 bp, Glycine max
  unsure at all n locations
  Clone ID: jC-gmle01810091h03a1
ggaaccggccggtccggttcaggttacgatcccgaaacccaaagcggcggaggcggaaggcgcgaacatcgttttgcagccgcggttgtgcactctgagatcctacggttcggatcgagcgggggttctgatcaaggcccgcaaggagggtgacgatgatgacgtgtcccccttcttcgccgctctttccgactatattgagagctctaagaaaagtcatgattttgagatcatctctggtcgtctagctatgatggtgtttgcagcgacggtgacaatggaaatggtgacaggaaactctatgttcagaaagatggacattgaaggaatcacagaggctggtggngtgtgtntgggtgcagtaacttgtgcagcactctttgcatggntctccagtgctcgaaacagagttggtcgaatcttcaccgtcagctgcaacgcattcatcga

SEQ ID NO: 16493 - DNA, 424 bp, Glycine max
  Clone ID: jC-gmle01810091h03d1
tgagcagtgatgatcgggccagtattaatctcgaggtcgacgacgctgactcgtccttttgtcgcccttttaatgaagaatttgtgaacaaaaacttatatgattgaccaagcaggaacggcgaaaagtgcattaataaataagagaacaataacatcgcatgtataaacataatgacacgctgttatctaaacttgagaagggtctgtgaccagatcaagaacaacccatgagaatattcggcttaatcgacttcatcaattttgggtccatgaccgcatccactgcctgctgcaggacgatccttatacatggatccacccggatcacggccaggactctggtacatatttggtatgaggggattacaagtggtctagaactcattgattttatcctcaaattcgtcagcctgagcaagtct

SEQ ID NO: 16494 - DNA, 445 bp, Glycine max
  Clone ID: jC-gmle01810091h04d1
agtatgtaaacatatatcataagctcttagggctgtttcattcgaatattttcttccaatcttccatggagaaaagtagttttgacatcaagttgttcaagttccaaatcttggtttgccactattgcaagcaaaaccctgatggatgtatgtctgatcacaggtgaaaagatttcgttgaaatctattccttctttctggctgaatcccttagcaactaacctagccttggatcttatctcttccttttctgaaagactaggtttcctcttgaatatccacttgcagcctaccacatgtcttcctttaggggggtcaacaagttttcaggtttgattcttatatagagattccatttcctctttcatagctaaaaccaattttcagcttcaggatgattgatagcttttttgtaagtggccggttcatttgaatctatttcttc

SEQ ID NO: 16495 - DNA, 376 bp, Glycine max
  Clone ID: jC-gmle01810091h05a1
gtggatcgggacttagcagcgagacaatctcggagaatggacaccattggattgggcttgatatttcagcatcaattcctatttattttgaatttttatatatttgtagctaacactatttattcgcgatcaatgtataagatgtcgcggtgcagcgagaggttcagggtgaccttttacttggtgacatgggtcagggtctaggaatttgccctggagttttggacggagccattacgatatctgctgggcaggtctcaatacggaacagattgaaaagcgcatgggagatccagacgccgatgccgataatcctgttctgaaagaagagccagatgcccaagtactgccttttataattgctatccatgttcat

SEQ ID NO: 16496 - DNA, 322 bp, Glycine max
  Clone ID: jC-gmle01810091h05d1
attataaaagcaaaggcaataaccggaattaaaaaatgtttacattgtgaaagcgcatttttgcagctttttccttgctatttatggaaggccttaggtactcacacggaattggaacgaagagaatgactccattttatactttagtgtccattgcttatgaaacccaggtcctttcgggatcgacactgtgaagaggcttcaaaggggggggaaatttttccaaaacccactctgaagaagaatctagtcacaaccctttaccggtttctttgtgcgtgaaatcgctagctttcgcgttcctactatttaaggtattatg

SEQ ID NO: 16497 - DNA, 556 bp, Glycine max
  Clone ID: jC-gmle01810091h06a1
gcgaaaagggaggatgctcagccgctgtgttttgaggtgaccgaacgaacagatagagggtttgcaggttggtggggcagagagaaagatggatccatgcctaacttcttgcggtttgaggctccttgtgttctacaaaacaacagggaaattgttgataagaatggtgaaataaactacttcagtggcctgttcctttgtagaccaaccgggcaagggaaatccatgctgatagttaggtttggaggaacaaaaagatctccactagcaaaagtgtttcctaagtggtacttccatcagaatgcaagcaaggtgtttgagcaagacatgggattcttgtcatcacaaaatgaaattcttctgagagaaaaggttccaacaaaggaactatacctgaatctgaaatcatcagacacatgggttgctgaatacaggacgtggatggacaaagcggtgcatggaatgccatatcattttggtcacagcactatctctatgctaaagagcctgctgtgaatgaacacgcacctgcttgactagtcgcaggacaatcagc

SEQ ID NO: 16498 - DNA, 425 bp, Glycine max
  Clone ID: jC-gmle01810091h06d1
agacaaactggttagtattcatttgaacaactatttttacaaccagtcactcacaatctcctatgggtcctaataaaatttggtggattcattgcaatggcggttgagcaagcatagactccaacagagcagagagctgcagatgccaagagaaggaccttccattggctcccaaaaagcagaattgccaacgcagttaatgcaattgccacagctgaaagagcatttttccaagcttcgaaagctttgacgacgggtctacatcctttgcaatgaatcacatgcctaaaatatctgttggcaaaattaggggcatgcattggtccaatgccccccttggttggtgaggaagctgattgtcctgcgactagtccagcaggtgcgtgttcaaccacagcaggctctttaggcaaagagatagtgct

SEQ ID NO: 16499 - DNA, 66 bp, Glycine max
  Clone ID: jC-gmle01810091h08a1
aaaaaaaaaaaaaaaaaaaaaaaaaaaaagaaaaaaaaaaaaaaaaaaaaaaaaaaaaaaaaaaaa

SEQ ID NO: 16500 - DNA, 434 bp, Glycine max
  Clone ID: jC-gmle01810091h08d1
ttcgttcttttttttttttttttttttgcttttttttttttttttttataacctgttcgtttgtttacattattacatgacgagtgctacgagcgcatgcacggaatattagcttcattgcaacttggcatcgctgcatgatatcatagcccagattcagtaaataaattaacaggataagcccagcctggcccgtaaataaattcctatgataagctaagcctttctagagcctgaaagttatcatattgggggaacaggtacagcacttccaaattcggcccaatgcaactgtgataaaatacacgccctaattcagacagaatagagccgcaatcagatattattccgccagttagcagcactcccaacccttggcatgccagttgcttccttcttagccttagcatccaccttgaaagctgcaccacaga

SEQ ID NO: 16501 - DNA, 440 bp, Glycine max
  Clone ID: jC-gmle01810091h09a1
aacaaaaacaccaattctccaccctctcattgaaaaaaaaacaaccaaacaaaaaaaatcaatcattttattttatttttctacgaaaatggttgatttacattggaaatcaaagatgcctagttccaaaacaccaaaactctctctctccgacaacaagtccttaccctctttgcaactacccttccgcaccacagatatctctcccgccgctccttccgtttgcgccgcttacgactactatctccgtcttcctcaactcagaaagctttggaactccactgattttcctaattggaacaacgaaccgattctaaaaccaattttgcaagctctcgaaatcacgttccgctttctttccattgatctctccgatcccagaccttactccaaccacagagaatggactcgccggatagagtctctcatcatgcatcaaa

SEQ ID NO: 16502 - DNA, 472 bp, Glycine max
  Clone ID: jC-gmle01810091h09d1
catatccatttgttattatcgttattatcccacaggtatccaagaaaagtcttggcggcatccaagcttggaaaatacgtcggttcaaggaaaatctgagtcaacgagtcagccgagtcgcaactcaacccaactcggttaccgttagcctctgaacttcccatcaccaccgccaacacctgcttatacgcgtagaagaatctcttcatcgccgcctcaatcgcctgcatcgcctgcaacaagtgaaccttctcgaactcgctcttcgaaacgtagagcttcatcgccgcctcttgaatcctcggtcctcccttcggatccacctccacctacaatatctccggcaccttgtgcctcagatctctgcacatcttcgtcagttccactaactcattcgatctgaagcagaacgatgccgtttcgccgctcgaggatttcaccgagagttgattctttagcctcaagaaatcgt

SEQ ID NO: 16503 - DNA, 454 bp, Glycine max
  Clone ID: jC-gmle01810091h10a1
tgaagattccacaacagtgggagggagatccaaaaagagagagtggaaaagatggcgcggttgatcacagtggtgtggtgcgcggtggcggtgctattatgcgccgcggccggtgcgtcgtgggtggaggaggcggcgaacccgatacgaatggtgtctggcgtggaggcggaggtggttcgggtgatcggggagtgccggcgtgcgttgaagtttgctaggttcgtgagcaggttcgggaagagttaccaaagcgaggaagagatgaaggagaggtacgagatattctcgcagaatctcaggttcatccgctcccacaacaagaagcgtttgccctatactctatctgttaatcattttgctgattggacttgtgaggagttcaaaagacacagactaggagctgcccacaattgctctgccactcttaacggcaaccacaagctcaccgatg

SEQ ID NO: 16504 - DNA, 299 bp, Glycine max
  Clone ID: jC-gmle01810091h10d1
gggaaaagggcaaaaaacaaaagccaaaggtagttaaaaaaggatgtttcaaggggggggctcaaaacgaaacgatagggaacaaaaaaacctaaaagagagaccgaaaattgggcggggaaaccaacgattgggggcaaaaaaaaccaaggggggataaaaaaaagagggactgttttaaaaaacggggcgcacccaactgggggcaatttggcaaaaaaaagaccccctaatggaaaaaagagttgaaaaaaaggggataaaaaaaaacgcgttaaacttcaaaacccacaaagggg

SEQ ID NO: 16505 - DNA, 473 bp, Glycine max
  Clone ID: jC-gmle01810091h11a1
atttctgccagcctcaaaaaagacttgctctgcctctgccactctctgagtaggactacactgccatggctgcctcagtctccactgttggagctgtcaacggagctccactgagcttgaacagctctggagctggagcttcagttcccagttcagccttctttggcaccagcttgaagaaggttattgcctcaagggtccctaacgtcaagatttcttctggaagtttcaaaatcgttgccgcggaaaaagagattgatgagaaacaacagacagacaaggacagatggaaaggtcttgcctatgaagcttcagacgaccagcaagacatcacatgagggaaaggtttggttgattccctcttccagctgcacaggatactggaactcactatgcaatcatgagctcttatgagtaccttagcactggacttaaacagtacaacttggataacaacatggacggcttttaca

SEQ ID NO: 16506 - DNA, 438 bp, Glycine max
  Clone ID: jC-gmle01810091h11d1
aagagaaagacatcaagactttaacattgcacacattgtaaaatgtagacaatgtaactcaaaattatacaggataacaatccaatatgaacaagataacttattttattatctcaactcttagcttctctccaagtggagaatgcttaggttctcagggtgtgtataagcaggttccatcatcacttcttgcagttgggtcgaagtttgaggcatttggatcagtacaaccttcaggaacgggaatgtttacttgctgagctgctttgccatagaaagttcctctgttgatggaatcttgattagcatcaccaagagcagcctctttcaagtacttgtctgccagttgtactctcttcacattctcttgttcttggacaagcatgttaccatacttcaagagcttgctcaaagtaatcttccggttggtcaaaggtt

SEQ ID NO: 16507 - DNA, 335 bp, Glycine max
  Clone ID: jC-gmle01810091h12a1
ctgcaccaacttataaaccataacgcgattctccaacgccgttgttggtgcctgaatcttctgaaacggatgcatcttaagccagctgagaacatgctttaagccaattcattcaaaattacggttcttgctgcgctatccccaacccacaattacctcttaattggcctgatcctatttaaagcaactgacattaaggctcaatttgccaaaccgatcgagttctgtctcacgagagcacggtcgccgaaagaagtagatgaccaatgccagacaccgaaagcgcggcggcagcggcggtggaagatgagaacaacaacgagctgttcggaaaa

SEQ ID NO: 16508 - DNA, 152 bp, Glycine max
  Clone ID: jC-gmle01810091h12d1
ggaaaaaaaaagggaagcaaaagggattccttacccaaaaacccgaaagaaactgccctgggtaaccggggagggccccttgggcaaacaaggggcccaaaacccgatgggccccccctttaaaaggggcccgccgttttacagtgggggca

SEQ ID NO: 16509 - DNA, 157 bp, Glycine max
  Clone ID: jC-gmle01810092a01a1
gctgatgcaacaaacatgagtattattcaagtaaggaaagctatagaggttggtcgagctgcgagaaacaaactcataaagcacaatctccggcttgtattgttcgtgatcaacaaatattttcaagattttgcaagtggctcaaaacgatcaattg

SEQ ID NO: 16510 - DNA, 467 bp, Glycine max
  Clone ID: jC-gmle01810092a01d1
acatgtaacatgtattgggttgttatttcttatgagcaataactccttcatatacaaattacatgacaaatgattataattttgtatacttaaataattgttatgagaattatcaagggcatggctataggtagcgtacgtgggactaaaatgacaccaatggaagcatatatatatatttgttaatttatacaacataacgacgaagattatccaaccgagctggatgcttaagcttaatgagagctttgacttcatgcttccggacaatttccctagaaatattcaagttcccagcaatttctcccaatgttctgtcacccttgccatcaagtccatatctctggctgatcactaggctctcctttggcttcagggaatcaagcacattatcaagagcaagtcttaaaacagcaagttgccttctattatcaccattaacaccattaacatcagttattccatta

SEQ ID NO: 16511 - DNA, 476 bp, Glycine max
  Clone ID: jC-gmle01810092a02a1
ggagagagtaatagtttgaagacgagttttgttatttacttgcattttatttgtttgtattttgtgttaaaagtagggtatggagatattagaatttatagggctcttaaccctcaaaattgacttgtacaatgaagattgcccaagctttgagctcaatttaagccatatttctagttgatgtgggactaaattccagtcaattgggcatttgggactgcaattaagataactttccatcaaaagataaaaagcaaaacagaataattttgttggttgtttgcagtttacctcgtcttgcattgtgctgttgttgaattcaagtggagtttcaattaggatcttgctaatgctatttgttaaattaaggcaaactcaatctctatttaagtcatatcttttgtcggtgtgagactaaacaccacccttgaggttgcagtcaaggcagccccaaagagtctgcaactaagacggac

SEQ ID NO: 16512 - DNA, 544 bp, Glycine max
  unsure at all n locations
  Clone ID: jC-gmle01810092a02d1
aaatgaagcgcaatatattatatcaaaaccatctgtcacatacacttatcctaagacgacatttgtatttcattacaaaagtattacaagtaattgtctcactttgaactacgattaaagaaatagcttgcctccttcaacgaacatttggaaacaaaaatggcattcaaaagtccacaacctcaatgactacagcaatgcagtgttggccgaagtacttcaagtcgaaatcaaccaggagacccacctcgaaaatcattagaaaaagcagcatatatggacattcatatgttttgatacacaagccatcaaattagaaaacatcgtagaaatgttcagaagaaacaaacaaacaataatctatttggcccaaaaggatgatgaaacacgggagaaaaaaaatgaacaaaagaagcaccaaagcaagttattattcccatacaaatatttaactcctccaggacaatgcaagatgaagcaaaactattcaagtgataaaatagcatcaacaagtagcctggattaacanatagcactaacaaga

SEQ ID NO: 16513 - DNA, 472 bp, Glycine max
  Clone ID: jC-gmle01810092a03a1
attgaaaacaaaatggtatctgttgagaggatcaaacagttcacaaatattccatcggaagcttcatggaacattaaggatcgcctgcctcctgcaaattggcccggggaaggccatgttgatatcaaagacttgcaggtcagatatcgtccaaacactcctttggttcttaaaggcatcaccctaagcatcaacggaggggaaaagattggagttgttggtcgaacaggaagtggaaaatcaactttaattcaagttttcttcaggctggtggaacctacaggaggaaaaataatcattgacggcattgacatatccgccttggggcttcatgatcttaggtcacggtttggtatcatccctcaggagcctgtcctttttgaaggaaccgtcagaagtaacattgatccaactggacagtacacagatgaagagatatggaagagtttggaacgttgtcaactaaaagatg

SEQ ID NO: 16514 - DNA, 527 bp, Glycine max
  Clone ID: jC-gmle01810092a03d1
caacgagaagtccaaagtatattactgatgatgcataattcaatataaaggcagtggagcaactgtgtaattgtacactgggcactgtgttatataaattaggacctaaaaaaggctatattttgtttgtatactagagctacttaagccagaggtaattagaaaaaccattcacaaggtttgctcattcttcacttgtccaaacagcaattatgcaggatggtaattgcacctctctaaagtaaaatgcctttctcctttctcgtggcacttggaagatcaatcaaaacttaaaaggcttagcctaagtttggttttctgttattgtctgaatggctgagagagacacatgcatggaactttcttataggccactggaacggttggcatactcttgaactaatgccccaaagagagatggcctttggagcaagttggctggtgaatcaaattctttggcccgccctgcatctacaactagaactctatcacagtccattactgtggtattctatgagcaatgctga

SEQ ID NO: 16515 - DNA, 228 bp, Glycine max
  Clone ID: jC-gmle01810092a04a1
caaatggttaatcgaaacaaccttgtgcgcttaaaactcatcgcataattctgatactgagtgatgtatacttagatacgacatctgattgcacttcttggtttaacagaccattatgcacaaatgatgtatgaaggaaaaagctctttttgagtgcttcagttctcttaggattattttttcatcaaaattagtatcagggtgtcaaaattcgtgtattcacccacc

SEQ ID NO: 16516 - DNA, 231 bp, Glycine max
  Clone ID: jC-gmle01810092a04d1
ggtgggtgaatacacgaattctgacaacttgatactaattcagatgaaaggataatcctaagagaactggagcactcaagaagagctttttccttcatacatgatttgtgcataatggtctgataaaccaatacgtgctatcagatgtcgaatctaagtatacatcactcagtaacagaattatacgatgagttttaagcgcaaaaggttgtctccattaaccatttgcta

SEQ ID NO: 16517 - DNA, 533 bp, Glycine max
  Clone ID: jC-gmle01810092a05a1
tcggctcgagaaaaaaggagaaaaaaaaagaaaaggaaaaaactccgaagagagaaaaaggagggttttgtgtcgattcgtcctctatgcggtacgggtgcatatcattgacaggagagagaacctgtgcgcggagagatattttaaacgcggcggaaccctaacgagtcgaacggcagcggtggcggcgaaggcagatcggagcgcgagcgaggaggatgagcggcaaaggcggtggcggccagaaggcagggattcctccggccagtcggaagatggttcagagcttgaaggagatagtgagcaacagttcgcgaacacgagatctacgccactctcatagactgtaacatggaccctagcgaagccgatagtcgcctgctctaccaagatacttttcacgaggtgaagagcatacgtgagacgaaaaaagagggtaaggacacaacggattccacgtctcgtgtggtaagcaatacatctagccgaggcggtggtgctagggttagcgctgaccgatatgttgggcgtgg

SEQ ID NO: 16518 - DNA, 374 bp, Glycine max
  Clone ID: jC-gmle01810092a05d1
agcatccaaaaaactttcccctataacccgaagaaaaaaatggtgaaaaaaaggggaccggtcgcttaacaccaaattaggccccctaaataccccaggtaaaaatcacgagcgtaattttaaccgggaataaaaaccactttggacaagggaggagcgggcaaaaaatgggcttttgggacccaacaaggggcccttttaaatattaaaccgcggaaatgccccctttaaactcacctcaagacccttaaaaaccgggggggtaaaaagaatagtacctggtttgcccaatttggggggaccgccttggggggtggctttgaaaacccgcagggggtgcttcccttggaatctggggacggtggtccagaaaa

SEQ ID NO: 16519 - DNA, 484 bp, Glycine max
  Clone ID: jC-gmle01810092a06a1
agattctattctcctcaagcaaaacctatagctcccccacactcctccagtacttgaataaaagctaaataaatattaaagcctttccttcatcaaggtactgtttgatctttgaatttcagtcctcaaagattggaacaacaggaacatgtgtactctcacaactgttcctgtgctcccttctaagcttaacaagccttcgctttctccgcaccacaattctctttttccctactgaggaagacgggtcgggaagaagaacaaagcaatggttcctgtatgtgtaacttttcttttcttctgagtttttttttttatttattatcaacatttattgatgttgtgtttgtctcatgggtttgtttggaattgatcaggttgcaaggttgttcgggccagccatatttgaagcctcaaaactgaaggttatgctcttaggagtggacgaaaattaacacccaagatatcttcccaggacttatac

SEQ ID NO: 16520 - DNA, 526 bp, Glycine max
  Clone ID: jC-gmle01810092a06d1
ccactccttacaaaaatctgtttaattctttgaaataaccatgcatacagacatattatacatgaactaatttaatttcttacgaaagaaaaatcataacaaagaaagtaaagaaaaatatataaaaaaaaaaaaattgcaaatacgagcttccttatttacattgaaatgggtttcgaatatttaatttgtatacagggaatttgccaatttggcagcatccccgtaactgtgaattgtagtagtttggctgtttatagattttgttgggtcccaatcccatcacaaggttcgtaatggcggctgggaacttgtttagaccactgaatagggctcaacgtaagcggtggaaagcaacattggcattcttcttggcatggctgtggaattgccaacccctcctcctggaccccacctgtgggtgctgacgcttccttcagtgggccccaacattccaccttgttgaattctggaatgtttgagtgaaagtagacccaaaccaaggcatcttgcaattctgggtagc

SEQ ID NO: 16521 - DNA, 425 bp, Glycine max
  Clone ID: jC-gmle01810092a07a1
agcaaacataacttgcagtaatggcttcaatgaataaccaaaaagaaattgagctctttgagggccaatctcttctgtacatgcagctatatgggcacctaagacctatgtgtcttaagtgggctgttcaactaggtattccagacataatacagaaccatgccaaacccatttctctttctgacttggtctctactcttcaaattccaccagctaacgctgcttttgtgcagcggttcatgcgcttcttggcacacaatggaatctttgagatccatgagagccaagaagatcatgaactaacatatgctctaacccctgcatcaaagcttcttgtcaatagtagtgatcattgtctatctccaatggttctagcgtttaccgatccacttcggaacgtaaataccatcacttgggggaatgga

SEQ ID NO: 16522 - DNA, 446 bp, Glycine max
  Clone ID: jC-gmle01810092a07d1
gaaacaaaagccaggtaaagacgtaaagccataccaaaacattgtatattgattgcatccattacatgtttattcaatttattttggccaaataggaatgagaaatccgtacacagaacatttaacaacatagcggggaggaacataatggaattccaccagaagttgataatgctatgtcatcatagctttattcagcaaacaacacgcaaaccactaaatacaattacaacgatgtctgaggatgttcataaatataaacgttaagggtgacatacacattataaaaatgttcaaggatagacctcaatcagagatctaaaaccaaagatgggaaatattttgtagggtttgaatcctgcttcgatgaaaagttgtttccattctttttccggtctctctcttccattcatcggcaacataataatgtccaaactaagctttgt

SEQ ID NO: 16523 - DNA, 530 bp, Glycine max
  Clone ID: jC-gmle01810092a08a1
ggtttggaaatgcttaaaatattcaaaaaccatcatttgaagacatctttgcttgatgactttatatattatgaaaatcgtcagaagatcatgctggaagaaaagaccaagttgctaatcagaagttttgaaaatccattaatgttacccacattagaaccacctcggaagttgaattttgtcgttgacatccctccagtcagtgttgagaagaaggcaaagatggatgatgagtttgatagcctaaaacagacttcaagtgctggacatattgatagtagttctgaggtcacaagcaccgcatctgcggatgaaaaggctgagaacggttcagttgagaaagaagatattgcttctgtccttaagattggttcagttactattacccaaaacaggtggagactaaaccatctggcattagtgttgctaataaggaaccgcttgatgttatcacagtaggctcaatgcaagtcaaagttaatggatttgccgagtcttcgcgtcttttgaagattggagtatcccacttg

SEQ ID NO: 16524 - DNA, 518 bp, Glycine max
  Clone ID: jC-gmle01810092a08d1
cacgaattaaattatatttctaaaaatactattcctgaaaatgctattcacactagagaggttacactttcattaaaagcattttgaatcaacaccgctcgaaagatccatgacatcagtatgaccctttatatcaatcagtagcaaacaaaaaagcagtaaaaaaaaaagattgaatagaaacccaacttcccaacagtggcacaatcaggcatgcattgatccatcttttcataaagatccaaaacgtgcctcgacatttataagaaaactttaagatccatttttaacacgagtacctccgtccagctgtagtgttcttggatcaagtgggatactcccaatcttcaaaagacccgaagactcggcaaatccattaactttgacttgcattgagcctactgtgataacatcaagcggttccttattagcaacactaatgccagatggtttagtctccacctgttttggggtaatagtaactgaaccaatcttaaggacagaagcaatatcttctt

SEQ ID NO: 16525 - DNA, 424 bp, Glycine max
  Clone ID: jC-gmle01810092a09a1
aacactcataacacaaagcacaaagcaaagctcatccttgagttaaaaaatggcagcagcttcttccatggctctctcatccccatccttggctggcaaggccgtgaagctgggcccatcagccccagaagtgggaagggtgagcatgaggaagaccgtcaccaagcaggtctcctcaggaagcccatggtacggcccagaccgagtcaagtacttgggcccattctctggcgagcccccgtcctacctaaccggtgagttcccaggcgactacggctgggacactgctgggctttccgcagacccagaaaccttcgccaagaaccgtgaactcgaagtgatccactccaggtgggccatgctcggagctctgggctgcgtcttccccgagttgctgtcccgcaacgggtgaagttcggagaag

SEQ ID NO: 16526 - DNA, 487 bp, Glycine max
  unsure at all n locations
  Clone ID: jC-gmle01810092a09d1
gtaaaaagcaagtaacattaagttggattcggatacacaagataattcacattatctgaagtacttcaccaaacacaaatctaaaaactctcaaaagtcatttcgttctttgacgctcactttccggggacgaagttggtggcataggcccaggcgttgttgttgacagggtcagcaaggtgatcggcgaggttctccaatggaccctttccggtgacaatggcctgaacaaagaagccaaacatagagaacatggccaatcgtccgttcttgagttccttcaccttaagctcagcaaaagcctctgggtcatcagcaaggcccaatgggtcgaagctgccacctgggtagattgggtcagtgacctcaccgagggggccaccagcaatacggtaaccttcaacggcacccattaggataacttgtgtggcccagatggcgaggatgctctgggcgtggatcaggctngggttgcccaagtagtcga

SEQ ID NO: 16527 - DNA, 508 bp, Glycine max
  Clone ID: jC-gmle01810092a10a1
aacactcataacacaaagcacaaagcaaagctcatccttgagttaaaaaatggcagcagcttcttccatggctctctcatccccatccttggctggcaaggccgtgaagctgggcccatcagccccagaagtgggaagggtgagcatgaggaagaccgtcaccaagcaggtctcctcaggaagcccatggtacggcccagaccgagtcaagtacttgggcccattctctggcgagcccccgtcctacctaaccggtgagttcccaggcgactacggctgggacactgctgggctttccgcagacccagaaaccttcgccaagaaccgtgaactcgaagtgatccactccaggtgggccatgctcggagccttgggctgcgtcttcccggagttgctgtcccgcaacggggtgaagttcggagaagccgtgtggttcaaggccggtcccagatttcagcgagggtgggctcgactacttgggcaacccagcctgatcacgccagagcat

SEQ ID NO: 16528 - DNA, 528 bp, Glycine max
  Clone ID: jC-gmle01810092a10d1
gtaaaaagcaagtaacattaagttggattcggatacacaagataattcacattatctgaagtacttcaccaaacacaaatctaaaaactctcaaaagtcatttcgttctttgacgctcactttccggggacgaagttggtggcataggcccaggcgttgttgttgacagggtcagcaaggtgatcggcgaggttctccaatggaccctttccggtgacaatggcctgaacaaagaagccaaacatagagaacatggccaatcgtccgttcttgagttccttcaccttaagctcagcaaaagcctctgggtcatcagcaaggcccaatgggtcgaagctgccacctgggtagattgggtcagtgacctcaccgagggggccaccagcaatacggtaaccttcaacggcacccattaggataacttgtgtggcccagatggcgaggatgctctgggcgtggatcaggcttgggttgcccaagtagtcgagcccaccctcgctgaagatctgggacccggcctgaaccaca

SEQ ID NO: 16529 - DNA, 323 bp, Glycine max
  Clone ID: jC-gmle01810092a11a1
attcgggttcttcttactcacctacggaacacaggaaaagcctccaaaaccaacccaccgttggcgcgatggctttcccctccaaaggcgatgacgagcaggttctggtgcagcgtaaatcgaatgcgagagttttgacactaaacaggactaaacagttgaatgccctctctttttatatggcttctcggctacttgaaattttttctgaagatgagaaagattctgatattaaattggttgtcgtgaagggaaatggaagggctttttgtgctggtggtgatgttgcagctgttgctcgtgatggaagtaaaggtgactgg

SEQ ID NO: 16530 - DNA, 482 bp, Glycine max
  Clone ID: jC-gmle01810092a11d1
atgggcttattgaattaattgcacataaatagagaatattcaatttcctctaaattagagattatatacctggaaactacatttattagagtatcatactctgattctcaacggtagacttcactagttttaaaatcttatcaattgtaacggtagcaattcataaactgccatacattgaaacatccaagaatcaattgaatggagcaatacgtgtcttccatactttgggcttgaaaatatgagaatgatgatgctttacagctttgaaatagcatatgtaggcagattattaaaccttttaggaagctccaaatctttccatcctttatcatcaagtttagagaagtaacgattaacatcgctatcactaagaagctccaatttggaaggttcccactttgggtttctgtctttatctatcagtatagccctacaaccctcgaagaaatccttgctgtagtggccttttagaatatgac

SEQ ID NO: 16531 - DNA, 309 bp, Glycine max
  Clone ID: jC-gmle01810092a12a1
attcggtttctttttactcacctacggaacacaggaaaagcctccaaaaccaacccaccgttggcgcgatggctttcccctccaaaggcgatgacgagcaggttctggtgcagcgtaaatcgaatgcgagagttttgacacttaacaggactgaacagttgaatgccctctctttttatatggtgtctcggctacttgaaattttttctgaagatgagaaagagtctcatattaaattggttgtcgagaagggaaaaggaagggctttttgtgctggtggtgatgttgcaactgatgctcgtgatggaa

SEQ ID NO: 16532 - DNA, 481 bp, Glycine max
  Clone ID: jC-gmle01810092a12d1
atgggcttattgaattaattgcacataaatagagaatattcaatttcctctaaattagagattatatacctggaaactacattaattagagtatcatactctgattctaaacggtagacttcactagttttaaaatcttatcaattgtaacggtggcaattcataaactgccatacattgaaacatccaagaatcaattgaatggagcaatacgtgtcttccatactttgggcttgaaaatatgagaatgatgatgctttacagctttgaaatagcatatgtaggcagattattaaaccttttaggaagctccaaatctttccatcctttatcatcaagtttagagaagtaacgattaacatcgctatcactaagaagctccaatttggaaggttcccactttgggtctctgactttatctatcaggatagccctacaaccctcgaagaaatccttgctgtagtgtccttttagaatatga

SEQ ID NO: 16533 - DNA, 236 bp, Glycine max
  Clone ID: jC-gmle01810092b01a1
cccaagttaaagggtgtttttatttcaaagctagtattaaaagcctaagtgcggagtttcaaaccttgaatttcaggtgaatcacatttttgggtagcagggaaaatctggttgcagtttatttgtcttactagtgattgggtggtttggctttctttcagagcccaaatggcccagtttgaatggtactaactactattaagccaccggatttgggaaaacatctcctgtttttt

SEQ ID NO: 16534 - DNA, 459 bp, Glycine max
  Clone ID: jC-gmle01810092b01d1
ctgtacatattatgatgcagaggtagatttttcaaccaaataccccaagcacaatcaagcagggagaattgtctagtctttcagaagaatttttcaagcgatttaacaacctaggggtagcttatctcactttaatgtaatcagcaaacaccactgaaacctaggcctaatatgaagctataattatggtgtctgccatgtgcactcatgagctccttagaaactcccaaggtcctgatcccgttccaattctcaagaagccagcaaatgccctaagacccatatagatggtcaaagcaacccaaattccaatgaaaccaccagcggatgacaaaataagcagagaaatgatgctaagaattgccaccacaaccatggagaaggctgaatatgcaaaatcagatgccccaaagttgacaccatcaaatacaaatgctaaagaattcagggttgagtgac

SEQ ID NO: 16535 - DNA, 213 bp, Glycine max
  Clone ID: jC-gmle01810092b02a1
caaagctgttagggggattgaggatgtactttgcaataacaataaagagataccgagctgtgaaggaagttggacaaattaagatgagtgttggagttaaccaattgatgcttgtttgccaggccgaatattttcgtcagttgcttaaacctgttacgtagtctagcatctacggacaccggtttaggggggtggtggggattgtcttatatt

SEQ ID NO: 16536 - DNA, 539 bp, Glycine max
  unsure at all n locations
  Clone ID: jC-gmle01810092b02d1
atagtacattcataaaataacacgcataataaaaattgagttttggggctaaaagaaataagccagcatagaaccacaatcaaacacaacctaaaaagtacaattatgacaatattttcttacataacctgaataagtaaaatgtcaatcatagtttattactcaggtagcatggcctcttctcataaaagttataactaggatggtgagcgaggcgagaaagggtgctattcatagaagctaacaaacaaagttggggaaatagtcaactgttgcagcagcatatgaccaacttacatttttcatggttcaaccccgaattgttcaacctcaactttgagagacttgaggtattttacagcttcatctaaaacagcaacagaatccatttgattacctncacctggcacaatctttctcaacatcctcaccatcctcttcatctcccagtgcttcccttcattgtggcagaaacccccggccccagacgacttctgtacagaagatgacgatgacctctttcttgatttgagcaatac

SEQ ID NO: 16537 - DNA, 491 bp, Glycine max
  unsure at all n locations
  Clone ID: jC-gmle01810092b03a1
tggaattcggctcgaggttggcagatgcaaagngatgtatatgctaagcagtcatataatcgctgatccggaagagcgtggagcatgtgattcgggttgtaacggtgggttgatgaccactgcatttgagtacacactcaaggctggtggactaatgcgagaagaggattatccctacactggaagagaccgtggcccctgcaaatttgacaagagcaaaatcgctgcttccgtggctaatttcagtgtggtttcccttgatgaagaacaaattgctgcaaatctggtcaagaatggtcctcttgcagttggtatcaatgcagtttttatgcagacatatattggtggcgtctcatgcccatacatctgcggcaagcattttggatcatggggttcttttggtggctatggatcttgtgcttatgctccatattcgtttaaggaaaagcctactggatcataagaattcatggggggagagctgtngagaa

SEQ ID NO: 16538 - DNA, 438 bp, Glycine max
  Clone ID: jC-gmle01810092b03d1
gggggaacacaaattaattttattcagggtacttgcaataactattgataacccgggggaatacttggagctagactaactagcgtataaaatttccccttaaaaacataaacatgggcttagcagattcctccttcataacattttccattatggaaattatttacataccccctttactggggcccctaccatgtttagggattcacccttatatttaaggggttcaaacatgttttgcatctacaggggaaaccattgagttcaccccaaatacattgggacctctgcaaaacttggaaaatcctttttttccccagattttcccccatgaaatctttttgatccaaaaaggcttttccttaaaaccaattggggccttagcgccagattcatttgccaccaaaagaaccccatgatccaaaagctttccccaaa

SEQ ID NO: 16539 - DNA, 581 bp, Glycine max
  unsure at all n locations
  Clone ID: jC-gmle01810092b04a1
gtgacataagagctgcctgaatgaaatgagagaacatttccagtatgcatgccctctctgctcaaagtcagtctgtgacatgtcaaaggtttgggagaaatttgaccttgagattgctgctacacgaatgcctgagcaatatcaaaataaaatggtttggatcctgtgcaatgactgtggtaaaacttctcacgttcagttccattttgtggctcaaaagtgtccgaactgcaaatcctacaacacacgacaaacatgaggcggagcaggtggccacgattattcattggcttcatcaaaagccttcactcgagagctctcttgatgttgtcgtgacttgtgaaggcagtgaaaatagatgtgcatccattgggtacgtggatgtgcacgtgtgggaatttggagtgcatgatgagccacattcagagggataaaataatggttcttatgttgatttggagtgnggggtttaatttgctggtgcttccctagtagttggaatagtccagagtggtagagttcttgtattatatcggtttagccctatcgataagattctagttacatactcgttagtgaaa

SEQ ID NO: 16540 - DNA, 409 bp, Glycine max
  Clone ID: jC-gmle01810092b04d1
ttttttttttttttttttttttttttttttttttttttttttttttttttttttttgggtttttaataattattttactttgaaatcatataaaatggggagacctccacccacaaaaagaacgggaagggcgaagaccaaaacaagggggggaaaaccaaacacaagaaaaaccccaaaacccggggggaacccaaaaaaaaggggggcccccccaaaaaaaaaccccccccccccaaaaaaacccaaaaaaggggggcacacccccccaagggggggccaaaagggcccaaaaaaaccccagggggggacaccaaggacccaagggggcccaaaaggcacaccggggccccaagggcccccaagggaaagaagggcccccaagggaggggtctgggggacccccagg

SEQ ID NO: 16541 - DNA, 434 bp, Glycine max
  Clone ID: jC-gmle01810092b05a1
aacccaaaccgaaaccctaaccctaacggagagatactgtggctatgggcatcgatattcgggacggagaaggacagggtgaactgtccgttctacttcaagatcggcgcgtgcaggcacggcgaccggtgctcccggcttcacaccaagccgacaattagcccaacattggttctgtcgaacatgtaccagaggcccgacatgaacatgagcattatcaccaaccccgatcagccacaaccccaatcccttgaccccgacaaggtgcaggatcacttcgacgacttctacgaagatctcttcgaggagctcagcaagtacggccccattcagagctttgaatattgtgacaacctcggcgatcacatggttgggaatgtgtatgttcagtttagggaggaagatcatgctgccaacgccctcatgaatctcac

SEQ ID NO: 16542 - DNA, 491 bp, Glycine max
  unsure at all n locations
  Clone ID: jC-gmle01810092b05d1
aaatatgaaacattcatagctgaactttatcaaatgtatcgcttcattttccattttccttcctaccttgcaggacattacaattgaagcagaaaattaaaatgttgttgctgtggatattacaaagttctatcactaaattgacaattccaaatagaataataacaatggcaactgaatccatctaaatgcaggtgcaaacaacacaaatcagattacttgccacacttactagcagattttgggccaaatcattacgttgttgttgctatatctgatggttaccagattcactaccattttgtgcaacactctgttcttgataatcatcactgcttttcgaattgttcatgttaccagtgtccccttgttccttctccctgttccattgctctattttagctctcctttctgcactactttctctgatcggaggactcctatctctgcccactggacttctacttcgntntcctctataccgaggacta

SEQ ID NO: 16543 - DNA, 500 bp, Glycine max
  Clone ID: jC-gmle01810092b06a1
aggagattaagagagtgagggcgcaaatggaagaggatgaacagttagcgacgctcatgaggggtcttcgaggccagaatttgagggactcgctcttcgctgaggacgatgttgaacttcgacttgttgaggtagacgagagtagtgagtttttgccattggtgtatgatcctgccagcatttctgcatattgcggaaaacgtccacgcgcggatgcaacgcgcattgtgcagttgctatcagttgcaggaggttttctttctcgcattgccggggatgtgattaacaagaaggttaaagagaatgaagttgctagggccattgagttacgtgaaattgtgacatctttgggtccagcgtacataaaactcgggcaagcattgagcattcgacctgatatactggcacccgtagcaatgacggagctgcagaagctatgtgataaagttccttcatttgcagatgatgtggctatggctctaattgaggaggagcttggt

SEQ ID NO: 16544 - DNA, 469 bp, Glycine max
  Clone ID: jC-gmle01810092b07a1
ggtttggaaatgcttaaaatattcaaaaaccatcatttgaagacatctttgcttgatgactttatatattatgaaaatcgtcagaagatcatgctggaagaaaagaccaagttgctaatcagaagttttgaaaatccattaatgttacccacattagaaccacctcggaagttgaattttgtcgttgacatccctccagtcagtgttgagaagaaggcaaagatggatgatgagtttgatagcctaaaacagacttcaagtgctggacatattgttagtagttctgaggtcacaagcaccgcatctgtggatgaaaaggctgagaaaggttcagttgagaaagaagatattgcttctggccttaagattggctcagttactattaccccaaaacaggttgagactaaaccatctggcattagtggtgcttataaggaaccgcttgatgttatcacagtaggctcaatgc

SEQ ID NO: 16545 - DNA, 526 bp, Glycine max
  Clone ID: jC-gmle01810092b07d1
cacgaattaaattatatttctaaaaatactattcctgaaaatgctattcacactagagaggttacactttcattaaaagcattttgaatcaacaccgctcgaaagatccatgacatcagtatgaccctttatatcaatcagtagcaaacaaaaaagcagtaaaaaaaaaagattgaatagaaacccaacttcccaacagtggcacaatcaggcatgcattgatccatcttttcataaagatccaaaacgtgcctcgacatttataagaaaactttaagatccatttttaacacgagtacctccgtccagctgtagtgttcttggatcaagtgggatactcccaatcttcaaaagacccgaagactcggcaaatccattaactttgacttgcattgagcctactgtgataacatcaagcggttccttattagcaacactaatgccagatggtttagtctccacctgttttggggtaatagtaactgaaccaatcttaaggacagaagcaatatcttctttctaactg

SEQ ID NO: 16546 - DNA, 476 bp, Glycine max
  unsure at all n locations
  Clone ID: jC-gmle01810092b08a1
gcctattcggcaatatggcggaaaatggttcaattgagctgaacaagtttgtgttgttttgtttgttgttgctaatacaagtggcagtttctgaaatcatttttgaagagcgatttgatgatggatggcgaagtaggtgggtgaaatcagactggaaaagcagtgagggcaaagcaggttcattcaagcacacagctggaaaatgggctggtgatccagatgacaaaggtattcaaacatccagtgatgccaaacactttgccatctctgcaaaaataccagaattcacaaacaagaacagaacattggtccttcagtattctgtaaaatttgagcaagagattgaatgtggtggatggtacatcaagcttctctctggatttgttaatcaaaaagagttttggtggcgatacaccatatatnttaatgtttggaccagattatgtggcacggatacaaagaagcttcatgtgata

SEQ ID NO: 16547 - DNA, 513 bp, Glycine max
  Clone ID: jC-gmle01810092b08d1
gcgacaaataaaccacttttatttaaaattaaaaagtttcccttggaaagtaacatgagatggactatcaatgtaactataattcataacaatcttgaaatttgtcaaccagataattgagaaggacgttttatcccatcaaagctcgtcatgaccatcgtaatcatagcgatgccttctatatttgtctctatatctgtcccgatatcgtcgatcatgacctctctctcgtctacgcctttcaccttcttctcttgctctttgagcctcctcctcctctttggcttttctcactttctctgcttcctcaaaaccttccttttcaatctccctgttggcaaacacctcctcaacaacttgttttgcataatcagggtcgtcacaaatcaaaacgttgtcaaaaactgaaccgcctttaacctgccaaacttcaatgcctacatacttgataggcttaagcacataaagatcagggtcgtcttcaaactctggattatctatccatggagtttt

SEQ ID NO: 16548 - DNA, 494 bp, Glycine max
  Clone ID: jC-gmle01810092b09a1
gcatgatagttcagtgtctacaataccaggtgattttgtcattggtgttaagttgacaaccataaacaatatgtgtgcatatgggctcaatcctggtatttcaggttctcgtcttttgggcaccattcctcagtctatttcacagcaaactgtttggaatcaaatggcaacagtgagaacaccattgaattttgattctagcaagcagagcttttgtcaattttctattgaccttctcggtggaggaattttagtggacaaaactggagattggatcacacttatacaaaattctccaattagtaacttgttgagagttgctgcttggaagacaggctgtttaatggttaaaattgcgatgtctgggaatgcagcagtcaaaaagagtgattgcgcctcattggtacaagtgtttttaacaaacagcaacagtacagagcatttcgatgcatgtaagtggacaaaatcggaaccacattcctgggaattgatct

SEQ ID NO: 16549 - DNA, 534 bp, Glycine max
  unsure at all n locations
  Clone ID: jC-gmle01810092b09d1
aaaataacacacacttcacacatcattacgacaattaaaagaggtgtggaaattttcaaatagacagagcatactcaacaagagggtcatgtctaatttcctttattgaattaaacaaacgaacaaacgaaagaaaacacaaattccagatcatgcagaggattccgcattttcagaagatctggcagtagcctgtggaacagaaaaagctggcataagagtattaccagcaatttcaaaatcttgagaaattcccaagagaatatcaaaaactgtagactgtttgggattgtcaataaggaaactcaagtgccatgaagtttgatttgcccactcagaactccacatttcaaaaccattattaggaccacatacctctattgggaagatcaattcccaggaatgtggttccgattttgtccacttacatgcatcgaaatgctctgtacttgtgctgtttgttaaaaacacttgtaccaatgaggcccaatcactccttttgactgctgcattcccagacatcacanttttaac

SEQ ID NO: 16550 - DNA, 445 bp, Glycine max
  Clone ID: jC-gmle01810092b10a1
gcctttcagcgtgttccagattcagctccaactgtgcagacaggtggtgtaaatcaagatgggcaattgaaatcatcatcaaacattcagcaacaagcccaacaacaaactttgcagccgggtttacctgcttctactggtgttaatacttcatcgggaaccttatcacgctccagatttcactggtcccatgcccttattgcagttggattactggctgcttcaggtgctggaacagctataataattaagaattctgttctccctcggttaaaatcttggatacgtaaggtttgtcttagacagtgatgatgaacaattaaagaaaactgacaacaaaccaacaccgatggaagaagctgtgcaagctgcaaaatcagctgcagctgcagctgcagatgtggcaaaagcgagccaagaaatgctggcttcaaaggcgaagaga

SEQ ID NO: 16551 - DNA, 501 bp, Glycine max
  Clone ID: jC-gmle01810092b10d1
acattagtaaacaaatttattgcatagaaagatacgtgcgtttgcatattgtattgatgtccagttcaaagtacaactaatatgattatgaaacagattgtgtgacaagcttattccaaatcatgtttttcatgatagatcatgcatgattcaccttcatttctcatcatatttgacttcatgctcctcttgtatctcactagaagtgggaaccgagctgacactgcttccctcaactgcaccttcagattccaatagttttgggtccatatgtacatcatcggaaccgtctaaagaatgagctactgactgattatcagacatctgttccttttgggccgatggctttggccgcctgattgcttctgcagcctacggcataactatgggcgagggtgaggaggaacccatacgcgttgaactggcttgtggattggctgctgactggatgcagcaccattgggtacttcattagactcattttcattatcaatctctcta

SEQ ID NO: 16552 - DNA, 321 bp, Glycine max
  Clone ID: jC-gmle01810092b11a1
cccagttcaaagaaacttgacaccgattagattaggggcttcgaacaaggagccccgaaacccaaaccctaatctgattcgctttcgattatggcgtctgagagcgcttctcgatcgagttcccgcggcccgattcgtacattgggagcttgataagcttgacctctaagagtgagatcagatacgaaggtattctctacaacatcaacaccgaagagtccagtattggcctcagaaacgtgcggtcttttggaacagaaggaaggaaaaaggatggcccacaaatccctcccagtgacaaggtttatgagttatactttt

SEQ ID NO: 16553 - DNA, 503 bp, Glycine max
  Clone ID: jC-gmle01810092b11d1
gttgtacaaacatctttccatcaaaccaagtggtagaggagtaacaagagggtaatatgacgagagaaaaaaaaatgtcctacttattctgtgaaacaaacacataacaggcaacacaacaatgaagcataatctctaacatacttatggttctttaatggaaggctacctaggctcttgttctccaccatgttcatgactaaacattaactgccacctacaaagtgcgacttggcatgccgcgtcccctccctcgtccagagtagccataccctcctcctcttccataataaccacctcgagtacgtccaccacggccagggccacggcccccacgaccaccatggtacctcacataatcgccaaacgtctcagtatcaatcttgatttgttcggagtatcgagtccttccattctgtgaagcattaccatgcatgttggaagagagcgagtcaaagaagtcgtccttgttataaacaggcttaacctcaatgtttgataca

SEQ ID NO: 16554 - DNA, 320 bp, Glycine max
  Clone ID: jC-gmle01810092b12a1
tttggtcataaagactacttctaatccttatgtgacacggtggaaattggtaatgatttctatctgcttggccctgattttggcagttaccttgaggcacaggctgctgccgataaagcatttgttgaacccagagaagtggatcaagatgagtatccttagtgttgctggctctgggagatttagcagtgacagaaccattcaagattatgcagagaggacatggaaaattgatccctgccgatgccctctctgatctcattattagaaattttagttttgtttggggaggccagaagaaaagggacaatgaaaattgt

SEQ ID NO: 16555 - DNA, 348 bp, Glycine max
  Clone ID: jC-gmle01810092b12d1
ttttttttttttttttttttttttttttttttttgtttttttttttttttttttttttttttttgttttttggtttcttttttttttttttttaccggcccccaaagaaaaaggaaaataccctgggaccggctacccggtcacaagggcaggggggggaaaaaccccggggggaaacccccaaaagcaagagggatctccccccaagaacggggccacccaaacagggaagggcccgaggggggcagacgggggcaccggggcggaaggggacaagaccagacatgagcttttccaacggggcaagatttccccagcttaaaggggcccctaccttggggccccccc

SEQ ID NO: 16556 - DNA, 529 bp, Glycine max
  unsure at all n locations
  Clone ID: jC-gmle01810092c01a1
ctaagaccgcatttgttgctgcggatgctgatgggagtgttccctttgtctggggaactgatgctgatggaaatctcattttttcagatgagacagagatcgtaactaagagctgtgggaaatcttctgcaccattccccaaaggatttttcttttcaacatccggaggtttgagcagttttgagcatccacttaatgaggtgaagcctgtaccaagggttgacagttctggacaggtgtgtggtgcaactttcaaggtggatgctgaggctaagaaggaagcaactggcatgccaagggttgggagtgctgctaactggtcgaataatatctgattgcgactctattctgtttgaattaagacttttattttatcatagctgcactcggccgaattttgaagttctgtacctggttccataatatgataaccttgaggctctagcgaggcttagcttatcatattaatttatttactggcgaggcttagcttatcatatntaattatttactgaatctgagatatgat

SEQ ID NO: 16557 - DNA, 504 bp, Glycine max
  unsure at all n locations
  Clone ID: jC-gmle01810092c01d1
aaggcagtaaataatcatttggaagaacctgtccgcaagtttacattattacatgatgagtgcgaagagagtatgagcttaatatttgcttcaaagcaacttcgtatagcttcatgaaatcatatctcagattcagtaaataaattaatatgataagctaagcctcgccagtaaataaattaatatgataagctaagcctcgctagagcctcaaagttatcatattatgggaacaggtacagaacttcaaaattcggccgagtgcagctatgataaaataaaagtcttaattcaaacagaatagagtcgcaatcagatattattcgaccagttagcagcactcccaacccttggcatgccagttgcttccttcttagcctcagcatccaccttgaaagttgcaccacacacctgtccagaactgtcaacccttggtacaggcttcacctcattaagtggatgctcaaaactgctcanacctncgatgttgaaaagaaaaatcct

SEQ ID NO: 16558 - DNA, 545 bp, Glycine max
  Clone ID: jC-gmle01810092c02a1
cagcaacattcttctagatgaggagatgaatccaaagatatcagactttggtcttgccaaaatatttgggggaaaagaaactgaagcatgtacagggagagtaatgggaacctttggatacatggctccagagtatgccttggacggattcttttcaaccaaatccgacgttttcagctttggagtagtccttctagagattctcagtggaaaaaagaacactggattctatcagtccaagcaaatttctagccttttgggtcatgcatggaagttatggacagagaataagctactggatttaatggacccatctctttgtgaaacatgcaacgaaaatgaattcattaagtgtgcagtcattggactcttatgcgtacaagatgaaccaagtgatcgacccactatgtcaaatgttttgttcatgctcgacatagaggcagcaagcatgccaattcccacgcagccaaccttttttgtgaaaaagcatctttctagctcagcttcctcttcgagcaaaccagatataagtcagtatgagagca

SEQ ID NO: 16559 - DNA, 541 bp, Glycine max
  Clone ID: jC-gmle01810092c02d1
aaccaagaaaaattttatattaaaaacatacgttataaattcaaaatggtgtatgtactaaaaagacagacaggaaatccaaaatttatccttaaaaataatacagaatactctaaattgttataaaatacaattaaaatatcattaattattttacacgtactctaacaatagcttcaatcatgcactatcgaccttcttgataactgctctcatactgacctatatctggtttgctcgaagaggaagctgagctagaaagatgctttttcacaaaaaaggttggctgcgtgggaattggcatgcttgctgcctctatgtcgagcatgaacaaaacatttgacatagtgggtcgatcacttggttcatcttgtacgcataagagtccaatgactgcacacttaatgaattcattttcgttgcatgtttcacaaagagatgggtccattaaatccagtagcttattctctgtccataacttccatgcatgacccaaaaggctagaaatttgcttggactgatagaaatcagtgttcttttt

SEQ ID NO: 16560 - DNA, 535 bp, Glycine max
  Clone ID: jC-gmle01810092c03a1
gttgaagccaagggcaaaaagggaatgatgtctcgtcaatttcagcgcaatgctcctcctcctttacccaagattgaagacgatggcaatcccaaattcgtcatcttcattcgcatggccaatgtatacctttggtaccctcttagtatcgtatcaggcggcaccactgctaaaataatggttgcagctaaagataattttctcggcaagtatatctacaaagacactcttgatagaaatctcgctgctgttatctacagagatgagaaggaggtacagaaatctgcattcaaacagtaccgtgtattgcgaacagctactgatttcagatacggctacaaacttgttgagaatggcaatataagagctgcactttctaccactgatgttattgagcttccaacacaagataaactaaaaaccgtgcttgacaaagtgaaagacttttttggagatgcaaaggaatcttttggaaagataacatcattgggcactactgaaacagaggagtcagaggaagacacaaaagaaaaag

SEQ ID NO: 16561 - DNA, 511 bp, Glycine max
  Clone ID: jC-gmle01810092c03d1
tttttttttttttttttttttttttttttttttttttttttttttttttttttttaaattcctggcaaataaaatgcatagattttacaacccgtaatttacacaacaattccaggaattttttgaactgataacggggccattacatgtcatcctacatgctatccattccaaagcattatggattacaacatacacgagtgatcaatcagtatcgtaaagatggggttcactttgcagaatataaaacaattttgatgggtacagatttaagaacaaaacctggagtagcattgttgggcacaaaagtttccccattaaccaatccataaacataattgagctttctgatctcatagggccacaggctacttataacaattcaagcaaatcatttccagctataggttcatcctttaaccttggctttttcttttggggcttcctctgactcctctgtttcagtagtgcccaatgatgttatctttccaaaagattcctttggatttcc

SEQ ID NO: 16562 - DNA, 529 bp, Glycine max
  Clone ID: jC-gmle01810092c04a1
ggctcgagatgcaggaagcgacgaaggtgataataatcggtgccggaacttctggtatcgccaccgccggttgcttaacgaagcaatcaataccttacataatgctcgagagagaagactgtttcgcttcgctgtggcagaaatacacctacgatcgtctccaccttcatttgaggaagcaagtttgcgagttaccgcacttaccgtttcccaagtcttaccctcactacgtgcctcggaagcagttcatagactacttgggaaactacgttaaccactttgagatcaagcctctgtaccagcgtgcagtggagttggtggagtatgatggatggaaagggatttggagagtgaaagctcagaatagaagatctggtgagcttgaagaatacgctggaaagtacctggtcgtggccagtggcgaaaccgccgagcctcgtctgcctcagattcaaggcttggagagtttcaatggaaaagtgattcactcaactgcctactaaaacgggaacgagtttaagaataaaca

SEQ ID NO: 16563 - DNA, 504 bp, Glycine max
  Clone ID: jC-gmle01810092c04d1
ctacaatagtaaaaaatttattattgaaacaaaattatatatgaatttcttaccataataatatcacattacgagaatcacaacaagtaatttaaaacaacatacctaattcatatccccaaaagaagaaagtgtcatgtacatactgtttctgcaaccaataatagataatagatcattacatgacacaaattccttctctttcttcttgaggaattaacgaggcaatatcatttgctactaattgggcatccatgttagctccaaagaaaccccttcttgacagcccaacacaatacaaaccatttcgacctttccaatgatttgggaaactgttttttggaaagccatcctcatttagaagatcatcaccccccttaagccacttttgagttgatctcttgaagcctgtacagaaaacaattgagtcgaatgtgtacgatttgccatcctggaacaaaacttcattacctcttatactctttatttcagctggcaacacct

SEQ ID NO: 16564 - DNA, 512 bp, Glycine max
  Clone ID: jC-gmle01810092c05a1
attatactctctgttgctaattttggttagcaactcggccttcacactgacataccggattacacttacaccaatctctcacttgccctcctattctgcttctctactccaccttcctgaatgcaatggacggaacatatgcctgcgccctctgctataactgcctactaccatggccacagacgatcaagacaaggttgaggaagatgctgccgttgatgatacgtgaaatcctacagctattgtagcatagacacagtagagatcaaatcagatggagaaatggagcacgaattaatacaggcactgcaagcattctattatgagggcaaggctattatgtcacatgaggaatgtgatgatcttaaggactaactgatcgctgatgggagcaccgttgtgatgctgagtcctgaggagcaaaaatgtctggaagcgtctatgggacatgtgtctggaaaaccaatctcgagcgacagatagcttgatcagttgaaacttaggctatagat

SEQ ID NO: 16565 - DNA, 507 bp, Glycine max
  Clone ID: jC-gmle01810092c05d1
aatcattcgtctttcttttctgttttttttttaccgctccattattaaaaaatggggccgcacagcatttttgcaaaaggcccaaagtgtgcctacaaattaaaaatcttgatgttaagaatatcctcatataattcatctcttctggtagacgaacctacgtatgctatacaaagttcataccattacaactcactagcatatatggtgtgcgacattgtgaacaatgatttcatggcccatagagaacaatgatttcagtagcttctacctatgacgatctgatctcattacaggaaacaatagtatcaagcgtgcctacatttaagcattacttccttctggtaatgtaatcaatcttgtttttgaatcatacaccattttagttacacagttttcacatttgactttgatggaggaatcgccacttgaaaccgacagtattgtcccacagaaagaggtattttcagtaccacagttgcgacaagggccctctaaatcagaaaa

SEQ ID NO: 16566 - DNA, 218 bp, Glycine max
  unsure at all n locations
  Clone ID: jC-gmle01810092c06a1
attcggctcgagaaggaatatgaacttctcagaaggaacttcagtgatactggttgcttcggctttggtattcaggagcatattgatttgggaatcaagtatgatccttcaactggtatttatggaatggatttctttggtgttctggagcgactctgctatcgtgttggacgtcgccgaagatgcaagtcccgtgtnggaattcagcaccgagtcac

SEQ ID NO: 16567 - DNA, 343 bp, Glycine max
  Clone ID: jC-gmle01810092c06d1
gattcaaaaccggccaaaaaaaaaacaaaaaatcacaaaaagaacgagccaaaggggacaaaactggaaacacacccccaaagggaacccaacctaaccaaagaaaagcccgggacctggaaaggggcacccccacggactaaacggggaaccccctcaaagaagccacccgggggacccggggcggaagcccaacccgggacttgcatttgcgggggcgtccaacacgacagccagggagcgccaaaacaaccaagaaaacgcacccttaaaaaccggagggagggacaaaccggagaccccaaaccaaaagcccccgaaaaccaaagccgaaaacacccgg

SEQ ID NO: 16568 - DNA, 282 bp, Glycine max
  Clone ID: jC-gmle01810092c07a1
caccaatgatacgtagagagcatgaacgcacactatcaccgctatggtagacaaacatcgtactatattatactcgaaggtcctagctggagacatgaccctcgactcttattaacaacgcatccatcattgacgaaaacgaaagccaatatccgtcaagacatagaacaagcctgcacttcaacatgatccggaacagactacacgcatacgaacgcatgcggatctactgttacctaatgtggatcatatacctgggaacctgtctatactgctgataac

SEQ ID NO: 16569 - DNA, 420 bp, Glycine max
  Clone ID: jC-gmle01810092c07d1
aatataagaaccataattagcactaaaatccaacatgcaaaatttccacattgcctgcatggtgacgatgacgaccttaacccgctaaacaaataaaccgaagactaggatatttagttctgatgagcatgaataacatgagtctaatacgaaaaaattaatcatggagattactgtgaaacacccaaccacttagaacagatgtcgaataccgaataatcacgaatctgacaccatagggcgatcccatgctatcccagcagcctagaaggccgacgcttactcgttagagacagtattcctgttcttggcaagctggtccttcttgaccttaacccgctgtgcctcagcgagaaggggcattctcttagcaagcttggcataaggattcagcttcagcatcgagttgagattcttaag

SEQ ID NO: 16570 - DNA, 245 bp, Glycine max
  Clone ID: jC-gmle01810092c08a1
ggaatttgcaaggtagtgttgtttacgacactacagttctcttcggtgccaacatatgatgtctcaagaagcaatatctgctccttacagcaatctgacagacccctcggctcaggctaaggagccaaacttggacatcgattcaaacccgaataagcctaaccctaatctacttaggagacaaagaagccgacccggaacagcacagccgaaggcatgagggattgctctggctcaaagtcgat

SEQ ID NO: 16571 - DNA, 427 bp, Glycine max
  Clone ID: jC-gmle01810092c08d1
gaataaatgtgcatgattcatttgatcctaatggcgttcatgccacaggaatggaacgattcttccaaccttgagtggatctcatctgataccctggcttatgattaacacaacgttcctaccttgaaccttgcgcttcaataattaccccgaacctttgctcgaacgatccatgatcagtaatgtccacggaactggctttgcaggtggaacactgcttcaatacccatgaaatttatggattacacgctccttcatgcccgattgaagctcgttaacagtactggtcgcttatgcgttatttctgggtctccacaatcccagtgttaaatggcgggtatcaacatgtgctccataccctgggtgctactgaatgaaaacccgcctccaataatattgatgctgctagcttgctaattcaccatgt

SEQ ID NO: 16572 - DNA, 513 bp, Glycine max
  Clone ID: jC-gmle01810092c09a1
cgaagaagaagaatccaaaagcaatcccatctgtgtgtttgcacatcggaagggagggctatcaaactctaagatctaatctaatcagccttttgggggtgtttcagacattgcatgcatatgggtggttgtgttggatgctataaaaggccttcactgagtcccacagtggatgtgccatcaaaagggttggcaacacaaagtaacgtagtgaggaaaccgagttcatcagaggatttttggaccaccagcacgcatgatatggacaacagcgctgttcagtcacaagggagcatctcttcagccagtctaacaaaccaagctgtggtttctcatgctggttctttcaaaagcagcaccaaccccactgaatttggaaatcacggtgtaattctttggaatcagactcggcaacgttgggttggaaataaatagcctgagaaccaaacacaacaattacaagaacctaaattgagttggaatgcaacatatgaaaagttacttgggagcaac

SEQ ID NO: 16573 - DNA, 359 bp, Glycine max
  Clone ID: jC-gmle01810092c09d1
ggaaacccaaccgaaaaccaaatctaaagaatgggcttttaaccccccataatgacgcgggaatttcccggaaaaagggggcgacaaaaaaaagggggggccccccaaaactggccccaaaaggggggcaaaaaaaggggggagtttgacaaaaattgcccctggaaaaagcaggggcccccaggggagtcaactaacaaaggggcaatcccgttttccgaggggcccaaaacccaaatgttccccaaaaacacatagggggctccgacaaggggaaaccaacccggggtaatcgcccaaaaggcctttcaacgggcgagaaccaaaatcattttacacccttcccaaatcctgaaaat

SEQ ID NO: 16574 - DNA, 459 bp, Glycine max
  Clone ID: jC-gmle01810092c10a1
caaaccaaacaaaacataagcaccgctcttttctctccgaaatccccatctcccttcacttctgagctctggacgagatcccagatctcaccatctttcacgcactcttccatcagattcaccctttcgtttaacgcaaactcataacttgaaggttaatggctgctccaccggcaagggctcgtgccgattacgattatctcataaagcttctcttgatcggtgacagcggtgttgggaaaagttgcctccttctgcgtttctccgatggttctttcaccactagtttcatcacaactataggcattgattttaagataagaaccattgagcttgatggcaaacggatcaagctccaaatttgggatactgcagggcaggagcggtttcggacaattacaactgcttactaccgtggtgctatgggcatattgctagtctatgatgttacagatgaag

SEQ ID NO: 16575 - DNA, 518 bp, Glycine max
  unsure at all n locations
  Clone ID: jC-gmle01810092c10d1
aacttgttaaaaaagtcagagacactacttatcacacaaatttataaagaatgacaaggttaagcacaaagtcagcatcatgatcattatacacgtaatttcttctttcttcttgttcttgtacaagaatgttgcctccaatttgtaacatttgtcctcaaccacaacaagccgatttttgtgcagcctgtccagcccctcctgactggtcttggttgattttgattgttgatggctctgccttggtgtcagtgtcagccagcctttgttttatatctcttgctattgagaagaaaacttcctccacgtttagatttgtctttgcactagtttcaaagaatttgatcccatactcatcagccagtgcttggcccttggacgtaggcacggcccttttgctttcatccatatcagctttgttccccaccagtattttgttaacattgtctgaagcatgttgctcaatattgcgaatccaattcctgatattgttaaatgatgcttcatcntgtacatca

SEQ ID NO: 16576 - DNA, 326 bp, Glycine max
  unsure at all n locations
  Clone ID: jC-gmle01810092c11a1
atttgcttagcctcgcataacagttatgaagatagaaaaaaattgtacagacagaaccttgatgatgaaaccttaatatgaatcaaatttcagcatcaaaaaaaaaaaaaaaaaaaaaaaaaaaaaaaactgtntttcccaaactaacaataaaccttgttgcaaacaaaaaaaaaaaaacataaaaagaaaaaaaaaaaaaaaaaaaaaggggggcccccccacaaggggccccccccccccggaaaaaaattccggccggggcccggggggggacccatttttccttaaggggagggaattaaaacctgggggctcactgggaa

SEQ ID NO: 16577 - DNA, 397 bp, Glycine max
  Clone ID: jC-gmle01810092c11d1
cttcttctcttttcaggggcccaaaaatagaccccaaaaaaggggccccacccaaaggggcccccccacccaatttcacccccccacaaacccgctaccccgggccaaccaaaacccccccccaaaccccgcccccccccccccccccccccacccaaaaaccccccaaaagggccccccaaaaaaaacccccgccccccccggaacccccccccaacccggaaaacccccgggggcccccaaacaaaaccccctggaaaacaccccccctcccccaccggggcaaaaaccaaaaagccccccccccagccccctcccaaacgggcccccccccaaagggcaacagggcccccccccttgaagcgcacaaaccccccccggggggggggcccccccc

SEQ ID NO: 16578 - DNA, 322 bp, Glycine max
  Clone ID: jC-gmle01810092c12a1
agtgaaagcagcaaacataaagcctttgagaagatgcaaaaacatgtcagtaaagacggggctaataagtgggtcagcgtacttcataaatttacaggaaagtcacaagcaacaacggattgcacagattccattggcagtcactctgagcctagcagagtgaatgatgattcatcagatgtatgggacatagaacctatgaggcatggtccacaaggcgttccaaaggatatgtttgccatgcttcatcttttctgtgcaacctattctcacctgcttttagttcttgatgacatagagttctatgagaaacaggttccat

SEQ ID NO: 16579 - DNA, 415 bp, Glycine max
  Clone ID: jC-gmle01810092c12d1
ggcgtgaaaaaacttaaaactatatatttgattgcataatgatcattattttcatgtaacacttcttttcaaataaccaagtttaataacagtgtttccaatatgaacatacaacaaaacctccatgcccggggataatggaagattggaataacattggcaccaactggctgtgttgaccgcagccattattagtcgctggaagcaaccaatattttcccagaacaaatcaggatgcttttttcttcaacaaaaacctaaatagcacgcctgaaaatttgcacaaactccgtgtccatgggctaaacttttggtaattgatatatactagcctctttgggatacgatcaccaggctcactaacaatggcatgtgccacctgaagcagatcaagaaagttcaaatccggcatttg

SEQ ID NO: 16580 - DNA, 451 bp, Glycine max
  Clone ID: jC-gmle01810092d01a1
caatggcatccacacaatgcttcttgcaccaccatgccctcaccactccaaccagagcttcatcacagcgcttagttgtgagcaccaaaccaaaccacattgtttgcaaggcacaaaagcaggttgtccaagagggtgaggacactactaacattgtctctcgcaggttggccctcactgttctcattggtgctgctgctgttggctctaaggttgcacctgctgatgctgcctatggagaagctgccaatgtgtttggaaagccaaagacaaacactgacttccttccatacaatggggatggattcaaactctcaattccctcaaagtggaacccaagcaaagaggttgagtacccaggtcaggttcttagatatgaggacaattttgactcaaccagcaatgttgctgtcatggtcactgcaactgacaagatgtccatcactgacta

SEQ ID NO: 16581 - DNA, 510 bp, Glycine max
  Clone ID: jC-gmle01810092d01d1
aagtccttagaagacatgaaaaattaagaatcaaagtgcttactccaaccaacagcctcaaaaactgaaacttgtggacaaaaagtggccacataattcaacacatacacaccccttcaagatgattcacatgcagaatagcactccactgataagttcttaggcaacactgaaagaacttgctgtgctctccacaaatcttcttgctcccttaaaccatctcttgtctccagcttgagccttgcaaatgtatagtttgccatctttcacagttgctgcaatcagctggtgcttgccaccttcatctccatcagctgtccttgtcaacacagtcaaactgtagtactgtttcccatcaatgacaggcgttgaactctccaagatgttgcagttgccacagcattggaatcaaaaccaccctcagcatcagtttggccaaagaaggcttgtttctccagcaagtaatccacctgagataggaactactaagtgaaccttatcagtgatgga

SEQ ID NO: 16582 - DNA, 377 bp, Glycine max
  Clone ID: jC-gmle01810092d02a1
gcctgtttcttggtacgacaacgagtggggatacagctcacgtgtcattgatcttcttgtattcgttgccaagaagtctctttaaggtgttacttcaaagtagcttgtcttcacattattaccgtatgtttatgtttagctgcgatttagtgtcttgctcgagcaaaaaatgagaggtctgaataaatcggtttctgaaaccagtggtgttacttgctggaggagcattagctcttttttggacttttgatgttttctcttgtggagggggatcgagtttttggatttttatatactcgctgatgtacttggcttgaatacttgctaatgtacttgttattgattgttatagtagatatttgtccgtcctttttttc

SEQ ID NO: 16583 - DNA, 382 bp, Glycine max
  Clone ID: jC-gmle01810092d02d1
gaaaaaaaggacggacaaatatctactataacaatcaataacaagtacattagcaagtattcaagccaagtacatcagcgagtatataaaaatccaaaaactcgatccccctccacaagagaaaacatcaaaagtccaaaaaagagctaatgctcctccaacaagtaacaccactggtttcagaaaccgatttattcagacctctcattttttgctcgagcaagacactaaatcgcagctaaacataaacatacggtaataatgtgaagacaagctactttgaagtaacaccttaaagagacttcttggcaacgaatacaagaagatcaatgacacgtgagctgtatccccactcgttgccgtaccaagaaacaagcttcac

SEQ ID NO: 16584 - DNA, 535 bp, Glycine max
  Clone ID: jC-gmle01810092d04a1
gaactttctcataaaactcaagctgcagctgcagtagcttcatcaatagctgaggagtcctttggtgcaataagaacagtaagatcatttgcccaagaagattatgaaacaacacgctactcagagaaagttaatgaaacacttaatcttggtcttaaacaagctaaagttgttggactcttttctggaggccttaatgctgcatctacactttcagttattatagttgttatatatggagctaatttgacaataaagggttacatgtcctcgggtgatcttacatctttcattctttatagtctctcagtgggttcttctatatccggtctgtcaggattgtatacagtagttatgaaagctgcaggtgctagcagaagggtatttcaacttttggatcgtacctcatccatgcctaagtcaggagataaatgtccacttggtgatcaagatggtgaagtagaactagatgatgtgtggtatgcctatccatcacgccctagtcatccggtgctcaagggcattacattgaagc

SEQ ID NO: 16585 - DNA, 541 bp, Glycine max
  Clone ID: jC-gmle01810092d04d1
attctaacagtatagatcacactaattactttcggttttaaaatatcgttagttacaccaaatctgttgctaaactttaatcatgtgtttggactagaagaaaatacagacaatgatacattttcttttatttggttgaggaaagaaagaaaaattgacatttagaagaaaaaatcaaaattttctttctttctattttctcttctattcaattttaaaatttttctcacttccttcgttttctttcctctgaaacagaaggtaatgctgtaacttgcaactgtggaagtgaaggtcttccaaggaacttgtgcctcagtatcatatgccccttttgtgggcagactagagtgtttaacaagcaaggtggtagggtttggttattcataatttgctagaccgagatttcggtttttgttggttgcagttgtctcttgaccaatgcagtatagacaccattcttgttgagaagctcttcatggttgcctctctaactacttggccatcagatataacttgaacagtattcagcagtttaaca

SEQ ID NO: 16586 - DNA, 513 bp, Glycine max
  Clone ID: jC-gmle01810092d05a1
caccgaccaccgaagctctcttaaccctaacactggttgacattgcatataataatagcagtgtttttagagggtaaatattcattgattcattgattccagatcctgaactcaacaacaacccaaagataaaaagcacaacacaagacactgaactcgcactcactgggttttcaaccatggatgcgatacggaagcagctcgatgtgttgatgggagccaaccgtaacggcgacgtccgtgaagtcaatcgcaagtactacgatcgcgacgtctgtcgtctctacctcgtcggtctctgccctcacgaactcttccagttaacgaaaatggatatgggcccttgccctaaggtccactccttgcagctccggaaagaatacgaggaggcgaaagcaaaggggaccgataattatgacagggagttggaggatgtaatagataagcttattggtgagtgtgataggaaaattggcagggctctaaagcggctcgaggacgacgatgcgaaag

SEQ ID NO: 16587 - DNA, 499 bp, Glycine max
  Clone ID: jC-gmle01810092d05d1
atccaatcaaactactatttttaagcacaatagcaagaactgctccaaagtaaggcagattacaaattggatttaatgtctgcaaagcaacatcaaaccataatttagcgacacctaagctcaagttacatccatcatccgagaaacggttcaacacagaagaaattgcaaaattatttgtccaacatgaggttcaacacccacctaaactagacattttctcatacccataagattcatggcaattgctagtatcgatcatgacgcctatgtcgatcataatctctagatcgctctcgggatctagagcgtgacctccgacgacttcttgagtcataggagcgggtgcggtctgagtctctgtcacggtctcgatcatatccacgatctctatcataatgcctatcatgatctctgctcctacgatcatggtctcgccctcgttcacgactatcaccaagttcacggtccctactagactccctgtctcgatccctac

SEQ ID NO: 16588 - DNA, 395 bp, Glycine max
  unsure at all n locations
  Clone ID: jC-gmle01810092d06a1
ggcagggtacatgtcaagcaagaagaccatggagatcaaccctgagaacccaatcatggaggagctcaggaagcgtgctgatgcagacaagaatgacaaatccgtgaaggaccttgttctgttgctgtttgagactgctcttctcacttctggtttcagccttgacgagcccaacacttttggaaacaggatccacagaatgttgaagcttggactgagcattgacgaggatgcaggtgaagctgatgctgaaatgcccccactggaggaagccgaggctgatgctgaaggcagcaagatggaagaggttgattaaaattaaatatgatgcgtttcttgttagtagcgtctctaatgccttttttggctatgnttntatctcccttttttaattt

SEQ ID NO: 16589 - DNA, 475 bp, Glycine max
  Clone ID: jC-gmle01810092d06d1
actacaaccaacaactcaaaaatagacccgcgaaattatagctaattagctaaatatccattgaacactgtcatcaatccaaaataaaaaaaggagaaaaaaacatagccaaaaaaggcattagagacgctactaacaagaaacgcatcatatttaattttaatcaacctcctccatcttgctgccctcagcatcagcctcggcctcctccagtgggggcatttcagcatcagcttcacctgcatcctcgtcaatgctcagtccaagcttcaacattctgtggatcctgtttccaaaagtgttgggctcgtcaaggctgaaaccagaagtgagaagagcagtctcaaacagcaacagaacaaggtccttcacggatttgtcattcttgtctgcatcagcacgcttcctgagctcctccatgattgggttctcagggttgatctccatggtcttcttgcttgacatgtaccctgcc

SEQ ID NO: 16590 - DNA, 113 bp, Glycine max
  Clone ID: jC-gmle01810092d07a1
ggcatcagaaaggtagagagggatacgtcacttcatcatcgttatgttccacaacgtgccgcctgtagaagccatgaatgtgcctgccagcaacatgacagaccactccgcta

SEQ ID NO: 16591 - DNA, 376 bp, Glycine max
  Clone ID: jC-gmle01810092d07d1
gaattattgtgcctgatttatatgatcctattcgtgatcaagaatcagcccaggatctacatggtaaccctgacgtagatatcaggcgctacacgtacttatgtgtcacagaacttcactaccttagccttatagctacatgaatgtttttcgaacctagctcgcccgctagatgatcgagaatgtccacggaactggatacgcaggttgatcactggtccactgcccatgacatctttgggtgagagcttgttagccgcgatcgaagcactggaacgtcaaacttgctggatgctgaacccctggttctgactatctgattcttcaagccgttaactcaccatgtgctccagaccctgggcgctcctcaatgaaa

SEQ ID NO: 16592 - DNA, 428 bp, Glycine max
  Clone ID: jC-gmle01810092d08a1
ctcgagccgaatcagctcgagcaacaacaatacaagttctcgctctatgggcgttattacttcacactaaggccactgataaatatgatggcacgcctgctctagttaaaactgactctgaactagttaagactacccctgccggtgaatatcttactgctgccctgaatgactttgatccagatcaatatgaggggcatgctgccatatctgatggtgcaaacaagcttttgatgctggttctggctgctgtcattaaagctggtgcttctagagaacatgagatactcgctgaaattaaggattctgatttctcttttattagaaagatggaaccaaaacgagtaatggacaccatgcttgtttcccgtgttagaattctggatataagatctttgcttgctagatccccagagttgcaatcaatt

SEQ ID NO: 16593 - DNA, 437 bp, Glycine max
  Clone ID: jC-gmle01810092d08d1
agagtaatagatggtcgagcctaaacaatgatattagatttaaaaccggatttgccaatgcaatcagatggctcaacttgggcaccaggttgaactgaacccggcagctgcgctttaagctactttcattaactacccgtagcaaaactgccgcacaatgtatactaaggataattactattacatacaagcataactgtgcactgctgagtgataaatactttgtacatagcatgtacagggaatctgattgcctaagaattaggcaagccatgacagaaatgtattaccacttagccaaactgctcaagagcattagcaatttagcacaggcacttgcgcatattagttaagaaccatctaacccttaaaaggtcatgttattacatctttgagtgcacccactttttcaagctcatcgaccaaatgcttaagcg

SEQ ID NO: 16594 - DNA, 444 bp, Glycine max
  unsure at all n locations
  Clone ID: jC-gmle01810092d09a1
caaaccaaacaaaacataagcaccgctcttttctctccgaaatccccatctcccttcacttctgagctctggacgagatcccagatctcaccatctttcacgcactcttccatcagattcaccctttcgtttaacgcaaactcataacttgaaggttaatggctgctccaccggcaagggctcgtgccgattacgattatctcataaagcttctcttgatcggtgacagcggtgttgggaaaagttgcctccttctgcgtttctccgatggttctttcaccactagtttcatcacaactataggcattgattttaagataagaaccattgagcttgatggcaaacggatcaagctccaaatttgggatactgcanggcacgagcggtttctgacaatacaactgcttactaccgtggtgctatgggcatattgctagtctatga

SEQ ID NO: 16595 - DNA, 518 bp, Glycine max
  unsure at all n locations
  Clone ID: jC-gmle01810092d09d1
aacttgttaaaaaagtcagagacactacttatcacacaaatttataaagaatgacaaggttaagcacaaagtcagcatcatgatcattatacacgtaatttcttctttcttcttgatcttgtacaagaatgttgcctccaatttgtaacatttgtcctcaaccacaacaagccgatttttgtgcagcctgtccagcccctcctgactggtcttggttgattttgattgttgatggctctgccttggtgtcagtgtcagccagcctttgttttatatctcttgctattgagaagaaaacttcctccacgtttagatttgtctttgcactagtttcaaagaatttgatcccatactcatcagccagtgcttggcccttggacgtaggcacggcccttttgctttcatccatatcagctttgttccccaccagtattttgttaacattgtctgaagcatgttgctcaatattgcgaatccaattcctgatattgntaaatgatgcttcatctgtaacatca

SEQ ID NO: 16596 - DNA, 445 bp, Glycine max
  unsure at all n locations
  Clone ID: jC-gmle01810092d10a1
ccgaaacccaatgacccacctagccatggtttggcttcaaacatggctccctgaaccctagcgtttctccctcttcgccaacaacgctgatccgatcccgatctgtttctgattccgatccgatccaatccaatggctggggcagcctctgctctgttcctccttgacatcaaaggccgcgtcctcatctggcgcgactaccgcggtgacgtcaccgccgtcgaagctgaacgcttcttcaccaaactcatcgaaaaagagggggatccgcagtctcaagatccggttgtgtatgataatggtgtgacctacttgtttatacagcatagcaatgttttcctcatgatggctaccagacaaaactgcaatgctgctagcctncttttcttcctacaccgtatcgttgacgtggttaagcattattttgaagaattgaagaggagtc

SEQ ID NO: 16597 - DNA, 529 bp, Glycine max
  Clone ID: jC-gmle01810092d10d1
ctgtaaaactgtgaatagatatttgaaaaatacatgtatattttatcgtgcatacatggttgagggacaattatttccctatctataattggtcagactacaatttgaccaattatacaaaaccctagaattctctgtaaaatgaagatcagactacaatttgaagacgatagaaaaagatggacagattgtgattacaaaaaaggcctgagaatgaagaggaagaaccaatcatttttcctatcaaaacagatttgaccaaagggacttgcaagagtttctagcttagatttagctgacaactttctagacaatgagtaacttataatttgatgcggtcagccaaaaatcgattaaagactccctcttccatccacgatcgttaaatgagacaattattttgtgaataccaaacagagacacaaatctcagatgagcctcagttcatactcttcagccattgttatgtatctcacccatggaagagcctgataaccacttttctcaataatcttcaaatatcttacct

SEQ ID NO: 16598 - DNA, 322 bp, Glycine max
  Clone ID: jC-gmle01810092d11a1
agtgaaagcagcaaacataaagcctttgagaagatgcaaaaacatgtcagtaaagacggggctaataagtgggtcagcgtacttcataaatttacaggaaagtcacaagcaacaacggattgcacaagattccattggcagtcactctgagcctagcagagtgaatgatgattcatcagatgtatgggacatagaacctatgaggcatggtccacaaggcgttccaaaggatatgtttgccatgcttcatcttttctgtgcaacctattctcacctgcttttagttcttgatgacatagagttctatgagaacaggttccat

SEQ ID NO: 16599 - DNA, 423 bp, Glycine max
  Clone ID: jC-gmle01810092d11d1
gtcgtgaaaaaacttaaaactatatatttgattgcataatgatcattattttcatgtaacactttttttcaaataaccaagtttaataacagtgtttccaatatgaacattcaacaaaacctccatgcacggggataatggaagattggaataacattggcaccaactggctgtgttgaccgcagccattattagtcgctggaagcaaccaatattttcccagaacaaatcaggatgcttttttcttcaacaaaaacataaatagcacgcctgagaatttgcacaaactccgggtccatggtctaaacttttgggaattgacttatactagcctctttgggatacgatcaccaggctcactaacaatggcatgtgccacctgaagcagatcaagaaagttcaaatccggcatttgaactgatg

SEQ ID NO: 16600 - DNA, 323 bp, Glycine max
  Clone ID: jC-gmle01810092d12a1
cgcgaagacggaactacgcgggttttccatgactgcgcgaacatcttccgtcactctcccgacaaaatcacgatacgctctcctcttccccctctccgcttcttcgcattctccgattctttcttccggccgcggattttgatacgttcgagagcggattagggttttgataggttcgcgatttcggtggagaaagagagggacggagatagatagatagagagagggagaaagtgtttggtagggttttttgtttggcgtatttcttgttttggagatggggagcgacgatcgggacggcaaccggctgatcaaggcgaatt

SEQ ID NO: 16601 - DNA, 546 bp, Glycine max
  unsure at all n locations
  Clone ID: jC-gmle01810092d12d1
tcttttttttttttttttttacagaaagaataaaatatttaatttccttaagttctgaaacagtgaagataattacgcagtctaaatgaaattcaactattcccctttacccctttttttttatttaatcttttcataggtagcacatgacaaaaaaattgcagagaaacatgctatcccgcaaccaaaaccacaagatccaccttatccacacacttcaaatgtacggataattccaacatatccacaacattcttctcatctgtgcactctaacaaaatcaatgtcctcccctgtagcttcaaccgatgacataaaaaaataaacattattgaacgtcatttacctctttttttagaaacgtcatctacttacctacatagacacctagatataaaatatcctccatgtacatatgaaaaaatcgaaaatttagggcaggcatcttcttacatcaataattnnttttttaccaatttttaggccatcggacatgaaaaagcactctgatgaaatcgcagtccaacaccatcttaagaaataaac

SEQ ID NO: 16602 - DNA, 435 bp, Glycine max
  Clone ID: jC-gmle01810092e01a1
aaattctagtgattatagactatctttatataataatataaataagaataaaaaaataaaaaaaaaaaaagaatctatataaatataaaaataatatatataaggtacaaatagtaaatcgaggtacccattttatgataaactttccttccatttttgttcctctagtaggcctagtatttccggcaattgcaatggcttctttatttctttatgttcaaaaaaacaagattttttagatacagaaaacaaagtaaaattctggggttttttattccccaattataatactaaattcaaaaaaaggagagtaatgagtataatctttcgctcagacgatgtactgatatattctatggcggaggttcgaagaacaagcaatttattttgcgccgatttcactttgataggttcattggggttattgctcgttgc

SEQ ID NO: 16603 - DNA, 486 bp, Glycine max
  Clone ID: jC-gmle01810092e01d1
attgaagatatcaaaaccaccacctatatcccaaaaaataatcgacccaaaataaaaactactaaagagacccgcgattccataaaaagccatcgtggccccttgtggaataaatggaaaataaataaagtccggaataaaagaaaaatcactaattttctcagaaataaagaacaaatccataccaagataactggaaattgcaacgaacaataaccccaatgaacctaacaaagtgaaaacggcccaaaataaatggcttgttcttcgaacctccgccatagaatatatcagtacatcgtctgagcgaaagattatactcattactctcctttttttgaatttagcattataattggggaataaaaaaccccagaattttactttgttttctgtatctaaaaaatcttgtttttttgaacataaagaaataaagaagccattgcaattgccggaaatactaggcctactagaggaacaaaaatg

SEQ ID NO: 16604 - DNA, 381 bp, Glycine max
  Clone ID: jC-gmle01810092e02a1
aaattatatagattatagactctgtttataggacaatataaactataatgctgaaattatcagcagtgtagagactgtgtatacataaaactcatatatataaggtactgatcgctaatctgggtgcccatcaattgaaaactgggctgagattttcggtgctctagtaagactaacgtctgcggcaattgcaatggctgcgcaatgtatatatgaggatatactcaagatcttttagatccagaagcctgcttatagtcctgcggtttcagatgccccagttgtcatactaaatacagaaacaggagagttacgagtgtaaactttgagtgacacggtgtactgatatatactatggcggatgctcgaggaacaagcatt

SEQ ID NO: 16605 - DNA, 548 bp, Glycine max
  Clone ID: jC-gmle01810092e02d1
attggagatatctaaaccaccacctatatcccaaggaataatggaccgataattagaactactaatgagacccgggattgcataaaaagtcatcgaggtcccttgtggaatcaatggaaaatgaatgatgtccggaattagagaaatatgactaattttcttagaaataaagaacaaatccataccaagataactggaaattgcgacgaacaataaccccaatgaacctaacaaagtgaaaacgggccaaaataaatggcttgttcttagaacctacgtcatagaatatatgagctcatcgtttgagcgagagattatactgattactctccttgttttgaatctagcactatagatggggaatcaaaaaccccagaattttactgcgctgtcggaatctaaaaaatcctgattttttgaacattaagagatatagaagccattggaattgcccgacatactaggcctactagaggaacaaaaatggaatgaaagtctatcataaaatggtgacttcgatttactatgttgaccttatagagattact

SEQ ID NO: 16606 - DNA, 518 bp, Glycine max
  unsure at all n locations
  Clone ID: jC-gmle01810092e03a1
caggctcattgatgtaccaatgagtaactgcatcaacagtggtatcaacaaggtgtacatcctcactcagtttaactcagcctctctcaacaggcacattgctcgcgcttacaactctggtaatggagtcacctttggagatggctacgtagaggttcttgcagcaacccaaactccaggggaggcaggtaaaaagtggtttcaaggtactgctgatgcagtgaggcagtttcactggctctttgaggatccaagaagtaaggatattgaggatgtcttgattctttctggagatcacctctaccgaatggactatatggactntgttcaaaatcatcgggagagtggtgcagatatcactctttcttgtctgccaatggatgacagccgtgcctcagattttggtctgatgaggatagacaacaagggaaggatcctttcatttagtgaaaagcccaaaggagaagagttgaaagcaatgcaagtagatacaaccgtgttgggcctttcaaggatga

SEQ ID NO: 16607 - DNA, 492 bp, Glycine max
  Clone ID: jC-gmle01810092e03d1
ggatgtgtgttggtagcactcttcaaaattgacatcactgccttaggaaattaatcagtcaaccaaaatttaagggagctctgatgattactggctgaggatgatgacattgatcaccagtgggaaaatgcagttcaagagttaccccagtcctttgcctaaaatatactagatttttaattcttaatgtgactgctattgtcgtggaattaaaccttctcatcaaaattcttaagccagtacaccaccgtatgccagaagtttgcttgcttggagactgtagcattaattgtgagtaaatggcaagtttaaattaagggggaaatgggtggtaacaacattttgtcttctctttgattcaggaggttagaaaaggaggtggctatcttcttgtagcaacagatatagctgctagggaagttgaccttccagaaatgcctcacatttacaactttgatctaccaaggactgcaatagattatcttcatcgag

SEQ ID NO: 16608 - DNA, 502 bp, Glycine max
  Clone ID: jC-gmle01810092e04d1
aaaaggaaatcctgcctgaacatacattaatccaaacaattggaactgacttccatacaagctaaatcaacataagcataacacaaaatgagacaatgatggagaaaaggacctggttacagtcgtttttcgttactgtacaagtctgttctatccagagcagagtcacaagcaagttcaaggggaaacttagtttagctagagtacatgcatgatacaaaatgagctttctataaacatactagaattatgattgcagctctttttaacaggactagcagaattatgcttatttgcaaacccgttagttccataagcatatcaataacttctggtttctttttctttttctataagtctagcaaaaaattgtcacagactaagatggatgatttcatttcacatggaaatagtacagcctaactctttggcagcgatatcaagaaagttaatagacaatccgtttgaaagtcggctgtgagcttcccaagtcaagcatttt

SEQ ID NO: 16609 - DNA, 393 bp, Glycine max
  Clone ID: jC-gmle01810092e05a1
ctgctgatcggcgcggtcgaaaagcccaaagcatatagagggtccgaggacacttggacaacagcgaccatacagagatatgcgcgtgcatatatgcgtatgcacacggtatcagccgttatggagacaagatgatagctacgcgaggttttgactgcttaccaacctggtggaacactatggctgcatactggatccggatattgtgaaccggttccgatcatgcagatgcacattcacatagtcaaggctcatgggggggcgtctcaattaggcatgatgagtgaaccatcacgggagggataagatctttaactcgagatagactgctcgggctgaactatggtgcatatgagagcgatgtcaaaagggtctttcgatgactgataaatg

SEQ ID NO: 16610 - DNA, 404 bp, Glycine max
  Clone ID: jC-gmle01810092e05d1
ggtcttacagtaaatttataacacattgaatggtatggatagtctatcccataaactagatgggacgatgcatagttggccgatcattgtgcactatgtcgcttaggcgcttacttagtctaacttggaggattgtggaattcatacttagaaagaatatgtgatgactttaagagatttggctgactattgtgccaatggatgatgataacctttttcgtacttacaactcaatgagagacactatatcaggaaagaacagcaaattggagcttcattaccctcgaatcatgttggtgtacaacacgaactcgtatatattatgctaatgagacagatgtgagctggaggcagagagcaagaatatatctaaatatagatcgatatatgtcaagcatatgctt

SEQ ID NO: 16611 - DNA, 498 bp, Glycine max
  Clone ID: jC-gmle01810092e06a1
gttggcagatgcaaaggatgtaatgcaagcagttcataacctgggaggcattagattgccagttctgactcctaatttaaaggtgcaaataactgctagagcaacaataaatgggcatatttatgttcagatgtctgatctgttacaattatagggttttgaagctgctatagcggctggcgctagagaagtagctgtttttgcatcagcttctgaatctttctcaaaatcaaacattaattgtagcatagaagaaagccttgtccgctatcgagctgttactcgggctgctaaacagctctctattcctgttcgagggaactgtagttccaatgcttttggctgtaatggctgttgtgccagcagagaagcttgctgtccacttccatgacacttatgggcaatcccttccaaatattcttgtgtcccttcaatggggatcagtgcagttgattcttcagttgctggtctaggtggctgtccttatgccaagggagc

SEQ ID NO: 16612 - DNA, 523 bp, Glycine max
  unsure at all n locations
  Clone ID: jC-gmle01810092e06d1
atcttgtaaaagagtaaatgatattttctatgatctttttcagaattatacaagaggcgtggtataaactaaacatcatgcacaatgagtgcatgatttaaactaaaaaacaaaaaattggagggataaaaattgcaagcttacactcaaatgagaagcttgtacttgtacttgctattggcagattacatgcattacttcttcctttccaactcatcaacgtgagtgggcattttattctttttctataattacggggttaataagatgaaacaatagggtgatgaaacgaatagggtgtcctctcactgcttgaagcatccaatttttatttttatttttatggtagaacatattatcatatcttggaagcatcagctgtgactcggctaaaggctaccgcggtctttgagccagatgggcgccccaaatgcttgccgatgaactcaccggctaacatgagctttccgagatcaacgttggttntcaccccaagtccattcagcatgtacacaacatcttc

SEQ ID NO: 16613 - DNA, 419 bp, Glycine max
  Clone ID: jC-gmle01810092e07a1
agggcctcgtgtcatccttggaagtggttaaccgaaaccgggtccgcgtgcacctgcacagcccgatctcgccctctggatcacaatacccctccccctcgtcgtccggcggacctatcacctcgccccttccctcgtctagcagccccgcaccataccacttcacgatcggctcggtcgacagctttgaaacgcagcttacggctgcgcaggaggagctgggcatcccgtctcaggagcgcatacccgtccaatacaaggaggagggcagcggatggtcagtgctcatctcgcttgcgccgacgttgttgctgggagggttccttttctggagcatgaggcggtcgccgatgggccgtgggggtggatcgggccgaatctttggcgtgggcaagagcaaggccagatgttcaacagga

SEQ ID NO: 16614 - DNA, 324 bp, Glycine max
  Clone ID: jC-gmle01810092e07d1
aaaagggccaaaacgaaccacgccgaaaaacatgcccgacaaataccagatcatgcctaacggattccgatcatccagcgagtcccgactggggtaaccccccctcatttcctaagggtccatgggacccctcccttattccacaagggggttccccggggtccgttcgaaccccgggctgggcccctttccaaaccagttattcacccccctcatcccaacttccaagcctatatggccagatctgctccactgggaacattccccggggattcgcccaaaaacctccaatgagccgttgcacccgacccagcactttagccc

SEQ ID NO: 16615 - DNA, 487 bp, Glycine max
  Clone ID: jC-gmle01810092e08a1
ggagcattgcagaggtggggaacctggaatggaatctctgatccattttgtgtgttgaatttgattttgtattgttatagattacagatttggtgggcaatggatagggacaacatatctcctccaccttcttctctttatgtgaaatcatcatcttcatccttcagacacgacgacataagcgctatgccggagaattcacccaagaacagaagccacagacgctcccattccgagattataaccctaccggacgacctatccttcgacgctgatctccttcccgactaccactacgacttgctctccctctacctgcaattcgatcagctagaatgctgttcacttcctctgctccttcctacttgcttctgctcacaacaacattaatgaaaggaccactggggttagacaccaacacggccactacatggatggctgcatccagctggagatgctgatctctgacgcctacgacgacgatgac

SEQ ID NO: 16616 - DNA, 491 bp, Glycine max
  Clone ID: jC-gmle01810092e08d1
ggcaaagaattttgcatagccaagatccaatgcataattctcaatctctaactaggactatctgtagtgtttcatgaataagaaatataatgactgtgacctaaacaaactctaaacaaaagggtaattaaaagtgatgaagagaaagcaatttgtagtctctaaaatcctctgccgcagaaggatttacatttgatgaggtgctatctgtgtcccctccctattcatgtcccccgtttgttgatgttactgttcctgttgctgctgtttgttgttgctgttgctgctgctgttgttgttgctgttgctgcagctgttgttgcagttgcagctgttgttgctgctggtgaaactgttgttgctgctgaagttgatgctgaaattgctgttgctgctgaagttgatgctgctgctgcttttgggaatgaatttgaagttgttgaaacttttgtgcagctaaaagagtgtgcatagcctgattgttgggatag

SEQ ID NO: 16617 - DNA, 513 bp, Glycine max
  unsure at all n locations
  Clone ID: jC-gmle01810092e09a1
gctcgaggattgaagagacccagcagaccgacaaggacagatggaagggtcttgcctatgatatctcagacgaccaacaggacatcacaagaggaaagggtttggttgactcccttttccaagctccacaggatgctggaactcactatgctgtcatgagctcctacgagtaccttagcactggacttcgccagtacttggacaacaacatggatggattttacattgctccagcttttatggacaaacttgttgttcacattaccaagaacttcatgaccctgcccaacatcaaggttcctctcattcttggtatctggggaggcaagggacaaggaaaatctttccaatgtgagcttgtctttgccaagatgggaatcaaccccatcatgatgagtgctggagagttgnaaagtggaaatgcangagagccagcanaactgatcaggcagagataccgtgaagccgagacttgatcaagagggaaagatgtgtgctcttttatcacgatct

SEQ ID NO: 16618 - DNA, 408 bp, Glycine max
  Clone ID: jC-gmle01810092e09d1
aggacaaaaggaaaaggcaccaaattcaatttaaggggacactttaactcaaaattatagaggaagacagtccaatatgaaaaatatagtaaaatcatctcaaacttggcatcttctctttgcacctaagacattgagaattctaagaatgttacacgcaagtcccatcacaacttttagcacttggatcagcacaacctttaggaacagaaatatttacttgccaagtttgctttgcctccaattcaagattggaagaaagttcccctgttaatagcatcctcgttagcatttccaagtgcagcctcgttcaagtacttgtcagccaattggactctcttgacattctcttgttcttggacaagcatgttaccatacgtcaagagcttctccagagtcatcttgggc

SEQ ID NO: 16619 - DNA, 251 bp, Glycine max
  Clone ID: jC-gmle01810092e10a1
gtagagctctagcgcgctcatattaacaaggaacaaccactgatacattgcatgctaaccatcacaactacaagcaaacccaaccacattgagctagatggaccgacatgaaagctgcactactgcgcccatttacgggagtccagcatccgtatgagcatctgtgagagccaccccagacgtgaatctgctcatgcccattcgtgaagcatctgcggggaattaaaccgttggtattgacattaccagtg

SEQ ID NO: 16620 - DNA, 538 bp, Glycine max
  Clone ID: jC-gmle01810092e10d1
ttgaaccgcccgcttacctttgccgagaagatcctctactcccacttggacgacccccacggtcaagagattgagcgcggctccagctacctcaagctccgtcccgaccgtgtagcctgccaggatgccactgcccagatggctattcttcagttcatgtcagctggtctgccctccgttgccactcctaccaccgtccactgcgaccatcttatcgaggcccaggttggtggtgagaaggatttggcgcgcgccaacgagatcaacaaggaggtttacaacttcttgtccacctcttgcgcaaagtacaacatcggtttctggaagcccggctctggtatcattcatcagatcgtgcttgagaactacgctttccctggtgctctcctcatcggtactgactcgcacactcccaacgctggtggtctcggtatggccgccattggtgttggtggtgccgacgctgtcgatgtcatggctggtcttccctgggaactgaaggcctctaaggttatgggtgttaagcttactggcaagc

SEQ ID NO: 16621 - DNA, 323 bp, Glycine max
  Clone ID: jC-gmle01810092e11a1
ttggttatgtattgatttgatacccaacaatatgtatgtctcaatgatttaagtactttttcctcccttcaaatttgccagaatctttatgtctgttagaattttaggtttccaatagactcttatttattggatacctaaattataattttattatcaatttaaatttggaatttgtctaagtgattttcacttttattggtttgcagagatattgaaagtcctcatggaggcctttcctgaaatttcaatgactgttgatctgtcgaacactactgtgttgcatactgctgcagcacaaggacacattgaggtagtaaatt

SEQ ID NO: 16622 - DNA, 564 bp, Glycine max
  Clone ID: jC-gmle01810092e11d1
aacagtaaatttgtataatattcaaattctgatgaagctaatgtgaaaatacctaaaataggcatgatgatccaatactttcaatttagaataacattcacttatcaagtggactatgattacatcttttgcctatgttctgcaaaggcatgcttttgttgcagtagttaatgtttgttttactaagcaacaaacacctacaatgttagtgtaactggccaaaaaaggagggagaactctgaaatggtagaaatcaaagttatattgcatacactgtcttatactcattctctgatcctgacatcattgacatagacattgactgcctactgctcattgttgtcctaagacttcgcaatcttgaggcctcaaggcgatgagcaatcacccaataacagagtgttcctaaagtagctgccataatcactgttcctagagctgtggctgctatagccaactctttatgatccccaacaattatgtatgacattgcaataaatgccacagaaatcagcacacatgcaacccacatcaacttatttataactgccatcatttgtctct

SEQ ID NO: 16623 - DNA, 182 bp, Glycine max
  Clone ID: jC-gmle01810092e12a1
gagaaaggttttctgcataggtggtttatagcatgtttgtataattgtaagagatttatgaggaattttctgtatcttctaagtgaactgttttgttgaataactgcagaaacaatagtgctttgttgaaaaacatattttcaaaataaactggcataggtgtgtgcttgtgtctactatct

SEQ ID NO: 16624 - DNA, 182 bp, Glycine max
  Clone ID: jC-gmle01810092e12d1
agatagtagacacaagcacacacctatgccagtttattttgaaaatatgtttttcaacaaagcactattgtttctgcagttattcaacaaaacagttcacttagaagatacagaaaattcctcataaatctcttacaattatacaaacatgctataaaccacctatgcagaaaacctttctc

SEQ ID NO: 16625 - DNA, 513 bp, Glycine max
  Clone ID: jC-gmle01810092f01a1
gttctgggacgttgcggaatggaatgtgaaggacttgagaccttgtgcattaaggatcagacacttacaaatgaaaataattggttgggctttaagccaccacctcatgcagaattcagaagctaagcctgattcaaagcttgtattgtcctgtgagagcattctgtatggaattgggatcttgcagtctatccagaatgaatccaagagcctgaagaaatcacttaaggatgttgtgacagaaaatgaatttgaaaagaggcttttggctgatgttattccacctagtgacattgatgttacttttgatgatattggagctcttgaaaaggtcaaggatacattgaaggagttggtgatgcttcctttacagaggcctgagcttttttgcaagggacaattaaccaagccctgcaaaggtatcctattatttggtccccctggaactggtaaaacaatgcttgcaaaggcaattgctactgaagctggtgctaacttcatcaacatttctat

SEQ ID NO: 16626 - DNA, 435 bp, Glycine max
  Clone ID: jC-gmle01810092f01d1
ggatctaaatgcttattattccagcagatttcgatagataagagaacaaatatatcacaggatcacctgactactttatcttttcatctagtagaacttttataacttgaaataagacgtccttcagggatgaggaacaaaacaaaagcagcagaacaaaccaaaattttggaaggctccactcctttcaaaacccatcatcccaaatgtaataaaaataactttataaataaaaacctatatttcattttacaaacgaaatggctcaacagcaaacccttaagcgataaaatttggcaaaactatagatgcaagcttcaggagatggaagctgcgggggagaagggacatgtcagctatagaaaaactctcacatgaaataactgagtgctttctttactcttgaacccccttctccatataattcattccatt

SEQ ID NO: 16627 - DNA, 482 bp, Glycine max
  Clone ID: jC-gmle01810092f02a1
atcgtctgcttcttctatggctctcactctcggatgcatcgactatccctgtcatcaacggaggtcgatcttaaaccgactcttccctaatcttcggctatgatctactctgcttctgtatctgatcttttctcctaaccttcttcaatgaaatgtactgtatcatgtgaatcaggccagggaggatctatctctatccaagatgtagttctggatgggaagaaggaaccctacccgtctacatatacaaggaatcttcctcaacacatggtgggtcatgaattcgctaacaagagaatgaatgtggtcctagtatctgactgattgagaggcacacacgatcttgcatattatggactcaaatctttcacgcactctatctctcgattggactcagctgactagtatgatagaataccatggaagagaatctatgagcaacacatagagagaagcagacagtaacatgggacggtttgggt

SEQ ID NO: 16628 - DNA, 438 bp, Glycine max
  Clone ID: jC-gmle01810092f02d1
caacataattgtaaatattgaataatttaaaaataagtgtatccataatcttcacatcaatattgataaagggagatagatgagagggaggatatggcaaacgcgacgagagcgagagcgggaaagacaccaaacccagctctgccagagaaacttaagacactacacatttaacgaaaaacaataccaatgaagactaaccctacaagatcttatatagcattacttgcaagtttcaaacagctactgagaggttgagctcctacttctcattcatggagagctgctcatgtcattagagaatcggactttgatcatgggtctgttatacgagtctatgagctgctgaaatttcgctatcaaataacctttttcttgccttgatagcctgttgttcccaatgtatgcggcttgtcatggtagaaaatagaatacatt

SEQ ID NO: 16629 - DNA, 529 bp, Glycine max
  unsure at all n locations
  Clone ID: jC-gmle01810092f03a1
aagaaaacgaagatgaaatacagcagcagagtgaagagaaaacaacgatagaaagtcacgaagaggagaacaaggcaacgggaccgtcaaagaaaggtagagacaagtatgtcaggacaaaagtacgactggctagcacgcttaacaagttctcgatcgtggatatggttggaatcttgatgcttgcatcccgtgtgctcaatctaggactactgccgagtgattttgcggactgggtggccacaggagtgatcccgtatcataacgcattagccacaacttgtgctgatgtgccagaagtacgggattccgtcaagttcatttctcgattcttccagtccgtaatgaaacgtcatagggcgagtactgttcagatcgcctactctgccaaccacctcatgtatcacatggggttgcgtctgcctcgactaaatgtgtcgctagctgtgcatcgcatttgcgccaccatgggttttcctggaaaggtctttcgcaactttcaagtggatctcggctttatgnaacgcac

SEQ ID NO: 16630 - DNA, 437 bp, Glycine max
  Clone ID: jC-gmle01810092f03d1
ggacagggtcacgctggggaaacctgtttgaaattgatgcccctttacgaaacccaaaatgacatagcgctagttgggttattgccttagggtagcgtcaagttcggtttgcttgaccatatttggcgatcttcgcaactttatagagcctgcgttgggctaaagcgtttggggcttgaagcccgtccaggggggcgatgacgtgtaactcatgcctaccaatgcctaaatagcttgagcggatgtaatcgttattccaaacgaaatgcaaatgtttgttggcataaccataccacaagttctgaggttggcgcaaattgatgtgacgtggtgacgtgcgtgacctttaaagcatgtctttacttgcttgagcttcattgggcactcgttagttgattaggctcgaacgacgtcatcatggcttttggcagtctttt

SEQ ID NO: 16631 - DNA, 247 bp, Glycine max
  Clone ID: jC-gmle01810092f04a1
gtgagggtgaatccgaggaagccaagaaggagttgttcgtcaaaagctactcctactaagatgtttgcagtgaatatgatacttgttaggcagcaacaccagcagttacagtaggtgttgacggacgatgaagtggaagactaatttgtctaaaatgtaatgtttttatagtcttggagactatttttgtttatggttaaatgcacctttacagcttaataaaccttttgctatgagttgtgtactt

SEQ ID NO: 16632 - DNA, 247 bp, Glycine max
  Clone ID: jC-gmle01810092f04d1
aagtacacaactcatagcaaaaggtttattaagctgtaaaggggcatttaaccataaacaaaaatagtctccaagactataaaaacattacattttagacaaattagtcttccacttcatcgtccgtcaacacctactgtaactgctggtgttgctgcctaacaagtatcatattcactgcaaacatcttagtaggagtagcttttgacgaacaactccttcttggcttcctcggattcaccctcac

SEQ ID NO: 16633 - DNA, 478 bp, Glycine max
  Clone ID: jC-gmle01810092f05a1
cggctcgagctctttctggaggttgaagaagcttgtgttatcaggtgacatctccgatgtagcagcagttccgttgagtgaaatctgtgttgtagagtaagctgttgtcatgtgagaacttttaagagttttttcgattttacagaatttaatatgattgtatatggaaaaaactcttctctgcgacatcaagcgtcggcattcgacattggtgcttgcttgacagagaaactctctgccactgccaccttcgctgctggcattcaagtgtgcctcttctctttttccttacatgtatcctgatttggacacctgtttacatgatgagatggcggctgcaacctttaaaggacctcctagtgagtgttgagggaatgggaaaatggaaagaaagccttctgggaggagacttgtgtttgttcagactgaaactgggtgtgttttgggaatggaattatatagaagggacaatgcccat

SEQ ID NO: 16634 - DNA, 542 bp, Glycine max
  Clone ID: jC-gmle01810092f05d1
cacactacaaatatcctttatatctccaggaaaacataggtatatacaaatttattttggcatctaccctgaattattcagcatactaaccagtgaacataaagtgggaaaaataaaaaggagcaaatcaggacataatcttcacatctactatagtggataagctctcccctctattgtgctgatgcaagacattgcctacctggaaatcttcatttgcttttactcctggataatccatcctcctcagtcctcagtgttgcgaaaataaagcctctgtatttatttatttatttatctatatatagttccatgtgtaccatatgacacattgtacaagtctctaatatttattagttcacttcacatttcatttatggtccccctaaaactggcatgaagttccaagtctctgtctctgcttcttgctcacatttcctcgtttgcaattaacaaaagctgggatcaccaacctctggaaattctcaagaaactgattccacctctcttcatccatatctggtagcttcacgaaacatgag

SEQ ID NO: 16635 - DNA, 449 bp, Glycine max
  Clone ID: jC-gmle01810092f06a1
ctgctcagacgctaagggttttatgcaggcatatcataacctagataccattatattgccgattttgactcctaatataaaggtgcaaataactgctaaagcaacaataaatgggcatctttatgttcagatgtctgatctgatacaattatagggttttgaagctgctatcaccgttgtcgctagataagtacctgtttgtgcatcagcttctgaatctttctcaaaatcaaacattaattgtagcatataagaaagccttgtccgctatcgagctgttactcgggctgataaacagctctctattcctgttcgagggaactgtaattccaatgcttttggctgaaatggctgttgtgccatcagagaagcttgctgtacacttccatgacacttatgggcaatcacttgcaaatattcttgtgtcccttcaaatgtggatcagtgca

SEQ ID NO: 16636 - DNA, 326 bp, Glycine max
  Clone ID: jC-gmle01810092f06d1
aacagtaaatgaatttgtctatgatctgcttgggagatatacatgaagtgtggtttaaacccggcattatgcacattgagcgcaggatttcttcgtactgaaaacggtgcccttagatgttatactgcatgcttacactttaatgagaagctggatctcgtacttgctattggcagataacatgcacgacttcttcctttccaacttattaacctgagagggcattttattctattgctattagtacggggtttataagatgaaacaatagggtgatgaaacgaatagggtgctcttatactgcaagaaggatccataggctattt

SEQ ID NO: 16637 - DNA, 467 bp, Glycine max
  unsure at all n locations
  Clone ID: jC-gmle01810092f07a1
ccggtttgtccgctggtgttgccgttgtagccactggccacccctttgataccgtcaaggtgatgctgcaaaagcacaatgcagaagcacatatgattcagtatagaaatggattgcattgcactgctaggatattgaagactgaaggaatcaaaggactttatagaggagcaacaccatcttttgttgggatggcagttgaaggatcactcttttttggcatttattcccagacaaaagtgtaccttcaggggggagttcaaagtggggaaccacggcctcaagtgataataccatctgcagcttttagtggtgccatcatcagttntgtgttaagtccaacagatctgataaagtgtaggatgcagatacaaggcactgactctttggttcctaaatccagtagatacagtagtccccttgattgtgcccataaaactgtaaaagctgaaggggtgaggaaattc

SEQ ID NO: 16638 - DNA, 481 bp, Glycine max
  Clone ID: jC-gmle01810092f07d1
cactgtaaacgtatttagaaaatattacaagtgtatgtatcttggggtagatgggtgttacaagtgggcttttctgtcttggccatactatacacttccaataatgttaacttcaatggatataaacaaatatactttcatgccagagatagaaatgttctacacttctatccaaaaaattggaggggaaaaagcatgtagaggcctaggggacagttaaaataaaggcctctgattccaagttcgttaagcaagctctctaataaaaaaagaattaaataaccagcttcaaatgcaatgttgaatgatgtcctgagctttgttgtattatccgcaattaggtagactctcagtcacgcttaatgcctagcattttcaatgctagctcccatgctacaatcgttgcagcattagcaggaaatgctcgacttacagtagcacccaaacctgtatagcaccccttcaatccagccctttgata

SEQ ID NO: 16639 - DNA, 385 bp, Glycine max
  Clone ID: jC-gmle01810092f08a1
cttcataaatggtgataatgattcaaaatgtaggtagcttagggaaataaaagtttgtccaaactgggtattctgcactattttaaaaaaacaaaaactttagtcattttttttttttgggttaggattagaggaaaaagcatgaagaacttgtactggttcaaagagatttctaacaacgtgagatcagggagaaggctttcactaggggaatacaagagagcagtatcatggtcaaagtatttgatctcttctggggcagccataaagggagaaggagaagaagaatggagtgctgatctgtcttaattgttcataaggtcaaaatttgcctctggaaagcatagcaggaattacagaggcatctacaagcacatggatgttg

SEQ ID NO: 16640 - DNA, 471 bp, Glycine max
  Clone ID: jC-gmle01810092f08d1
aaaatggaagaggattatacttattaattaaacatattttttgttcttgggattgatttaatacaattcatgttacattgttggaaagagaatgttaagctttgcaagaagcaaatatattattacattttgacaagcatctaagaattatattattaggacatggtttgtaagtagagaaaaattctggatcctgctcaagtgcttcagtgtagctctccaaaattgcgactatctcatcaaaatgtggtcttttatctggattgcttgaccaacatctgttgatgaggtgactaaaagcctttggacagtcacatggcaacgggggcctttcattcttgtgagtcacagcatatgctgcttgctctggtgtcatgttgtcaaatggcgtcaatcctggtaatagttcccacagaactatggcgaaactatagacatctactttcttggtgtgacgcttttttttgatca

SEQ ID NO: 16641 - DNA, 449 bp, Glycine max
  Clone ID: jC-gmle01810092f09a1
aaatggactagggtcatcaggaacaggaaattctgatcaaaatgagaagctgactaagaaaaggaaggatcaagatgaagatgaagatgaggatcaggagaatgatcttgacaatgaggacccatcagcccagaagaagcctcgggttgtttggtctgtggacctgcaccgcaagtttgttgctgctgttaatcagctaggcattgacaaggctgtacctaaaaaaattcttgatttgatgaatgttgaaaagcttacaagggagaatgtggcaagccatcttcagaagtataggctttatctgaaaagaattagctgtgtggctaaccaacaagccaatatggtggcggccttaagggttgcagatccatcctatttgagaatgaggttcgtgagcggggttggacatgtacaacattagtgggttccgacagctttcatacataatt

SEQ ID NO: 16642 - DNA, 487 bp, Glycine max
  unsure at all n locations
  Clone ID: jC-gmle01810092f09d1
ccaagcataaaagggggcatccatgtttattgtcattcatcataatcactacaatctttgtttatggatccctaacattttacaaatttgcaaccccagatctctccccatctgctacacagagtgcagcgaggagtgagaaagacacaggttcaagtgggttccacctggaccttttgtctctctctcctcactacaagtgaggctgtgagagaagatctaggtccaatttgcaggccagcatatctatgtagattaaacaaagtgattgatacttcataatgcattgctggacctgaaggcaaggacaacaaagcatttgtataaaattagaaagcccttaatggaacaaacctagaaaactttacccagganaaagtaatctggagaagctaagcctatagtaactatgagaagaaaaagtggttaaacccaatgaaactacaaaatcatcaacgaggatgtgcatgatatgctggtatgtgct

SEQ ID NO: 16643 - DNA, 507 bp, Glycine max
  Clone ID: jC-gmle01810092f10a1
aattcggctcgagcgaagattacaagttcaatggtttggcatggctctttttgggtgtccctacaagcagctcattgctatataaggaggaatttgagaagatgcaagagaaatatcctgacaacttcaggcttgacttcgctgtgagccgagagcaaacaaacgagaacggagagaagatgtacatccaaacccgaatggctcaatatgcagaagagctgtgggaattactgaagaaggataacacttttgtgtacatgtgtggactaaaaggaatggaaaagggtattgatgacattatggtgtcattggctgccaaagatggcattgattggactgagtacaagaggcaattgaagaaatcagagcaatggaatgtcgaagtctattaatttctgatcacttgcacaaatatcatctcctactttgtgctgcaacaagtctatcaacccttctgccgtgtgtagatatatgacgtccctggaattttctttgacgattttatac

SEQ ID NO: 16644 - DNA, 349 bp, Glycine max
  Clone ID: jC-gmle01810092f10d1
gacatacggaacttggattaatttattttggatcatccctcaaaaataggacttggaaaactgacattgaagttgttcatgaacgggttaaaaatcgtcaaaaaaaaattacagggacgttatatttttacacaacgcaggagggttgatagacttgttgcagcacaaagtgggaaatgatttttgggcaagggaaccgaaattaataaacttggacattccatgggtctgattgcttcaatggccttttggactcaggccaataaatgccatttttggcagccaatgaccccataagggcataaatacccttttccattccttttagtccacacatgtacaccaaagg

SEQ ID NO: 16645 - DNA, 323 bp, Glycine max
  Clone ID: jC-gmle01810092f11a1
attgtgggtcattggttgttgccaaagttggaaatcacaaacaaattgttggtttccatgttgctggaagcaaaggaagactgggatatgcttcattgataccatacgttgagccagttgtgcaagcttaaaagcgctgaagtttactctgacttcttccctgtggaggttgatagtcaagagggagttgctcacattggtgaatcgaaatctggtgtctatgttccactgcctacaaaaactaatttggtggaaactcccaaggaatggcaactggatctaccttgtgacaaaattcctagtgtcttgactcaactgatgag

SEQ ID NO: 16646 - DNA, 567 bp, Glycine max
  unsure at all n locations
  Clone ID: jC-gmle01810092f11d1
aaacacactcattgcacatagtaatgcgctttatttaagtgaataaaatattacatactagttcacaaatgcaaaaggacactcatcaaccagatatttgagactcttacagttctcaagaagtcgcatcagcatagggttagtggcgttagaactcagaatttcattcttaacgccaaaaagaacagccagtaaagctactggaaaaggatcaactctagtaagaaaaacaattgtcttacctctcccaagtgctgtgcgaatccttttgttgatatctgaggagcgattgttaactgcagaactaatccaagcagtggtgggtaaaccaccacgtccactaccacatgtaacatttacaacgacagcttctgaaggtaattgacttacaggataaagacaattcacaaaaattggtaaccaagaatccactggaaaatttccatcaaagaattcttgtgtgttaaccaacacaagcttatcatcaaaaacaatcttggttggaaaagctttacctgctcctttgtaacccaacanatcaatgctcaacagtagatcaatattatc

SEQ ID NO: 16647 - DNA, 183 bp, Glycine max
  Clone ID: jC-gmle01810092g01a1
cgacgacgacgacgatgatgtttaccatctctcccgcgtggtcaatggtcttatatattccttttggatggtccaatgatcttaatatttgcttaccatattttatatatagttatattgtctgttgaagaagaactgtacagcggtgccaggccagctatgggcacctctgacaaagaaaaa

SEQ ID NO: 16648 - DNA, 133 bp, Glycine max
  Clone ID: jC-gmle01810092g01d1
aacatacaatttaaatttatatcacaatatggtaagggattttcttgaaaaaggggccctccaaaaggcctatttaacaaaattgacctcacaggaaaaatggtgaagcatatcgtagcattcgtatttccac

SEQ ID NO: 16649 - DNA, 532 bp, Glycine max
  Clone ID: jC-gmle01810092g02a1
ctccaacgcagaaacagacacatcctctcttctcttatcatggcttctcacaacatcaaaatccacgaccactcaagggtctcccctccctcagccacagaaatatccctctctctcacttacttcgacctgctctggctcacgttccaccccgtggaacgcatcttcttctacaccctccctacaccccattcaaatccatccattgtctattccaaacttgttccaaagctcaaaacatctgtctctcgcactctccaacacttcccccctctcgccggcaacgtcgtttggcctgataacaccccaaaccccaccgtccaatacaccccacgggactccgtttcacttgaggttgctgaatccgaagctgatttcaccacgtgttagatgactcacctcacgatgcatcagagttacgttgcttactaccccacttggatgcatcggattctcatgcttctgttgtctactttccaatcactctgatacctaacagaggctatagcataggaatcagcacccaccatgc

SEQ ID NO: 16650 - DNA, 527 bp, Glycine max
  Clone ID: jC-gmle01810092g02d1
atgatcaatcatctaacatttcttgacgaaacaaagtacaaaagagatccatgacatgttccttcagcacgagcccaacttgaacaccatcattcccatccttgctgtctgcaaacccaatggttcaggctctatccaccgatgctatctccaccttagcaggctttccccaaccaaaatcaggtccataaactccaaaccgggtagaccctgcatttcccatgatgtcaactccgtgttttcccaaagactcatatctagaaaacgcactctccatcccatgaaaaatcccctcatctaatatcatctttattttactatgaatactctttgcaacaatagcagaagcttcttcctttatgaagtccaatggttcagcatccaccacatgcccccacacacaattgccaaaataattatcatggattggaggctccaacctcgccctgcaatccactgtgaacgcaaaagcaaattgctctttctccttttcaactgcatgaatggccttagcaatgcaagctagc

SEQ ID NO: 16651 - DNA, 600 bp, Glycine max
  Clone ID: jC-gmle01810092g03a1
atttggctttctccctacttccttcacatgcattgctctctcttctctcacccagcaaaaactcattccttttaagcacaatagaagaagaagaacaacaacatcaacagcggcatatctcagatatcatcatggccgttgaagcgcgccatctcaatctcttcccttctcaactcatcaccaaccggcaagtgatggattctggtgaggcgaatatgatgaacatgtacaacaacagcactgcgattggtggttactcttcgtgtatgccgttatccggcgccgatacggagacagagctaacgtactcggttatcaaccattctctcgccaacgccgtcaaatgctaaagcggcgttacctacaacaacagcaacggcaacaacaacgtttatgatactgccatgtcgagaaagcgatcccgagatcataacaacaattacaggtacaacagcagcaacaacgattcattgccgcttcttggtcaagacgtttctctgcagatccagcagcagcaacttgacatcgagcagttaatcatgcaacgcatggagaacgtgagaatggacaatgatgagaagagaagaggcagccaggatg

SEQ ID NO: 16652 - DNA, 514 bp, Glycine max
  Clone ID: jC-gmle01810092g03d1
cttcgtcctttttttttaacaatttgtcaatttatgaaaatttgatctattttcaccttttaagagattgaattgagacaaagagatgattctcattaaggtcctagagtcctatcttatccaaaaatcaggacatgttaacatgcacactagcagtcttataggacttacacctgggacaaatgcgtagtgaagacccacacacagtacacaagcacaaatgacggcacggctcaatcagcccacaatactcttccttgctacagttcctgcacaacctaccattaccaccaccctacttatccttcacccctgcgcaccccgctaacgtgcgccaaccccccgtttccttttctaaaccgttctcctcagtgctcccgcagcaggactcggcgtcagccatcttcgcgccgtcgcacacggtggcgccttcgccgacgtcttactgcgccgccattacgtcgcgctgcgcgagaacctgctctaaatcacaccgcagagcattcgctgtggc

SEQ ID NO: 16653 - DNA, 530 bp, Glycine max
  Clone ID: jC-gmle01810092g04a1
aatcgccatagttgtgcctaccgttctcgttgttgttgctttgctcattttcattagcatatattttaggaggaggaaattagcaaggaaaaatcttctcgctgatgaagacgatgatgaaattgcattggctgaatcattgcaattcaacttggacacagtacaagttgcaacaaataacttctctgactctaataaactcggagaatgtgggtttggagcatgctaccaggctctctaatggacaagtgattgctgtcaaaaggttgtcaagcgatcctggccaaggtggcgtggaatttaagaatgaagtccttttactggccaagcttcagcaccgaaatttacctaggctacttggttttagattggaagggaaagaaaagctacttgcttatgaattgtgtccagataaaagccttgggtacttcatatttgatcccacagagaatgcacgactggattgggatagaccatacaaaatcattcgaggtattgctcgaggtcttctttatcttcacgaggattca

SEQ ID NO: 16654 - DNA, 431 bp, Glycine max
  Clone ID: jC-gmle01810092g04d1
gccattaaaagcaatatttatttccattgaaggggcttttcgttgtaactgtggaagcaacaccaagcagcacggattgcataattaccaaaccatacactttaagaccaatacaccatggattgatattcgatggcactggattaactgactgaaacaattaagttctatgggctatttaagtaaccatactttgcacaaataaattacaagttccaaaacatgtattaataacattgacgacaaatgcatatttcacccctaactatgaccagaatttaacgagggtatagctcaaaaattgaagcctcacttactgagtcgtgagctgatttggttggggactgattcgaacgggttggccctgaattaacttcccatgacatgtttggaaagcttgtagttgcactatccataaaaaaagcaggttt

SEQ ID NO: 16655 - DNA, 455 bp, Glycine max
  Clone ID: jC-gmle01810092g05a1
agctgatctaatttgcattggtttagatgaacatagtccgaggaacagcctccatatgtgtggcatggagttcctatctatgttggacggacttgacgaggaacggtgcggtgactaaccgcggcattattctgtcaagaggcttcgactaactgtgctacaagtgtacgctatgtagaagaactttgactgagataacacgcttgcacctgagacgaaagtgaagcttgcccaagaacttgggttgccacctacaccagtagccatttggatccaaaacctccgaacccgatggagaaccatactgttggagagagattatggagacctcatagccaatgatgacgctcttaagcttaactacggcactctcaatgaggacaacctaatcttattatagcacgtagaataatcatacaacatagtataatatgtagaatagttgattatgagtc

SEQ ID NO: 16656 - DNA, 415 bp, Glycine max
  Clone ID: jC-gmle01810092g05d1
gataaaggactacatcggtattctatacttgaattgaaatttggtttttacagcatggtttgctttacgattgaataattattgatattacccacgatcgagagtaataattaaccttaatcggcatccttcatttccgaccccacgccatgcagccattgatctctggtctctttttcgtaactctatcttttgcacagggtttcattttctaccttcaagcagcctttgttggcaaggggcaacctttttttacaacttttacctcaatgagcagggttcaacacaaccgggcaacattttaaacaaaaatttttgaaagcgggttccaattttcccatggttcttctatctcagctccactgttctggacagtaccattgcagggtcggtgcttgttcatcggagaagaaat

SEQ ID NO: 16657 - DNA, 522 bp, Glycine max
  Clone ID: jC-gmle01810092g06a1
attcattctcaacaacaaaccaatctttcttagaaaatgagggggggcttgtggcaacttgggcaatcgatcactcgccgtcttgcccatggagataagaaggctgttgctcgtcgatgttttgcctcagaagctgagctgaaaaagacagtgtttcatgacttccatgttgctcatggtgggaagatggttccatttgctgggtggagcatgccaatccaatacaaggactcaatcatggactctaccatcaactgtagggagaatggtagcctctttgatgtttcccatatgtgtgggctgagcctcaaagggaaggacgctgccccattccttgaaaagctggtcattgccgatgttgctgggcttgcccctggaactgggacgttgactgttttcacaaatgaaaagggaggtgcaattgatgattcaggaattactaaggtgacggatgaccacatatatttggttgtgaatgctggctgcagggataaagatctggctcatattgaggaacacatg

SEQ ID NO: 16658 - DNA, 433 bp, Glycine max
  Clone ID: jC-gmle01810092g06d1
aaaggcattaacagggactggaacccccgattttgggaaaatttggcaacaggggaaaaagccattaggaaaaggttaaaaaataaaacccgaagtaaatcaggaagggttatagtatttgggggggccaaagggcatttttggaaccaccccttaatgggggttccccccaaaaaaaatctttactttgggggctgccttgggcaaaccaaatttcacatatcccagggctatgttctttggggggcaaggaccgaatcccccacgggggaattccccaaggggggggcccccttaatctggaaactcactggggcttttgggagggggccccaaaaaaaagaaacccacccccccgattttaggacccttttaaagctggttcaggaaaacaatagctcctaaaaaaccacctttgggtttcccccttttc

SEQ ID NO: 16659 - DNA, 488 bp, Glycine max
  Clone ID: jC-gmle01810092g07a1
gtgcctgcaacacaaaaggtttggatggacttatactcccttccagtccctggatctggtggtaagacgtgctcccagatatttgaagaagctgggtgtgacacaccagctagtcctagttgcggtgcttgtttgggtggcccgaaagatacttacgcacgcatgaatgaacctaaggtttgtgtttcaactacgaacaggaacttcccgggccgaatgggacacaaggaaggtcaaatctatttggcttccccatatacagctgctgcatctgcattgaccggttatgttactgatcctagagagttcttgcagtagaatgttgttacagtcatcccattggtgttgtacacgttgttggttagttgtgtattctctagccataagttaaaactgatagctatttaagccgaccaatcttttggtattttttgtctgaagaaatttcggtgactattattcaattgacacaagtttggttgtaaaaa

SEQ ID NO: 16660 - DNA, 354 bp, Glycine max
  Clone ID: jC-gmle01810092g07d1
atcttctgtattgattgttagacaaaaaataaaaaacaaagggacgggaaaaatatgggaaaaaaccccacaaagggggagagaaaacaaaacagaccaaaaaagataacaaaaccaaagaaacgacaggaagggggggaaacagcaagaacacagcaggacaaggggccaaaaaggccccagaagagcaaacgccggggaacaagcgggggggaaggggggacctgacttgcggggaaaaaaccccggggagagaacgactccgcgggaaaaaatagacccccagtaggattaggggggggccaaaaaaaaacggcccgagctggcaaaaaatgggccggggaaaagacgggg

SEQ ID NO: 16661 - DNA, 466 bp, Glycine max
  Clone ID: jC-gmle01810092g08a1
gtgcctgcaacacaaaaggtttggatggacttatactcccttccagtccctggatctggtggtaagacgtgctcccagatatttgaagaagctgggtgtgacacaccagctagtcctagttgtggtgcttgtttgggtggcccgaaagattcttacgcacgcatgaatgaacctaaggtttgtgtatcaactacgaacaggaacttcccgggccgaatgggacacagggaaggtcaaatctatttggcttccccatatacagctgctgcatctgcattgaccggttatgttactgatcctagagagttcttgctgtagaatgttgacacagtcatcccataggtgttgtacacgttgttggatatttgagaattctctagcgatcagttaaaactgactgctatttaagccgacctatctttcggtattctttgtgtgaagaaatttcggggactattattcaatt

SEQ ID NO: 16662 - DNA, 251 bp, Glycine max
  Clone ID: jC-gmle01810092g08d1
gatatcctggtatggggtatacataagagtattatcgatgtatcgtctatgagcatataactaggatatttgtttctatcgaaaactgactctattcaatgcacattatacatttctgctaatactacataactgacaacctgcttgaagatgactattgccacatcacatggtgggagtattggaccataaccaaatcaacagacactagtacacttgaatgacttatacccggagatctttgcaacttg

SEQ ID NO: 16663 - DNA, 383 bp, Glycine max
  Clone ID: jC-gmle01810092g09a1
cctcgaggtcgacggatagcttgatatcgaattatttatatgtgaattgagcacacaatggggatttaaaaaaacgaccgagaaggttatgaaatatcattccagatcaaagagtgctaattttctcataaaggaaggcgagaaagtaaagaaacttgcagagcagtatgttgaagctgcccaacagaacagaaaaaattgattcatatggtatcatttcatactcgacaagttttctttagtcattgcccgttacccgcctttgttctattatggtgctatacttgcttattaagaaacttgccatattgggcagctgtggatatattagatttagtctcacctcgtcatttatatgtgaattgagcacacaatggggattt

SEQ ID NO: 16664 - DNA, 327 bp, Glycine max
  Clone ID: jC-gmle01810092g09d1
aaacccccatggggggacaaatgaaaaaaaaaaagaaaagggggaagcaaaggaaaaaacaccgcagtatcacaaaagggacagttccaaaaagaacaataacaacggcaacagaaaacaaaggaaagcaagggcaaacaacacaaaaaaaatacgggggcaaaaaaacagccgaatagggccaaatcattacgctgggggggcgataaaagagggggccagaaagactaccataatgtgccccactcctgaaaggaaaaacatcaccgcttggacaagggaccaagttaccaaacgccccggggggcttttaaaaggcccaagggg

SEQ ID NO: 16665 - DNA, 388 bp, Glycine max
  Clone ID: jC-gmle01810092g10a1
cggctcgagggaacccaaaccgatatatcaacttacgtagtgatctactgtggttatgaaatattatgaatttaagcacctattgggctgcaaagtgaaattggtttcagcttaattctcaatgcatctttatgcttttttccatgtttggagaaacatgtctaagatagtaatatagagatgcgttttggttatagagattgcaatgctttcatgcaggtatatatatcttggactattcgacagcgaagtagaagctgcaaggtcctagtgatacatgaattacattctacccgcactgaatttatttacatgaattatcaaagctcattaggctccatccaacacgtatctcccttttgattttctggaaatcagggcttatgac

SEQ ID NO: 16666 - DNA, 502 bp, Glycine max
  Clone ID: jC-gmle01810092g10d1
agtgcactaaaaatagcatttgcttcaaagatgatgtatccaaacatggggcattatagtttaagcaagagacagcaataaggtgtcgaatctcagtatacaccaatcagtggctgaattataaaaagaatttggaccgaaaacacttttgttttagtctgtctttaatctgtactgcaaaatcagctatggtggtgcctgtgggggcttaacctagtaataatattcagatgcattgcgggtaggcatgctggatgaagtaaaacagagactctggggaattgagttcatagaacttgttggaaagatggcagccgatggaaaggtagctgaaattgagaatcctgatgatgctgcagcagagaacgttggtactggggtagcattgacctggccatgtgtttgccacgcccagttggggagtccgcttgaaggatcaacgccgattctctctgctctttccccattgtgaaagaaattacgagacatgccattccataat

SEQ ID NO: 16667 - DNA, 319 bp, Glycine max
  Clone ID: jC-gmle01810092g11a1
atcttatctgctatattgatgctcgataccgagaatgcgagatctatgcaatcgcagagattgaaagtgttgactgattggaacactgatgagacatcaccttaccggaacacggttctatggcggggcggtggggacatgggagctctcttccctgatgaacctgttgcctccgctaagcagacgattgttcaggagagactgcaactggtagccctggcgttgttgcctttcacctactgtggtccatgattgagtcccctacacctacaatagccgttgttgctgacgtcactgtagctagctgaccctcgctgat

SEQ ID NO: 16668 - DNA, 346 bp, Glycine max
  Clone ID: jC-gmle01810092g11d1
gctgaatagtgcttggaaaggaacatactcgggagacttaacaggcaccttgacatttcaatacacattgcaacggcaaggctaggcagggatatctagcatggacaagcccaaaggacgccggaccacataaaagggtagctgttacaactgtgggatactacactgaaagggatagccatagcgcagaaggcgatgccattaaagctgataacgctgcggccataatattaactttcccaaacaactgtcgcgtactataaatgcaaacgtctgatatgaacaaaagtgacacatgtgggcgtggccccactgtaacgctctaggatcagcccaggattggtac

SEQ ID NO: 16669 - DNA, 317 bp, Glycine max
  Clone ID: jC-gmle01810092g12a1
cataatctttgtcgattccagaaatgtgtagcactagcattagcatagcttcctcacaccaaagctttctcaccaacgcccttattccaccaaagttcaggaccaccaggattagtattgtttcttgcagtttccccacaacaatctccaaggaagaagaataatgagaacaagttggcaaagttagcaatggttgcagttgctgttggggtgctaacacttgggtcagtttatgatgcatcagctgccaagactggtggtagaattggtggccaggccttcaagtcagcagctccacgctccgcaccaagatcaac

SEQ ID NO: 16670 - DNA, 582 bp, Glycine max
  Clone ID: jC-gmle01810092g12d1
aaattagtgtaaatattgggaacttccctgaacaagtacaatgtatgtctattgtttcattacatcctgtataacaagcatgtaaattgtaaatcagtgcattagaaagcacatgattgctttggttttcaagtataatatctcaaaatacatcaaagtaattaattggtcactcttccattcttctatacatcaaaataacactctctttaaaaagccttttatgctgctagtagtcatcatcttcatttcttgacccaaagaatctcctcacaactgcagcagcaacaccaagaaacataaacagaagaatagtgtcaaatccacctccaacgcctacagctacactgggacctggtgcaaagaatgaaaatggagaccatccccagccaccataaccatagccatagccaccaacaagcggaggtgccactcgaggattgatatagatgttggtcctggaattgttgattcttggtgcggagcgtggagctgctgacttgaaggcctggccaccaattctaccaccagtcttggcagctgatgcatcataaacctgaccccaagtgtagcaccccaaca

SEQ ID NO: 16671 - DNA, 188 bp, Glycine max
  Clone ID: jC-gmle01810092h01a1
gcctaagaatccggcttcgagctcgagaggaccaggagcatattgggcactgggtaaacggagccgggtacgcgtgcgccagtgacaaacgatctagccctctggatcacaacaccccagagcctcgacgcccggtggacctatcagcgagcgcctttcctagtgtagcagtcctacacacataccac

SEQ ID NO: 16672 - DNA, 171 bp, Glycine max
  Clone ID: jC-gmle01810092h01d1
gaatagtagataaaagttctatcgagcatttgggatcttaaaagatactgaaagactagataaccaatctattacgaagtgatcttgggtaatgagcacgctggtcttcttacttcacgagagtgccatacgatgggcataggcaaggtatggcactaacaagggtcttgc

SEQ ID NO: 16673 - DNA, 467 bp, Glycine max
  unsure at all n locations
  Clone ID: jC-gmle01810092h02a1
attcggctcgagtttcttccgccatattccacaagaactctccaaggatcctccttcccacgagattctttggtgggaaaaatccaagaggtttgaaatttgaaggcagggaagatggattatttcaatgcaccaggaagaaaccatctctttgttccagggccggttaacattccggaccagatcatccgggccatgaacagaaacaatgaggactaccgttctccagcaattccagctatgacaaaaactttgcttgaggatgtcaagaagattttcaagaccactactggaaccccatttctcatccctacaactggtactggtgcttgngagagtgctctcacaaacacactgtctcctgnggatcgaattgtatcgatcctgattggccaattcagcttgctttggattgatcagcagcaacgccttgagttcaatgttgatgttgttgagagtgaatgggg

SEQ ID NO: 16674 - DNA, 484 bp, Glycine max
  Clone ID: jC-gmle01810092h02d1
gatatacaggacaataaaagaagcaatgcattaaagctgaaagtagaaagtacgttcatcttcaaaggagtgtaaaagagggtaatatatattttacagaatttctgaaagagcagaaaaaggaagtaaagacaagaatgatttgtgactcaaatcctggaagggatcataggaatagtgttctgtaagtatgcactggcagcagcaactccacttccaagctttacaggataacccacatctttgagtatcatctctacaccagctagacatcccaacagttgcaactcattcaagtggccaagatgtccaattctgaaaaccttcccagcaactttgttcagtccaagacctaagctcaaattgtatctcttccatgccctcctaactatttcagtactatcaatgtaagcaggaacaagaacagcagtcacagtgtcactgtaccactcttccttttgggtgcaattcttcaaaccccatg

SEQ ID NO: 16675 - DNA, 471 bp, Glycine max
  Clone ID: jC-gmle01810092h03a1
gaaccctattttggcaaatattttaagaatcatagtcttttaccactttcaggtttagcattattatctgaaatggcatcggtgtctagtcagcatcagttccgttacacgcagtcaccgacaaaggttcttcatttgagaaatttgccgagtgagtgcacagaggaggaactaattgagcttgggaagccatatgggaaagttgtaaacacaaagtgcaacgttggaccacatcgtcatcaagcttttattgaactcgcagatttaaatcatgcgattgcaatgatatcggattatgcctcatcgacggagcctgctcaagtacgagggaaaactgtgtatctacaatattgcaattggctagaaatagtgaatcacaaaactgcaccatatgttgctggaaatgtactgatagttacaattgatggtgaagatgcacgccttgtcagcattgatgacttacacttggtc

SEQ ID NO: 16676 - DNA, 388 bp, Glycine max
  Clone ID: jC-gmle01810092h03d1
atatgatattgatttgctacaaagggactgataaaaaaaaaggaacaaaagaccgagcggatccacggatggggacatgaccacacgcacacttttgggcccattggaccaacaaaagggacaaaaggggagtgaaaacccacgcggagaacacaagcacaaatgaccgctcgaaaaacccagtacacaagactggaaattcccacagttaaagcggcgcctcccattacgagcaacctccgtatacttcacccctgctcagcccgcaaacgtgcaccaaccttgcgtttacaaatggaaaccgaacttcttggtgcgggcgctgtaggagtcggcgacaaacatctgcgcgccgacgcacactgaggcgcctccgacaacgtcggaa

SEQ ID NO: 16677 - DNA, 338 bp, Glycine max
  Clone ID: jC-gmle01810092h05a1
ctaaccaaacataacataagcaccgctcttttatctacgaaatgcccatctcccttcacttctgagctctggacgagatcccagatcttaccatctttcacgcactcttccatcagattgcaccctattcgcgaacgcaaacttatgactggaaggttaatggctgctccaccggcaagggctcgtgccgattacgagtatatcataaagcttctcttgatcggtgacagctgtgttggcaaaaggtgccttcttctgcgtgtctccgatggtgcttataccactggtttcagcacagctataggcattgacttgtacgatagaaccattgagcttga

SEQ ID NO: 16678 - DNA, 520 bp, Glycine max
  unsure at all n locations
  Clone ID: jC-gmle01810092h05d1
gaaaaatcgagctcaaatatattatagtaaatgatgaagaacaccagttcttttaccctacatacaattgctcaatctatctcattctcaagctaacacccgtgtttctttaaaattatacaacagggcaatagagaataataatccaatttcttgctcagaaaacgattagacacagaaggaaacaacaaaacagaaaaattgaaattctgttcaatgatttgtttgcttgcatctcttgccttctcaacctgggactattattactttcccccaggtgataagaatttgggtgggtgtataaattttccgagttcccaaagactctggtataaaacatctctccaaacatcccaaacacaaggtggggaacccttggtgccaaaatggtggcaccagggttcagcatttgggatgatgatgcatcctcttcttggtataaatgctgattntgataagtgttgcgatatggaacactttgagatgantgttgcatgagcgattgagcacccaaagcagg

SEQ ID NO: 16679 - DNA, 498 bp, Glycine max
  Clone ID: jC-gmle01810092h08a1
cacctttctcctaaaacatctccagtgggttcttcttcttctattacaacaacgtcgtccaagaccatgaccatggccatggccacgatcctgctcctgttcacggtcttcgcggtttcatcggccctagacatgtcgataatctcgtacgacaacgcccacgccgccacgtcgcgcagcgacgaggagctgatgtccatgtacgagcagtggctagtaaagcacggcaaggtgtacaacgcgctcggagagaaggagaagaggttccagatcttcaaggacaacctgcgattcatcgacgaccacaacttccaagaggaccgaacctacaagctcggactgaaccgggtcgcggatctcaccaacgaggagtacagggccaagtacttgggaaccaagatcgatcccaaccggaggctcggcaagaccccgagcaaccgatacgcgccacgtgtcggcgacaaactacctgaatcggttgattggaggaaggaaggt

SEQ ID NO: 16680 - DNA, 409 bp, Glycine max
  Clone ID: jC-gmle01810092h08d1
cgggcaaatccaaataatgctgcattgccacatagtctacataacctgggaaactaacagcaatcaaatatgttcgccatttggaattggaatttgaataccaatacagtgcatcaataatataaccctatgtacacagccaatatctgactgaaatttgatacagaatagtatcaatttggatcataataaaatggcacatagaaatttatgtgaaggtaaaggggaagtgtatcagctggggtttaaattcttcgtctttcatttacttcattattggctccttcctgcacgttcacatttcctttatctgcttaagcactgttgaccttgtttttactcccaaaggtccaatggggtttagccggagttcgccttaatgccttcacttcgaatgggttgttcttgc

SEQ ID NO: 16681 - DNA, 456 bp, Glycine max
  unsure at all n locations
  Clone ID: jC-gmle01810092h09a1
ttcatcttctcttcttctcgtgccataacacaaaaatcttctgcttctttctcatcacctatgcttgtcaaatccatggccactcccaagcctcttccctcagtctctagaactgtaggctctagaaagaactcaactgtgttcccacttggggaacaacctaggagcagccccgcgacagccacgcctcccataaagcttttgacaaggatggagcagctgaagctgctgagcaaagcagagaaagcagggttgctatctgcagcagagaagtttggattctccctctcaacaatagagaggcttggactcctctcaaaggcagaagaagttgggtgtgctatctgctgcaactgatcctggaactccaaggacactcttgaccctcagcttggggttgctgatccttggacccttatntgtttacttcgntcctgaggacaaccttggattggt

SEQ ID NO: 16682 - DNA, 358 bp, Glycine max
  Clone ID: jC-gmle01810092h09d1
ggggaaaaaattttccccccaaaaattcaacaaaaaggggccacccccttaaagaaacccccctaccccaaccagggaaaaacattacaatgggcaaaagtcccccctcaaaaattcaaaaaaaccggaaacccggggcttcgggtttaataaaaaaccttaaaggggcccaaaaattttttcaaattccgcgagggggaaacaaaaattgggggccccaaacccggaaaacccccaaatccccgggccaaggggaccccaaccgggaacccccccaaaccaaggggggccccaggaaccaaggtaaccaaaagggggccacgggttacacacccccaacgggggggcaaaaaggccc

SEQ ID NO: 16683 - DNA, 326 bp, Glycine max
  Clone ID: jC-gmle01810092h10a1
gctaaggctcttcaagatggactcctattggatttaccaatgtcagtggcattttataagcttgttcttggtcaagagcttgatttgcatgacattcttttcattgatgctgagcttgggaaaactttgcaagaggtaaatgcccttgtttgccgaaaacattatatacaatctactggtggtagctacaccgatacctttgctaatttgcattttcgcggggccccaatagaagatctctgcttggacttcacacttcctggttatccagagtacatcttgaaacctggagatgaaattgttgacatcaataatctagaggagta

SEQ ID NO: 16684 - DNA, 449 bp, Glycine max
  Clone ID: jC-gmle01810092h10d1
aaagcatagtatttgatattatttctattccttttaccatcttccatgcatgtataataactaactgccaataatttgagttgaaaacagaatgatggaaaatttagaggggggaagggaattactcaacattcctattctatttacatgttgtaacagctaaaacgagctccgcaaattcctttacacctttagaacgaggcgatccgattcaactgaaccatgtcaccacctttgatgtgtgacccgggagaggccattatttgagaagcagggaggaaagtacatataaccaaaaaataatcaagtctcaagagtaaaccctgattcatcatcatattaacatacagggccgggttggttagttccagaaactcacgataaatcaaaggatccctggccttcactgattgcatagagtagcttcttgtacataatttccttggtag

SEQ ID NO: 16685 - DNA, 321 bp, Glycine max
  Clone ID: jC-gmle01810092h11a1
ctttgccaaaggtgaataaaaggtgaaagattaagcaaaaatggtaaaatgattgttgtcataaactctcattttaaggagtttgcttcatctgtacatcttatgggaacatttgaaaagtgttattgtaccacgctggtgaagggaaaaaatgtatatctaccaattttgttacatgggagagtggtgtatagttgtagacttttaggttgcatagctgtattagtagtcttagtttgctcatgtatatgctgttgttgctgatgcaatgtaaaacttactctccaggatacaaatagtaagtgttgatatcttcaatat

SEQ ID NO: 16686 - DNA, 365 bp, Glycine max
  Clone ID: jC-gmle01810092h11d1
gtgtaatgtttgtaaagtggttatgaaaatctgaacaacaagcatggggatcgtgaagaagagcattcgcatggacaggggggcaacggtatttacgtgagcaaaccaaaactacaaaaacgacaaagagaggacaaagttacaaactttaaacgaaacggccacgcgacaaaatcggggggtctcaggctgccagtggacaaaatcgtaaaatagcgacccaaaaaaggtcccaacaactgcaccaaaaacggcgagtaacaaaaaggggagattagggccacatccatttccaacgcttacggaaacactgggacctggtgcaaagaatggaaaaggggacccaaaataggcagcataaccaa

SEQ ID NO: 16687 - DNA, 322 bp, Glycine max
  Clone ID: jC-gmle01810092h12a1
gttgtttggagcgatccgagaaaaactctgtaaacatgttggtttaccaggacctccttacaggtgatgagcttctctctgactccttccgttacaaggaaattgagaatggaatgctgtgggaagttgaaggggaagtgggttggtaaaagagcagttgatgtagacattggtgcaaacccttctgctgagggtggaggagaagatgagggagttgatgatgcagctgttaaggttgttgacattgttgacacattcagacttcaggagcaacccgcattcgataagaagcagtttgttaccttcatgagaggtttatcaa

SEQ ID NO: 16688 - DNA, 434 bp, Glycine max
  Clone ID: jC-gmle01810092h12d1
aaaatccttataaataaaaccatgaagccaaattaaaatttttttagtccccacccaaaaatttttaaaaagaaacttccgggaatttagcacgaccaaaatcataaattaaggaaattttaacccatcgataattaaatttggggggaattatgatgtagcagtagcacacgtttaacctttaaaatcaaaatcccaggtcaaagtttcaagtaacttaggacagaacgtaaaaaaaaactagataaaaggggtagatagctcggtccattaagtcacttagcacttgacctcctttaaggcatatgcaaagtccaggaatgttggatcagcagcgccgtccttgtagtaggcaaagaccaagcaggcattatcacccatgcttttaccaacaaaaaattggaaatctttaatcttagagggcaggtatttag

SEQ ID NO: 16689 - DNA, 322 bp, Glycine max
  Clone ID: jC-gmle01810093a01a1
atcatttctccatttccattttctctctcacttttcaagaatcgtaagctatgggaaagtcttacccaactgtgagtgctgattaccagaaggccgttgagaaggcgaagaagaagctcagaggctttatcgctgagaagagatgcgctcctctaatgctccgtttggcatggcactctgctggaacctttgacaagggcacgaagaccggtggacccttcggaaccatcaagcaccctgccgaactggctcacagcgctaacaacggtcttgacatcgctgttaggcttttggagccactcaaggcggagttccctatttt

SEQ ID NO: 16690 - DNA, 272 bp, Glycine max
  Clone ID: jC-gmle01810093a01d1
ggaacataacgctaacatacataagaacactgacaaatacgaagaatctacaagtcaaaaagtgaaaaaacacaggatatttgaacacaaaaaatagaagaacagatagaagagcacaaaccaaaaagcactagaaggaggaggaaagatgcgtgacacaggagatattacactatcggcggatataaatgctagggaacgccgggggaaggaaaacaacgaatctcacacatgtttggagacaaaacaaagggcatagtgaacccttctac

SEQ ID NO: 16691 - DNA, 313 bp, Glycine max
  Clone ID: jC-gmle01810093a02a1
ctgtgattcgggtaatggccaccagtggaggcgatgaggggcagaacaaccctgccctcgacccggatttggatgctccggatgacccggatcacgagttcgctgagttcgggtcgggttgcttctggggtgctgagttggcctttcaccgagttgtgggtgtggtgaagactgaggttggttacactcagggtcacactccggatccgaattacaaactggtttgcaccggaaccactaaccacgttgaagtggttcgggtccagttcgacccgaaggttcgcccctacaatgatctagtcgctctgtttgg

SEQ ID NO: 16692 - DNA, 366 bp, Glycine max
  Clone ID: jC-gmle01810093a02d1
gaatagcaaattggtcaactaaaggcccaattgcaatttgggccctttgaagatccccccttggctttattttattttggaaaatattattatttgggggtccccaacagatgggtgattgaagcccaacatggggaaaggggccccaagaaaggggtcatcattcatcagccatagcccctggggggaacagggcaccctttttttggggattggttggtgccttgacctccaccctttttcaaaaattggggaggggattcctttggtttggaaaacctttttggtggaaggattttttggacaattttttcctttaggtccaattggtttgccttttttgattcccggcctaaacaagcttgg

SEQ ID NO: 16693 - DNA, 320 bp, Glycine max
  Clone ID: jC-gmle01810093a03a1
ctacaaaggttgctgtaggagataagatattgaagtagtgctaagtgcctaacacctgcagtgaacaatggcctctgcatcagcatctcttctcaagtcttcacttgttcttgacaagtctgagtggggggaagggacaaacacttcgccaaccttctgctgcatcagttgtgagatgcaaccccaccaccccatcaggcctcaccatcagagctggttcctatgctgatgagctcgttaagaccgcgaaaacagtggcttcaccagggaggggtattttggccatggatgagtccaatgctacctgtgggaagcgtttg

SEQ ID NO: 16694 - DNA, 565 bp, Glycine max
  Clone ID: jC-gmle01810093a03d1
caaccatgtttgttatatattgagacataatcaatcaagtacaccactcacagcagaaggtttataagctgtaaaggtacatgtaaccataaacaaaaatagtctccaagactataaaaacattacattttagacaaattagtcttcttccacttcatcctccgtcaacacctactataactgctggtgttgctgctgcctaacatgtatcatattcactacatacatcttagtaggagtagcctttgacgaacaactccttcttggcttcctcggattcaccctcaccggtgtacttcccaagctgggcgagcgagttggacttggcacggaaaaggagtgcatcttgtgccgcttcacgttctctgggcggcctccccatgtcttaaggcagtgttttggagggctctggcatacgagaacgacacgtgccacgggtttggagattggttcatggcattcaagttgagggtagcttcaacctcagactgtccaccagacaaaaacataattccagggacagcagggggaattctctgtgaagagcttgaggtgtatcagcact

SEQ ID NO: 16695 - DNA, 316 bp, Glycine max
  Clone ID: jC-gmle01810093a04a1
attcaataagaggagaaagaacactcagcttaattagcaatggaattgaagaagcattttcttttatgccaagaaggaattggatgctgataagtggtatcgattgatctgttattttctgtgggagactgagaaacgatgccacgccagctatggttttctctgccaatgatttacaagaatggaaagattttcccaaagggctcaaggttcttctccttgagagagacaacatttgctgctgccgagataagggcaaagcttgcagccatggactacattgtttctacattctgggacgagaatgaagccttgt

SEQ ID NO: 16696 - DNA, 400 bp, Glycine max
  Clone ID: jC-gmle01810093a04d1
ttttattttttttttttttttatttttttttttttgtttatgttatttttttttgatttttttttttttttgatttttctttacttttattttttgattgcgttttcaaaaacaggaggacttaaatagcccccaccgcctacgagagccagggcaagctagagccgcagaagataatgggggccttactaagcaacaaacacgggccccgaccgcgcgcctgggcaaaggccgccggagaactgagaaccggaagaaacccccccatattgcccccaacagacacagctcaggggctgaccctgaccccctcgacagagacattgactgcctactgctcattgccgtcctaagacttcccaatcttgaggccttaaggcgatgagcaatcacccaaaac

SEQ ID NO: 16697 - DNA, 276 bp, Glycine max
  Clone ID: jC-gmle01810093a05a1
tcacattctccatgtctcgcaggacgacgagacaatggaatcgctaatcctcgatgacgacggctcttccgttcagcagcaccaccgtcctacgtcgccgcagagccctaattcccctttcaactcgattgtcgagcccttcctactacgccgacgcgatcttcacctccttcgatgccagcggccacgaccatgcgatggaatcccccgccggccgatccgggtacaaagactacctgcacattttcgtctccgatccttataaggagcaggaca

SEQ ID NO: 16698 - DNA, 561 bp, Glycine max
  Clone ID: jC-gmle01810093a05d1
acaactctgattagttaaacccattgaaatcttgaaggtcggacaaaaataaaaggatatatgcatatacaactctgggctaatgctaagttcgtctaaagtaatgtaactacataagattacattaatggaaccaaaatctagaatttctgcatagaaaaggcaaaaacaataatttatacagccaagtacattttagctgctgtcactcgagtaagcagccgtttcttccgcaagcttctcccacacagctgccgtcttctctgcatagcctgcttgattgacaacaaaccctcgcagcatgcttaggaagtcgctattcctctcttggtcaattctttcaagttcactcctattattttccttgattcgttcatactctctatctgcacaaattttagcattctcagtaactctaatggcttcttttaactcttcaattttccgcatcctagacttgtctccaccaaatattttggatgaagcaacttcaagtttttccacccgtgaatgtaaagaagctaggtctgatgagaagtgttgacagtcaacaatgcactc

SEQ ID NO: 16699 - DNA, 312 bp, Glycine max
  Clone ID: jC-gmle01810093a06a1
aaaagctgtcattttgttttttgtttagtttactggaatggatttcagtcgattcttattgtctttgaatatgactccacgtacctagttcctgttttctgtgttattatatctgaaccttcaaaatctagtttaatgtcagatacatcaagttcattagaatctcactttaacagccacagttaaaagatgatagtatattaatctcttgttgtccctacttttgtgtctgattccctgctttggtctcttcttctttatcttgcatttcgaacccttcgaaaattgattatagttcacataaattttaat

SEQ ID NO: 16700 - DNA, 433 bp, Glycine max
  Clone ID: jC-gmle01810093a06d1
aataagaacagcgacaagttaaattctaaattattgcacacttgaaatggatctcatgtgaaaaatcggccacaagttattgaagcttagaaacccgttacactgtcacagctcaccaatgcaaatatattagctgacatgcccaaagcacatactatcctatatgaaacagacctacttccacatagaaaaatagaaccacaaatgccttaagcaacagtttcaacagcagtttttgaaggcttgggttcagggtcagctgaggcaacatgtgcagcttctggaggcttgatttctgaggcaacaggtccactttctgaagccttgatatcattctcagctgaggtaacaggtgcagtttcagaaggcttgatttcaggcaggttgtgcttaatccacccagatcgccgtcatttttccggatttggaaacg

SEQ ID NO: 16701 - DNA, 302 bp, Glycine max
  Clone ID: jC-gmle01810093a07a1
cgaggctgatcacaaggctgctgctgcattgaagggttcagatcatcgccgtgcaacaaatgtcagtgccagactggattctcaacaaaagaagctcaaccttccaatcctgccaaccaccactattgggacccttccctcagactgtagaactgaggagggtacgccgtgaattcacggctaacaagatctccgaggaagagtatgtaaagtcaattgaggaggaaattcgcaaagttgttgagcttcaacactagcttgatattgatgttcttgcccatggagaaccatagagaaatgat

SEQ ID NO: 16702 - DNA, 101 bp, Glycine max
  Clone ID: jC-gmle01810093a07d1
tctgcacaaaactgggagaacgccgaaacacaacaggatggcggggaaaccccaaggggtccaccaacttaatgggaaaacaggacaggggaaaaacaacg

SEQ ID NO: 16703 - DNA, 580 bp, Glycine max
  unsure at all n locations
  Clone ID: jC-gmle01810093a08a1
tcgagcggctcgagcaataactctccaaggatcctccttcccacgaaattcatttggtgggaaaatccaagaagagggtggaatttcaagccagggaagatggattatttcaatgcaccaaggaagagaccatctctttgctccggggccggttaacatcccggaccagatcattcgggccatgaacagaaacaatgaggactaccgttctccagcaattccagctatgaccaaaacactgcttgaggatgtcaagaagattttcaagaccataactggaatcccatttctcatccctacaactggtactggtgcttgggagagtgctctcacaaacacactgtctcctgtggatcgaattgtatctttcctgattggccaattcagcttgctttggattgatcagcagcaacgcctgaaatcaatgttgatgttgtacagagtgaatggcgccagagtgctaagcttgatgttctggaatcaaagattgcttcagatactttacacactattaaggcaatttgcattgtccacaatgagactgcaactgnngtcaccaatgatttggccaagtgagaca

SEQ ID NO: 16704 - DNA, 410 bp, Glycine max
  Clone ID: jC-gmle01810093a08d1
gatatacaggacaataaaagaagcaatgcattaaagctgaaagtagagtgtatgttcatcttcaaaggagtgtaaaagagggtaatatatattttacagaatttccgaaagagccgaaaaaaggaagtaaagacaagaatgacttgtgactcaaatcctggaagggatcataggaatagtgtcctgtaagtatgcactggcagcagcaactccacttccaagctttacaggatagcccacatttttcagtatcatctccacaccagctagacatcccaacagttgcaactcattcaagttgccaagatgtccaattctgaaaaccttcccagcaactttgttcagtccaagacctaagctcaaattgtatctcttccatgcccttctaactatttcagtactatcaatgt

SEQ ID NO: 16705 - DNA, 553 bp, Glycine max
  Clone ID: jC-gmle01810093a09a1
gttcccaaccaagagtagctttatggaacccttttgagtgaaaacattataggtgtaatccatgaccattttatcacatattacctagatatggacgttgatggctctgacaattcatttgttgaggtaaacatccatgaagcctgagacctcttcaggagaatcacccagatagagttatctaaaagctgttaaaaaagtggcaaagacagagaaagatgctcaaataagacttcaactctatgacccatcggaatttcatgtggtgaacccattgaagaagacaaggatagggaaccctgttgggtacaaattggttccaggtgccacagcagctagcctgctggatccagaagatcctacacagaaaagagcagcttttacaaacaatcaaatatgggttactccttacaacaaaagtgagcaatgggctggtggtttatatgcttaccagagcagaggggatgatactctttaagtctggtccaacaggtatcgtccaattgagaataaagacattggtttgtggtacacaatagggttccatcatata

SEQ ID NO: 16706 - DNA, 491 bp, Glycine max
  Clone ID: jC-gmle01810093a09d1
aacatcataatttttcttatacataagaattaaacatggtatcaaaaggttttacaatatttatacattctgtttaatcaacagaactagaccctctttactttaagttaggtttaaagttcagtttgggcatcatcatttgctacatgcataaataaagcatgtatctaattagactaaaaaccaactgatgggatctcaagctgaatcacgagccttgcaaacaggtaaatcatcttcgaaattgggagggactccaaggattggatttctctcaaagaaattagcaggcttcaaatcaaaacttgatgatacagtaggcatgacaggatagtcctcttgacagggtatatgatggaaccctattgtgtaccacaaaacaatgtctttattctcaattggacgatccctgttggaccagacttgaagagtatcatcccctttgctctggtaagcaaataaaccaccagcccattgtcacttttgtgtag

SEQ ID NO: 16707 - DNA, 520 bp, Glycine max
  Clone ID: jC-gmle01810093a10a1
gtgatattgtgagtgctattcagtctgccgtgcctggagctgtgctagttggggactatgttcttgagaatggagacggtattggtaggttaccagacgaacgtgctgaaggcaacattggcaacgcccatggacccatggttaaccaccactatcttgttacagatgatggatagcaccgttgaaattgttagggaaccaagagcacattcgagtgcctggacaaggcaccgtcgttcagatgaacgttggcgctatctgcggggtgagaatctattgggacttcatgatcatgacattgaggatgatctgcgtatatttagggatgcgggagaagatgcatctcctgtgccaaggaggcgtcggcgtttgacccggacaaggtccaatgaagatcagccttgatgactgccaccatttgacctgaattgtctgatcagcatgcagaacttgttcaaagttctggactggacacacgcattcatgcccgtgtaccagctttggacccagttgagtatgc

SEQ ID NO: 16708 - DNA, 494 bp, Glycine max
  Clone ID: jC-gmle01810093a10d1
caagcttaaagcaaacaatttagtagagataagaaaaggattgaacaacaataaagtacttacagtataagttatacataataatacaaatattaactgtgaaataaccttccaaatcacccagatgtttagtaatcccaaggctaaatgtctttacattaaaggggtctttttaatcatccttctagcaattttccttgtttcaaggaaacttgtgtttaaggatttgacaatgatttattctgaacttgctgcttcagcatactctactgggtccaaagctggtacattggcctgaatgcgtgtttccagtacaaaactttgaacaagttctgcatgctgttcagacaattcaggtaaaatggtggcagtcatcaaggttgatcttcattggaccttgtccgggtcaaacgccgacgcctacttggcacaggagatgcatcttcacccgcatccctaaatatacgcagatcatcctcaatgtcattatcatg

SEQ ID NO: 16709 - DNA, 574 bp, Glycine max
  unsure at all n locations
  Clone ID: jC-gmle01810093a11a1
cggcaatgcaaacgcgcgcagcgttgacaacaaaaccacaaaccaattaaccgaacatgaattccgattgggacagcggcggcggtggcggtggcgcgacgctaatccctggtctcccaaacgacgtatcggggtctatcctctcgaaggtcccctactcccaccacgggaggctcaaagcgacatgcaaatcatggaaactgctcctctccttgaaatcgctcttagcctcgctgaacaaacgtaaccaccttctctgcatcttcccgcaagatccttcactcgcttcaccctttctcttcgatccgaactcgctcgcgtggtgcccgctcgctcccatgccctgcagcccccacgtgtacggcctctgcaacttcgccgctgtcttcgtcgggccccacctctatgtccttggtgggtccctcttcgacacgcgctccttccccatcgatcgcccttccccgtactacgacacgttcaggttcaactatcacgacttctcgtgggagccacgcgcctcaatgctgtctaccagggggagcttcgnctgcgcggtgtgccgcccgcgggagca

SEQ ID NO: 16710 - DNA, 454 bp, Glycine max
  Clone ID: jC-gmle01810093a11d1
atccattataaatatttcagtacttcaggattacaacactagaaaaagctgatactatacgtcacttgtatccaaatttagatggtatcaactaatacaaagtgaatgccccgatcaagacatactacatacagaaatatacaaataagccacctacatggaatctggtggatcaaatgatgcgatacacaatcaatttggaagtgatccctatactatacaaataggatgcaacattattcatagacaaattgagctcaatacagcactattaatatctatagggtaatggaaaggtgattttgcaacaagcgatctccatgtcttcttttttgggtcatatatttgaatgaacagagttcctgccctcttatgttgtctggaccttcgtgtttctgtaaaatcaacgacacataaatgtgtcactacataaagctccccgtctacacaacaa

SEQ ID NO: 16711 - DNA, 595 bp, Glycine max
  unsure at all n locations
  Clone ID: jC-gmle01810093a12a1
ggaaagtggaaatgcaggagagccagcaaaactgatcaggcagagataccgtgaagccgcagacttgatcaagaagggaaagatgtgtgctctcttcatcaacgatcttgatgcaggagctggtcggcttggtgggacccacccaatacactgtcaacaaccagatggtgaatgccaccctcatgaacattgctgataaccccaccaatgtgcagcttcctggtatgtataacacggaagagaatccccgtgtgcccatcatcgtcaccggtaacgatttctccacactctatgcgcctctcatccgtgatgggcgtatggagaagttctactgggcaccaacaagggatgaccgcattggtgtctgcactggaatttttcgcaccgattcaattcctgaacaggacgttgtcaagattgctgacaccttccctggccaatccattgatttctttggtgcactgagggccagagtatatgatgacgaagtgaggaagtggatttctggtgttggtgttgacggcattggngaagaagcttgtgaactccaaagatggaccttccacctttgagcaggccaagatgactctggaga

SEQ ID NO: 16712 - DNA, 458 bp, Glycine max
  Clone ID: jC-gmle01810093a12d1
aagtggacactttaactcaaaattatagaggaagacagtccaatatgaaaaatatagtaaaatcatctcaaacttggcatcttctctttgcacctaagacattgagaattctaagaatgttacacgcaagtcccatcacaacttctagcacttggatcagcacaaccttcaggaacagaaatatttacttgccaagtttgctttgcctccaattcaagattggaagaaagttcccctgttaatagcatcctcgttagcatttccaagtgcagcctcgttcaagtacttgtcagccaattggactctcttgacattctcttgttcttggacaagcatgttaccatacgtcaagagcttctccagagtcatcttgggctgctcaaaggttggaggtccatcttttgagttcacaagcttcttcccaatgccgtcaacaccaacaccagaaatccacttcc

SEQ ID NO: 16713 - DNA, 322 bp, Glycine max
  Clone ID: jC-gmle01810093b01a1
ctaatattctttagaataatcaaaaagaatattaaattcaaataaattttagatagaaaaaagacttaaaaaggaggatttgaaatgcgagatctaaaaacatatctttccgtggcaccagtagtaagtactctatggttcggggctttggcgggtctcttgatagagatcaatcgtttttttccagatgcattgatattcccttttttttcattctagttattgacacggaaaggggtgaagaagattatagatccaattaagtattaaatatatgtaattaatatgtaattaatctcctcttctttatttcgtcttttat

SEQ ID NO: 16714 - DNA, 570 bp, Glycine max
  Clone ID: jC-gmle01810093b01d1
cttaaagtagtagttctagcggttgactcgcttttttcaaattgtttttcattattaagaaaaggtaacgaagataaaatacgagcttgttttatagcaattgttattaatcgttgttgttttaaggtcaatctatttacgcgtctggataatatttttccttgttcactaataaatcgactaattaaacccatgtttttataatcaattcggtcccccgattggatcgggggcaaacgcctacgaaaagatcgcttggatttcataaagagtcgcttagatttttccatggtttatttatccctattccaaaaatcacatttattacaagaaatactataaaggatttgtttttttattctgacttttttaatatatgttgctatttttttaatatatgttgttatatactgatatttgtatatattcaactgtaaatgatagaatacagatagatctatctatatagataagaaaaatagatcattttacatgttaagttctttggttcaagggtaacacacaagcgatcaatttgatctatttctttatttctgcgtgaaatgatgt

SEQ ID NO: 16715 - DNA, 324 bp, Glycine max
  Clone ID: jC-gmle01810093b02a1
tgagacgtggctggttcaactgaggtgatggctttgaatttgccttctcccgcccaagagaagcccttatttttctcttcaaataactccacaaaacttccaggtagcttttctttgaagagaaaagatagtgacacaacagttgagagacgagtttattgctctgccgctgctcaatcaccaccaccagcatggccaggaacagctattcccgagccttctgatttcaagacatgggatgggcaaaaacctatttctgtcttaggatctacgggttcaattggaactcacacactgagtatagtggctgcgtcccagaaagat

SEQ ID NO: 16716 - DNA, 489 bp, Glycine max
  Clone ID: jC-gmle01810093b02d1
ctgaagctagaacttttattgaaacccttttaggagtacatatactttatatagctacccctttacattttacaagattgatgaaccaacaaatacatttacaaaatatgctagcagttgccaacaatccaccacagccccaacttctaaaatatgtcagaaatatgggattcaaacacttgaagctttttgcagactagcagcatattgtcgagcccattggtcatagtgaataatttcttcgagtgacggagatgctactaattccttttgatgttcctgacaagttagttccacaaccttgaatatatccagataactaatcttttcttcaacaaacatttctacagctttctcatttgctgcactaagaactcctgtcatggtgccttcagcacgtcccgcagcatagcaaagattcaccgatggaaacttcttgtcatcccgtgcataaaatgttagagaaccatacttgctaagatcaagacg

SEQ ID NO: 16717 - DNA, 320 bp, Glycine max
  Clone ID: jC-gmle01810093b03a1
gcagcttctcatgagaagaaatcatgaaagaaatctgactgtacagatctaagcttcctaccgttcttatccaaaaccattcagttctatcactttcctcctgtgaatgaaaattttcctcacttcttacgcatatatatagttctatggtactgcacaatttgtataatcaactgctgatacaaagcaaccagcatgctgaatgatgtttattcgtacttagtttccagaatattgaattacttcccatataagtgactacaacgggatgggatggacatatacagatatcaaaaagccaccacaggcagcaaatgagt

SEQ ID NO: 16718 - DNA, 591 bp, Glycine max
  unsure at all n locations
  Clone ID: jC-gmle01810093b03d1
aagtaaatcatttttgtttgcaaagtagacgatgaagggctcaaatatacaaaaggatgtaaaaggtgaagggataaggaatggatatgaatccatggatgagaatgagctcctaatgattgccttcctcctctagctcaagcttttgggttctctatcttttgaacgagctctctttcttctctccgtttttcacataaaaacccttcctgagtttgagattttgcgacgacgcgttgagcgcgagtaagtggttgtggcgctaagcgcgccatgtgcgctaagcgcccctttgcctgactgcaggttctctatgctgcttcttcgcgctgaacggaaaccttaccgctaagcgacaatagctcgctaagcaagcttagcgcgttgagcgtgaaccatcagacttcaacttttctctctatcccttgctaatatatctgcaaaataaaaaccatcaaaacatataaattagcagtttaaggcacctactgcacaaaaacttagaggatgccgaaattccaatgattcacacanaaagaagccaatagaatgaaagaatatacctaatcttgatgtttaatagatatctac

SEQ ID NO: 16719 - DNA, 317 bp, Glycine max
  Clone ID: jC-gmle01810093b04a1
cgataaacagaagctcgttattgacttgatttgatagccagattgctattattcttattactcaatgtttgacaaaccagagaactaaaacggagaaaagttctagaatggctttaagctccaaaaaactggatcaagtatccatttgtgtaaatgtgactaggaaactgttgctgattactgcatttcgtttttagtttcctttgttaagagcatgattctttttctttttttcttttttgctgagagcatgctatacaggtgctaatcactttttagtttttggcatttctttatttttcagattccattctaga

SEQ ID NO: 16720 - DNA, 520 bp, Glycine max
  Clone ID: jC-gmle01810093b04d1
aaatgaaagtgtaaaattaatatttgaaccatcatattagcgacagtttatatgtcaaagtaaatgcaaagcatagatcatctcctgtacttttctgaaaaactaaaagtgatttgaaagtaaaggtaattagcatgtatctctgcttaggtgtgctatatacagaagtaatggatcagacatcagagaaaaccactagtcacttggaatacgatatttgaaagagacttgcatgctccagcttcaccagtgcttcagttcaaaagcctacatttgtacatgctatatacatttcttgttcagctttctttggttcacattttaagaaaaccagcacctgaaagtattacctaagcatggaaaataggagacattgatgcttgccacagaagaaatgtcaaatggtgatcccatttaagctttataccccattaatcattgaagcctgaataaagaactggtctgcgagtttgtctccataaaatgcacgcttagtcttctgagaggtattctaaatcaa

SEQ ID NO: 16721 - DNA, 317 bp, Glycine max
  Clone ID: jC-gmle01810093b05a1
cactcataacacaaagcacaaagcaaagctcatccttgagttaaaaaatggcagcagcttcttccatggctctctcatccccatccttggctggcaaggccgtgaagctgggcccatcagccccagaagtggggaagggtgagcatgaggaagaccgtcaccaagcaggtctcctcaggaagcccatggtacgggccagaccgagacaagtacttgggcccattctctggcgagcccccgacctacctaaccggtgagttcccaggcgactacggctgggacactgctgggctttccgcagacccaaaaccttggcc

SEQ ID NO: 16722 - DNA, 461 bp, Glycine max
  Clone ID: jC-gmle01810093b05d1
gtaaaaagcaagtaacattaagttggattcggatacacaagataattcacattatctgaagtacttcaccaaacacaaatctaaaaactctcaaaagtcatttcgttctttgacgctcactttccggggacgaagttggtggcataggcccaggcgttgttgttgacagggtcagcaaggtgatcggcgaggttctccaatggaccctttccggtgacaatggcctgaacaaagaagccaaacatcgagaacatggccaatcgtccgttcttgagttccttcaccttaagctcagcaaaagcctctgggtcatcagcaaggcccaatgggtcgaagctgccacctgggtagattgggccagtgaccttaccgagggggccaccagcaatacggcaacctgtaacggcactccataggataactagtgtggcccatatggcgaggatgctctgtgcgtggat

SEQ ID NO: 16723 - DNA, 308 bp, Glycine max
  Clone ID: jC-gmle01810093b06a1
ggcttcaatctcaggcatatgctcatcctccccaactctcaaccactccaccccaaaacgacgccgcaccccactcctcccttcctgctcattcccctataaaccctccccgcctcgctccctcgcgcgtgagacccccgcgccgcaacaacaacaacaacaactgtgcgcagtaacaaaaccactccacgccgggctcgagaaggagccacgcgccctatggcggcgctacgtggagtggctctaccagcacaaggagctggggctctaccttgacgtgagccgggtcgggttctccgacacttcgt

SEQ ID NO: 16724 - DNA, 432 bp, Glycine max
  Clone ID: jC-gmle01810093b06d1
aaagaagaaaaaaaaatcatcttcattgtagatggagagatccaacaaccaaaacaacttataataccattatggaatgaggatttcattaatctactactcaagcgtacaattcatcaagattacactccccaagaaaaaccttgatgctcctcggagaaccacagttaccttcagcaattagtgctctgtcattggcagccatatgagcaatgatcttgtaaatcatttcaatatcttctggggcatggcaacggtcagctacttcttcaagtgttaatggttcaacaggctccttgcagcttgcttcattgagtactgccaatacccgtttctgaagtgctaacacttctcctgctgctttcttaccagcttccacaccaaggttggtgataagcatttatgttaacaagcgaagcatatattccaacg

SEQ ID NO: 16725 - DNA, 315 bp, Glycine max
  Clone ID: jC-gmle01810093b07a1
cgtgagaaaaacaaaagagtagtggcctttaggtggtgaagaacaagagctcaaatcaaatcgaatcgaaaaaagaaagaaagatcatattcatggcgatggcaagcctggctcgacggaagggttacccccgtcgttttgtcgtcgaggtcgtcgttttgtctgacaagctggaggggattcgcgtccggatctgacgaaaacgacgtcgtcgtcatcggcggcggtcccggcggctacgtggccgccatcaaagccgcgcagctcggtctgaaaaccacttgcatcgaaaagcgtggcactctggcggtacct

SEQ ID NO: 16726 - DNA, 515 bp, Glycine max
  Clone ID: jC-gmle01810093b07d1
aagaacaacacaatcattcctcttattatgcaaacaagtaaacaaggggctaatttgcatttaaaaacctgaatctaaatttaacacaggatgtatcatctccaagtcattgtaaaattcttggacaaaaatgaaaacaagaagtagcaaccggctccttttaaatgtgaatgggcttgtcataagtggccattgcggcttctttcacagcctcgctcattgttggatgtgcatggcacacacgtgcaatgtcctcactagatgcatcatactgtagtgctattgctgcttcatgaataagctctcctgcattgggtgccataatgtgcactcccaatatcttgtctgtctccttttcagccaatatcttcaccagtccttcagcattgtcaattgccttagctctgctattagccatgaacgggaacttgccacacggtattcaactcccagttccttcacctgctcctctgtcttcccaacagatgcaacctcgggcatttgatagacaacac

SEQ ID NO: 16727 - DNA, 514 bp, Glycine max
  Clone ID: jC-gmle01810093b08a1
tagacatcatcactgacctcgccatgttcattactccgctttggattgcggttatcgtcggcgtcgtcgtgggctgggcctggaagcccaaatgggcctttcaccccaaagacgctcttctcaagtttccgctcccctcgcccttccaatccccaaaacgacaccgctttcaccttctccaccaccagttcctccgcgcgtgaaaaagacgcgagtgcgagtgcgagtcatttagtgacggaatacgatttgctgcatctgtggaagttggttgaggaaaaagacggagggccggcatggattcagatgatggaccgttctaccccgaccatgagatatcaagcgtggcgtagggatcctgagagtggaccgccgcagtatcggagcagaacagtgttcgaagacgcgagtcctgagttggtgagggatttcttttgggacgatgattacaggttgaagtgggatgacatgctcatacatgctttcaccattcaggaatgtgtcctcactggaa

SEQ ID NO: 16728 - DNA, 342 bp, Glycine max
  Clone ID: jC-gmle01810093b08d1
aaagaaaaacctggaaattgatgatattcctgcagcatgataatctttaatgacttaaagatacaatgtagctatttccagttataagccgcctcatatagattatacaaatggagaaagaataatagcattcttcttgaaccacggctgccaactagattcagaataaacacttgctccaaagcaagaagtgacatctcaatttctaattctactgccagagcctggcaatttctcaaagcaaaaaacgcaatgtatcacaacctctttcctcccatttttgcaaaccttcgggctactccaaatataactgccttagtcagtagtccttgatcaagagtg

SEQ ID NO: 16729 - DNA, 457 bp, Glycine max
  Clone ID: jC-gmle01810093b09d1
gcgtgtctcggtacgtccgattattcccgggctactagtcggtggtcggccgtcgtccttttttttttttttttttattttttacttttgtatgtacatttatgaggtatgtttcaggttactgttctagtattcaaagccatacatcactctaaaagcatgttttgtgaaactagatctcgaggctgattacgtgtaaaacacttcattggcaacacgtgtctaaataaatggtgccactagccgcagtcaacaatgctttctttgttgatcggaatcgtgcggcacatgttttggccttggagcgattagaaacagttgccacatttaccataagcgtacatatacctagtccgttgatctgttcagaaacctgatgtaagcaattctccaggacgccgaatacttatggccctaataagccccaaagtccagtgtaagttcccatccccaagct

SEQ ID NO: 16730 - DNA, 545 bp, Glycine max
  unsure at all n locations
  Clone ID: jC-gmle01810093b10a1
ctgctaccaatttcaccattctcatcctccaaagttgaaccataatttcaaatccaaccaagagacaccatgtcatcaagtggaaccatttggagctatgaggaagaaaaagcatttgagaatgccatagctatgcattggattgaggaatcctcaaaagagcaatgggagaaaattgcttcagcagttcccagcaaaagcatggaagatgtgaagcaacattaccaggttctagtagaggatgtaagtgcaatagaggcaggtcacatatcattcccaaactatgctgcttctgaggaaatcacatcttcaaataaggactttcatggctcttccaaggccacaagctcagataaaagatcaaattgtaattatggacgtggtttttctgggttaggacatgactccaccactcatagtagtggtaaaggaggcttgtcaaggtcatcagaacaagaaagaagacaaggaatcccatggactgaagaggaacacaggttatttntacttggtctagagaagttctgtaaaggagattggagaag

SEQ ID NO: 16731 - DNA, 389 bp, Glycine max
  Clone ID: jC-gmle01810093b10d1
gggggacaaaaaaaaaaacccctcccccggggaaaaaaccccccacctccccccaaaccccccccgggggcactttgggggacccccccccccggaaaaaaggggggggcccttaaaaccccccctcccccgccccaaacccaccccccgggggccccccaacaaaaccccggggaaaacccagggggggacctcaaaaaaaaccccccctttccggacccccccccaaggggggttaaaccccccccccaaaaggaaaaaaaaaaaccccccccccccaaaaaaaaaagaaaaaaaaggccggtcctggcccccctggggggggccccccggggaacccccggggaaaacccacgggggggaacgcaacaccccgggggggggccccc

SEQ ID NO: 16732 - DNA, 543 bp, Glycine max
  Clone ID: jC-gmle01810093b11a1
gatcgagcctcttttgcctccaaaggttgttatggatagatagatagatagaacgctgctttgagtttcctcaactcaagaatggctgccaacgactcgtccaccgagattgatactaagaagctttcgaattgctggggaaaaggctcaaatgccctttgcactccccactctcctctcttcaccaccccaacacctccacacatcattcaccactgccgctgacaattttttcagatttctacactcccttgcttctcataactctttcctcaacaaaattctctctctgccctccgaatttcacaccctttgcgtgcagattgggaagcaaaggaacgtgaggttggtttctggtcataatttcgctgccgttatgcctggggattcggtggcagggctggtggtggcgaatggggttctgaatctcttgaacatttacaacactttgctcattgtcaggcttggtttgacatggcttcccaacactccttctttcattgttagacctcttagcaccatatgtgacccatacctgaacat

SEQ ID NO: 16733 - DNA, 529 bp, Glycine max
  Clone ID: jC-gmle01810093b11d1
aaataaggaccttaagtttattgactaagaagaccataggattaaaagaaaaaacacaataggactgtggaagcttgagccttgagctttcaacagcaaactccataactctaaaatctctggaatcataagctcaaaaattgtgttgcctagaatagaactatcataatcgggatggaacgtatctaaattaataaacagacacagaggcacaaataaactctcccatgttctatttagcatcagcaccagatgtccttgacctgttcccttgaaaccgtgtcaaccatttcttctgtgaagtagtaaggttagtggagtgcaatggtgctgcaaggccttgtttggattgttctgtgactggaagctcagcagggagtgcagaagcagtgctggtgaaggcatttaggaccaagaatgctaggatgggagagagatccagcgttcctcccagagggggaataagtccacggaatatgttcaggtatgggtcacatatggtgctgagaggactaacaatggaaggagg

SEQ ID NO: 16734 - DNA, 569 bp, Glycine max
  Clone ID: jC-gmle01810093b12a1
acttcggctcgagcaacggtggaagagtacaatgcatgcaggtgtggccaccaattggcaagaagaagttcgagactctttcctacttgccagacctcgatgatgcccaattggcaaaggaagtcgaataccttctaaggaaaggatgggaatccttgctcggaattcgagttggagcacggttttgtgtaccgtgagcacaacaggtcacctggatactatgatggacgctactggaccatgtggaagctgcctatgtttggctgcactgatgcttctcaggtgttgaaggagcttcaagaggctaagactgcataccccaatggcttcatccggatgattggatttgacaacgttcgccaagtgcagtgcatcagcttcatcgcctacaagcccccaggcttctaagtcattgaaaaatttgcaaagcatctgtagccaccccactttgattgttgtacttaaactacattcccatttgtttttgctttatgagatttcatcatcctggatttttggtttctggtttccgacttcaatggaaattaatggatgagaactaatgaaaa

SEQ ID NO: 16735 - DNA, 426 bp, Glycine max
  Clone ID: jC-gmle01810093b12d1
aattagttctcatccattaatttccattgaagcccgaaaacagaacccaaaaatccggggggaggaaatctcataaggcaaaaccaaaggggaatgtagtttaagtccaacaaacaaagggggggggctacaaaggctttgcaaatttttcaaggacttaaaacccggggggcttgtaggcaataaagctgatgccctggacttggggaacgttgccaaatccaaggatccggatgaagccatgggggtatgcagtcttagccttttgaagctccttaaacacctgaaaagctttagggcagccaaacttaggcaggttccacagggcccagtagcggccatcatagtttccaggggacctgttgggctcacggtacacaaaaccgggctccaactcgaattccaagcagggaatccatcctttcc

SEQ ID NO: 16736 - DNA, 318 bp, Glycine max
  Clone ID: jC-gmle01810093c01a1
gaccaccaagtgcgactgggatcgctgatggattcggattcacccgacccgacccgacccggttctgctttcacgtcatttctcccttttcttatttctttattggttagttttggacatagtcgtccgacttccttgtccttcaagggttactgttcagagatatgattattttattataccgcatgtatgtatgcatgcatcatctaccttgactactgtattcccttctgtggacgggatttttgctgtattatttatatcacacattcacacttgttatgtgttgatcaataaatctcattttcttccgcttct

SEQ ID NO: 16737 - DNA, 320 bp, Glycine max
  Clone ID: jC-gmle01810093c01d1
ggaaaaaccggaatgaaaatgcaatttttttttcaccaaaacaccagggggaatgggggaaaaaacaaaaccagccaaaatccccccccccgagggggaacccggagcaccgggggacgttgccggccaccatcgcggcgggcaaataaagaagacgattctgggaaaagatccccttagggcccaggggaaccccacctttgtccaaaaactccccctttaggaattaaaaacgggggaaacttggtgcaacccaacccgggcctcggttgggcaggggggagcccaatccctaagggcccccactaagcctggggggc

SEQ ID NO: 16738 - DNA, 320 bp, Glycine max
  Clone ID: jC-gmle01810093c02a1
gctttctgtttatcctgtatccgcaattggcgtaatagtgctgccccaacatctggaatggacatcggtaatgctggcactgctaatacagtcagaacctgtcctgtttgtcgcaaactatcatattttgtcatttccaagtggtatttggtattctactaaggaagaaaaacaggaaattatcaacaactacaaggcaaactgcaaattaattgattgcaagcattttaactttggaaatgggaattgtccattcggggctagttgcttctacaagcatacagtgaagcctggctcttacacatggaacatcacaggcc

SEQ ID NO: 16739 - DNA, 514 bp, Glycine max
  Clone ID: jC-gmle01810093c02d1
gtcaaagcaaaatgataggataccatactgccaaagaaactacctcaataactggtttatagacgggatttatatgaactaagaaaatctagtagtcttcatcactgtattcttcttcctcatcatcatcttcatcttccatattagaatgcatcatcattggtaacaaggcagcctccataggattgaaatcttcattaccaatatcttcgggaccaaaatcatccacaccagaagcaagcgcttccgacaatgcagccatctgaaaaatatccaagtcctcctcatcagaatcaaaaagacctaaacaaggacctgagtcaccagcaagcctatgagatatatccatcatctcaaatggatccatatcatcaaaaaagtctgaacccctcatgatggaaaaatattctgcacttgttaagtcaacatcttggagcatgtccaacatgtcatacatatcaaaatggttctgtctacactgaggtggtggcctgtgatgtatccatgtgtaaga

SEQ ID NO: 16740 - DNA, 324 bp, Glycine max
  Clone ID: jC-gmle01810093c03a1
cataaaccctacttctacttcccccctttgctctcaaaccttatcacctaatccttatcctcccaaaccagaaaaccatgtctacctccgcagcttccctcgcactcccaaccctcactctccgaacccgacaacctctatgttctccccaatgcttgtcctcgtccctctccctcacacccaacaacaaacccatttccatttctgctgtttttctcaaaccaacaactctgtcgtcgtctcgcttcgttccccacgtcgtggtgtcgtcggatttggggcaggaggaggacaccttcagtgacggagacggccccagcttct

SEQ ID NO: 16741 - DNA, 397 bp, Glycine max
  Clone ID: jC-gmle01810093c03d1
atagggaaaatacggactacaaatcagtttcaaatgacaaccatcaaatttggaacatacctttaaacttttcaacagacactcatttaggaagaagcctgtcaaattttgaaactgggtacatgtagtctcaatgcatgtaagtgtatttctttcccaaactgtttttgccaatgacattttgcagctgtataactcccaagtcccaaataccgaaatcctttctcgggttttgaccaaaagctaaatcctcaaaactgcttgggcttggaatctgctaatgagactcgtatagctttgccattcaagtccacgccatttaaggactgaattgccctgttgacctcataagggcttctgaaagtccaaatccaaagccttttgatcggccactttc

SEQ ID NO: 16742 - DNA, 298 bp, Glycine max
  Clone ID: jC-gmle01810093c04a1
ctgtggaaacatgttgggttaccacgacctccttacaggtgatgagcttctctctgactccttacgttacaaggaaattgagaatggaatgctgtgggaagtttgaggggaagtggggttgttaaaggagcagttgatgtagacattgctgcaaacccttctgctgatggtggaagaaaagacgagggagttgatgatgcagctgttaaggatgttgacattgttgacacattcagacttcaggagcaacccgcatttgataagaagcagtttgttaccttcatgcgaggcttatcaa

SEQ ID NO: 16743 - DNA, 518 bp, Glycine max
  Clone ID: jC-gmle01810093c04d1
tggactgagtagaccgtatgaagtacctgtgtcggcagatgcatacctagggcggcggccgtcacttagtcggtggtcgtcctttgttttttttttttttttttttttttttttttttattaggctttttttttttaacctttattcctaattaaaattgctattttttcccccgccaaaaatttttgagaaaaccctccttggtagccgtcccacataaaaggctagttgttaaagcagtgcgaccctacaatgtaagagattgccggggagtaaaggcgttgccagtccagatgttaaccctgcggctataatatgccctgtccaaggctcctgttgcttactacaaatgcaaaagactttcctaactaaagggactcatgtgggggggcccctagtgtaatagccgtggatcgacccttgattggaacaaaaagccatgttggctgtcacaagaaaatgacacatgatgggtaaggagctttcatgaaatgatttgcctgatacgcgttttaaac

SEQ ID NO: 16744 - DNA, 280 bp, Glycine max
  Clone ID: jC-gmle01810093c05a1
aatgcatataatcatgcattggaaactgcaaaactgaaatatattgaatcccttagatattatggggcggcaaggttagaactgaatgccatcaatgaacatgatgatcctgttacaagcagcttgaagaatgaggcacatacacagtttgctcatacttttctgcggtttgtaatgcttctggcacgagataatactactgcattttatgaaactggatcactggaaagaacatgggttagtcacaccacgccccatgacagaaaatccagtaaagatt

SEQ ID NO: 16745 - DNA, 520 bp, Glycine max
  Clone ID: jC-gmle01810093c05d1
gaataaccacattataagtactttttacttgaatagttggcccaaaaattcattacaggtgaataaccacatttaagtactttttacttgaacagttggcccaacaacagatatcagacaaaaattagaaagaagtaagaaaacatttactttggagtttaatggtcatatcctaacagtgtaaaacaaacttatacatgatgagttatgatggatgatgacataaaactattttacaatgtcggtgcattacctattttctctttactttgatttgatgatgtaaacaagagaaaactgtcatcatgatatccaaaaactgcacacggtatgcagttggatgaattttccatcatgatatccacaagttgtacatgttatacaattggatcatattagtacccttcagggacatcttgtagagttccctgatctttccaccatctccaaatctgctagatgttgaagatggttgacagggagatttgtttgcactcgatgaaagtatcgtggccaacat

SEQ ID NO: 16746 - DNA, 316 bp, Glycine max
  Clone ID: jC-gmle01810093c06a1
gtcagtcaatacctgagactgaaccaggcaaggagcagttttatcattatttatcatttggctggttgtgtggaggaatcattgagcatgcatctggcaagaaatttcaggagattcttgaagaagccaatagttcgcccccttcatattgaaggcgagttatatgtagggattccaccaggggtggaatcacgtcttgcggctctgactgtagatactgctgaattaagcaaaatctcagcactcgctaatcgtgctgaccttccctccaccttccaaccacaacaaattgctcaacttgcaaccactttacctg

SEQ ID NO: 16747 - DNA, 560 bp, Glycine max
  unsure at all n locations
  Clone ID: jC-gmle01810093c06d1
gactattaaaattgcaacttcgagggtacataattacatagtaagtatcgcaaagatatcccaagtgcaagaagagcacagaaaaaggctccaaagattcccgtatataatcaccaaggctttaggtaaaattcaaaattatacatgaaaatatggtggaaaagggttaaaaagaaccttccaccctcaattaataatgggcctccccattgataattgctcatctggtccactttgctcaaccgcaaatctcaagaaatcgtctggaacaggaatatttaactctgaacacacaagttggacaatttttccagtgacacctccaaaggacattttgttcagtgtcacagcaacagagaagttattggtgacatcacaaaaacccgtggatccacccattcccgagtgaccaaaggcaatggatgacccatccttagaactaaacctcttaaaccctaggccaaaactttcccctggcaaagctaaattctcgtactctcctgtacccaagaattcatcnnatatcctaggattcttgaggaccttacgagcaacatggg

SEQ ID NO: 16748 - DNA, 313 bp, Glycine max
  Clone ID: jC-gmle01810093c07a1
ctatgcataggattcttcaaaggggtcgtcgattcttcaatcctccaccgcaacttgttactgctttctcaggttctgctgcttttcacgcatttccctctcatggggttgaatctcctcatgttcgggaaaatcacaaacacaagagaagttaagaatgactttgacaaataccatgtaaagggtttatctcgatgcctgaactggacttcaaggtcaaatgccaatagtcaagcatcctgctatgtggtaaatcgtcattttgcatctgattgcaatgatatatgctcaaaggagttctcaagtagcttct

SEQ ID NO: 16749 - DNA, 519 bp, Glycine max
  Clone ID: jC-gmle01810093c07d1
gttgaacttggacattctatgcaattttataagtgtgttccggagtacatgttcaacatgtgatttttctcaataatcaaagcgactaaactgactcagaacacaagcagaagtgaacagcattacaattgtgtttgctggctctctcttttctataggcagggcccacgggacagtaaacaccaacataaatacatattctacagtggccaaacaatgtgcctatcatgcaggtgcatgactagctatagtaacttatagtttggaggcatgacttgtaactttactcaaagcagtagctgcttttgaaccagatgcacgtcctaaatgcttgcagatgaaatccccagcaagcataagctttccaaggtccacatttgttttcactccaagtccattcagcatgtaaacgacatcctcagtggctacattcccagttgcacccttggcatatggacaacctccaagaccagaaacagatgaatccactgtgctgatccccatctgagtgaaattaaa

SEQ ID NO: 16750 - DNA, 552 bp, Glycine max
  Clone ID: jC-gmle01810093c08a1
attcggctcgagctttttgtggatcattaggcctgaccttgtcattggtggatccgtgattttgtcgtctgagtttgtcagtgaaacaagagacagaagcctaatagcaagttggtgtccacaggaacaagtgctaaaccatcccttcaattggtgtattcttgactcattgtggatggaactcaactactgaaagtgtttgtgctggagtgccaatgttgtgttggccattttttgcagaacagccaacaaactgtagatacatttgcaatgagtgggaaattgggatggaaattgataccagtgcgaagagagaggaagtggagaagctagtgaatgaattgatggtgggagagaagggaaagaagatgagagaaaaggtcatggagttaaagaggaaggcagaggaggtcaccaagcctggtggttgttcatacatgaacttggacaaagtaattaacgaggtgttgcttaattagacactgttagattgaatggtttctttttttcttttcttaatgctttattatcatgtagttcattgatttctct

SEQ ID NO: 16751 - DNA, 363 bp, Glycine max
  Clone ID: jC-gmle01810093c08d1
caaagggtggaaaaatcaaaactaagattttaccacccccaataaacaaaccccaagggggccctttgggggccccttttttccaagggaaaaaattttagagaaaatcagggacctttcaggaaaaataaaagccttaaaaaaaagaaaaaaagaaaccccttaaattaaacggggtttaattaagcaacccccccttaaaaacttggcccaagtcatgggtggaacaacccccgggctgggggacccccttggccttcctttttaaccccaggaccttttttctaaaatgtttgccctttggtccccccaaaaattttttcccgagctttcccacctccttttttttcgcccggggacaaa

SEQ ID NO: 16752 - DNA, 464 bp, Glycine max
  Clone ID: jC-gmle01810093c09a1
ggttgctgtaggagataagattgcagtagtgctaagtgctaacacctgcagtgaacaatggcctctgcatcagcatctctgctcaagtcttcacttgttcttgacaagtctgagtgggtgaagggacaaacccttcgtcaaccttctgcatcagttgcgagatgcaaccccaccaccccatcaggcctcaccatcagagctggttcctatgctgatgagctcgttaagaccgcgaaaacagtggcttcaccagggaggggtattttggccatggatgagtccaatgctacctgtgggaagcgtttggcttcaattgggctagagaacactgaagctaaccgccaggcataccgtacccttctcgtgacagttccaggccttggtcagtacatctctggtgccattctctatgaggaaacactctaccaatccacaactgatggcaggaagattgttgacgtgct

SEQ ID NO: 16753 - DNA, 495 bp, Glycine max
  Clone ID: jC-gmle01810093c09d1
aagtacacaactcatagcaaaaggtttattaagctgtaaaggtgcatttaaccataaacaaaaatagtctccaagactataaaaacattacattttagacaaattagtcttccacttcatcgtccgtcaacacctactgtaactgctggtgttgctgcctaacaagtatcatattcactgcaaacatcttagtaggagtagcttttgacgaacaactccttcttggcttcctcggattcaccctcaccagtgtacttcccaagctgagcgagtgagttggacttggcacggaatgcgagtgcatcttgtgctgccttcacgttctctgggcggcctccccatgtcttaaggcagtgttttggagggctctggcatacgagaatgacacgtgccacgggtttggagattggttcatggcattcaaattgagggtaggcttaacctcagactgtccaccagacaaaaacataattccagggacagcagggggaattc

SEQ ID NO: 16754 - DNA, 539 bp, Glycine max
  Clone ID: jC-gmle01810093c10a1
gtcgtcgcgtgtactttcttgcgaaacagaagggcgaaggggcaaacacaacttttttgtttttttgtagagcgagagagaaaaaaatgttggggatcttcagcagttccgtggtgtcgccgccggaggagcctgttggctgccggcagcagaacgccgtcgccgaagacgacggcggggaagctgctgaaccggttcgtggagaacaaggcgtcggcggtgtcgctgcaggtgggagaacacgtgcagttggcttacacgcaccacaacgagtcaccgtggcatcccagatcatttgctgataaggatgagatattctgcttgtctgagggggctctagacaatttgggcagcctgagacaacagtatggactggccaagtcagccaatgaagtggttctggtgattgaggcttacaaagctttacgtgatcgagcaccataccctgccaatcgtgttgtatgccatctcagtgggagctttggcttcatagtttttgacaagtccacttctaccctttttgtggcttctgatcaagc

SEQ ID NO: 16755 - DNA, 481 bp, Glycine max
  Clone ID: jC-gmle01810093c10d1
ttttttttttttttttttttttttttttttttttttttttttttttttttttttttattttttagtttttatttttattcctttacaccccaaaaccacaacaaaaacccagcacatcaaaacccagagggcccaccgggcaacacccacaaaaggcccccggcccaaaaaaaacccaaaaaagggcccaaaagaaaccccaggaaaaacgtcaccccccccccacacccccccaagaccccacaaagggggttaacgcgggcccccagggaaaccctcccccggaacgggccaaaaacccaaaccccccgaaaaaaccccccggggctctccccaaaaaaaaaagtttcgcacggggcccgaaaaggggggggacccccccgccccagaaaaacccccccccaaagctcccccccccgggggggaccccacacggcaatggtggggggaccctacgcggaaaacccccccccgggagggg

SEQ ID NO: 16756 - DNA, 529 bp, Glycine max
  Clone ID: jC-gmle01810093c11a1
cgtttctcttgttttgtttcacagtctgcagagtgcagagccttctctcctctattttggcttccaacctttttgctccattcattctcaacaacaaaccaatctctatattttgcttagacaatgagggggaagctggtggcaacttgggcaatcgatcactcgccgtcttgcccatggagataagaaggctgttgctcgccgatgttttgcctcagaagctgagctgaaaaagacagtgtttcatgacttccatgtagctcatggtgggaagatggctccatttgctggatggagcatgccaatccaatacaaggactcaatcatggactctaccatcgactgtaggcagaatggtagccttttcgatgtttcccatatgtgtgggctgagcctcaaggggaaggatgctgtcccattccttgaaaagctagtcattgctgatgttgccgggcttgcccctggaactgggacattgactggtttcacaaatgaacaaggaggggcacttgatgattcagtaattact

SEQ ID NO: 16757 - DNA, 484 bp, Glycine max
  Clone ID: jC-gmle01810093c11d1
aacatgccaaattaaactcatacatgtctgaaaattgataccgagttatgaatgcaactgaaagccttatatttaagacaatgacattagcagtggctgtaacacttgattatgggaaaatttgtcaacaagggagaatgattaggaaatgcttaagatataaatacagaagtagatcaggatggcttatagtattttgttggtacaaatggcatttttgtaaggactccttcattgggttttcctcgaataataatctttactttggtgcctgccttgtgcaatccagatttcacatatcccatggctatgttcttctggaggcaaggactgaatccaccactggtgatttccccaatgttggtgcctccttcatcttgaatctcactgtggcttctgggaggtggaccagaagaaaagaaaccaacacgcctgattttaggaccttcttcgagctgtttcaagataacatcagctcctagaa

SEQ ID NO: 16758 - DNA, 553 bp, Glycine max
  Clone ID: jC-gmle01810093c12a1
cggctggggagtcaaatgtgtcagttaaagcaaggaaatctaatggtgacagtgatccattgccacgttgcgttgttcttgacattgaaggaactactactcccatatcatttgtttccgaggttctcttcccatatgcccgtgataatgttgggaggcatctatctctaacatatgatacccccgagaccaaagctgatatcaagttgcttcgttcccaagttcaaagtgaccttgaacaagggattgcaggtgctgtgcctatccctccagatgatgctgggaaacaggaagtcattgctgcacttgttgccaatgtggatgctatgattaaagctgatagaaagatcactgccttaaaagagttgcagggtcatatatggaaaactggctatgagaataatgaattggagggaatagtttatgatgatgtaccagaagctctagaacagtggcacgccttgggtataaaggtatacatatattctagtggtagcagattggctcaaaggctaatatttggaaataccaaccatggggacctaagaaaata

SEQ ID NO: 16759 - DNA, 479 bp, Glycine max
  unsure at all n locations
  Clone ID: jC-gmle01810093c12d1
ggagaaactcaacgcaaaatacattacattacattattttaattttttttaattacattattttaattaagaagtgaacgttacactattcttagtaatgataacacatttaatgtcattccagaagactgcaattggtcttagatctccgagaaggatttgattgtcttgaagccatgattgtcagggaggggtccatttccaggtcgaatagaaattatcacctccaaacctgcagccgttgcagctgtggcttcttgatatacatcagtgacaaataaaatatctgatggtttttcaacancgagtgactcaganatttcacatactgcgtgtctctctttggttcccactgtagtgtcaaaaacccagataatattntttaggtcccatggttggttttcaaatttagcctttgaccaatctgtaccactagaattatgataccttatacccaagcgtgccactttttagagctc

SEQ ID NO: 16760 - DNA, 317 bp, Glycine max
  Clone ID: jC-gmle01810093d01a1
atccgcaagcccgtcactatgcactcacgtgcccgtgcccgagagctgaccgccgcacgacgaattggccgccaccgtggtttcggtaagaggaagggtaccgccgtctctcgtatgcccaaccaaaatactctggatgcgccgtctacgggttctccgccgtgtactagtcaagtaccgtgccgccggaaagatcgacaagcacctctaccacgagctctaccacctgtacaagggtaacaccttcaagcaccagcgtgctctcgttgtacacatccacaacgccaaagctgggaatgcgcgcgagatgccatcaa

SEQ ID NO: 16761 - DNA, 435 bp, Glycine max
  Clone ID: jC-gmle01810093d01d1
ctactgtactggatgctcattatcctatgcatatggacattcatagcatctaatgcagagaaggcagcctttttcagttgcacatgctcgagcgagaagagtcgttcggagagatgacccagacgtacatgaacatgaccgcatatgatgcccagagagaaaggagatttgacgcccttcttcaaccttaaaaagacccacgccaggtatttatcatgtcgtccgtcgcttactcgtcggccagcatcgcagcgcgcttctgctgcacacgctcctgccttctttcgcgcgccgacttggacttcgcacgcttggcgtccatctactccttgatgtgcctctcgcgcgccttctcagccttggccttgtggatgtgttcaacgagagcacgcttgtgcttgaaggtgttacccttggagaggtggttgagctcgt

SEQ ID NO: 16762 - DNA, 321 bp, Glycine max
  Clone ID: jC-gmle01810093d02a1
cgggaatacattagagataagtaccctactcatgcggaaaggtttattagagaacattttaagcgtgggagtggttgatgtatatatagtagaatttgtatactttggtgtgctgactgctttttacattctgctttccccccttattgttcagtgccctgcctccattgtcaatggtagtggataatcattgactgggatatcaagcttattagttattatgaaagctacacaggaaattattgaagtgaacttcactttgttgacttgtaaattggtggttaggtaactggttggcagtaaggaacagaatcttgttgt

SEQ ID NO: 16763 - DNA, 358 bp, Glycine max
  Clone ID: jC-gmle01810093d02d1
ctagcaaatatcttatataatattttagaggtggatcaacaacaagattctgttccttactgccaaccagttacctaaccaccaatttacaagtcaacaaagtgaagttcacttcaataatttcctgtgtagctttcataataactaataagcttgatatcccagtcaatgattatccactaccattgacaatggaggcaggacactgaacaataaggggggaaagcagatgtaaaaagcagtcagcacaccaaagtatacaaattctactatatatacatcaaccactcccacgcttaaaatgttctctaataaacctttccgcatgagtagggtacttatctctaatgtattcccg

SEQ ID NO: 16764 - DNA, 321 bp, Glycine max
  Clone ID: jC-gmle01810093d03a1
tagcgcttatgcacgtctctatgattatgaacgtgtacgcaaggtttgcgataaacagaaagctatactattggcagatatggcacacatcagtggattggttgcagctggtgtcatcccatcaccttttgattatgctgatgtagttactaccacaactcacaagtcacttcgaggaccacgtggagctatgatattctacagaaaaggggttaaagaaattaacaaacaaggaaaagaggtattgtatgactacgaagacaaaatcaaccaagctgttttccctggactgcaaggtggccctcacaccacactattact

SEQ ID NO: 16765 - DNA, 365 bp, Glycine max
  Clone ID: jC-gmle01810093d03d1
tcgtcctgagggtttatgggcatatttgaattaattgctcattattatgtttttttctttttttttttttaatttgtcaatttttttgtgttgaaaacagaatgatggaaaatttatatgtgtttatgtaatttcttaacattcctattctatttacatgttgtaacaggcggaagcgaactcctaaaatgcctttacaccttcaaaacaggcgatcccaccaactgaaccatgtcaccacatactatgggcttaaaaaaaagaggccagttatgccttacagggatgaaagtcaattaaccgaaaaaaaatcaaccctttaggaagctccaaatctttccatgctttatcaacacggttacaaa

SEQ ID NO: 16766 - DNA, 316 bp, Glycine max
  Clone ID: jC-gmle01810093d04a1
ctttgtttagattttgtccctacttcatcagttgtcaaatcatctacaaaaaaaaatggaccaaaggcttattgtcagtacaaatactcatggtacttatggacttaaaataactatgctttgtgaatcgggatcaataactattctttataggagtgcttctgttttgactttccttcaatgagcttgggctttttctagctgttcaatggccccttccacttcaatacttccaaatttcaaatagttctcaagattctttgttttcgattattctaagtggatgaatttgtgctgaactgtaaattgtttggtg

SEQ ID NO: 16767 - DNA, 456 bp, Glycine max
  unsure at all n locations
  Clone ID: jC-gmle01810093d04d1
acttatatgaaccaataagcaatttactaaatagttttactacagaggaacttaacctcaacttccatcacaacaatgacaaaaaagaagaaaaaacaagtaaaaaagtgataaaacaaaggttattttatcacaaaatattgcagatctgataaaagtgcacatcccttttatatatcagaaggaggaggaaagatgcgtgacacaggagatattacatattgttggatataattcttagaattgtttgggtcaggaatccaatgaatctcactcatgtttggtgtctcaacaaaggccatagtgaaccctcctaccttcactagtttccctctcttccctgccctcagtataaggttcccatgctggtacgaaaatatgccattggtaagacaaattatgtcacctgaatcaaaagcatcacactcgtcgncccagaactggaaatgaatagct

SEQ ID NO: 16768 - DNA, 317 bp, Glycine max
  Clone ID: jC-gmle01810093d05a1
tcagaatgcagagcgcaacacgcgccgaggcggagcgtctcctggggatcgcggagaagctcctccagaaccgcgatctggtggggtctcgagagttcgccttcctcgcccaggaaaccgagccttttcttcgaaggctccgaccagatcctggccatagttgacgtcctcctcgccgccgacaagcgcgtcaacaaccaccccgactggtacgccgtcctccaggtggaccgccgctccgacgacctggacctgatcaagaaacagtaccgccgccttgccctacttctccaccccgacaagtaccgtttccactt

SEQ ID NO: 16769 - DNA, 458 bp, Glycine max
  Clone ID: jC-gmle01810093d05d1
gtaggaaaagccagagtttttattttttatttttgtgaaaaccacataaaataaagttaagggcattaaggccctgtgaatctaataatttcaactatagataaccggccacattgtttctcttcccctactcatcaacaaggcataaaatcaaaaacccatagcaaaaaaaccagagccaaaaagatacccacattcaagagacagatcatacaaaataaccaggtaatcatatctacaaaaacaacagttaaacaacacaacagtacctacaacaacaatccaaaacaccccctactttttacgacggcaatggatacttcctcggccgcccccgtttcttcttccccgtcccattccccgatcctaccccgttcggcaccgtcgcccccgacctcgtcaacctggtggccgccagcaccggtgtcacacttcccacgccattctccggcggcacc

SEQ ID NO: 16770 - DNA, 272 bp, Glycine max
  Clone ID: jC-gmle01810093d06a1
aaagaatgcaaacctccacaggcgccggggcggagcagatacatggaatcccgtagaaatctacggcacaaccgggatataactgagtgtcaagagtgaaccttactagaccaggacacccagccttgagaaagaaggctcccaccagatcctggccttatttgatgtggttctcaccgccgacgagcacataaacaaccaccgcaactgatgcgactgtctcaatgtaaaccacatgtccgactaactggacccgacaaaaaaacagtgcc

SEQ ID NO: 16771 - DNA, 254 bp, Glycine max
  Clone ID: jC-gmle01810093d06d1
gtatatccactttttaagttcttgtcactaaagtcacaggcccaaatattcattacaggggaaaccccacatgtaaaagcttaggactttaacggcctgccaatctaccgatatcaaataaagattaccgggcactaagatcacatttacctaggagtttactgggcatatgctaacagaccaatacaaaattatccatgaccagtgatgatccctgatgacataaacctatcatacaaagtaggcgcattacc

SEQ ID NO: 16772 - DNA, 309 bp, Glycine max
  Clone ID: jC-gmle01810093d07a1
ctttgcgtggatcatttggcctgaccttgtcattgttggatccttgatcgtgacgtgtgagtgtgtcatgaaaacaagatactgaagcctaatatcacgttggtgtccacaggaacaatgagctaacgcatacttcaatcgctgtatacttgactcattgcggatggaactcacctactgaaggtgtttgtgctggactgccaatgttgtgttggccattttgtgcagaacagccaacacactgtagatacatttgcaatgagtgggaaattgggatggatattgacaccagtgcgaagagaaggaggt

SEQ ID NO: 16773 - DNA, 332 bp, Glycine max
  Clone ID: jC-gmle01810093d07d1
aacttggacattttatgcttttttataatttgttttttctggagtacaagtgtaaaaagtgaaaaacctaaataattaaagcccccaaacaagactaaaaacacgggcctatttgaggggcccttcaatagagggcagaaagctcttaaaaaaatatagggagggcccacggaaacagaaacccctacaaaaaaacaaaaaaaaaaacggtcaaacaaagcggggtataatgcagagcacgactagaattagctactcaaagtttgggggcaaaaaccgccactttacggaaaccaactggggcttctgaaccaaatgcacgacctaaatgc

SEQ ID NO: 16774 - DNA, 542 bp, Glycine max
  Clone ID: jC-gmle01810093d08a1
tgtgtgtgttggatgggacccggaaggcgtgcttggtccaccccaaactgggcacctcgccaggttcgagtttaagaggcgcctcgagagagacgcagatgcccgcgaagccttccaacgtcaagtccgtgaagagaaagaacgccgtcaatcccttcgacaatctcgtcctcttcccgatactccgcaagacctcattgaatacttccttgacactgaagctcaggagattgagtttgagattgcaagaatgagaccaagattgaatgaggaattctttgcgcaactcaaattcgagttaggacagcttcgattcgctgttaacaaaacacagctcatggaggacagacagattgagctggaggctctagagaaagccatactagaaggattagaagcctatgataagatgcaaggtgaactcgtaaaagccagggcaagcctaaccaaaatcttgacatcaaaggatgccaaagcaactttgctggagatggttgaacagaatgaaattaatagatctttatggcactttagatgaaaac

SEQ ID NO: 16775 - DNA, 538 bp, Glycine max
  Clone ID: jC-gmle01810093d08d1
aaaatgtacaatttgatacttctgatattacagtggagaaatctgctaccacaacatcccagttctttagtattgtctttctgatcaacagcacaattttcacaaaacttaatagtaaagtgggaagaaacgtactatatgcactaaactgtaatgtaccgaagaacagccccgcggagcttctccatatattctgcagcctgtttctggttgcccttttgtgcacttgctatgttttcatctagaagtgccaataaagatctattaatttcattcttttcaaccatctccagcaaagttgctttggcatcctttgatgtcaagattttggttaggcttgccctggcttttacgagttcaccttgcatcttatcataggcttctaatccttctagtatggctttctctagagcctccagctcaatctgtctgtcctccatgagctgtgttttgttaacagcgaatcgaagctgtcctaactcgaatttgagttgcgcaaagaattcctcattcaatcttggtctcattcttgcaatct

SEQ ID NO: 16776 - DNA, 343 bp, Glycine max
  Clone ID: jC-gmle01810093d09a1
ggctgctcgagtacattatagtgcaatagagcggctagctggcacacgcaatgaacacgggcctttgtatcacgagatctacatcagtgttccggagctcctgccaatccgaagtggctccgagggcagaaccatgcgtcagcctgctgcagcactccttcgacgaaaacgcacgaggcgaaactgcctgagcctcatcgtgtcgaacctatgctgctgagctcgcactgtacccggtagcacacggttctgatggctaacacacaccacagccatggatcaggacattgctgactatgggcagcgaatgacgtcaaatgctctacggcacactggagtttac

SEQ ID NO: 16777 - DNA, 350 bp, Glycine max
  Clone ID: jC-gmle01810093d09d1
aaggtcacaatgtatatcgaaaggtgaattaagctggaatggtgcattgaaccttcaacgaagatggactacaagactataaaaacattacagttctagacacaataggcctcacacttactcgaccgctaacacctactgtaactgctgatgatgctgcctaacaagagtcatatgaacatgatacactgtatgaggagacgctaatgaccagcaactgcttatggggatcctaggattcaccctaaccagcgaacttcccacgctgagacgagtgagatggacttggcacggaatgcgagagcatcttgtgctgcctgaacgatctatgggcggacgccgcatgtcta

SEQ ID NO: 16778 - DNA, 458 bp, Glycine max
  Clone ID: jC-gmle01810093d10a1
gtggaagaggctcatgttgacctttctatgtgcctttgctgctttcttcgcttacaatatcatgactgcgctagttatgttcttgtccatagtcacaattgggttaagtagtggtgggcttgcggttttggtttccaatcacggttttgtacttcattgggtatgtgtacctcaccgtggtgtggcaactagccagcgttgtcactgtgttggaggactcgtggggggttcgagccatggcgaagagcaaggagttgataagggggaagatgggtttgtccatattcatctttttcacccttgtggcttcttttgagcccattagggttttgttcaaggtgatggtggtggatgatggaggccgtagtatctttggacacaccagcatatggtgttctctgtttcttgctattgtcttgggtgctactctttgggcttgttttgcacactgcgctcta

SEQ ID NO: 16779 - DNA, 562 bp, Glycine max
  Clone ID: jC-gmle01810093d10d1
gatgtgaaataaagtcatctcatagcattaattaatacacctttgcaaaagagtcctatttttaaacagaaaattaaatacatataaccaatcatatagagagtaatgaaattcacttcacacctgccttaatttcacacacaaaagatatttctaaagacatcaagaaaccaaagcagatataattaaccgcatcatcaatctagacacatgatgatgattaatttaatttatctaattaagctatattataaatcaaacttggtactgctccagctgaacatccttagccgtcaatggcacatactctccacgatacccttcaagatgatctgccaaagccgatttgtcaatattctcatggtgataggacttgcaaacaaagtagagcacagtttgcaaaacaagcccaaagaggaacaaacaagacaatagcaagaaacagagaaccccatatgctgttttgtccaaagaactcaccctccatccatccaccaccatcaccttgaacaaaaccctaatggaaacaaaagaagccacaagggtgaaaaagatgaatatg

SEQ ID NO: 16780 - DNA, 475 bp, Glycine max
  Clone ID: jC-gmle01810093d11a1
gttcaatctcttcaacgacaagttgagtttctctcaatgaaattagctgctgtgaacccaaggcttgacttgagtattgatgatctatgtgacaaagatgttatttctacttgtgctacagattttccaaacattgggatttgcatcagcatcagacatttctaaccctgcctatcatcagtttaattccccacaacaaattttgtcatatgatggattagacccatccgatatggggctcagaaggaccataagtgctcctgtatcaatgcctgaaacatatcttcaatcgtcctgtttcacacaaatgctaccctgctcaacatgggaaggtgattttcaaaacctttgcagttttgattctgatcaagcacgggctacatcttatcccttctcagctgttatcaagtctggttgaagctggcagactaaagatggagatgtatactagagcttctattttcttctgcaactt

SEQ ID NO: 16781 - DNA, 358 bp, Glycine max
  Clone ID: jC-gmle01810093d11d1
attacattattttaattttttttaataacattattttaatttagaagtgaacgtttcactatttttagttatgattacacattttaatgtatttccagaagactgcaaggggtcataaatatccgagaaggatttgaggggcttgaagccatgattgtcagggaggggtccatttacaggacgaatagaaattatcacctccaaacctgaagacgatgaactgtggctacttgtatacattagtgacagagaaaatatctgaaggtttttaaacaccgagtgagtgaaaaatttcaacataactgcgtgaaaatcaaatgttccccactgtagagacaaaaaacccagatgaaggggg

SEQ ID NO: 16782 - DNA, 460 bp, Glycine max
  Clone ID: jC-gmle01810093d12a1
ggaattcggctcgaggttttgaaggaaatattgatctttgtggtgaacaacttaacaaaacttgtcctggggatggagatcaaacaacagaagagggtcaagaaccaccagtcaaaggtgatgattctgttttctatgagggattatacatgagcttggggattggatacttcactggattttggggcttattagggccattactactgtggcgtccttggagaattgcttacatcaggtttctgaacagattaacagactatgtatatgtatgcttatggtgaatgtgggaagtgttgctaatcgctccaaggcacaaagatgtgccgcacgcttctgatcagagaagaaagcattgttggctgctacaagtgcgaaatatttctttagtatgggagtttacaatgctttgtatttaagtaatgaactgcaagatcttgacttgcggaacttggtatga

SEQ ID NO: 16783 - DNA, 327 bp, Glycine max
  Clone ID: jC-gmle01810093d12d1
cacagatgtaagcacattaatgaaaaataaacagcattacaaatatattatacaataaaatacaacaatatcataccaagtttccggagacaagattttgcagttcattacttaaatacaaaacattgtaaactcctatactaaagaaatatttcgcacttgtagcagccaacaatgctttcttctctgatcagaagcgtgcggcacatctttttgccttggagcgattagcaacacttcccacattcaccataagcatacatatacatagtctgttaatctgttcagaaacctgatgtaagcaattctccaaggacgccacagtag

SEQ ID NO: 16784 - DNA, 320 bp, Glycine max
  Clone ID: jC-gmle01810093e01a1
gagctttttgtgaggattccaaagcatggcttcccttgcagcatccactgctgctgcttcccttggcatgtcagaaatgcttggaaaccccatcaacctcagtggtgccacaaggccagctccatctggctctagccctgcctcctttaaagactgtggctcttttctccaaaaagaaggctgcacctccaaaaaaagctgcagctgctgctcctgccaatgatgagcttgccaagtggtatggtcctgacagaaggatcttcttgcctgagggtctcttggaccgatctgagatcccagagtacttgacggagaagtcc

SEQ ID NO: 16785 - DNA, 476 bp, Glycine max
  Clone ID: jC-gmle01810093e01d1
ccaaggaacaaagccaaatgccttaatatctcagggatatgtattgtacattaagtaagattggagaaaaacatgaagatgaatgatttagagaagtggagctctctcagcagatccagaaatgacagtgagcaagttgttgccaaaagggtcactgagatgttttgcaaggttctaaacaggaccttctccagtgacataagcttggaagtagaaaccaagcatggcaaacatagcaagtcttccatttttaatttccttcacctttagcagtgcagcttggtctggatcatttgcaagccccaatgggtcaaatggaccacctggatgaagtttgacttcgaaattcaggccattaataattctgtcgaactctgaacctaccacaagaacaatcttagcaatgacagccacaataagattgatggggatgggtttcccgaagtggttcaaggtgcccccattaagaagcagag

SEQ ID NO: 16786 - DNA, 320 bp, Glycine max
  Clone ID: jC-gmle01810093e02a1
aatccactcacttgctacgatgtccccttctgccaacactaacggaacttctgccaccaatggctcgtcgaagcctcgtcctactttcgctgtcaaggctggactcgctcaaatgctcaagggagggggaatcatggatgttgtcaacgttgaacaagccaagatcgctgaagctgctggagcttgcgctgtcatggccctgcaacgtatcccctctgatatccgaaaggacggaggtgtcgctcgtatgagtgatccccacatgatcaaggagatcatggaagccgtttccattcccggcatggccaagtcccgtatcg

SEQ ID NO: 16787 - DNA, 463 bp, Glycine max
  Clone ID: jC-gmle01810093e02d1
aagggagagtagctacaaagagaaaactggtgattttgcaaagtgaggccaaaaggggacaaaaaaacgaacgattaaaaatttttctatacaaatgtcacaattcttcctttgttgcccaaaataaccatgtccagggaaaggaaagagggaagtgaaaagttgaaaagcgagagtttagtaacctcgatcaggggtcataacctttccagctttggcgcctaatcgggattctccctttatgccttcaccgaggccccaagaaatcttggggagcttgacgggatcttggtagtgagtagtagcgaggaccacggtaccagcgaacttttcggggttttcagatttgaagataccggatccaacaaagacaccattcataccgagctttatattgagagcagcatctgcgggagtagcgattccttcagccgaaaacattactactggaagtcccttgaac

SEQ ID NO: 16788 - DNA, 322 bp, Glycine max
  Clone ID: jC-gmle01810093e03a1
aaagaaaggaaaaagaagtaaagcatgaacgaacacctcagaacttttgcacttcaactcagctactcaacaacgacgccaaaatcctcttccacaccgcacactgcttcttccgttctctcaaggtttcttttacactgaaattcagtaagaaatttggaaaactggcataatggaagacaacgactacataaggagatgggaggatctggacatagatattttggtgaagatttttcagttgcttgacatttttgagttgacatccggcatctctcgtgtttgtagtgcatggcgcttggcatgttgtgatccacttctc

SEQ ID NO: 16789 - DNA, 517 bp, Glycine max
  Clone ID: jC-gmle01810093e03d1
gcccaaaactaatctcatcacacttctataaagaaccataattactgtcttaacaaattttcatgatttagaacacttctcaaaatgaaaccaactacagaaacaaaacttattgttcctatatacagttacaagatttggctaactcctagagggtgcatcagtattcatatgcaagaattaaactatggttatttggatctacacttaaggtggcagcattacttaacaacagagaatgtgacatgagcattaacaactagatcgcttccgattgcctaaagtgagagagaccttacctcatctgttatccaaagcccttactcgtacttgtgccacctaatcagtccttaatcatgacttgttcgttggcacatgacacatgagtcttccatgcatgtgagaaattcacgtaaccgagaagccttctgacgaatagtcacatcaatttctttaatgattctcttctgttgaggagctgggagggcttccatcagaacacaatgtgatatgttga

SEQ ID NO: 16790 - DNA, 302 bp, Glycine max
  Clone ID: jC-gmle01810093e04a1
atcaaaagaaaaaagagaaacaaatggcagcactgggtggctttaccgacatcaccggagcacagaacagcatcgatatcgaaaatctcgctcgctttgctgttgatgaacacaacaaaaaagagaatgcagatctggagtttgagagggcgattagtgcaaagaaacaagtggttgctggcaccttgtactatatcactttggaggcaaatgatggtgtgacgaaaaaggtttatgaaactaaggggttggagaaaccatggttgaacatcagggagggtcaagaattcaagcccatcact

SEQ ID NO: 16791 - DNA, 413 bp, Glycine max
  Clone ID: jC-gmle01810093e04d1
aacttaaatgaaatctatatttcacttaatgtcaataaatattaagatagatccaaggagggcaagaacttcaagattgtgaccccataatcgcattgagtacagaagggaccgctccaccagatcattctgctataaagttcgaatcatcaccatccacgctttggacgaaacacgcataaattaatacataatcaattattttattaatctcgatggcaatatttatactgaaatatataggatggcaaacatgcacaaccccacaccgtttgtagagttaataggtacatttattcagttcatacatattattactcttgcggccaagctagtcacttccataacctagctatgtgctagaccgtcaccgaaagaggattaacagcaacagtgatgggcttgaattcctg

SEQ ID NO: 16792 - DNA, 318 bp, Glycine max
  Clone ID: jC-gmle01810093e05a1
gtggtagtaagcgaagagggtttggcaaagtaagagttactgctgaagactcagtttctccctctgagaccattgcagatgactattatgaagttcttggactgcttccagatgcgacaccagagcagatcaagaaggcatactacaattgcatgaaatcttgccacccggatttgagtggaaatgatcctgagaccacaaatttctgcatgttcatcaatgaagtctacacggtgctcagcgatcccgtccaacgcatgatttatgatgaaattcatggctactctttaacttcaatcaatcctttcttggatgatt

SEQ ID NO: 16793 - DNA, 492 bp, Glycine max
  Clone ID: jC-gmle01810093e05d1
ataaacaagctttcttatattttccaaagtattactatggttcatctatttctaaaaatttaccttaataggagttgctgcatatacaatcatgggtagtagaatgagaaagaagatctcattggtttaacttaggaggctataaatgaactaattacacgggactaaatgatatagtagaaggtaaatgaagtactgttcacttgtccttgccaaggcttgcctctggaagtttaaatgtgggaggcttatcaacacctctacttgagtattccctccatcttcgtgccgctgaagcagctctttttgctctttcttcaacttcctcatctgaactttgatagtctttctgtttgccccaaagattgtcccagtacgaatttttcttatcagaaccttcttccctcatcattctcaattttgcttttgccaagacttttgactgccttttttcccatctggaacttgccattctgaaacattaatgatgct

SEQ ID NO: 16794 - DNA, 65 bp, Glycine max
  Clone ID: jC-gmle01810093e06a1
atatatttatgacagataaataacagaaagagagaaaatgaagaaaaaacttttatacttaaagc

SEQ ID NO: 16795 - DNA, 279 bp, Glycine max
  Clone ID: jC-gmle01810093e06d1
attatggtattaccaaattaattgtgttaatttttgtccgaggacccggaagttccgaatgatacgaaccgtggggagcaacctaactgttacattgaagcgtcactcaaagtcaacagattggaccacactaactgacaaaactactggggaacccatgcgtgctccacacaatatacatatgactcaatagcccgttcaactggagggacatgatgtacagaggcccactacattagcacgtatcgagaatactaccaatgaaagaggggaaaggaa

SEQ ID NO: 16796 - DNA, 315 bp, Glycine max
  Clone ID: jC-gmle01810093e07a1
aggatgaaaggtgttagagattgggtcttctctcaaatactatccaaatcgctggtctcgccttcaccattatctggcagtaatagtctctatgctggagagcatcggaatgaaaattttaatgagccagggctcagatcactcagctaattcagtatcatcacccatcccttccaactcatcaaactctttatatggtgatcagagtaatcagcatagttcctccttgcagctagtttcagatacagaaatctatcagtatcaacataacactaatggaagacggaaggatactttggccaaggttgaggaact

SEQ ID NO: 16797 - DNA, 531 bp, Glycine max
  unsure at all n locations
  Clone ID: jC-gmle01810093e07d1
atcactaacatatacccagagcttcattaacattttccacattgcaaaaattcctgttgaacaacaatcctctatcattcaaacttgctaatacttgaacaaatcacaggaaaaaaaaatcctgacattttctgtgctttactgtacagttatgacttcattttactagaaatgaatatcaattctctcatactgattattaatccataatctacagatagaaataagttcaagatgccagccagccttacctaaaagactttcaaaaactgcatctgaagtatcacggaaaagaaaattccagctagcctcttcaaaaaataaaatccaattcgtactttctgtcttccttttacaggggaaaaaggtccatatctacgtagggcatgcagaatgcttcactgttntcacatcttccttgaacaaaanataacagtaccaataagtaaacaacgagagcagacttcagtccattacatccctcaccacgttcttagtttcccttctacgtgataggaatttcanaatcga

SEQ ID NO: 16798 - DNA, 529 bp, Glycine max
  Clone ID: jC-gmle01810093e08a1
ccaaaacatcgtaagttaaattgcatttttagagcaaatctgtaagctctgacggcagcttatagaggtcgttgacggcaaagagagacacaaatgtattctgtttgagtttgaaacattgattcgttgtttccttctgcaaaattaaatcctcattgtgattgttgatgaacaattgaagtgtctctccgatttgaggattccggcgacagcaagcgatgaccaccggcggcgacggtgacacctccaaacaagagctcttccaccttatcaaacgcttcggagcttgcgtcactttcaagatctccaatctgttctctctctctctccacggcctcgatatacgctctatcggggcagttgctggtcttgctgttgcaattgttttcacatggaggctgttgagatctccttctgggtcttaacggaggcaacaaaaacggcaaggtccttcatctagtaatcctggagtcactacacattcaaatgtgtcagatgttccttcggatgcttgttcaccctcagatga

SEQ ID NO: 16799 - DNA, 531 bp, Glycine max
  unsure at all n locations
  Clone ID: jC-gmle01810093e08d1
ggtcactaatattattcatgatggtataacgtaatgaaacttgatcaaatatctaataaaattgtcactttgccagtctaaaatgtctggatggaatacaatgtaatgcacaaatttcaaaacatagaagaaaaaagaaaatagtaaaacttcttcaaagcatcaacatacacatatggtctttcacctacctagagtgagagaaccttaaatctttaagaaaaatctaaccttgttctcatacatctagtaaaactggaaaaaaacttatggtgaatgtggaaatcgagatgaacatagaaacaaacttggagacatttatgaataacatctgatttgtagtggttttagtttcatatggatccaaagaactgttccagagatggagcactgaacacatttgcagcagttctttcggttntataaggagatacatgaagttgatacttgataaacctagctaactgagtgacaatttcaggatttgaatcaatatgccaatcaggttccaattgccgaacaaacgatgac

SEQ ID NO: 16800 - DNA, 542 bp, Glycine max
  Clone ID: jC-gmle01810093e09a1
tggaatgcaacctataccaacttatgaaagacagggaaaaactgttttctgaaggtgaagttagaaattggtgttttcaagttttccaaggccttgcttacatgcaccagcgtggatacttccatcgcgaccctgaagcctgaaaacttgctggttaccaaggattttatcaaaatcgctgattttggcctagcccgagagatcagttcacaaccaccctacactgagtatgtctccacacgatggtatcgtgctcctgaggtgctgcttcagtcttatctgtatacctctaaagttgacatgtgggcaatgggtgctataatggctgagcttttctctcttcgtcctcttttcccaggtgccagtgaagcggatgagatttacaaaatatgtggtgtgataggcaatccaacctttgaatcatgggcggatggactcaaacttgcaagggatattaactaccagtttccacagcttgccggtgtgcatctttctgctataattccgtctgctagtgatgatgcaatcagccttattacatc

SEQ ID NO: 16801 - DNA, 500 bp, Glycine max
  Clone ID: jC-gmle01810093e09d1
acaaatagcatttatttatagtaatagtaaaaagcatcaacttagctctgtatgtcccaaaagtacgaaacgattaccaacaagtaataacacacgggcagtactagttttgtagtttagacatcgacaaagtcatcagaatgtctaaccatacatttatttttatttttatttgatattaggatacattcacaatcacatcattgagcattatagaatcatcatcactcacattttactcattcatacttgtcatcaggcaacttttcttgcaaaagttcttccagtcggaatctgctgtgcgggcccaaggatgaagtttccagattcagaaatccaattgccttcagccttcattggtggaggaggacgaggttgccccattgattgtcttcgactggaaacagacaaattgcccaacttttcagctgtttctgaaaccccacgtacagacctccctttgttcatagaagttgggctgtcctttcctggctgacgat

SEQ ID NO: 16802 - DNA, 561 bp, Glycine max
  Clone ID: jC-gmle01810093e10a1
ctgagactcttgaagaatcttttccattcttcggttatgtatggaaagatagaaataaaatgactacaattttgggtattcacttaatcttgttaggtataggtgcgtttcttctagtattcaaggctctttattttgggaggtatatatgatacgtgggctccggggggcggagatgtaagaaaaataaccaatttgacccttagtccaagtattatatttggatatttattaaaatcaccttttgggggagaagggtggattgttagtgtggacgatttggaagatataattggggggcatgtatggcttgggttccatttgtatacttggtggaatctggcatatcttaaccaaaccttttgcatgggctcggcgtgcacttgtatggtctggagaagcttacttatcttatagtttaggtgctttatctggtcttggttttattgctagatgctttgtctggtttaataataccgcttatcctagtgagctttacgggctcactgggccagaagcttctaagctcaagcatttacttttctagttagagaccaacgt

SEQ ID NO: 16803 - DNA, 573 bp, Glycine max
  Clone ID: jC-gmle01810093e10d1
aagaaaaaagaaagttctaattattaataaattatatctatatatatatatatacagatagatattctatatcttttatcttaattaatatttgacccctccttataatgtgttatagttttctttatttttaggaacttatccattccttttttaatgtgcccgacaatccgaaagaattctgggggaggggtcatttcgtttttgatctagaataaatagagcttcaagaaatgagagaattaagaatacccacgagaaacactaatccaatccataatgatgtaccggaaaatacaacatttttgttattcgaccaaccttcaggagaagcaaatacaacaggtacactaatcaataaaataaatgaaatagcaattaatgcaaaaacagctaattggaaagcaatagtcatgtttctaatcctccaatttaccaacaaaagaactttaccatttgatcccccaaccccttgatccctttattgacaaaaaaatttataataaaaaaacgcagaaggttttatcatgaattcattgatttttttactattatcaaccttttgaggcatga

SEQ ID NO: 16804 - DNA, 594 bp, Glycine max
  Clone ID: jC-gmle01810093e11a1
ggagatcggagagagagagagagagagagaggagggaaaggatgggttgttgccaatcatcgacgttgctgagagtgggagagagggagactcaccctgaaaaggaaaaggaaaaagaccaccagaggcttctttgaggccgagaaagagggctttgatttctccttctctgagttctcgctggctgagctgaaggcggccaccaacaatttcagctctgactatatcgtgtctgagagtggggagaaggcacccaaccttgtttacaagggtcgcctccagaaccatagccgctggattgccgtcaagaagttcagcaagtctgcttggcctgatcccaagcaattcgtcgaagaggcttccggcgtcggcaagttgcgccatccaaggctcgctattttgatcggtttctgctgcgacggcgatgagaggcttctcgttgccgagtacatgcctaatgatactcttgccaagcatcttttccactgggaaactcagactattgagtgggctatgcggctgcgagtcgctctttacatcgccccagctttgcattattgcagctctgaggtcgtccctcgtccatgacttgat

SEQ ID NO: 16805 - DNA, 494 bp, Glycine max
  unsure at all n locations
  Clone ID: jC-gmle01810093e11d1
agaataacctcaataaacacctggttgacagtaagtaacccagtaggcatcaaccaatcaatttcattaacaatggaaaaattaccggtattccttcccaatttagagtgcataagcacagttttcaagttaaccgattcctataagatggtgaaataaaatgcatgtgccatctactccaccacttttgtatttctctgacacattttatactcattcaaacgttagttttgcttcccagctcaacctttatacagaacttgacaccctcaaattagcccactgcataaaactatgatcctctcgctcctctttgcctcttctcttccaatgcagctgcctcatttaacatatcagccgcatccttgtgcatgtccagttttgcaagagcaactgattgcatgtagaaagccgtgggccagtctggataaacgcactgtgcttgcattgcatctcgtagcgcaggatctggntgatcacataacagatagcat

SEQ ID NO: 16806 - DNA, 434 bp, Glycine max
  Clone ID: jC-gmle01810093e12a1
atggcatatagaaaaggaaaaaaaaaaagtattactagggacacaaaacatattctcttctatctcatgatcatgatgcaaaagcattagcatcaagcaccatgcaccccatggaaagtgtcttctctctctctgtagccgccagaactgattatatccaatttctggtgcagtctttgggctgcagttacattggtctatgggcatatgattccatttcaccaaatcgtttgagcttcttggatggtatctacaatgtaaggaacaaccaagcaagctctagtttggggagtgtgcaggcacaacagcttttcagtcagttccggactttgacatttgatgtcaatgatgaccgtgttcctggactagcttttaggaatcaacgaccctacctagagctccaacaattggaacttcttagattagcatccaca

SEQ ID NO: 16807 - DNA, 480 bp, Glycine max
  Clone ID: jC-gmle01810093e12d1
aataaaaccaatttaattatgagaccaaaatatcacaacaagtggtggagagttgaattaaatagatttgatggacttaaactaacatcaacgatgcactaccgtcgcagaataaatcaaagagtaatggtcaaagaaagttattggtccatttggtactgtgccaagtcagcaactactcttcttactgcttcctcgaaggcagactcgtcccattcacttccctgaataatcctcaatctgaaggttagttgatgaagtgcattgttcccttctgcaatgtgagtgtttgcgtccatggaaaccaaactcacgtggtgagccagttttaagaatttcaataaccggattaataaatcagtttgagaaacttgtcctctcacattcacttgcaactccaccattctctcttctgatgtgcttgattcgggtacatgtgaaattctgacacttaatctttcatttggtgataaactagct

SEQ ID NO: 16808 - DNA, 318 bp, Glycine max
  Clone ID: jC-gmle01810093f01a1
cattatttgagaacaacagcagagaataaaagagaagaggagatcttggagctggttcaaaatactgattttttagtacttgcgaggtctatgcggatactatccagcttctttttaaggagctattggaagggatataattaacatccaccatggcctgttaccatcatttagcggcagcaatccatctaaacaggccggtgatgcaggtgtgaaattaattggtgcaacaagtcactttgtgactgatggacttgatgctggacctattattgaacaaatggttgaaagagtttcccatagagaaacttgctgagc

SEQ ID NO: 16809 - DNA, 288 bp, Glycine max
  Clone ID: jC-gmle01810093f01d1
ccaatgttctattgaagtagtcactttttagatgagctcgctaagagggagcggcccccccctcaaaaaggcttaaggcccaccttacaaaaaaacaaggggcgagaggggcacccggaaaaaagcacccggggggctcaagaaaaaaaggaccacccccccgaaaagggcacaccccccccacggggcgcagccgcaaagcggaggaccccgaaaggaacagggatgtttaactctgaaacacgccacctggacaaggcaaacagggacccccccacagggcagggg

SEQ ID NO: 16810 - DNA, 320 bp, Glycine max
  Clone ID: jC-gmle01810093f02a1
actattcccaccctcatatctgccaatgtctgagtcacttgctgaccctccggcaacattttccggtcataattgccggaaaccgccgcaagaccggccaagagttggtggaggaagtgttgtcctttggcacaaggcctgctccaccttggactcacatctggccaagtggttgccatctctgctttcaatagtgataggtatctggagtggttattagccattgcatttgttggaggaatagctgctcctctgaactatcgctggagttttgaagaggcaagattagcaatggctgcagtgaagcctgtgttgttagt

SEQ ID NO: 16811 - DNA, 539 bp, Glycine max
  Clone ID: jC-gmle01810093f02d1
gacagaaattaagcatttattctttaaaattaaattgaatcaaacacatgtttagtacacgaagaagacagcatgttcaataaataataagaataggagaggggagaacgaatgtgtgatacaaaattgtactcaattaatgtgtcactcaataaattgattagcattttcacatgaagccgtatatatgaggaatcatagcaatacagtggtttaaggggcattggagctatgatatattcaaagattactatgtaaagattgtagttgagacataacttcctttctgacttgatctctttttattttccctattgtagtgagtggaaatggctttctccatacaataaacatttttggtatcttaaacctgcttaaatgattttctatacagtattgctgaatattctttctagataggagaaactcttcatttgaagcagacaactgctctgaccattgccaattttctcttagttggatacatgctgctaccatctctgtcaggtgagcatctgggattcccacaacaacaacac

SEQ ID NO: 16812 - DNA, 318 bp, Glycine max
  Clone ID: jC-gmle01810093f03a1
cggctcgaggtttgaaatcacaaaccgatgcacatacactgtctgggctgcgtctgtgcctgttggcggtggcgtgcaattaaacccgggccagtcatggtccgtggacgtgcctgcaggaacgaaaggggcccgtgtttgggcccgaaccggctgcaacttcgacggttcgggccgtggtggatgccagaccggtgactgcgggggtgtcctcgactgcaaagcttacggtgcgcctcccaacaccctggctgaatacagcctgaacgggttcaacaatttggacttcttcgacatctccctcgcgactgttttaac

SEQ ID NO: 16813 - DNA, 400 bp, Glycine max
  Clone ID: jC-gmle01810093f03d1
gaaatggaatttcattgcccaaagagtttaatatattattcataaggaccccatttcatttagaatagaagtacacacatgatacacgatgagggggcacgcaaagggcacacgccttatggaaatctatggatctgtatttcagcgcatatatgatttatcattgaatggcatctgcttgaagcgacttggataaccctgtagtcagctccaccattacaagtgaaggtgcttgctggatcatccttggggtaactattagcatcggggcacctttgcttgaagaatctggaataatcagggggcccacagcttccggaattgtgacagtactggtcggttttgaagacagtgcaagggttgttgcaacctccttgagtattttgcttactagggcact

SEQ ID NO: 16814 - DNA, 319 bp, Glycine max
  Clone ID: jC-gmle01810093f04a1
gccaaatcaatcaaattctttgagttgaacacaggggccaagattccttctcttgggttagggacttggcaagctgaacctggtgttgtagctgaagctctcaccacagccattcaggttggatacaggcatattgactgtgctagtgcgtataagaatcaagcagagattggttctgctcttaagaagctttttgatgatggtgtggtgaagcgtgaggacttatggatcacttccaaactctggtgttcagatcatgcaccagaagatgtgccaaaagcattggataaaacattacaggaattgaacttgactatct

SEQ ID NO: 16815 - DNA, 409 bp, Glycine max
  Clone ID: jC-gmle01810093f04d1
gtcaaattcactcaactcactttattatattgaataaaagatacaatcattaaatgaaaaataactcttggctacttattcggtgttaccatcaatagtaacacttctcaaaatctcacttgaatcactacaactagtgggtataaggcagaataaatttgctctaggagcaatgtatttttcaacgtctcaaagatgcatattgctcagagttcaccatcccagaagtcttcaatgctcctataggcaccataggtctcgtgaacaaaaaaactggccttaactagcctttcctgcttaatttcagagatcttggtcatcaaatcttgaggaatagaccagtcaaagatatcaaaatttcccttgaatctggactcattagtgctcttatgatgcacactatgacctg

SEQ ID NO: 16816 - DNA, 318 bp, Glycine max
  Clone ID: jC-gmle01810093f05a1
ccaaatctacgttagggttcgtcttcatttcaaattcaacaacttcgccaaccacgccatggcaactcttcaatcactgcgaccttctttccgtccatcaatcccatccccaaattctcacactttcccaggcactccctttaattattcccccaaatcgattggctcaaagggtggcagtgttaccgtaagacactctatcgtttctcccagggtttcggtttccaattcggagtatagtacccaaattgcggaaaatctcggtgacgttactattttcactgccactggcgagccagtaaggttcagtgatctctg

SEQ ID NO: 16817 - DNA, 445 bp, Glycine max
  Clone ID: jC-gmle01810093f05d1
aaaagtaaacttttttaaacaaacatttttatagatggaactttataatattggtttatgatattaaatcatatcatccacaactggcaatattttgccaccgatttcattcagagaaatcgggtatcctaaaacaaattttcctaaactgaaatttcctaatcttatgcaaatggaaaattttataaagtccaacattaggccactggagctttgcagcagacatcaaaaacatcatttaagggggcatgaccacctgtcccttcatctttcctcgcatagagtacctgttttcctttgaacacaaacatccctccctgctgcaacacaccacttctatcatcgggaggggcttcaatggtatagttcttgacagctttctgcaaagcatcaaatctcgaaaacaccttgatactggatggattgaagaaagttcggccaaaac

SEQ ID NO: 16818 - DNA, 314 bp, Glycine max
  Clone ID: jC-gmle01810093f06a1
cggctcgagcggctcgagctcgagaaaagcagcatagtgagatactacgtatactacgtagtactacacatttcatttgcctcttgtagtagccatggttttccaaacaaacattaatcctcacttcgtatttgtttcctctcatggctcaaggccacatgatccccatgatggacattgcaagactattggcacggcgtggtgtgattgtttccatattcaccaccccaaaaaatgcatcacgattcaattctgttctttctcgtgatgtttcatcaggcctcccaatccggctagtacaactccattttcca

SEQ ID NO: 16819 - DNA, 529 bp, Glycine max
  Clone ID: jC-gmle01810093f06d1
gctgtaataccatatatagccatcaatttcattcatggttttgtgaaatgcataaaaaataaattccatacactatacttgtcatgaaaaagacatgtacccattttcattacattacccaggaaagatagttacataagaagaagaaaaaaatttagtaaacttttaaaaatttaaccattaaaaacatcaagcgctacatataaattgcgactcttaggcgtcaacactttacatcctccttgctacttgattgttgcatgatgtcttgtataagcaaagtcatgtcaagatgggaagacccccctttttcaaccgctttctttgccatctcacagagtttggttgccctttctcttctctctttgctttcttcttcatcattgtccatcaccatgcatattgccctctcaatgttcttcttcttcaccaacacaccagttttctcttcctctccccaattcattggaacttttgccccaacactcacaccaatcttcaacacttgagtaacgagcttttcatttaa

SEQ ID NO: 16820 - DNA, 317 bp, Glycine max
  Clone ID: jC-gmle01810093f07a1
cttctgtgcaaccagaaaaaaacggaccttgccctcagtctcttttttccatcatcacttcattaaacattattcactctctttctctgtctctagtttttacaacatggctactgcggtaactgctgcagtgtcctttccagccaccaagtccacttctctttcaagcagaacctctatcactgccccagatagaattgtcttcaagaaggtttcgttgcaatacagagatgtttcaaccagtggaagggtagtttcaatcagagcacaagtgaccacagaggcacctgctaaggttgaaaaggatcaaagaaaca

SEQ ID NO: 16821 - DNA, 519 bp, Glycine max
  Clone ID: jC-gmle01810093f07d1
gacttcatctatattgatagatcctcaaaattatttcatgcaaggctgttgcaatgaagcttgtacgttcataaggaaggtaaaaaatcccatcatagaaaaattacagggccgtaatctatctacacagcgcatgacagcaaaatagatttgctgctgcacaaagtagggcatgatatctgagcaagtgcaagtgatattaattagtagacttcgacattccattgctctgccttcttcaattgcctcttgtactcaatccaatcaataccatcttttgcagccaatgaaaccattatgtcatctatacccttttccattcccttcagtccacacatatagacaaaagtgttatctttcttcagtaattcccataactcttctgcatattgagccattcgtgtttggatgtacattttctctcctttttcgtttgtttgctctctgctcacagcaaagtcaagcctgaagttgtcaggtgctttctccttcatcttttcaaattcctccttataaagt

SEQ ID NO: 16822 - DNA, 544 bp, Glycine max
  Clone ID: jC-gmle01810093f08a1
cctcctcacagctccaaagccacaagcctcctccgacctccccgaaggcaccaactggcgctacagcgagttcttgaacgccgtcaagaagggtaaagtcgagcgagtcaggttcagcaaagacggttcccgccctccagctaaccgccattgacggccgtcgcgcctccgttattgtccccaatgacccggacctcatcgacatcctcgccatgaacggcgtcgacatttccgtcgccgagggcgaatcccccaacagcttgttcaacatcataggcaacttgctcttccccttactcgcattcgcgggcctgttcttcctcttccgcagagcccaaggcgggcccggcgggcctggcgggctgggagggcccatggacttcgggcggaacaagtccaagttccaggaagtccccgagaccggcgtgagcttcgctgacgtggcaggcgcggaccaagcgaagcttggattacaagaggttgctgatttcttgaagaatcccgataagtacaccgcgcttggcgcgaagattccgaagggtgt

SEQ ID NO: 16823 - DNA, 519 bp, Glycine max
  Clone ID: jC-gmle01810093f08d1
gaaagtgtaactcagccgtagaaccatattttttatttatttattgcgtaagctgctgtgctaattgttttttctccttgaatttgataaaataattattgattcttacagtgtacaagtcagagcgtattttatagtacaaacataattctgtgacttgcgtgtatgattatgcaacatataattcggcttttccatcaatgaatagactcatgaactcttcaccatccacagtttctttttctatgagaagttgagcaagcttgtgaaggatatcaatgtgagttgagataatatgtgttgccctagaatatgctctctctaccagttccctcacttccgcatccactacatccgcagttgccatggagtaatccttttgcgatgacatctgttgacccaagaatggatttccaccaggtccaccaatggcaacttgtccaatttttttgctgaatccaaatctctcaaccatctgccttgccactcgtgaaacttgcatgaagtcgtttgatgctc

SEQ ID NO: 16824 - DNA, 373 bp, Glycine max
  Clone ID: jC-gmle01810093f09a1
acctatttttattcctaaaatttatggcttctgtaattccaacaattgagtatgattacacgatggactttgatcttggtagctccagcaattgactaagatggtagctgcatgttcaagtataacacgggccatattgtccattgttgcttttcattgatccaaagcaccaatacttttctgatacttttctacgtataattgttgattgtcacacagttggtgtacatgtcatgtaaattatgaccgtgtgagtcatgactattgctatctggatgttgaacaagtttcctttcagatgtgtacataattgacatacccattcgtaaaaaaaaaaaaagatgatgtctgcacatgcccaacaggaaaggca

SEQ ID NO: 16825 - DNA, 210 bp, Glycine max
  Clone ID: jC-gmle01810093f09d1
atacatatgtacggatagatgttctacatccaaaaaggaaaaggaaagacgaacccagaaaaaaaagagatggagtgaacacgaactgagggaccttagacaatcatacgcaaaggagccccaaaaaacgaaaggggcctgggggaagggaaaagccgcgggggaccaaaagcccatagagcaccaggacatgcaggaaccaagaaaacc

SEQ ID NO: 16826 - DNA, 552 bp, Glycine max
  Clone ID: jC-gmle01810093f10a1
ctagcttccttcgcaaccaacaatccctcttcccaacctctcgattcttctctcttcctctctgctccttcaatttttgtttcaggttcgagatccatggtgagttttgaagcagaaggagggaaggggtgtaaccgcttcctttttccgcgcgtttgacatggacgacaatggggacgagtgcatggatgagtactttcataaacccgagaagaagcgtcgtctctccatgaaccaggttcagtttctggagaagagtttcgaggaggagaacaagcttgaaccggagagaaagaccaagcttgccaaagaccttggtttgcggccacggcaagttgctatttggttccagaaccgtcgagctcgctggaagaccaagacgctggagaaggattacgaggctctgcatgcaagttttgagaatcttaagtccaactatgacagcctcctaaggagaaagacaacttaagagctgaggtggcgagcctaatgagaaggtgcttgcagagggaaaccagagggcacatgaagcagcaagctgaagtgaagaag

SEQ ID NO: 16827 - DNA, 559 bp, Glycine max
  Clone ID: jC-gmle01810093f10d1
caacgagaagacattatttaattacattggaaccaacagtttgattacaagtactaacaaaatgaggcaaaaagaaaacaaacatttctttcctgataaagctaaagctatagccatttttgaagcctggacaaaaagtgcaaatactaaatactaattactaaaaaaacatatgacacaaacacacacatgaacatggaagaaaacttagtatgcccaggtccaaagggcgtgatcttcctcagaaaatccaaaattacaagaactttcaggcgggtcggagtaatccacatcttcttcaagtttgggaaagaggtacgaagggtagagacttttgctgaggttatcttcttcatcttgtgacatatccgattgatcatgctcaaacacataagaagaatcaccatgctctagcagtgcggagttaactccatcggtgtaatgtggactatctgaatccaaaatatcactcctggctgaactgatatcttcctgtttacaacccccgcaacagaagagactttggatccttctcccttcgaaactgatccagtaaaag

SEQ ID NO: 16828 - DNA, 484 bp, Glycine max
  Clone ID: jC-gmle01810093f11a1
gcatcatacaaagcattgaattcaaaaactaagttcatttcttgtgctttgctttattcctcaaaaccaaacatgtcgaacacatgcggcaactgtgactgcgctgacaagactaactgcaccaagggaaacaagttatggttatagtagagactgagaagagctacatcgagactgttgacatggatgttccagcagctgagcatgatgggaagtgcaagtgtggcactaactgcacttgcacggactgcacttgtggccattaaggaatatgtatgaaaatgtaattgccatgtgtttggcaatacaaatctccaaataatgtaatcttcgtatgaataaatgtgtgctgttatcctacttcagggtctgtgtagtcatgcagtctgaatcatgtccagttcctgtcataggtattaacagccatggttgcggcattctatatatggatttatagtagataaataagtgtaactctccgttc

SEQ ID NO: 16829 - DNA, 482 bp, Glycine max
  Clone ID: jC-gmle01810093f11d1
gaacggagagttaaacttatttatctactataaaaccatatatagaatgccacaaccatggctgttaataactatgacaggaactggacatgattcagactgcatgactacacagaccctgaagtaggataacagcacacatttattcatacgaagattacattatttggagatttgtattgccaaacacatggcaattacattttcatacatattccttaatggccacaagtgcagtccgtgcaagtgcagttagtgccacacttgcacttcccatcatgctcagctgctggaacatccatgtcaacagtctcgatgtagctcttctcagtctctactataaccatagctgtttcccttggtgcagttagtcttgtcagcgcagtcacagttgccgcatgtgttcgacatgtttggttttgaggaataaagcaaagcacaagaaatgaacttagtttttgaattcaatgcttgtatgatgc

SEQ ID NO: 16830 - DNA, 500 bp, Glycine max
  Clone ID: jC-gmle01810093f12a1
gtgtcatttacgcttctcttctctgcagcaactatgcctaaccctaaggtcttcttcgacatgaccatcggcggtcaatctgctggccgcatcgtgatggagctctacgccgacgtcactccccgcaccggcggagaacttccgcgcgctttgcaccggcgagaagggcgtagggcggagcggcaagcccctccactacaagggctcgtccttccaccgcgtgatcccgagtttcatgtgtcagggtggcgacttcaccgccggaaacggaaccggcggcgagtcgatttatggcgccaagttcgccgacgagaacttcgtgaagaagcacaccggtcccggcatcctctccatggcgaacgccggtcccggaaccaacggatctcagttcttcatttgcacggagaagacagagtggctcgacggaaagcatgttcgtgttcggacaggtcatcgaaagattgaacggtgtcaaggacatcgagaaggtcggatccagc

SEQ ID NO: 16831 - DNA, 498 bp, Glycine max
  Clone ID: jC-gmle01810093f12d1
aggcgaattatagatgtcctaattttattgaaggtagctcatcatgttttttttatgcttctcataacagactccattcactcactctatgaaccccaaccaaccaaccacatgatactgatattgaaaaggaaaggggaagggtttcgaaatgatatccttaacaccacaatcccctaaacgacgacacgagaaagaaaagaagagaaaaaaaaggcaaaaacgacaccgaaagaaataacacagattcagagattaaagccgcgggtcaacgtcgtctaagagagttgaccgcagttggcgatgacaacgggcttggaggtcctgccggagctggatccgaccttctcgatgtccttgacaacgttcaatccttcgatgacctgtccgaacacgacatgctttccgtcgagccactctgtcttctccgtgcaaatgaagaactgagatccgttggttccgggaccggcgttcgccatggagaggatgccgggaccg

SEQ ID NO: 16832 - DNA, 321 bp, Glycine max
  Clone ID: jC-gmle01810093g01a1
ttgaagaagaacatcatctaccacaagaagagttgttacagtgagagctagctccacagagaaggatgaatccaaggacaaagatgcttcagcattcaacccttttgggtttgtcactgacaacccttattagccgaaatgccattcaactgcctgaaaaccctgctgaggatggcaacgttggccaaatgctatatatgatagaagacaagggcaaggaatatgggtcatatgttaaatctggcaagttaagatggtttgtgagagaaactgggtcagcaaatggcagaagaggaacaattgtcttgcttcatggggccc

SEQ ID NO: 16833 - DNA, 469 bp, Glycine max
  Clone ID: jC-gmle01810093g01d1
attaggaaagggaggacaaattcatttcaagaaagctataattttatttgttgaccatcattaaaagaaaagaaaaattaaggcatactaaatttacaatttaattaaggaaaaactcaagaatgcccttccaatgaaataaagcacttggatgcctgcagggtcaattatttgttgaaatcataagaacattttgaaagcatcaacaactttctcaggccagtccttttgtggcatatgaccagctccttctatcaatttaagctggatttgagctggatttcctttctgaaactgctctgccacaaactggggcaagtacttgtctgataatccccaagcaagtagtattggtttatcccatctctcaagtgcaaatcctgctgatatttcactgaaagtacctttgaagttagcttttcttgcaacttcaagtagagcaaattcaggtccactgcttgtcaaataa

SEQ ID NO: 16834 - DNA, 320 bp, Glycine max
  Clone ID: jC-gmle01810093g02a1
aacgaggtggaaaagtgaagttgcaatccatagtgatgcctctttctgagtttgaccatgaggaaaagggagatgccctgtatgcaatggaacttgctctgtcgttggagaagctaaccaatgaaaaaattacttaactttgcacagcgttgccttaaaagaacaatgatgtgcaattggcagattttgttgaaagcgagtttttgggtgaacaggtggaagccataaaaaaaatctctgagtacgttgctcagctcataagagttggtaaaggacatggtgtgtggcactttgatcagatgctgctgctgaggagggcg

SEQ ID NO: 16835 - DNA, 525 bp, Glycine max
  Clone ID: jC-gmle01810093g02d1
caaaaaaaaaataatccattcttccatttttaaattgatttaatttttcgttgaatcttaaattttgatttttcactataataataaataataaataaaaagattaagtaaatcatgatatataagataataatcatgatatatgatgcaatataaattcagcaaaaaaaaatgatgatgtataatcttaatattttcttttttgagtttgaattaaaagttcatactctatcaaaacttattaaaacaaaataataggcagatcattggactgttatattttgtcaatgtttattatttcaaattcatacaatggctttttgtttgccatcttttgttaatatatatatatttttttttgtgaaataatagtatttgtttaatatatatgattgcgtttgtttttctttgcttatcaaatagaagcttatgatcttcttatctatattgataatttgagttttcgatataaacgaccagaactttggataacttcataaaattggtggaaattaataaatatta

SEQ ID NO: 16836 - DNA, 318 bp, Glycine max
  Clone ID: jC-gmle01810093g03a1
atgaattcgtactttcacatcgtcggtgtgggactaacaggaaaaggttgatgttcaaacacgcttaaccaattcacacaatcctcgtaacctcttccatggctactgtttcttctccttgtactggtttccccatacttacatcaaccttgtcgaagccccacttggctcccctctcttgccgaacccaaaaacgaagtcgtgtcagtatcatcacctctgtcgccggggatcgagaaatagttccggtgtccgaagatagaggaattcgtttgaacgaagttgatggatttcaaccttcggagcctacacagagtc

SEQ ID NO: 16837 - DNA, 539 bp, Glycine max
  Clone ID: jC-gmle01810093g03d1
ccagatgcaatgttaagtagtttttttcacattttccatcattatatatatgagatgaataattttttttatacagacaacagacatacggatatatgaggtaatccgatacaaacaagaaaaggaacataatttaactcgagttctgaatgcatctatatcatatatacaataatctaagtatgtgatcactgcaacctgaatagttgatcttagccagaaggatgcacgacctgtgtaaggtgtaagtgtatatatcctgtatgggaagcagatcaaaacctcatgtccctaaggccgtttaattggaccttcaactgatagattcttcaaatctttgctgaggttgattttgcaactgccatgaacctagatagttttttctcctctcctcgtttcgtttattccttggaattttcgcttgaagtggatgaccctgtttctgatgctgcctcagatattcgtgcttctgatttctcatttgaataggttgaaagtattgtgacccagatgagctccacacagtccacccaaagaag

SEQ ID NO: 16838 - DNA, 302 bp, Glycine max
  Clone ID: jC-gmle01810093g04a1
aaattcctagcagtaattgcctactacggatgagagattggtacgcacaaaaaccgaggtgataaatccttcatcttgactcaattcacagactatgccactcccatgacgcccctagatgaagaaactcttttctcaagtcgcacaagacatggttgaggaatggattgattgtgacgttgatgaggattcctatgaagaaggttttgtccgcgcagcacttaatggggttgaggggccaggactatatgggaagagtccctctaggcgcacccgagttttttctcttgtgtgcttttacg

SEQ ID NO: 16839 - DNA, 496 bp, Glycine max
  Clone ID: jC-gmle01810093g04d1
ctgcctggtcggcgtatgtagtacttggtcggcagagctcactgggcggcggacgccctagtcggtggtcgtccttttttttttttttttttttttttttttttgtcgtgaaaaggcttaaaactttatgtttgattgcataaagcccattatttgcatgtaacaccgcgcttcaaataaccgaattaaataagacgggttaacaataggaacgtacaacgaaacctccatgcccggggataaaggcagatcggaattacaatggcaccagttggctgaggggaccgcggccataagtaaacaatggaagcaaccaacttcatccgagaacaaagcaggatgctttggtcttggacaaaaacctgaatagcacccctgaaaatttgcgcaaactcagagtccatgggataaactttaggtaactgatatatactatcctctttgggaaaccaaccccaggctcacttacaatggcatgtgccacctgaagccgatc

SEQ ID NO: 16840 - DNA, 314 bp, Glycine max
  Clone ID: jC-gmle01810093g05a1
gattttccaagaggtcatatatcacttaagagtttcaatgctgaagtagttgatgaagcagggaaccctgtgcctcttcatgaaacttatctccaccactgggttgttgtaagatactatcaaccttaatatgtgacgacacacacatactatgatggacataagatacttcacaactctgaccatatatttgtgaggaacagcggcttatgccagagagatactctaggacaatactatggccttggatctgaaacacgaggaacagctacggatgttcctgacccttttgggatagttgtacgtgatcctgc

SEQ ID NO: 16841 - DNA, 404 bp, Glycine max
  Clone ID: jC-gmle01810093g05d1
acaacaaacatgatatatatagtattacatatcacacaaccataataagcaagactggtttaagacaaacatttcaaacccttaccaattcaaataattgataatcacattactacaatccttaaacttgaaaatatgctctttgccggttcttgcgtgtgttggcctattgctgccgaatatgagaagtatatgttccatcgatatgtatttctggatttcttttaaccgggatacatactgggataccatcgatttgacactcaacttatatttgcatctcacaacttatctatcaatgaattatactatttatattcataaaaaatgaagaacgagaagaatatctgaagtgttggtgtggaagctgttctgccccaataggtagaaaagccccattactc

SEQ ID NO: 16842 - DNA, 320 bp, Glycine max
  Clone ID: jC-gmle01810093g06a1
tgacatcacaacacgaaacactcacatgacacatcacagcacgctgcaagaacaacaacaacaacatatccacaacacaaccaaatgacacccacaaagagggagacaaagagagacgctactacttcttcctcctctctgctcgcagaaccctgaagctccagaagccccttttcgaattaattcgcttctcttttatctaaattcattgattcttttcgtcgacatgttggagggtccaacctttcttgtttcgagggacatactgagctcttgtgagcaagagaccaggtggatctacaattccttctgtgtgatgg

SEQ ID NO: 16843 - DNA, 491 bp, Glycine max
  Clone ID: jC-gmle01810093g06d1
gggaagatctgaatacgattagaatacatatttaaaaaagggggcgcaacagaaagcaaagaagacaaaaattgagaccagttacaattctgcaacacttcaattgaacttatgaaaaaggtgattgcaacccaacatgagctaattattcacctgtcactgtgccaacatttgaaaaaccatcatgataacttaaaatgaaaagactcagttttgtgaaccttctaaaactgtatctgttactctaaataggagttaatatttacccccaaaggtgggctgattacccaagagccagaatcatctctccttgaaagtgaagaatgttaattacattcagaataaatccatatagcactattcaccaaaagcaaatgcctcagcttcccatcactgcacaggtatacacaaagcttcctgattgcctgctagcaagcaagttccactctggcacacctttacctgtgacacaagcgttgatctcaattacc

SEQ ID NO: 16844 - DNA, 317 bp, Glycine max
  Clone ID: jC-gmle01810093g07a1
cgaacgttatctttttctgtttgaggcggaacatgaagtgaaacacagtacagaagaacgttaattatccaaccgaggcaagacaaagggctatttttaagcttctaggctctgtcacttccttcttcaggccccagtcttcacgttcgaatgtttctcttcccaaaaagagactggggtggcggtaccttttagtttgtactaatcaacagagaaaactcattaatggagaaactgaaagtgtctgctaagaatgatcctgctgccagcagtgatcaggcagactcatttccaatatcaaaatgcagacagtcaga

SEQ ID NO: 16845 - DNA, 454 bp, Glycine max
  unsure at all n locations
  Clone ID: jC-gmle01810093g07d1
aatcaaaataactagtaatatgtatgatattttaataagccatatacaaaagtgtattattgatgtatcgtcgatgagcatataactaggatgcttgtttctatcggaaaatgactttattcaatgtacattctacttttctgctaatcctacataacttagaatttgtttgaagttgtctattggcagatcacatgatggtagtattggaccataaccaaatcaacagacactattacacttgaatgacttagaccccgtgatcgttgcagcatgaaatcagataagatgctgaccaaagatcctgagtgaacagtgcaaaccgtcaaaaaatatccatatcaatagagctaactagcactccatcatcttcccactntatatcctttgcacgggatcgtttcctatcaatttaagaggaacatctaatgggggtggagtcatgttgcggata

SEQ ID NO: 16846 - DNA, 481 bp, Glycine max
  Clone ID: jC-gmle01810093g08a1
cgaacgttatctttttctgtttgaggcggaacatgaagtgaaacacagtacagaagaacgttaattatccaaccgaggcaagacaaagggctatttttaagcttctaggctctgtcacttccttcttcaagccccagtcttcacgttcgaatgtttctcttcccaaaaagagactgtggtggtggtaccttttagtttgtactaatcaacagagaaaactcattaatggagaaactgaaagtgtctgctaagaatgatcctgctgccagcagtgatcaggcagactcatttccaatattcaaaatgcgagacagtcagaatgttggactgcagaacagtagaagagtggaagatgatgcaaaagctgtaagattggatggaggttctgtaattgctccctctaattctgcaaacagtaaggaacctatcaacagtggatggcatttgcaaagaagcctggtttcacagttgatggcaactc

SEQ ID NO: 16847 - DNA, 506 bp, Glycine max
  Clone ID: jC-gmle01810093g08d1
aatcaaaataactagtaatatgtatgatattttaataagccatatacaaaagtgtattattgatgtatcgtcgatgagcatataactaggatgcttgtttctatcggaaaatgactttattcaatgtacattctacttttctgctaatcctacataacttagaatttgtttgaagttgtctattggcagatcacatgatggtagtattggaccataaccaaatcaacagacactattacacttgaatgacttagaccccgtgatcgttgcagcatgaaatcagataagatgctgaccaaagatcctgagtgaacagtgcaaaccgtcaaaaaatatccatatcaatagagctaactagcactccatcatcttcccactttatatcctttgccacgggatcgtttcctatcaatttaagaggaacatctaatgggggtggagtcatgttgcggataagaggccaattgattccacggaaaaaaggatgttgcttgatttcattggca

SEQ ID NO: 16848 - DNA, 608 bp, Glycine max
  Clone ID: jC-gmle01810093g09a1
cacaagaagactcctcaatcatccatagacatggccaccgtcacttctgcagcagtttctattccctcattcactggcctcaaggcaagcgcaggcaaagtgagtgccgccgcagtaaagtctagctccccagccacaaggttctgcggcatcaaggcttccctcaaagacgttggagtcgctgttgtggccactgctgcgagcgcagttctagctagcaacgccatggccattgaagtgttactgggcactgatgacgggtctctggttttctctcccaactctttctccgtggcccctggggaaaagatcgtgttcaagaacaacgcaggtttcccccacaacgttgtgttcgacgaggacgagattcctagcggcgtggatgcagggaaaatctccatgagcgaagaagaccttctcaatgcggctggtgagacttacagcgttactttggatgccaagggaacctacagtatctactgttcgcctcacccaggagctggtatggtgggaaatgtcaccgataattaattatatattgtctcctacctctaagttctcatatgcttgtttcctagaaagcctaaatcatctttcttgtagggcct

SEQ ID NO: 16849 - DNA, 490 bp, Glycine max
  Clone ID: jC-gmle01810093g09d1
aggccctaacaagaaagatgaattaggctcttctaggaaaacaagcatatgagaacttagacgtaggagacaatatataattaattaacggtgacttttcccaccataccagctccttggtgaggcgaacagtagaaactgtaggttcccttggcatccaaagtaacgctgtaagtctcaccagccgcattgagaagggcttcttcgctcatggagattttccctgcatccacgccgctaggaatctcgtcctcgtcgaacacaacgttgtgggggaaacctgcgttgttcttgaacacgatcttttccccaggggccacggagaaagagttgggagagaaaaccagagacccgtcatcagtgcccagtaacactctaatggccatggcgttgctagctagaactgcgctcgcagcagtggccacaacagcgacttcaacggctttgagggaagccttgatgcccgagaaccttgtggcttggggagctg

SEQ ID NO: 16850 - DNA, 527 bp, Glycine max
  unsure at all n locations
  Clone ID: jC-gmle01810093g10a1
gctatcacagactcacccagcactttctgggtacgaagtgtctcctggtattgtgaatcctgtgaataatttagtggactcagtcaagcctcaaatcatgacccctcaggagaaaattgaaaaattgaggagggggcagcaaatgcaggcaatgattgctattcagaaacaacaacaacaattgggccatcaagttcctagtactagtaaatcaagcactcaaaaatgtcctccagaaattcaaagtcatcttagtgatgggactgatgacgatctaagaactcttcctgctctagatccaccaattgaacaagatgattctaatacaatgtcagtggcagttggtaatgatttcgttgaagataccgtattgtacagacttcaggatattatatcaaagttagacatcaaaataagactctgcatcagagatagtttggtcccgttggcacaaaggcattatactagtgatactagcagtacancaaaagtagcagagaagaacttgagttgctgcagagaagaag

SEQ ID NO: 16851 - DNA, 437 bp, Glycine max
  Clone ID: jC-gmle01810093g10d1
cccccccccccccccccccaaaaaacccaaaaaccaaacgaaaacccgggggggcagcgcggaaaccaaaaagcgggggccccacggggggggggggggggggggggggggggggggggcgggggcccccccccacccccccccccccccgccgggcgggggccgggcgcggcgggcaaaacccaaacggggcccccgggggccgggggccgccgggccccccggggggggacaaccaccaaccccccccccccccccccccccgggggggggggaacccccggccccccccccgggaggggggcaaaccccccggcacccgccaagcgccggggacccgcgggcccgaaaccggggcccccggggcccccgggggcggcggcccccccgctaggcgccgcggggggacccccccccccccccggcggggggggggg

SEQ ID NO: 16852 - DNA, 571 bp, Glycine max
  Clone ID: jC-gmle01810093g11a1
gttgttcggagcgatccgagaaaaactctgtaaacatgttggtttaccaggacctacttacaggtgatgagcttctctctgactccttccgttacaaggaaattgagaatggaatgctgtgggaaggcgaggggcaagtgggttgttaaaggagcagttgatgtagacattggtgcaaacccttctgctgagggtggaggagaagatgagggagttgatgatgcagatgttaaggttgatgacattgctgacacattcagacttcaggagcaacccgcattcgataagaagcagtacgctaccttcatgaagaggtctatcaagaatttgactcccaagctcgatgcagagcaacaggagttgtttaagaagcacatcgagggagcaactaaatacctgctctctaagattaaagatttccaattttatgttggtgagagcatgggtgatgatgcttgctaggtctttgcctactacaaggactgcgctgctgatccaacattcctgtactgtgcatatgccttagaggaggtcaagtgcttagtgacttaatgtaccgagctatgtactc

SEQ ID NO: 16853 - DNA, 408 bp, Glycine max
  Clone ID: jC-gmle01810093g11d1
caaatccttatcaataaaaccatgaggccaatttaaaatttttttagtccccacccaaaagtttttcaaaggaaacttccgggaatgtaggccgaccaaaatcataatttaatgaaattctaccccatcgttatttaaatttgaggggaattttgatgtatccgtcgcacacgttttacctttaaaatgaaattcccggggcaaggtttcaagtaccttaggacaggacgtaaaaaaaaacttgataaatggagtagatagctcgggacattaagtcacttaactcttgacctcttttaaggcatttgcaacggccaggattgttggatcagcagcgcctgccttggggtaggctaagaccacgccagcatcataacccttgctttcaccaacaaaaaattggaaatc

SEQ ID NO: 16854 - DNA, 515 bp, Glycine max
  Clone ID: jC-gmle01810093g12a1
ctcatggcccatatgcatgggatggggaggccacatataaattcactacttaccaccctggccaaaactacaaaggtttatccaatgtcaaaaactacttccaccatctcggctacatccccaatgcaccacaactcgacgacaacttcgatgacaccctcgtatctgccatcaaaacctaccaaaagaattacaacctcaacgtcaccggcaagttcgacatcaacactcttaaacaaatcatgacaccccggtgtggcgtccccgacataataatcaacacaaacaaaaccacatcgtttggcatgatctcggactataccttcttcaaagacatgccgcggtggcaagctggaaccacacaactcacctacgctttctccccggagccaagacttgatgacactttcaaaagcgcgattgcaagggccttcagcaagtggaccccagtggtgaacatcgcgttccaggagacgacgtcctatgaaacagccaacattaagattcttttgcga

SEQ ID NO: 16855 - DNA, 489 bp, Glycine max
  Clone ID: jC-gmle01810093g12d1
aaattaaggtaaatttgtcacatttattcattatcatatatgcatcacctagtatcagctggtttattcttaattaagagaaaactaaaatacaatatcttacatgctatttttgttgttcttgaattagaataatttcacctcgataactttcaaaatcctttaatgcaaattaccgaaataaaactctagttctagtacaaacaacacctagctataataattaggggttgataccatagagctttcgaatcccgtctatatcatcttgcgctagattcaccttcctagttcgaggtggtatagaaggatacatgatggctcttaggtccgacgagtggcctaatccgagcaagtgcccgatctcgtgcactgccacagattcaaggtcaaacgcacttgtcaccggcgatttggtgacatcgccagacgccacccaatattcgtcggcgtcaaagtggcacctcccatcagtgggagcgaatgcat

SEQ ID NO: 16856 - DNA, 114 bp, Glycine max
  Clone ID: jC-gmle01810093h01a1
atcgaggtgaacaagtgcagctgcaatacgtagtgatgcctcttcctgtgtttgcccatgaggagaagggaccatccccgtatacaattgaactctctgccgttttgggtttgc

SEQ ID NO: 16857 - DNA, 368 bp, Glycine max
  Clone ID: jC-gmle01810093h01d1
caaaaaagaaagggacgactcttccattttaaaatagatttaatttatcttggaatcctaaattaagaggattcactataataagcattcttaaataacaagattaagaaggtaatgctctataatatcattagcatgaaatatgatgcaagggagcctccgcggaaaataatgaggatgtataatgttaacattttctacgctgagacggatttcaaaggccataccctatgagaacttagtccagcaacctgtttggcagatcattggactggaataggatgtccatgctgaaaatgcaatattcaaaccatggccaagtgcttgccatattttgccacaatatgtatatttggttttgtgaaata

SEQ ID NO: 16858 - DNA, 318 bp, Glycine max
  Clone ID: jC-gmle01810093h03a1
caaaatggatggattctacattgctccagcttttatggacaagcttgttgttcacatctacaagaacttcatgaccctgcccaacatcaaggttcctctcattcttggtatctggggaggcaagggacaagggaaaatctttccaacgtgagcttgtctttgccaagatgggaatcaaccccatcatgatgagtgctggagagttggaaagtggaaatgcaggagagccagcaaaactgatcaggcagagataccgtgaagctgcagacatgatcaagaagggaaagatgtgcgctctcttcataacaatcttgatgc

SEQ ID NO: 16859 - DNA, 356 bp, Glycine max
  Clone ID: jC-gmle01810093h03d1
aaaggaaaaggcaccaaattcaatttaagtggacactgtaactcaaaattatagaggaagacggtccaatatgaaaaatatagtaagatcatctcaaacttagcatcttctctttgcacctaagacattgagaatgctaagaatgttacacgcaaggtccatcgcaacttctatcacttggattagttcaacaaccttcacgaacagaaatattcacttgccaagcttgctttgcctacaatacaagactgggcgattgtttccctctgaatcgtatatctcgcggctttgactttggccaaactccgtgtccatggtgtaaacttttgggacttgatatatactatcctgtttgg

SEQ ID NO: 16860 - DNA, 315 bp, Glycine max
  Clone ID: jC-gmle01810093h05a1
ccttttaacaataccttctaaaggatggctagtccaagatgctgaacaacaaagttttattttggaacaacatcatcattatgggaatgtacatgcagtagaaaaattacgccaatccattgagatatggtatgctacaagtgaatattttcgacaagaaatgaatcctaattttaggatgaccgacccctttaatacagtccatataatgtccttttcgggagctagaggaaatgcgtctcaagtacaccaattagtgggtatgagaggattaatgtcggatccacaaggacaaatgattgatttacctattca

SEQ ID NO: 16861 - DNA, 487 bp, Glycine max
  Clone ID: jC-gmle01810093h05d1
accgttcttggtggtatcaacacggcactgtgtcgggatatcttatccatttctccgggaaaatagatatccccggaaaatatttttaattcaatctttttttttttcttctccaatcggaccaatccccttactcgacttcttatatttaaagtgattagtgtatctacttcaacgatactattgttccgtaccattatggaagaagattctggtaaaatatgcacttcctcgggaatgaaaaaaaattgatctactttaatttggtattttgtcttaaattctttaactccttgatactcaattaaaaaatcctctttttttaaaaatggaatttatacctatagtcctatatttagtaattcccgagctctgtgttcggtattgaggatcatcgaaataagcaagaatgctatttctacgaaaaataccattgattggtatttcaatcgagatactggaagctaacattagctctttgcctcgt

SEQ ID NO: 16862 - DNA, 316 bp, Glycine max
  Clone ID: jC-gmle01810093h06a1
ccttttaacaataccttctaaaggatggctagtccaagatgctgaacaacaaagttttattttggaacaacatcatcattatgggaatgtacatgcagtagaaaaattacgccaatccattgagatatggtttgctacaagtgaatattctcgacaagacatgaatcctaattttaggatgaccgacccctttaatccagtacatattatgtccttttcgggagctagaggaaatgcgtctcacgtacaccaattagtgggtatgagaggattaatgtcggatccacaaggacaaatgattgatttacctattaaa

SEQ ID NO: 16863 - DNA, 510 bp, Glycine max
  unsure at all n locations
  Clone ID: jC-gmle01810093h06d1
accgttcttggtggtatcaacacggcactgtgtcgggatatcttatccatttctccgggaaaatagatatccccggaaaatatttttaattcaatctttttttatttcttctccaatcggaccaatccccttactcgacttcttatatttaaagtgattagtgtatctacttcaacgatactattgttccgtaccattatggaagaagattctggtaaaatatgcacttcctcgggaatgaaaaaaaattgatctactttaatttggcattttgccttaaattctttaactccttgatactcaattaaaaaatcctctttttttaaaaatggaatttatacctatagtcctatatttagtaattcccgagctctgtgttcggtattgaggatcatccaaataagcatgaatgctatttctacgacaaataccattgattggtatttcaatcgagatacttggagctaacattagctctttgnctcgttcttgaatcgattggaattgaaa

SEQ ID NO: 16864 - DNA, 493 bp, Glycine max
  Clone ID: jC-gmle01810093h07a1
ctgccggtttctgagtcaatgcaacactgccatggctgcctcagactgcactattggagctgtgaacagagctgcactgagctagaacagctgtgcaactggagatatagcacccagttccgccgttctttgcccaagcttgaagaaggttactgccagacgggtacctatcgccaagaatacccctggaagcttcaaaatcgttgcggcggagaaagagattgatgagcaacaacagacacacagggacagatggacaggtcctgcctatgatattgcagatgaccagcaagacatcacaagaggaacgggtttggatgattacctcttgcaagctgcacaggagactggaactcactatgcaggcatgagctcttttgagtaccttaacactggacttaaacagtataacttggataacaacatggacggatattacattgctcctgcttatatggacaagcttggtgtatacatgaccacgaactttatg

SEQ ID NO: 16865 - DNA, 444 bp, Glycine max
  Clone ID: jC-gmle01810093h07d1
agtaaaactatcttctattatttgaagccacaaagttcagcagaaccacaatgaacaccaggaaatattaattgattatctcaagtgttttttttagtagtgagacaatgtaactcaaaattattaaggataacaatccaatatgaacaagataaattatttgattatatcaagtcatagcttctcttcaagtggagaatgcttaggttctcagggtgtgtataagcaggttccatcatcacttcttgcagttgggtcgaagtttgaggcatttggatcagtacaaccttcaggaacgggaatttttacttgctgggctgctttgccatagaaagttcctcttttgatggcatcctgattagcattaccaagagcagcctcgttcaagtacttgtctgccagttgtactcttttcacattctcttgttcttgacaagcatgtta

SEQ ID NO: 16866 - DNA, 562 bp, Glycine max
  unsure at all n locations
  Clone ID: jC-gmle01810093h08a1
aatcaagatagctcctttgaattttctatcagaatctgagggcccaaaatctagggttttctgttcttctctggggatctgaagacatgcagtccaagtctgaaactgcaaatcgactgagatcagatccttaattcctttcaacctggcagtgtttattctgagccttggtggcgtggtattgggtacaatcctgtggcccagacaatggctggggcaaatgcatccaattcatcgtctcttgaatgccctaatggtgattctgaatccaatgaagaaggtcagtctttgtccaatagcgggatgaatgaggaagatgatgatgccactaaggattcacagcctgctgctcctaatggaacaggaaattatgggcaagaacagcaagggatgcagcatactgcatcatctgcaccctctatgcgtgaagaatgccttactcagacaccacagctggaacttgtcggtcattcattgcatgtgctacaaatccttatcaggatccgtattatggnggcatgatggcaggctatggtcaccaacagttgggatatgctccttt

SEQ ID NO: 16867 - DNA, 539 bp, Glycine max
  Clone ID: jC-gmle01810093h08d1
aatgtaactaacagcatgttcattatcctatgatgtcttatgttaacattaacaaccggttgaactacacaaagataaaccagtcaaacgagtgttggcacatcaagagtttgtttctcaccatactccataatcttctgaagtgaccatcctaaccactataaaactttacaaaatgcaaaaatgagaaaagaacgaaggattgattgactgacttcaacagaaatctcaaataccaatcattccccccccccccatagtatcattaacaccacaaacacaggaacaaagccaagaatgatttgccgcttggcatatatattgccaagagtgtttacagataaccaaggtattcaccaaatatgtcacttggatacaaaccaacctcggcctctaaccccccatcaattgtggttcagttgctgacccgaacaatccctttcctccagtctttcacctgaggatgaatggtacactgaagattgcaatccattatgattatggtaggagccactgccattttggaacagggtgctttg

SEQ ID NO: 16868 - DNA, 542 bp, Glycine max
  Clone ID: jC-gmle01810093h09a1
caaggaagggatcccacctgaccagcagagacttatctttgcgggtaaacaacttgaggatggtcgcacccttgccgattacaacatgcaaaaggaatcaaccctccatctcgtgcttcgcctcaagggtggcatggcaatctttgtcaagactttgaccgggaagaccatcacccttgaggcggaatcctcggacaccattgataatgttaaggccaagatccaggacaaagagggcatccctccagatcagcagaggctgattttcgctggtaaacaacttgaggatggaagaacccttgctgattacaacattcagaaggaatccacccttcacttggtgcttcgtttgaaaggtggcatgcagattttcgtcaagactttgacaggaaagaccatcaccttggaggtggaaagttctgatacaattgataatgtgaaagccaagattcaggataaggagggtattcccccagaccagcagaggcttatctttgccgggaagcagctttgagatggaagaaaccttgctgattataaca

SEQ ID NO: 16869 - DNA, 437 bp, Glycine max
  Clone ID: jC-gmle01810093h09d1
gggagatgataatggttttttattcttttgcacgagaccgtgcatagcaagctatgtcacagacatagccttaaaactaaaaacattaaagcagcacctaaataacagctgcaaccaacgagttcaacatacactggacataacaacagagaattcaactaatattggacataacagacagactcagaaaccaccacgaaggcggaggacaagatgcagggtggattccttctgaatattggaatccgccaaggtacgaccatcttccaattgcttcccagcaaaaataagcctctgctgatctggtggaataccctccttggcctgaatctttgctttcacattatcaatggtatcagagctttccacctccaaggttacggtcttccctgtcagagtcttcacaaatatttgcataccaccacgaagccttaaca

SEQ ID NO: 16870 - DNA, 538 bp, Glycine max
  unsure at all n locations
  Clone ID: jC-gmle01810093h10a1
caccaaagtacttgtgagtgtatacccaacacaaactaagatcaacatggactactacacccgcgtttcagaagttgagagggaacctatcatggagtattccacaccacgaccaatgatgggcaactaccaccaaccctaatgctcaccgtgtcctcaacgagaagattgtttatgaggaggatgtgattggaggatcccgccacaaccacatgcatcaccaccaccctgagactcatgagagagtcaaggtggtggagtatgaacaagttcctgagaggcgcgttgactatgaagagctagttgcttatgacgacgatcgttactactctccaaggtattgaaattggacaaatggaagaacacctataacgtgttatcatgtggctttttattaggcaggctacctagtataccaaaagcaccactgtgcttgtactaaatanattcctgcttatatatactggccattatgttatatataataatcatatgcatgccgtttatataaattgagctaatgtgaataatatatcta

SEQ ID NO: 16871 - DNA, 513 bp, Glycine max
  Clone ID: jC-gmle01810093h10d1
cacacatatacaaaatagatatattattcaacatagctttatttatataaacggcatgcatatgatttttatatataacataatggccagtatatataagcaggaatttatttagtacaagcacagtggtgcttttggtatactaggtagcctgcctaataaaaagccacatgataacacgttataggtgttcttccatttgtccaatttcaataccttggagagtagtaacgatcgttgtcataagcaactttctcttcatagacaacgcgcctctcaggaacttgttcatactccaccaccttgactctctcatgagtctcagggtggtggtgatgcatgtggttgtggcgggatcctccaatcacatcctcctcataaacaatcttctcgttgaggacacggtgagcattagggtggtggtagttgcccatcattggtcgtggtgtggaatactccatgataggttccctctcaacttctgaaacgcgggtgtagtagtccatgttgatc

SEQ ID NO: 16872 - DNA, 473 bp, Glycine max
  Clone ID: jC-gmle01810093h11a1
ccatctggtgggagggcatacaccaattttcgggggtcgaaaaggattttgttgaaggtctcattgatctgattatatatttggattgaatttcaagggaatatggcatctttttctgtacacgatgccaattcagaacaaaatggcaaccgttccttctcctttgcaggaaactcttccagaacattcattgacagagatggtttcacatatgaacgagcacctgctgtgtggaacacgttgatgattgaagagctaaaatgacaaactcgtgttccttcacaccctgcctgtacattaacatggtggagtaccatatttcatgcgttaaggctgtggcaagctctctgtacatttacaaaattcagggtgtccctccatactatttaaattgcctgatctagattattttttttgccctgtttcaatatatgattttgtttaacccccatattgagggccccattgttagc

SEQ ID NO: 16873 - DNA, 237 bp, Glycine max
  Clone ID: jC-gmle01810093h11d1
agggggccccatttggggaaaccggaataaaaaacaagcggggaaccaagtccctgcaccgggataatcgctaaaacaagggggcccccatgggaaaaaaaaacaaagggggccaacccttaaccctcgcacaaaaaaaaggggcccccaataagggggggaaacaaacacccaaattgaaaaccgggccaaaaaaaaattgagacccaaacacctaaaaagtttggggggcccccc

SEQ ID NO: 16874 - DNA, 545 bp, Glycine max
  unsure at all n locations
  Clone ID: jC-gmle01810093h12a1
catcgtcaaaatatggattgctgattggtttgccaagctcaacaacaagatgggaggagatttgaagaaaattgagaccgtgggccgttacttgatcgagatttggaaggctgttgggatggatctggagagtgggaaaagttgagtttctgtggtcctccaaagagattaacgccagagctgatgagtactggcctcttgtgttggatatagctcagaagaacaatcttaaaaggattatcaggtgtagccaaataatgggacgaagtgaacaggatgaattaactgctgctcagatattctatccatgcatgcagtgtgctgacatatttttcctcaaggccgacatttgccaattgggaatggatcagcggaaagtgaacgtacttgccagagagtattgtgatgacattaagaggaagaacaagcccattatcttgtcacaccacatgttacctggtcttcagcaagggcatgaaaagatgtcanaaagtgacccatcatcttgcattctcatggaagatgacgaggcttgaagtgatgtg

SEQ ID NO: 16875 - DNA, 562 bp, Glycine max
  Clone ID: jC-gmle01810093h12d1
aaataaaaatataaatataaatagacacatctatattttaagtaaacaaaaatcacattactcattctaaagaaaacctccgccacattttagaagtccagaagtgtataatctcataacgtgaaagaacgactgtttggcaaagaatagaaattagcctgaagtctttaacgagcatattatttggtgactctgtaagccttgacccttttcagtagctctttagcattgctgtccttcctaaagtgttccctaacaggctccagaattttattcaatgactttgccaatgctgtttaaggtcaccaggatgtaactctccactttcataggctgcagtcagctcagcaaagcttgtgaaagtcttattcccaccattatctgcactacgctccactgtgaactcattaaaccaaggtaagacaagatatttaatgtactccaagcatgggtttccttccacagtcttgggagggcaataagccttttttattttcacattcacttcagccttctcatcttccatgaaaatggaagatgatggtcactttttgacatcttt

SEQ ID NO: 16876 - DNA, 448 bp, Glycine max
  Clone ID: jC-gmle01810094a01a1
ttctatttctcccgagtattctgttctcctttattaagcagctaaaaattttaaggaacgggaaaatgaagaatctttgtcagaattttgatgttagagccacgattccggttaaaataggaaaaaaatcgacttggaaatgttatggtccctcgtaggttgtggttgccgacgtggacgtgtgatcagaggatggaggggaagttgaacttaaaggtgcagtgcggtactaggaaagaaggttggctcgaatctgcgggaaaaagcgcgtttgggtaaggcgttccggacggggctttggtctctgcgttctgctactcgcccggggcgcttgcagagccccttaccgttgcttttcccgtgtctcggtcgcctgatgtaaatgcagttcatagaactctttgggaagcatggtgtttaattcgagaaacattctttgatcctacat

SEQ ID NO: 16877 - DNA, 488 bp, Glycine max
  Clone ID: jC-gmle01810094a01d1
gtcgtgcttcaactaggagttaaattttctattattctattcaattgtatatacaatacaatctgtttctctgttttatatacccatgacaactagtgatcccaatgtaacatagtacaaaatgatgaattggctgacacatcagcactaaactaccctttctttcaactgttaaacattgaaaagaaagtgtgatataaggaaattgaatgttcaagaagcagttcccatggactcctccaaatccaactcatgttctgctaccattatgcatgaatctgcttccagagatgagactgaggccttgtctttggttgaatttgaaatatccttggttgaattgagcatttctgttgtgcattgcacatctggtgttatcccaacctgatctatgtcatgaagggctggtgatagatattttgccactgtaacaaagagtgctgacccatcatgaagctgagtgacactctgaatctttcctttaccaa

SEQ ID NO: 16878 - DNA, 417 bp, Glycine max
  Clone ID: jC-gmle01810094a02a1
ctctgcctgtaagagtgaaaaaaccttctcttttccttctctcaagtctcaagagatttcatcatggctccaaagaaggacaaggctccaccaccttcctccaagcccgccaaatctggcggtggcaagcagaaagacgaagaagtggagcaagggaaagcaaaaggagaaggtgaataacatggtgctgtttgatcagggcacctatgataagctcctttctgaagctcccaaattcaagctcatcactccttccattctttctgatcgtttgaggatcaatggatcacttgcaaggaaggctataagagaattgatggctacgggttcaatcaggatgtgtgtctgcccatgcaagccagcaaatttacaccagggcaacaaacacctagtgtgtggaacttgatcttagcttac

SEQ ID NO: 16879 - DNA, 426 bp, Glycine max
  Clone ID: jC-gmle01810094a02d1
gaatgtaaccaaaaatacaatctgagcattggatttagcgacaatctaaaactgatagaaccatatgagatgcttcccaaagtgcaaaagaacaatacttcattactattcctaccaattctccgtaagctaagatcagttccacacctaggtgtttgttgccctggtgtaaatttgctggtttgcatgggcagacaccattctgattgaacccctagccatcaattttcttatagccttccttgcaagtgatccattaatcctcaaacgatcagaaagaatggaaggagtgatgagcttgaatttgggagcttcaaaaaggagcttatcataagtgccctgatcaaacagcaccatggtattcaccttttccttttgctttcccttgctccacttcttcatcttctgcttgccacggcagatttg

SEQ ID NO: 16880 - DNA, 293 bp, Glycine max
  Clone ID: jC-gmle01810094a03a1
gttcatacctgctattctctttatcgacgcgctgggttggttattcttgtgctgttgaatctggctaggtgcggatgaggatccacgcgctgctatgccgatcggctgtaccgcttgcttattgtggacgatattgatcaagatctccaggctcagtctcagtggaggagagccattggttgaagcacgtaggtggattttagtggatgctacctgatgtcaatgatgttcattatagtacaggcagcaataacgagtggaccagacgtctctgtatgaagagatgggcaagt

SEQ ID NO: 16881 - DNA, 336 bp, Glycine max
  Clone ID: jC-gmle01810094a03d1
ggggaaaattggtaacctaatgccaaatgcaccgccaacaagttttaaatataaatatatcttacaggaaaagatacaaattacacatctaaaaagaattcataaatatataccacgcgggcttttgtgctcatagatccaacccgagaagcaattgaggaactaagaatggacaagcgtagctacaacaaataaggttgagagaatttgctccttttaagaagagaacaaaaaaaatgtggattgttcatctagtcttgaagccaaaagcttcaatgccactcaatactagaagagatgtggaaatcgagggttgaaaccaccaaaaacaacctt

SEQ ID NO: 16882 - DNA, 506 bp, Glycine max
  Clone ID: jC-gmle01810094a04a1
cgaaaggttggaaagcggaaggcttctggtaagcctgagaaaagcagagcaccaaagaaggagaagaaggccaagaaagaccccaacaagcctaaaagaccaccgagtgctttcttcgtgttccttgaagagttcaaggaagacctttaaggctgagaatcctctcgtgaaggctgtatcagttgttggaaaagctggaggagagaaatggaaatccctgtccagtgctgagaaagctccatatgaagccaaggctgcaaaaaggaaagctgagtatgaaaaacttatcaaagcttatgagacaaagcaggcaagctctgcagatgatgatgaatcagacaagtccaaatctgaagtgaatgatgaagatgatgccagtgcagaagaggaccaccaagaggacgaggatgatgaggaagaagaggacgatgaagatgatgactgagattgatgtccaaaccttggatatgatatttggttatgagggaggctttatatattcgact

SEQ ID NO: 16883 - DNA, 506 bp, Glycine max
  Clone ID: jC-gmle01810094a04d1
gatcagaaagaaattatattacttaaagcaacccatttaaggctacaatgcacaaaaagtgattcaggtacgatagctaagtgagggaagctcaagtagttggcaatatatcgtaccaacaaagaagacattcttttctaccagcacaaacataaaaagtagcctagtatgcacagtcagaatatataatagcctccctcataaacaaaatatcataaccaaggttttggacatcaatctcagtcatcatcttcatcgtcctcttcctcctcatcatcctcgtcctcttggtggtcctcctctccactggcatcatcttcatcattcacttcagatttggacttgtctgattcatcatcatctgcagagcttgcctgctttttctcataagctttgataagtttttcatactcagctttcctttttgcagccttggcttcatatggagctttctcagcactggacagggatttccatttctctcctccagcttttccaacaactga

SEQ ID NO: 16884 - DNA, 487 bp, Glycine max
  Clone ID: jC-gmle01810094a05a1
taaaagccttagccttccctacaactccaaacacaaagacatcatcatccatggctgcctccgtctccactgtcggagctgtcaacagagctcttttgaacctgaatggttctggagctggagcttcagcttccagttcagccttctttgggaccagcttgaagaaggttattgcctcaagggtccccaacagcaaggtttccggtggaagcttcaagattgttgctgtagaagagaagaaagagattgaagagacccagcagaccgacaaggacagatggaagggtcttgcctatgatatctcagacgaccaacaagacatcacaagaggaaaggggtttggttgactcccttttccaagctccacaggatgctggaactcactatgcagtcatgagctcctacgagtacctcagcactggacttcgccagtacttggacaacaaaatggatggattctacattgctccagcttttatggacaagc

SEQ ID NO: 16885 - DNA, 334 bp, Glycine max
  Clone ID: jC-gmle01810094a05d1
gggaaaaaagggaaaggccccaaattcaaattgagggggcccttgcacccaaaattttaagggaaaagggcccaatttaaaaaaattggggaaaaaatttaaaaaccaaaagtttttttttgccccaaaaaaatgggaaattccaaaaatgttcccccccatttccccaaaaagttttggcccctgggataatgacaaaacctttaaaaaaaaaaaatttttttgggcgaatttgtttggcccacaataaaaaatgggaaaaaaatgcccccctgaaaagaacacccgtggggattttaaaaggccccccctcaaaaaaacttggcacccaatt

SEQ ID NO: 16886 - DNA, 520 bp, Glycine max
  unsure at all n locations
  Clone ID: jC-gmle01810094a06a1
ggaattttcttccttcttactttaccttcgattgtcaccttctaattctgcaacaagttccaaaccttcaaatctcactgccccaaaaatcctttcttttttaaatagccatttgacttcagcctctacagcagagtcccagatctctgcattccaattcccatggctggtcgctatgacagtaaccccttcgatgaggaagaagttaaccccttctataatcctggaagtgttcccgctgccactaattcaaggctttcacctctgaagccagaacctgttgattataattatggctttggtgcgacagttgatatacctcttgattcatcaacggatttgaaaaagaaggagaaggaacttncagccaaggaaactgaattgagaaaaagggaacaggaagtgagacggagagaagaagctgcttcacgagctggaattgttcttgaggagaagaantggccgncttttttcccaatatccatcacgacattgctaatggaaatccaattcatcttca

SEQ ID NO: 16887 - DNA, 457 bp, Glycine max
  Clone ID: jC-gmle01810094a06d1
ggaacaagacaagtgaaccttttaaactatatagaggattaatttccataaattatagcatgtttctaccagccactagtatgtccaagctctcagctttcgatatacactaacaaaccacattaataggtagcatgctaaacagaaaaataaataaacaaataacagctgtaaacaaaaatcatgctcagtgaaatatttttgttcacaatttctgtgtgtggcttctaatatacaacattgatccatacacaagttatccacacttccttctccacaagactgatgaatcatattgcagccctcagtgctccccttgcggcctcccgtttcatctcagcggccttcccactgccgcggaagtacatgtatacttgctgaataacccaaatgctgatcaaagtttcaacgcagaacaatccaaatccaatgaagtagaagatcccaatcaaagcat

SEQ ID NO: 16888 - DNA, 295 bp, Glycine max
  Clone ID: jC-gmle01810094a07a1
ctctgaaagtggtctgcaacaacataacaaggcaaagcatggtggtcagtgatatttttgcagttggttaaccaggtctttcatgtattatttttggcttatgtaatagagtgagtatcctaaggacgttaggcatctgtccttgtttttggcctactaaaccgtggtggtgtcaaggtgaatgcatgtttcggaagttttgtttgatattttattgggaacttcaattattatctaagattattgcggttagatcttttgctgctaaaaaaaaaaaccataaaaactaactctg

SEQ ID NO: 16889 - DNA, 266 bp, Glycine max
  Clone ID: jC-gmle01810094a07d1
agcagcaaaagatctaaccgcaataatcttagataataattgaagttcccaataaaatatcaaacaaaacttccgaaacatgcattcaccttgacaccaccacggtttactaggccaaaaacaaggacagatgcctaacgtccttaggatactcactctattacataagccaaaaataatacatgaaagacctggttaaccaactgcaaaaatatcactgaccaccatgctttgccttgctatgttgctgcagaccactttcagag

SEQ ID NO: 16890 - DNA, 530 bp, Glycine max
  Clone ID: jC-gmle01810094a08a1
caaggagtgacagatgttgggcttgaagctattggaaggggttgtccaaatgtgcaaaacttgaagcttcgtaagagtgcttttctgtcagacaagggattagtatcatttgccagggctgctccatcagttgagagcctgcaattgcaagagtgccacagaattacccaaattgggctctttggtgtcttttttaactgtggtgcaaaattgaaggttcttactctgattagctgctatgggatcaaagatctcaatatggatttgccagcattatctccttctgaatcaatttggtcattaacaatccatgactgccctggatttggcaatgctaaccttgccttacttggaaagctgtgtcctcggcttcagcatgttgaattgagtggacttcagggagtaacagatgcagggtttcttccattgcttgagagctctgacgctggtctggttaaagttaatctaaatggctgtgtaaatctttcagacagagtagttttggtcatggtcaactcacatggatggac

SEQ ID NO: 16891 - DNA, 561 bp, Glycine max
  Clone ID: jC-gmle01810094a08d1
aacagtacaaagggcatatctcagtatcattacatgatatagaaggttacaatgacaagttcaaaaaaaaaaatgaagcttaaaaagctagggctttggtagtaaaaaacaacccatcccaacgggaaaagattgtgatgacagaccaggataacttgctgccatgaccaacgcccctgaggacaaaggcttcataactctgaagaactgccaaagtaaaccaagacaacaccacataaactggaacttcaacatgccccttgactaaaacttaagacccaaaaatcacgtaaagaacataagctcaaatacgtgaaaaattgggtaaacaccactggacagactcgataaatgtactgctgcaaagaaacgaggacaaggaaacacatggtggcaaaaccgatacaaagcagagctaaaaacatcaggtgccaacactagaaaaaaagatacctaactccagaactcggtaactatgctcgcagagataaacagccatattctaaaagtggcatctcatcaacggagtgcccaaaaatttgaacagatttccaattaatg

SEQ ID NO: 16892 - DNA, 409 bp, Glycine max
  Clone ID: jC-gmle01810094a09a1
ctggaccactttcagatctgcaactctagcggtctctggtgagggctttctggcacgtgatatagcttttgagaacaaggcagggccagagaagcatcaagcagtggccttgagagtgaatgcagactttactgctttctacaggtgtgctatgtatggttaccaagacactctctatgtccactcctttagacaattctatagggagtgtgaaatttttggaaccatagattacatatttgggaatgcagcagtggttttacaagcatccaacattatcacaaggatgccaatgcttggtcaattcactgtcatcactgcacagaccagagattcccctgatgaggacactggcatttcaatccaaaactgttcaattctagccaccacagatttgtactccaatttt

SEQ ID NO: 16893 - DNA, 353 bp, Glycine max
  Clone ID: jC-gmle01810094a09d1
atgggaacaaaaaattctcaaaccatttttaaaattttaaacgccaataaaccccctaaacaaaatacaaactcccccccccccttttatttacacaaaccaaaggccaaaggggtattttcaaaacaagcgaaccccccctttaaaaccccctaacccttacaataaaaaccccccctcctaggggggaacaaacaccccccaccaaaggtcccccaaaaaaaacccccaaaacgggaaaattcaggccccaagaaaacccaccgtctggaaccccccccaaaagacccgggattaaaaccccaaacccggcccccaattggggcacccccccgaaaaaaaaagggcccaac

SEQ ID NO: 16894 - DNA, 267 bp, Glycine max
  Clone ID: jC-gmle01810094a10a1
ccctctctctctttctctttctctctcatccagatcttgcaaaaaaaaaaaaacccaggggcggggagcgctcccactcaacgcgaagagtccgggtacatggggaacctggcggagcaggccaagccctacgaggagatggtggaggtcagggaaagggtctccgcctccgccaagagcgaggagctgaccgtggaggagcgcaacctcttttccgtcgcctacaagaacgtaatcggcgctcgccgcgcctcctggcgcattatc

SEQ ID NO: 16895 - DNA, 457 bp, Glycine max
  Clone ID: jC-gmle01810094a10d1
aaaatcgatcggaataaatgattccgaggctttagaataaaaacaaataaaggtgtcacaccttcacatgctaaaacaattagcaataccaagtttgctagagaacaatatcttaatattctaaacagcattataatggaaatttcagtgtcattatgaaaataggcagttcagaaacgcgtactaatggaaggacaaactaaaatagcccagtacatccacaattcataacgaagaacatgaatgcccaaaatctcagtaacaccgagattagcattcaacaccttctccctttgaaaacattacacaagggaagttcaatcactaattagaagtatggtatgtttaattttgttccccgtcacctttgggtgcggcttctttaatttcatctgcaccatcatcctgcatgtcagaggtccagagggtaaggttatcacgaagaagttgcatgatc

SEQ ID NO: 16896 - DNA, 448 bp, Glycine max
  unsure at all n locations
  Clone ID: jC-gmle01810094a11a1
ttccatttgtgctcttgatttccgcatggatgaatggggagttgatgtggcaataactggctcccagaaggccctttcccttcccactgggataggtattgtggtcgcaggccctaaagctattgaggcctcaaaacatgctaaatcacttagagttttctttgactggaaagactacctcaaattctaccagctaggaacctattggccatacactccttccatacatttgctgtatggactgagagctgctcttgatctgattattgaggaaagactcgaaaatgtgatcgcacggcacattctgttacgcaaagcaaccagacttgctgtagaggcatggggattagagaatcgcacccaaaggaagaagggtacagtgacactgtgactgctgttcttgttcctgcttacattgatagnactgaaatagttacgagggcatgga

SEQ ID NO: 16897 - DNA, 520 bp, Glycine max
  Clone ID: jC-gmle01810094a11d1
cataagatgcaatgatttttgatatacaggacaataaaagaagcaatgcattaaagctgaaagtagaaagtacgttcatcttcaaaggagtgtaaaagagggtaatatatattttacagaatttctgaaagagcagaaaaaggaagtaaagacaagaatgatttgtgactcaaatcctggaagggatcataggaatagtgttctgtaagtatgcactggcagcagcaactccacttccaagctttacaggataacccacatctttgagtatcatctctacaccagctagacatcccaacagttgcaactcattcaagtggccaagatgtccaattctgaaaaccttcccagcaactttgttcagtccaagacctaagctcaaattgtatctcttccatgccctcctaactatttcagtactatcaatgtaagcaggaacaagaacagcagtcacagtgtcactgtaccactcttccttttgggtgcaattctcaaaccccatgcctctacagcaagtctg

SEQ ID NO: 16898 - DNA, 522 bp, Glycine max
  Clone ID: jC-gmle01810094b01a1
gacaaacacgattatgcctatcattggcaaactgtactgttcatcgtctgagacggtgcttgtggtgaggaggaggccacacgtggtgaatggtgggggttttgcagtcatggattgtagtgcccagagggttttgttcagggtcgatggttgtggtgttcgtggcaaaaagggagacttgattctaagagaaggatatggagacgctttgcttctcatgcgtcgaatgggaggcatggttgaagccttaagcatttacaagaagtggaaatgctacagcttggactacgaaggatctgggaagctggttttcagcttgagagaacccaattcttggatggttaagaacagtgcaatcagaatcttcactaggaacataggccgtgactttaagatcatgggctgcttcccggataagtgttgtagcattgttgactctaaaggcaacgaggtagcacaggtggagatgatgaacgaagtggaggaattgattgaaagcaggatttgaaccatgtggtggtg

SEQ ID NO: 16899 - DNA, 499 bp, Glycine max
  Clone ID: jC-gmle01810094b01d1
gggtgaaagcactttttttataggtaacaaatcacactgatcattattatacatttatacaagacaaatccctttattataagggaaaatgccttaatagccacatttcttcgtaatatacaactttagaaaattgattctagacaagttgatgatccctttcttctttagaaaatcttcaatccccatttatatgcctgtgtgataggagaaagagtgatcctacacaccaaaaaagaaaaacacaaaactcagagcacattctcagtagagttttggatttagcggtgggtagattcgccataaatgtaatcaaggacagcgatgactccgaaaacaaaagcttgatccatcccaggattcaccaccacatggtacaaatccttgctttcaatcaattcctccacttccttcatcatccccacctgtgctacctcgttgcctttagagtcaacaatgctacaacacttattcgggaaacagccactgatcttaaagt

SEQ ID NO: 16900 - DNA, 473 bp, Glycine max
  Clone ID: jC-gmle01810094b02a1
gtagaacccttccactgtggtgactctgcgatgggtgcctacaagtatgttacagagctatggcgcacgaagcagtctgatgtcatgcgcttcttgcagcgggtgaggtgctgggagtataggcagcaacctttccatggttcgaatgacaaggtctacccgccctgacaaggctcgtcgctcgggcttcaaggctaagcagggctatgtgatctaccgtgttcgtgttcggaggggtggccgaaagagaccagttcccaaaggtattgattatgggaagcccacaaaccagggagttacccaactgaaatttcagcgaagcaagaggtcagttgccgaagagcgagctggaccgaagctgggtggacttagggtcctcaattcttactgggtgaatgaggactctacttataaatactttgaggcgattctggcggatgttgctcatgctgctattagaaatgatcccagaa

SEQ ID NO: 16901 - DNA, 554 bp, Glycine max
  unsure at all n locations
  Clone ID: jC-gmle01810094b02d1
atagaaaaagatgattaaatcattcaaaactcgaatttcaaagtcaaaacatcaaatgctgtgtgttctcaaaatagtatttcagaaaatgaagcaaaaataagatgacagcgaaattaacggtagcggcggagagacagggtgttgtttctcttccaggttgccctgcgggatggacgtgctttgtgatatagatgtcctctgccacgtaaacccctgttgcttttcccggcagaggtaagcccacgcagctctctgtgcttgtgcactggattggcgagccaattgattctgggatcatttctaatagcagcatgagcaacatccaccagaatcacctcaaagtatttataagtagagtcctcattcacccagtaagaattgaggaccctaagtccacccagcttccgtccagctcgctcctcggcaactgacctcttgcttcgctgaaatttcagttgggtaactccctggtttgtgggcttcccataaacaatacctttgggaactggtctctttcgccacccntcctacacgacacggtaatcacatag

SEQ ID NO: 16902 - DNA, 477 bp, Glycine max
  Clone ID: jC-gmle01810094b03a1
atctaaggttagtaaaaattaataagttagaaaaacttcataagtttatttttgatagaaaaatagaaaggatccaatttgagcatggttcaaaaaaatggttggaattagtaaaactgttttgatcaaaagtgtagcccgcaagacttaacctgctattagtatgattctttcatagaaagaaaaaatggtatgttgctgccatttttgaaaagattgaagattcccgaagtaatgcctaaacctaatgattcaaagacaagctaaaagatcatggctcatgctgatatcatttctacattggctcatgaatactattatccaatgttattgacaatagattatgaagacacgaaacacgggcaatagaggagagttgagaccactctatcaatgaaatagctactaatggctctgttcattttatagatattggatcattatgcaatttgggttattgcgctataaacttgaaga

SEQ ID NO: 16903 - DNA, 397 bp, Glycine max
  Clone ID: jC-gmle01810094b03d1
atattattatataaagatagtctataatcactagaatttctatatatttatacttagtatataataattctagtgattatagctaagccaatatatatcataatataatatacccttttcttattcaaagaatttatggctatgccttatcatttttagtcaaagaaaagaaattatggaattgaaataactcactcagaacgccctttaaaagattacgcggtacgattgaatcaaataagcccttatggaataaatattcagctgcttgtgaaccttcaggtactggcttattcaatgttttgttcaattactcttttaccaacaaatgcaatataagcatttggttcggcaataatgatatcccccaacatgccaaaactagcagttacccccc

SEQ ID NO: 16904 - DNA, 229 bp, Glycine max
  Clone ID: jC-gmle01810094b04a1
caaatggttaatcgaaacaaccttttgcgcttaaaactcatcgtataattctgttactgattgatgtatacttagatacgacatctgattgcacttcttggtttaacaaaccattatgcacaaatgatgtatgaaggaaaaaagctctttatgagtgctccagttctcttaggattattttttcatcaaaattagtatcaagttgtcagaattcgtgtattcacccacc

SEQ ID NO: 16905 - DNA, 228 bp, Glycine max
  Clone ID: jC-gmle01810094b04d1
ggtgggtgaatacacgaattctgacaacttgatactaattttgatgaaaaaataatcctaagagaactggagcactcaaaaagagctttttccttcatacatcatttgtgcataatggtttgttaaaccaagaagtgcaatcagatgtcgtatctaagtatacatcaatcagtaacagaattatacgatgagttttaagcgcaaaaggttgtttcgattaaccatttg

SEQ ID NO: 16906 - DNA, 502 bp, Glycine max
  unsure at all n locations
  Clone ID: jC-gmle01810094b05a1
ggaattttcttccttcttactttaccttcgattgtcaccttctaattctgcaacaagttccaaaccttcaaatctcactgccccaaaaatcctttcttttttaaatagccatttgacttcagcctctacagcagagtcccagatctctgcattccaattcccatggctggtcgctatgacagcaaccccttcgatgaggaagaagttaaccccttctataatcctggaagtgttcccgctgccactaattcaaggctttcacctctgaagccagaacctgttgattataattatggctttggtgcgacagttgatataccttttgattcatcaacggatttgaaaaagaaggaagaggaacttcaagccaaggaaactgaattgagaaaaagggaacaggaagtgagacggagagaagaagctgcttcacgagctggaattgttcttgaggagaagaantngccgccttttttcccaataatccatcacgacattgctaatg

SEQ ID NO: 16907 - DNA, 502 bp, Glycine max
  Clone ID: jC-gmle01810094b05d1
ggaacaagacaagtgaaccttttaaactatatagaggattaatttccataaattatagcatgtttctaccagccactagtatgtccaagctctcagctttcgatatacactaacaaaccacattaataggtagcatgctaaacagaaaaataaataaacaaataacagctgtaaacaaaaatcatgctcagtgaaatatttttgttcacaatttctgtgtgtggcttctaatatacaacattgatccatacacaaggtatccacacttccttctgcacaagactgatgaatcatattgcagccctcagtgctccccttgcggccttccgtttgatctgagcggccttaccactgacgcggaagtacatgtatacttgctgaataacccaaatgctgatcaaagtttcaacgcagaacaatccaaattcaatgaagtagaagatcccaatcaaagcatggtcgcccagcacatctatggcagccagaatgcccgtcagggatt

SEQ ID NO: 16908 - DNA, 479 bp, Glycine max
  unsure at all n locations
  Clone ID: jC-gmle01810094b06a1
ctcttccataaacgggtggtgcctctcttccatctccccagccaaaacctctctcaggaaggccacattacgcccttccgtcttcgcaacccttaacactccttcttctccttcctcttcatcttccttcccctctctcattcaagacaggcctgtttttgctgcccctgcccccatcatcaccccaactgtgagagaggatatggcaaaggaatacgagaaagctattgaagaacttcagaaattgttgagggagaagagtgaactcaaagcgacagctgctgaaaaagtggagcanataacagcttctctagggacatcatcatctgatggcatcccatcatcagaagcctcagacaggatcaaagctggtttcattcacttcaagaaggagaaatacgacaagaatccagctttgtatggtgaacttgccaaaggccagagccccagttcatggtgtttgcttgctcagactcagg

SEQ ID NO: 16909 - DNA, 524 bp, Glycine max
  Clone ID: jC-gmle01810094b06d1
ccgacatgcataaacgcagttcatagtttcatatatatctttataaatatcatatggtgatgaaggtggctaggcctcttcattgcagatacacacgacctctaagcatggcccctatagcttccaatggagaatggtggccacatctttaacctaacaaagaagaaaaatgcagtggtgaaagaccataaaaatattacacgttccttgaacaaaacggattgaacttcaatttggaatagagggtgatatgtggagaaatctccatatccacttttattattaggaaattcagcacatgcatgcattataacaagagcaattaattacagagtacattttagataggagaatacttagggaaccaagatgaggtcattgataatggttgatgttcatacggagaaagaagatgcaaggccaaactgaaggccccagagctcaaaagatcctttaacagagtcatagtatcctcctttcagtgacaatgttatgttcaccaagccatctttaacaaatgggta

SEQ ID NO: 16910 - DNA, 452 bp, Glycine max
  Clone ID: jC-gmle01810094b07a1
gtgggagaaagccttagagagaatttttttcaaaaaagaaaaatattccttcttaattctacgtacgtgaggtgttagaagacacaacaatgaatttggcaaagggtgttggcggaaacattgacaaatcccaagttctgtccgctgttgaaaagtacgagaagtatcatgcttcttatggaggtcaggaggaggagaggaaagctaattatgttgatatggttaataaattctatgatcttgctactagcttttatgagtatggctgggggcaatctttccattttgcacctagatggaaaggggaatctgttcgagaaggcattaaaagacacgagcacttcattgctttacaactttgcctaaagcctggacaaaggttttggatgttggatgtggaaattggggaccacttagagaaatatcccgattcagctcaacatcaataacag

SEQ ID NO: 16911 - DNA, 488 bp, Glycine max
  Clone ID: jC-gmle01810094b07d1
aaaagtacaataaagccttggtaatataaaattatagatgtaaaaaaagaaactcaaaacaactgaagtcacattggaaaggctaattgaaggcaataaattttacaacttttctccttgaatcgcaataactcatttgcagcaccaccttattgaccaccaaaattaggctttcgagccaaaaagaagtacattggtgtgaaaatctctttctttccaccttcaagtagtccatctgctgccctttgcaagatttcttgaacttttagacttgcccttggagctagtctaacaaattctaaagcccttatcagacttcttgtgaaaaatcgtccaatagatgttacaggaaaggtactaagtgagaagtgacttgcatccaaatgaaagtaccaatgaactggagaattaactgcaagatctttctcccagattaccgtaaaacctgcttgctttagagcttcaacacactttgtggtcaatctaat

SEQ ID NO: 16912 - DNA, 407 bp, Glycine max
  Clone ID: jC-gmle01810094b08a1
ctagagacttcaatatttgcaccactgtgtgtgagaatccacactgtggtgcaaatattgaagtctctaaatgtgccttctgaaaccatagatgtgcttgaaaatgacttgacgcgccaagggctgaaagagtactcctgttgggctacctttgctcacgtctacataaaaagagagttttttggaggctgtgatatcactgctgatgcatatcagaaggggtaattgcaggagctgttggagaaggcagtgttgtcctgaagctatggaaggaatgataggacttctcaagtttgtactctgcaatcttccccctaaagttgtacttgggctcacagacaatggaccaaataaaatgcgtgatgcattttgtgtccacagttgcctattatgaatactgcaataca

SEQ ID NO: 16913 - DNA, 431 bp, Glycine max
  Clone ID: jC-gmle01810094b08d1
atgcatatgcatagttcaaatttacatcatgcatttatttgcacaaggctcataagagtaaagtacagagcggggattcagggggactagttgtatgtaagaagtattttttcgagtgcatattttgcttctattgcaaaccaaatggaccttatgatctgaagcttggcacaaaacacagattatacaattttaagctacactctcaaaacagataagctatgaaaatggacattgatcactgatcaatcataggtgcatgaattctttttgaatttgataggctttgatcgagaagagttgaggaccaaggggcaagtgatttccttacgatgccttggcttgaccagtttacccactacatttccacgcgaacggatttcaaagttcaatgtgagtggaacttcacaccagtttgggatacagttatg

SEQ ID NO: 16914 - DNA, 265 bp, Glycine max
  Clone ID: jC-gmle01810094b09a1
cgctgattcacatgattgggtcaagcacgaaggctcagacgccaccattggtattactgaccatgcccaggaccatcttgtagaggttgcgtatgtggagctgccaaaaccaggcggcacaattttcaaaaagtctggcttcacactcaaagaccgtgcctaagaaacaagcgatctatactctcaaatctggggggagatcgttgaggttaacaaaaaggtcacagaaacgcctggcctggtcaactcaagcccatacgaagat

SEQ ID NO: 16915 - DNA, 486 bp, Glycine max
  Clone ID: jC-gmle01810094b09d1
aataaaaatatttttattaaagaaattagaatgtagacacactgaagtgtcggtgacaagagacaatagcaggggaaggaaaaatggaaagaaacaggtctgttgcatattaaaaaactgttcagaaggggataagatcataaacatatgaagaacagtcagtcccatacataactgcatgagccaattgagtagaaaccctaatgacttgcatgttcttcctcacaaaattttgcgtgctcctttggacccatatgggaatctaattcagatggatcgcttggctttactttgatcatccatccatctttggatgggcttgagttgaccaggccaggcgtttctgtgagctttttggtaacctcaacgatctcccccgagattggatagttgatatgacttgatgctttaacactttcaacggcttcgaagccagacttcttggaaactgtgccacctcgttatcgcagcttcacatacacaaac

SEQ ID NO: 16916 - DNA, 268 bp, Glycine max
  Clone ID: jC-gmle01810094b10a1
ggagttattactgtgtggataatttacgtctaaaatatcattgtacagtatggtgttgcatttctcagcgtaacgtagctgttacattgtcggttcttgattatattgtcaattttgtgaattgctgccttcggcgcaagttttaaatttataaaccaagttatgctgttgccgttaaaacaaaaaagaaagctctactaaaaaagacttaaaacaaaaaagacataaaaactgggtggaatgcccaaaggtgctaaaacctacatat

SEQ ID NO: 16917 - DNA, 347 bp, Glycine max
  Clone ID: jC-gmle01810094b10d1
gaggataatgctatgtttcgagaaatggcgtttacatgccatttggaaataccgtacacccccgacaggggtttaaaagagaaaaaatgcggcgcagaggccactttcaaaaaagggccaccaggttaaaggatctccatcgaccatctcgtaaggctttcctttatggtgaagtttaccagcagacttgacagcaagctccgaaccggattccttgaagacatccaggggcaggaaatcccaacttaggaaccgcggtttgcaaaaatggcacctttcaggagggccccaaaagctttagttccttcccgaaatcgccaagctcggacttcttgaagaccgcaagt

SEQ ID NO: 16918 - DNA, 486 bp, Glycine max
  Clone ID: jC-gmle01810094b11a1
gagccagagtaagaaaggagtgtcattcatggcgattgaggcatggttgatggacgatagcaatgaagatccaaggctttctcaccgtcgcaatcccaacgaatcagtttcattggaccaattagcagaattgggtgtgttatactggaagctcaatccaactatctatgagaacgatcaagagttgaccaagattagacaagataggggatacaactacatgcgaatattctatttatcttttaattgtatttgctttctggaattagatagtgcttcagttgctacctcttcagtcttcattgattaatccaggataggaatagtatttagaattcccagcgtgctatgaatacatagagcagagttgctacagtaatcagtggagttcacgaaacaaaaacagaattcttgaaaagataataaattctgcaaaatttgttaaaaagaattttaaaaagcccacgctttatgcccaatccggat

SEQ ID NO: 16919 - DNA, 438 bp, Glycine max
  Clone ID: jC-gmle01810094b11d1
catcaaagccttcatgggggtggagggatttatctatgctgggttttccagcaatattcaggggaaggtgatgagtgcttaagggatctgttcaaagcctacatcacgtgaatatatgccagtatcactatctcctaaaaggaaaaaacttaatctaaacaactgaacacgggctaacagaacataatagcagtttcacagagacaaaagctagtagtatgtaaacatatttcataagctcttaggtctgtttcatctaatgcttggtatgtttcaggttcatagacaagtttactcatggtaaaactacccaaattttatcccaacaattacatcacagaccttaagctgggattaatatctgaaacaagatttactagggtatttcagggccctaatgagctgcaagtggcactccaaatttctcagttaggccct

SEQ ID NO: 16920 - DNA, 419 bp, Glycine max
  Clone ID: jC-gmle01810094b12a1
aacgccccaattttctctctcccctctctcctgtgcaccttctcctctcccacctcgccgccgaatctttctcgctcctccccgaaccgccgcatcttccgccaccgacgccgcttcctcttctacttcctcttccgcttcgaatttcgctcccaaagtcgtcgtcaccagagagcgcggcaagaacgccaagcttatcgccgctctggctaaacatgaaatcaattgtttggagcttcctctcattgagcacattcaaggacctgatttaggcaggcttccttctgtattaggagacaatgcattggatggggttgagataacgtctccagaggcaggttctgtctttctagaggcatggagatcttctgggatgcctcatgtcaaaataggtgttgttggggctggtactgcaagca

SEQ ID NO: 16921 - DNA, 430 bp, Glycine max
  Clone ID: jC-gmle01810094b12d1
acatggaaactttttacccctttctcatgaaagcctttttttataggcattaattaaaaaaataatgggtagaatttgggattaaaaacaagggcctgtttaacaaactttgaaattaattccaaaaatttttatattttaatcaatgaccataagggccctttatttcctaaaatacactacactttccttactttattgaagctaaagggttttttaaaaatactactactgaacagagagtttttccatccacgatgccaaattattatattaatcttgcagcatgagagaaacagttgaaaacatttccaggttgctacaaagagctgggacctaccttaataattcatcataggaacctaatgcttcaagaatgctttctacccagcctttgatgcctggttgggccggataggccacatttggg

SEQ ID NO: 16922 - DNA, 533 bp, Glycine max
  Clone ID: jC-gmle01810094c01a1
tgcagagaaagacaccccatctccaacctcggtgctatctacagttggttcggaagcatttgggtctcaattttcagagcagactaacagatgcctttcaccaaactcttgcaccactgatattcactcagtcaggctatcacctgttgaaaaggaaaatgattgcatgacatccaaagaatctgaggaggaagagaaagcatcaccagcttcacgtgctttatccactgtttctaacccaaaaatgtgcatgaaacctgagtttagttccaaggagatagaagatgctactgatatgccacaaaccactagtattaagctttttggaagaacagtctctatggtaggtaatcagaagtcactgaagatagatgatgatggtaagccgataactgtgaagtccgatgaagtagatgatgttgagaatgagaagcttggccaatcaggagaatccacgcaagtagatacacaattatcactccgcgtggatagtggtaactggcctataacacccgatgctgatggagctaatg

SEQ ID NO: 16923 - DNA, 512 bp, Glycine max
  Clone ID: jC-gmle01810094c01d1
aacgacagaatttgctgctatatgtctctatttggttaaagtaactgtaacatgataaaaaccagaacaaacaatgccaccagccccccacttgaattattggaaatgaagtgttttcatgtgaaagaaagaagattttggaaaaaagaattggaaatcagatgcttgtcaattagacaattagatcacagctacctaaatcatgtccttatttctctcagttttttttttttctctgattaacaccatgattatgaatcatgttaaaatagaatgtaaggctatgagcacacacgtgctcgttgcccctccctctcttccatggcaacaataaaagaatgtccatctctttcagctaaacatcttttatatggtacaaatccccttgcaggcttcttctggggtgcagctccttcctcgtgatatttttgaaacttagaatcaacagcatctgagttcttgccttggttttccatgtcacagactgattcaaagttggaaccagtgcaaca

SEQ ID NO: 16924 - DNA, 554 bp, Glycine max
  Clone ID: jC-gmle01810094c02a1
ctcaccccttatccatagctctaagcaattcccatacagcttcccaagctctttcatcatctacaactcttcccaatctcccagtagctcagctgcaactgcatatcaccacaatggccgcagagacagaaaacacgcttcagaaggtcgactctctgactgaccaccaagatggcgccgctaagaagggccaccgcagagtcagctccatggctgctgatgtctaccggatcgaggatctagaaaaggaaggcaagaagattgagatcgcaatcgaaacccagaagctgaattggaagctgaacaagtcaccatccactgtcgaagacccatcagtcttgaaaatgccactcaccgagcccaagctcaagtccatcgccctgcacttcccgctaggcctagcatgtcaccgcacggaacatgaaaaggtgtcaccatcaaggatgcactagatgccatccacaagcagttcatgacgcgcgcagatgacgagttcgaagagccgtacctcatgggcttcgagtgggacccagaagagtgctacacccgcttta

SEQ ID NO: 16925 - DNA, 509 bp, Glycine max
  unsure at all n locations
  Clone ID: jC-gmle01810094c02d1
cacgatagtcaggtcttctcattatgtcaggtgcttttcagcaacccgaaagagtgcccgagagcatacatgagcagatactgcctttccagcgagcatcccgcgaacggttccacgacgcatatccaccactcgatagccacagcaagtacaccgtctgccaatgcaggcatacagtataccagccacgccatcacagcagacgcgctcgctcttcccatatcgatatgaagattgaccagcacccgagtgcatatccataccccgcacataccgttgccgaagcacagaagtatgactgaggctgtgtgtagaagtcgaagtcagggaagggggcgagtcgttcatttaggaaccctcctctccctcggccttgttcttcttcttcttcttgcttgagccgaaatcgttctttaccgtcgggacggccgactggtggacgataagcgggtgtagcactcttctgggtcccactcgaagcccatgaggtacggctnttcgaactcgtc

SEQ ID NO: 16926 - DNA, 394 bp, Glycine max
  Clone ID: jC-gmle01810094c03a1
cgcgaggattccactctctgtatttctgacacaagctgtgttgtgtctcctttggtgaggatgaacaagaggaaggcgcttccagatctttgcaatcgagaagtcggccacctatcccccagaaatttcgctcctccgtcttggctcttccgaggatcttgtccttcgacttcaattactgaggaatctgcaaaagcaccgaggttgtgtcaacgctgtgagcttcaatgcagatggtgacattctggtctctggttccgatgattgtgggattattctctgggactgggaaactggccgcattagactctccttccattctggtcattctaacaatgttttccaggccaagatcatgcctcactctgatgatcgaaccattgtcacctgtgct

SEQ ID NO: 16927 - DNA, 525 bp, Glycine max
  unsure at all n locations
  Clone ID: jC-gmle01810094c03d1
gacaagaaataaattttagcacaattgtatgtagaatattgtttagacatactatgcaatattccagccaacagtaattgttaatcctatattatttacaattgctaacatttttcttagaagggccaagttttgaccaaggtgtaactctcaactaactgaacaagtcgtcttggctggttgtatcaccatcgtcatcatcttcgttagaactgtcactattggcattgaatgtcaatatcaactgtagaaggtctcgatctgtggatgagttttctccattgctttctgtcctgacccttcgtcttggaagtgaaatcagttgcatcaggtcttcaggataagctatccggtacatccagcccttagccttcggtttctgctcaatatttttgggcaaagtagctttctcgagggcctttggagtccatatcttgatgtcatgctcaataccactgctggncaagaaccattgtatgaggatgagactcaatgcagttacaacatacttatctgcttcatgac

SEQ ID NO: 16928 - DNA, 515 bp, Glycine max
  unsure at all n locations
  Clone ID: jC-gmle01810094c04a1
aaaaaataaaaaaaaaaaaagaatctatataaatataaaaataatatatataaggtacaaatagtaaatcgaggtacccattttatgataaactttccttccatttttgttcctctagtaggcctagtatttccgggcaattgcaatggcttctttatttctttatgttcaaaaaaacaagattttttagatacagaaaacaaagtaaaattctggggttttttattccccaattataatactaaattcaaaaaaaggagagtaatgagtataatctttcgctcagacgatgtactgatatattctatggcggaggttcgaagaacaagcaatttattctgggccgttttcactttgctaggttcatcggggttattgctcgttgcaatttccagttatcttggtatggaatttgttctttatttctgagagaattagtgatttttcttttattccggactntcatttatttccatttattccacatggcngccacgatggctttttatggaatc

SEQ ID NO: 16929 - DNA, 497 bp, Glycine max
  Clone ID: jC-gmle01810094c04d1
caaaaggtacacaaaataaataggacaattctgaagctttttgtgcaatttaatttctaattaagttcaattctcatcagtaaaaaagtggtacacccaaaaatacagataattcgccagctttatgtgcaatttgtgtcccattcaaattatcttcaatacgagtcaagggaataaacccctgttctatggtttccagataaacgatactctcaaaagtactggtacgagtaaaaataccctcttctttaacttctgttattattctgatggagtgaagctcgttcataggtatttcgagaataatacgacgattttttccaggaaatccccaacgaacaaaacgtacctttttcccttttttattgaagatatcaaaaccaccacctatatcccaaaaaataatcgacccaaaataaaaactactaaagagacccgcgattccataaaaagccatcgtggccctttgtggaataaatggaaaataaataaagtcc

SEQ ID NO: 16930 - DNA, 484 bp, Glycine max
  Clone ID: jC-gmle01810094c05a1
gcaggccacagccattattgactccatttctttttctcttccctcttaattttattctgccaaaacaaatttcaataataattttttagaaagaggagagagaaagagaaagagaactcgttcttctttttccattaacattttcaatctttttcacctaacacaccatctcctttccattcctttcttccttcgtcccattctcgaattggcgtgtgcctcttgcaatcccccaaaggttttttgaagcagaagaatggacttctttactagagacataaatgaggattctatgcttagatgcccattcttgaggaacatcaatgagcctactaacttctcattctcttcaccttttggctgtaccaatgcctgtttcgtggagctaaaagtccaatttattgaagatcgtcccaattttgatttggcatttaggcttttccacgggagtgatggtgtagcacccttatctgacagatctttt

SEQ ID NO: 16931 - DNA, 369 bp, Glycine max
  Clone ID: jC-gmle01810094c05d1
gggggttaataaaattgttggtttttttttttatctcaagtttaaaagaaaaatgaacccacaagtgttgtaatggtaatagtcgtagtaagcatccaaaattacaatgggctgggtcatacctaataaattaattaccaatgggaatatgtttggctctcacttccatttggtggcaacaatggcggccaaaaccacaaccctttgggaggtgccccattcattggcatacccagcaatgaccttcaccatggtatttcccaagaccatgggcaacggggagttaacgggtgggggcccatcagggcccccgaagtcaacgggcacaagggggtcattacaccccgagggggtacccctgagcccaat

SEQ ID NO: 16932 - DNA, 415 bp, Glycine max
  unsure at all n locations
  Clone ID: jC-gmle01810094c06a1
gactttcccccagggcacttcccgaagtgttaagagaatgcctctttctatagggggaggagctggtgcaaagaatgctattctcatgaatatgccaaatgctgttctttcaatgtggagatattttgttggagatctcgtctttgaagtttctaagatgacttctccctacattaaatgtacagtctctttcttcatagcatttggaaatttggctgatgacaccatcaattttgaggcttttccccacaagctggtgcagtttggagagattcaggaaaaagttgtattgaaattttcacaagaggaatttcttacagcttggtcaactcaggtgcgtcctgcaacaactctgttggctgatgggtgtccatatttgtatgctatggtgcatgatagntcagtgtctacaata

SEQ ID NO: 16933 - DNA, 494 bp, Glycine max
  Clone ID: jC-gmle01810094c06d1
aaaataacacacacttcacacatcattacgacaattaaaagaggtgtggaaattttcaaatagacagagcatactcaacaagagggtcatgtctaatttcctttattgaattaaacaaacgaacaaacgaaagaaaacacaaattccagatcatgcagaggattccgcattttcagaagatctggcagtagcctgtggaacagaaaaagctggcataagagtattaccagcaatttcaaaatcttgagaaattcccaagagaatatcaaaaactgtagactgtttgggattgtcaataaggaaactcaagtgccatgaagtttgatttgcccactcagaactccacatttcaaaaccattattaggaccacatacctctattgggaagatcaattcccaggaatgtggttccgattttgtccacttacatgcatcgaaatgctctgtactgttgctgcttgtaaaaacacttgtaccaatgaggcccaatcact

SEQ ID NO: 16934 - DNA, 295 bp, Glycine max
  Clone ID: jC-gmle01810094c07a1
gacctggtactttgaacaatgataaatcacggatcaggaccggaaaccactccttactcgcataaagattaaattgagatgcccgccaccttcttccacgatgcaatgttatttacactatatatcataccagcgactgacggtccctgtacagttcacagtccagcatgtctaacctgataggcagcaagcgcattgagctgagggcgccctacctagtgcttgaccactgctcacgcgtacaaccagaatacatctggattgactgctatggcggtcgactgggcaagagcat

SEQ ID NO: 16935 - DNA, 379 bp, Glycine max
  Clone ID: jC-gmle01810094c07d1
agcttatacaatgctatcttataactgatatttgaagcgggagcattaggcaccacaacgtgaggatctgaacgataaatgacgaacgtaaatacgtctgggaaacacacaagtaacgccatgacatacttatgtgaaatccaacaccttataccttatcacatacaacatgcccacccaacggcgaccctgttgcatcatacaggcacactcaagttaaggcatcattcaacaatgctggaatgagcaatacactatacactgtcaagcaggacccggtggaagaccccaagaaccataaaagccaggcaattgaagccacactcggataagacgcacaagtggcaacaccacacatgaccgtccacaatggatcttg

SEQ ID NO: 16936 - DNA, 491 bp, Glycine max
  Clone ID: jC-gmle01810094c08a1
gttgggatctccatacgccggatctgctaaaatacgcttgatccatatgggcctcctcgaccacttgtgggacgacaccgtcgccggcccaaggccggaaaacggtctgggcaagctccgaaaacaccacaccttcactttccgacctagctccggcaagggtacgccctgcctcgttaatcatactcatataattcaccaacgattttcgttaactacaagtccacaactacaatcgttaactcaactcttatcataattatcattcttttataatctaaccactcgtaccttcgaatcggagaccgatttgtgtgttttaggttgcatgctgtcagatctacaccctaaacatgcttttcaagctcgaatcctccaagttccgaatcttctaaatcatttccacatgatctatatgcaataatagtaaaagatgatatagtttgggagatgaaataacctgaacataaccactttaaattttgagatac

SEQ ID NO: 16937 - DNA, 464 bp, Glycine max
  Clone ID: jC-gmle01810094c08d1
gaacactaccaacaaacgcagaatggcttattaattataaatatacattacataataataagatacaccgctactctacccttacactttcttacttacaatttgccagccactacgcagctcacctaagtaaagacttaaagaagctaaaccaaaaagctacctcgcgtgaactggcagaactgtggcacaaccttaacctcaactgattccttacatacattcatacatgcaaacggagatctaaacaaaaatgaatacagcataggccaaaagactacatcctcagctttcgggtacgagaaaatgcgactctcatttctcacacatcgaaaggagaagaagggcctgatctggtcttgcctctcttctcgtacgcatctgatgccgaccttctttcgataccgatacgaatctttttcttcgggaaaacggagaaatcgagtagtagaaccgcgggagaa

SEQ ID NO: 16938 - DNA, 201 bp, Glycine max
  Clone ID: jC-gmle01810094c09a1
cttctagcattgtgatgttgattgcatatgttgtctacattgtctttcaactgtggacacacagggagttatttgaagaagaagatgacggttaagatggcgaggatggttcagaagaacaagctgtgattggattatggagtgatattgattggttggctggaatgactgtattcattgctgtgttgtgagaatatgggg

SEQ ID NO: 16939 - DNA, 461 bp, Glycine max
  Clone ID: jC-gmle01810094c09d1
ataaaattaaaatttataaaaattttatttcccacgagacctagtacaatatatagtaacacaataaatacaagagattctgcaaactgaaaaagggattcttactaaagcaaactcaaacaagaacaacttccactcatttggcatctaccgtagtaacacaagatcaaaagcagcttctctgatagaacacacgtacgtatgattcaacatctttcacagtagtggttcatttctaacagctagctattgcaacttaaaataattgcaatgcttctgcaaagtgctaactttttttcccccccttctttatggatatgacaatgtgatcagaatgaaacaataaccaatccattgaatttgaatctgattttgggtttggatcgataccaccattcttcatctcaggaaaggacaagaaataggccaaagcctactaattaagcgcttaaaactgcatt

SEQ ID NO: 16940 - DNA, 413 bp, Glycine max
  unsure at all n locations
  Clone ID: jC-gmle01810094c10a1
cagaaagcaagctcatcctagagttttaaaaatggcagcagcctcctccatggctctctcttccccatccttggctggcaaggccgtgaagctgggcccatcagcccccgaagtcgggagggtcagcatgaggaagaccgtcaccaagcaggcctcctccggaagcccatggtacggcccagaccgcgtcaagtacttgggcccattctctggcgagcccccgtcctacctcactggcgagttcccaggtgactacggctgggacactgctgggctttcggccgacccagaaaccttcgccagaaaccgtgagctcgaagtgatccactccaggtgggccatgctcggngccttgtgctgcgtcttcccgaactgttgtcccgcacggggtcaagtttgagaagctgtgtggt

SEQ ID NO: 16941 - DNA, 482 bp, Glycine max
  Clone ID: jC-gmle01810094c10d1
gtaaaaagcaagtaacattaagttggattgggatacacaagataattcacattatctgaagtacattgcaataacatatacttcaccaaacacaaatctaaaaactctcaaaagtccacaagtcatccttttctttcatgctcacttgccggggacgaagttggtggcgtaggcccaggcattgttgttgactgggtccgcaaggtgatcagcaaggttctccaatggacccttaccggtgacaatggcctgaacaaagaacccaaacatagagaacatggccaatctcccgttcttgagttccttcaccttaagctcagcaaaagcctctgggtcatcagcaaggcccaatgggtcaaagctgccaccagggtagattgggtcagtgacctcaccgaggggcccaccagcaatacgataacccttaacagcacccattaggataacttgggtggcccagatggcgaggatgctctgggcgt

SEQ ID NO: 16942 - DNA, 473 bp, Glycine max
  unsure at all n locations
  Clone ID: jC-gmle01810094c11a1
gtcaaagtctgcacccccacctaactcggcagaagggaagggtttgacatcattattagaggtctcatcaactcatgttaagcataaccagccaaaacaaacaaacaaggcaccagtttcggtcctccattcacctgttgcaaagtttcccgcatacaatcaaggaaagagcggattcctctatccaaacaacttgcttaatgtgaaagcaaacacaaagggctgggttagtactgaaaagttgaaacagagaaacaaggtcaacgattcactcaatgagcagaatcaaggtcctagaacagctaatgcaaaaggtgcattaatgtctggaggtaattctgtgagaggctcacccccaggtgggagtggaaatgttaccaacaaaatcaggacagatcaatacaacctttctgattttccaccaaatatgatcatgcacttttctttgtcatcaaatcttacagngaagatga

SEQ ID NO: 16943 - DNA, 503 bp, Glycine max
  Clone ID: jC-gmle01810094c11d1
gtggtccacgtggcacatcgccacaccatcgtgatcggcatgctggcatggcgggtccccaggaatagcatcagccccacatgctattcagtcattcactctctcaaccaccttaggatcctccatgttcttcacagatgataggtctactgacccaagtgtagtggttaattcctctatttgctgtacactggtatggggcatagattgccttgttttcttctcctgcaataccttctggcggctttcgtaaaattcaaagtcatccaatatggaagttcttgccacataattcttgaaaatgttaagcatttcaacaccttggggaaaactcacctcttgtgtgtctctactatttgtgacaggcttgtgatcattattctcgagtattatgtggcgtagttgaggatttggaacatcctttataatgtgccatttgacagagaaatatccattccacttatcctggtgccagaaatccatacttttggtgaaatcaactc

SEQ ID NO: 16944 - DNA, 488 bp, Glycine max
  Clone ID: jC-gmle01810094c12a1
gcagcaaatctcaagctgtcaacgccaaatacgttgtcgcacctattctattctttgttgggttgctgatcttgatttgcatctatttaagagtaaggaagccaacaaagcattttgagagtgaaaccatggttgatgacgaaattaaactagtcgtgtcatcacagtttgactttgacaccataagagtcgctacgaacaacttctctgatgcaaacaagcttggacaaggtggatttggacctgtttacaaggggacactcttcaataaacaagaagtagcaatcaaaaggttatctagcaactcttgccaaggaaatattgaattcaagaatgaagtgatactaatgtccaggcttcagcaccgaaatttagttaggctccttggtttttgttatgaaagcgaagaacggctccttgtctatgagtttcttcccaataaaagtcttgacaagatcatatttgatcccatcgagcgtgcacatttg

SEQ ID NO: 16945 - DNA, 373 bp, Glycine max
  Clone ID: jC-gmle01810094c12d1
cacggaaatggggttatcaaaattccataacgaatttttttataaagaggggaaatggataaaaagccattaagtttgcaatatcttgaactttgtgaaagttcaaatgaaaggatcaggaattaggaatatttaacacaacaagcatccttcattctatagttctgttgtaatcagcctttttttttttggtcgtcgtcgttaagaagttacattatcccatgttatatcatctgaattttggttaatacaaccgcccagtaaatttcctaaaattgaatggatgtgtaatgcttttgtcaattgacatcttatagtaaaaataatgtccttttaattatgacctttactttaatggaacaaaagcatgact

SEQ ID NO: 16946 - DNA, 455 bp, Glycine max
  Clone ID: jC-gmle01810094d01a1
tcaagattgttgctgtagaagagaagaaagagattgaagagacccagcagaccgacaaggacagatggaagggtcttgcctatgatatctcagacgaccaacaggacatcacaagaggaaagggtttggatgacttccttttgcaagctccacaggatgctggaactcactatgctgtcatgagctcctacgagtaccttagcactggacttcgccagtacttggacaacaacatggatggattttacattgctccagcttttatggacaaacttgttgttcacattaccaagaacttcatgaccctgcccaacatcaaggttcctctcattcttggtatctggggaggcaagggacaaggaaaatctttccaatgtgagcttgtctttgccaagatgggaatcaaccccatcatgatgagtgctggagagttggaaagtggaaatgcaagagag

SEQ ID NO: 16947 - DNA, 423 bp, Glycine max
  Clone ID: jC-gmle01810094d01d1
aggacaaaaggaaaaggcaccaaattcaatttaagtggacactttaactcaaaattatagaggaagacagtccaatatgaaaaatatagtaaaatcatctcaaacttggcatcttctctttgcacctaagacattgagaattctaagaatgttacacgcaagtcccatcacaacttctagcacttggatcagcacaaccttcaggaacagaaatatttacttgccaagtttgctttgcctccaattcaagattggaagaaagttcccctgttaatagcatccctcgtagcattttcaagtgcagcctcgttcaagtactttgcaggccattggactcttttgacttctcttggtcttgggacaagcatgttaccatacgtcaagagcttctccagagtcatcttgggctgctcaaaggttgga

SEQ ID NO: 16948 - DNA, 326 bp, Glycine max
  Clone ID: jC-gmle01810094d02a1
ccaagattgtagctgtagaagagaagaaagagattgcagagacccagcataccgacaaggacagatggaagggtcttgcctatgatatctaagacgaccagcaggacatcacaagaggaacggaactggctgacttcctttatccaagctccacaggatgctggaactcactatgctgccatgagctcctacgagtaccttaacactggactgcgtcaggacttgtaccacaacatggatggattttacattggtccagctattatggacaaactcgtagtccacattaccaagaacttcatgaccctgcccaacatcacggttcc

SEQ ID NO: 16949 - DNA, 450 bp, Glycine max
  Clone ID: jC-gmle01810094d02d1
aggacaaaaggaaaaggcaccaaatttaatttaagtggacactttaactcaaaattattgaggaagacagtccagtatgaaaaatatagttaaatcatctgaaacttggcatcttctctttgcacctaagacattgagaattctaagaatggtacacgcaagtcccatcacaacttctagcacttggatcagcacaaccttcaggaacagaaatatttacttgccaaggttgatttgcctacaatttaagattggaagaaagttcccctggtaatagcatcctcgtttgcatttccaagtgcagcctagttcaagtacttgtcagccaattggactctattgacaatctcttgttcttggacaagcatgttaccatacgtcaagagcttgtccagagtcatcttgggctggtcaaaagttgcaggtgcatcttttgagttcacaagcttc

SEQ ID NO: 16950 - DNA, 530 bp, Glycine max
  Clone ID: jC-gmle01810094d04a1
cggaattcggctcgaggcagggagagggatctctacaagaactcttcacatgcatgtgagacccttctgtccctgatggttgacaagaagcgatgtcggaaaacggcaattctctcgctgaagaaatccagtcctgagcttcctggagctcctgacacaattttctgccggcattgctggtactggccttgcagtcctgctatccgtgatgtgtaacctagcttgtggaagggctaccttttgtacttctagcttgttcaacaccgggtttggacttgggttggtttggctttctggggtagtaaataagctaagggccacaattgtcaacatcagcaagaatgcaggaaagttgggtttgaaagaagaggaaatgatgcaaaagctggataagagcataagagatatttactatactgctgcagcattgctagcagtggtagtgctaaggcttgcttgagtaacatctacaagatgtagttatttctggctggatggatgctacagtgatggcttttggtgaaagaaag

SEQ ID NO: 16951 - DNA, 81 bp, Glycine max
  Clone ID: jC-gmle01810094d04d1
aaaataaaaaaggccattttatggatcccttggaaaattcctactttttaccaggttacctaaaaaccaaaacagggttcc

SEQ ID NO: 16952 - DNA, 475 bp, Glycine max
  Clone ID: jC-gmle01810094d05a1
attatactctctgttgctaatcatggctagcaaattggccttcacactgacatacccgcttccacttacaccaatctcttccttgtcctcctcttctgcttctcgactccaccttcttcaattcaatggccgccacatatgccttcgccctcggctatttctgttttctcccatggccacagccgatcaagacaaggttgaggaagatgctgccgttgttgatagtaaaatcctacaatattgtagcatagacaaaaaagagaagaaatcagttggtgaaatggagcaagaatttctacaggcactgcaagcattctattatgaggggaaggctattatgtcaaatgaggaatttgataatcttaaggaagaactcatgtgggaagggagccaccgtgtgatgctaagttctgatgagcaaaaatttctggaagcgtctattgcttatgtgtcttgaaaaccaatcttgagcgac

SEQ ID NO: 16953 - DNA, 471 bp, Glycine max
  Clone ID: jC-gmle01810094d05d1
gtaatcaagttttaatcattcgtctttcttttcttttttttttttaccgctccattagtaaaaaatggggccgcacagtatttttgcaaaaggcccaaagtgtgcctacaaattaaaaatcttgatgttaagaatatcctcatataattcatctcttctggtagacgatcctacgtatgctatacaaagttcataccattacaactcactagcatatatggtgtgcgacattgagaacaatgatttcatggcccatagagaacaatgatttcagtagcttctacctatgacgatctcatctcattacaggaaacaatagtatcaagcgtgcctccatttaagcattacttccttctggtaatgtaatcaatcttgtttttgaatcatacaccattttagtttcacagttttcacatttgactttgttggtggaatcgccacttgaaaccgacagtatagtcccaaagaaag

SEQ ID NO: 16954 - DNA, 486 bp, Glycine max
  Clone ID: jC-gmle01810094d06a1
cgttcttcgtgttctccattccctctctcactccttcatctactgatatcatatcacaatgtgtggcatacttgctgtgcttgggtgctctgattcatctcaagccaaaagggtccgcgtccttgagctttctcgcagattgaagcaccgtggtcctgactggagtgggctccaccaatatggcgataactatttggctcatcaacggttagccatagttgatccagcttctggtgatcaacccctcttcaatgaaaacaaaactgttgctgttacggagaatggagagatctacaatcatgaacaactcaagaaacaattgcctaatcacaccttccgtacaggaagtgattgtgatgatattgctcacctgtatgaggagcacggagaaaactttatggacatgcttgatggtatatattcatttgttcagctggatactcgtgacaacagttttatagcggcacgggatgcaattggggtcac

SEQ ID NO: 16955 - DNA, 392 bp, Glycine max
  Clone ID: jC-gmle01810094d06d1
atgatgactagtataataatattatatgctggttctagggcaactactagtccttgctatggctcatacaagctctatatggcaactcctagtggagaaacttccatcttgggtatgaacttctctggttctacagctttgacctggtttccataagctgatgcatgcactccaagtgctgctttacctgatggatcaaggttgttagaccaagcagcatcccactcaacagcttttgctgagctacatgcaacacttggtccttcaggaacagtgagccttgctgagttctgagggaagaacctttcaaatatcattctataggggcatgcctctttggtggttggagtgtcaaaggggaaaatgcttgcagcattgagcatcattctggc

SEQ ID NO: 16956 - DNA, 394 bp, Glycine max
  Clone ID: jC-gmle01810094d07a1
ctcagaacacccactgaggtctaattctctgaagtcatcagattttggtcaagaaaacaattctcccaagtcagttttatctacagttgtttcagaaactgttggttcctccgattcagatacatctagtcgatgtttgtcaccagcctcatccattagtggtgtccccacaaacagatttccacttgctgagcccaaaacatcatttaaggaagaagggtctgcaccaagttcagctcatgatgagcaacctcctgtgaaactggagttttttcacaaagaaagtgtttctaccagagatgatgcaacagaagaatcatctggtcgtactctcaaactttttgggaccactctactggtaacagacacatgcaaacctttttcttcaacaacg

SEQ ID NO: 16957 - DNA, 423 bp, Glycine max
  Clone ID: jC-gmle01810094d07d1
ggcccaaaaggaaggggccctaagtacaactttattcaacttcagctgatttgagggtaataatgcgcttcatttgaaaaatatgaacaccttccctaatgaccgatgcctaagtctggaacttacccttgaaagaccattcgaatttaaaagaacaaaagccctacatttatccgagtggggggtgggaaaaagaatttgaagaaatcccaaaggcctaagcctgaagaaattttaaaaggggggataatccactggattgcgtttttcccaaagtcttgaaacccaaattggttaacacaccggcttgggggaaattaaccatgccgtgaaaagctcaaaaatttcagctcccttatctttctttttaagccggggcatctctcaacagaaacggggacactttacccttaaaagggaaac

SEQ ID NO: 16958 - DNA, 236 bp, Glycine max
  Clone ID: jC-gmle01810094d08a1
ctcggaacacccactgaggtgttatgctctgaagcaatcaaattatgagcaacaaaacaatggtcccgaggaaggcttatctacgctagctttcagaaactgtatatttctacgacgctaatacatcatagagcgtgtgcgctacccccctgatgcatgactggtgtccccacgaacagttgtgctgttgatgagacacacacattgttttaggaagaatggtatgcaccatgttc

SEQ ID NO: 16959 - DNA, 393 bp, Glycine max
  Clone ID: jC-gmle01810094d08d1
actaacgacaatgccatattataacagatattagaagcggaagcatcaatccaatacaatgtgtaactacgagccattaatacatgatcagtttcatgtaggcaaaacatgcgcttcaggccaaaatagagacctgtgatccacaagacctactgcttcatgttatacaccatgcgaacagaactaggaccttatttaatactacagttgcacttatctttaatcatgaggcatgaatactggactcagcaaatcccaattgactctgaaggacggcatggtagtagtcggcaacgaccatacggtgatgcgaattacgccgcactgggatgcgatgcacgtgcagcaacagctcacgggaggttacccaatccatctaaaggccgccatttt

SEQ ID NO: 16960 - DNA, 438 bp, Glycine max
  Clone ID: jC-gmle01810094d10a1
ggtaaaacaattggactctacttctcagcggaatggtgcgtcccatgcgccaagttcactcccaagctgatttccgtttaccgctatggaatccaagcttatccattcagtaaggacaggttggagcagctgcaaaaggaagacaaagtgaagcgtgataaccagactctcactaatttactagcaaaccaccatagagactacgttttgagtcacactcacacgggactcaaaaaggtacctgtagcttccctagtgggtaaaacaattggactctacttctcagcggaatggtgcgtcccatgcgccaagttcactcccaagctgatttccgtttacgagaagataaagcacgagctagccgaaaagggagaggaggacttcgaagttgtgctaatatccagcgaccgcgaccaagcatcctttgactcctactac

SEQ ID NO: 16961 - DNA, 469 bp, Glycine max
  Clone ID: jC-gmle01810094d10d1
aacgaacatagtaacagcactattttttataaaaaaaaagctatggagaatcaaatagttgattccccaagtatctccttttctttttatcaccgtcagtcacatattctgaacaagtagaaaagcacccataaagacacgtgatctaactaatttaagggcattccagtcccttcccttgtgcactcaagtcatcgccctctaggacgacatagaattaattgccaaaggaattgaattagttaattaaatcctagaagcaaccagtggtgtccaccaagacattgtcatcgcgttccacagttctgacgcactttgggtgcacttcatagccacattggagacactggtaggcccagctagacccttgttcatcacacacgcagcagataaagggccctgcaccatttccatcagacaccaaattcagatcatgtcgatgcccttggtgatacaccaatgctggaag

SEQ ID NO: 16962 - DNA, 518 bp, Glycine max
  Clone ID: jC-gmle01810094d11a1
ccgggattgagaagtaagatggaggttgttatgcgccgtaagtaatttgtttgttggattggaattgagaaaacagcaacaaggggaaatgggagatagagaagaacaaggcgagggtgctggctcctccttggaattggaagctcctattccagagacccaaaaagaaatcccaatttcagatggcatcgcattcaacaatcagagcgcgattttccaagccatcgaggttgtggaacgagactcgttggccatcgctcagagtttcacttctctcttcgcttccctccgattggccctctccgaatccacatccacctctctccatcacatgcagtgcttcaccgatgccaccggtcgccttcaggaatctgtgcttgatgcagctaccaaggggaatcgctatataaattcctgtctcagattgaatgaggagatgaagagtgttgatggtctcgcctctcaattaaaaatcttaagaaagcatgtcgatgctctggacgcagctgttaacaagc

SEQ ID NO: 16963 - DNA, 536 bp, Glycine max
  Clone ID: jC-gmle01810094d11d1
aagaatcaaatcattatacatcatattcagttccagttaatgatttcacacgttactagcatcatttacccacttttaccatagaagaatgtaagttacatatgaaccataggttaggtaacagcgaggtgtctatcctaattcagaatatttaaaatggagtggtgctttcaaagcataaccatgtcacatggaaaagtgctcaagttgccttgtaggtgaaattcaaaacactagctcaagttgccttgtagatgaaattcatgagcctgcgttcgaaatattcattttcatgtttgccttgtacaagactgcatccccccagtttcaggggatatgaagaagcttgttaacagctgcgtccagagcatcgacatgctttcttaagatttttaattgagaggcgagaccatcaacactcttcatctcctcattcaatctgagacaggaatttatatagcgattccccttggtagctgcatcaagcacagattcctgaaggcgaccggtggcatcggtgaagcactgcatgtgat

SEQ ID NO: 16964 - DNA, 460 bp, Glycine max
  Clone ID: jC-gmle01810094d12a1
gttcgagctctccggcatcccccctgccccccgtggtgttccccagatcgaggtcaccttcgaccttgacgccaacggaatcatgaacgtctccgctctcgagaagggcaccggcaagaccaacaagatcgtcatcaccaacgacaagggccgtctttccaaggaggagatcgagcgcatgctcgctgacgccgagaagtacaaggaggaggacgaggccgaggctggccgcatccaggccaagaacggcctcgagtcctacgcctactccctcaagaacacagtctccgaccccaaggttgaggagaagctgtcctctgaggacaaggagagcctgacctccgccatcgacaagactgttgcgtggatcgacgagaaccaaaccgccaccaaggaagaatacgaatccgagcacaagaccctcgaagggtgttgccacccgatcatgactaagatctac

SEQ ID NO: 16965 - DNA, 498 bp, Glycine max
  Clone ID: jC-gmle01810094d12d1
gatgattagaaaacgttcatttctcgaaaacctcaagcgaggttggctacattacagaaggatgcttttttttcctccaagtcatagcatcatgaattttgagcagaagaaaaatcccaaatctagtcggaacgccgtgttgtcgatgcaagttgagagtcgtgaagcgagacgcttagtcgacctcctcaacagtgggaccgtcctgcgggtcctggggaggaccaccggcaccgggcatgccgccgggagcaccgcccttctgagagtagatcttagtcatgatcgggttggcaacaccttcgagggtcttctgctcggattcgtattcttccttggtggcggtttggttctcgtcgatccacgcaacagtcttgtcgatggcggaagtcaggctctccttgtcctcagaggacagcttctactcaaccttggggtcggagactgtgttcttgagggagtaggcgtaggactcgaggccgttcttggactggatgc

SEQ ID NO: 16966 - DNA, 549 bp, Glycine max
  Clone ID: jC-gmle01810094e01a1
tgttaatacacctaacttacgtgacgtcgcatgcacgctagctcggggttatccacaggatcaagaccacaatacggtagaggattgttgatattagtaaggtccaactaacacttattttacacgctgatacaagtgaacaagcaaacatctttaatatatatagcttgcctgtattatgatatcatgaggtacaatatattataagttgatactcgatagaaatgatagtttcatcattttcatttgaaagatgcacctacatataaaagagacaatggcatttgagacataattcaatatatatgccaattagtgaattctgaggtacatgataatagcaattatcctgtggatatatatacttgaacctatggatgtagaaacataaatgtgtacatgttattattgtattctgagttcagatgtgaaatatatactaatggtatttgtcacaattcttttcttgctctgaaacagtgaatgcttattttattttatttagtacatgtacagtttatgaacacatatcgaagtattctttatttg

SEQ ID NO: 16967 - DNA, 323 bp, Glycine max
  Clone ID: jC-gmle01810094e01d1
gcccaccttggaatactttaaaagatttttttcaaacctacctccacatgcattttttggtaaaaaggctaatatctaaaacatgggaaaaattcaaaggctaaaacacccagttttaaacccgggaaaaagaacaactcccttacaaaagggacccatttgcccatacaaaccctaaaaaacactggttcctaagagtaaacctttgaaaaaagggtttgattaaagccgcctccacacttgaatggcccaatcatgggaactggcgtctgacctatggggcttaatgcacaaataccgggttttgactagtctgaaaaggg

SEQ ID NO: 16968 - DNA, 396 bp, Glycine max
  Clone ID: jC-gmle01810094e02a1
gttttgtgggtggctcctgaggataaggcgagtttatggtcacaacttcattatgtttcgtgtaataatctggaaatgcaagaagcttatcttgtcaatctcgtaaatgtgttacgagaattgtatttgcacaagtccaaaggaagctcgccaattgagaaggaaagctctctctcgtattgaatggctgcaaaaagctgatgtgcctaccatagcacagattgaagagttccattcgatgcagaggatgatgaatgctcctgattcaaatgataatattgatctactgttgagcattgatttgatgggtttacacggagcaggtaaagctcttccaaacagattgattttgatgatagcgttgtgttggctaacacacaagaattctctgatgga

SEQ ID NO: 16969 - DNA, 511 bp, Glycine max
  Clone ID: jC-gmle01810094e02d1
aaacacactcattgcacatagtaatgcgctttatttaagtgaataaaatattacatactagttcacaaatgcaaaaggacactcatcaaccagatatttgagactcttacagttctcaagaagtcgcgtcagcatagggttagtggcgttagaactcagaatttcattcttaacgccaaaaagaacagccagtaaagctactggaaaaggatcaactctagtaagaaaaacaattttcttacctctcccaagtgctgtgcgaatccttttgttgatatctgaggagcgattgttaactgcagaactaatccaagcagtggtgggtaaaccaccacgtccactaccacatgtaacatttacaacgacagcttctgaaggtaattgacttacaggataaagacaattcacaaaaattggtaaccaagaatccactggaaaatttccatcaaagaattcttgtgtgttagccaacacaagcttatcatcaaaaacaatcttgtttggaaaagct

SEQ ID NO: 16970 - DNA, 454 bp, Glycine max
  Clone ID: jC-gmle01810094e03a1
cgagagctttcagtttctgtggttcatctttcttcttcttaatctttccccccctctctgtaacatcccgcttctctgaatccctttctgctaatcatctgtctttcaagctaagattttctggtttgtcttttaatttcaccaaaaagcaaacttagaaggatttttcgaaagccaggtgttttcagaaacgagatccaggttttattgacgaatttcgctagtcatattaatatttcatcatttttttttcctttgaaaccagccaagagggttatttttgatccctcaaagctaatttctcattttcttttccgggactgaagaggttgtctatttgaaatctccttcatcctttcctttcttgctgaaaagtttttgtctttgatctaattaaccagcagttcttcagttttagaaagacgcacgttgaattatcatggccgctatgatg

SEQ ID NO: 16971 - DNA, 459 bp, Glycine max
  Clone ID: jC-gmle01810094e03d1
gtacaataataaatccatatttttataattaaaagtagtagattacagcgatgcacttgagaaacatattaagtggactaattctccctggtcaagcaagaaaaaaaccagctatgacccaaggtagagagagattatacacagaatactagtaattaactaagactggctctgcaattgccaaaaactccattgcagtagcagccacctgagaagacactaagacctagactagaccatacataatgaagattaatacccttacataacaacataggacactaagaaaacacggcttcacagagaatcccagtcgatctcataagaggggtacttctggagattaaaattatccgaatcaccttcccactgcggctcgctgacgtcagcgaaagtcagaaccgaaagcggcgaagaaccttcagaagaggaggaagcagcttcgaccttacaagagtt

SEQ ID NO: 16972 - DNA, 454 bp, Glycine max
  Clone ID: jC-gmle01810094e04a1
caacgccgccgcttacaacgtaatgcttcggtttctcagcagaaggcaagactgggaaggcgcggagaagctcatctacgaaatgaagggttccgaattgataagttgcaacgccttcaacacccttatctacgcgtgctgcaagcagagcctcgtgcaattgggaacaaagtggttccgaatgatgttggattgcggcgtcgtgcccaatgtggccaccattgggatgctcatggggctctaccggaagggttggaacctcgaggaggcggaatttgccttttcccgaatgagagggtttcgtattgtgtgtgaatccgcgtattcgtccatgattaccatttacacgcgtctcaggttgtatgacaaggccgaaggcgtgatcgagttgatgaagaaggacgactgtggtgcccaatttggagaactggctggtgatgatgaatgctcctag

SEQ ID NO: 16973 - DNA, 508 bp, Glycine max
  Clone ID: jC-gmle01810094e04d1
caacaaacatctgtttatttgttttatttttgctacaagatatacagaaaaatcttaccaagggaagccatagttcagaggctttactcatgtaggaattttaaggtcaaactattcttcaaagaacaagggttagaaggtccaagaccacttagataatgccatagctttatgaaattcatattttcatctgcttcatccataatgaccatttaactgcttctaaaaatttatcatttcgtcgcagtgcagtgataagattagtgtagcttttcttgtcaggttctattccattttttctcatttccttgatcaaacctacagcttctgcaaccattcctgcaatcccatacgccttgatcaatgtgttatagctgcacaaatcaggtctgagtccacattctttcaattctgtaagcacattagcaacttcattaatccatccttgttctccatagatattgatcaaagtgttgtatgtgtagtggtcagaggcacaattggaatc

SEQ ID NO: 16974 - DNA, 426 bp, Glycine max
  Clone ID: jC-gmle01810094e05a1
ggttgcatgtgctgctgtgtgcaagtcctggagagaaatgtgcaaagaaattgttaccagtcctgagttctgtgggaagattactttccctgtctccctgaagcagcctggttcaagggatggaaccatccagtgtttcatcaagagagacaaatctaatctgacataccacctattcctttgtcttagtcctgcattgctagttgaaaatggaaagtttcttctttctgcaaaacggaccagaagaactacatgcacagagtatattatatcaatggatgcagataacatatcaagatctaatagcacttacattggaaaactgaggtcaaattttcttggcaccaagtttataatttatgatacacagcctccctataacaatgctcagctgtctcctccaggccgaagccgtaggttttattc

SEQ ID NO: 16975 - DNA, 547 bp, Glycine max
  Clone ID: jC-gmle01810094e05d1
aaatcttaatgagaaatttatattcatgaattaaaatgatgaagtaccaaaatatactaatgtgttttttggttcaggagagcctaccataggaagaagcccattacactgcagggaagcaacacatagatagtttgctgcagagaagaaaaggaaaagcatataagaaaaattacattgagcacaggttgttctgtcctttacagttatactctggtgtaaaatgactccatgcagcttcacctcccagtgaataaataaatggagatagaatcctattgtctttgtaccacacctctcattgtcactattcacaagctagttttgtgtcaaaactagtcaagcaaatggcaaaagcctgaaatgcagataggggatatctatagtccatagtaaatatatccttgccaaccttgccaaactgaagaataatcttgtcatgatcagactgcgctggctgcgatgacggtgtatgagcatcggtttgaagtggctgcggcgcagcaatcagctggaaattcttgactgaggcaacagtcacccttcc

SEQ ID NO: 16976 - DNA, 422 bp, Glycine max
  Clone ID: jC-gmle01810094e06a1
gctactttggcaaacttggtgcaggaagcaatgcttatattttgggtggccaagacaaagcacagaactggcatgtctactctgcttctgcagattctgtaactcaatgtgacaatgtttacactcttgagatgtgcatgactggcctggatagagagaaagcacaggttttctacaaagaacaatctgcttcagctgccatgatgactgttaattccggcattagaaaaattcttccagattccgagatttgtgactttgactttgaaccatgtggttattcaatgaactctgctgaaggcgctgctgtttctacgattcatgttaccccagaagatggtttcagctatgcaagcttcgaaactgttggttatgacttcaaagcggtgaatctgaacgaaatggttcagacggtattggca

SEQ ID NO: 16977 - DNA, 583 bp, Glycine max
  Clone ID: jC-gmle01810094e06d1
gcacgcaaacaaagtgatttattaatccattcgatgttcaaatggtaatagaaacaataaaggtctaaatgcccaaatggtctctaacagaagctaaaaaagacaacaaagaaaaacaataacgtatctggaaaaccagacttattttcacaaggacagaataataaagacacttaaggaaactactcttcctcatcttcctcattccagcactttagagttgatctaggtgaaccacagtcactagtcttcccgaatttttggtagacaacagaaccacccattccaagcccttcgtggctcctctgttcacgacagtatcccttaacattcagaaagcaggtctgctcaaacgacttgcttgcaccatccacatgaactgcaacagaaaactcagttgggaggaaacatgccaataccctctgaaccatttcgttcagattcaccgctttgaagtcataaccaacagtttcgaagctttgataactgaaaccagttttctgtgtaacatgaatcgtagaaacagcagcgccttcaacagagttcattgaataaccacatggttcaaagtcaaagcacaaat

SEQ ID NO: 16978 - DNA, 466 bp, Glycine max
  unsure at all n locations
  Clone ID: jC-gmle01810094e07a1
atgacattgtagcagctgctgtgttgtctgggaatcgtaattttgagggccgagtacatgcattgacaagagctaactaccttgcctctcctcctctagttgttgcttatgctcttgctggcacggttgacattgactttgagaaggagccaattgggacagggaaggatggaaagaatgtctacttgagggatatttggccatctactgaagaaattgctaaggttgtccaatccagtgtgttgcctgagatgtttcgaagtacatatgaggctattaccaaagggaacccaatgtggaatcaactacaagttcctgctgacactctatactcatgggaccctgactcaacatatatccatgaacccccttacttcaagagcatgaccatggatcctnctggacctcatggtgtaaaagatgcttattgcctactgaattttggtgacagtataaccactgatca

SEQ ID NO: 16979 - DNA, 466 bp, Glycine max
  Clone ID: jC-gmle01810094e07d1
aaagaaagaaattttcactaccataacactgcattagcagaccgagtgccgtgcgcaattggcagggttcacacttcacgtcggcttttacacaattgtccccattttcaaggggcagggttatcgcacaatcaaatgaatcaccgtttaccggtctggtctaataattaataagcttgaaaactgtcgaaatgcccctgtaaaaaaagggatcttttcctagctctcagaaaatcattctcacattttacaactttaaaagcatatgggaacaatgaccttggaattttcaatcgggtatggcttgactgcttaatgaggtttcttatgacatatggaagtatgcctccgtggttgaagtaagcaagttcgacctcaatgtcaaagcgtgctgtgcaagtgaaagattttgcattatcggttgtgactgtcacatgttggccaggcctaatctcattgataatac

SEQ ID NO: 16980 - DNA, 494 bp, Glycine max
  unsure at all n locations
  Clone ID: jC-gmle01810094e08a1
gtttcttctcccttaccatttttttctctcgtctctcaagcataataggttaggtgattgattctgttttcttcatagcaggatttttcactaatcttttttcttcttcctttgttgcctttgaaattattctctagtccttctggccaaaccaaaccatattacaaattgatgtctaatttgtacaatcagatttccttaccttcaccccaaggagccaattcaccaaacataaacatgagaggcaattttgatgttgatagtcagtacttaacggagctgctagcagaaagacagaagcttggacctttcatgcaagttctacccttatgtaccagactccttaatcaagagattttaaggtttaccggaaagaatgaattattgcagaaccaaggatttagtgactttgatagaatgcgattcataaatctgagtcatatggcttcccaaactcacaccanacttcactggctggaacagcctgtcacatg

SEQ ID NO: 16981 - DNA, 430 bp, Glycine max
  Clone ID: jC-gmle01810094e08d1
cacaacaatttcatattgatgggcattacaaatagagtgataaatagatcaaaatatagtttaatgttttttcttgtctagtgacattgtggcaatgaatatgttattctccccttgattttcgttctccaaatcggctgcatcaaatcaggaaggtcttttcattgcagctttacaaactttagttccaggaagctttcaggcattgcaacaattctcaacatataatcactattgctcagttttgactcgctttattacattagaagtgattggagaaacactgccactcatttgagggctctcttctctgaagttggaatcaagcatagcaggttcttttaaatggtgccttttcgaaaggtcctgggacttatccactggtttaagtcgctctcgtgtgatttactgtgcttgcatggatcttaca

SEQ ID NO: 16982 - DNA, 325 bp, Glycine max
  Clone ID: jC-gmle01810094e09a1
gaaaaaacaacaacgcggtgtcatcactggcgtgtccgttgctgagtgattacggttacagcgtggcgccgccggaagtgcaaccggcgaattggtttctgagagagtggttgagtcaggtaaggggaaattagaagaaggactgaggctttgcgcgcacattgggtgcggtcgaccggagacgcggccacacgagtttcgccggtgttcggtttgcggcaaagtgaattactgttcacgtggatgtcaggcgctggattggaagttgcggcataagatttgagtgttcgcccgtggaaatgtacggtgatggttgtgtttgatg

SEQ ID NO: 16983 - DNA, 486 bp, Glycine max
  Clone ID: jC-gmle01810094e09d1
gacaaataaaaagtatttccttgtattgcatgtaatgcattaaacatttagcaccgttgataaaattaacacggaaaccattttttaataaagaacttttaatcttagttgtccataaatatatatacatatatataaaagttactacctcatctgtacatagtacataccaactgattgacattttttttttaatttatagaatcgcttcttttcctctctattttcttatttttcaaccttagaaattgattctgtcgctgaaacacttcttcaaacggcatcgtttgggaccacaaactcattctccacatcaacaccaccatcaccgtacatttccaccggcgaacactcaatcttatgccgcaacttccaatccagcgcctgacatccacgtgaacagtaattcactttgccgcaaaccgaacaccggcgaaactcgtgtggccgcgtatccggtcgaccgcacccaatgtgcgcgcaaag

SEQ ID NO: 16984 - DNA, 469 bp, Glycine max
  unsure at all n locations
  Clone ID: jC-gmle01810094e10a1
cggctcgagccaactcctactggaagaattcacaaaggagtatgttcaacctggatgaagaatgccattcccttagagaaaagccgtgactgtagttgggctcctatttttatcagaacatcaaacttcaagttaccagctgatcattccattcctattattatggttggtcctggtacaggcctggcacctttcaggggatttttacaggaaagattggccctcaaagaggatgccgttcaacttggtcctgcattactcttctttggatgtaggaatcgacaaatggattttatttatgaggatgagctaaagaattttatggaacaaggtgctctgtcagagttgatagtcacattctcgagagagggacctgaanagagtatgttcaacacaagatgatggataaagcttgcaatctgtggaatgtgatgtctcagggaggttatctntatgtttgtggtgatgc

SEQ ID NO: 16985 - DNA, 515 bp, Glycine max
  Clone ID: jC-gmle01810094e10d1
catcaactagaagaattatttcattaatcgagtgcttattcattgccaattcctacaatttgatacatggccattggaaataaactagtgcgacctatacgtattaaatcatctatgaagctatctatcagtccccctaaaaataatcctagttcaaatatcatgacaagagagaatatcaaggcggcgaaaaatataagaaaaccacacaaatgtccacgaaaacgatttgctttctcaaggaaatttcagcctccatcattggtgtcccaaaactccgtgatagaagagtatcaaatatccttcaaccaatcttgaacttaacagaccaaatagcaaggaaggcacaacccagaaagatgaataatcagaaaatttaccagacatctctaagataacgtccatccatctggagttttttaactatagcctctgcctttgaagagtccacattttcctgctgctggacaatggtatgaagagtccgatgaacatctcgggccatgcccttagca

SEQ ID NO: 16986 - DNA, 404 bp, Glycine max
  Clone ID: jC-gmle01810094e11a1
tctctctctacaatggcctcagccgcagcccccacaactttctctctcctccactccaccaccccggcctcctcctcctccgccacctccgcctccccctcgcgcgtgcagctctcctcctccctccgctcgcgcccgctcgcgcgccgccttggcttcgccgcagcggacccgctgctcgcggcgaatgtcgcagcgcgcgtcgcagcggtgagaggaggaaagggcgcgaggggggtggtgtcgatggcgaagaagagcgtgggggagctgagcgcggcggacctgaaggggaagaaggtcttcgtcagggccgacctcaacgtcccgctcgacgacaaccagaacatcaccgacgacaccagaattcgcgccgccattcccaccatcaaacacctaatcca

SEQ ID NO: 16987 - DNA, 516 bp, Glycine max
  unsure at all n locations
  Clone ID: jC-gmle01810094e11d1
ggcagcaactaaaagatttattcgaatttatggctctcagccagggtttacagttacacgcaatttatgtgtgaagccaataataactcaagcatgataaaatttacactaacagactccgaagggtcctacaacatatgctcttttacaagattgacaacaccgaaatctgaggatggaaaaattttccaagctgaaaattgtcttacacggcaactgggacggcttcatcgagagcaaggactcctggaagctctttgccttccaataactccaaactggcaccaccaccagtagatatgtggctcatgacactagcaactcctactttctccacagctgcaacagaatctcctcctccgataattgtggtcaccccctttccactgagatcagccagcttctttgcaatagcctctgtaccaacagcaaacttgtcaaactcaaacactcccattggtccattccatatgatggttngggtagtatccaatgcttcactgaatgatttaacag

SEQ ID NO: 16988 - DNA, 317 bp, Glycine max
  Clone ID: jC-gmle01810094e12a1
ggcagaaattgctgttaagagtttgacggtgcataatttctatgttggagagggttcagacttcacgggtgtcctcacaaaaatgctgacagttaatggcactttacgcatgagcatctacaaccctgctacattttttggcatccatgtgcactccacacccatcaatctagttttctcagaaatcactgttgctactggcgagctgaagaaacactatcagccaagaaaaagtcaccgcattgtatcagtgaacctagagggtactaaggttcccttatatggggctggatccaccataactgtatcccaactgg

SEQ ID NO: 16989 - DNA, 536 bp, Glycine max
  Clone ID: jC-gmle01810094e12d1
cctcagtaatgaactcgcgaattgtttcttcattttatgcatatgcatatacaaatttacatacatgcatttatttgcacaaggctcataagagtaaagtacagagtggggattcagggggactagttgtatgtaagaagtattttttcgagtgcatattttgcttctattgcaaaccaaatggaccttatgatctgaagcttggcacaaaacacagattatacaattttaagctacactctcaaaacagataagctatgaaaatggacattgatcactgatcaatcataggtgcatgaattctttttgaatttgataggctttgatcgagaagagttgaggaccaaggggcaagtgatttccttacgatgccttgtcttgaccagtttacccactacatttccacgcgaacggatttcaaagttcaatgtgagtggaacttcaacaccagtttgggatacagttatggtggatccagccccatataagggaaccttagtaccctctaggttcactgatacaatgcggtgactttt

SEQ ID NO: 16990 - DNA, 515 bp, Glycine max
  Clone ID: jC-gmle01810094f01a1
tggatatatagaaattaaagacagatcaaaggacatcataatctctggtgctgaaaatatcagcagtgtagagatagagaatactctttactcacatccttcaatactggaggcagcagtggttgcaagggcagatgaaaaatggggcgagtctccctgcgcttttgtgacattaaagccaggagtggataaaagcaatgagcagcgtataattgaggatatactaaagttcagcagggccaagatgcctgcttattgggttccaaaatcaggtgtgtttggagccttacctaagacagctactgggaagatacagaagcatatactgagggccaaggcaaaagagatgggacctgtaaagttgagcaagttataaacatattgaaatgatcatgacgaataacgaactagttataaacatattgagtactttataaacatattgagatagcctatttgtgattgtgattctgcatacttatctataataatatagcccgaaccttttatatgtg

SEQ ID NO: 16991 - DNA, 404 bp, Glycine max
  Clone ID: jC-gmle01810094f01d1
aatggagaaaaatacacgttaaaaattatataatggaagccaggatggatttattgacttcaaaatagataagtgacacgttggtcttatccaacaactacttttgaaccacatataaaaggttcggctatattattatagataagtatgcagaatcccaatcacaaataggctatctcaatatgtttataaagtactcaatatgtttataactagttcgtttttcgtcatgatcatttcaatatgtttataacttgctcaactttacaggtcccatctcttttgccttggccctcagtatatgcttctgtatcttcccagtagctgtcttaagtaaggctccaaacacaactgattttggaacccaataagcaggcatcttggcccttgctgactttagtata

SEQ ID NO: 16992 - DNA, 528 bp, Glycine max
  Clone ID: jC-gmle01810094f02a1
aaagaatataatgctcaatccaaggacaatgtaattgcaattatgcttgataccaagggtcctgaggttaggagtggggatttgccacaaccaatcaatttaacaactgggcaggaattcacatttaccatcccggaggggtgttggaactgcagattgtgttagtgtgaactatgacgatttcgtcaatgatgtggatgtgggggacatgcttcttgttgatggtggtatgatgtctttggtggttaagtctaagacagaggattctgtgaaatgtgaagttgttgatggaggagagctcaagtcaaggagacatttgaatgttagaggaaaaagtgcaacacttccttccatcactgagaaggattgggatgacatcaaatttggagtggataacaaagttgacttctatgctgtttcttttgttaaagatgcacaagtagttcatgaactgaagaaatatttgaaaagctgtgatgctgatatacatgtcattgtcaaaatgaaagtgcagactctataccaaac

SEQ ID NO: 16993 - DNA, 452 bp, Glycine max
  Clone ID: jC-gmle01810094f02d1
ggctgaaagcatttttcattccaatttctaatcaaaatttcaatggcacctactatcatatgtctaatgtccgtgattaatatagaacaatcacccaaaaataatgattacaagaaagtaatagatgaagaaaaaatgaaaaacctaggcaacaaacaaacaactaaaatgccggacttagcaaattggcatcaacccaccaaaagggaacatgctcttctaaaattaaatatattgtcctgaaaggctgaaacttggttcatggccatcttcacctttttttattttggtttcactgttcggacctggatattgtgagtggattggaacctccatatgggttgcctgccactttgtactagtgctacttcttctcctgatttcaccattccttgcttctgcagcaaatccaaggcccttgtgaaagtctcttcagcatcttcagagaattc

SEQ ID NO: 16994 - DNA, 417 bp, Glycine max
  unsure at all n locations
  Clone ID: jC-gmle01810094f03a1
aaaaaataataataataataatagtaataacatcatcgtatcatggcagcagccactctctccgttcgtcccgaccgtctctcgcccggtgcggcgtttcccagaccgccggttcagcctgcgctgcgaaaaccaattcgcggcgcccgagccgtggcgcgccgtgccgccacgtatacgcatcaggacggtggcgccggtccaggcgagctcgcgcgccgatgactccgcgccgttcgagatgtcggtggagaacgcgctgaagctgctgggcgtgtcggagggcgcttccttcgacgacatactncgcgccaaaaacgcaatcgttgccaattgcaacgatgaccaagatgccattgcgcangttgaagctgcatacgacatgttgcttatgcagagcctaactcagcgtcgggc

SEQ ID NO: 16995 - DNA, 341 bp, Glycine max
  Clone ID: jC-gmle01810094f03d1
aaaagggcccccggacaaaaagggccccgggaaaaacccccttcctaaaaagggaggggccaaagggggggggagccccccccgaaaaaaaagggggggaagaaacccgccgggggaaaaaaaaaaggcccgggggaccaatttgaaaaaagaaccccccaaggggccggggccccaaaaggccggggaaaccccccaaggggggggaaacagggggccccccaccaaaaaaacgggggggggggcccccccccagggggaaaacaggctccccggggggaaaacacccggggggggcccctccgggccccaggaaaaaagcgcaaaaaagggcccccccc

SEQ ID NO: 16996 - DNA, 347 bp, Glycine max
  Clone ID: jC-gmle01810094f04a1
ataaataacaaaataaaaaaaaaaaaaatacaaagagaagagaaaagaaaaattaaaatggaggggaaggtgacaggatgtgtcgctggcagcgaacaatttcccggagagacagcccattgggacgaatggagacgggcccgcacgactgtaggggctaccagcagcgggaacaatctcctctgtttgccccgacggatttcacttttcttttctttgacagagtaaggatagccgagtttgcgggcacttttctgtttctatgcatcaatgtcttaaccgtcatgggagccgccggggctaagtctgagtgcattaccgttaagactggggggatcgcttgggcc

SEQ ID NO: 16997 - DNA, 473 bp, Glycine max
  Clone ID: jC-gmle01810094f05a1
ggagagggtgatgatttggagtctctcatacacaagcacgccctttttttcgataagttgatcgagttgattcccgccaagttctatctgccaactgatgacaaggagaagccatggtttcagggtctcagcaaggctgcaaaagctgaagcaaagaaagagaccaaggagaatatcaagaagtctcggagggatcgtttagaccctgacaaaccctctgcaactacccttgaccttctcaaggaaagttttggaaaagagaaggtggatgacagtgatgaagagcagggtgccgcggcgcctaggcctgttgtttctgggatgaaaagagatgatgggtctgtgacttatgaagagcttcagcaaaggcttcgtcgcaggctcgaagagtttcgtgcaagtcgtaatactgggaattcggataggaagagggatgaaagaaatgctaggagaggatataaggacaagaaacg

SEQ ID NO: 16998 - DNA, 475 bp, Glycine max
  Clone ID: jC-gmle01810094f05d1
gaaattgaaaactatatattaagattgagattgttgaaatgataaattggaaacagagcctgagaaagtttatactcagtttaagaaatatagtgaagcagagagaaatgaataggtgcatcttttaacccttgaattgggattctctaacactactgttcagtgaatagcaagatgataacgatgataagaaaaatcgacatacttcaagacccattttagctggatccaccatcatgcattaaacgttatttgcgatctttagagccaggccgtataagagcttgatcccttatggagatcatccgcattaagttgtcatgaatgctcgcagatgtatacttggacacttactgcggcatctctggcatcaactgtgacatcgtttgaattctatccttccatttcttcgcattcttatgcatgttcttcttctctttatgaatgctcttatgcgacagtgttgggatcatca

SEQ ID NO: 16999 - DNA, 428 bp, Glycine max
  Clone ID: jC-gmle01810094f06a1
ccgaggtcatggccgaccccgaggctcgaggcgtcgtcaaccgtgccatcaagaccttgcgagaggtctccaaggtctacgagggtgacggtaccaacgtgcctcctctcaagatcgccgagggtaaccacctcgtcaccaacttgatcgccgagttcaaaaaggccgacgccaaggagatcccggacaacgagaaccccgcgctcgtctacgccggtgtcctcgctgccggactcgtcaacgcccacaactatgaccagcagacttgggagtccaccttgtgcccttacctctccttggccgttcccggatacgacaacggtcccgtcgtccgagagctcttgcaaaagaaggccgacgaggagggtcaggacgaccgagtgttcgacgacgaggaggagggcgaggacttgtgtaactgtaccttt

SEQ ID NO: 17000 - DNA, 342 bp, Glycine max
  Clone ID: jC-gmle01810094f06d1
caaccaaatgtaaaagggaaatcgccttgagagaatttaaagaagcattccatgccccggattgctcaccgaaaaaattgatcgggacccgacacaaccagtggggctaaacggggcccttttatagcccgtcctggttggtggggacctcctcgccttgcttccttcgggccatcctttccttatttttttttcggacctcggcggccctggccttctgggccttctcgaccttgacgattttgttccccatggggtcaaactggccctcctcggcctcctttcgctggtaaattcgggccccggaaccctgaccgctttagacccaggcgagaccggaag

SEQ ID NO: 17001 - DNA, 431 bp, Glycine max
  Clone ID: jC-gmle01810094f07a1
gttattcaaagcatcagttatttgatttttcaatccagtccaaagacacacaaacaccttagaaaacacacaaaacatcaacaactatgggtaactgttgcggacctagtcagcctgaacgggagctatccaccaatcctccccaatatgcagggtacctctgatgatcctgaattaaccaaagtcgccacaaaaattcaagctaactaccgtggacatcaagttcgtaagaacatttccgctggccctgacgctctagacatcgctgggcagcaagttgaccatgagggcaatagtcagcatggtccaacctcagaaataagcagtagtggttaatgaaattcctaactacgcaaatcctaacactgcagccactctggagaagctaggtaccttcagctatgaccaggacctacccgaagactcgcaat

SEQ ID NO: 17002 - DNA, 367 bp, Glycine max
  Clone ID: jC-gmle01810094f07d1
cgggaagggccccaaaaaaatcaaagggcaccaaaaaacccaccccttatccccttataaaaccgtgccaaccaaaaaagcgccattttttttaaaacccttaactttaaaaaaattttccctttttattaacgaaaaaaccttttaaccttcagactaaaccccgagctttccaccgggccctttaaaaaaatatcccccctttaaaaccaatggagcttttttccctcatcccatagcccttccttgaccattcctttggcggaaagggaacccccctttccaggggggtttccattttcccaaaagcccttatacttcctaccattgggccggtaaaactccccaaaccctgggtttttatttt

SEQ ID NO: 17003 - DNA, 505 bp, Glycine max
  Clone ID: jC-gmle01810094f08a1
gtgtaaatcaattgaaagccctcatgtatatgcaattacggacacagccatccgagaaatgatacgggatgaagtgaatcagtctataattataagtggtgagagtggagcagggaagactgagacggcaaaaatagcaatgcagtacttggctgcccttggtggtggaagtggaatagagaatgagatattaaagactaatccaatactagaagcctttggtaatggaaaaacattaagaaatgacaactcaagtcgttttggaaagctcattgagattcacttcagtgaaactggaaaaatatctggtgctaatattcaaacatttttgctggaaaagtctagagtagtccaatgcaacgaaggggaaaggtcatatcatatattttatcagctatgtgctggagcaccatcatctcttagggagaagctaaatctactaagtgctgaagactataaatatctgaggcagagcaattggtattaattacgggagtgatgatgc

SEQ ID NO: 17004 - DNA, 509 bp, Glycine max
  unsure at all n locations
  Clone ID: jC-gmle01810094f08d1
gagtatctaactccacaactcgtgcagaagtttctcatacataagagtggctagcaacagctaacctaattacagtaaacagtaatttattcgccctactcctatcgtatctttcctattgtattttcctcattttccgatatatagttggcaatgcccttaaaacagtgcatagaccaaagccaaaccccaataagataaaataaataaatcaacttattcttgtactattccttcttccccaccaacttttcttcactttctcaatcgatccatcttcactcccaagtttatgtaaaatgacctttgtttcacgtagtcttgcaccataatcctttttccaagcttcaaacatttgttttaaccttctaagctctctatctgggttcaaacttgcttcaacttgaccagattntacctctaccaagaatttagaatcatcaccaaacacttgactcctttgctcaaattcttcagccaaccgacttattacactcaaaccagcactc

SEQ ID NO: 17005 - DNA, 451 bp, Glycine max
  unsure at all n locations
  Clone ID: jC-gmle01810094f09a1
ctcttttgttgtaactcaagagttgctgttttttttcctcgtgacttctgatttgatttccaccttcactcaagttctctttcttctttctttcccttttatttttttattttgcctatgtttctttaaattttaatttgtagttttataccatatgtgtgatttttcttatatttttgtacaagatttgttgattcaattatctgagagttccaagtactttgttcattgtgaagcaggttttaattgggaatctgatataggctttggaggttcttccacttccaaggatgctttcaattatacactacagaggatttttcagcgattgagtgagtggatatgaacatggaaggatcttatgattcatcatgcaatggagaagcttgtaacngaagccttcaaatcattaaatactcttcatatanaccctgcaccatgatatcattat

SEQ ID NO: 17006 - DNA, 535 bp, Glycine max
  Clone ID: jC-gmle01810094f09d1
atatatacctgcatcactattccatcctgatattgaaaaattgacaatgacaatgttgctgtttaaaaaataaactacctcctcaactataaaaattaaaaactataagccacttctggtagcaatattttttttgaccatttacatgaaaacgctttttatgtgctagttacaacctacacaatcaatcacacaatggatgtcaacccatcatgatgacaaaatttaagcatctatgccatcctttgaaacaagaacattctttaaagacttatgaagggggaaaaaaataccactgatggtttgttgccttgaagatatagagcatataagttcaaactcttgaggggtatattatatgaacctcctcttaaaattacgagtagttgcttggtatgagcgtactaacaagctaactcctataccaactcctacacataagccaagcccaattccaacaccaactcttacaccagcattaaaccatgatagttcaccatcttcctcatctacatatattgttctttggcaatac

SEQ ID NO: 17007 - DNA, 366 bp, Glycine max
  Clone ID: jC-gmle01810094f10d1
ggcaaaaaaaattggtggttctgtttttcagtaccagtttaaaagaaaaatgaagcaccaagtgttgtaatgggagtagtcgtactaaccatccaaaattaccacggcttggggcatacgcaatggattacttacccttggaaatttggttggctctcacttccatttgttgggcacaatttcggccaaatccaccaccctttgggggttgccccattcattggagtacctagcaacggccttcacgattgggattgccattaccgaggctcacgaggagtcaacggttgtgggcccattagggctcctgaattcaacggcctcaattgggtcatatccccccgaggggattcccttgagcccatt

SEQ ID NO: 17008 - DNA, 532 bp, Glycine max
  unsure at all n locations
  Clone ID: jC-gmle01810094f11a1
gctttgcttgatttgtcgaacttcatatttgttacgcagactccgcatttttcactttacagtcattcttagtgtcagctaagaccctattttattctaattttcttgtaatcatgggcgttgacgttgaaaccatatcacccggagacggtcatacctaccccaaaacaggacaaactgtcatcgtacattataccggaactttaatcaatgggaaaaaatttgattcatcgagagatcgaggccaacccttcaaattcaaaattggcaaaggagaggtcattaaaggatgggatcaaggtgtagccaagttaagtgtgggtgaaagagcaaaactgacttgcactcccgactttgcctatggttctcgaggccaccctggaatcattccccccgactccaccttaatnttcgatgtggaacttctgaaagttgaataatcaatattcttcctataatcaatataagccaattctttgatgcattttaaacaaattaatctanactgattaagtttttgcacttaatttct

SEQ ID NO: 17009 - DNA, 444 bp, Glycine max
  Clone ID: jC-gmle01810094f11d1
atattctgggccatgaatgaaaagaataaagcttttgagttccgaaacccaataatgctacggctataccatctttacaacataaattaccagcagcttcaattatttctgactagcatcaaacgaaaaattgtaacaagggcggtaagactttaacgttattcagtccttgcagatcagtttattaaaaattgagtaaatcaagtttgatgggagtttctgaccagaatctcaattttcatacaatgaaaacaggggttaatcagttgaatcaagactatttaatgaaacaaagaatgatccacaataatagaagaaagaaatagtaaaattgaaacagaggtacaaaacacattatgggataaaaaaaaaggatacaattagtaaaagtattggaggacaaaagggcaactgacatgattaaaaaaaaaaaaagaggggggg

SEQ ID NO: 17010 - DNA, 303 bp, Glycine max
  Clone ID: jC-gmle01810094f12a1
ccacggcttcatcagatcacacaattaagataattggggtcagcaacacggcctcccagcatctagcaactttgactggtcaccaaggacctgtatggcaagtggtgtgggctcaccctaagtttggttctcttcttgcgtcgtgttcctttgacggccgtgtcattggttggaaggagggtaaccaaaatgaatggactcaagctcatgtgtttgatgaccacaagtcatctgtgaatttcggtgcttgggcgcctcacgagttgggtctctgcttggcttgtggctcatctgatgggaata

SEQ ID NO: 17011 - DNA, 556 bp, Glycine max
  Clone ID: jC-gmle01810094f12d1
aaaacaactcaaactaatcaactttcattcttccaagcacagaatactcaatggatcacaaacgtcaaggaactagtggcattatgaagcacaattaatcaactgtataatatgcaaagaaacaagatgtcaactatatttcaaaacgaaaactctaaccattttcaaaacgaaaaatcacattctaaggctccactgtagtcacctgttgccattccccatctactgcttccttccacaatgtcacattgttgttcccatcagccacagccagtatgtttcctgtcaatgaccatgagacccttcaaacaggggtcttgaaatcattcaaaaccttgccttcccactgatctccctctttcgccacggtccatatgatcactttaccatcctgcgatgcactagcaatggtagatttaggaagccctaaattgggtgcccaagcaacatctcggacccaatccgtgtgcatctgaagagcagggaagcagtccatctttcagagtccattggttaacttccataccttcacagtttatcacaaccaccagagcac

SEQ ID NO: 17012 - DNA, 494 bp, Glycine max
  Clone ID: jC-gmle01810094g01a1
ttcacaaccacaattgtagcaatgaatccatagacgatgctgaaaatggaagtagtggggctggcaatgaaaagacaattcaaaagaatgaaaacctcctcctgaattggcccttaatgtcctctatcatcgcataattgtgttttctcacttcatgatattacttatacagaggttttctcgttgtggtctgttagtcctcaaaggatggggggtttgaactttacaagtgatgatgttggtaatattctttcaatatcaggtgttgcacttatcatttaccaacttaccttatacccatctgtggaaaaagctagtggacctattggtattgcccgcatctcagcgatgttatccatacctcttctacaaagctactccttcatagcattgttgtcaggcttggcactatacatagtgttaagtattgcttcaattctgaagaatattctgtctatcaccattgtaactgctttgttcctactacaaaaccg

SEQ ID NO: 17013 - DNA, 558 bp, Glycine max
  unsure at all n locations
  Clone ID: jC-gmle01810094g01d1
gaagaaaaaaggatcaatattttagcttttatttttttggagttacaaattgaattggtaccacctatttagctttaataataattagtccgcatgataacatactcaatgcagcaagctaccatcgctgtcccaaataataagcaagaaataacaatagctcaaagagatgctacatatgcctaagcaaaactgataggcatcagtgtaactgatctgagtgccttttcttcttttcagcaaggaatggtttgaacaacatcaataatccaagtgcttcaactatgttcaaggcaaagaagaccatatgggtgcctgggagaaatgaagcatccattcgcttttgtgaccaagttaatacagcaccacctgcagcagggccaatagcattgaatagagacatgcctgtcacagcaatgccattagctaccccttttggtgttgttccactgctcggttttgtagtaggaacaaaccagttacaatggtgatagacagaatattcttcagaatngaagcaatacttaacactatgatagtgccaagcctgacaacaat

SEQ ID NO: 17014 - DNA, 519 bp, Glycine max
  Clone ID: jC-gmle01810094g02a1
caattttagagcaagtgttgatttgcagcgcactcatcgtattaaaggaatgattaaaatggtggccacagttggtattcctgagaatacaggtatagcattggcctgtgctatgaatagttcttttagggggccgtgccagttctgatatttacaccatctgctctcaagactgtgaattatggaatcctgcttgcacaaaagcaatgactatgtcatttaatccaaacccgtgttctgatgcatggagtttggaatttctgaagcgtaccggatttcattgagatatcatatgtgtcactggatggactgccactccaatgcaggatgttcaggttacaattgattggattatttcctctaggaatgtgttcccggacttattgtgttttaaatccacaaaatccttttgtgttgaataggtggatggggaaactgactatgcccaggcactatccgagtgttaagagatgcctcttctataggggaggagctggtgcaaagatgctattctatgaa

SEQ ID NO: 17015 - DNA, 345 bp, Glycine max
  Clone ID: jC-gmle01810094g02d1
aaaaaaaacccccccctccacccagtttgccccccacaaaaaggggggggggaaatttgaaaaagccaggggtcaccccaaaagggggggcgggttaaaacccctgatggggaaaaaaaaaacagaccagagagagaaacccccaattcagaaaggagggggggggcccccttttaaaaaaaaaggggggagacccgggggaaaaaaaaaaggggcgaaaggaggcccccccgaaattaaaaaaccgggggaaatccccaagaagattataaaaccgggacaggggggggggacggaacaggggaaacccaagggcccgaaacttcgatggcccccccaaaaacc

SEQ ID NO: 17016 - DNA, 525 bp, Glycine max
  unsure at all n locations
  Clone ID: jC-gmle01810094g03a1
cttttctgcaagaaaacatttcagggtaacccatgccctccttatctggaggcagtttgcaggaatatcttaaaaatgtgtggggggttgccactggcaattgtggcaattggtggtgcattggctacaaaaaaccagggcaaacatagaagagtggcagatggtttacagaagttttgggtctgaaattgaaggcaatgacaaactggaggatatgaagaaagtgctttccctgagtttcaatgagttgccttactatctcaagtcctgtttgctgtacctaagcatatttcccgagtttcatgctattgagcacatgcgattgattcgcttgtggatagctgaagggtttgtgaacggagaagatggaaagacactggangaagttgcagacagttacctaaggagctcttgacagaagtctgctgcaagtggtagcaaaaccagtgatggcaggatgaagacttgtcgcatgcatgatcttctaaggagattgtcaatttgaagtcaaggatcagaactttg

SEQ ID NO: 17017 - DNA, 401 bp, Glycine max
  Clone ID: jC-gmle01810094g03d1
aagaaacctaaaaattaatattaggccccctgattaattgggccaaaacatgaaaaaatttacaggggggactcaggggactgcaaaaaaaacaaaatcctacattcacttgcatatgcaagctgatgtccaacaaaaaatgggcatcactaacacatgcaagtttgtaaaaagaaaaaatcaaggttaaaccttccagagggcccaaatttaaagacttttttttgcagtcccaaaacgggaatcactctttttttttccaaagggctttaaggggtagacatcccaacccccatccctccaatgggggatataaacgggggggaacatgttgactctccaataatcctcacctccattgggacccagggctgaaatcaatttttcgggcatatcaaaaa

SEQ ID NO: 17018 - DNA, 503 bp, Glycine max
  Clone ID: jC-gmle01810094g04a1
cacaagtctcggcacaccttcaggcgaccgatcaccccttacagatcaacacgacgttcttgctactcagtgcagagcgatccggctcccagttcctagtcctcaacagcagatctttcacttcttcatctttcaatctagcagctcgacgctcaaagaccatgcctcctaaaaaagccgccgctcccgagaagaaggctctcctcggaaggccttcgaacaacttgtacgtcggtatcgttggaatgcccaacgttggtaaatcctccttattcaatactctcactcgatgtgatctcggaaaggttgccaacttcccttacgctactatcgaacctgaggagactcgtgtacccgttcccgactctcgcttcgactggttttgcgacctctccagcccgcttcgaaagtaccagcagtcctcacttgcgtagatattgccgtttgacaaaggtgcttcgaccgagctggatggagaaacacttttggcaaacgttcgagct

SEQ ID NO: 17019 - DNA, 538 bp, Glycine max
  Clone ID: jC-gmle01810094g04d1
gggagcgaaagatgtatatattcaagacgtagggtgagaggagaatgctatgtatcgagaaatggcgttcacaagccaaaggaaaatacaaaacatctccgagaggtatttttggggggttgtatgcggaaaggattctccgattaggcgttgtgcttccagtgagcgatatctccatcgaccatctcgtaaggctttcctttttgttgaagtttaccagcagccttgacagcagtttccgaaccgtattccttgaggtcatcaaagttcatgatatcaccacagatgaagtgcttttcgaaatcagtgtggatgacaccagcagcttgaggagctttagttccttcccgaatcgtccaggctcgtacttcttgaggaccgcaagtgaagtatcggatgaagttgagagcttggtaaccagcaaccatgattttacctaattgaccttgagtgttcaatttcgtgaactcctcgactcgaacgttatcatcttcgaattcttgcaacatgcgctctttcaacgcgaccgagaaaggaa

SEQ ID NO: 17020 - DNA, 278 bp, Glycine max
  Clone ID: jC-gmle01810094g05a1
ggcggatataaaaaaagccgtgttctttgtaatcgctcaatgcttcaccttttccgcatatgctgcaaggttagaaatcacaaaccgatgcacatacactgtctgggctgagtctgtgcctggtggcggtggccttcaattaaacccggaccagtcatggtccgtggacgtgcctgcaagaacgaaaggggcccgcgtttgggccacaaccggcttgatactttacggttcgggccgcggtggatgccaaaccggtgactgcgggggtgtcctacact

SEQ ID NO: 17021 - DNA, 480 bp, Glycine max
  Clone ID: jC-gmle01810094g05d1
cattgcccaaagagtttaatatattattcataagtaccccatttcatttagaatagaagtacacacatcatagacgaggaggggcacgcaaagtgcacacgccttatgtaattatattgatctttattttagtgcatatattatatattatgtaaggttattgggttcaaggacaaaagacaaccctatagtcagtcccaccattacaagtgaaggtgctagttggatcatccttggggtaactataagcattggggcacctttgcttgaagaatctggaataatcagtgggcccacagctaccggaattgcaacagtgctggtcggttttgaagacagtgcaagggttgatgcaacctccttgaggctttagctcactagggcactgtccgttaatgtccgcagtgcagtttatgccacgtgtgcatccattcgaggttggactaaagtccatgggcaacgttaaaccgttgacgaggg

SEQ ID NO: 17022 - DNA, 514 bp, Glycine max
  Clone ID: jC-gmle01810094g06a1
gaaacttaagctccagttatttccaattgatgaacctactcgaagagcattggaaatggataagcataatccacacctggagcttacacttagtactcgaaagaagatatcatcaattttagaacatctaaaccgtaaatggggtaattcaagcatagcagctggagaagtaatgctttttccttatggtattcaaagggaaaatttagttaattatccgagatggacccaggaatctactcttagtgcagctgatatatatgcaatgattggaagtccacccatcttccgtttaaggtatggttggttctccaatactgagcttgggttattaaatatgcaagtgcctgaagcatctggctccatgctcagacaatacaaaagtagtgtggacaatgctaaggatccgattgtgaattcagtttcatttcctacaccattgactaatactctttccatggagctctctgaagattgcagaacatccatgaacagaaaccatactcttatgact

SEQ ID NO: 17023 - DNA, 349 bp, Glycine max
  Clone ID: jC-gmle01810094g06d1
ggggggggaaaaaagggttttttaaaaggcccccttcaaaaccccaaaaaaaaaaaaaatttgggtcccccaaaaaggggattttttacccgggcaattaaccccccaaaaaccttttttttggaccaaaagggaaatacccccaatttaaaaaacctttcccgggaaaattggaagggggccaaaacgattttttaaaagccccccccccaggcctcatggaaaaaaacggggaatcttaagaaaaacccaaggggtttttcccccaaaggggaaaccctttcccagaaccctttattaaaagttcaaaaagccccttccaattgtaaaaacggaaaaaggggggatt

SEQ ID NO: 17024 - DNA, 482 bp, Glycine max
  unsure at all n locations
  Clone ID: jC-gmle01810094g08a1
tgcatgcatggtggtctttcccctgaactcacaaacttggatgaaatcaggaatctacctcgtcctactgcaattcccgacactggcttgctttgtgatttgctttggtctgatcctggtagggatgtgaagggttggggtatgaatgacagaggagtgtcctacacctttggccctgatatggtcgctgaattcttgacaaagcatgacttggaccttgtttgtcgtgctcaccaggttgtagaggatgggtatgaattctttgctgataggaaacttgttacgatattttcagctccaaactattgtggtgaatttgacaatgctggtgcgatgatgagtgtggatgaaaacttgatgtgctcatttcagattcttaagccctgcagagaaaaaatcaaagtttgtgatgtcaaacaagatgtgatggntgggacatcactgtcaagtaattaacaagatgtattcgtggggtaaattaa

SEQ ID NO: 17025 - DNA, 484 bp, Glycine max
  Clone ID: jC-gmle01810094g08d1
caaaccataaaatccagcaattgcacctttactaactgaataaaattggccacaatcacaaactgctctatcagtgtaaatcgatagtctaagaggacctttcagagcaaataaggtcatttccacagcatctacaacacatatatgtacatattgtgttgcagaataattatgaaacaaggaaaaaaataaaaataaaaagataaaagcctttgcttttatggccatccaatagtgcttaatatctcttgtagtccctcatgctctctgcctgactggatgttatagcagtaaacttgcctcttcatcatcatcacctagaatagatggaacttaagaccattcaatctaaatcttcaggatttaatttaaccccacgaatacatcttggttaattacttgacagtgatgtcccaaccatcacatcttgtttgacatcacaaactttgattttttctctgcaggcttaagaatctgaaatgag

SEQ ID NO: 17026 - DNA, 256 bp, Glycine max
  Clone ID: jC-gmle01810094g09a1
gttggcaaaagacgaactggcagatcaatcagcattctagatatttatggctttgagtcattcaataggaacagttttgagcagttctgtataaattatgcaaatgagagattacaacaacacttcaatcgtcatttattcaagttagaacaggaggaatatatccaagatggaattgattgggctaaagttgaatttgaagacaatcaagattgccttaatctttttgaaaagaaaccactcgggctactatccc

SEQ ID NO: 17027 - DNA, 486 bp, Glycine max
  Clone ID: jC-gmle01810094g09d1
aatgataaaaataataattttattattattattattattattatttacagttacatttataaatctcacttaaatgtagaaatatccacaacccgtgtaatgctgaaaaactcgctattttttttacatgcaattcacataccaaggcgtggggtgatgatttacatgactcacacggttcgtattgagtatctaactccacaactcgtgcagaagtttctcatacataagagtggctagcaacagctaacctaattacagtaaacagtaatttattcgccctactcctatcggatctttcctattgaattctcctcattttccgatatatagttggcaatgcccttaaaacagtgcatagaccaaagccaaaccccaatgagataaaataaataaatcaacttattcttgtactattccttcttccccaccaacttttcttcactttctcaatcgatccatcttcactcccaatttatgtaaaat

SEQ ID NO: 17028 - DNA, 444 bp, Glycine max
  Clone ID: jC-gmle01810094g10a1
tgaacaccagaagttaccctttgcctccaaaaaccaacctaaggtatgtttctgctttgagtttgaagcaaataattcatgcaattctgtgactgacaggaagcgaaaatgaaagagattgtgactgtccaagttggtgatttcgccaacttcgttggttctcacttctggaactttcaggatgagttgcttgggttggctgggaatccctctgctgattcagtcttcaagaatcaggatcttaacatggatgttctttatcgtactggtgagacacagcagggtatcccttcatatactcctcgcctactttcaataaacttaagaggatcccttggatctatgagttcacgtggtacgttgtatacggagggtgctttcacaacaccagatgttgtcacctggactggtagagtttccacccaagcctctgaaccttataaa

SEQ ID NO: 17029 - DNA, 462 bp, Glycine max
  Clone ID: jC-gmle01810094g10d1
gggaagaacaacgcatatattctaatctgaatctgatgacaactgaggaggatgcaatgccgctaccattttagacaacatctcttccatttccaccaattcttcctggccaaagccccaactcctaagtaactcagcccccgctgctcctcgttgaattccaaactgatgaagatttcgcagcttactctccaagagtggtaacacaatactgctagatcgtaatctggcagccatgggaatggaatggatgtcgagggatccttttggtgaagaattagtaatttgaccactcatcaattcaccgtgctggccaacattgttcccaaatattgatggaaaaggcaaggggattggcaagggactaagagcaacagatagatgacagaacattggccttgaattggcacatcgaaaagcagcatcaacggtatcctttaccttaccaactgaagcacgatg

SEQ ID NO: 17030 - DNA, 526 bp, Glycine max
  unsure at all n locations
  Clone ID: jC-gmle01810094g11a1
caactcccttctccttctctgcacctccctcgctctctccttcactctcctcctctcccccgccgactccgccgccgcctttgttgtcacctccccaaggaagctccagtccgatgaactcgccaccgtccgcctcttccaagagaacactccctccgttgtctacataaccaaccttgctgtcaagcaggatgcgtttacattggacgtgttggaggttcctcaggggtcaggatctggctttgtttgggataaggagggtcatattgtgaccaattatcacgttatccgtggtgcctctgatctcaaggtcactcttgctgaccagtcaacttacgatgccaacgttgttggttttgaccaagacaaggatgttgcggtgcttgcgtgttgacgcacctaaagacangctcaggcctatacctattgggggtctctgctgacctgcttgntggtcagaaggtttatgctattgggaacccgtttggactcgaccacacactcacaactggtgtcattagtggac

SEQ ID NO: 17031 - DNA, 404 bp, Glycine max
  Clone ID: jC-gmle01810094g11d1
ggccgggggaaaattttttagggtaaaaaagggaaaagttaaaagggggaaaacccggcagccccaaggaccaaatggcccccgggccccgtttttaagaagcaagaacccccccaaaaaaccccatacccagggggattaattccgggcctaaaaaagggttaacccccccccaaaggggggcgggggggaaaaggaaaggcctttcacaagggatcaaaaggccttggccccaaaaaggcggggattttcccccggggggcccctttaaaaacccccccaatccccttttccccccctttacacggggcaaaaattctggaaaaaacactcccctttgaaacccttttaactttccccggggttatggggccccccaaaagggggccccccaaaaagccccc

SEQ ID NO: 17032 - DNA, 512 bp, Glycine max
  Clone ID: jC-gmle01810094g12a1
gcagtttcctatagatctagagcagtatgatagaagagaacagctgaagaagagtggccttggaaaggtcattatgtttctatcgaagtctgatgaagaaatcaatgtgaataggaaactagccaaggagctggttgataagtggagccggcctatatttaataagagtacccggtttgaagacatgagaaatgtggaggatgatagggttccttataggagaccatcagttaaaaagtactcttatacctatcgatcttcaattgcttggcttctgctgcatttgttccaacatgttaaatttatacaatttggttgacgtcttacaggccggcaaataaagctgcaggaatggaatctaagacagtgatcttgatttagaactttcacagcctaggtctggacagtcctcttctaggcagcatgcatcaaggcccggagcaacacctttggattttgtggtccgcccccagtctaaatgatccagagaaatagagcacgagcaaacaagc

SEQ ID NO: 17033 - DNA, 448 bp, Glycine max
  Clone ID: jC-gmle01810094g12d1
gataaaacaagcttgattattcaattgaaaaataaaaatcttaaaacatgtacacaaccgtccagtgtattttggttggtattactgctgcagcgctgcactacaaagattacttgtaccaaggacgaatgcaaaatccacattttcattaaactgatgacaagcttgactatatatacgaatgcataaccgtccaatgtattttggatttcctactgcactagatgaatacccaaatgcagcatacggatggtattttcataacatccctctccatcaaatttccatgtagatcactgaacgaatagcccacctttagaagaatccacatcaatgcaggcagcacattatatgaaaagcttgcagcaggacaaacaaacccatccagtttcaacgtggtcacatttataaatatttgatcataccacgacctttcacgctcagtttt

SEQ ID NO: 17034 - DNA, 448 bp, Glycine max
  Clone ID: jC-gmle01810094h01d1
accaacaaaaaaaacccaaacattaaaaaaggcaaagggaaacctaaccgggaaaatctaaaatggggaaaagactcccttaatcaaaacgaacacttaaacaaggcgcggtttggtttcaaaggccccaaaaaactaaaagcccctttgccccaggccaaagggaattggccaaaacccccaaacagggcctttatacaaaaacccaactttcactttcacttttaaggaagggagggctaatcaagcgggcaatttttaacatttaaacttggactttccctggaaacacctttttaaagttctaaacccaatttaaagcccccttggcggaaggggcccgaaaaatgctggccctaatggaagcccaaaaccctttgaggacctgggttctagccatcttgggagcccccaccagggctttcctcttgggggaaactttgcgggg

SEQ ID NO: 17035 - DNA, 604 bp, Glycine max
  unsure at all n locations
  Clone ID: jC-gmle01810094h02a1
taacaattcaataagaggagaaagaacactcagtttaattagcaatggaattgaagaagcattttcttttatgccaagaaggaattggatgctgataagtggtatcgattgatctgccattttctgtgggagacttgaaaaacgatgccaagccagctatggttttctctgccaatgatttacaagaatggaaagattttcccaaagggctcaaggttcttctccttgagagagacaacatttctgctgccgagataagggcaaagcttgaagccatggactacaatgtttctacattctgtgaggagaatgaagccttgtcagcaatctcaagtggactcgacagcttccacattgccatagtggaggctgagttcaagcagtggccagggaggtttcaaatttcttgagaatgccaaggacttgccaaccattatgacttcaaacaatcattgcttgaacaccatgatgaagtgcatagcgcttggtgcagttgagttcctcagaaaaccactatctgaggacangctcagaaatatctggcagcatgtggttcacaaggcattccatgccagngcaaagcatctgtctgatcacttaaacc

SEQ ID NO: 17036 - DNA, 510 bp, Glycine max
  Clone ID: jC-gmle01810094h02d1
gtgtatgtggagaagcaacactctcacccttggaagcatcaacaatatccacttcctccttaaccaaagtaatttcagatttcctttgttgaggagtactttcaacttcctccctaaccaaagtaatttcagatttcctttgttgaggagtactttcagcattcaaattaccacatgtagtttcgacagatttagattctccttcatgttccccactttcttttcctgtggagcaattagtctgctcttggcaatcaccatcatccaacaatctcgtcccttgtctcaattgtggggttgaaggagctggatatttatcatttccagaagacaactcatgatcattatcaacaaagcgggatactttctctatatccctggatactctactttcatgttgttcatcgtctgtttggagctgcaacatggacactacagattctttgacaggtttaagtgattcagacaggatgcttgccctggcattgaatgccttgtgaaccacatgct

SEQ ID NO: 17037 - DNA, 372 bp, Glycine max
  Clone ID: jC-gmle01810094h03a1
cacaaaaatacgaacaccctaatgtgctagctcacgccgcacccatcaacaggacgctcttggtactgacagccccactaatcggctgccagctgctacttcttattaacagaactcgcactttatcattttctgattaaacctcctcgacgtttatataccacgcctcttacgtcagccgccgatccctataggcccgttctcctccgaacgcattctcacaatgtgcatggtctcctcctcgaactgccccgcgatgctacagtcttcttacgccgtgctctgactcacgcggagctgctagccgctgtccactacccttacactgcggttgctctggttgcgactcgggacgcgcctgctcgagtctcg

SEQ ID NO: 17038 - DNA, 348 bp, Glycine max
  Clone ID: jC-gmle01810094h03d1
aggaaactggggatggatatctatatgacggaaggtgagaggggaatgcacaagagtcgagagatggcacatggacgccaaatgaaaattctattcatctacgtaacggatacagggggggacctatagggtaagaattttacgatataagatgaagcgcattcactgagcgattattccaacgaacatataatcaggctatacttattgctgtcctgcaccactagactatactgccgattcacctgcgccatgcttgaagtgatcaacattaatgagggcacccactatgaaccgcattttgcaataaccaccgatggtcccatcttatagatgagcaatagaacc

SEQ ID NO: 17039 - DNA, 550 bp, Glycine max
  unsure at all n locations
  Clone ID: jC-gmle01810094h04a1
atttttctttctcccttcttccttcacatccattgctctctcttctctcacccaacaaaaactcattccttttaagcacaatagaagaagaagaacaacaacaacaacagcagcatatctcagatatcatcatggcncgttgaagcgcgccatctcaatctcttcccttctcaactcatcaccaaccggcaagtgatggattctggtgaggcgaatatgatgaacatgtacaacaacagcactccgattggtggttactcttcgtttctgccgttatccggcgccgtcacggagacggcgcttccgtcctcggttttcaaccattctctcgccaacgccgtcaaatccgaaagcggcgttacctacaacaacaacaacaacaacaacaacgtttctgtttctcccatgtcgagaaagcgttcccgagataataacaacaattacggttacaacaacaacaacaacgattcattttcgtttctcgccaagacgtttctctcagatccagcagcagcaactcgacatcgagcatttaaatcatgcacgcatg

SEQ ID NO: 17040 - DNA, 440 bp, Glycine max
  Clone ID: jC-gmle01810094h04d1
atgagattgagttgagacaaagagatgattctcattaaggtcctagagtcctatcttatccaaaaattaggacatgttaacatgcacactagcagtcttataggatttacaaatgggacaaatgtggagtgaagacccacacacagtacacaagcacaaatgacggcacgggaaaatcagcacacaagactcttccttcctacagttcctgcacaacctcccattaccaccaccctgcttatccttcacccctgcgcaccccgctaacgtgcgccaaccccgcgtttgcttttctaaaccggcctactcggtgctcccgcagcaggactcggcgtcgtccatctacgcgccgtcggacacggtggcgcctacgacgacgtcttcctacgccgacattccgacgcgctgcgcgagaacctgctctaaattacaccgcagag

SEQ ID NO: 17041 - DNA, 566 bp, Glycine max
  unsure at all n locations
  Clone ID: jC-gmle01810094h05a1
gaaacttaagctccagttatttccaattgatgaacctactcgaagagcattggaaatggataagcataatccacacctggagcttacacttagtactcgaaagaagatatcatcaattttagaacatctaaaccgtaaatggggtaattcaagcatagcagctggagaagtaatgctttttccttatggtattcaaagggaaaatttagttaattatccgagatggacccaggaatctactcttagtgcagctgatatatatgcaatgattggaagtccacccatcttccgtttaaggtatgngttggttctccaatactgagcttgggttattaaatatgcaagtgcctgaagcatctggctccatgctcagacaatacaaaagtnagtgtggacaatgctaaggatccgattgtgaattcagtttcatttcctacaccattgactaatactcctttcatggagctctcttgagaatgcagaacatccatgaacagaaaccatactcttatgactgcttcaactgatttgtctaatgctagaggaaacaatgtttacctgaatac

SEQ ID NO: 17042 - DNA, 282 bp, Glycine max
  Clone ID: jC-gmle01810094h05d1
gggggcaaaaaaaagggcttttaaaaaacccaagtcaaaaagaaaaaaaatgcaaaaatgtcggggaccaaaaaaaggggattttcccacggggaaatgttgactgggagaaaaatgttttttgcaaaaaaggaaaaaggcccctttctggaaaaaataacccggaaaaataggaaggggccaaaaagaatttttaaacaggcgcacccgagggcctttaaaaaaaaaaggggaaaattttaaaaagccccaagggggcccccccaaaaagggaaaaccact

SEQ ID NO: 17043 - DNA, 540 bp, Glycine max
  Clone ID: jC-gmle01810094h06a1
cgcagcaaatcaggaatcagttcacgttgggaaaaatgaaagttaccagcaatgggattcgcttaccgccaaattctccgctgccgccaattttccctttctgttactgcaaatgcctcaaatcatactcaatgctcgaaatctgttatcgggaaataaactcgctctctccgctgtcccctggctgggaatgctaactagtttgcttggaaacttgtctctgctttcatactttgccaagaagagagaaaaggaagccatggtagtgcagacgttgggtgtggtttcaacatacgtggtccttgttcagctggcattggctgaaaccatgccgatgccttactttttggctacttaagctgatgtcatctctggccttgttctgaatttcttgaattactttggtatactgaatgctggaatctggcgcttttgggaagatttcattacaagtgggggtttatcagcgcttccccaaataatgtggtctacatttgtcccctatgtacctaacagcatcttacctggggccactttctt

SEQ ID NO: 17044 - DNA, 487 bp, Glycine max
  Clone ID: jC-gmle01810094h06d1
aggaagggtccaaatggtaccccaaacatgcacttactcttcatgtaagtggattccttgccatggtattctaaaagtggcatctacaaatatttgaatgtaggaatatctaaacaattaagagggatgagtttcaccttgaacattacattattacaatcatatcctccaagttcaatgcagtcctatatcacagcttgtatgagaaaccacttaaaacgcgcattagttacacaacaacaacaacgggcccgttaggcccgtcatgaataaaaaaaaaagttgcaacaacaacgtactcattttcaaccccatgatgtgcgaagtggtattgacaacgaatttatgattcaccgtactcatttccaaggtagtgtatattttgtactgtagctgcagtgacaatcaagcctaactatttcagcagaaaggaccgggtaactgagctttagtgcagaatcgcaggctttaatttcacgatccaaaa

SEQ ID NO: 17045 - DNA, 272 bp, Glycine max
  Clone ID: jC-gmle01810094h07a1
ccttaacacaacaacacgatgatgtccatcttcagccacttcgagatcgcgcaggcccagaactggagcttttctttgctcccagtaaaaagcacgaattcgaagcccaacacagaagccacttcctcctccgctgagtccaaaaccgccagaaaagtttccaatctatcacaacccggtggatccaagcaaaacccgccccgtttgaggcccagatttgcgccggagttggacgggttacactgctttgaatccattgtaccctgctagat

SEQ ID NO: 17046 - DNA, 441 bp, Glycine max
  Clone ID: jC-gmle01810094h07d1
aatcataaatttgtctatcaaaattttataacgtatttttttataaagaggggaaatggataaaaagccattaagtttgcaatatcttgaactttgtgaaagttcaaatgaaaggatcaggaattaggaatatttaacacaacaagcatccttcattctatagttctgttgtaatcagccttttttttttttgtcgtcgtcgttaagaagttacattatcccatgttatatcatctgaatttttgttaatacaaccgcacagtaaatctcctaaaattgaatggatgtgtaatgcttttgtcaattgacatcttatagtaaaaataatgtacttttaattatgacttttactttaatggaacaaaagcatgactgtgtggaattaaagatctacaccaataaaatggtttttttaagaatccttcataaaatggtattaac

SEQ ID NO: 17047 - DNA, 226 bp, Glycine max
  Clone ID: jC-gmle01810094h08a1
atttgattgtgaatggatttggaatttaaattgtgtgaatattttttaattgtttgttgagaagcattgaattggattttacttgaggagtagtatattatggagaacgtgtgtgatgttaatcacttggatgcggatgttcttttgccccctcggaagcgtcttcttgctgggttgaaaaaacagagttcagatggtgatgctgctgcatctccacctttggttg

SEQ ID NO: 17048 - DNA, 419 bp, Glycine max
  Clone ID: jC-gmle01810094h08d1
agtcagttcaaattcattacaaaaccaaagatgaaaaaaaaaaaagggccctttttgtaaaaaaaaaaaaaaacttggggggttttacctcagttttcaacttttgggatgggagttttagcccccagtcttttaaaattaaatctgaatctgaattttatgattgcccagttttattttggttgatacaagccggggccttaaactccgggcatttgcatgttgttggaccctcaatggggatcaccctttcaggggatggctccattggaaacaaagggttgttcccaacagcttgattgcccccagggttcattttagtcaatggggcacttttagctttacacctttctttggcagggccctatttttggaggggcaaatgcttaagggcaacttctttagcttcacccttcctt

SEQ ID NO: 17049 - DNA, 187 bp, Glycine max
  Clone ID: jC-gmle01810094h09a1
gcaacctcaactgttacgcttagtactccacgaacaatattcagtctgtaatgggtatgagagtgaatacactctttgactcttctctgggactgtccatagctgcagacacaccatacagtgcacagtcccaatccctcagtcctggagagaccatagtttccccaagaggactctcaggacgagg

SEQ ID NO: 17050 - DNA, 491 bp, Glycine max
  Clone ID: jC-gmle01810094h09d1
gggaataacatcttattttttttaatttgaattttgtgactatctgttgaggatgcaatgccgttaccattttatacaacatcttttccatttccaccaattcttcctggccaaagccccaactcctaagtaacttagcccccgctgctccttgttgaattccaaactgatgaagatttcgcagcttactctccaagagtggtaacacaatactgctagatcgtaatctggcagccatgggaatggaatggatgtcgagggatccttttggtgaagaattagtaatttgaccactcatcaattcaccgtgctggccaacattggtcccaaatattgatggaaaaggcacggggattggcaagggactaagagcaacagatagatgacagaacattggccttgtattggcacatcgaaaagcagcatcaacggtatcctttacctcaccaactgaagcacgatgaccttatgatgcaagagcttcatggaca

SEQ ID NO: 17051 - DNA, 450 bp, Glycine max
  Clone ID: jC-gmle01810094h10a1
acactagcttaattatcatttatcatcttatacagtactatatatatatatatatactttatataagtggactatttataaatccaatacaagggtgaaattctaggattaatattcatgttggcggtgtcacctttgaggagcacaagagatgaagggcaaggagagatgatggagagtttctcgattggaaccgatgattttgctgacctttcagaagggaacttgcttgaaagcatcaacttcgatgatctcttcatgggaatcaatgacaatgaagatgtcttgccggatctggagatggaccctgagatgcttgctgagttctccctcagtactgaggaatcagatatggcctcatcatctgtttcagtggaaaataacaacaaatctgcagataacaacaacaacagtgatgggaataatatagttactactgagaaacaagat

SEQ ID NO: 17052 - DNA, 383 bp, Glycine max
  Clone ID: jC-gmle01810094h10d1
acattggcgaacttaaaatttttccctgaataatttaaggtatttggcttacctggaccacttaagactaatccaaaattcccggctttttaaaggccccatttaccaaaaatgggttaacaaattgggcgggccttatcccagaaaaaaggaaggtcccaaagttaatttttaaaattggttggttaaatcccccttttaaattttcgctaagggaaaaatgggagcaaaaaagccccgttttcccttgcagaggggaaaaaattggaaaggccctaaatttagggtttttgggcctaaaattcccccgggccttaaggggaaaaatttcttttttttaaagtggcaattaaggcttaaaggggggggatcttgggaatccc

SEQ ID NO: 17053 - DNA, 480 bp, Glycine max
  Clone ID: jC-gmle01810094h11a1
ctgcaatttcactcttttctgaaaactatgagaagcttgatcaactgaaatccgagattaatagttcaactaaattgattgttactgggcatggtcttggaggagcagttgcttctctctttactatatcgctattaaatagcattggttctggaaagaatcgcccactctgcatcacctttggttcaccccttattggtgacaagaaattgcaacaagccatatcacgtaattctaattggaattcttgctttctacacgttgtgtgactcaaagacccacttccaacgctcttaattacaaactatagctcttcacctgctgtattgactcctgaaacatgtggctacatgccttttggaacattcttcttgtgttctgacgcaaactccacttgttctgagaaccctgactctattttggaacttctcattgcagtgggctcaatccacactcagaatcaaggatttcagtcttctg

SEQ ID NO: 17054 - DNA, 370 bp, Glycine max
  Clone ID: jC-gmle01810094h11d1
gacttatattaatagtttataatgggggcgaaaacaaaataaaaaaaagggggggggcccgccttttaaataataaataaaaaaaaaaaaaaaaaaaaaaaaaaaaaaaaaaaaaaacaaaacaagggagaaaaaatacaaaaaaaaaacaccttattaaaaacacgcgaaaaaaagcaggtataaaaaaaaaggggggaaaaaagaaaaaggcaaggggggaaaaaaaacccccaaaaaaatttggggcaccccccaaaagaaacaacaaaaaaagaggggagggggggtaaaaaaaagccccaacaagagcggataaaacctcgcccaaaaaaaaagaaggtggtgccaaaaaaaaaaataaggggga

SEQ ID NO: 17055 - DNA, 336 bp, Glycine max
  Clone ID: jC-gmle01810094h12a1
atcttaaaagctatattgctgcacgatctcgtgatagtgatatttctgtcattgcaaagatagaaagtattgactcattgaagaacttagaagagatcgttctagcggcagacggagctatggtggcacgaggagacttgggagctcaaatacctttagaacaggttccatctgctcaacaaaggattgttcaggtttgcaggcaattgaataagcctgtcattgttgcctctcagctacttgaatccatgattgagtaccctacacctacaagagctgaagttgcagatgtttctgaagcagtcagacaacgagctgatgctttaatgctttctg

SEQ ID NO: 17056 - DNA, 463 bp, Glycine max
  Clone ID: jC-gmle01810094h12d1
gataggcaaatactatggaatctttattgaaaccttcacattttagtcaacattgaagtggaaagctaatgcaatgatataaaacatggaaaatgcaaatgtgtgccttacaacttaaaagggtagctattacactattgcctcactcgactaaaaaagatatctagagcttgaaggtgtatgcattaaaactaagaacttcaaggccataatattaactctcccaaacttctgtcgtgtcctataaattaaaatgacagaacgaacaaaattcattcatgtagtctctgccccattttagcactctagcagcatcccaggttttgaacaagcagcaatgttggctttcaaaagaaatgaaacatgttctcaaggaacattcatcacttgtattgactgcaacatgtctgagacggcaatgacaaggtcaccagatttgatcagatttctggccttgagcaat

SEQ ID NO: 17057 - DNA, 194 bp, Glycine max
  Clone ID: 700877280H1
caatacgactgttgtgtacacgatatgtgagctcatctcatttctatgcgacttctagcatgttcttggctcccagtttgtcagcttgtcgaccatgacgtcggcacccacaaagagcttacaagtttggacgttcaggttgctccgcctcaggccggcgaggtccgcgtccacatggtcttcactgctgtctg

SEQ ID NO: 17058 - DNA, 178 bp, Glycine max
  Clone ID: 700877281H1
tctggcaactagttggtatgaaagagaggcttgaagcaaaaaaaaaaaaaaaaacaaaaaaaaaaaaaaaaaaaaaaaaaaagaaaaaaaaaaaacaaaaacaaaaaaaaacaaaaaaaaaaggaaacacaacgccgccggggccccccccccgccgccgcgcaggtcggcgccggcc

SEQ ID NO: 17059 - DNA, 249 bp, Glycine max
  Clone ID: 700877282H1
acctcacacacccactcgaataatattaacaacaacaacaacaacaaccctttgttccttacacaccacacactctctactcatctatcaaatggcgacccccccaaacgacgccgcatcgacgagaagccacaacccatcccttggacccaccaggagaccgtgcacctcatccgcgcctaccaggagaagtggtacgccctcaagcggggcccactgcgccacaaccagtgggaggaggtcgccgtc

SEQ ID NO: 17060 - DNA, 208 bp, Glycine max
  unsure at all n locations
  Clone ID: 700877283H1
catctccactccttgcctctgagaggtcccatagaactacttccaagctcaaagtcaataatgatgcaacttcatcacacgatgacttcgtcgcagccacatcttccacccttcacccacacgaaattccacacaacataagagggaaaaatctntgcaanactcatacatcagcttcaccaaagtattccatcagttctacacaaca

SEQ ID NO: 17061 - DNA, 249 bp, Glycine max
  Clone ID: 700877285H1
gtgtttacaatgtacatcggagaacgaattacagacctaaaacttgggaatggcacctctcttttgatattcacaaacattatctcgtacttgccagcttcttttggtaggacaattgctcaagcattaatgatgcaaactacattggacttggtaccattgttttgtccttctttttgttggtagttggtattgtttatgttcaggaagcagagagaaaaatcccgcttaactatgcttctagattca

SEQ ID NO: 17062 - DNA, 249 bp, Glycine max
  Clone ID: 700877287H1
gccaaatgctgtccatatgtcaaccatccttaaccatgttcaaagcaatcaattaggcttgtacccgcaaaatattcagggtgttgctggttcctatgtggatatggtttcacatcaaatgcatacagtcctgtggcttccatgtatcctcaacagatgtatggcaaccaattcggaggatatggctatggtcagcaaccaagggttcagtatgttgagcagcaaatgtatggtttatctgtcagagat

SEQ ID NO: 17063 - DNA, 252 bp, Glycine max
  Clone ID: 700877288H1
gctcctttgaaagatttttttttctatggaaaaaggaaagactgtgagtaaatatgtacaagatggaactgtagatctcaaaggaaaacctgttctcaaatctaaaagaggtggttggaaagcatctctttgcttcttgtgtatgaggtattcgaaagaatgacttattatgggatatcatcaaacttggtcctgtatctaacaaggaagcttcaccaaggcactgtcactgcttccaacaatgtaaacaat

SEQ ID NO: 17064 - DNA, 251 bp, Glycine max
  Clone ID: 700877290H1
gttattatctaagcattgcatcaaacaaaactaactgaaaccaaaaccttgagaaaactgagcatggcggagagtggcggaggaaatcgccggagagaaccgcttctggtgtcgccggaggaagagctgcaaaagcatcgtggaggcttaacgtcaaagagtttcgtttgccaagccaaacgaatgatcatcaaaatcaacgatccttcactttccatggccttcttcgtaaacccaggaagcaacgcaaa

SEQ ID NO: 17065 - DNA, 251 bp, Glycine max
  Clone ID: 700877292H1
gttccatggtattcctcaagttcacctgcttcaaacctcaagtctccaagctcgagtcccaattctccaactttggggaagcactcgcgggacagtgacatgattaagcaagactctttgcacaagaagaagcttcaacgccaagaaacgggagtgttttggtcccaaaaacgttgagaattgatgatccaagtgaggctgcaaagagttctatatgggcaactctaggaattaagaatgagtcagtgagt

SEQ ID NO: 17066 - DNA, 248 bp, Glycine max
  Clone ID: 700877293H1
aaaatatattcaattttgcgtttctctgcctaaaaggtagacttcttctctgcttcttccgattgaaagatgggtcaagcattcggttgctaccaagtcgatcagtcaaatgtggctatcaagggcattttggaaaatttgatgatgtcctagagcctggatgtcactgcctgccttggtgtcttgggtaccagattgctggtagtctgtcgctgcgagtgcagcaacttgatgtacgatgtgagacg

SEQ ID NO: 17067 - DNA, 249 bp, Glycine max
  Clone ID: 700877294H1
gagagatgttaggcagatccgggagaaacaacaaagtatggctgccttgtgtatagagattctgacttgaatgctgcatattttctttaatgcctgagtttaaggatataacaagctatgacctgatgtttatcgattggtgttggaagttctgagtaggggaaatcttcagcttttttggcctgattaaacttgacattccaaatttaagttggaatggaatgtggaattgtggccacaaagcacaaa

SEQ ID NO: 17068 - DNA, 253 bp, Glycine max
  Clone ID: 700877295H1
ataaaatcccactccaccctatcatagtattataaaatgtcaaactttagagccacaatccctttcctccctttcttcttttgtttcatatgatgaaaacattcaaaagctatgatagtattatctatattaacttatccgacactgaagtactttgagattcaccaatcaaagagggcacaacagttttcatcctatttgcaaaagcctctgtaatgaccttgaaaattacattacaaaggcttatggccta

SEQ ID NO: 17069 - DNA, 257 bp, Glycine max
  Clone ID: 700877296H1
ttgggatgttgtatgttggacgaggagccatagtcacaaccttcattgtttgctatgctctcacatctttcatttctggttatgtgagtggggggatgtactcacgtaatgggggtaaaaattggattaatccatgatccttacagcatcactgttccctttcatgtgctttggaattggttttattttaaacactattgctatattctatggatctctagctgctattccctttggtacaatggttgtcgtctttg

SEQ ID NO: 17070 - DNA, 248 bp, Glycine max
  Clone ID: 700877279H1
atcaagattcatggtttttaacccactaccactagctaccacctttcttctattatgaaattaaacctatggcagcgtttatgaaataagtaaggagtttgagtttggaatattttgtcattttcttctgtatgattgaaaatccaagaatagtctttgagagtggttatatatattactacttcatgttgtgctttcatggaccaaaaaaaaaaaaaaggggcgcccgcggattattaacctcttcg

SEQ ID NO: 17071 - DNA, 252 bp, Glycine max
  Clone ID: 700877243H1
cttacaactcctttcaggccattggatggacgatttccttaactaagattttgtacaatcttctcgtcactgcatccatcaaaggaacctatgcttccgccgccagcttaatctgttttctgcaatgcgtgcattcttggaagttatacacggagccattggcattgtgcccagcggggttttgcttcctcttatgcaatggggaggaaggacgcactttgtgcttgccattgttaggaaacttgatgagct

SEQ ID NO: 17072 - DNA, 257 bp, Glycine max
  Clone ID: 700877244H1
ctattcataaaattaaggaaaatgttttatcaacacccattaacctatttaacatcgagaaaaaaaaacaaaaaaaaaaaaaaaaaaaaaaaaaaaaaaaaaaaaaaaggggggcccccccatttgggccccccccccccgggttttttttccgggccggtcccccgggggccccccttttcccccaagggggggttttttaagctttggggaattaatgggcaaacgttttccccggggaaaatttttcccccccc

SEQ ID NO: 17073 - DNA, 257 bp, Glycine max
  Clone ID: 700877246H1
ctctcagattctttgttttgaggttctcttctttatacggatggcagcaccattggcatgtcttgttgggagtggtttatctatacagagtaataaattaactcttggcaaggacgtcaatggaagatactcttctcatatcataggctttcagcacagagtaaggaggacaaagacaatatgcataaaggcatccttggatcaaaggaagcatgaagggagaagaggatttctgaaattgttgaatgtgggagttg

SEQ ID NO: 17074 - DNA, 260 bp, Glycine max
  Clone ID: 700877247H1
ggaaaataaaaatactaacaaaagagagaaaagaagatgcagtgagtcacagtcatagaatagaaacagaggcaccatttccgttttccaacaacctctaccctatacgccgttataacggttcgtgctttcggacgcgacgcttcaactgtgaaacggacgcgacgtagtttatataaagcgccgtccctttccgtttgtgcgttaatcaatcagcaagacgatgaccagtgccgaattattttccctcttttctctca

SEQ ID NO: 17075 - DNA, 244 bp, Glycine max
  unsure at all n locations
  Clone ID: 700877248H1
tgactatgtaaatccgggaaggccgtggtgtaggacccctgaaagatcacatctatctccacttgaatcactctactctcagatgttcttaaggagaggctacctggtatctctgaaacagctgctatttttgtggtgtggatgttactaaggaacctattcctgttttgccaacagtgcattataacatgggtggtattcccacaaatcatcatggacangtgatctactataaaggtgatga

SEQ ID NO: 17076 - DNA, 252 bp, Glycine max
  Clone ID: 700877249H1
caaccctatcatgatgagtgctggagagttggaaagtggaaatgcaggagagccagcaaaactgatcagacagagataccgtgaagccgcagacatgatcaagaagggaaagatgtgtgctctcttctcaacgatcttgatgcaggagctggtcgtcttggtggaactacacaatacactgtcaacaaccagatggtgaatgccaccctcatgaacattgctgataaccccaccaatgtgcagcttcctggt

SEQ ID NO: 17077 - DNA, 242 bp, Glycine max
  Clone ID: 700877250H1
gcagcataaccagcgaggattcgagcttgttggtgtacgagtatttgcccaatgggagcttgtgggaccggcttcacacgagtaggaagatggagcttgattgggaaaccaggtatgaatcgcggttggggcagcaaaagggttggagtatttgcatcatgggtgtgagaagcctgtgattcatagagatgttaagtccagtaatattttgttggatgagtttttgaaacctaggattgcag

SEQ ID NO: 17078 - DNA, 250 bp, Glycine max
  Clone ID: 700877251H1
atcggtcaaattggaatcgtcggatcaatttgtcatgaagttcctggagtgttctgctttagatcggcttaatgatttcttgggtaatttgaatctgggagaacgtactatcaaaggatgccttgagcttatagttgcaaacatgcttgatcggataaaaaactctccatcagtttggagacagagattcttgattatcttgggaaatcatccgacactgattcctcctcaccagatcaaaccttcttaa

SEQ ID NO: 17079 - DNA, 173 bp, Glycine max
  Clone ID: 700877252H1
gtcttttttcaagtgttcttgtatgtcatgtctgttatgttcaatttctcccttgaacttgtttgctgttctggtttaggtgctgctttttatgttttaatatgatgtattgagctcgtttcgccaaagaattaaatatcaatatcgtatcatagttaaaaaaaaaaaaataa

SEQ ID NO: 17080 - DNA, 256 bp, Glycine max
  Clone ID: 700877255H1
ggcaatggaatggttcagatgccccgtttctgggcttttactccccctgtttttacttcttgctttcttcatcttctttccccggaaggaacaaaattatgttacccacttgcctcctccttcgttccttccactatcaaactcaactacacaaatataaccattttttctccctctcccttaccacaaccaccaccaccaccaccacttgagcttctttccatctttgctcctgcaaatgaaagctacaataaca

SEQ ID NO: 17081 - DNA, 255 bp, Glycine max
  Clone ID: 700877256H1
ctagggttgatgcttatgtcttggagggtgattttccatgtttggctcgcctgataactggagttggaaatttttatgctctcaatttcatttttggcattcttatagaaaacggtcaattggatcttttcttcagaagtattctgctgctgcagacacaaacactggcactgctgaggctgtcagaggatttcgaatggctgttcttacatccttgaagcatttcaaccctaatgaccttgatgcatttgccat

SEQ ID NO: 17082 - DNA, 254 bp, Glycine max
  Clone ID: 700877257H1
attccacaaaatttccctcatatatttctcaccatcatcaccccctttccttctctcaagaaaaaaaaaagttaatttcttgaacccaatggcttcagagacagaggtgccggatattatttcctctgtttcgaaaggtttcaacaaaacagatgcatgtctctgtttctgcccttcctcttcggcttctctgacgccaccccaggacgaaatagcgacgacccagatcacgaaactgctcccacagaagcccc

SEQ ID NO: 17083 - DNA, 253 bp, Glycine max
  Clone ID: 700877260H1
cttgaatcttcgttatccttctttttttctccttgaactcgaatattcactatggcagatgaggtggttctgctagatttctggccaagtccatttgggatgagggtcaggattgcacttgctgaaagggtatcaaatatgagtccaaagaagaggacttgcagaacaagagccctttgctcctcaaaatgaacccggttcacaagaaaaatacggttctcatccacaatggcaaacccatttgtgaatctct

SEQ ID NO: 17084 - DNA, 254 bp, Glycine max
  Clone ID: 700877262H1
caaaatattgcagaatcaaaagtagctctagtatatggtcaaatgaatgaaccgcccggagctcgtatgagagttggtttaactgccctgactatggcggaatattttcgagatgtcaatgaacaagagtacttctatttatcgacaatatctttcgcttcgtccaagcaggatctgaagtatctgccttattgggtcgaatgccttctgctgtgggttatcaacccactcttagtactgaaatgggttcttta

SEQ ID NO: 17085 - DNA, 256 bp, Glycine max
  Clone ID: 700877263H1
ggaaggtattgacgaaatttgcaagattattcatgataatggaggccaagtatatatggatggtgccaacatgaatgctcaggtgggactcacaagcccaggttggataggagcagatgtatgccatctaatctccacaagacattttgcatccctcatggaggaggtggccctggcatgggtcctataggtgtaaagaaacacttggcaccatttttaccatcacaccctgtgatagcaactggtggaattcctg

SEQ ID NO: 17086 - DNA, 258 bp, Glycine max
  Clone ID: 700877264H1
ctcgagccgtgcaaagtgtcactttgttgcaattgatatttttaatgggaaaaagcttgaagatattgttccatcatcccacaactgtgatgttccacatgtgaatcgcactgactatcagcttattgatactctgaagacggctttgtgagtctgttgactgataatggaaataccaaggatgatctgaagcttcctactgatgaggcattgcttgctcagattaaagatggattttctgaaggaaaagatcttgtg

SEQ ID NO: 17087 - DNA, 129 bp, Glycine max
  Clone ID: 700877266H1
caagacgaaggttgtgtacacgatatgcgagttcatttaatttctttgtgacttctaacatgttattggctcccagtttgttagcttgtggaccaagaggtcgacaaaaacaaaaagaaaacaatttgc

SEQ ID NO: 17088 - DNA, 242 bp, Glycine max
  Clone ID: 700877269H1
ggttcattcctttttttcgatccccttttcatattaatagttgtcatttaaattaatgttagactacttttataatagatgcggtgttacaacgtatctttttctgtatccaattgtggcaacgagatacaatataagttcttatgcatttatcttaacttccgccgctaggctgatcgtagtggtttacaatgcatctatttataaaataaaataaaagacaatggatctatttatccttt

SEQ ID NO: 17089 - DNA, 231 bp, Glycine max
  Clone ID: 700877270H1
tgaatctctgaattctctaaaagagatttttttctgctctttgaagaaagaagggtctttgcttgattttggagatgtctctgctctcagatctcatcaaccttaacccttccgatactaccgagaagtgatcgtagagtacatatggatcggtggatcaggaatggacctgaggagcaaagcaaggactctcccaggaccagttagcgacacttcagagcttcccaagtg

SEQ ID NO: 17090 - DNA, 253 bp, Glycine max
  Clone ID: 700877271H1
aaatgttataattcatcgagacctaaagccaaggaatgttcttttagtcaattctagtgccgaccatttaaaagttggagattttggattgagtaagcttatcacggtccagagttctcatgatgtatcaaaatgactggtgaaactgggagctaccgctacatggctcctgaagttttcaaacatcggagatatgataagaaggttgatgtgtactcctttgcaatgattttgtacgagatgcttgaaggtg

SEQ ID NO: 17091 - DNA, 253 bp, Glycine max
  Clone ID: 700877272H1
ccaacaggtgctagcgacacttggaccaagcttatacgattttactcggagaaacagttatcgttcatttcgcattgatcttgtccgtgagattggctggcaactgtcggaatgtgtagcatctatgatgatttacgcatgatccatactgacctgaagcctgaaaacatacttctagtttcaccagagtatctaaagattcctgactactagagtactaccagatcaccatgctcctgttgcaagagagtgc

SEQ ID NO: 17092 - DNA, 251 bp, Glycine max
  Clone ID: 700877273H1
caactttaattttttttattatttatatgaaaaaaaataatcaaaataaagcggattatattgtaccgttcaattaatgttcatttttttcaaaaaaaaaaaaaaaaaaaaaaaaaaaaaaaacaaaaaaaaaaaaaaaaaagggggggccccccccaggaaggcccccccccccggggattttcttcggggcgggccccaggggggggacccgtttcccccaatgggggtataatgacggtgggcgaaac

SEQ ID NO: 17093 - DNA, 253 bp, Glycine max
  Clone ID: 700877274H1
acagaggagaggagaggagaaggcgatgcaacccacatccggcggcggcgggctggcaaggttccgttcagctccggcgagctggttagaatcagttctgttgaaggaagaggaagaagaagaagacccttaagcttcactcaactgctttccactatcgatgatgctccctctcattctcaacaccaactctatggtgccgctctctcaaacaaggataaaacacctgaaatcttcatgttagaagattccg

SEQ ID NO: 17094 - DNA, 246 bp, Glycine max
  Clone ID: 700877275H1
cttaattctctcatttcttgaagctctatttattctagatcaaaaacgaaatgacccctcccccagaattctttcggattgtcgggcacattaaaaaaggaatggataagttcctaaaaataaagaaactataacacattataaggaggggtcaaatattaattaagataaaagatatagaatatctatctgtatatatatatatatagatataatttattaataattagaactttcttttttctt

SEQ ID NO: 17095 - DNA, 253 bp, Glycine max
  Clone ID: 700877278H1
ctctaatctaggaataggaaaaagatgggcagcactagtgcgagtgccctcaggctatcgtcgatggtcagcgtgtccccgaattgcaattgctcatcgatgacgcttatgaagaagacggcgatgcgatggcgatggctcctttttcacttgcaatgaaaatcaaaagcaaaaggggtggtattaggtgcgaggtggctattaatgcggtggatgaggagtcgaggacgtcaccggaggagacgaagatcgg

SEQ ID NO: 17096 - DNA, 244 bp, Glycine max
  Clone ID: 700877242H1
tttttgtccaaatctggatggaagttctgtttaatgatattcacaagtaagcctttttattattgagaaaaaaaaaaaaaaaaaaaaaaaaaaaaaaaaaaaaaaaaaaaaaaaaaaaaagggggggccccccttttttttccctccccccccgggtttttttttcggggccctctttccgggtgttccctttttctcttttgtcgttcttttttgtttggggtttttcctgttctcgtctttt

SEQ ID NO: 17097 - DNA, 260 bp, Glycine max
  Clone ID: 700877206H1
gttagttattaccattcgtggaagagaaaaagaaaaaagtaactaaaaaaaactgtaataaagagtccaaatgaaagcgaaagcgctgaaaggaaattggagcttgaggacgaacaagctcagcttcccttacgtttcctcgtctgcatcttcttctttctcgctggattcttcggtttcactctcttctctcactctcagggcgatggagatggcttgaggccgaggcagaggctgcttgattcgacgaacgaggcgga

SEQ ID NO: 17098 - DNA, 262 bp, Glycine max
  Clone ID: 700877207H1
gccaaatattcttatctgccgatctattcaatgctggaatcagacccgctattaatgtaggtatagacgtttccagagttggatcggcggctcaaattaaagccatgaaataagtagctggtaaattaaaattggattagcacaattcgcagaattagaagcttttgcccaattcgcttctgatctcgataaagctactcaaaatcaattagcaagaggtcaacgattgcgcgagttgcttaaacaatcccaatcagctcct

SEQ ID NO: 17099 - DNA, 246 bp, Glycine max
  Clone ID: 700877208H1
cttaattctctcatttcttgaagctctatttattctagatcaaaaacgaaatgacccctcccccagaattctttcggattgtcgggcacattaaaaaaggaatggataagttcctaaaaataaagaaaactatacacattataaggaggggtcaaatattaattaagataaaagatatagaatatctatctgtatatatatatatatagatataatttattaataattagaactttcttttttctt

SEQ ID NO: 17100 - DNA, 263 bp, Glycine max
  Clone ID: 700877209H1
caaagaatgtgtgattaacaattcctggagccctggacaggaatccataacatgattcgaccccaaaatagcaagaatcagaatttgaggaaccctcgtctcatcgaagcaaaaattcttcaacacagagaaaataaaaagtgagattctattctaccattctttgtatcctctgacgttctctgttctcccctcaccgtactctcccgcggaggatccaccgtacgccggagaataccaccgcacaccatatccctctctct

SEQ ID NO: 17101 - DNA, 259 bp, Glycine max
  Clone ID: 700877210H1
cagaaaaacaatgatcagtattctagccagtagaggggcaaatagtacaatccccacactttgttccataaaatcatctaattttacaggcgggtcatgtcctgtgaaggatgattctacttttgaaaaaacagtaacacaagtaagttacttgagcgtgaccagcactgttgatccacttaaagagtgttgtaggcctgtttgccaacctgcgataatggatgcagcactacagatttctggaagacaaatgatgatt

SEQ ID NO: 17102 - DNA, 250 bp, Glycine max
  Clone ID: 700877211H1
cttctaaaaaaataaaattaagaaattttcatggtaaccattcgtgcagatgaaattagtaaaattatccgtgaacgcattgagcaatataatacggaagtaaaaattgtaaatacgggtaccgtattcaagtaggcgacggtattgctcgtatttatggtcttgatgaagtaatggcgggtgaattagtggaatttgaagagggtactataggcattgctttgaatttggaatccaaaaatgtaggtgt

SEQ ID NO: 17103 - DNA, 258 bp, Glycine max
  Clone ID: 700877214H1
attgaatctcagaattctctaaaagagatctttttctgctctttgaagacagaagggtctttgcttgattttggagatgtctctgctctcagatctcatcaaccttaacctctccgataccaccgagaaggtgacgcagagtacatatggatcggtggatcaggaatggacctgaggagcaaagcaaggactctcccaggaccagttagcgacccttcagagcttcccaagtggaactatgatggttccagcacaggt

SEQ ID NO: 17104 - DNA, 262 bp, Glycine max
  Clone ID: 700877215H1
ccggcgcgcgctgaagtttgctaggttcatgagcaggttcgggaagagttaccgaagcgaggaagagatgacggagaggtacgagatattctcgcaaaacctcaggttcatccgctcccacaacaagagccgatacgccttaactctctctgttaatcattttgctgattggacttcggaagagttcataacatacagactatgcgctgcccaaaattgctctgccactcttaacggcaaccacaagctcactgatgctgtt

SEQ ID NO: 17105 - DNA, 256 bp, Glycine max
  Clone ID: 700877217H1
gcgagggctgtgaagcaatgcaagtggagaaggagagcttggtgtacatgtggggttacctgcccggagctctgccgcagaggacgcctctgttgacgccgcttccttgttagggttccgccctctggttactttggaaggatgtctgcggcggtggttgtggattcgccatggctatctctgagcctggaaagctcataacatggggttcaacagatgatttaggccaaagctatgttacatctggcaaacatgg

SEQ ID NO: 17106 - DNA, 255 bp, Glycine max
  Clone ID: 700877218H1
gaaaatcacgactgctagattagcactaacagatgtcacccctgcagaactgatgacagaagaggcaacaagtggaaatccatgggccccagatgccagaactctcagatcaatttcaagggatgcttttggctagatgattattggaggattgtggagattctgcataaaaggtttcttaaatttgaaaagaagaattggagggtctcttacaattccctgatcgtgcttgagcacctgttgactcatggacca

SEQ ID NO: 17107 - DNA, 260 bp, Glycine max
  Clone ID: 700877223H1
gaacaaagcacttagtgctattcaataattacgaaaaaccaacagcgagtgttgtttttgtttggtccaggctggaccagggaatgaatagagatgagaggctttcggttgaagagaactgagttaagcggcgagccaaacgcagaatcggcggcagaaattgccaccggaagcacgtcgaagaggagtgaaccaaacacaaaattccatccaccacttctcttttcaatccccaactcaaatctgtgaagaaatctcaa

SEQ ID NO: 17108 - DNA, 258 bp, Glycine max
  Clone ID: 700877224H1
aaaaaaaaaacgaaaatgctgagaatcgccgcaagcgcaaagagaattgttcaaacggcgtcgttggaggcgccaccgttggggattagggttctgccgcgtctctaccacgagagggtggtggaccactacgcaacccccgcaacgttggatccttcgacaagaacgaccccaccgtcggaacgggtcttgttggtgcacccgcgtgtggcgacgtcatgaagctccagattaaggttgacgacaaaacggggaaga

SEQ ID NO: 17109 - DNA, 257 bp, Glycine max
  Clone ID: 700877225H1
gttcaatacccttccaagatgcttttagccacgggcaaagtttctggttcatttgaaatatggctatgtgacatatcttctggggaatttgataagcttggctcatataatgcacatgatttggttgtaagtttttttccctctttttatttttatttttttgggtgatagttggaaaaaaaggccatattcctatgctgatttctgcatttttttaaatttctcaaggttacaggtttgacctgggcattcggtgg

SEQ ID NO: 17110 - DNA, 254 bp, Glycine max
  Clone ID: 700877226H1
catagaggatgttcatttgaatggtgacaacagaatcagcttaattgttgcagatttctgcatgggatgggctttggatgttgggagtaaactgggaatcaaaggagccctgttgtgggcttcaccagcagtttatttggccttctatacaacatccccaagcttatcgatgatgggatcatagattctgatggtggactaacactaaccacgaaaaagacaattcacatatcacaaggtatacctgagatgga

SEQ ID NO: 17111 - DNA, 257 bp, Glycine max
  Clone ID: 700877227H1
ccttacactgttgtactgtttgatgagattgagaaagcccatcctgatgtgttcaacatgatgcttcagatcctggaagatggaagactaacagacagtaagggcagaacagtggatttcaagaacacactcttataatgacatcaaatcgttggaagcagtgtgattgagaaaggaggccgcaaaattggatttgatctggattacgatgagaaggatagcagttagaacagaatcaagagcctggtaactgagga

SEQ ID NO: 17112 - DNA, 257 bp, Glycine max
  Clone ID: 700877229H1
tgagagatgttaggcagatccgggagaaacaacaaagtatggctgccatatgtatagagattctgacttgaatgctgcatattttctttaatgactgagtttaaggatataacaagctatgacctgaatgttatcgattggtgttggaagttctgagtaggggaaatcttcagcttttttggcctgattaaacttgacattccaaatttaagttggaatggaatgtggaattgtggccacaaggcacaaacaattat

SEQ ID NO: 17113 - DNA, 259 bp, Glycine max
  Clone ID: 700877232H1
cagtgatcacaacctacgccgagtgaaaccccaatcccaatacactcccaactcacaaagccatgtctccaggtcctgttgtcgacgcttcccctgaggttgaagcagagcaacaacttccctccgtcgatgacgaacccagttgaagaaatcccaaccgcaggaggatgatgctcccgttgtcgaggacgtgagggatgatgacaaggacgacgacgatgaggacgacgacgacgatgatgaagatgacaaggaagac

SEQ ID NO: 17114 - DNA, 253 bp, Glycine max
  Clone ID: 700877233H1
tatcagtccacccgcaagaagctcgagacgcgtcgtctggcttacgatacttctctggccaagatgcagaagacgaagaaggaagacttccgcatggaagaggaactacgcgcccaaaaggccaaatacgagagaccagcgaagaggtcttcaggaggatgcaggacatcaaggagtcagaagtcgacatggtccaggacctgaccgctttcctcgaggcagagctcagttactacgaccgctgtcgtgagat

SEQ ID NO: 17115 - DNA, 229 bp, Glycine max
  Clone ID: 700877235H1
gccgaagcgggaagactcgggcgagtcggtcgacgaccaggaccgcgtggtgcaccagcaggagctcgagggcgccctgcgcgagatggcgctgtgccggcgttgtgtaaccaggcgacgctgtccagccgagcgaggacaacacgcagtgggaggccaacggcgaccccaccgagattgccctgcaggttgctgcgcacaagctgggccgcggcaagccgttccacac

SEQ ID NO: 17116 - DNA, 249 bp, Glycine max
  Clone ID: 700877236H1
ctggatattcatcatgctttcgtaaagaagctggatctcatggtcgagacactctaggaatattccgagttcaccaatttgagaaagtggagcaattttgcctcactagtccaaatgacaatgattcacggacatgcatgaggaaatgctgaagaactctgaagatttctacaaagcgttaaatcttccctatcaagttgtttccattgtatctggtgctatgaatgatgctgcagcaaagaagtatga

SEQ ID NO: 17117 - DNA, 253 bp, Glycine max
  Clone ID: 700877237H1
ggatgctgtacagcaagccagtcccgcttttgaatacttggagaatgctcttggtaaatttgatgatgggccattcttgcttggtcaattcagtttggtaagttaaaattcaatggtcttcagaaatttgttttccttttaaattcgttgcctttcaggctgatactaatgcttgtcgcgatgcatctgacaaattagagtatgtgaaaataccttatcatatcaagtattatcctctaagattagttttcac

SEQ ID NO: 17118 - DNA, 255 bp, Glycine max
  Clone ID: 700877238H1
ctactcttccattctatcgtcactcattcccaaacgaaacgaaaacgcgcgtttcttcagattcagacccaaactcatggcaaatacgttgcggttatacttgacctgcattcggaacacgctcgaggccgaatgtgcctccagaactttccgtgtcaagaagtcgaaaggcataacaagcccgaggttgaactcaagaccagccccgaactcctgctcaatcccgttttgatatgccgaaatgaggctgaaaaa

SEQ ID NO: 17119 - DNA, 255 bp, Glycine max
  Clone ID: 700877240H1
atctagatgctgttgaagctcttgctgatcagaacacagtggcgttggcgatcataaaccctgggaatccttgtgggaatgtgtacagttaccaccatttggagaagattgctgaaactgcaaaacgggtggaacaattgtgatctctgatgaagtttatggtcaccttgcatttgggagcaagccttttgtaccgatgggagtttttggctctactgttcctgttctcactcttggctcactttctaagagatg

SEQ ID NO: 17120 - DNA, 256 bp, Glycine max
  Clone ID: 700877241H1
caggtttcttcgtcgtcgcttgatgtcggagtggtgccggacgggaacacagtgtcggacatgtcgtattcgagtgggattgtggtgtcgggtggacaaggcgcgacgcagttgtgtgggatggatcgggagcgagggtgctgcgatacagagagaaaaggaagaaccgaaaatttgagaagatgattcgatacgcatcgcgaaaggcttatgcggaaacccggcccaggataaaaggccggttcgcgaaacgaac

SEQ ID NO: 17121 - DNA, 255 bp, Glycine max
  Clone ID: 700877205H1
gttgcaagacatagtgtggcattctgaagcaaaacaatgaagaatcaagatgtgcatgcatggaagatatcatgcacgtatttttgttggaagatatcaggaactttttttgttcatggaagatatcgtgcttgctaaaactggagcatgttgagttgggagagtctgctctaatgtctgatagggtaaaaacaaaacctagatcgtacaaaacttagagtgtatatttccttgaacttttattcataatatttc

SEQ ID NO: 17122 - DNA, 271 bp, Glycine max
  Clone ID: 700877165H1
tgcacttccggtcatcattttaccaacatgcagattttgagttggtttctgaatataaatggacgccaaacggttcatccagctggttgaggagaagaagaagaaaattatggagagaaaggaagctcctttgaaatgggagcagaagctggaagctgctgctgaagctaaagagaggaagctgaaggttgcaaagcatacaaaaagatctggctctgatagtgacagcgattatgacagtgatgatgagagtagaaagacaagtaaaaga

SEQ ID NO: 17123 - DNA, 258 bp, Glycine max
  Clone ID: 700877166H1
ctcttgagcacccgtgccggaggtcttggtttgaacttacaaacagcagatactgttataatctttgacagcgattggaacccacaaatggatcaacatgccgaggatcgagcacatcgcattggacaaaaaaaggaagttagagtttgtgtgttagttagtgtgggatctattgcagaggtgattttagagcgtgctaaacaaaagatgggcattgattccaaagtcattcaggcagggctctttaacacaacttct

SEQ ID NO: 17124 - DNA, 262 bp, Glycine max
  Clone ID: 700877168H1
tgaatatggcattttgctcatggagaacggttaatcccatcttttcttgttaccctttgcgttaaagtttctaaattttaccctttcatggcagtgggaagatcgcatgcagagaggactttgtcgctatgatgttaccgcctgtgaaaccaaggtctgttttcttttgtttttgtcttcctatgcatagatatatggattgtatgactcctgagtttgatgtgttttgtggtgattttgtcgtaggtgatcctggtgaata

SEQ ID NO: 17125 - DNA, 264 bp, Glycine max
  Clone ID: 700877171H1
gccttgattggactaatgtgggccgtttgcattgtttcttgccttggtgggatgatgctactgtggattttatgacaagtggtggttacaatgtttctccattgataggaaaggtaaaacagaaaacactgataatatggggtgaaaatgaccgcatcatcagcaataagtttgcagtgcgactccactgtgaattacctgatgcaattatacgccaaataccagattgtggacatcttcctcatctggaaagaccagattcta

SEQ ID NO: 17126 - DNA, 262 bp, Glycine max
  Clone ID: 700877172H1
tgaacattttgcaggaaagacaacctttgtgaaaaggcatctcaccggagaattcgagaagaaatatgagccaaccatcggtgtggaggttcacccattggatttttttcacaaactgtggaaagattcgattctactgctgggatactgctggacaggagaagtttggtggcctcagagatggatactagtaagtcaccttttatagtgtatcagattgtgtttgttatgacgattaagatggtttgtcaatctcaacttc

SEQ ID NO: 17127 - DNA, 268 bp, Glycine max
  unsure at all n locations
  Clone ID: 700877174H1
aagaaggtttgtttggtttagagagaagaaaacgttggtcggagaacattaccggaaagagaatctttgttgattccagaaatgtctagcatcgcttcctcacaccaaagcttcctcaccaacgcccttattccactaacgcacaaccccaagttcaggaccactgttactttcccttcttcactcaaaactgtctcttgcagttccccacaacatgcncccagtnaatctccaaggaagaagaatgagaacaagttagcaaagttgg

SEQ ID NO: 17128 - DNA, 268 bp, Glycine max
  Clone ID: 700877175H1
cgttacttcactcaaacaagatagtccatcgaaacattcaaccagagaacatcctgttgaggaaattgaaggatggatctatgcaagtgtctctcgcagattttgggaattcatcaaaagatgcgcctgatctaattcctattgcgaagaatcctcagtacactgcacccgaagttttcctgagagcaaatccgaaagaaccgtacgatggctacaaagccgatgtgtggagcatgggatgcatcctcacacaaatgctcactgggat

SEQ ID NO: 17129 - DNA, 266 bp, Glycine max
  Clone ID: 700877178H1
gaagtttgatggttatccatcatggtctatggttgactttgcatgtgattcaaatggatatcctatattagcagtgagcgacttggcagttcattcaaaggacctaactgccaatcctaaatgttcattgcttgtggctagagatcctgaagataggactgatttagtgattactgtacatggtgatgctatctctgttcctgaaaatgaaagagaagccgttcgagctgcatatttggcgaggcatcccaatgcattttgggttg

SEQ ID NO: 17130 - DNA, 273 bp, Glycine max
  Clone ID: 700877180H1
atcattttgttagaagcgactttctcaaaccaatagtagatgcctttgttgctaatggtaatcgctacaatctgctcaactctgctgttcttgaacttttcgagtatattagcaaggagaatctgaaattattattgaagtatttagttgattctttctgggaccagttagtgaaatttgagtatttggtttccattcattcactgaaagtaaaatatgagcagtgtttggataatgatgggacaaaaggtactgctattatgattgaccttc

SEQ ID NO: 17131 - DNA, 262 bp, Glycine max
  Clone ID: 700877181H1
cagtactaccattagccgcgtttttcaaaagtgattttcgagaattagcgatgggaattgaaagaggaggcttcaagggattcaggagcgcctggagcgtgccgcccaagccgtgcgattcctgcaagctggcctcggcggcgcttttctgccgccccgattccgcgtttctctgcatcgcctgcgattccaacattcactgctcgaacaaactcgcgtcgcgccacgagcgcgtgtggatgtgtgaggtgtgcgagcaggc

SEQ ID NO: 17132 - DNA, 258 bp, Glycine max
  unsure at all n locations
  Clone ID: 700877184H1
cacacatattccgataaacagaaacaccaccgttgaatttgagaatcccggcgaggcatgttcttgctccgagtccactcggtggaagaggaccaccctctggatccccaaaccatcttccaatcccaatcccaatcccaatcccaatcccaatccaacaaccctaaattcagcgaacgcagaggcgcactccacttggttcganactcttcccattcctcgctcaggccgcagacctctctttcttctctcctcttc

SEQ ID NO: 17133 - DNA, 264 bp, Glycine max
  Clone ID: 700877185H1
cttcaagaacaagctggacatctcattgggtgttgcattaggttcagcaactcagattgccatgtttgtggtcccattatgtgtaatcgttgcttggataatgggtatcaatatggacatgaacttcaacctcttagagacaggttcccttgctttggcaataatagtcacaggcttcactttacaggatggaacttctcactacatgaaaggccttgttctcctgctgtgctacattgttattggggcatgcttcttcgtaca

SEQ ID NO: 17134 - DNA, 203 bp, Glycine max
  Clone ID: 700877186H1
atgctccccatcaagcaagatctctggctccacaattgggaccatggtattgatagaacttttgaagtagcccaaaaggtctgggcagaggttttcttctaccttgctgagaacaatgtcctttttgagggtattctccttaagcctagcatggttacacctggagccgagtccaaggacaaggccagtcctcagacagttgc

SEQ ID NO: 17135 - DNA, 262 bp, Glycine max
  Clone ID: 700877187H1
taacttcacaaatcaaagcgatcgtcgttttcgtactgtttagtggatcgcgactcgggaaaatcgtccacgctcgagttcaactcacctcgacccggtgactcggtcgttgcaccgttgttgaagaatcagaaggtgaacactttctactacgtggagctcaccggagttagcgtcggcggggaaatcgtgaccgttccgccggagacttttgccgttgatcaatccggcgccggaggtgtgattgtggattctggaaccg

SEQ ID NO: 17136 - DNA, 264 bp, Glycine max
  Clone ID: 700877191H1
aaagaagatgagaagcttaggaaactcgccaaatgcgcaaactttccactctatggtcactgggtatgctgccgttggagggaattatcaaggtgacagaactgtggggtgagatgaaagctcttgcttcttctatctccatgaagtttgatcaggaacttcttgattccgtgctgtacacgtttgtgaggggcggattctttgttcgggccaatgaagttgtggcaatgatggaaaaaggaaaaatgtttgttgacaagtaca

SEQ ID NO: 17137 - DNA, 263 bp, Glycine max
  Clone ID: 700877192H1
ttcttatggtggactaggaggaggaatgtatggatcatcttatggtggggggatgtatggtaacagtatgtacaggggaggatatggtggcatgtatgggtcatccgggatgtacgggggtggaatgtataacagtggcttagggggtccaatgggtggttatggcatgggtggtggtccttatggagaacaagaccccaacaatccgtatggtgcccctccatccccacctggattttggatttctgccctacgtgtgatgc

SEQ ID NO: 17138 - DNA, 265 bp, Glycine max
  Clone ID: 700877193H1
cctcactcagtttaactcagcctctctcaacaggcacattgctcgcgcttccaactctggtaatggagtcacctttggagatggctacgtagaggttcttgcagcaacccaaactccaggggaggcaggtaaaaagtggtttcaaggtactgctgatgcagtgaggcagtttcactggctctttgaggatccaagaagtaaggatattgaggatgtcttgattctttctggagatcacctctaccgaatggactatatggacttt

SEQ ID NO: 17139 - DNA, 265 bp, Glycine max
  Clone ID: 700877194H1
accaaattcagtttcagttcaaattctgtgtgctgaaatgattacatggttaaggcagcaaaagaatctacacatctatgtggaaccacatgtcagggttgagcttttgacagaatcatcatactttaactttgtagaaacttggaatgatgataaggaagttttgaggctacacactaaagttgacctcgtggtaactcttggtggagatggcactgtcctatgggcagcttcaatgttcataggacagtgcctctattgtccc

SEQ ID NO: 17140 - DNA, 270 bp, Glycine max
  Clone ID: 700877195H1
gccggaaagggagaggaagacttcgaagttgtgctaatatccagcgaccgcgaccaagcatcctttgactcctactacagcaccatgccttggttagccttacctttcggtgacccagaaatcaagaacctcgttagacactacaacgtgcaagggattccctggttggtgatcataggccctgatggtaaaacaataaccgtacatggcaggagtttgataaacttgtaccaagaaaatgcgtaccctttcaccaacgccaaagtggag

SEQ ID NO: 17141 - DNA, 272 bp, Glycine max
  Clone ID: 700877196H1
aaagaaaaaagcgatcatagtttcacttcggccttatccagtttagggtttcggttctctaccctatctttcacgtatcgaaaccttaaatttacgatcaggtctgagcaatctggttggtagaacctttggtcttagtgagtcaagttttatgtctgaattagacgatcagattcctactgccttcgatccttttgctgatgcaaatgctgatgactcgggtgctgggtcaaaggagtatgtgcatattcgtgtacagcagcgaaatggta

SEQ ID NO: 17142 - DNA, 256 bp, Glycine max
  unsure at all n locations
  Clone ID: 700877202H1
atttcttaaccgaaaagcctcaaagaacaaagatttacctcttcggaggttttagtggtgactgctggaggaagctttagccgtggctaggcaagaactgcactcactcactctcgattcaaattgctcaatgaacgaaacacagagaacacaatgcttcgaaacgacgacgttcgcatcgtttcctcttccatcaaaatccctcttacttccatttccaaacaccctactatcagnctgcgaaccgcgcactctc

SEQ ID NO: 17143 - DNA, 253 bp, Glycine max
  Clone ID: 700877203H1
acacccccccaaaacaagccccaattatggctctgaatctttgtatctcacctaactgtaaatgggtttcatctcctgcttccttagatagtgcatcttctttgagatcttcacttggttcttgttttggtacataaacattgctagtgtgagtttaagcactagtagaagtttgagtttgaggaggagtgggagtgttagtgtaagatctagtttggaaactacggggcccacagttacagtgggacaggtc

SEQ ID NO: 17144 - DNA, 259 bp, Glycine max
  Clone ID: 700877204H1
atcagcaagtccatcccgggccgctccggcaagtcctgcaggctccgctggtgcaaccagctagtccccccaggtggagcaccgggccttcacccacgaagaggacgacaccattatccgggcccatgcccgctcggcaacaagtgggccaccatcgcccgcctcctccacggcagaactgacaacgccatcaaaaaccactggaactccaccttgaagcgcaagtgcacttcaaccatgattgacgacgacaacactc

SEQ ID NO: 17145 - DNA, 269 bp, Glycine max
  Clone ID: 700877161H1
ctttctcctaaaacatctccagtgggttcttcttcttctattacaacaacgtcgcccaagaccatgaccatggccatggccacgatcctgctcctgttcacggtcttcgcggtttcatcggccctagacatgtcgataatctcgtacgacaacgcccacgccgccacgtcgcgcacgagaggagctgatgtccatgtacgagcagtggctagtaaagcacggcaaggtgtacaacgcgctcggagagaaggagaagaggttccagatct

SEQ ID NO: 17146 - DNA, 274 bp, Glycine max
  Clone ID: 700877127H1
cagcgacaatccaagatatggatataatgctgccaccggaaaatatgaagatttgatgtctgctgggatcattgatccaacaaaggtggtcagatgttgcctggaacatgcagcctctgtagccaaaaccttcttaatgtcagattgtgtggttgtcgagataaaggaacctgagcctgtacctgctggaaaccccatggacaattcaggatatggtatctagagcaacggctgcttcagtgagaagagtattttttttctcctcggatgaaat

SEQ ID NO: 17147 - DNA, 275 bp, Glycine max
  Clone ID: 700877129H1
aaaaaaactaagaagacccatgagagcatcaacaacaggctcgctctcgtcatgaagagtggcaaattcaccctcggttacaagaccgttctcaaatctcttaggagctccaaagggaaattgattatcattgctaacaactgcccccctttgaggaagtcagagattgaatactatgctatgttggcaaaggttggggttcatcattacaatgggaacaatgtggatttgggcactgcatgtggcaaatattacagagtgtgctgccttagcat

SEQ ID NO: 17148 - DNA, 278 bp, Glycine max
  Clone ID: 700877131H1
gcgggtatgaacagcgtcgtaaagagatgaataagaagtatgatatttatgccaagcaattgcaagcggctaagaggagtggaaaccaggctcagcaaaaaaaagttaaggatcaagctaagtttgcagcagctaaggaaaaaagcaagggcaagggcaagggcaaggttgatgaggatgaggccccaccagaggcacctcagaagtggagggattacagtgtggagtttcactttcctgaacctactgagctcacacccccacttctgcagcttatt

SEQ ID NO: 17149 - DNA, 260 bp, Glycine max
  Clone ID: 700877132H1
cagtggtggttacaagcgtcgtcttgccttagcaatacaattagtgcaaacccctgatctattgatattggatgaacctcttgcaggacttgattggaaagcacgtgcagatgttgtgaagcttctgaagcatctaaaaaaggaattaactgtgttagttgtcagccatgatttgagagagttcgcaagtcttgttgatcgatcatggagaatggaaatgggtggcaacttagagaggaattctaccattatgattatgt

SEQ ID NO: 17150 - DNA, 273 bp, Glycine max
  Clone ID: 700877133H1
gaaagcctcactccctcaccggcgtctggaactggaagcaccgtcgcagtgattgagaacggtaatagtatttttgctttagccggataaagactttgaatttttcgataatgtgaaaggagaataatacataatgtttgtttgttggttggctggaatattagtgccttacattcctattctgtattggaaaagcaaaccctaatatctcttcttccccttcagctcagctcttgcttcttccaaagtttttgttaattctgaggtttagag

SEQ ID NO: 17151 - DNA, 264 bp, Glycine max
  Clone ID: 700877134H1
ggttgtgataaaaagagtgttaataaggaatcaacgggtatttctagatatataactaaaaagaatcgacagaatacgcctagtcgattggaattgagaaaattttgtccccgttgttgcaaacatacaattcacgcagaaataaagaaatagatcaaattgatcgcttgtgtgttacccttcgaaccaaagaacttaacatgtaaaatgatctattttacttatctatatagatagatctatctgtattctatcatttacagt

SEQ ID NO: 17152 - DNA, 269 bp, Glycine max
  Clone ID: 700877136H1
catctgcactgttctatgctgccacctcaacatctatgtaaacagatgaaggagaaatttctaaccacaaaattacaaattctcaaaatgattaccacgggatggatcagggcaataatattggggttgcaactggaaactggggatgtggtgcctttggaggagatcctgaagtaaagacaataattcagtggcttgcagcttctcaggctctaagacctttcatagcttactacacatttggcttggaggcattgcagagcctagac

SEQ ID NO: 17153 - DNA, 266 bp, Glycine max
  Clone ID: 700877137H1
gcaatgcttggaggcttcttgcagaggtgtccctctctcaagagaggtttcaagaagtcaatgatcttatttttgaagccattggctgtggtgaattggaggatgtcaacgttgaaagtgtcaaagaagttgatgcagtcagcacaagcgaacaccctactgtggtggtagctggttcacaagaatgtgtgattctacactaacaaggctctaaaattatgaacaaattcagcagatccgtagtgctttaagaataattgctgaat

SEQ ID NO: 17154 - DNA, 270 bp, Glycine max
  Clone ID: 700877138H1
atctttaaagccatggcggttgtgggagacgaaaaggagcaggaggagcttattcctggcttaccctacgaaattgcagagctgtgtcttcttcacgttccgtacccttaccaagctttgtcgcgctctgtttcgtcgacgtggaacagagcaataacgcacccttcttttattttctccaagaagaccctctcccgtcctcacctcttcgttctcgcgtttcattcacaaactgggaaaatccagtggcaggcgctcgacccttcctcg

SEQ ID NO: 17155 - DNA, 242 bp, Glycine max
  Clone ID: 700877140H1
ggctcgagtttagttatctactcttttcagcatgtttgttctctcaacgactcctccgcgaaagattattattcaatattttggttgggttgaatcccggggttgaagcgttgcagacatcacggctattctaagagtgtctcgctccctcattcatgtccgatctgtacgacggaggacgggtagttgcgtaactgccgttaacccttcgacgcacggtgggcgtggtgctttgccttctg

SEQ ID NO: 17156 - DNA, 249 bp, Glycine max
  Clone ID: 700877142H1
cgctgaacgcagaaaggggaaaaaggggattagggtttaggaagcagcgacaacaatggatttcacagcggagaagaaggaatcagagagcaacaccgaaaatgctcatccaacaactttagattcttcttctcaattggcatcggcacttgattccagcaacaaagagaggcgagaacgacaagctcgtgaactcaaagccggtcttcaccccctcaagcacaagtttgtcttctggttacacgcgcg

SEQ ID NO: 17157 - DNA, 252 bp, Glycine max
  Clone ID: 700877145H1
tttgtgtttatgatatatatgcagatgagagttatctgacaaatgggtatttggactccaaagtggactggattcctggtatgaagatcttccggctgaaggacatacctgacttcataaggacaacggatctaaatgatgtgatgttgcaatttctcattgaagttgcaaatagaattcaaagaaacactactattcttttcaacacttttgatggacttgagagtgatgtaatgaatgctctacctctat

SEQ ID NO: 17158 - DNA, 278 bp, Glycine max
  Clone ID: 700877148H1
tcaatgtttcgtcaccaagaagttaccttgtgaagaaaaagcatgtgaaatttagcaaacacatcagtgctgctgctgttgcaacaacaacaacaactgaggaaattcaagagtacaagcttccatcatgggctaagtttgaaatagggagggctgctgtctattggaaaaccatgaatggcctccctccttcttcaggagaaaagctaaaacttttctataatccagctgcaactcaacttgtccctaatgaagaatttggaattgcttttaatgga

SEQ ID NO: 17159 - DNA, 270 bp, Glycine max
  Clone ID: 700877149H1
gggcacttgtgcaaacagacaatgcaatgtctatttcccaggatatcattgcccgagggattttgtctttggcactgaaggcagcccatggacctcatctaatggtaacagtgaacgtgagaatgactgttaccgacttggttccttgccattgtcatcaccttgtcatatttcaggacacaacaaggaacttctgaatcaaacaatactcaagcatgaagcgatatttagggaccaaattcaagagcttcaccgcatttaccagaaaca

SEQ ID NO: 17160 - DNA, 267 bp, Glycine max
  Clone ID: 700877150H1
cggcctcatagcctcacccgaaagcactaaactttcccccgcgacagcaatcgcaggagcaatattcacaaccctcggaacctgcgacgccgcattcgctgttcaacaaatagccgacatagcagaaggcgacaaccgcggactggcactgttgctgcccataatcccagcaatagggtgggttctgttcaacattctgcagccggcgctgaaccagctgaaccgaatgcgcacaccaaaggcgtgatcattggcttagggcttggc

SEQ ID NO: 17161 - DNA, 266 bp, Glycine max
  Clone ID: 700877151H1
gtgaaactgggaaaatggggagagcctttgtgtatgtgattcttggaggaggcgtggctgctggctatgctgctcttgaattcgtcaagaaaggagtctctcatggtgaactctgtattatttccgatgaaccagttgctccttatgaaaggcctgcattgagcaaaggatttttgcttccagaagctgctgcccggcttccatcctttcatacctgtgttggtgcaaatgaggagaggctaactccaaaatggtataaagagcat

SEQ ID NO: 17162 - DNA, 218 bp, Glycine max
  Clone ID: 700877152H1
agggttccatcccatctattctatctatttagataaaacacgaattcccaatcttaatcgcaagcaattcctctctctgagagatgctctcgaaattcttctgatactcgtagaattttaatggcttgttcatcatccgattcaaaaaaaccagtgacgtcgctgttattcttttccttcctaattccgataccttccgatactctttccacacaaca

SEQ ID NO: 17163 - DNA, 267 bp, Glycine max
  Clone ID: 700877154H1
atgagatcaggtttacggaatcacttttcacaatcccgtgtacctgtatctgaatctggcaatcttgctgcttctattaataccccacatgatggatttgatatgcaaaccatcgtaagtcgaattcagtcagaacttgccacatcagtggctgcaacagctgcagagttgccttgcactgtgaagttaagagtgtggtcacatgacataaaaaatccctgtggcccacttaatgctgatagatgtcgtctaaccgtaccgcatgct

SEQ ID NO: 17164 - DNA, 267 bp, Glycine max
  Clone ID: 700877156H1
atccatcttcctcaccattattctctttttgctgaatagtcgaaactagtcgaccgttaccgtttgccgttgaaacctaccatacggctcgattcccgcttagtcgcaatttagtcctaacggtcgcacatcacgctacaacatcgtcatggccggtgcactcccagaaaagcagctccatgagctcctctcccgttctatggtcgacatctacgtcggaaccgagaacacacactggattcttcatgagaagctgctctgccatta

SEQ ID NO: 17165 - DNA, 271 bp, Glycine max
  Clone ID: 700877157H1
ttaaaatatattcaattttgcgtttctctgcctaaaaggattgaaagatgggtcaagcattcggttgctaccaagtcgatcagtcaaatgtggctatcaaggagcattttggaaaatttgatgatgtcctagagcctggatgtcactgcctgccttggtgtcttgggtaccagattgctggtagtctgtcgctgcgagtgcagcaacttgatgttcgatgtgagacgaaaaccaaggacgatgtctttgtcaatgtggttgcatctgtgca

SEQ ID NO: 17166 - DNA, 265 bp, Glycine max
  Clone ID: 700877158H1
caggagtcatgctcagaaattctttacaaagttggagaaagaggcctttgtaaaaggtgttccaataggacaagctcttgatatagacatcccccctccacggccaaaaagagatccaagcaatccttatccccggaagaccaatgttggtgccccaacattacatagcgaacagaagcatggaaagtctctcatttcaattgcatcttcacatggtaagcaagccctggacttggagacagagccacttccagagcatactgtc

SEQ ID NO: 17167 - DNA, 262 bp, Glycine max
  Clone ID: 700877159H1
caggagtcatgctcagaaattctttacaaagttggagatagaggcctttgaaaaaggtgatccaataggacaagctcttgatatagacatcccccctccacggccaaaaagaaagccaagcaatccttatccacggaagaccaatgttggtgccccaacattacatcgcgaactgagcatggaaagtctctcatatcaattgcatcttcacatggtaataaagcactggacttggagaaagaaccacttccagagcataatg

SEQ ID NO: 17168 - DNA, 263 bp, Glycine max
  Clone ID: 700877160H1
ggagtgggcggcggcgaggagggctcgggcggggccaaggaagtggaagacggagagacggagggcgtgggggccggcgcggagggcgagggcaaaggagtaggggcgggagtcggcgaatttgggggaggagtagagttggagggcggtggagaagaggtagaagaggaagggggcggtgaagaagaggagggcgaagaagaacaagaggcatttggcgttgtggggtttgttgttgggatttggatatttagggaagaaga

SEQ ID NO: 17169 - DNA, 270 bp, Glycine max
  Clone ID: 700877126H1
cttgaatcttcgttatccttctttttttctccttgaactcgaatattcactatggcagatgaggtggttctgctagatttctggccaagtccatttgggatgagggtcaggattgcacttgctgaaaagggtatcaaatatgagtccaaagaagaggacttgcagaacaagagccctttgctcctcaaaatgaacccggttcacaagaaaatcccggttctcatccacaatggcaaacccatttgtgaatctctcgttgctgttcagtac

SEQ ID NO: 17170 - DNA, 241 bp, Glycine max
  Clone ID: 700877087H1
gtaagctcccaagcagtgggaggcggctcgggactctgaccgcgtgcctgttgaagaatgagccggcgactcataggcagtggcttggttaagggaaaccaccggagccgtagcgaaagcgagtcttcacagggcaattgtcactgcttatggacccgaacctgggtgatctatccatgaccaggatgaagcttgggtgaaactaagtggaggtccgaaccgactgatgttgaagaatcag

SEQ ID NO: 17171 - DNA, 243 bp, Glycine max
  Clone ID: 700877088H1
aagatcaccaaagtacttgtgagtgtatacccaacacaaactaagatcaacatggactactacacccgcgtttcagaagttgagagggaacctatcatggagtattccacaccacgaccaatgatgggcaactaccaccaccctaatgctcaccgtgtcctcaacgagaagattgtttatgaggaggatgtgattggaggatcccgccacaaccacatgcatcaccaccaccctgagactcat

SEQ ID NO: 17172 - DNA, 240 bp, Glycine max
  Clone ID: 700877089H1
cagagtgagaaagagagagagagagagagaaactgagagaaattcgcaaaccctaatttcggaaagatcggcgatggctgcctccaaggatcgcgagaacttcgtctacatcgccaagctcgccgaacaggccgagcgatacgaagagatggtggaatcaatgaagaacgttgcgaatctcgacgttgaactgactgtggaggagcggaatttactttctgttgggtacaagaatgtgat

SEQ ID NO: 17173 - DNA, 237 bp, Glycine max
  Clone ID: 700877090H1
ccgacgcgcttttgatttgcaacggcttcaaggacgcggagtacatttctcttgccctggttgccaacaaacttgccctcaacaccgtgattgttgtggagcaggaggaggaggttgatttgatcgttgaattgagcaagaagctctgtattaagcccgtgattgggcttcgtgcgaagttcggaccaagcattccggccatttcggtgggacttcaggagagaaggggaagtttgg

SEQ ID NO: 17174 - DNA, 236 bp, Glycine max
  Clone ID: 700877091H1
ggctctgtttggatttcatcagaaatgaaaggcctgaatgatgattgtgaacactttgagtgttttccacctggtcacttgtattctagcaaagaaagagggttccgcagatggtacaatcctccttggttctctgaggctattccatctgccccttatgatcctcttgttttaagacacgcctttgagcaggcagtcataaaaaggttgatgactgatgtgccttttggtgttct

SEQ ID NO: 17175 - DNA, 240 bp, Glycine max
  Clone ID: 700877093H1
ttccgtttccagagttggatcggcggctcaaattaaagccatgaaacaagtagctggtaaattaaaattggaattagcacaattcgcagaattagaagcttttgcccaattcgcttctgatctcgataaagctactcaaaatcaattagcaagaggtcaacgattgcgcgagttgcttaaacaatcccaatcagctcctcttaccgtggaagaacagataataactatttatactggaac

SEQ ID NO: 17176 - DNA, 240 bp, Glycine max
  Clone ID: 700877095H1
ttcttgatctacatactgggtggggttgcttgcaacttcacaagttttctacatacatcagatcccactgttggtggaactggacctgtatttgcaataattggtgcttggctcatgtatcaaattcaaaacaagcatgttattgcaagtgatgcttcagagaacctgttccagaaggcagttattatgacagctcttattttcatattaagccactttggtccaattgacgaatggtca

SEQ ID NO: 17177 - DNA, 272 bp, Glycine max
  Clone ID: 700877102H1
cttccattcacaaccttaaacctttctttcttgtaaactttattgattgattctgagaatagaactaagagggtatagacatggctagcgcaattgcagcttcttttttggttctgcttctggctttccccactgtatttggagctgaccatgaagttggtgacactagtggatgggccctcggagttaattacaacacctgggcctctgggaaaactttcacagttggtgacacttggtgttcaagtatgactccactcatcaagttgatg

SEQ ID NO: 17178 - DNA, 274 bp, Glycine max
  Clone ID: 700877103H1
gttgttaggaggagaaaggatctaatggaagaagcatcaccataaagcaagacacttttttcctcttcattccttccttcaccttcttcgttgcttgcggtgccctagattttctctatcctttcaatcgttcccgaattccctcccgctagggtttcccatggattccgaggacgatatgcacgacgccaacgatttggagtcccttgacgacgatttctacagtggcgagaccgtggacgctcccatggattactacagtgactacgacgac

SEQ ID NO: 17179 - DNA, 274 bp, Glycine max
  Clone ID: 700877106H1
ggaaatttggctgatgacaccatcaattttgaggcttttccccacaagctggtgcagtttggagagattcaggaaaaagttgtattgaaattttcacaagaggaatttcttacagcttggtcaactcaggtgcgtcctgcaacaactctgttggctgatgggtgtccatatttgtatgctatggtgcatgatagttcagtgtctacaataccaggtgattttgtcattggtgttaagttgacaaccataaacaatatgtgtgcatatgggctcc

SEQ ID NO: 17180 - DNA, 256 bp, Glycine max
  Clone ID: 700877108H1
aacaatttcatcaagcctgccatggcttcctcgtgtgcttcctctgccattgcagctgttgccatctccacaccaagttcccagctgaatggatcactcttgggaagcacaaaagcttcttttcttagtgggaggaaactgaaggtgaacagttttacagcaccagttggagcacgacccagcactacagtgtgtgcagttgctgagcctgataggcctctgtggttcccaggcagcaccctcctccatggctaga

SEQ ID NO: 17181 - DNA, 278 bp, Glycine max
  Clone ID: 700877109H1
tggcatgctcagccacctctgcttctctcttctccgcaaaccccacacctctcttctctcccaaatcctccctctccctccctaacaactctctccacctcaaccctctccccacgcgcccttctctctccctcacgcgcccctcgcacactcgccgctccttcgtcgtcaaagcctcctccagcgagcttccgctagttggaaacaccgcaccggatttcgaagcagaggctgtgtttgaccaggagtttatcaacgtgaaactatctgattacatt

SEQ ID NO: 17182 - DNA, 274 bp, Glycine max
  Clone ID: 700877110H1
agacaaatcacttttaccaagaaaaactcaaaagtcacttcatcgccaaaatgactaccgagcagaccttcatcgctgtcaagcctgatggtgttcagcgtggcctcatcggtcccatcatcacccgcttcgagaaccgtggcttcaagcttgcgggtatcaagatggtcactccctccaaggagcacctcgagaagcactacgccgacttgagcgacaagcccttcttccccggtctaattgcctacatgggctctggccccgtctgcgccat

SEQ ID NO: 17183 - DNA, 275 bp, Glycine max
  Clone ID: 700877111H1
tcgatcggcttctattcggttctggttttgttttttcgtgctgttttgctttagatctgataattgttttactgtcttatgttcagattatcaacgatcgtgagactggcagatccaggggttttggatttgtgaccttcgcctcggagcagtccatgaaagatgcgatcggagcgatgaatggacagaacttggacggccgtaatatcactgtcaatgaagctcagtcccgcggtggcggcggcggcggcggcggaggaggaggaggatacaat

SEQ ID NO: 17184 - DNA, 275 bp, Glycine max
  Clone ID: 700877112H1
atagcctttctttcgtagctactactacttgagtttcattaattcttgggttcaaagaagcttagttgttggtagagattgacaattaggaaaatggtgagtgttgaagagattcgtaaggcacaacgtgcagaaggccctgccaccgtgatggctattggcacggccactcctcccaactgcgtggatcagagtacctatcctgactattatttccgcatcaccaacagtgcccacatgaacgagctcaaagaaaagttcaagcgcatgtgtga

SEQ ID NO: 17185 - DNA, 244 bp, Glycine max
  Clone ID: 700877114H1
taaattgtaccaagatatggaaagccgaatataaaatgcatctaatctgggtcaagtacccgatgaagtacgcccaaagtataaaggattttctcagtgggattcatatacttctcgacgttaccatgacacaattcttcaaatattacttcacggaaaggactcgagtgccaaagatgtagatggaaatgttatgcccatattggtgtatttggctcgcgagaagagaccccaagttccacac

SEQ ID NO: 17186 - DNA, 277 bp, Glycine max
  Clone ID: 700877115H1
ctactaatagcggacaaattggagtattaccaaatcatgcgcctattgccacagccgtagatataggtattttgagaatacgtcttcttaaagaccaatggttaacgatggctctgatgggcggttttgctagaataaacaataatgagatcactgttttagtaaatgatgcggaaaagggtagtgacattgatccacaagaagcacagcaaactcttgaaatagcagaagctaatttgaataaggcggaaggcaagagacaaacaattgaggcaaa

SEQ ID NO: 17187 - DNA, 275 bp, Glycine max
  Clone ID: 700877116H1
gcttcaatggcatcttcaagctccttctgcaacctcaagttcatcaccaaacccaacaatggtagaagaagctctcttccccgtattgtattctgtcagaagcaccacgatagcacacccaccgtccacctcaaccgaagagaactcatattgagaagcagcgaaatagcgaccattggtgccatcttgaacttcggtgggaaaaaacctgattatcttggagtgcagaaaaacccaccagcattagctctgtgcccggcaacgaagaattgcgt

SEQ ID NO: 17188 - DNA, 272 bp, Glycine max
  Clone ID: 700877117H1
ggcgcccatcctccccaccaaggatctccccaaggatttcgattggcgagacaaaggagccgtcactaacgtcaaggaccaaggggcgtgtggttcgtgttggtctttcagtacgacgggagcgttggaaggagctcattatctggccactggtgagctcgtgagccttagcgagcaatagcttgtggattgcgatcacgtgtgtgatccagaagaatatggagcgtgtgactcaggctgtaatggtgggttgatgaacacgcatttgagta

SEQ ID NO: 17189 - DNA, 264 bp, Glycine max
  Clone ID: 700877119H1
aaagagatcacatagcagaatggcttctactcaatgtttcttgcaccaccatgctcttgccacccctgccagatcgccatcacaacgcatcatggttagcaccaagcctaaccagcttgtttgcaaggcacagaagcaagaggatactgatgtcagcccaatctctcgccggttagctctaaccgtgctcattggtgctgctgctgttggctccaaagtccaacctgctgatgcagcttatggggaagctgccaatgtgtttgg

SEQ ID NO: 17190 - DNA, 267 bp, Glycine max
  unsure at all n locations
  Clone ID: 700877120H1
ccaaagcgcaccgtcaccgtaaacaaacggtggtccaggagggtggttgtatccagtggaggcttcaacctacgaacttgtccttataatgacacgctcacctacgcttcttctctctctcacaccccacacctccttatacacccttctcctctatctaacaacacccaacaaaaataaaagataaaaaacattagggttttcaatttggggaaataaaaatagggggaaacatcccagaganagtgtgtagaaatatgggtgtcg

SEQ ID NO: 17191 - DNA, 272 bp, Glycine max
  Clone ID: 700877122H1
cggctcgagcttaaattctctcttgtgtatttgttgttataaataattggagactaacaagttattcatcatgataattaataaaaaaaatatgcttaaccagaggcagtgttgttaaatagctgctacagtgctattgcattgcagaatttcttggacctgcaattgtggttccctccgctatcatggctgccatcaatgttgtggttgtggcatgcatcctgcatccttgcgagtctccagccaattgaacttttgagatgatattatgc

SEQ ID NO: 17192 - DNA, 260 bp, Glycine max
  Clone ID: 700877123H1
cccgtttgaaaataatttgtgtttttttccactgtagattgaatggagagcctgagaaagatgatgcggtatggtgttctgtgctccgggaaccctcggcgtttgtacgccacgaaagtggacctgaaaaagctccggccgatgattctgaagagaatcgagaaacgggcacatacttacccggttcgcggcatggttccggttgccaatgaggtcctccaagtcaggaatgatctcatccatggcgtttacaccttctt

SEQ ID NO: 17193 - DNA, 270 bp, Glycine max
  Clone ID: 700877124H1
attagaagcctgaaacgtctccttccactgctcggtgacacttaccttcccaatcactttcctttcccatttccgatataagctccaaacccttctccaccttcttcttcccaactcacccttttgcgttgaaactttgattctttctttgatacttttcataccaaagacgaaaccatgtcatcaacaacacggagagatctagaaagtggagggtcgaacaagaactacaacaacataagctacagtgctgctcccacttcctatgtt

SEQ ID NO: 17194 - DNA, 243 bp, Glycine max
  Clone ID: 700877086H1
gcaaactaaaggtgaagtttgccagaaacaagatgggaaggaaccattttcagcagcaacactgtgctgatgggagcatgtggatggagagtcagggtcagcaacagagctatgccttccaagaagagtcttggagccctgataacaactatggccacaaccacaagcaattcccaggcatgcacatgaacatgaacaacaacaacaacaacaaaaggcttggtgcttttgctgctgtggact

SEQ ID NO: 17195 - DNA, 248 bp, Glycine max
  Clone ID: 700877041H1
gttgcgaacatagtgctgagtaccaagagaaagctaaaatgggacttgggactctgccactgaccccttcttacagcagtttctcttcaaagtcaggagggcttttacatgacatcaccaatcacagcagggttaatagaagcatgaaattcagagtttcagccaaacaagagaagcaagaagagaagaaaaagcaatctttgttcagcagtgtgactgaagctcttgatttttctcaagtgagatct

SEQ ID NO: 17196 - DNA, 244 bp, Glycine max
  Clone ID: 700877043H1
attttattatcttcttcgtctgttctttgcattgaagaaaatttctttgaattgaagaaaacttgaaatcgaattgtgaaacagaaaataaaccaaaggaaatttttactgattgaattgcagagattggaaaaatggcgttgagtatgactcaacagatcgggaccctagctggtgcgacggtgccggattcctcggccggagaatcgaccgcggcggtgagtgccgccgggtgtggaagtca

SEQ ID NO: 17197 - DNA, 246 bp, Glycine max
  Clone ID: 700877045H1
ggagtgatggctgtgcagctgtgggaaaccctgaaggaagccatcgtagcctacactggcttctctccttccaccttcttcacggtgctggcgcttctttttgccgtttactacgtcgtcacgggtctctttggctcctccgacgatcaccatcaccgccaccgccacgtcgaggaggaggaggagatgccgcctctgcgccccccggttcagctcggcgagatcacagcggaggagctcaaggcc

SEQ ID NO: 17198 - DNA, 249 bp, Glycine max
  Clone ID: 700877046H1
gcttcaactaccacagaagacgatagcccataacctacgacctttccccggtcctcaaagtctacaaaattggtcgcatcagagaggcttgctggcacagcggttcttcctgcgggcctcgaccccgaaaccaacgtggaatcgaaagacatcgtaatctccgaagaatacggaatatacgcgcggcttttcgttcccaaaagaaccaccttttccccgccgccgcagcaaaagctccctctccttgtt

SEQ ID NO: 17199 - DNA, 248 bp, Glycine max
  Clone ID: 700877047H1
ggaggtggttgaggttatttatgataagactactgggaggagcagggggtttgggtttgtgaccatgtcttccgttgaggaagctgaagcggctgctaagcagttcaatggctatgaacttgatggaagatcattgagagtgaattctggaccacctcctgctcggaatgagagtgctcctcggtttagaggtggttcttctttcggttccagaggtggtggtccttcagatagtgaaaaccgtgttc

SEQ ID NO: 17200 - DNA, 250 bp, Glycine max
  Clone ID: 700877048H1
tggtagtaaccattgtagcttctcattgtgttgttccaaaccaagaaacacccaaggttcgtttatggttatcagatagtgaccaagtagtgcgtttaggtcatacacccactatatatgtttacaaagcaaaacacaacaccaaaaccatagagagaatgaaaacctcacttggcaagattttggtgtactactatccagttgctggaagattgaacttatcagatagtggtcgaatggaattggattg

SEQ ID NO: 17201 - DNA, 250 bp, Glycine max
  Clone ID: 700877049H1
tgttactcaacgccaattgcgatctcaaggtgtgcgatttcggtctcgcacggtcagccgcctcgacagaagataatcagggcttcatgaccgaatacgtcgcaacgcgatggtatcgcgcgcccgagatcatgcttacgttcaaggagtacacaaaagccatcgacgtctggtctgtcgggtgcattctcgccgagatgttgagcggcaagccattgtttcccggcaaggactaccaccaccagctcac

SEQ ID NO: 17202 - DNA, 249 bp, Glycine max
  Clone ID: 700877050H1
ctttcacacagcttatcccttcaccttcttcttcctccttaaaccctatcacactctccctaaaccctaaatccccaacctctccgccgcagcagcatttcaatctcgatattctccggcaccggcgccggagcctaattccactcttcggtgctccgtctcctcgttctcggagaagcaccacacgaactcctcgaactccgacgacgtggtggagctccccctgttccctctccctctggtcctctt

SEQ ID NO: 17203 - DNA, 250 bp, Glycine max
  Clone ID: 700877052H1
tgcatttccactacaaaaccagttgatgagtgcttcacaccatgcccaacttccaagaaatgaaaatgggcagactattggtcctccacaatcatccacgcacggctttgagcctgtaagcatttcaaatcctacgtacagaggagttgaagagtacttcccagaggaggaaattcgtattagaagtaatgagatgctagaaaatgaagatatgcagcatctactccgtatttttaacatgggaggccaa

SEQ ID NO: 17204 - DNA, 236 bp, Glycine max
  Clone ID: 700877056H1
cattccgcataggttccgtgttccaaacaatgagtttgactatgagcttgtgcggtaattacagtcttcagcttcaaaatcgcagaatcgtaagctgcaatcttcaccaggatggcaggcatattgttcccatcaatacgcaccaaaaaccttccaaacctgaaaagtgtcttcggtccaaatggaagattaatggcaataacattgggacatgcattggagtcatgacagtggca

SEQ ID NO: 17205 - DNA, 241 bp, Glycine max
  Clone ID: 700877060H1
ggccaagattccttctcttgggttagggacttggcaagctgaacctggtgttgtagctgaatctctcaccactgccattcaggttggatacaggcatattgactgtgctagtgcgtataagaatcaagcagagattggttctgctcttaagaagctttttgatgatggtgtggtgaagcgtgaggacttatggatcacttccaaactctggtgttcagatcatgcaccagaagatgtgcca

SEQ ID NO: 17206 - DNA, 247 bp, Glycine max
  Clone ID: 700877062H1
gctttagcgagtcttcccctccgctaccgcagaagtagaagctgaggccgtgagggcaacctcgacggcgttgtgcaaggacgacccgaagttgctctcacggcctcagcttctacttctgctttagcgagtcttcccctccgctgccgctgcgccgtcgtgccacaccaacgtcgggtcatctttgcacgacaccgtcgaggtcgccctcagcctcaccctcaccctctacctctccattctcgaa

SEQ ID NO: 17207 - DNA, 246 bp, Glycine max
  Clone ID: 700877063H1
aacaacgtggcctatatcaaagcctgggtgtgattcggggtgtggagatgttcccattccttatccgtttggaatgaaccgttcggattgctatgcaggaaaatggtttgaaatagaatgcagaaacagtactagaccttacctcaagtctataggattaggagtggaggtgttatcctttgatgtgaatagaggcacagttgatctcaacaatccgatttaccgcagtaacaactgcggaacaaa

SEQ ID NO: 17208 - DNA, 247 bp, Glycine max
  Clone ID: 700877064H1
ggaacttgtaagggagcaaaaaataaaggaacaagctgttgccatcagattgaatacaccggcattgcaggaaaactctcgatccatgaaacaccttgcggatgaaatgagtggtccattatctccaatgtcacttcctgcaccaaagcaactcaaattcactcctggagttgttaattggtcaggcagggagtcagctacatttttagatgaagcacgaaagatgatacccattgcagagttgtca

SEQ ID NO: 17209 - DNA, 246 bp, Glycine max
  Clone ID: 700877065H1
aaagatttcaacttttgggggatttagtgggcctactgaagttacttgtggtgggaatgcattgaaattctatgcttcagtgcggctaaatatcaagagaatagggtttgtcaagaagggtgaagagattttaggaagtcaggttcttgtcaaggttgtgaagaacaagcttgcccctccatttaaaactgccgagtttgagcttcaatttggcaaaggtatatgtaaagaaacagagattataga

SEQ ID NO: 17210 - DNA, 244 bp, Glycine max
  Clone ID: 700877068H1
gatcaaagattttgcaagtggggaaataaagcaggcttcgagcttgtttgattgtgatgtacaacttgatgagtatctaattaagagctattacaagacagcgtcgttgattgctgccagcacaaaaggagctgcgatctttagtggttctgacagcagtgtcactgagaaaatgtatgaatatggaaagaatcttggtctatcctttcaagttgtggatgacatattggatttcacgcaatca

SEQ ID NO: 17211 - DNA, 245 bp, Glycine max
  Clone ID: 700877071H1
tggggtttgaggaaactgagttaaggcttggactgcctggaaacggaggcactgaagaagtgctcatcaggaagaggggtttctctgagactgaaactggtcatgaagatgagtctgccaccactgtggatttgatgcttaatctttcttctaaggaggccgcaaccactgctgctgctgctgcagatccaactgataagcacaagactttgcctaaggagaagacccttctgccagcagatcct

SEQ ID NO: 17212 - DNA, 247 bp, Glycine max
  Clone ID: 700877072H1
ctcagagaagagagaaaagaaaaagaaaaatcccagtgagagagagaaaagaaaagaacgaaaaaccaagaagcttcgaaacgatcgtgtgagatgaacaagtgcgaactgtgcaaagttccggcgaggatcttctgcgagtcggaccaggcgagcttatgctgggactgcgacgctaaggttcacagcgccaacttcttggtcgcgagacacgcgcgaaccttactctgccgcacgtgccgctctc

SEQ ID NO: 17213 - DNA, 242 bp, Glycine max
  Clone ID: 700877073H1
ctcgagccggaagattccacaacagtgggaggtgcatccaaaaagagagagtggaaaagatggcgcggttgatcacagtggtgtggtgcgcggtggcggtgctattatgcgccgcggccggtgcgtcgtgggtggaggaggcggcgaacccgatacgaatggtgtctggcgtggaggcggaggtggttcgggtgatcggggagtgccggcgtgcgttgaagtttgctaggttcgtgagcagg

SEQ ID NO: 17214 - DNA, 240 bp, Glycine max
  Clone ID: 700877076H1
atctcaagattctaagagagattttgctgctctttgaagaagggtgtttgcttgattttggagatgtcgctgctctcagatctcatcaaccttaacctctcagacactactgagaaggtgatcgcagagtacatatggatcggtggatcaggaatggacctgaggagcaaagcaaggactctcccaggaccagttagcgacccttcaaagcttcccaagtggaactatgatggttccagc

SEQ ID NO: 17215 - DNA, 242 bp, Glycine max
  Clone ID: 700877077H1
ggaagttattgaagaatgcaagcttttctactttgcagggcaggacaccacttcagttttgcttgtttggacaatgatattattgagtaggtaccctgattggcaagcacgcgcaagggaggaagtctcacaagtttttggcaaccaaaaaccgacttttgatggactgaatcaattaaagattgttactatgattttgtatgaggttcttagattataccctccaggagttggtgttcctc

SEQ ID NO: 17216 - DNA, 238 bp, Glycine max
  Clone ID: 700877080H1
tttctttctcaccctgctgtaacattgcttacctagctagctaggtagggacatctctccctctttctatctatctatggagcacggagacactaccacagtgatcgaaacgtcgtccggtgaggctgtggcggcgcatggcggtcgcgaagtgactatgatggatgcgaattccggtgaagaagagaatcataatcataacaataaaggaaaattagaagagggtggtgcagaagaa

SEQ ID NO: 17217 - DNA, 247 bp, Glycine max
  Clone ID: 700877081H1
cacttcacaacacctcacccattatccactctttcccttctatattgttccacctcttaatttttctaacaaaatggaggaaagtgtgctaacaaagaggccaagagaagaagaacccctagagaacaaagatagtacttatgaattactagagtccttatcaaagaggcacaggtcatacaaccacatactctccctccttgaatcagaggaagatgacgccacacaagacctatctaatctcatc

SEQ ID NO: 17218 - DNA, 94 bp, Glycine max
  Clone ID: 700877082H1
tgacgatggaattggaagttgacgagaacgacttgaaagccgccggcgctgaactcttcgccgaaggtggccggcgaggcattcgtatcaatgg

SEQ ID NO: 17219 - DNA, 245 bp, Glycine max
  Clone ID: 700877083H1
ctctcgctggtggataacgaaatttcttaggtaattctctcttctctctctatctgatctctccacgattattacggtttgcttcgatcaagttcaatttcgtttttcttcttcttttcgtttgtgttttgaagaaattgaagggaaacaaattccgaaaaatgaaaaatctcgagcgatcgtttttctttgctggtttttgttttgtaattctgcgaaattggtgatttgttgaatgatttgct

SEQ ID NO: 17220 - DNA, 240 bp, Glycine max
  Clone ID: 700877085H1
cttggcgaactgtcggagcaggcggacggtacgaggagatggtggagttcatgcagaaggtggtggtccggtcgacgccggcgtcggagctcacggtggaggagcgcaacctcctctcggtggcctacaagaacgtcatcggctcgctgcgtgccgcgtggcgcatcgtctcctccatcgagcagaaggaggagggccgcaagaacgacgaccacgtctccctcgtcaagcactacagat

SEQ ID NO: 17221 - DNA, 251 bp, Glycine max
  Clone ID: 700877040H1
cgtcatcttaggtgatccttcacccgttttgttttatcccatcagtagcactgagattcgctgtttggttgatgtgcccggcctaaaattaccttccctaggtggtggtgaaatggcctgttatttgaaaactgtggtggctcctcaggttcctccagagctgtatgattcttttatagcagctattgacaaaggaaacataagaaccatgccaaatagaagcatgcctgcctcaccttatcccacaccag

SEQ ID NO: 17222 - DNA, 239 bp, Glycine max
  Clone ID: 700876986H1
aaataggatggggtcaaatgatgtatggggcgaaggcattggtgtaaatactaatgctgatttcagatcaggatatattatgaatactagcattgctggtcttgaaaaagcggatgcgatcctgttggttggcacccagccacgggtggaagctgccatggttaatgccagaatacgcaaaactgtcagagcaaaccaagccaaagttgggtacattgggcctgccactgatttcaact

SEQ ID NO: 17223 - DNA, 238 bp, Glycine max
  Clone ID: 700876987H1
ggcttgttacccccttgaatcaaccaaaaccaaaagcaaagaatagatctttttgtagagcacactttgtcccttaccgaggccttgtgtggcttccaatttgtgctgactcacttggatagccgtcagcttcttattaaatcaaatcccggggaagttgtgaagcctgattcatacaaggctataaatgatgagggaatgcccatgtatcagaggccattcatgaaggggaaacttt

SEQ ID NO: 17224 - DNA, 238 bp, Glycine max
  Clone ID: 700876991H1
tggatattgaaacttgagggtggcgcagaaaagcgatattctacctatatattgtttccgggcatgccacgtattcaatttgatcttggcgccacataacagaatttagcttgagcttgcatacaacaagtagaatggctctgaaacttgtaaatctagggtttcactcatcgatcccgtgttctccgaggcccttgaacgatcggttcgtggttcggtgctctaaagtggaacaaat

SEQ ID NO: 17225 - DNA, 242 bp, Glycine max
  Clone ID: 700876993H1
gaaaaagttaattgcataaaaaaaattcaaaaactaacaaaaataaaatctaaaggattgagtatctgtatcaccaatccaacaaaaaaaatgtctgtggcatcttcattcccatgcatcaaaatcccagcttgttcctcctctccatcatgcacatcttcatcaacttcatcatttagattttcttcttccaagccttatgctgctgtttctataaggcactctcagactgaagggcctct

SEQ ID NO: 17226 - DNA, 105 bp, Glycine max
  Clone ID: 700876994H1
attcctttgaggaagtttctttaagtgcagcacttaatggtgttgaggagttggactatatagaaagaattcctcttgccccatctgagggttttcctcatgtgc

SEQ ID NO: 17227 - DNA, 240 bp, Glycine max
  Clone ID: 700876995H1
gtttctattcctcactaggagctcctgtccactggttcttcatctgcatgcacacagttgcatagttttggaaaccaagaattcctgaagaagggtagcatcaacaagcagttctgacaatggagatcaccaatgtcagtgcgtatgaggctattgcaaagcagaagttgccaaagatggcgtttgactactacgcatctggtgacgaggaccagtggactctgcaagagaacagaaatg

SEQ ID NO: 17228 - DNA, 278 bp, Glycine max
  Clone ID: 700877002H1
gattcggctcgagctcgagccgattcggctcgagagagcatttcttgaatggatacctctccgaaaatacgtatctgtggtctgaaggaagtagtgagtggcagcccttgtcctcggtttctgacctgtgggctcaaattaaccggcagggacctgattcttcaactactgtgtctgctcctgatgttgatgagtttgaaagatggcaaaaggagattcaggaggtggaggcacaggtggaaggttcggaatttggatccttatctggcaatgttggt

SEQ ID NO: 17229 - DNA, 264 bp, Glycine max
  Clone ID: 700877003H1
gagatgaatgatgcaacccatggtgctgacaacatcagaaatgatatcagtgcacttgctcaaagatgcactattattgatcgagatgaggagtgtggggtattgcccttcctgatatatgtttgacaaaactgcacctgcaattctttttttggtcttaaccctttagtttcatcaggggaaagggaccttgactaatccgaagtttggccaggaggtaagtaaagcctggtcaagaattgtttccgtcaagggtcgaactcg

SEQ ID NO: 17230 - DNA, 257 bp, Glycine max
  Clone ID: 700877005H1
gaagcattggtggctagctaagcgaactagaaaccaaactcttcagcagtttgtttttgcttagcttcttcttctgcttttgctttctccaccaccacaaccaccatgtattctgccactgcctccaacactttcttccttctctcttgtttccttctcttctgtctcctctcagctccttcctgtgtttccatgttctctggtattgagacaggagctttagaaaaaagagatgatttgtttcgccagattctaag

SEQ ID NO: 17231 - DNA, 260 bp, Glycine max
  Clone ID: 700877007H1
ctcaacaacaacccaaagataaaaagcacaacacaagacactgaactcgcactcactgggttttcaaccatggatgcgatacggaagcagctcgatgtgttgatgggagccaaccgtaacggcgacgtccgtgaagtcaatcgcaagtactacgatcgcgacgtctgtcgtctctacctcgtcggtctctgccctcacgaactcttccagttaacgaaaatggatatgggcccttgccctaaggtccactccttgcagct

SEQ ID NO: 17232 - DNA, 269 bp, Glycine max
  Clone ID: 700877010H1
tcggctcgagggcttatggtggatacctaggcacccagagacgaggaagggcgtagtaagcgacgaaatgcttcggggagttgaaaataagcgtagatccggggattcccgatataggtcaacctttcgaactgctgctgaatccacgggcaggcaagagacaacctggtgaactgaaacatcttagtagccagaggaaaagaaagcaaaagcgattcccgtagtagcggcgagcgaaatgggagcagcctaaaccgtgaaaacggggt

SEQ ID NO: 17233 - DNA, 257 bp, Glycine max
  Clone ID: 700877011H1
attgatttctccctcttcgctctctctcagtgaccagagacagatgatgatggagatggcgaacgaaacgctgtcgttgcggcactcgcggcgttggtgctactcgcggcgagtgtggcggtggatgctcaggagaactcggacgtgaagacgctggtgaagtacaagcacgggaagaagtactgcgacaaaggatgggaatgtaagggctggtcaatttactgttgtaacctcaccattaccgattatttccagac

SEQ ID NO: 17234 - DNA, 259 bp, Glycine max
  Clone ID: 700877012H1
aactcttcaaaagggagaagaaaaggaaagaaaactctcaaaaaactattatagcaatggcagaacaaaaccaaaaccaaacaactgaagctggaaggcaccatgaggttggtcacaagagccttctccagagtgatgctctttaccagtatattctggagacaagtgtctacccaagagaacctgaatccatgaaagaactgagagagttgacagcaaaacacccatggaacatcatgacaacctctgcagacgaagg

SEQ ID NO: 17235 - DNA, 260 bp, Glycine max
  Clone ID: 700877013H1
aaggaaggtaaaggaagcaaacgcaagagcaagagcaagagcgaaagcgtcagagaagatggaaggagaagagggttctcagcagccacagttggtgctcgcggacaagctattccttctcctgcaacccgatgtgcaagacattgacaaggttcgctacaaagaggatgtcttcactcatgtcaaggaaaacgatatggtccctctgtacgaaaccctagtcgctgattccgtgttggacttggatcgtgcccttttgg

SEQ ID NO: 17236 - DNA, 215 bp, Glycine max
  Clone ID: 700877016H1
ttgccacagccgtagatataggtattttgagaatacgtcttcttaaagaccaatggttaacgatggctctgatgggcggttttgctagaataaacaataatgagatcactgttttagtaaatgatgcggaaaagggtagtgacattgatccacaagaagcacagcaaactcttgaaatagcagaagctaatttgaataaggcggaaggcaagaga

SEQ ID NO: 17237 - DNA, 259 bp, Glycine max
  Clone ID: 700877017H1
ttttgtcattggtgttaagttgacaaccataaacaatatgtgtgcatatgggctcaatcctggtatttcaggttctcgtcttttgggcaccattcctcagtctatttcacagcaaactgtttggaatcaaatggcaacagtgagaacaccattgaattttgattctagcaagcagagcttttgtcaattttctattgaccttctcggtggaggaattttagtggacaaaactggagattggatcacacttatacaaaat

SEQ ID NO: 17238 - DNA, 258 bp, Glycine max
  Clone ID: 700877018H1
ggcttatggtggatacctaggcacccagagacgaggaagggcgtagtaagcgacgaaatgcttcggggagttgaaaataagcgtagatccggggattcccgatataggtgaccctttcgaactgctgctgaatccacgggcaggcaagagacaacctggtgaactgaaacatcttagtagccagaggaaaagaaagcaaaagcgattcccgtagtagcggcgagcgaaatgggagcagcctaaaccgtgaaaacgggg

SEQ ID NO: 17239 - DNA, 256 bp, Glycine max
  unsure at all n locations
  Clone ID: 700877019H1
attgatttctccctcttcgctctctctcagtgaccagagacagatgatgatggagatggcgaacganaacgctgtcgttgcggcactcgcggcgttggtgctactcgcggcgagtgtggcggtggatgctcaggagaactcggacgtgaagacgctggtgaagtacaagcacgggaagaagtactgcgacaaaggatgggaatgtaagggctggtcaatttactgttgtaacctcaccattaccgattatttccag

SEQ ID NO: 17240 - DNA, 257 bp, Glycine max
  Clone ID: 700877021H1
aaggaaggtaaaggaagcaaacgcaagagcaagagcaagagcgaaagcgtcagagaagatggaaggagaagagggttctcagcagccacagttggtgctcgcggacaagctattccttctcctgcaacccgatgtgcaagacattgacaaggttcgctacaaagaggatgtcttcactcatgtcaaggaaaacgatatggtccctctgtacgaaaccctagtcgctgattccgtgttggacttggatcgtgcccttt

SEQ ID NO: 17241 - DNA, 257 bp, Glycine max
  Clone ID: 700877024H1
ctactaatagcggacaaattggagtattaccaaatcatgcgcctattgccacagccgtagatataggtattttgagaatacgtcttcttaaagaccaatggttaacgatggctctgatgggcggttttgctagaataaacaataatgagatcactgttttagtaaatgatgcggaaaagggtagtgacattgatccacaagaagcacagcaaactcttgaaatagcagaagctaatttgaataaggcggaaggcaag

SEQ ID NO: 17242 - DNA, 254 bp, Glycine max
  unsure at all n locations
  Clone ID: 700877025H1
tccaaagtgattcttaggatcgagagacaaccagtaaatccaatcaatgaacttaaactttagcagtttccttgttgatggtaccgtggaacagaattttgacaatcacaaagtggaaggacaaaactcagcacctagcaaccaacaatgagagacataagatcatgattaagagccccaaagaagcagattttccattcaacctggaacccgnannctcaatcaattactgatcctgaaaaggcaaaggcttc

SEQ ID NO: 17243 - DNA, 253 bp, Glycine max
  Clone ID: 700877031H1
gcaaaaatgcaggagctgatttggtgggtggagaggatctgatagaacagataaaagcaggattcatggagtttgataaactaattgcttctccagatatgatgcctaaggttgctagcctagggaagattctgggaccaagaggactgatgccaaacccaaaagctggcactgtaacacccaatattccccaggctatagcagaattcaagcagggaaaagttgaatacagggcagacaaaactggaatcgt

SEQ ID NO: 17244 - DNA, 93 bp, Glycine max
  Clone ID: 700877034H1
atgacacgctgttatctaaacttcaaaagggtctttgacaaaatcaagaagaacccatgagaatcttctgcttaatgtacttttccccgtttc

SEQ ID NO: 17245 - DNA, 252 bp, Glycine max
  Clone ID: 700877036H1
cataaaatttgacttattttgattttttatgattgatactagtgtgagcagttgataagagagatgatgatcaacgtgaaggaatcgaccatggtgcggccggcggaggaggtggcgcggttggtggtgtggaactccaacgtggacctggtggtccccaatttccacacgcccagcgtctatttctataggtccaatggcgcccccaactttttcgacggcaaggttatgaaggaggcactgaccaaggtg

SEQ ID NO: 17246 - DNA, 227 bp, Glycine max
  Clone ID: 700877037H1
aacacactatggatgtttggtcatggatatgtgagctccccaactcggtggaggggaccgagtcccactcgccacccatgaagttcgaaatcgcgagtgagaagaacgacgacaagctggacaactcaactcgttccattcacctgaaagctgagcgaacctccggctcagactcggaagctgcggtgatcttcaccgtatgcttgcaaggctttcacccacacaac

SEQ ID NO: 17247 - DNA, 243 bp, Glycine max
  Clone ID: 700876985H1
attgaagttaaaagccttagccttccctacaactccaaacacaaagacatcctcatccatggctgcctccgtctccactgtcggagctgtcaacagagctcttttgaacctgaatggttctggagctggagcttcagctcccagttcagccttctttgggaccagcttgaagaaggttattgcctcaagggtccccaacagcaaggtttccggtggaagcttcaagattgttgctgtagaaga

SEQ ID NO: 17248 - DNA, 240 bp, Glycine max
  Clone ID: 700876950H1
ctaggatcaacaatgacggaaatctccaattcgccaccgacttcaaatcccgtcgaagaagacacccaaactccgaaaaccacgcgaaacacaatacccggcgtcaaacgcctcatcatcagcgtcactgtgctcttctcattcatcctaggttttactcttctgtggaaatccgttaaaatctaccgcgcgccgctcacgttcgatcgaatcggatccttctcatcacaaatcagaatc

SEQ ID NO: 17249 - DNA, 251 bp, Glycine max
  Clone ID: 700876952H1
ggaattcggatcgaggatgcatccacggatcagacccatcgccggaaaaatcaaatgcgcggcgagactcttctgttcatcttcgaagatcacgccggcgggacgccgtagcaaatcccgacgactctcgcgggtctccgagcccgactgacggagaaatcgccgtcgctatcggatttcgtcgcgcttaaatcggacagcgcatactcagtggaggtcaaggagaagaagaagccgcttccgaagccgaa

SEQ ID NO: 17250 - DNA, 247 bp, Glycine max
  Clone ID: 700876953H1
aaatgaacgaataattcgaggtcttctcaaactcacaccaaatcgatcgatgtcttaactgtaacagcttgggaccacaatatgtttgctcaaatttctggacgtttgtttgcattaactgtagcggaatacaccgagaatttacacatcgggtaaaatcagtttcaatggctaaatttagtgcacaggacgttagtgcacttcaagaaggaggaaatcagcgtgcacaggaaatctatcttaaaga

SEQ ID NO: 17251 - DNA, 247 bp, Glycine max
  Clone ID: 700876954H1
gaaaggcccatcattcacgacaacgaaagcgtcgctagttcgttccattcccctctccatataaacgcttttgacaaaatcctaacatttgttgtggcagttattgaaatccaaattctcggggcagatatctttcgaccttgcttcacaccattcaacgaactgcactcactgtgctctctagaaccctaacttttgtgctaaaaccctaaaccacgtcgaatcgatgattgaaccctacaacaag

SEQ ID NO: 17252 - DNA, 245 bp, Glycine max
  Clone ID: 700876956H1
gtggaagttctggggcaagctgagaagtgtgccaagtgcccaaggtagaaccagtatcgcggaatacgtcagcgtctatggggaaagtgggctgctgagattcgcgacccaagatagggggttcgtgtttggcttggtactttcagcactgctgaagaagctgcaagagcttacgatgctgaagcaaggaggatccgtggcaagaatgccaaggtgaatttccctgatgagccttcaggcgctgc

SEQ ID NO: 17253 - DNA, 240 bp, Glycine max
  Clone ID: 700876957H1
ggggtgtgcttcctcgaagcgtgttgatgcggcacagtgccctaccgtcccgcacccacaagcttggcggtgttcgacatcaacaccatcgcggagccatggctgaagcacctcaacaacaccatcgaggagccatggctgaagcacctcaacaacaccacccctctcccccaagacaataataaaccctccctccccgcccctattctccacaaactcaacttgcgcgacgccaccgat

SEQ ID NO: 17254 - DNA, 238 bp, Glycine max
  Clone ID: 700876958H1
cgcgcactgagcagccgttgccggacaaaccattgccgacgatcgcggagacagtgagacttcgcgtggtgttcgaggctcgtggcatgttgagcacgtcacagaagaagcaacggctcaaacgttgctggtttctgcttaaaccccaacacaccgccatttccgatgttgcctctcatctactcaacactttccgcctccaccgtcactgtccccctggcatcgtcctatcgatgga

SEQ ID NO: 17255 - DNA, 241 bp, Glycine max
  Clone ID: 700876959H1
gtgaactagacaatttcaaactactcagctctgtatcaaacctgagaagaatcagactagagcggatttctgttcctcacttaggggcattgaaaaatcttggaaagttatccctctacatgtgtagtaacataactcaggcttttgaaaatggtaccatcacagttttggattcatttccaaaactatcagatttgaacattgactattgcacggatatggtgaaattgcctactgggat

SEQ ID NO: 17256 - DNA, 246 bp, Glycine max
  Clone ID: 700876960H1
caagaacttaaagaagcagagagtgcagaagagagagcaaaggaacaaagctgaaggacttcttggccacaattgagtcatcttctacctttcaatcggagatagcaaagctccgccttgatgttgaggagtatgcaaaacaatttccaaccattggttttgataaagcaaccatgaagcacaagaattgagaaaagaaaattttccattaggtcatcccatggtcttactggcaagcaattcaac

SEQ ID NO: 17257 - DNA, 245 bp, Glycine max
  Clone ID: 700876961H1
ttcctgttcaatttgatgaggaagaagcttctaaatgactccaaaccaaaaggtgagattagtgtgaatcttctgatgctttggttctgattactcgccaaatcttgagtcattaaggatttagctccacttttctgtgctagttacacttaacatctctaggctcctatacccagacttaatttttagtgagctgtcagtgatagattttttttttttgtctgttcgcgactttgcattttctt

SEQ ID NO: 17258 - DNA, 219 bp, Glycine max
  Clone ID: 700876962H1
gagagaaagatgggtagtagtgaatatcagactctgcacattttactactttcccttcttggctcatggccacatgataccaaccgtggacatggccaaattatttgccgaaaagggtgtgaaggccactataatcaccacacccctcaacgaatctttgctctacaacgccattggaaaatccaaaactaatggcaacaaaatccacatcacatacaa

SEQ ID NO: 17259 - DNA, 219 bp, Glycine max
  Clone ID: 700876963H1
ctttctattgacgtgcatcatggaatgttcccaatgctctgtttcaccacatgtactcatacgacgtaagtaactagatcgctattacacgcgctcaggacagggctagcattggcacgctgggaggaccagcagcatatgtgctatttgcacactcactcaggctaggtgactgtgaatgcagaagctgggagcgcattgttctattggctagttgag

SEQ ID NO: 17260 - DNA, 247 bp, Glycine max
  Clone ID: 700876964H1
ttctgttcttcttttctcgcataataaagtgatcaataagcacataaaccttcgaggacatggcatcagccttgtccacgaccagtgtgctttgctggaggaatcctcagcacatgcatattatctcaccctcttcacagacacttcaaaatggaactctaagaactgtagctgcttcagcctcaacagatatcagcatagaaagtgacaagtgttcctctttgttggtgaaccgaagcacaatttt

SEQ ID NO: 17261 - DNA, 253 bp, Glycine max
  Clone ID: 700876965H1
ggtagctagaccacggtagttcaattgccatggatattggtggtggagtggaagagccagtgagagagttgaggcaatacttcaaaactggaaaaaccaagagtgtaacatggaggaaaaaccagctcacatctctcatagaccttgttcatgagaatgaagatgctatatttaaggccctccataaagatcttgggcagcaccctgttgaggcttaccgtgatgaggttggacgggtagaaaaatcagccag

SEQ ID NO: 17262 - DNA, 253 bp, Glycine max
  Clone ID: 700876966H1
ctaggacagaaatcaagcattgggtcgaactcttctttgatgtcaaagtaatagctatgaatagtcatcgactcccggtaaagggtagaagagtacgacctattatgggacatacaatgcattacagacgtatgattattacgcttcaaccgggttattctattccacctcttagaaagaacaaaacttaaatcaaaatacttaatagcatggcgatacatttatacaaaacttctaccccaagcacacgtaa

SEQ ID NO: 17263 - DNA, 251 bp, Glycine max
  Clone ID: 700876967H1
gagaaaagaaggaatgatggaacaaatcaaacgcgaaatttccgtgatgcgtttggtgcgacacccaaacgtggtggaaatcaaggaagtgatggccacaaagacaaaaatcttcttcgtgatggaatacgtgcgtggcggggaactcttcgccaaaatctccaaaggcaaactcaaagaagatctcgcccgcaagtattttcagcagttaatcagcgccgttgattactgccacagcagaggtgtatccc

SEQ ID NO: 17264 - DNA, 247 bp, Glycine max
  Clone ID: 700876969H1
aaagaagaagaagaagaaaaaggaaaaggagaaggagaagaaggcagctgcggcggcagagcagcagcagcagcagtagcaggaactgtaccagaaaatgaaacagcagaagataaagctgaggtaattgaaccaaagaagaatgattcaaaggctaaaaaagcagctgataagaaagtgccaaagcatgttagggagatgcaagaggcactagctcgaagacaagaggctgaagaaaggaagaaaa

SEQ ID NO: 17265 - DNA, 240 bp, Glycine max
  Clone ID: 700876972H1
cttcaacaggacctggcattcgctttttccagctatatgtgtacaaggacaggaatgtggttgctcagcttgtgagaaaagctgaaagggctggattcaaagccattgcccttactgttgataccccaatactaggacgcagagaagctgatatcaagaacagattcacattgccgccatttttgacattgaagaactttgaaggattggaccttggaaagatggacaaagctgatgact

SEQ ID NO: 17266 - DNA, 239 bp, Glycine max
  Clone ID: 700876973H1
atggcgtactgttgtgagcatccccaacggtccctctgctctggcagtgaaggaagctgcctggggtctagctcgctatgctgcaatttcacaggagaacgggttggtcccaattgtggagccagagatcttgcttgatggtgagcatgggattgacaggacattcgaagtagcccaaaaggtgtggtcagaggtattcttctacctggctgagaacaatgtcctgttggcaggtattc

SEQ ID NO: 17267 - DNA, 108 bp, Glycine max
  Clone ID: 700876974H1
tttcgaaagattttatccaattgaaattttaaaaatgactgggataaacttaagaattcaattacttgaaatgtgaatgaagtacaacaatgttaacttggtacttgg

SEQ ID NO: 17268 - DNA, 164 bp, Glycine max
  Clone ID: 700876975H1
agaaggcacgctcgggcacggaggaagagagaccatagacgtcgtgctcagtaccaagtttgaagagaaaacgttgatccgattccgaatttgcaaattagaatagaattcttcttccttccctttggtatcccgtatcagtatgcagagatccagagacgatg

SEQ ID NO: 17269 - DNA, 244 bp, Glycine max
  Clone ID: 700876977H1
ggaatgggtttcacttgtatgtgatggagacaaacaccccagaatacgtactgctcgtcctcttaatactttacaatatgaaggaacaagaaagagacgtagagctgctatgggagattatgcatggtctgttggggatagagttgatgcatggatacaagaaagctggtgggaaggagtcatcacagcgaagaataaaaaagatgaaacaacatttactgttcactttcctgctagtggagaa

SEQ ID NO: 17270 - DNA, 246 bp, Glycine max
  Clone ID: 700876978H1
tggttaaaaggcagtatcagtgtgtaggtagtagctgtatgaatgctgggcggacatctggtataccttcagaagatgcatgcccatcaaaacttgaccatattgctaacaataccccatgtccaaagggtgcatcagattataccttaggtaaaggtgtcacaggtttctcattagatgcgtctgatctagccaacttcctcacaatggacatgcctataggattgaattgcaatggacaaattt

SEQ ID NO: 17271 - DNA, 243 bp, Glycine max
  Clone ID: 700876979H1
gcttcaactaccacagaagacgacagcgaagtaacctacgacctttccccggtcctcaaagtctacaaaagcggtcgcatagagaggcttgctggcacagcggttcttcctgcgggcctcgaccccgaaaccaacgtggaatcgaaagacatcgtaatctccgaagaaaacggaatatacgcgcggcttttcgttcccaaaagaaccaccttttccccgccgccgcagcaaaagctccctctc

SEQ ID NO: 17272 - DNA, 251 bp, Glycine max
  Clone ID: 700876981H1
cttttctccgagacgaactcggaggaggagcggcgcgtgaggtagcaacctagcattggggcgtcggggatttcctccggggtgaagctcgaaaacgtggggaaagcctacaagggcgtgacggtgctgaaggacgtgagctgggaggtgaagaagggggagaaggtgggcctggtcggcgtgaacggcgccgggaagacgacgcagatgaggataatcgcgggccttgaggagccggatttcgggaacgt

SEQ ID NO: 17273 - DNA, 248 bp, Glycine max
  Clone ID: 700876982H1
aaagaagaataatattgaatatttggttgggttgaatccctgggttgaagcgttgcagacatcacggctattctaagagtgtctcgctctctcattcatgtcccaactgtacgacggaggacaggttgcgtaactgccaccaacccttcgccgcacggtgggcgtggtgctttgccttctgaaggtggtagcccttcagacttgctcttcttagctggtggtggttctgctgtcttctagcttcttct

SEQ ID NO: 17274 - DNA, 250 bp, Glycine max
  Clone ID: 700876948H1
gtgactgtgtctcccgatggatcaatttgtgcttcgggtggtaaggacggtactgccaacctttgggacctaaacgatggcaagcgtctctatgcactcgtggctgatgatgtcattcacgcgctcgtgttctcacccaatcgctactggctatgtgctgccacgatcatcgggcattaagatctgggaccttgagtcgaagattatggtgcacgacctgcagccggacattgaagagcctaagggtcag

SEQ ID NO: 17275 - DNA, 254 bp, Glycine max
  Clone ID: 700876908H1
aaataactcaaacaggagcagccatggataccgcaaatgcagctcctttgcacatagcaatatttccatggtttgctactgggccatctggtccccatctcttcacctctccaacaagcttgcacagagaggccacagaatctccttcataggccccaaaaaaacacaaaccaaactacaacacctcaatcttcaccctcatctaatcacctttgttcccatcaaagttcctcatgtcaatggtcttcctcacg

SEQ ID NO: 17276 - DNA, 254 bp, Glycine max
  Clone ID: 700876910H1
tcggctctaggaatatagataattgttatagtaagaaaatatggagattgagggttgggttgtgattgggatgattcgctcatgagttgtttttggtatttggtttcattattattagtggagtttggtggagaagaatctaatctgtttgtcctgtccactccattccactccaccatggctatctatctttccctttgtttgtgtttctttctaaatataattgaataaatagtaactctaatctaacacgc

SEQ ID NO: 17277 - DNA, 247 bp, Glycine max
  Clone ID: 700876911H1
tccagccacacgcttcagaagacatggcctcattgggtgggttacaaaatgtgagcggcatcaattttcttatcaaagagggtccaaaagtcaatgcaaagttcgagctgaagccgccaccatatccactgaatggtttggagccggtgatgagccagcagacacttgagtttcactgggggaagcaccacaagacttatgtggaaaatctgataaaacacgttgttgggacagagcttgctgggaa

SEQ ID NO: 17278 - DNA, 75 bp, Glycine max
  Clone ID: 700876913H1
ccgcaaacagcttcacttcacactctactcccaaaatggcggctgctacgacgtcgtattcttccgcaatcgccg

SEQ ID NO: 17279 - DNA, 254 bp, Glycine max
  Clone ID: 700876914H1
ttttctttttgaattaagagttgagaattcacgtgccccagttggttgatctaccttgcagcttgagatagtaaagttgcaaactttgaagcaattagtgtagaagatgagtacgttggatgcaacaagggctgaacttggtcttcttgttttatatttgggcaaggctgaagcaagggacaaaatatgcagggcaatacaatatggttccaaatttttgagtaacggggaacctggtactgctcagaatgtcg

SEQ ID NO: 17280 - DNA, 255 bp, Glycine max
  Clone ID: 700876915H1
actatctctctctctctctctctaggaatccaaaatattccaactaaacctttctctctttgcatggcagatcctacccgtctttcattccgttcaatctcagacctgtatgtgtatctctaatgcaatctggtgacgaatgcgaagaggaatccaaaacgtcagataccactgcctttcagcatgcctgtgacagccccatatgatccgcataattctgatgataacatgcttttccctgttgaagagattgta

SEQ ID NO: 17281 - DNA, 257 bp, Glycine max
  Clone ID: 700876917H1
ttggatcttaccctcttgtttgctaatattctcattcttctgtctctgcttcttctccttctgaactaagagatggggttgtctttcaccaagctttttagccggctctttgctaagaaagagatgcgtattctcatggtaggtcttgatgctgctggtaagactaccatcttgtacaagctcaagctgggagaaattgtcacaaccattcccacaattggattcaatgtggagactgtggcatataagaatattag

SEQ ID NO: 17282 - DNA, 244 bp, Glycine max
  Clone ID: 700876918H1
ggcgtctctctctcacctcaacaaactcctctgcatgcccccgctcaactcttcaccctctatttcgccaccacgcagcagcgtcggaatttggaccaaacctgtcggaaggccgaggctactggtgcgtgtccgagcggtcacgagcgacgacgagtgggggccggagaaggaggaggcgtacggcggcggcgtacggtggaggagaaaccgacgaatacaagacggagacggagacgctgaa

SEQ ID NO: 17283 - DNA, 258 bp, Glycine max
  Clone ID: 700876919H1
tgcctggctaaggaaaaacaaaaccggaagcgctcactaggcagccatgccaatttggcagttgtgtccaaacatccattccgttcctcaaatcgtagcgtgcacccgcaacgacaaaacgggatcgaaatccgtttcagggagacccaaggtgagccctcaactgaaccggtggttcagagcccgagccgtgcgttccggtcagaaattggaccggtccagtctccgaacccaacccccggagccccaacctcctgt

SEQ ID NO: 17284 - DNA, 253 bp, Glycine max
  Clone ID: 700876921H1
tgagtcttgcaattgaagttgaagtcttgcccttctctcttcaactccaaacacaagacatcatcatccatggctgcctccgtctccactgtcggagctgtcaacagagctcttttgaacctgaatgggtctggacctggggtttcagctcccagttcatccttctttgggagcagcttgaagacggttattggctcaagggtccccaacacaacgatttcctctggaagcttcaagattgttgctgtagaag

SEQ ID NO: 17285 - DNA, 244 bp, Glycine max
  Clone ID: 700876925H1
gaaagtgtctagagtgaatcagaagaaaaaggccaggattctggatgatggcaatataaaagaaataggcagtgtgtctatcaatgcctggcatctcagggcactagtcttgtcatccttacataagtgtttcctgtacgacactgggaccttgaagtttcttgactcctcaaattttcagatgttgttgagacctattgtttcacaacttgttgtagatccaccagcactgttggatgacagc

SEQ ID NO: 17286 - DNA, 245 bp, Glycine max
  Clone ID: 700876926H1
gccaaagcatggcttctctctcttgctccgccaacgaccttgccccactcatcaacgacaccgccgccgccaactacctctgcgcacaattcgattccatttctagaaagctcgtcgaaacaacctacgccgtcgacaacacctaccttctgttttcagcgtatcttgtcttcgccatgcagctcggcttcgccatgctctgcgccggctccgtcagagccaaaaacaccatgaacatcatgctc

SEQ ID NO: 17287 - DNA, 244 bp, Glycine max
  Clone ID: 700876927H1
aatttctaaaactcgtcagtgcaatagtataatggacaacttggaagatgctacagagccagtgagtcctagtggacgattcttcaacaccacggtgctaactgcgtatgtttttggcttcttagaatcagaagttccaattgaattctctcaagccaagtatttgttcgaagatgtctttctacccgtcaatccacacttttcttccaccatggtgagagatgaagaaggagacatgaaatgg

SEQ ID NO: 17288 - DNA, 225 bp, Glycine max
  Clone ID: 700876931H1
cggctcgagctcgaccgaattcggctcgagggatgccaaagcaactttgctggagatgaggacacgattgacttagtagatctttattggcattctagatgagaacatagcaatgcacaaagggcaccaggttcgtaattagcatgcgtttccttatggagtggaactgagactgtgagtggattgccaatattgaggctagataatgctagtatcactcagttg

SEQ ID NO: 17289 - DNA, 102 bp, Glycine max
  Clone ID: 700876932H1
tcttcattcagagttgtggccagtggtggcaagaagatcaagactgacaagccgtatggaattaatggtggcatggctttgagggaaggagttgatgcatct

SEQ ID NO: 17290 - DNA, 259 bp, Glycine max
  Clone ID: 700876933H1
gtggagggcttgaaaaatgcactagccgctggtgctgacaaggatgaagacgattcagagggaagaactgctttgcattttgcctgtggatatggtgaggtgaaatgtgctcaagttctccttgaggctggagcaaaagtggatgctttggataagaataagaacactgctctccattatgcagctggttatggcagaaaggaatgtgtggcccttctccttgaaaatggtgctgcagttactctccagaatatggatg

SEQ ID NO: 17291 - DNA, 202 bp, Glycine max
  Clone ID: 700876934H1
ctatattgtatgtttatttctaattctgcagctcacgaaactagtcgtgtagatgtgtgtaccgtattaaattactgtgtacgctcttttactatctttgtatgatgttaatgctgtttaaaactccgctaaatagacttagataagaaacattaagtattgtttgagccatgaacatcaagtaatttatgatccttcattc

SEQ ID NO: 17292 - DNA, 256 bp, Glycine max
  Clone ID: 700876935H1
gttctaaaaaaggaatcaaatcgtatgttgctcaccattttatttctgtttcttattaaataataatatctggataaaagagaatcctgagaaatataaaagcatcatgtgtatggagaagcacggccatgatgaggaggagcaacccaaacctgtggttctaatcacaggatgttccacgggagggataggccacgcgcttgcacgatccttcgcagcgaacaggtgcagggtggtggccaccagcaggtcgcgg

SEQ ID NO: 17293 - DNA, 245 bp, Glycine max
  Clone ID: 700876937H1
caagagaagaaagggaataccacaccgtgccccaatggttggactaatcatagaatattagatagttggtatttttaggttattggctacaatgcccttaggtataaaaataccatagtatactaaagcaagtgtttcgacgtcgtttcatcaaagtccaatactcgagctttcctagggccggtatttggaagtgtcaccgtccgtctttttatttttcttcttgtagtggtttctagcgtttt

SEQ ID NO: 17294 - DNA, 247 bp, Glycine max
  Clone ID: 700876938H1
gcaaaaatgcaggagctgatttggtgggtggagaggatctgatagaacagataaaagcaggattcatggagtttgataaactaattgcttctccagatatgatgcctaaggttgctagcctagggaagattctgggaccaagaggactgatgccaaacccaaaagctggcactgtaacacccaatattccccaggctatagcagaattcaagcagggaaaagttgaatacagggcagacaaaactgg

SEQ ID NO: 17295 - DNA, 246 bp, Glycine max
  Clone ID: 700876939H1
cggatctagagtcttcagtttctcctcgttgttcttcgctttcctgttttcaatttcgattctttcgttaatttaataagatgtttgggagggcaccgaagaagagcgataatacgaggtactacgaaatcctcggcgtctccaagaacgcttcgcaggatgatctgaagaaggcttacaagaaagccgccattaagaatcaccccgacaagggcggtgatcccgagaagtttaaagagctggcgc

SEQ ID NO: 17296 - DNA, 79 bp, Glycine max
  Clone ID: 700876940H1
ggcaaaaaaaacttaaccacctcgttctggtttctcgcaacgttgaaactaattctactacttcttccacacaacatac

SEQ ID NO: 17297 - DNA, 242 bp, Glycine max
  Clone ID: 700876941H1
accaagaatccctcttggagccaccaatgcttgaagcaactaagcctaataagcactttgttggggagagtagttctagcactaccaaagtaatcaaacacgtcgaaaacgagaagagtccttcgaagctagaggtgcttcctctgtcgtcagaagggccaagggatgtttttcagtgtcaagctagactgtggcaagctgttaccaaagctgtgaagaaaatcaagcgaagaaatgggcca

SEQ ID NO: 17298 - DNA, 166 bp, Glycine max
  Clone ID: 700876942H1
aaagtaacaaagcaaagtccatgttgtgttgctctcacatcacctgactttgtcgtaggatatttgatcattgcttgagatctgcttttctgcttcttctgggtcttcccagattatgaacattgaaacaccatctcgagcaattaggagataatctcgtgtatgc

SEQ ID NO: 17299 - DNA, 55 bp, Glycine max
  Clone ID: 700876943H1
cggtccaaccactaacaaaccatctgggtccctcaaaggtgtgactgacagcacc

SEQ ID NO: 17300 - DNA, 247 bp, Glycine max
  unsure at all n locations
  Clone ID: 700876944H1
ctcaaaccctaaaaaaaacgatgtatcgttttttgtcttccattcgccatggctgtggatcttccctcacatcacttctcccgccgaaacccacccttccattcgacgccgccctacagatctcgncgtttacctcaaaacgacggtactcttcgaatccctctgctttcatttccgccgttttcgaaatggaaaacaaatttgaagtttagatggcgtcgtttcgatgtgtggatttactcgagac

SEQ ID NO: 17301 - DNA, 177 bp, Glycine max
  Clone ID: 700876946H1
acaatatagagcagattctatcaatctagtgcttattccttgatgattgctcagcggatatatcgtataccttcactagatgcaggcacatcacaacttgacgatattgctcgtcaaaatccccatgtcaagagggtatcatcacataatactcttaaaggttgagcggcacaggga

SEQ ID NO: 17302 - DNA, 246 bp, Glycine max
  Clone ID: 700876947H1
ggctttatacctgttggctaggctagcccagtgtgcttataattctgcaaaatctaaaaacaagtttcacctttgggggagtcattggagacatggagattcattgctgtttgcccttgcttgtgcacaggttatgtatgcctttgtaatgcgtcctgagagcttgccaaaatcctatcaagacttcattcaaaagaccgggccagttgcagagcctgtatacaaggctgtaagggatagctgtag

SEQ ID NO: 17303 - DNA, 250 bp, Glycine max
  Clone ID: 700876907H1
tgtgggagtcatcaagaacgttgagaagaaggatcctaccggagccaaggtcaccaaggctgcccagaagaagaagtgaatcgtgcgggctggttcatcaggggatgttggttacaataaatgttggtttcttttctgtactcttgtgtcttcttttctaggtagcttgtttttcggacaaagtttgaagtctccaccatcatctcgcaactgttgttcccagaactgggttcttgatcgacggtggcaa

SEQ ID NO: 17304 - DNA, 240 bp, Glycine max
  Clone ID: 700876862H1
ctctcagtcacatatggttagcactctcttctaaagccaactactactattagtatttagtgccctttcactcgtaacaagtgttcactgatataaatgtctttgtctgtggaagacaactactatggcatgagcagcagtgtgagtgagatagaggaagagaattcttcacacttgcacttgaataatgatggtcctaatcctatggtcaccattggtgaagaagagaacgaggatgat

SEQ ID NO: 17305 - DNA, 243 bp, Glycine max
  Clone ID: 700876865H1
ccaatgtcgacaaacggtttgccattactgcccttggttatttgattctgatgcaagcttagctcatcaagttggtgcaaccttacccgtgagtgtgagtctatgcttcctccactcacctgcatgtataagtggcataacggtctatccgtcccaatgtgggttgcagactataatttgacatgccataacagctcacatttaattcaaaccttgaaaaagtaacactagtcttgtaaaagc

SEQ ID NO: 17306 - DNA, 137 bp, Glycine max
  Clone ID: 700876866H1
gttctagatcgcgagcagccgccctttttttttttttttcaaaaactgggtttaaattaataaggtgaaaacttttagtaataggtaagtgacatcaatataatcttaagccaattgaaacacatttgcttgttatc

SEQ ID NO: 17307 - DNA, 236 bp, Glycine max
  unsure at all n locations
  Clone ID: 700876868H1
ctcttctttctctctcacgttttccgcttcagttttctcgggaaaatcatggtgaaaggtccaggcctctactctgacattggcaagagagctcgcgatcttctgttcaaggattatcagaatgaccacaagttcaccatcaccacttacacttccaccggagtggaaatcacttcaactggagtcagganaggtgagatatattgggcgatgtcagcactaaggtgaagaacaag

SEQ ID NO: 17308 - DNA, 124 bp, Glycine max
  Clone ID: 700876871H1
ctcagaggttctagaaagatccactccgaaatggacggtgcgccacaatccgccggtgccggaggtccggcgccgttccttctgaagacctacgacatggtggacgatgcctccacacaacata

SEQ ID NO: 17309 - DNA, 239 bp, Glycine max
  Clone ID: 700876872H1
gcaagcaccaacgtgaataccctaattcggagggtttcagttttcgccctcttttctcatctccaacatcttcgtcgtcacggaggctagtcttcctgttatcacaaacaatgtctgacggtcaagaatcagacaagaatattgagatatggaagatcaagaaattgataaaggcattggaagctgctcgaggtaatggtaccagcatgatttctctgataatgcctccacgtgatcaa

SEQ ID NO: 17310 - DNA, 240 bp, Glycine max
  Clone ID: 700876873H1
gttccttcccctcctcatattttccaataccatttttcactgttaacaccaacacacccaaaatctcaatcttgttcagatccctcataccccttttttcattcaaactaagggggtgacaagatgagtgaggtcttcgaagggtacgagcgccagtactgtgagctctctgctaatctctctcgcaaatgcagttctgcctctcttgtttctggccaggaacagcagcagcagaagttg

SEQ ID NO: 17311 - DNA, 237 bp, Glycine max
  Clone ID: 700876874H1
aaaatggccaaatcaatcaaattctttgagttgaacacaggggccaagattccttctcttgggttagggacttggcaagctgaacctggtgttgtagctgaagctctcaccacagccattcaggttggatacaggcatattgactgtgctagtgcgtataagaatcaagcagagattggttctgctcttaagaagctttttgatgatggtgtggtgaagcgtgaggacttatggatc

SEQ ID NO: 17312 - DNA, 240 bp, Glycine max
  Clone ID: 700876878H1
agctcaagccctatacaaccaaaccctaacacacacccatttgattcagtttccatggctagcctcaaggttgcatttttggctgcagtgctctgcatggttgtggtgagtgcacccatggcacatgcagctatcacgtgcgggcaggtgacgaatagcctgatcaattgcatcggttacctccagaacggaggaacgccgccgtcgggatgctgcaacggagtgaagagcctcaatgcc

SEQ ID NO: 17313 - DNA, 245 bp, Glycine max
  Clone ID: 700876879H1
tatcgagccgaatcggctcaagaaacaacgttaacacgacaaccttaaacaacggaagattccacgcgctcttgaacttcggcaaaaagaagacggcgccgcagccgccgccgaagaaaaaggaagtgaaagtgaaaccctccggagaccggctggtgtggttcccgaatgcggagccgccggagtggcacgatggaagcatgatcggcgaccgcgggttcgacccgttcgggttcgcgaacccg

SEQ ID NO: 17314 - DNA, 115 bp, Glycine max
  Clone ID: 700876880H1
aagcaatacataactttctccagtatcaacagtgcagttataaagttctacgacagggaaacaaatttgacatcaactttgacaaaattgattatgaatagaattgattttggtt

SEQ ID NO: 17315 - DNA, 241 bp, Glycine max
  Clone ID: 700876881H1
gccaaagttgatactccaaagacatctggcaagtttactgatctcaaatcagtagtgtgggaaaatggtgcttcccctacctctaaggatgtatcaaatccaacaaattattctaacagcaaaccaggaaatcaacatgctgttgcttcaggagctgcctctgcaccattgaggaacccaaataacctaaaatcccctacggagcggaagccatcttctatggatttgaaattaggttcca

SEQ ID NO: 17316 - DNA, 237 bp, Glycine max
  Clone ID: 700876882H1
atagctcagcattgaagccacccaatgtatatggaagcctcgagttaaaaaatgttgatttttgttacccatctcgtcctgaagtgttggtattgagcaattttagcctcaaagtcactgggggccaaacagttgctattgtgggagtttctgggtcaggaaagagcactataatatctttgattgagaggttttatgacccagttgcaggccaagttttcctggatggtagggact

SEQ ID NO: 17317 - DNA, 236 bp, Glycine max
  Clone ID: 700876883H1
gagatgattgatgcaacccatggtgctgacaacatcagaaatgatatcagtgcacttgctcaaagatgcactattattgatcgagatgaggagtgtggggtattgcccttcctgatatatgtttgacaaaactgcacctgcaattctttttttggtcttaaccctttagttcatcaggggaaagggaccttgactaatccgaagtttggccaggaggtaagtaaagcctggtcaag

SEQ ID NO: 17318 - DNA, 64 bp, Glycine max
  Clone ID: 700876885H1
atcatcacaaccaagagacgcagagaggagagagaaagcgcattaaaagatcaatttgcccttc

SEQ ID NO: 17319 - DNA, 238 bp, Glycine max
  Clone ID: 700876886H1
cacagagtgagatatagaatcactgaagagcttccttcaatggcggtttcttctctctctgttactcctctttcgctctcaaattcttccccctctctatcttccaagccaaagtttccatctttgtgttttctctctggcaacaacaccacattgagggtaacatgcccaaaacctctgcactcatccactgttgttcatgttgctaccgaagcgttggattcatcccctgatccct

SEQ ID NO: 17320 - DNA, 237 bp, Glycine max
  Clone ID: 700876887H1
gataaattatgctactgggtgcatatttgagtatgacaaagctcatccagagggttctggcattggctttaaggaggaagacaaacccaacttcattggttctttctattccaaaactaaggctatggtcgaagagctcttgaaagaatatgacaatgtgtgcaccctcagggttcgcatgccaatttcatctgacttgagcaatccgcgcaatttcatcaccaagatttctcgtta

SEQ ID NO: 17321 - DNA, 237 bp, Glycine max
  Clone ID: 700876888H1
gtcagttaaaagctttacttcaaaagatgaagcaatacaaagtaagagcaatggctgacatagttattaatcatcgtactggcaccacccaaggacgcggagggatgtataatcgttttgatggaattccattaggttgggatgaacgtgctgtgacatcagattctggaggactgggtaatcgaagcacaggagccattttccaagggtttcccaatattgaccatactcaagatt

SEQ ID NO: 17322 - DNA, 236 bp, Glycine max
  Clone ID: 700876889H1
caaaccgtgacgtccctgccgcgggccgggccgcgagctacggcggatccgacatagtgtggaccccatacgggcccgagtggccgatgctgcggaaggtgtgcgtggctaagatgctgagccacgccacgctggatacggtgtacgatctgcgccgcgaggaggtgcgcaaaacggtgtcgtatttgcacgaccgagtggggagtgcggtgaatataggggaacaggtttttctg

SEQ ID NO: 17323 - DNA, 237 bp, Glycine max
  Clone ID: 700876890H1
gattttgtaattgagttcgatcaaatagctcccagtactttaattgatttctgaatatcatcacttaatttgaaggaaagatggtgagcgtagctgagatccgccaggcacaaagggcagaaggcccagcaaccatccttgccattggaactgcaaacccaccaaactgtgttgatcagagcacctatcctgactactacttcagaatcaccaacagtgagcacatgaccgagctca

SEQ ID NO: 17324 - DNA, 238 bp, Glycine max
  Clone ID: 700876893H1
ctccaatcagcggtgattttgtttatcataggaggatctgatgtactcgctcgtggatctcaactatattcacgatcatgatggcccttgaaaattctgaaaatatgcaaataaactgtgaggcatctttaaaatgcctccagggcaagggatttccttgcaattttcagagtaatgggagttctatggaaggctttacagagcttaaaaatgagcctggtactcatccttctgggga

SEQ ID NO: 17325 - DNA, 240 bp, Glycine max
  Clone ID: 700876896H1
gaatcggccggttcgaccgttcgggccggtcggttgctttacgtggccacagcgcgtctttagttgtgcttggtacgtttttgttatggttcggctggtacggcttcaaccctggttcgtttctgacaatagccaaggggtatgaaagtggagggtattatggtcaatggagcgctatagggaggacagctgtcacgacgacattggctgggagcactgcggctctgacgacgttgttca

SEQ ID NO: 17326 - DNA, 268 bp, Glycine max
  Clone ID: 700876901H1
aataccccctcttttgctgcatcagaggagttgtaaattaagagcatggctgcacaagctcttgtatcatcatcttctcttaccttctcagcggaggctgcaagacaaagtcttggaccaagatcactccaatctccatttggcttctccagaaaagcctcctttcttgttaaggcagctgctaccccccctgtcaagcaaggatcagacagacctttgtggtttgcatcaaagcaaagtctttcttacttggatggcagccttcggg

SEQ ID NO: 17327 - DNA, 78 bp, Glycine max
  Clone ID: 700876902H1
tcgagtacacatgtatacaataagggtgagtatagtgctgctggctcgactgtgtgagatgatgaggaggaattacca

SEQ ID NO: 17328 - DNA, 260 bp, Glycine max
  Clone ID: 700876903H1
cccatctggcctgcttccctccattgatctttcttacattgaagacagatatgcaggtcgccaggcttggtcttttatgaataatggtaacaaaagaagttcatcgcaagttcaattatcaagtgatacatcaaagatttgggttccctcaaatccaagaggtgcagaaagattacctcctggcattgttgaagccgagtcagacttttatttgcgtagattgtggggcaagcccagtgaggatctaacgtccaggccaa

SEQ ID NO: 17329 - DNA, 260 bp, Glycine max
  Clone ID: 700876904H1
aaaccaactccctccaaactttaaacagtgtccgtgcgtctctctttattttctctgagaaaattcagcaagaaaaatttgcaaatgtcgaatttcctgagcaacactaatccgaaccctaacaagtcctttgaggtgaatcagcctcccactgattccgtgtccagtctcagcttcagtcccaaagccaacttcctcgtcgccacttcttgggacaatcaggttcgttgttgggaggtagcacagaatggagttaatgt

SEQ ID NO: 17330 - DNA, 254 bp, Glycine max
  Clone ID: 700876905H1
tcttgaaccacctctccgtcttcattgaaggttatggtcctgctggatatgcattattcgttgccgtttatgctggattggagatccttgcaattcctgccattcctttaaccatgtcagctggacttctatttggatctgttgtcggcactatcatagtctctatcagcggaacagtggcagccagtgttgcttttctaattgcacgatattttgctcgtgagcgaattgtaaaactagtggacggaaataag

SEQ ID NO: 17331 - DNA, 251 bp, Glycine max
  Clone ID: 700876906H1
cccatttccatttctgctgtttttctcaaaccaacaactctgtcgtcgtctcgcgtcgttccccacgtcgtggtgtcgtcggatttggggcaggaggaggacaccttcagtgacggagacggccccagcttctcccccgaccttaagctctttgtcgggaatcttccgttcaacgtcgacagcgcgcagtcgcggagtgctttgagagtgccgggaatgtggaggtggttgaggtgatttatgataagact

SEQ ID NO: 17332 - DNA, 237 bp, Glycine max
  Clone ID: 700876857H1
tgtgtatggcacataataggaatgccaggccactttaaactactccttaggtgtgtgccaatgaatcatttgggtatcttgcatggcttgttttgaagcctatccataaaggagcagtgcctagcttcaactttgtttcttgttctttatatttggttgttattctattgcacttcacctagatctttggatggatacttgatgatcttgtagattgctttttagatggtcaccatg

SEQ ID NO: 17333 - DNA, 249 bp, Glycine max
  Clone ID: 700876812H1
aaaaaaacttaggaggacccagagagaatcaacaacaggctcgctctcgtcatgaagagtggcaaattcaacctcggttacaagaccgttctcaaatctcttaggagctccaaagggaaattgattatcattgctaacaactgcccccctttgaggaagtcagagattgaatactatgctatgttggcaaaggttggggttcatcattacaatgggaacaatgtggatttgggcactgcatgtggcaaa

SEQ ID NO: 17334 - DNA, 247 bp, Glycine max
  Clone ID: 700876813H1
cgtgaatgcgtataaaaggaaaataaagaaattagcgtcaaaatgttgggtgtgttcagcagctccatagtgtcgccgccggacgagctcgtggcaaccggcagccgtactccgtcgccgaagatgacggcggcggcgctgcggaagcggttcgaggagaagaacccctccgccgtgtcggtggaggtcggagagcatgtccagctcgcttatacccaccacaacgagtcgccgtttcagcccagat

SEQ ID NO: 17335 - DNA, 243 bp, Glycine max
  Clone ID: 700876816H1
gggtaatgcatcgggcggtgaacgtgctcgacacacagaagtacttacaaatggccttatagatactgcttggaaatttattgaacacaaatctgtgcttcctcagcatccaccctcagatgcaaacgatcaagactattccaaagagttaccgaatgggaatgatatcacaggaactctcaaatcaggggaagtttgttcctaatcaaaaggttttggtgctgaggaacaaattaattaagt

SEQ ID NO: 17336 - DNA, 250 bp, Glycine max
  Clone ID: 700876817H1
atgccaaagacttagatgccatcaagaaactatacgtagatatgaaaagacgaatagaagatgcagtcaagttgggtggagtacccagcgaacaagatcaaagcataatgggttttctcaatgggattcgtattattctcgacatgatcacgatacaatccttcagatactacttcatgaaaggaacccacacaattcgaaggatgtagatgggtttgttttgccaactctggtgtatatggctcgtgag

SEQ ID NO: 17337 - DNA, 141 bp, Glycine max
  Clone ID: 700876818H1
atgaacacgaaaatgttctcttcttcctcttcaatgtctatagcaagaccccatttggtatgaattatgaccatggctttaagttcactttttttctccactcgtttcattcccacaccctttgttacttccacacaacat

SEQ ID NO: 17338 - DNA, 246 bp, Glycine max
  Clone ID: 700876819H1
tcgagttctgagtgggcaaatcaaacttcatggcacttgagtttccttattgacaatcccaaacagtctacagtttttgatattctcttgggaatttctcaagattttgaaattgctggtaatactcttatgccagctttttctgttccacaggctactgccagatcttctgaaaatgcggaatcctctgcatgatctggaatttgtgttttctttcgtttgttcgtttgtttaattcaataaagg

SEQ ID NO: 17339 - DNA, 244 bp, Glycine max
  Clone ID: 700876821H1
ccctttcctccactcgttttctcgcttcctcttcagaactctttgggttccgaaccgatttctcgtaccactatgttggtgttcgagcttccaattctgcgtctaaaatggttgttcaatgcatgtcttctgccacagatgttcctcccactgtttctgagacaaagttaaatttcctcaaggcatataagcgaccaatccctagtatctacaatactgtgctgcaggagctaatagtgcagca

SEQ ID NO: 17340 - DNA, 243 bp, Glycine max
  Clone ID: 700876823H1
cgcccagagaacgtgaaggcagcacaagatgcactcgcattccgtgccaagtccaactcactcgctcagcttgggaagtacactggtgagggtgaatccgaggaagccaagaaggagttgttcgtcaaaagctactcctactaagatgtttgcagtgaatatgatacttgttaggcagcaacaccagcagttacagtaggtgttgacggacgatgaagtggaagactaatttgtctaaaatgt

SEQ ID NO: 17341 - DNA, 247 bp, Glycine max
  Clone ID: 700876828H1
gagagagcgagcgagcgagcagtttcaaagagaggatttgggattgggaaggcgagggattgcgctgcgtctcttcctcttctctttcgattcatccctcattcataatcttccaatccaacaacctcaacctcacactcacacatacacacatctgaacgcgtatcgtccctcccatggcttcaaagcgcatcctcaaggagctcaaggacttgcagaaagacccaccaacttcttgcagcgctgg

SEQ ID NO: 17342 - DNA, 242 bp, Glycine max
  Clone ID: 700876830H1
agcgaatagcaaggtggaaatgtcgaaaggcggttcgcttcaaaaggacgtgccatggagagcatcgtcttcttctgcgaacccatccccaaaattcaccacagtccccttcttcgcgtatcccaaacacctgtttccgattacggtatctccgtcatgaggcatccggaccctataggtggtggattgggtcatgaggccatagtggaaccagctggccctgattgtctcgtacctggcca

SEQ ID NO: 17343 - DNA, 242 bp, Glycine max
  Clone ID: 700876832H1
tgagatttgggcagctcgttacatcttggagaggatcactgagattgctggtgtggtggtttcctttgaccccaagccaattaagggtgattggatggagagaaaggttctgatattgtgctctgttgtggccttcttggggctgttggctatgaaatgatcttagaggaataagcgacaaggattaaggtttctcaggttcattttgttacaccaaaccagtgcacgtatcctcgtagtcc

SEQ ID NO: 17344 - DNA, 247 bp, Glycine max
  Clone ID: 700876833H1
atagagcctgctcttgcacctcctgctctgaatcctctaccaatgcccaggcctaaaaggcctcgatctaatgtggttccatcatccccggattcctctgttcttactcgtgaagcttcatctaaagtcagcgtagatcctttgccaacaagtgggtttcaaagggtcttgcaaggtcaagaactgtcgaccttgagaggtaattttgctgaaacaacgaatctgatacggtcgagaagtctgctgt

SEQ ID NO: 17345 - DNA, 244 bp, Glycine max
  Clone ID: 700876834H1
gggcacgagtgcaaacagacaatgcaatgtctatttcccaggatatcattgcccgagggattttgtctttggcactgaaggcagcccatggacctcatctaatggtaacagtgaacgtgagaatgactgttaccgacttggttctttgccattgtcatcaccttgtcatatttcaggacacaacaaggaacttctgaaacaaacaatactcaagcatgaagcgatatttagggaccaaattcaa

SEQ ID NO: 17346 - DNA, 112 bp, Glycine max
  Clone ID: 700876835H1
atgagattccgttgtatagcttgtggtgaaccttaattactgcgttggtgagaaaataaaatgccatctaattacttttcaaggctcgcagcttcgattcagagatcgattg

SEQ ID NO: 17347 - DNA, 241 bp, Glycine max
  Clone ID: 700876836H1
ctcctacgagtacttaagcactggacttcgccagtacttggacaacaaaatggatggattctacattgctccagcttttatggacaagcttgttgttcacatctccaagaacttcatgaccctgcccaacatcaaggttcctctcattcttggtatctggggaggcaagggacaaggaaaatctttccaatgtgagcttgtctttgccaagatgggaatcaaccccatcatgatgagtgct

SEQ ID NO: 17348 - DNA, 89 bp, Glycine max
  Clone ID: 700876837H1
cggtgacacaaccgtgtcctccgtggacgcgcggttccgttcctctctcgaagcgcgtcctcccacgacgtcgtttcaccacacgccac

SEQ ID NO: 17349 - DNA, 243 bp, Glycine max
  Clone ID: 700876839H1
gaaagatagaaagaaagaacaacaccacagctttagcacccagaatcaccaaaatagacacaacacaacacaaaactctcctatatctcccttttctgcacgaaagagaaaaccctctcaatggctcaccaatatccctcctctaatgaatctgacagccatatcattcctcctcaaccgttgaaattgaagaaaccccaccaacccaaaggaaaacaaatggggcaagaaaaggaagatgaa

SEQ ID NO: 17350 - DNA, 219 bp, Glycine max
  Clone ID: 700876840H1
taataatgggaggcaccaggtttattggtgtgtttttgtctaggctccttgtcaaagagggtcaccaggtgactttattcacaagaggtaaagcgcctggtcactcaacagttgccaggtgaatcagacagtgattatgctgatttttcttccaagatcttgcatttgaaaggagacaggaaggacttcgactttgtaaaatccagtctctcagcagag

SEQ ID NO: 17351 - DNA, 240 bp, Glycine max
  Clone ID: 700876842H1
cttcaataaaaaaaggtggtccaagggaaccttggcacgacatccattctcgacttgaaggccctattgcttgggatgttttgttcaactttgagcagagatggaggaagcagggaggaaaggacttacttgttccactgagagaccttgccgatgtcattattcccccatccccggtaacttacattgatgatcatgagacatggaatgttcaattatttagatccattgatggtggag

SEQ ID NO: 17352 - DNA, 244 bp, Glycine max
  Clone ID: 700876843H1
aagagattgaagagacccagcagaccgacaaggacagatggaagggtcttgcctatgatatctcagacgaccaacaggacatcacaagaggaaagggtttggttgactcccttttccaagctccacaggatgctggaactcactatgctgtcatgagctcctacgagtaccttagcactggacttcgccagtacttggacaacaacatggatggattttacattgctccagcttttatggacaa

SEQ ID NO: 17353 - DNA, 247 bp, Glycine max
  Clone ID: 700876844H1
atttcatggagtcaaatacaaaaaacgtgcatgcaactaaagtattgtgggtttaccgatttggaacattttctttgcaaatgtcctatcagggtcagctctctatcgagtaaatgtctttcttgagccaaaagagattcccagaatactagcggaagctgtaccatcccaggcatccttcttcatagcttatgttgtgacttctggatggaccgctatagcatcagaactctttcgattgactaca

SEQ ID NO: 17354 - DNA, 157 bp, Glycine max
  Clone ID: 700876845H1
atttgatccagatctacacgtcgatggtgcttgtggccgggtctttcatagatctggtgcgtagaggctcagatctacggtaccgaggtacaacagagaatcgatgacaagaacgcagatccgacggtagatccagccgattccgcttgttcgatcg

SEQ ID NO: 17355 - DNA, 242 bp, Glycine max
  Clone ID: 700876846H1
ccttttcttagcttccgacgggttcaggctcggtggcgctccggcgatcgccttcggaaaggttcggaagaaccgcaaaatgggaatattccccgtttgcagagctggttctgccgtcgtcttccgcgacctcgacgccgacgactttcgccaccctcttgatcaacagaatacgctgctactgagagcaattccgggattgaacgaactgggaaaagctcttctaggaactgtatctgagc

SEQ ID NO: 17356 - DNA, 185 bp, Glycine max
  Clone ID: 700876847H1
tggacatgcttggttcaaggcttgtgggatgtttggaattcctcaagccaggctatgactgcggaaatggttgcatgtatagcagtcggagtccctatcgatcctggagaagatgcatgcaagaggctatgtgcatggagatgtaaaaccagaaaactttttactaggtcaaccttccacacaac

SEQ ID NO: 17357 - DNA, 239 bp, Glycine max
  Clone ID: 700876850H1
cttttgtcaattttctattgaccttctcggtggaggaattttagtggacaaaactggagattggatcacacttatacaaaattctccaattagtaacttgttgagagttgctgcttggaagaaaggctgtttaatggttaatattgtgatgtctgggaatgcagcagtcaaaaggagtgattgggcctcattggtacaagtgtttttaacaaacagcaacagtacagagcatttcgatg

SEQ ID NO: 17358 - DNA, 242 bp, Glycine max
  Clone ID: 700876852H1
tgcggggatcagattatagattcaacaatggcctctgcttctgctactcttctcaagtcatctcctgttcttgacaagtgcgagtgtgtcaaaggccagacccttcgccaacctctcgtgagatgtaacccttcctcagcatcagctctcaccatcaaagctgcttcctatgctgacgagctcgtcaaaaccgccaaaacagtggcctcaccggggcgtggtattttggcgatggatgagtc

SEQ ID NO: 17359 - DNA, 248 bp, Glycine max
  Clone ID: 700876811H1
gttaatttgaagaacttgttgctttttggagccgcggatacatattgggggacatctagatccgttcatgggtcagcatcattggcaagggactattacgaagtgcttggtgtgagtaagaatgctagttcttctgaaataaagaaagcatactatgggcttgcaaagaagctccatccagacacaaacaaagatgatcctaaggctgaaaagaagtttcaagaagtttcaatggcatatgaggtttt

SEQ ID NO: 17360 - DNA, 241 bp, Glycine max
  Clone ID: 700876855H1
gagaaagtgttgtgttgagaacgcctctatatgacccataagggggtctgcgtgtaaagtcccaagcatttgtcatcactcaaagagtggacaagtccggtcaaaattgctgcaccttggcctgcaccttccttgctccgtcccttctttctctaattcttcaccctcttaattaaaaccttctccctcgttccccttgtgaccacaacacacaacaacacatcaaatatatagatatttc

SEQ ID NO: 17361 - DNA, 251 bp, Glycine max
  Clone ID: 700876768H1
actaaatggagagtttgaagatgtcaaacgcttaaatgatctcctaattgaaaagaacaaaataactgggtgggacactcctattcatgttgatgcagccagcggtgggttcatagccccatttatttacccagagcttgagtgggacttccggttacaactagtgaagagcatcaatgttagtgggcacaagtatggtttggtctatgctggaatcggttgggttatctggagaagcaagcaggacttgc

SEQ ID NO: 17362 - DNA, 251 bp, Glycine max
  Clone ID: 700876771H1
tcgtcttgtagccagaaagttcttggccagacctcagcatgagggtgttggagccgttgttagaagaagcatagggagatttgaactcaagtactttgatcctttccttgtcttggatgaattctcaggtgggcatctctgtattttcctctgttttttaatttggattacgaaaaatattgtggtgcatcttgtattgtattctaagaatatgaaattctgaaatattgcagtgactgctcctgctgggt

SEQ ID NO: 17363 - DNA, 252 bp, Glycine max
  Clone ID: 700876773H1
aaatgggcagatttatgcagcgcagggaagagctttaaatgccgttgcatcccgcaatgtcaaagttatagtagtgggaaacccttgcaatacaaatgcattaatatgcttgaagaatgctcctaacattcctgcaaaaaattttcatgctttaactcgtttagatgagaacagagcaaaatgtcagctagccctcaaggcaggtgtcttctatgataaagtgtcaaatgtgacaatatggggcaaccactc

SEQ ID NO: 17364 - DNA, 252 bp, Glycine max
  Clone ID: 700876774H1
cttcaattgggctagagaacactgaagctaaccgccaggcataccgtaccctcctcgtgacagttccaggccttggtcagtacatctctggtgccattctctttgaggaaacactctaccaatccacaactgatggcaggtagattgttgacgtgctgcttgagcaaaacattgttcctggtattaaagtcgacaagggtttggtgccccttgcaggttccaacgacgagtcatggtgccaaggtttggatg

SEQ ID NO: 17365 - DNA, 151 bp, Glycine max
  Clone ID: 700876776H1
gaaattgtaccaagatatggaaagccgaatagaaaatgcatctaaggtgggtcaagtacccgaagaattacgcccaaagtataaaggattttctcagtgggattcatatacttctcgacgtgaccatgacacaattcttcaaatattactt

SEQ ID NO: 17366 - DNA, 261 bp, Glycine max
  Clone ID: 700876777H1
cggctcgagatggtaacatgcttgtccaagaacaagagaatgtcaagagagtccaattggctgacaagtacttgaacgaggctgcacttggaaatgctaacgaggatgctattaacaggggaactttcttccaatcttgaattggaggcaaagcaaacttggcaagtaaatatttctgttcctgaaggttgtgctgatccaagtgctagaagttgtgatgggacttgcgtgtaacattcttagaattctcaatgtcttagg

SEQ ID NO: 17367 - DNA, 264 bp, Glycine max
  Clone ID: 700876778H1
caagaagcttatcttgtcaatctcgtaaatgtgttacgagaattgtatttgcacagtccagaggaagctcgccaattgagaaggaaagctctctctcgtattgaatggctgcaaaaagctgatgtgcctaccatagcacagattgaagagttccattcgatgcagaggatgatgaatgctcctgattcaaatgataatattgatctactgttgagcattgatttgttgggtttacaaggagcaggtaaagcttttccaaacaag

SEQ ID NO: 17368 - DNA, 145 bp, Glycine max
  Clone ID: 700876779H1
tctaaactcattaccagtcccaccaacttctctgtgggcttcttcttcttcttcttctttgcttcttcataacaacaagaagaagaacaacaatcttagtcccttgaaacccattgttgtcagtggagaccccccaactgttgtg

SEQ ID NO: 17369 - DNA, 257 bp, Glycine max
  Clone ID: 700876780H1
gataagcacaaggcggaaaactgctgcatggctaagggagtgtgtatatcagcttactccgactctcattatacttggacagcgatcaccaacaaggtcggatctatgtacgcgagaatttgtacagctacttgcaaaatagcaggacagggtccccgcattatctccccagtgagcaagaggctttattgagagtgaattaggagctcccattaatatattgtttaaagagtttgaagatcggcccattgctgctg

SEQ ID NO: 17370 - DNA, 148 bp, Glycine max
  Clone ID: 700876781H1
gtcaagacgcaaagatgcaagttccattgatcgacatcgacagtatcaacggtctccaagtgggtctgaactctctgcaggacccatcctgccgagtccgtgctcagatcacaacctccctcgcttacaatttctgcagatggggcgc

SEQ ID NO: 17371 - DNA, 254 bp, Glycine max
  Clone ID: 700876782H1
ctgcaaaggattctacccgccgctcgatgggaattgcgcttcaaggcgtctcgtagggctaatccgcctcacgagggtcaccaacggcacgtgcctttggggggccgaggcccctactgctggtcggcaaacggacggcgggcgcacgcgtcgcttctagcccggattctgacttagaggcgttcagtcataatccaacgcacggtagcttcgcgccactggcgtgccaaccaagcgcgatgaccaattgtgcg

SEQ ID NO: 17372 - DNA, 253 bp, Glycine max
  Clone ID: 700876784H1
acgaagccgaacgcgtcttccagaaatcgcgaaacgtcgtcgtcgtggagcgcaacggaactggcggagagatgattccctgtgttcgctccagcaaaggtgcactggaattcgccgctcagacgattaccggcgaccaaacgtcatcggaacttttgggttcacatggggaacgttgcaagtagattggatactatagttgagcaagtgactatggttctacaacacaaaacatctaaagagtttaaggagc

SEQ ID NO: 17373 - DNA, 251 bp, Glycine max
  Clone ID: 700876785H1
gggtggttgaaagttttaaacttttcttgattcgattgcaagtctggtcttgaatgaatacttctaagaaaagggtgcctttaaactttttgaacgatatcttcttcttctttgtcatgtatgtatctctgcacttgatcaacaggtactgcctcgtgtcattggatgtgtgaatttctgaactcatttcacagaggtcatgcattattctgctgcttctctttgcatccaagacctggtgtcgatttaga

SEQ ID NO: 17374 - DNA, 150 bp, Glycine max
  Clone ID: 700876786H1
ctcatgtacttcttaagaggaagtcttccttggcagggactaaaggctggcaccaaaaaacaaaaatatgataaaatcagtgagaagaaaatgtcaacttcaatagaggtgctctgcaagtcatatccctcagaatttgtatcgtatttt

SEQ ID NO: 17375 - DNA, 81 bp, Glycine max
  Clone ID: 700876787H1
gggatatgatgtattatgcgtcgcttatgctgaattacttgtcgctgactacggcggagaaggtgttggtgatggctagca

SEQ ID NO: 17376 - DNA, 153 bp, Glycine max
  Clone ID: 700876788H1
cagagaagtctgagtgtacaatgtttctcttcttgacctctgaaacagaagagaaacattgtacactcagagaagtctgatgttgttcagctggctcaaagaaattccagtgaacttgaggacacccatttgaaagagccgtctgcacaatta

SEQ ID NO: 17377 - DNA, 258 bp, Glycine max
  Clone ID: 700876792H1
atggagtatgatgagaagaggatttctgctttgcagcagaggctgcttaatgggattagagagaagcttgatggggtggtggtgaatgggagcttggagaggcgctatgtggggaatttgaatttgttctttgcttatgttgaaggggagagcttgctcatgggtttgaaggaggtggctgtgtccagtggcagtgcctgcactagtgctagtttggagccttcgtatgtgttgagggcgttgggagttgaggaggac

SEQ ID NO: 17378 - DNA, 125 bp, Glycine max
  Clone ID: 700876793H1
atcaacagtgctgccgagtaaggaaggtgaggcccttgaggagagcccttaagggtctcaaagcatggatcactggacagataaaagatcagtctcctggtactaggtctgaactccctgttgtc

SEQ ID NO: 17379 - DNA, 259 bp, Glycine max
  Clone ID: 700876795H1
cgcaaggccaaggttcgtgttccagtccggtgcagctgcgaggagcagcgagccaccgcacccgatccacaaacctaccaagctcttcctcttcgccaccgtttccctctcctcactcttcctcactctctccctcttcttcctcgaagcggagccttcaaatcgctcctcttctggctcgcactctctctcctcgttggccccttcgcccctccctccatcactggcggcgacgtccgcgtcggccgcggcgaggtcg

SEQ ID NO: 17380 - DNA, 257 bp, Glycine max
  Clone ID: 700876796H1
cccaaatcgtagatctacggttaaattggtgtagtgtggtaagatgggaggaggatttagagtgcttcacttagttaggccatttctctcgtttcttcctgaagttcaaactgctgacaggaaagtgccatttagagagaaggtcatatacactgtgatctctcttttcattttcctggtttgtagtcagctccctctatatgggatacactcaacaacaggtgctgatccattctattggatgcgtgttattctcg

SEQ ID NO: 17381 - DNA, 256 bp, Glycine max
  Clone ID: 700876801H1
aaaaaaggaagactaaaactaaaactaaaaccccactcagtcttccagtgaaaaaagaaaggcagcgatggaagaagacttcgacatccccggcggcgaggaaatggatctcggcgaagacaaggtcggcgaggagcgggagatcggctcccgcggcctcaagaagaagctcctcaaagaaggtcaaggctgggaaacccccgaagtcggcgacgagtccaagttcattacacggggactttgctcgacggaacta

SEQ ID NO: 17382 - DNA, 249 bp, Glycine max
  Clone ID: 700876802H1
aagaatgcatcttgaaggtccaaggtaggtaaacagctaacaagggccttagtagcttctgtcttatggttgttgatatctcatcatcactcttaggctttcatctggttgttgatagttgatacattggtgaaggttcatttatagcctagttgtcatgaattgttttcatagatcatttgcttagatacagattgttaaatttggcattcattcatcatcctaagtcaaaaccctcatggtttggat

SEQ ID NO: 17383 - DNA, 245 bp, Glycine max
  Clone ID: 700876803H1
ctgaaaacaaaataagggaagaggagaaaaaacaaaaccaaacaaacctcaaaagttagggtttcctttttggttcgttgctgtggaatcgattcctttgccttatattaaacgtgcgtcgttgtgaagtagaagcaagactcgcagcattgctctgctagttttgacatttaagcgtcacctaaccttcttcggttgctttttaaataattctgcattttctcgcttctttgatcactgcttcg

SEQ ID NO: 17384 - DNA, 246 bp, Glycine max
  Clone ID: 700876805H1
cctcagtcttggggataagataactttgaaacagaagggagccgcttaataggagtaaatgcccgttttctctgatgtttcttcgcttatatcaactttactgtaggctcttgtggcggctaatttgaagcaataaccaagcttgaagttagccgccacaagaagctacacaaagttggttattgcttcaaattctgcggcttttggtggcagcccgcttgttagtattaattttttttttccctt

SEQ ID NO: 17385 - DNA, 249 bp, Glycine max
  Clone ID: 700876808H1
tacgtctccgcatcgagcaccaagaaaatactaataatgggaggcaccaggtttattggtgtgtttttgtctaggctccttgtcaaagagggtcaccaggtgactttattcacaagaggtaaagcgcctgtcactcaacagttgccaggtgaatcagacagtgattatgctgatttttcttccaagatcttgcatttgaaaggagacaggaaggacttcgactttgtaaaatccagtctctcagcagag

SEQ ID NO: 17386 - DNA, 247 bp, Glycine max
  Clone ID: 700876809H1
aaaagaatatgttggaaggagatgggcagattgggttggaattgagaagtttttcaaggagaaaaaatggcaattcagtataactggaacgtcagagagagcaatggtcattggcctgggtggcctcaatctgtttggagttattattcttggaaccatgttgaaagatacggctgttgcacccagtagcttcattaaatttgtagccgacatatttcctcttcttcagatttatgctggttccttc

SEQ ID NO: 17387 - DNA, 245 bp, Glycine max
  Clone ID: 700876810H1
aggtacaaatacttggttcggttgcatttctgtgatattgctagcatttcgcttggtttgctttacttcaatgtgtatgtcaatgggaatttggcttatgaagatttggatctctcttacgttttgaattcgctggcttcgccgttttacgcggactttgtggttgatggaggagatgatggggccttgagtgttggtgtaggtccttcgaagaggagcatgccgcatgtcatcgatgggatatt

SEQ ID NO: 17388 - DNA, 233 bp, Glycine max
  Clone ID: 700876764H1
cccatggctgctctcacttctctatctttctcagcagtgactcattgctcagaaagaaaagtgaccctttcctccactcgctttctggcttcctcctcagagatatttgggttccgaaccgatttctcgtaccactatgttggtgttcgagcttccaattccccatctaaaatggttgttcaatgcatgtcttctgctacagatgttcctcccactgtttctgagacaaagtt

SEQ ID NO: 17389 - DNA, 257 bp, Glycine max
  Clone ID: 700876723H1
cgcactatcagtacaacaactcactcactaagctaaacaatttcatcaagcctgccatggcttcctcgtgtgcttcctctgccattgcagctgttgccatctccacaccaagttcccagaagaatggatcactcttgggaagcacaaaagcttcttttcttagtgggaggaaactgaaggtgaacagttttacagcaccagttggagcacgatccagcactacagtgtgtgcagttgctgagcctgataggcctctg

SEQ ID NO: 17390 - DNA, 255 bp, Glycine max
  Clone ID: 700876725H1
aaaggatccaatttgagcaaggttcaaaaaaatggttggaattagtaaaactgttttgatcaaaagtgtagccgcaggaattaaccttctatttgtatgattctttcatagaaagaaaaaatggtatgttgctgccatttttgaaaagattgaagattcccgaagtaatgcctaaacctaatgattcaaagaaaagctaaaagatcatggaacaagtaaataccattttcaaattgtctcatcaattctattatc

SEQ ID NO: 17391 - DNA, 251 bp, Glycine max
  Clone ID: 700876727H1
cttccgacgggttcaggctccgtggcgctccggcgatcgccttcggaaaggttcggaagaaccgcaaaatgggaatattccccgtttgcagagctggttctgccgtcgtcttccgcgacctcgacgccgacgactttcgccaccctcttgatcaacagaatacgctgctactgagagcaattccgggattgaacgaactgggaaaagctcttctaggaactgtatttgagcaggttatgctccttgaaaac

SEQ ID NO: 17392 - DNA, 258 bp, Glycine max
  Clone ID: 700876731H1
gtattatcaaccctcatactagcagcagcttgctcaacagctagtgttgtggatctccttctcaacacccatgggtctttttgccctccaaagctttgtagcaggtacaggatatctgcagttatggcttttttgtcatggtttctatctatggcatcctctctatttaacctttggctattaccctctgtgattctcatttaactcccctgtaaagttattagattaatcattatttattttgtatttttgcccctt

SEQ ID NO: 17393 - DNA, 272 bp, Glycine max
  Clone ID: 700876732H1
ctctcaatgccggttaatgtatagccggaggcggaaaactgctgcatggctatgggagtgtgtattacagcttaggtccaactctcattaaacttggacagttatcatcaacaaggtcggatctatttccccgtgaatttgtagaggagcttgcaaaattgcaggacagggtccccgcattttctccacagtgagcaagaggctttattgagagtgaattaggagctcccattaatatattgtttaaagagtttgaagatcggcccattgct

SEQ ID NO: 17394 - DNA, 266 bp, Glycine max
  Clone ID: 700876733H1
attgtttgttgttgtaactcgttcttcttcttttgttgttctgtgtttgtgtttgttttttctctcacctgaaaatgtcttgctgcggtggtaactgtggttgcggaagctcctgcaagtgcggcaacggctgcggaggctgcaagatgtacccagacttgagctacactgagtcaaccaccaccgagaccttggtcatgggagtggcacctgttaaggctcaatttgagggtgctgaaatgggtgtgcccgctgagaacgatggc

SEQ ID NO: 17395 - DNA, 240 bp, Glycine max
  Clone ID: 700876734H1
atctttaaggcgcaaggtaggtatacagctaacaagggccttagtagcttctgtcttatggttgttgatatctcatcatcactcttaggctttcatctggttgttgatagttgatacattggtgaaggttcatttatagcctagttgtcttgaattgttttcatagatcatttgcttagatacagattgttaaatttggcattcatcatcatcctaagtcaaaacctcatggtgttgatc

SEQ ID NO: 17396 - DNA, 254 bp, Glycine max
  Clone ID: 700876736H1
gtcttgctccaatctgacaatgttggtgtcctcaaaaccttccctttccgacccctcgaacctctccttccgctctgtcctgaacccttttcagctccctacacaaaacccagcttcatgcaccccttcacgctcctcaagcacccaaattcagtgtggtctgagagaactgagaacccgcattgagtctgtgaagaacacgcagaaaatcacggaggcaatgaagcttgttgctgcagccaaagtgagaagag

SEQ ID NO: 17397 - DNA, 168 bp, Glycine max
  Clone ID: 700876737H1
tatgtaccatgccattgtaattttgtatgcttactactactactaccactacaacacttgttgcttcatttttcttttaaacttgtactgagaaacagaaccatcaattttctctgccttctcattgtgcaataaaattcttaccttgaaatctgaatgttgatgatc

SEQ ID NO: 17398 - DNA, 114 bp, Glycine max
  Clone ID: 700876739H1
aagacaattgtaacactcattttaagtccttaaggattgcgttatttagagagaaaattaacttgttcaaattcttaattaccctgtggaattatagggtccaccaagattgag

SEQ ID NO: 17399 - DNA, 253 bp, Glycine max
  Clone ID: 700876740H1
ctcgagccgaatcggctcgagtccaattgaaattttaaaaatgactgggataaacttaagaattcaattattgaaattgcataagtaaacaatttaattggattggtcgaatggtatcaaaaaaatggagtactaactcccatttcttatttattattgaattaaccgatcaacttgctttgttatcgaacatttctttttgatttcaaaaattttccggaaaaaatttgaatctatttttatatgcgaatca

SEQ ID NO: 17400 - DNA, 257 bp, Glycine max
  Clone ID: 700876741H1
cgattacgctagaggtcgagtcctctgacaccatcgataacgtgaaagctaagatccaggacaaggaaggcattccaccagaccagcagcgcttgatcttcgccggaaaacagctcgaagacggcagaaccctcgccgattacaatattcagaaagaatcgacgcttcatctggtgcttcgactccgcggagggatgcagatcttcgtgaagacgctcaccgggaaaactattactctggaggtggagagttctgat

SEQ ID NO: 17401 - DNA, 261 bp, Glycine max
  Clone ID: 700876743H1
caccaaataattgtactctctccactcttcattctccaccaacacaaaaacatctgcaaactagttttgtttttggaacatatcgcattacattacattagattggtggcaaagcaatggcatcgtcactacaagcagcagctactttcatgcaacccaccaagtttttgcagctaaagtctactcaggccatatctaaggcttttggtttggaacctgctggagttaataaggtcacatgctcccttcaggctgatctta

SEQ ID NO: 17402 - DNA, 252 bp, Glycine max
  Clone ID: 700876746H1
cggctcgaggtttctcttcaatcttcctgaaaaaaacaaaaacacgaaaaatcatccaccctctcacattctctctctctctcctttcaactaatatggcaattgaaaaccaagacaacactgtcagagaaatcaagccaaagaacaggagaatcatgggtgctggaggccctgatgatgacgacaataggtggccaccgtggttgaagccactgctgaaagagagcttctttgttcaatgcaagttgcatg

SEQ ID NO: 17403 - DNA, 254 bp, Glycine max
  Clone ID: 700876747H1
atcccaaactcacttggtctgattgaaacgactttgcggtggctaagcggtcaatgttcggtggcggaggggaggacgcgctggcggcgtggctgggcatgatgccgccgtcgctgctgaatccagcgtcggtgatgtccggcgagatgtctccggcggttccggcggcgagggaggagagggggccggcgcagcgccagtggagccagcaggagacgcgggagttcatagcgatacgcgcggagctggagaga

SEQ ID NO: 17404 - DNA, 252 bp, Glycine max
  Clone ID: 700876749H1
ggctcgagagagtgaatggggccatggtgctaagcttgatgttctggaatcaaagattgcttcagatacttcacacactataaaggcactttgcattgttcacaatgagactgcaactggggtcaccaatgacttggccaaagtgagacaaattcttgattcctaccagcatccagccctccttattgttgatggagtgtcttccatttgtgctcttgatttccgcatggatgaatggggagtggatgtggc

SEQ ID NO: 17405 - DNA, 275 bp, Glycine max
  Clone ID: 700876750H1
gctcggattcggctcaatcgagcgattcggctcagaacgcattgtgtttctctcttaccgcggcgtagatctaagcagtttgggaaaccctaactgctctcaccactctctttgctttttttcctctccgatcaacgacctctttcgtcgccctaagtcatggcaggacttgcacccgagggatcacagtttgatgctcgtcaaaatgataccaagatgaatgagttgcttacatctgatggacaggatctcttcacatcttatgatgaggttta

SEQ ID NO: 17406 - DNA, 245 bp, Glycine max
  Clone ID: 700876753H1
tgcaattgaagttgaagtcttgcccttctctcttcaactcctaacacaagacatcatcatccatggctgcctccgactccactgtcggagctgtcaacagagctcttttgaacctgaatcggtctggacctgcggtatcagctcccagttcatccttctttgggatcagcttgaagaaggctattggctcaagggtcaccaacacaaagattttctctggaagcttcaagattgatgctgtagaa

SEQ ID NO: 17407 - DNA, 191 bp, Glycine max
  Clone ID: 700876754H1
ctcgagccgattttgtctcactatattcatatagtttttcctatatgttgtgtcaaggggcaatagacgagaaaggtttcctctgtatcttgttctgtttcttcaaatgtctccctcaaaacccttgtaaatgcatgatgtaaagatggaaagttcaaagcgttgttttacgtatcaactcagacggaatt

SEQ ID NO: 17408 - DNA, 253 bp, Glycine max
  Clone ID: 700876755H1
ggcgagacgagccgtttctaattaatgataggaatcaatggaagtaggaatgtctctgaacgcgctggttcgtcttcctctctcgaattcacgcttccacgacgatgctgctccgatgattattaggcactctctgttttcgagccgaaagcaacagcagcagcagcagagttataaggttccacagcgtcatcaagtgttcgtggttgaagccaagggcaaaaagggaatgatgtctcgtcaatttcagcgc

SEQ ID NO: 17409 - DNA, 250 bp, Glycine max
  Clone ID: 700876756H1
gtgcttcactcttcacttcgcagcttcagatcttctccatcctctgaatcaagttttgactttatttgaagagtttctcaactgcactttccttccaaaatgagccggacaatggaggaagatgctgcgggtaaaaatgaggaagacgtattcaacaccggacgcctatctgtactcatgatgagtgttaaaaataatactcaggtactgataaattgtcggaacaacaaaaagcttctgggtcgtgtaa

SEQ ID NO: 17410 - DNA, 252 bp, Glycine max
  Clone ID: 700876757H1
aaaaatagttgatattggtccaaagaattggcacaaagcctgttttgtgccaacaaagtcagatgcccttgttattggttatagaaattggttaaagaagtatgcaggtggtcaggttgattggagaggaaaatatagtggggctctccctccaacacctccaagagaacagcttatggacaggtactggtcccatgtggtgaattgcaagagttgcaattctgcttataagagcctcaatgtgattgaagt

SEQ ID NO: 17411 - DNA, 259 bp, Glycine max
  Clone ID: 700876758H1
tgaaggtcctggaaagggcaagagccatcagggctcagttaagtatggctttagcctagttaaagggaaagcaaaccacccaatagaggactatcatgtagcaaaaatcgtcaagcttgtagggcaagagttaggactttttgctatatatgatggacacttgggagacagtgtgcctgcctatttacaaaagcatctcttttctaatatcttgaaggaggaggacttctggactgatccagccagttccatcattaaa

SEQ ID NO: 17412 - DNA, 118 bp, Glycine max
  Clone ID: 700876760H1
cagcaattgaatgaagttcagacagaagctatggacgcagattctgaatatcgtgaaaatagtgattcttcatttgtttgggatgagaattcacaactttacttccacacaacatacg

SEQ ID NO: 17413 - DNA, 161 bp, Glycine max
  Clone ID: 700876761H1
gtagtaaatgattgttctacgaagctcccctcggatacagcatagaagacgttagaccaaacggtggaatcaagaaattcagatctgctgcttactccaactgcgctcgcaaaccttcctgatatccatccagattgatagttcattgcatgcaaccatag

SEQ ID NO: 17414 - DNA, 265 bp, Glycine max
  Clone ID: 700876763H1
ctctcttcaacaacaagttgatgtgctccaaacccaattggcactggcacaagcagaggttgtacacatgagaatgcgccaattctcaccactatcagatcaacaacaacaaccctcagtgcttcctgaagcctccaatgcatcatcagagaacttgtaccactcaagcaggctcttgtcttcacaaaccaagtccctttttagcatggacatggtcgttgatcaggccaacatggggcaatccttgtggtcatactagcttaat

SEQ ID NO: 17415 - DNA, 255 bp, Glycine max
  Clone ID: 700876722H1
ctatgcacctctcatccgtgatgggcgtatggagaagttctactgggcaccaacaagggaagaccgcattggtgtttgcaccggaattttccgcactgatggtattcctgaacaggacattgtcaagcttgttgacaccttccctggccaatccattgatttctttggtgcactgagggccagagtatatgatgataccgagaggaagtggatttctggtgttggtgttgacagtgttgggaagaagttgtgaac

SEQ ID NO: 17416 - DNA, 241 bp, Glycine max
  Clone ID: 700876673H1
gcaaaaggtaacactagttcctcgtggtcaagctcggggtcttacatggttcattcctaatgatgatccaactctgatctccaaacaacaactctttgcaagacttgttggaggactaggtggaagggctgcagaagaaattatttttggtgagcctgaagttacaactggagcagctggtgatttgcagcaaatcaccggtttggcaaaacagatggtaaccacatttggcatgtctgat

SEQ ID NO: 17417 - DNA, 238 bp, Glycine max
  Clone ID: 700876675H1
tcagaaaggggttgactataatgggccgattcgggtttggggtaacttggttgctttcttagaaagaattgatgttgaatttttcaagagcttgcagtgcatagatcctcatacccgggactatgttgagagactcagggatgagcccttgtttctggttcttgcccagaatgttcaggaatatcttgaaagagttggaaatttcaaagctgcatctaaggtggccttgaggagggtt

SEQ ID NO: 17418 - DNA, 240 bp, Glycine max
  Clone ID: 700876676H1
aatttgtatatgctaccaaacctcatactttccctaactgcaattaatctgcatttgcacgaacctaacctactatcgaaagtcgaaacatcccctgtcactttgactcaactcacacaccaatctccatatccctaccaattttccctattcactcatcaattttctcgtatcaggtttgatctgaaatccaggattgctacttaggtttgcatcaatataatctgacaagagaatagt

SEQ ID NO: 17419 - DNA, 240 bp, Glycine max
  Clone ID: 700876677H1
atcattaaatactctccttataaaccctgcaccatgatatcattatcatcaccttggtttgttctaagagtgttttatgtgagagtgtgtggcattcaggttgatgaatccaccccagagtttctctctctcaaccatattcctcttagtcctgatacccttttagaggtgaatggtgttaggagcagcatttactctgatggagaagagtcttcagttctgagaagggatagagtggat

SEQ ID NO: 17420 - DNA, 242 bp, Glycine max
  Clone ID: 700876679H1
catagatctgaatggagagcgaggtggtgtccattgccgttttctaatgaaaacaacaaaatagacacctgttaagaaggaggacaacgatggtgctgccgctatttactgctttcattctctttgcttttattccgaatggattgttagcagttccttccaccgtcccggcattcctttggtcatcacattatgaactggcctctgaaaatatattgaaggaatctgtaaattaccaagtc

SEQ ID NO: 17421 - DNA, 244 bp, Glycine max
  Clone ID: 700876680H1
agcccacattcatcaacgacccacacctatacgcacctgaatgggcgcaaatcttgaccgacatgacctataccgatccatcgtaccgcgccaagagtggtctaacatcggaattcgattcattccctccgtacatggaccacatggacacttatcagttcccaccatatccgccccagatgagcaatgtgctcggttcgctagcagacatcagcgatctgactcagatcgacagcatggactt

SEQ ID NO: 17422 - DNA, 240 bp, Glycine max
  Clone ID: 700876682H1
ctttaaagcaggttattcaccccatccatgaccagaccttctatctgactatggagcataagaagaagcttaaggaggagtatggaattgagccctggacttttgctcagaagttaggagatgctgttttcattccagctggttgtcctcaccaagtcagaaatctgaagtcatgtattaaggttgctttggattttgtctctcctgaaaatgttggggagtgctttcgtttgacggagg

SEQ ID NO: 17423 - DNA, 240 bp, Glycine max
  Clone ID: 700876685H1
ctcagaggttctagaaagatccactccgaaatggacggtgcgccacaatccgccggtgccggaggtccggcgccgttccttctgaagacctacgacatggtggacgatgcctccaccaacgacatcgtttcgtggagctctaccaacaacagcttcgtcgtgtggaaccctcccgagttcgctcgcctccttctcccgacctatttcaagcacaacaacttctccagcttcatccgtcag

SEQ ID NO: 17424 - DNA, 157 bp, Glycine max
  Clone ID: 700876686H1
aacagagacgagacgagcgtgcctcgtaataatcatagcataaattcatcacgatgagagtgtgctatagtgagagttggagatggatcagccgttgtggagtgtgttgcctttgctaacaatcctggtctcctttggagtgttcttctacttgcag

SEQ ID NO: 17425 - DNA, 236 bp, Glycine max
  Clone ID: 700876688H1
cgcggaagaacgctcgcccgcaccgtccagatcgtaatcaagagaagaggagcgagttctctttttccttgcagcccaagccatggcgcctctgatcctgcatggtggaaaaaccaacaaaaattcttacaagacactcattgcggcggagtatgccggcgtccaagttgactttgccccaaattttgagatgggtgtctccaataaaactcctgaatttctcaagatcaatccta

SEQ ID NO: 17426 - DNA, 69 bp, Glycine max
  Clone ID: 700876690H1
gtgaagacggaagagtatccttcttctatcatatttggctttcaatcaaaaatgacatttaatcaatcc

SEQ ID NO: 17427 - DNA, 237 bp, Glycine max
  Clone ID: 700876691H1
gaagaacagttgcttttaagaaatggtatggaagcaataaatagtaatatcaaagagagaaggaatgctttcctatactcttgtatagcatgtattggtagagaaagtaccaaaaaataatcaggaagtcaaggttaaatacactttatccattaaaatgcactagggaatcatattcttgttcaccagagaagttctctgcttctagttcaagattttccttaatgaagggttttg

SEQ ID NO: 17428 - DNA, 236 bp, Glycine max
  Clone ID: 700876692H1
aaaaaaataaaattaagaaattttcatggtaaccattcgtgcagatgaaattagtaaaattatccgtgaacgcattgagcaatataatacggaagtaaaaattgtaaatacgggtaccgtacttcaagtaggcgacggtattgctcgtatttatggtcttgatgaagtaatggcgggtgaattagtggaatttgaagagggtactataggcattgctttgaatttggaatccaaaa

SEQ ID NO: 17429 - DNA, 238 bp, Glycine max
  Clone ID: 700876693H1
cagaaaatgaaggagtatggatgtaaaccaacgactagtacttataatactctcatcaaaggatttgggattgctggaaggccttatgaatctatgaaattgctagagatgatgggtcaagatgaaaatgtgaaacccaatgatagaacatataatattctcatccaagcctggtgtaccaagaagaaactggaagaagcatggaatgttttgcataaaatggtggcttctggcattc

SEQ ID NO: 17430 - DNA, 238 bp, Glycine max
  Clone ID: 700876694H1
accgtagataacgccgcgtttggttgttaagttgttccgtttcagccatggtggagaacaatctcttcgaggatatctttagggtcgaaaaattaaaccccgatgacaaaaaattattcgataaagtcactcgcattgaagcaagaagtgaaaagtttgacatgtttatgcacctggacattaattctgaggtatatccattaaaggtgggtcagaagtttgctcttgtgcttgtttc

SEQ ID NO: 17431 - DNA, 241 bp, Glycine max
  unsure at all n locations
  Clone ID: 700876695H1
ctctctctcaccctcctcttcacacattatctgtcccctctaanaaacattctcgttcanactttcagattgtctgaagatgggggcgggtggccgaactgatgttcctcctgccaacaggaagtcagaggttgaccctttgaagcgggtgccatttgaaaaacctccatttagtctcagccaaatcaagaaggtcattccacctcactgtttccgccgttctgttttccgctcattctcc

SEQ ID NO: 17432 - DNA, 61 bp, Glycine max
  Clone ID: 700876696H1
gaaatttgcatatgggatttggtcaatccttcagaacctacacattttccacacaacatac

SEQ ID NO: 17433 - DNA, 270 bp, Glycine max
  Clone ID: 700876701H1
attgtttgttgttgtaactcgttcttcttcttttgttgttctgtgtttgtgtttgttttttctctcacctgaaaatgtcttgctgcggtggtaactgtggttgcggaagctcctgcaagtgcggcaacggctgcggaggctgcaagatgtacccagacttgagctacactgagtcaaccaccaccgagaccttggtcatgggagtggcacctgttaaggctcaatttgagggtgctgaaatgggtgtgcccgctgagaacgatggctgca

SEQ ID NO: 17434 - DNA, 255 bp, Glycine max
  Clone ID: 700876702H1
atccttcgttaaatgacctatcagagttagctaccaactaattttggttagtttgaaaatatttatcttaatggggttgcattttgctgtgttggcgaaaataatcaattttctttattttaaaaaaatctttgcacaattcataagagtgtgcttcttggcaattatgaagtaattgcaacgttcataatatttaaataattattatgttttagtatattaattactctgtcgggtataattcaactggacttt

SEQ ID NO: 17435 - DNA, 253 bp, Glycine max
  Clone ID: 700876703H1
cacagcatgatgagactgtcacaaatgatgagattgcagctgatcttaaagaacacgtgattaagcctgtgattcctgagaagtaccttgatgagaagaccattttccatttgaacccttctggcaggtttgtcattggagggccgcatggcgatgctggtctcaccggccgcaagatcatcatcgacacctatggaggatggggtgcacatggtggtggtgccttctctgggaaggatcctaccaaggttga

SEQ ID NO: 17436 - DNA, 197 bp, Glycine max
  Clone ID: 700876710H1
gactaccattgctacgcccctaaagcacttttcctccctctgacttttgctacaactactacctttacaagcatatagttggaatggctcgattttcattggatgagatatcagacactggtgcctttgtgagatctgcttcaacattcagaaattggatttcgagggacccgaattcgctgtttccaccggaatca

SEQ ID NO: 17437 - DNA, 70 bp, Glycine max
  Clone ID: 700876712H1
catctagctactctaggttggggggtaggtcctgggggggaagttatagacacctttccacacaacatac

SEQ ID NO: 17438 - DNA, 256 bp, Glycine max
  Clone ID: 700876713H1
gaattatttggacgctcaatattttggtgagattggaattggcacacccccacagcccttcactgtagtgcttgacactgggagttccaacctttgggttccatgcatcaaagtgctactttactcttgcttgctatacccataattggtacacggctaagaaatcaaagacacatgtcaaaaatggaacttcatgtaaaataaactatggaactggatcaatatctggtttcttcagtcaagataatgttaaagt

SEQ ID NO: 17439 - DNA, 220 bp, Glycine max
  Clone ID: 700876714H1
acaaaggcaactctccagcataatgcctttgttgacttctgactatggatcttctgaagggtggataggaacaaatgtgaaaccaacagtaccacctgaattggccacctacactgtgcttcctctaattggctactttgaattcatccctttgagagagctagaggaaattaagggagatgctagtttcctttgtatggagcctaagcctgtggggctc

SEQ ID NO: 17440 - DNA, 257 bp, Glycine max
  Clone ID: 700876717H1
caagaaatggaggagaacaatcgaaaaattagtatcttagaaactcaagtcgagaagtataatgggaaaaactcgcacgtgccaatatctctatctccattgacaaaatctacttcagcaactcaaacagagcgcatcagaacttacatatatatacctcagatgatatggtgatgattccataatctcaggactcgatctcaggattcgtgcgccagaaacgacattctcaatctcaggcggagacgtgaacagat

SEQ ID NO: 17441 - DNA, 104 bp, Glycine max
  Clone ID: 700876719H1
gaacaatccaagtcaaccatcaaaagtaaattgcagatacaacatttcacttgatatacaacatctgcaagagttggaaaacaatcgccatttagctgctggta

SEQ ID NO: 17442 - DNA, 247 bp, Glycine max
  Clone ID: 700876671H1
tacaaacttagccctgcttctgataatgcagaatgcatagatggtaaaatcaaaagagtctctcggagagggaagaaggttgttgatgaaagtgaagaaaaggagttaaagggcgattgggtggtcagaaaccagaacaagaacaagaaacctaaacgattgaatcttgatcagagaatttcattaaagaataacaaaagtggggacgaagtcattccaacccgaaagacaagacatgttgggaaca

SEQ ID NO: 17443 - DNA, 260 bp, Glycine max
  Clone ID: 700876720H1
aaggaagagctctgctggttcttcgagaagatcgtatagcgagagtgaatcggaatcggaatcagagtctgaatctgaatctgaatctgaatcagaagaagaggaacgtagacgaagaaagagtaggaggaatagaagaaaaagaagtaacaggagcaggaagaagagaagatatagcgattcagatgagagagaagacagcgagagcgatgactctgatagcagtggcagaaagcagaagaaacgatcttcttcctcaa

SEQ ID NO: 17444 - DNA, 259 bp, Glycine max
  Clone ID: 700876721H1
aaaaaaaaggaaaggaacttgagccacattctgtccctggtggactcaagaagagtctttcataggacagttaaaattatagcttgcaaaaagggttcactagcaaacattgcaatggcctcaacctcttctgctctcactatatcctcttcttccacccttcttgatggcaaggctccaagacagtcaccagctgcttcccctcaatgtgtgagcctcccccctccccctttgcactctcagaaccgttcatggaaga

SEQ ID NO: 17445 - DNA, 249 bp, Glycine max
  Clone ID: 700876628H1
ggttacttcccctatggctcgtcactccgtactctgagccctcctcctcttcgccgccgtgggcagcgccgcgatggcggtggccgcgtccgacgccgacgacatcctgatccgtcaggtggtgccagatgttggcgaaccgaagaggaggacaaccggctgaacgccgagcaccacttcgcgagcttcaaggccaagttcgccaagacctacgccaccaaggaggagcacgatcatcgcttcggcgtc

SEQ ID NO: 17446 - DNA, 250 bp, Glycine max
  Clone ID: 700876629H1
ctctcagtcacatatggttagcactctcttctaaagccaactactactattagtatttagtgccctttcactcgtaacaagtgttcactgatataaatgtctttgtctgtggaagacaactactatggcatgagcagcagtgtgagtgagatagaggaagagaattcttcacacttgcacttgaataatgatggtcctaatcctatggtcaccattggtgaagaagagaacgaggatgatgatgacactg

SEQ ID NO: 17447 - DNA, 255 bp, Glycine max
  Clone ID: 700876631H1
gtgggaagcccatttgtgtgcagggtccagattgcccttaagttgaagggagttgaatacaaatttttggaagaaaatttgggcaacaagagtgatttgcttctcaaatacaaccctgttcacaagaaggttccagtgtttgttcacaatgagcagcccatagcagagtctcttgtgattgttgaatacattgctgagacatggaagaacaaccccatcttaccttctgatccttaccaaagagccttggctcgt

SEQ ID NO: 17448 - DNA, 256 bp, Glycine max
  Clone ID: 700876632H1
ccactggagacaatttctacgatgatggattgactggtatagatgaccctgcatttgacatttccttctcaaaaatctacactgccaagagcctccaaaagcaatggtatagtgtgttgggcaaccatgactacaggggtgatgttgaagctcaattgaatccaatccttcagaaaattgatcctagatggatctgccaaagatcatttattgttgatactgaaattgctgagttcttcttcattgattcaacacc

SEQ ID NO: 17449 - DNA, 252 bp, Glycine max
  Clone ID: 700876634H1
gcaaggagattgatgctaaattacgggatgaagccagaaggcaaagagctgttggaggtagggaacaaaaagttgcctcaggagttggacaggaaaaagggcatagagcaaatgttgcaacaaaagacaatgctgacccaggcttattggtgcagcaaggacgttattccagctcaaggaaccaaagtgaattatccaaccctcatagaggaacggtgtctggcaatctggttttccctcacaaacagtcag

SEQ ID NO: 17450 - DNA, 251 bp, Glycine max
  Clone ID: 700876636H1
accgaaggggtcatttctcccaatccgtttctgtttctgtcttccaggaacactgtcagtcagtgaaggatacgatgaacatcatgtctacccaccagtgtagttggcctgtgagaattcaggatcatcctgacaaaggaagtattaatagggctccattttccagaggatcagacttccttaatgttggataccatactcaaaaatatggtcatagtgccagacaatgtaggcccgttttttccagttca

SEQ ID NO: 17451 - DNA, 248 bp, Glycine max
  Clone ID: 700876637H1
cacaaacaatagtgcatagcgtttttcattgtgcattattcaatggccaccacagcagctctatccggaaccatggtgagcacctccttcatgaggaagcaacctatgacgaccaagagcctaaagacattccccaacgctctttttggtctgacaggtggacgaggtggtcgtgtaacttgcatggcctcgtacaaggtgaagctcataaccccagaaggagaagtggagtttgaatgcccagatga

SEQ ID NO: 17452 - DNA, 251 bp, Glycine max
  Clone ID: 700876639H1
tggatgtttggtcatggatatgtgagctccccaactcggtggaggggaccgagtcccactcgccacccatgaagttcgaaatcgcgaatgagaagaacgacgacaagctggacaactcaactcgttccattcacctgaaagctgagcgaacctccggctcagactcggaagctgcggtgatcttcaccgtatgcttgcaaggctttcacccacacaacgcacatccccctctatgggtctccgaacagtgc

SEQ ID NO: 17453 - DNA, 248 bp, Glycine max
  Clone ID: 700876640H1
gcaaatatcaattccgaagaggacggtgaagaaatccatttgcaaaaaactgtcctaagcaagttcttagaaagatagcttgttcaatactacaccgtgtatctattattgagttacttctctgttaattatggtctataaatttttgcacttgtatggtttcactgccattcgttccgagccgatcttaaaaaaacaaaaatgcgtttattgttccgccaaaattgatatgaatagttcgagtcatt

SEQ ID NO: 17454 - DNA, 246 bp, Glycine max
  Clone ID: 700876642H1
gtttatattgccatttaggcggtgatcgtaactgaaaattggcaatggtgaatcgtcgacgcctcactcgggtggcgacgagcgacgatgaagacgaagcaccgccgcgtccacaacgcacgcggaacaggatgaggcttatcgaggaagataacgatgatgacgagaatgaagaagaaaaagaagaggaggtgccggagccgcctcagcttgcggaggacgctaaacctcgtggccaacccgtta

SEQ ID NO: 17455 - DNA, 245 bp, Glycine max
  Clone ID: 700876644H1
gtcattattagtgcagtgctcaccagcagggcaattttccagaggatgaagaactatactatctatgctgtctcaatcaccattcgtattgtgtttggtttcttgtttattgcgttgatctggaagtttgattttgcacccttcatggttttgattattgccatactcaatgatggtaccattatgactatatccaaggatagagtgaaaccatctccacttcctgatagctggaaactgaggta

SEQ ID NO: 17456 - DNA, 247 bp, Glycine max
  Clone ID: 700876646H1
ctcatattttatgggccgatgtgtgtgcaatgcaaccaaatgaaagtgtcatgtgaatgtgacgattaataccgagcaaatcaaattatttatgatttctggagtgcgaaaactggaccattgatgtgtgtctctcggaagctgccaagttcaaattatttatgtcatacgggctatcggcatagtagctggtgttttagtggttgttcttctggtgctgcttctcatgaggaggatgggatggtta

SEQ ID NO: 17457 - DNA, 247 bp, Glycine max
  Clone ID: 700876647H1
acattccattcctagagtagggcagaagcaacaacatcataatcggaatttgattgaattcgatttgggtgatgagcgcgtgaaaacagaggaagaggcagaagatggcagggaagcaaggggtggcggcagaagacgcaataagggccattggtttaggttacgatctcacaaacgatctcaagctcaaagtctgcaagaaccactccagattgatcgctatcgacgatgacaaccttcgaactgt

SEQ ID NO: 17458 - DNA, 245 bp, Glycine max
  Clone ID: 700876651H1
gcaaagcagaagttgccaaagatggtgtttgactactacgcatctggtgcagaggaccagtggactctgcaggagaacagaaatgccttttccagaattttgtttcggccacgtattcttattgatgtgagccagatagacatcacaactactgtcctgggcttcaaaatatccatgccaatcatgcttgccccaacagccatgcagaaaatggctcatcctgagggagaatatgcaacagcaag

SEQ ID NO: 17459 - DNA, 244 bp, Glycine max
  Clone ID: 700876652H1
ctcgagccgattcggctcgaggaagattgacatttacagtgataagcgtgaccaggaaacaatggaggattgggatcaagagaccttggagaaggtggtggagtcaaagaaaactgagtataatcagaataaaccaactgacatagtctgtaaatactttttggatgcagtagaaaagaagcaatatggttggttttgggtctgccccaatggtggtaagaattgccattatagacatgctctt

SEQ ID NO: 17460 - DNA, 246 bp, Glycine max
  Clone ID: 700876653H1
atgactacaactctgaggcatcttcaggcttttttgtttcattactttttggtcttggccctttacttggaggcattattttggttgtatttgctcttgctttgcgtcttcagcatgctctcctcatgggcaccgcatgcggtattgcctttgttctcggtgcctggcgaccggtgcagcttattttgtcttcaaaattgggacttttccctgttttgttactccttgcaatgggggctgctttca

SEQ ID NO: 17461 - DNA, 245 bp, Glycine max
  Clone ID: 700876657H1
gttctcaaaccctaagaattttgatccatcctggcaagagcattgagtaggtgttaggaaccgtatagtctgtcagactaaattatttccttgaagttggttctcttcatgggtaagaagttttcatggagttttcgttgcatttgagcaattcaaccttgtaaaaataaataggctttccataaaccaaatgttacttttaaatgcccaaagcttatcaagcctcttttcttgaatggggattg

SEQ ID NO: 17462 - DNA, 241 bp, Glycine max
  Clone ID: 700876660H1
ctctttagagagatagagagaggaagaaagaatggcagcttgcactgtctactcaacacaatctctgagctcaaattgctccatctcaaccccatcaaagacgcaactcagttttttccaccaaaagcaggtagttttctggaggaacagcaagaagggcagctgcagcagcagaagaagctatgtgataacatgtgcagcaggtgactcacagacagtggtgattggcctggctgcagac

SEQ ID NO: 17463 - DNA, 243 bp, Glycine max
  Clone ID: 700876661H1
tttcggtttatatatgagactgagcggcatagtggtattggggagcttcttgagattctggggagtattattaatgggtttgctttgcccatgaaggaggagcataagttgtttcttgctagggcgcttctgcctctgcataagcccaagccggttggggtgtaccaccagcagttgtcgtattgcattgcgcagtttgtggagaaggattacaaactcgcggacacggttattaggggtttg

SEQ ID NO: 17464 - DNA, 246 bp, Glycine max
  Clone ID: 700876663H1
ctctcagaaaagccgtgttctttgtaatcgctcaatgcttcaccttttccgcatatgctgcaaggtttgacatcacaaaccgatgcacatacactgtctgggctgcgtctgtgcctgttggcggtggcgtgcaattaaacccgggccagtcatggtccgtggacgtgcctgcaggaacgaaaggggcccgcgtttggggccgaaccggctgcaacttcgacggttcgggccgcggtggatgccaga

SEQ ID NO: 17465 - DNA, 247 bp, Glycine max
  Clone ID: 700876665H1
gagagagcgagcgagcgagcagtttcaaagagaggatttgggattgggaaggcgagggattgcgctgcgtctcttcctcttctctttcgattcatccctcattcataatcttccaatccaacaacctcagcctcacactcacacatacacctctctgaacgcgtatcgtccctcccatggcttcaaagcgcatcctcaaggagctcaaggacttgcagaaagacccaccaacttcttgcagcgctgg

SEQ ID NO: 17466 - DNA, 246 bp, Glycine max
  Clone ID: 700876666H1
ggctggttgatgccacccaaggtttctctcctcaaggcaactcaaggtgatgctataagcaactattaccatgaaatgcatgtcatccaggacatgcttgttcctttgtacaaggtgggagatgctttagaatgggttcaccgtgagatggaggtataccccatttggctctgcccacacaaattgttcaagctgcctgtcaaaactatgatttaccccgagccaggattcgaactacaccgcagg

SEQ ID NO: 17467 - DNA, 243 bp, Glycine max
  Clone ID: 700876667H1
gttttgaacccaaaaagcggagaagcttctcttctcttctctctttctttcaaaccgccatctccttctccttctccttctccttcttcagctgttgaaaataaaaaatggcagacggtgaggatattcaaccactcgtctgtgataatgggacaggaatggttaaagctggatttgctggggatgatgctccaagggctgtgtttcccagcattgttggtcgtccccgtcacacgggagtga

SEQ ID NO: 17468 - DNA, 55 bp, Glycine max
  Clone ID: 700876668H1
ccatttgtcataattttactttgcgttagagtctctatagtaaataattgcgtac

SEQ ID NO: 17469 - DNA, 238 bp, Glycine max
  Clone ID: 700876669H1
ctggaaagcagcttgaggatggccgtacccttgccgattacaacattcagaaagagtccaccctccacctggtgctccgtcttcgtggtggcatgcaaatctttgtcaagaccctcactggaaagaccatcacccttgaggtggagagctctgacactattgacaatgtcaaagctaagattcaagacaaagaaggtatcccaccagaccaacagaggctcatttttgctggaaaaca

SEQ ID NO: 17470 - DNA, 147 bp, Glycine max
  Clone ID: 700876670H1
gtcgaagcaggttcaaacctcaaggatgaaccgttcggctgttgtactcttcgcgctctgtagaggctctcttagatgcgcaatcaggggcattggtacaggtatccttggagttgagaacttgggacaattgaatatcccatacaa

SEQ ID NO: 17471 - DNA, 249 bp, Glycine max
  Clone ID: 700876627H1
ctactgttgagcattgatttgttgggtttacaaggagcaggtaaagcttttccaaacaagattgtttttgatgataagcttgtgttggctaacacacaagaattctttgatggaaattttccagtggattcttggttaccaatttttgtgaattgtctttatcctgtaagtcaattaccttcagaagctgtcgttgtaaatgttacatgtggtagtggacgtggtggtttacccaccactgcttggatt

SEQ ID NO: 17472 - DNA, 240 bp, Glycine max
  Clone ID: 700876589H1
ggacaaaagcaatgtagatgttgaagatgtggttcactctaacaagggattatctattctattcctttacaatatttcatatttcttgtcacctgttggtcaatgcatggtgttgttcactatactttatttatgtcatcttgttttttatcaagtgtgggcaaggaattaccgatgatgaactaagcccaacttgtgtatcttccatattgggtatccacatagagagagttgctgcag

SEQ ID NO: 17473 - DNA, 238 bp, Glycine max
  Clone ID: 700876591H1
aaaaaactcaatcaccatgggtaaagaaaagggacacgttaacgtcgtcgttatcggccacgtcgattccggcaagtgcaccactactggacacctgatctacaagtgcggtggtatcgacaagcgaaccatcgagaagttcgagaaggaagctgccgaactcggcaagtcatccttcaagtacgcatgggttcttgacaagctcaaggccgagcgagagcgcggtatcaccatcgat

SEQ ID NO: 17474 - DNA, 197 bp, Glycine max
  Clone ID: 700876592H1
cgacgccgccggaaagtgggtagcccgttgaggttgagagatcctgagcgtccattacagaaagttgaagcctgaattgaattcaaggtggaaggaacgcaacttttcatttgagaatcagccctgtctctgtacgcgttcgactcgatcactgatttagtccatatcacctaacaccgctaacgccctagctaact

SEQ ID NO: 17475 - DNA, 236 bp, Glycine max
  Clone ID: 700876595H1
agacaaatcacttttaccaagaaaaactcaaaagtcacttcatcgccaaaatgactaccgagcagaccttcatcgctgtcaagcctgatggtgttcagcgtggcctcatcggtcccatcatcacccgcttcgagaaccgtggcttcaagcttgcgggtatcaagatggtcactccctccaaggagcacctcgagaagcactacgccgacttgagcgacaagcccttcttccccggt

SEQ ID NO: 17476 - DNA, 238 bp, Glycine max
  Clone ID: 700876596H1
gaaaaacaaaagagtagtggcctttaggtggtgaagaacaagagctcaaatcaaatcgaatcgaaaaaagaaagaaagatcatattcatggcgatggcaagcctggctcgacggaagggttacgccgtcgttttgtcgtcgaggtcgtcgatttgtctgacaagctggaggggattcgcgtccggatctgacgaaaacgacgtcgtcgtcatcggcggcggtcccggcggctacgtgg

SEQ ID NO: 17477 - DNA, 262 bp, Glycine max
  Clone ID: 700876601H1
aagttgtctgtggtggctaccacacctgtgtcctgaccagtaatttcatgctggtgagcgttatacttgggttcaaatgaaaatggctgccttggtattggttcctcggatgtcattcatctgcctgaaaagatcaagggccattcttgaagtcttctgttagccagctttcttgtggttggaagaatactgcagccatttctgggtcatggaagtgatgtcgactatataaatcctacaagagtttgctttggagaagacg

SEQ ID NO: 17478 - DNA, 259 bp, Glycine max
  Clone ID: 700876602H1
cagagggtcatctctctcccctattcgttgagtttctgcccgcgtgtatagtgtgaatttattcatatgcttggttagcaatggggcggggtttgttatttttttgtcatgtaatatttgcggatctaacagccaaagcatcattgtgattgatgcaactggggtgttctgcaaatttgaggaatacattgtgcactactgaagatatgtagttcagaatattttagacacgtcaaacagttcaaaaatctatatagat

SEQ ID NO: 17479 - DNA, 267 bp, Glycine max
  Clone ID: 700876603H1
gctcgagtacatagagtaccgcaccagaaaggaaaaggaaaacgtcagcgtcaaaaaccatgtcattcagtggttcgaagtccttgatgggttacttggtccatattggaaagccctggggctagccttcaactgtactttccttctctttggatctgtgatacagcttatagcatgtgcaagtaacatatactacataaatgacaaattggataaacggacttggacttatatttttggagcttgctgtgccaccactgtgttcat

SEQ ID NO: 17480 - DNA, 259 bp, Glycine max
  Clone ID: 700876604H1
atccttcgttaaatgacctatcagagttagctaccaactaattttggttagtttgaaaatatttatctgaatggggttgcattttgctgtgttggcgaaaataatcaattttctttattttaaaaaaatctttgcacaattcataagagtgtgcttcttggcaattatgaagtaattgcaacgttcataatatttaaataattattatgttttagtatattaattactctgtcgggtataattcaactggactttggtg

SEQ ID NO: 17481 - DNA, 259 bp, Glycine max
  Clone ID: 700876605H1
gaacaagctgggaagcaaggcattatggtggcgtctcagagtcaaaaccccattgagcaaatccaagcgcgcttcaaggacttggaaactggattccgcctctggctctccaagcagtccctccccgtcgaggccgccgtcgtcaccaccaccagcgccgcccagggcgccgccatcggcgccttcatgggcaccctcaccgccgacgcctcctccaccttccccacccctcctcccaacgcctctctcaatccccaag

SEQ ID NO: 17482 - DNA, 258 bp, Glycine max
  Clone ID: 700876607H1
aagacgaaactccttggatcgagattatgcaatgtccatgatttccatgtctgcagggatctcctaaatgcttctttcacgttcatcgtcatgtttacccttcctccttcctggaagtagatgcccctgcaaaatgttaaggagtttgtttagaagtgttactttcgattatagaagacttttttatttttatttacattatttaacgcaacatatgtaaaatcatttcaaaaaagtgaagtacattttctaaaaaga

SEQ ID NO: 17483 - DNA, 256 bp, Glycine max
  Clone ID: 700876609H1
gacagagcagcactcacattcacaacgaaggtttcctattcatcagacatggtgaaggcaatcagagttcacgaactcggtggccctcaagttctgaagtgggaggatgtggaaattggagatccaaaagaaggcgaggtccgtgtgaggaacaaagccattggggttaatttcattgatgtctactttcgcaaaggagtttacaaagccccttcttttcccttcactccaggtatggcagctgttggggttgtga

SEQ ID NO: 17484 - DNA, 256 bp, Glycine max
  Clone ID: 700876610H1
tttttcagcttgtgggtcgatgtcaactgtgtcaaaagatgacaacttggcgctttcttcggaggactcttcatgcccagaagagtctgagcttgaattgggtcttgggttgagcctctcctctggctcttcatcaaaatctcatcaccaccatcatgctagaatttacactgctaaggattttccttcttctgcagcagcagcagcagcagcagcatcatcaccttcctcttcttcttcctctcccaacaacatc

SEQ ID NO: 17485 - DNA, 156 bp, Glycine max
  unsure at all n locations
  Clone ID: 700876611H1
gtgaagacggaagagtatccttcttctatcatatttggatttcgcccnaancgacatcttcaaccgcgtcattcatttcaaccttcaagctacggaagagcgatgaactcatgatattgattagcatctaaaaatgtttattcttccacacaacat

SEQ ID NO: 17486 - DNA, 250 bp, Glycine max
  Clone ID: 700876612H1
gagaggtacttgctcacagatatatttgtctttttgtctccatcattttctcgagagctttcagtttctgtggttcatctttcttcttcttaatctttccccccctctctgtaacatcccgcttctctgaatccctttctgctaatcatctgtctttcaagctaagattttctggttggtcttttaattcaccaaaaagcaaacttagaaggatttttcgaaagccaggtgttttcagaaacgagatcca

SEQ ID NO: 17487 - DNA, 253 bp, Glycine max
  Clone ID: 700876613H1
gtttcgaactcattttggtggtggcaagtccactgggtttggtttgatctatgattcagttgagaatgccaagaagtacgagcccaagtacaggcttatcaggaatggacttgatactaaagtagagaaatcaaggaagcaaatgaaggagagaaagaatagagctaagaagattcgtggagttaagaagacaaaggcttccgatgctgccaaggctggaaaaaagaaatgagttttcaaacatcctgtcttg

SEQ ID NO: 17488 - DNA, 256 bp, Glycine max
  Clone ID: 700876615H1
gaacttttgaagtagcaaaaaaggtctgggcagaggttttcttctaccttgctgagaacaatgtcctttttgagggtattcttcttaagcctagcatggttacacctggagctgagtccaaggacaaggccagtcctcagacagttgctgattacaccctcaagctccttcacaggagaattccccctgctgtccctggaattatgtttttgtctggtggacagtctgaggttgaagctaccctcaacttgaatgc

SEQ ID NO: 17489 - DNA, 255 bp, Glycine max
  Clone ID: 700876618H1
gtctagtctatctagaattcaataatttactattttaggcaaataaaaacaaattaaacttgagaagaaaaaaaggcctgcaaagggacattgtaccttaaattaaaagattgaagtttcatgtagtttctttttcatcatccattgaactgaaccttaaattaattatagaaccatgtttgcaactaccaattcctccactttgtcacctttattctctttcagtagaacaacagcaacctctctgccttccaa

SEQ ID NO: 17490 - DNA, 240 bp, Glycine max
  Clone ID: 700876619H1
gatgaatatatgatcgataaatatacaggtttcggccacgtattcttattgatgtgagcaagatagacatcacaactactgtcctgggcttcaaaatatccatgccaatcatgcttgccccaacagccatgcagaaaatggctcatcctgagggagaatatgcaacagcaagagctgcatctgctgctggaacaatcatggtacttctcttttatgttcaaatcccccttaattagggac

SEQ ID NO: 17491 - DNA, 253 bp, Glycine max
  Clone ID: 700876620H1
atagcctttctttcgtagctactactacttgagtttcattaattcttgggttcaaagaagcttagttgttggtagcgattgaaaattaggaaaatggtgagtgttgaagagattcgtaaggcacaacgtgcagaaggccctgccaccgtgatggctattggcacggccactcctcccaactgcgtggatcagagtacctatcctgactattatttccgcatcaccaacagtgcccacatgaacgagctcaaag

SEQ ID NO: 17492 - DNA, 253 bp, Glycine max
  Clone ID: 700876621H1
aggattggcaattgaagatccctctgcaccccatggccttcgccttgtgatagaggactacccttatgctgttgatggacttgaaatatgggatgctattaagacatgggttcatgaatatgtctccttgtattacccaacagatgcagcagttcaacaagatactgaactacaagcatggtggaaggaagctgtggagaagggtcatggtgacttaaaagaaaagccttggtggcctaaaatgcagacaact

SEQ ID NO: 17493 - DNA, 254 bp, Glycine max
  Clone ID: 700876622H1
attgacagctttggagcttctatttgcattaagtgcgttaaataagcttggtgaattaactaaggtgggtagacggatggcagagttcccacttgatccaatgttgtcaaaaatgatagtggcttcagaaaattacaagtgttcagatgatatcatttctattgctgctatgctttcggttggaaactcaatattttaccgtccaaaagataaacaagtacatgcagacaatgcaaggctgaattttcacactg

SEQ ID NO: 17494 - DNA, 253 bp, Glycine max
  Clone ID: 700876623H1
gttgccatcacaagcctttgcgtacatcaaatacaatggaggacttgagacagaggaagcatacccctacactggaaaagatggtgtatgcaaattctcagctgaaaatgttgccgttcaagtcattgactcggtcaatatcaccttgggtgctgagaatgaattaaaacatgcagttgcatttgttcggccggttagtgtggcctttcaggtggtgaatgggttccatttctacgagaatggagtttacact

SEQ ID NO: 17495 - DNA, 250 bp, Glycine max
  Clone ID: 700876624H1
aggagatccagttgatgagatgctcttcatcatacggggtcgccttgagagtgttactacagatggtgggaggagtggattcttcaatcgtggttttttaaaagaggccgacttctgtggggaggagcttttgacctgggcactggatcccaaatctggctctaatctcccatcttctactcgaacagttaaagctttaacagaagttgaagcttttgccttaactgctgaagagttaaagtttgttgcc

SEQ ID NO: 17496 - DNA, 250 bp, Glycine max
  Clone ID: 700876625H1
ctgcgactggcaaatggtcgcaaatgctcgttttagaagatttccccgaatggcatactcgcaagaacaaggtcttttggcgtggatctactacaggtggaggcaacaatcctgctggacgtcaacttgattatcagcggcatcgctttgttcgtatgacttcggataattcgagtgaacccgttggcatcatattgccgccaaaaaacggcactagcgacctaacctacgtggaattgcctagtgcacg

SEQ ID NO: 17497 - DNA, 240 bp, Glycine max
  Clone ID: 700876588H1
aagagaacccccgtgttcccatcattgtcaccggtaacgatttctcaacactctatgcacctctcatccgtgatgggcgtatggagaagttctactgggcaccaacaagggaagaccgcattggtgtttgcaccggaattttccgcactgatggtattcctgaacaggacattgtcaagcttgttgacaccttccctggccaatccattgatttctttggtgcactgagggccagagtat

SEQ ID NO: 17498 - DNA, 240 bp, Glycine max
  Clone ID: 700876546H1
agaagatgtcccaaattatgtttgagactttcaatgtgcctgccatgtatgttgcacttcaggctgtcttgtctctgtatgccagtggacgtactacaggtattgagcttgattctggtgatggtgtgagccacacggtgcccatatatggagggtatgctcttcctcatgcaattcttcggttggaccttgctggccgtgatttaacagagtacttggtgaaaatccttaccgagagag

SEQ ID NO: 17499 - DNA, 244 bp, Glycine max
  Clone ID: 700876547H1
gcaaatatcaattccgaagaggacggtgaagaaatccatttgcaaaaaactgtcctaagcaagttcttagaaagatagcttgttcaatactacaccgtgtatctattattgagttacttctctgttaattatggtctataaatttttgcacttgtatggtttcactgccattcgttccgagccgatcttaaaaaaacaaaaatgcgtttattgttccgccaaaattgatatgaatagttcgagt

SEQ ID NO: 17500 - DNA, 242 bp, Glycine max
  Clone ID: 700876548H1
gttcaattgctggtgatgaatttgaggttattgaatcccttgatactgcacgtgaaagggcagaaactcgtgctgagtcattgcgtaatgagcgtatttcagcaaaggcaggggatggaaaggtcaccctttcttctttagcttcagcagtttcgtcaggaaagctgtctggactagatttgcatcaactaaatattattttgaaggttgatcttcagggatctattgaagctgtcagaaaa

SEQ ID NO: 17501 - DNA, 236 bp, Glycine max
  unsure at all n locations
  Clone ID: 700876549H1
ggctcgagtactttttcgatttgttacaccgcattacctgctaccacacttctatgcctatacannnngctggtgctgctttgggagaataaggtttccgagcaataaatactggattcatttgatgacttttaaagtcttcaattgtgtgagtttcttttccagtatctaaaatttaatgtgcataaaaatcttgttaggttgtgaatggtagcttcttcctccccaaatcaccg

SEQ ID NO: 17502 - DNA, 246 bp, Glycine max
  Clone ID: 700876551H1
aacagagaggagaagagagtgccttgtaataatcatagcataaattcataaagaagagagagcataatagtgagagtgggagatggatcagctgttgtggagggtgttgcctttgctaacaatccttgtctcctttggagtgttcttctacttgcaggattcttacacagcacagttttatgctctcataaagttaccacgggataagtgcagccttcttccccatcgccacttctggatatccag

SEQ ID NO: 17503 - DNA, 241 bp, Glycine max
  Clone ID: 700876553H1
ctcgagccgattcggctcgagacagccttgaactttaactatcatgtcttcttggctttctctgttcaggatcaacatggatattgtatcacgagctttgctatttccgttggctatacttgtgctcatattaagcacaccgtgctcaggcgcttttgggaagagtggaactaatgtgaaaacagctatttttctgtcccccaagtttgaacttggaccaggatcggtagccaataaatat

SEQ ID NO: 17504 - DNA, 244 bp, Glycine max
  Clone ID: 700876555H1
attaggatgaattactaccctccatgtccccaaccagaacgagtcattggaatcaatccgcattctgattcgggtgcccttaccatccttctccaagtcaatgaagtggaagggcttcaaataagaaaagatggaaagtggattcctgttaaaccactctctaatgcttttgtcatcaacgttggagacatgttggagatactgaccaatgggatttaccgaagcattgaacatcgcgggatag

SEQ ID NO: 17505 - DNA, 83 bp, Glycine max
  Clone ID: 700876556H1
acaattctcagatttgtaacctgctctcaaaagagagaagaaaagagccaaaacccaaagggggcgggttttccggctaaaat

SEQ ID NO: 17506 - DNA, 243 bp, Glycine max
  Clone ID: 700876557H1
atccccgccaaggagatcaccaaagtccacgccgcggacgccacgcaaatcggcgctcccggcggagaagctcctctactctctcgagtacgccggccgagacctcaagctcgtgcgcatggccgtgcctctcagagacaccgagaaggaggacctgctcgattacttggaagcctgcatcgatttcattgatcgcggtcggaaggaaggttccgttctcgttcactgttttgccggactttc

SEQ ID NO: 17507 - DNA, 241 bp, Glycine max
  Clone ID: 700876558H1
aaatcattttatctactaatagcggacaaattggagtattaccaaatcatgcgcctattgccacagccgtagatataggtattttgagaatacgtcttcttaaagaccaatggttaacgatggctctgatgggcggttttgctagtataaacaataatgagatcactgttttagtaaatgatgcggaaaagggtagtgacattgatccacaagaagcacagcaaactcttgaaatagcaga

SEQ ID NO: 17508 - DNA, 240 bp, Glycine max
  Clone ID: 700876559H1
cttttctctactcttcccccattttttcttctttaatccctcgcctatatcttcagaaaattagatctgcttcagatctagggtttcccttttccaaatcacgagtccgttgagtttgattttgtggatgaaagcatagggatagggcttttgcaaacctctccaatgtttctcgaaattatatgaccatgcgtcgaattcgtatgctgcactccttctccgtcgtgttcctctactggt

SEQ ID NO: 17509 - DNA, 241 bp, Glycine max
  Clone ID: 700876561H1
gaagaagctaaagcagcataaagaggtaaagataaaggcttgtttggatggagttattcccagcacaaccagacttgtccttacaaatcagccctccaaacgcgaaacccacatcaagttggaggagaagcacagaagaagacatggatttggggttttggaagagagccttggactcaagaaactccattcaatcaatggccaaacaagactcttgcttcgacctctccctctccaatcc

SEQ ID NO: 17510 - DNA, 86 bp, Glycine max
  Clone ID: 700876564H1
tgtagatagtgtcacatggaaaaaagtgacggtcacaacaatctatatcagattattatcacggttatgatccatattcaatttga

SEQ ID NO: 17511 - DNA, 244 bp, Glycine max
  Clone ID: 700876566H1
ctttttcttattggcatgagcctgtctctctatcctgtgtaatctgacgctgtgggtccaattgtccaaatattactgatctaataattgttttttccagagtgacattagttttcaacatgaagcttttttttaaaagtgagaagctttcgcttgttttggtgttccagttccacttagagccatgacagacatctccaagtcccttctctttacctttaccatcatcatcagctttggcttg

SEQ ID NO: 17512 - DNA, 245 bp, Glycine max
  Clone ID: 700876568H1
aaaagctaaaagatcatggaacaagtaaataccattttcaaattgtctcatcaattctattatcaaaaattataaaaaataaattataaagaaacgaaacacgggcaagaaaggggagtagagaccactcaataaatgaaatagctactaaaggctttgttctctttttagttatttgataattatccaatttgagttatggagttataaatatgaggagttttttttcaaaaagaaaatacgaa

SEQ ID NO: 17513 - DNA, 243 bp, Glycine max
  Clone ID: 700876569H1
aaaattatatcttttgcgcgcattctcattcaccaatggcgttcaccgtcgccattggcagtggcgtggctataatcccctgcggcaataccaccaccgcaattccttacacccgtggtggtggtcaccgaacgagaagaaagctccatactccatgtggcgcgcgcgaagaagcccctgaacggcgacgacgtttccatttacactgagctcctcaaaaccgaagtttccgttttcgaaaat

SEQ ID NO: 17514 - DNA, 242 bp, Glycine max
  Clone ID: 700876572H1
caaagctgggttttctagaagcatatgaacctggttggacagaagcccatcaaaactcagacaggaatcagtccccctgatttccaacgtatgggcgacaatggatcaagttgtgaagatagccctatatagttctcagggggctctgaatctatctgtagctaggctttagagttttatacctgctgtctgtatatgcaacttttgaagctcttaggattatgagacgctaatccaatgaa

SEQ ID NO: 17515 - DNA, 242 bp, Glycine max
  unsure at all n locations
  Clone ID: 700876574H1
gaaacagtttgagcgtcacgtggagacagagagctttattggntgtcctcttattactagtccaccaaatctgtgcaaccaancagcaagagcattcttgccccccttcttcctgtggcaaaatcaccaacataacttatccatctcgattaaaaggcgacccagaagtttgcggggtcaacaggtattggctagcttgtgaaaacaatgttacggtgttatatttgtactctggaaaatat

SEQ ID NO: 17516 - DNA, 241 bp, Glycine max
  Clone ID: 700876575H1
cgcaaacatgtccaccgcaacaactcacttgctcgcttatcccttccctacctccggtcacgtgatccctctcttagacttcaccaaaaccctagtctctcgcggcgtccatgtcaccgttctggtcacaccctacaacgaagccttacttccaaaaaactattcccctcttctccaaacgcttctcctccccgaacctcagttcccgaacccgaagcaaaacaggctcgtatccatggta

SEQ ID NO: 17517 - DNA, 237 bp, Glycine max
  Clone ID: 700876577H1
ggggacaggaacagcaaaccagtgtccaacaattgatggtggattggagtcatttgccttcaagcaagggaaatacaatgccaagaagttctgccttgagccaacttcattcacagtgaaggcagagggtgtggccaagaacgctccccctgagttccaaaacacaaagctcatgacacgtttgacctacactcttgatgagattgagggaccctttgaggtgtcttctgatggcac

SEQ ID NO: 17518 - DNA, 237 bp, Glycine max
  Clone ID: 700876578H1
ggagtttaggaagtgtttggttacttctgagattctgctgttccttagagagcgagcgatgacggtagcagcaggaatgggttacgctctgctagcgttaggaccctctctctccatcttcgtttctgtcatttccaaaaaacccttcctctttctcaccgttctctccagcacactgctgtggcttataagtttgattgtgctgtctggaatatggaggggggttttgcctctcca

SEQ ID NO: 17519 - DNA, 238 bp, Glycine max
  Clone ID: 700876580H1
caattacaaggccatcgaactcgacactgaatccgatggaaaagagctccaagcagcattagttgagtggacggaccagcgaaccgtgcctaatgtgtttattggtggaaaccacattggtggctgtgactcaacaactgccctgcacactcaggggaagctggttcctctgctgatatctgctggagctgttgccaaatcaactgcttaaaggatctcccatttctaggttatgcag

SEQ ID NO: 17520 - DNA, 243 bp, Glycine max
  Clone ID: 700876581H1
accacatccatctttgccttctgcatgttggttctctgtaaacagatactgcaaaagaagaataattccgaatatttggttgggttgaatccctgggttgaagcgttgcagacatcacggctattctaagagtgtctcgctctctcattcatgtcccaactgtacgacggaggacaggttgcgtaactgccaccaacccttcgccgcacggtgggcgtggtgctttgccttctgaaggtggta

SEQ ID NO: 17521 - DNA, 244 bp, Glycine max
  Clone ID: 700876583H1
ccctcgagccgaatcggctcgagcttagccttccctacaactccaaacgcaaagacatcatcatccatggctgcctccgtctccactgtcggagctgtcaacagagctcttttgaacctgaatggttctggagctggagcttcagctcccagttcagccttctttgggaccagcttgaagaaggttattgcctcaagggtccccaacagcaaggtttccggtggaagcttcaagattgttgctg

SEQ ID NO: 17522 - DNA, 239 bp, Glycine max
  Clone ID: 700876584H1
ggacatcagtgatctgaatgatttctggtgttggaacagacgatagttcacttgtagcacaacctggtacttcctaagaggtgataagaaaatgcaattgtaccatcatccatttgatttggactcccagaaggtgagacttgcgttggaagagaaaggcattgattatacatctcaccatgccaatcccataactggcaagaacttggattcttcattcttcaacatgaatcccggtg

SEQ ID NO: 17523 - DNA, 241 bp, Glycine max
  Clone ID: 700876545H1
gttatattgacctcagtttcaacaagttgcaaggagatctcccaattccacccaatggaattcactactttttagtctcaaataatgagctgaccgggaacattccttcagcaatgtgcaatgcaagctccctcaaaatactcaacttggctcataacaacttgacaggccccattccttcagcaatgtgcaatgcaagctccctctatatactcaacttggctcaaaacaacttgacagg

SEQ ID NO: 17524 - DNA, 239 bp, Glycine max
  Clone ID: 700876585H1
ttgcagggtaacacatggctctgttattcaaggatccgtcgaagatttcggcgtatcgagatagaaggttccccgggacgcaagaggagtttgagcacgcgcttctgacctcaaccaccgtttacgtggggaacatgtcgttttacacgacggaggagcaagtttacgagctcttctcgcgtgctggggaaatcaaaaagatcatcatgggcttggacaagaacacaaaaacgcctgcg

SEQ ID NO: 17525 - DNA, 240 bp, Glycine max
  Clone ID: 700876586H1
tcttgttttggatggagtcattcagctcacagaataggatgagtgtgcctaccaagagatgatcactcatcttcctctttgctctatttcaaaccccaaaaaggttttggttattggtggaggagatggtggagtcctgcgggaagtagctcgtcatgcctcagtagagaagatagacatttgtgaaatagataagatggttgtcgatgtctctaaacaatttttccctgatatagcagt

SEQ ID NO: 17526 - DNA, 248 bp, Glycine max
  Clone ID: 700876512H1
gcccagagcatcctcgccatctgggccacccaagttatcctaatgggtgctgttgagggttatcgtattgatggtgggcccctcggtgaggtcactgacccaatctaccctggtggcagctttgacccattgggccttgctgatgacccagaggcttttgctgagcttaaggtgaaggaactcaagaacgggagattggccatgttctctatgtttgggctctttgttcaggccattgtcaccggtaa

SEQ ID NO: 17527 - DNA, 250 bp, Glycine max
  Clone ID: 700876514H1
ctccgttaaacaaaaccattaaaatgtagcgagagaaaaacaaaaccgcaaaagaaaatcagttaatttattaattttatttttttatggctttccacgaccatctccagaccgaaatagcgttccagcgtttcacggaggagcaagagttgaccgagaacagagacatgcagcagaggctcccacctccgacatggctcaaaacggttaacgcgcgtcaacagaatttcctcgacaccgagaagagcgt

SEQ ID NO: 17528 - DNA, 249 bp, Glycine max
  Clone ID: 700876515H1
ttcaaatgctgtgcccatgaatatgaaaagttttgctgcagtagcaaaacttttcaaatgctgtgcccatgaatatgaaactcaccaagaaatggcagctgctgctttggcatataaatgcatggaggtggcacacatgagagtggtttactgtaaaaattctagtacgaacagagatcgacatgagttgcaatcaactcttcaactggtttttcaaggcgagtctccttcatcttctgcatccgatgt

SEQ ID NO: 17529 - DNA, 217 bp, Glycine max
  Clone ID: 700876516H1
taatgactatgatatacatagtggttaatgaaaggaacaagagaatattgaattgtatgccacatcattagcaaccaaagtataatttaatattctcttgttcctttcattaatgactatgatatacatagtggttgtgttggtcaatgtgccattgtacatgtctttcatcatagaacattttgttgatcaatgcacaagtctttgatcatttggt

SEQ ID NO: 17530 - DNA, 255 bp, Glycine max
  Clone ID: 700876518H1
taacaagtgaagcacctcttgtgattgaagacagcagaccacctagcaactggccagaaactggaacaatatgtttcaaaaatttgcagatacgttatgctgaacatctgccatctcgtgttgaaaaacatcacttgcacatttcctggaaggaagaaagttggtgttgtagggcgtaccgggagtggaaaatcaactctcatacaggccattttcaggattgttgaaccaagagaaggaagcattataattgac

SEQ ID NO: 17531 - DNA, 251 bp, Glycine max
  Clone ID: 700876519H1
aaaaaatgaaaggtatgaatggctatggaaggtttaagacgacattgttaattaagttcataatcaggtgtctaactggtttataaatgcccgagttcggctatggaagccaatggtagaagaaatgtacttggaagaggtaaaacaagaaccaaacaatagctctcaggataacaccacaaaaagatcaaaagaatcaagcaaggagttatggtcagaagctaatgctactgcacaggaatctggtgcaa

SEQ ID NO: 17532 - DNA, 89 bp, Glycine max
  Clone ID: 700876520H1
aaattctcctacaccgacaaaaaaatggaactttcaccacaagaattcattgtccgttccccactccccgagatagcaatcgccacaca

SEQ ID NO: 17533 - DNA, 250 bp, Glycine max
  Clone ID: 700876521H1
ctaacaaccacttatcccctttctccttctaacgagtgaggaaaaatggcgcgtaagaagatcagagagtatgactcaaagaggttgttgaaggagcactttaagagactctctggcaaggagttgccgatcaagtctgcacaaattaccgcatcaactgatttcactgagctacaagagaaggaaccctggctttcatcttctaaattggttgttaaacctgacatgttatttggaaagcgtggcaaaa

SEQ ID NO: 17534 - DNA, 250 bp, Glycine max
  Clone ID: 700876522H1
tggcaaaggtcgatagattatttaagtgatttattatctattactattgcatattggaccggtttgtttaaacttagagtaagcaattttaaaataagcggatttaaaaaaaatgcttatttaataagcagattggatttgtttatcagaataatcagaaaactgttgttttaagcagaagtagtttagacatttacactaaaagttcagaaatctgtttattttatttaaataagtgttttttgtaacg

SEQ ID NO: 17535 - DNA, 255 bp, Glycine max
  Clone ID: 700876523H1
ctcaagcaaccatggcaatggcaacccaagcctctctcttaaccccacccctctccggtctcaaagccagcgaccgcgcctccgtgccatggaagcaaaactccagcctctccttctccagcccgaagcccctcaagttctccagaacaatcagagcagcagccgccgacgagaccacagaggcaccagcaaaagtagaggctgcaccggtcgggttcaccccaccagaacttgacccaaacaccccttccccga

SEQ ID NO: 17536 - DNA, 249 bp, Glycine max
  Clone ID: 700876524H1
acaccccccacgaagcaccaattatggctctgaatctttgtatctcacctaagtttaaatgggttccttccttagatagtgcttcctattctttgagaccttcacttgggtcttgttttggtaacataaacattgctagtgtgagtctaagtactactagaagtttgagtttgaggaggagtgggagtgttagtgtaagatctagtttagaaactgcggggcccacagtcacagtgggacaggtcactg

SEQ ID NO: 17537 - DNA, 249 bp, Glycine max
  Clone ID: 700876525H1
aatgacatggattgctaaaccaatttcctcgttaaagatcagggtcactgtggttcttgttgggcatttggtgctgttgaatcattgtcagatcgcttttgcattcattttgatgtaaatatctctctctctgttaatgaccttcttgcatgctgtggctttctgtgtggatctggttgtgatgggggatatcccttgtatgcgtggcaatacttagcccaccacggtgttgtcactgaagagtgcgac

SEQ ID NO: 17538 - DNA, 243 bp, Glycine max
  Clone ID: 700876527H1
ggagaacctattaccactaacaacaggaacgctgctgccaaagtcttcagccatcctgatgttgtcgctgaagtgatatggtacggaattgaacaagaatacaccttgttgcagaaagatatccaatggcctcttgggaggcctgatggtggttacactggacctcagggtccatactactgtggtgatcacgctgacaaggcattaggccgtgacattattgacgcacactacagagcctgt

SEQ ID NO: 17539 - DNA, 244 bp, Glycine max
  Clone ID: 700876528H1
atcatttctccatttccattttctctctcacttttcaagaatcgtaagctatgggaaagtcttacccaactgtgagtgctgattaccagaaggccgttgagaaggcgaagaagaagctcagaggcttcatcgctgagaagagatgcgctcctctaatgctccgtttggcatggcactctgctggaacctttgacaagggcacgaagaccggtggacccttcggaaccatcaagcaccctgccga

SEQ ID NO: 17540 - DNA, 248 bp, Glycine max
  Clone ID: 700876530H1
cgacacgacttgaatcacaaactaattttatctgaactatctctttcatagaacggagaaagacacgatgcaggaagcgacgaaggtgataataatcggtgccggaacttctggtatcgccaccgccggttgcttaacgaagcaatcaataccttacataatgctcgagagagaagactgtttcgcttcgctgtggcagaaatacacctacgatcgtctccaccttcatttgaggaagcaagtttgcg

SEQ ID NO: 17541 - DNA, 247 bp, Glycine max
  Clone ID: 700876531H1
gttgcattgtttctgataagagagaggtcaaggagtaattctctttggaagcattacttcagcgttctgcctaaggaaactgactctactatatattggtcagaggaggagctctcagagctacaagggactcaacttctgaacacaactaggagtgtgaaacaatatgtggagaatgaatataggagattggaggaagaaattatactccctaacaagaagcctttcccttctcctcttacacttg

SEQ ID NO: 17542 - DNA, 246 bp, Glycine max
  Clone ID: 700876532H1
aatttgggtgaactgttgtgcaccatcactgggttcgactccttctctttgcaaccaaatgctggtgctgctggagaatatgctggacttatggttattcgtgcatatcatttggcaaggggagaccaccaccgcaatgtttgcattatacctgtctcagcacacggaccaaatcctgctagtgcagctatgtgtggaatgaaaattgtctctgttggaactgatgccaagggaaacattaatata

SEQ ID NO: 17543 - DNA, 252 bp, Glycine max
  Clone ID: 700876533H1
ttgcagggtaacacatggctctgttattcaaggatccgtcgaagatttcggcgtatcgagatagaaggttccccgggacgcaagaggagtttgagcacgcgcttctgacctcaaccaccgtttacgtggggaacatgtcgttttacacgacggagtacgaagtttacgagctcttctcgcgtgctggggaaatcaaaaagatcatcatgggcttggacaagaacacaaaaacgccttgcggcttctgtttcg

SEQ ID NO: 17544 - DNA, 250 bp, Glycine max
  Clone ID: 700876534H1
tggatttgtaactgagtactatactagcaatgcatatagtccggtgcaagatcttgcagactcctgcaggactggtgctgcaactaatgttatatttggccttgccttgggatacaagtctgttattattccaatttttgctattgccattagtatttttgttagtttcacctttgctgccatgtatggtattgctgttgctgcgcttggcatgctgagtaccattgccaccggattggccattgatgca

SEQ ID NO: 17545 - DNA, 248 bp, Glycine max
  Clone ID: 700876536H1
gtcaggatgcggacttttttggttgcagcgtgtgttattgcactggcgcaaccgccgtctcgcatactaaggacctgctgaagagatctccgttcttcgatgtgttcgccaacttgcaagacgataaaactggaattttccagggcgaaaagtatgattccggctacatcaagatcaaggaagcttttggccaagcaggtgaaatgttctactggcatttccctgcccgaacatctgcagaacaagct

SEQ ID NO: 17546 - DNA, 248 bp, Glycine max
  Clone ID: 700876537H1
cttcctggggttcttgggtcaactatttcatggagtttatattgcgtcttctatgacagagccaaacagagatatgcaaggaacagggaggggaagttgagcccaggtctgcatcttgcctcagcagctgaagcaggagctatagtttccttcttcacaaatccagtatggctggtaaagacaagattgcagcttcaaactcctcttcatcagacacgaccatactctggggtttatgatgcatttag

SEQ ID NO: 17547 - DNA, 247 bp, Glycine max
  Clone ID: 700876538H1
cgccagcacggtctgacccaaacggacgtgattgcgctctctggggcccacaccgttgggttctcgcactgcgatcagttcgctaaccgtttatattccttttcatcctccaacccggtggaccccactctggaccccacctatgcccaggatctaatggcggggtgccctaggaaccccgacccagccgtagtgcttcccctggacccgcaatcccctgcggcgttcgacaacgcgtattaccaaa

SEQ ID NO: 17548 - DNA, 244 bp, Glycine max
  Clone ID: 700876539H1
gattgtttggtttggaagattagaaaattccctgggcagactgagtcaaccttaagtgcagaagttgaacttatttccacaataacagaaaagaaatcttggactagaccaccaattcagatggagtttcaggttcccatgttcacagcatctggtttacgtgttcgtttcctcaaggtgtgggagaagcgtgggtacaataccgttgagtgggttcgttacattacaaaagctggatcctacg

SEQ ID NO: 17549 - DNA, 230 bp, Glycine max
  Clone ID: 700876540H1
atagtgccctggtttactgcatatagaattattctcagcggggaaatttactttctcatgcactatctgctagtgaattttccttctcaaggcaaagttaatttggcatttccttgaaattaagctggaaaaaaaatctaaggatgaatttttcatgtaaggggtcattcttaaatttttacattcgttttcaagagattaaactgaccctaatagatgtcattctagct

SEQ ID NO: 17550 - DNA, 247 bp, Glycine max
  Clone ID: 700876541H1
ggttgatgagtatttggaccttgttgatgactgcgacaaccaccactttgcttctgttgctactactacggaccattactctcatcagcaccaacatttcgcgtgttgtttctcacaagagttatgctggggacagtgttgttccggttcagcaccaccagcattttcagcttggcttggagtttgacaactccaaagctgccttcagttacaatgcttctgttaatcaaagtgtttcagtttcatc

SEQ ID NO: 17551 - DNA, 254 bp, Glycine max
  Clone ID: 700876510H1
gcagtacaaacaaaagtagcagagaagaacttgaagttgctgcaagagaagaaagcaatagccaaaacagatatgccaggatgcctgatgttgaaacagagacgaatcccattgatagaactgtggctcatttactttttcataggcctatggagttgacccaaaactattctgacaagttggagtcgcctatttctaccaaggtgcaatgtgaaagcaaagcagctaacccagtgaactttcccatgagttac

SEQ ID NO: 17552 - DNA, 245 bp, Glycine max
  Clone ID: 700876468H1
ggtcagatcaaacaggaattccatctcaagatcacttgattaatatatatgttgagagaaattatcttatatggaggcttcctgatctgcaaaaactgcttagtgtgctgcaaaactagtgattgaaacacttgaaagtaataaaagtgaacttaaggattgggcttgtgtcagaaaagaagcattttcatctgacaaaaatgagtatggacatttgttggtatccgagttctctgattcacttt

SEQ ID NO: 17553 - DNA, 245 bp, Glycine max
  Clone ID: 700876469H1
tgctccatctggccttccacttgataggcattttagctacttccctgagtcacctgaagtttctctcatgagcccagttgcatttgggaatttaaatcacgttgatgggaattttatgatgaacataagtgctcgtgcatctgtaggagccagtgttggtctttctggaaatacccctgaaattagttcacccaatttcagaatgatgtctctgcctaggcatggttccttgttccatggaaata

SEQ ID NO: 17554 - DNA, 245 bp, Glycine max
  Clone ID: 700876470H1
gtcgaatggtatcaaaaaaatggagtactaactcccatttcttatttaatattgaattaaccgatcaacttgctttgttatcgaacatttctttttgatttctaaattttccggaaaaaatttgaatctatttttatatgcgaatcaatcctactacttctggtcctgaggtttctgcgcttgaaaaaaaaaatctgggacgtatcgcccaaataattggtccggtactagatgtagcttttccc

SEQ ID NO: 17555 - DNA, 246 bp, Glycine max
  Clone ID: 700876471H1
ggggatgagcacaaagatagtacaaagtgtttttgcagcttctgttctattcatggttaaggaggagcttgttaaggcttgtatggttgtggcagataagagcaaaaagttgtatcaaatataagtagttgactttcttcttttggataaagaaagtaaaacaagtagttgacttctttaccatatgaaagggataactccctcttgatctacctctccctgttggttattcacagattctggtga

SEQ ID NO: 17556 - DNA, 250 bp, Glycine max
  Clone ID: 700876472H1
ctcagacacgcacagatctgatctgatctgatctatctgaagccgaaaacgccgacggtgatgatgaagatggggtgttcacgttgctccttcttcctcttcctcatctcttagtggcgctcttcccctcgtcgctctccgagatccgcttctccgatatccgaaacgacgaccgccgcatcatccccttcgatcagtatggattcacccacaagggtcgacttgagctcagcgtttccaaaatctcact

SEQ ID NO: 17557 - DNA, 252 bp, Glycine max
  Clone ID: 700876473H1
ggcaggtttgggaatatggatgggtttcgttagcctgtgtcttctgtctgtatcagtatcaggtctgctccaacgcctagagcaccctgtcaaagctgatggctcacttagccttatggtcattggagactggggaaggaaaggaacatacaaccaatctcaagttgccactcagatgggaagggttgctgcaaagttaaatatcgactttgtgatatccactggagacaatttctacgatgatggattgac

SEQ ID NO: 17558 - DNA, 244 bp, Glycine max
  Clone ID: 700876475H1
gctgcgtgaatatttgcaatttgaattggagatacccaaccctccttttgagattgactttgaacgagtagtggacgattttgtatttctatgcttctttgttggcaatattttcttccgcatatgataagatataagatcagggaggggtctataaatttattgatgcatatatatagaaaggaatttactgccataggtggttatcttagtgatgcgggcgaggttttcttagatagagtgc

SEQ ID NO: 17559 - DNA, 250 bp, Glycine max
  Clone ID: 700876476H1
cagcgtacccgcttcaaggctatcgtcgtcatcggtgactccgagggccacattggtcttggtatcaagacctccaaggaagtcgctaccgccatccgcgccgccatcatcatcgccaagctctccgttgtccccatccgaagaggttactggggtaccaaccttggtgagcctcactcgctccccaccaaggagagcggaaagtgcggttccgtcactgtccgtctcattcccgctccccgtggtaccg

SEQ ID NO: 17560 - DNA, 168 bp, Glycine max
  Clone ID: 700876477H1
cagcgtacccgcttcaatgctatcgtcgtcatcggtgactccgagggccacattggtcttggtatcaagacgtccatggaagtcgctatcgccatccgcgctgtcatcatatcgccatgctctccgttgtccccatccgaagaggttgctggggtaccaaccttagtg

SEQ ID NO: 17561 - DNA, 254 bp, Glycine max
  Clone ID: 700876478H1
cttatcttagctaccccatcacaacaaccacgatactatttctcatactctattaggcaaaaacaccaccaaatgggagaggaaaaggagcagcctaagaatgacaccgagaaaagcccgaggaggtagcccccaagaaagacgacggacccatccctgtcgattacaaactcgacttgcattgcgagggatgcgtcaagaagatcaaacgcacctgtcgccacttcgaaggtgtggaaaccgttaaggcggat

SEQ ID NO: 17562 - DNA, 258 bp, Glycine max
  Clone ID: 700876480H1
agcatatattagcatatattagtatatattggatattcaaaaaaaaaaataataaataaaaaaattaagagccataattagaattctgtatgatatttacgtttacggcgtgtgaaaaaagatactatatagaactaaaggagattcccgtttcagttacattcaattcaacgattgaccaaaagagaattcaaaaaataacatttagatcacccaaattccaatatttctatgaaacaataattaaatctaacgaat

SEQ ID NO: 17563 - DNA, 244 bp, Glycine max
  Clone ID: 700876481H1
taagcaacttcaagtcttcaacgatggctacgaattcgattacctcatcctccttccgattagtaacaacgagaatccctctctccctcttccgaaaaaccccactctcctttcattccccacaaaacccttttacatcaaaacccatcaccttccagagacttcaaccaacaccaccaccacaatcatcatcatcatcaacatcagcatcccttcaacccatcgaagacctacctccgaagct

SEQ ID NO: 17564 - DNA, 243 bp, Glycine max
  Clone ID: 700876482H1
aaagtttttaatagagggtaagtctcaaaaaatcgaagaattacagacgaatatgcaaaaaaaactgaattgtgtgaatcgaaaactaaacattgctattgtaaagttgcaaatgcttataaacaccctaatattattgcagaatttatagctggacaattaaagaatagagtttcgtttcgtaaagcaatgaaaaaagctattgaattaactgaacaggcgggtacaaaaggagttcaagta

SEQ ID NO: 17565 - DNA, 242 bp, Glycine max
  Clone ID: 700876484H1
ccgcggcttcaaccttgtctttcatagatctgatgtatggaggctcagatctactgtacagagatactgtagataatcgatgagaagaacgcagatccagccgcttccgcttgttcgatcgctacagacgcttgtatcggattattcatgattgattcataagcagcatgtcttcctccggctatagttgttgcagatctcggatgttgtaaaattagtgtatgatgtgaagctatgggctg

SEQ ID NO: 17566 - DNA, 244 bp, Glycine max
  Clone ID: 700876485H1
gaaaagtgtattttacattataaggaacaggaaaagaatctggaagatcagatcacagagaatctatcattattgactgctgctgaaagcaaactttcagaggtaaaaagcaatatgatcaaatggtagagaataaacagttagaactatcaaggcatttgaaagaaatatctcagagaaatgatcaggctattaatgatattaagaggaagtatgagttggagaagatggaaattgtgaacaa

SEQ ID NO: 17567 - DNA, 243 bp, Glycine max
  Clone ID: 700876486H1
aacatggacgacgacgaggtcttcaccttcgccaagaacatcgctgcgccttatgacctcgtcatgcagaccaagcagcttggccgcctccccgttgtccacttcgccgccggcggagtcgccacccccgccgacgccgcgctcatgatgcagctcggctgcgacggcgtcttcgtcggctccggcgttttcaagagcggcgatcccgcgaagccgccagggcgattgttcaggccgtgactc

SEQ ID NO: 17568 - DNA, 250 bp, Glycine max
  Clone ID: 700876488H1
tagagaattaggcaataagctaaagatgtctgacgattgcaaaggtaagagctcatggcctgagcttgttggagtgcaagggacagtggcagaggctacaattgagaggagaatcctttggtgaatgctatcattgtgcctgaaggaaacagggtcatcactgattaccgctgtgatagggtttgggtttggatcaacaaagatggaattgtcaaggaagttccacacattggatagacacttttccctc

SEQ ID NO: 17569 - DNA, 217 bp, Glycine max
  Clone ID: 700876489H1
gcacgcgggaagagctcgcgcagctgccgcaggatttgaaaaaggaattgatcgagattttgaaccagttctttccatgactcctcttaattgagacatgagatcctatgaagtagaagtcacttttattttactataaatattactataaatattgggttgaattgagcgggtcgtatttaaataagaatttcttttccttttttcttagtttcta

SEQ ID NO: 17570 - DNA, 248 bp, Glycine max
  Clone ID: 700876491H1
gtcgctgcgatggatcgcaagaggggaaggcatgaagctgccttcaatttcaatggcggcgccaagaaatcgaggcctgaaatggactcctttccaactggtttaggagcaaatcgaagccatgcacaaagtttttcagcacctctggctgtccatttggtgaaggatgccacttcctgcattatgttccaggtggattcaaagctgtctctcagctgatcaatgttggtagcaatcctgttattcct

SEQ ID NO: 17571 - DNA, 250 bp, Glycine max
  Clone ID: 700876494H1
ctgctcgagcggctcgagcacagaaatgggcagtgcttctctgattccagtttcctggttgccttggcggccactttctcctttcaagggaacggtgaaaaccttggtcgaaaaccatggctgaagaagattcagcaagcaagacccctcatttccgtggttaacaaggctgcctctctatcttcccccgtgacagcacccagcgtcggcgttcggtttcggctggacaatttggggccgcaaccgggtt

SEQ ID NO: 17572 - DNA, 258 bp, Glycine max
  Clone ID: 700876501H1
aatgatcaaaaccattcaagtgatcagtctgactcaagttcacttatcttccaacttggtcgggacatctcaattaattgtctcctacgatgctcaaggtctgactatggttcgattgcctcattgaaccaaagttttcgatctcttgtccgaactggagagctttataggctgaggcgacagatgggtatcatagagcattgggtttacttctcttgtaatctccctgaatgggaggcattcgatccaaacacccgt

SEQ ID NO: 17573 - DNA, 268 bp, Glycine max
  Clone ID: 700876502H1
tcagctcgatgctttctttcacatcccatccaacgaacgatccacgaaagatgttggctgttttcgacaaatcggtggcaaaaagcccagagggtctgcagagccctcactcagattccgtctcagccctaaaagacggttttatcgcagaacacttctcttccgttcaccctggttccgtcaccgtcaaccttggctcttccggtctcttggcctattcccttcacagacagaacccccttctcccaaggctgtttgcagttgtgga

SEQ ID NO: 17574 - DNA, 250 bp, Glycine max
  Clone ID: 700876503H1
ttagtagggttttattcattttgcgatggtttctgcagatgttgagtaccgttgctttgtcggtgggctcgcttgggccactgacgaccatgccctcgagagagccttctaaatatacggcgaaatcgttgaaacgaagattatcaacgatcgtgagactggcagatccaggggttttggatttgtgaccttcgcctaggagcagtccatgaaagatgcgatcggagcgatgaatggacagaacttggag

SEQ ID NO: 17575 - DNA, 253 bp, Glycine max
  Clone ID: 700876505H1
atacaccaaaacccaacatgaaaacccttaacaaagcctcacttattttattccctctcttgttcctttccctattcaagcattcccatgctgcaggaatcgctatctactggggccaaaacggtggagaaggcaccttagcagaagcttgcaacactagaaactaccaatatgtgaacatagccttcttgtccacttttggcaacggccaaactccacaactcaaccttgcaggtcattgtgaccccaacaa

SEQ ID NO: 17576 - DNA, 111 bp, Glycine max
  Clone ID: 700876507H1
ggactctctcatccttggcttcaacgcgggtgtcaccatcgacaagggcacattcaagacccaagaggacttcgagaaggagttcaagacagccaagagcctcaatggcgc

SEQ ID NO: 17577 - DNA, 239 bp, Glycine max
  unsure at all n locations
  Clone ID: 700876509H1
ggctcgagatacactggcatctggacccttagcttttgctacttagattcctggtctaccccagataaacaaactccactacacatgcgagagaggntgaagtctaaggatgtcgaggctggcaagggcccttcatcgatcccccactggcgtttggtatgggaccagggtctcatcactgatatggtcatgaactggaactacccaggctccggaactgaagaggacccgtatgtggt

SEQ ID NO: 17578 - DNA, 244 bp, Glycine max
  Clone ID: 700876467H1
ggttggtggttttggtttggtgaagttcgattcgatgcgatgcgattgcgttggggattttgattctctctctctcactgtgcggtctctaattcgcttggtgcggtcgggaaccggttttcgcgcggaatggaggaacggtcgccggcggcgatttggatcccgccttgcatcaactgaatcggtggccgcggtgaagctttgcctcgttttccgctcagatctcatctccgagattctacca

SEQ ID NO: 17579 - DNA, 153 bp, Glycine max
  Clone ID: 700876433H1
gcaaacagtttggaaccccccaaaaatgggtgcaacgacggccattgccgcactctctcttcactgcttctccaaatcccacacacacttttcaacagttcgcactctccctgcctcacatgctccttctcttcctccatcaaattcaacatc

SEQ ID NO: 17580 - DNA, 248 bp, Glycine max
  Clone ID: 700876434H1
ctgctgcactgaggatgcccgctcgatccccccggcgcagacaaatgacctgctgaaccagccgggcttcgtaggcgccgacgcgcgcttctggcagcgctcctatgccccgactatgtcggcctcgcgctgttgatcatcggatacatcttcatccaattcctcgccgagcccttccaacgcatgttctacccatccgacctgcgcattgcctacccgcacgccctcgtcgagcgcgtctccgtcgc

SEQ ID NO: 17581 - DNA, 246 bp, Glycine max
  Clone ID: 700876435H1
gtgatctcaaccatgaagcgtccactcacaccttcagccagcggcatgaagactaacaagaaagccaaggcgatggaaaatgacgaagacgtggaggggctggggcgttcgacgacaaccttctgttcgaggtgttgaagcacgtggacgcgcggacgctggcgatggcgggatgcgtgaacaaacagtggcacaaaactgcgcaagacgagaggctctgggaactgatctgcacaaagcagtggg

SEQ ID NO: 17582 - DNA, 243 bp, Glycine max
  unsure at all n locations
  Clone ID: 700876438H1
gcacaacgaaccactctgaagccgctcacgttatccacaacactctcaacatgaccttaaaccctaaccaatccaaccatggcttcttcttccacattaaatgcaatacaaactgnaagctctcctcctcagccgccatctcctcgttcccctcccgccgccgctccaacgccgtcgttctgtcgaggcgcagcgcgccgctagggtctccgccatggccaaggagttgcacttcaacaaaga

SEQ ID NO: 17583 - DNA, 249 bp, Glycine max
  Clone ID: 700876439H1
tttcaggaagaaagaagtgcaatggacatcggaacctatggctatcctacaccagcagtgaaaaagattgagtcttactatgatgtgccagagggagtggatattcggggatatatgatgcagagtttgcaaaaatcctcacaaaagatgctttgaaattcgttgctgacttgcaacgtgagttcaggaaccatatcaagtatgcattagagtgcagaagagaagcaaagaagaagtacaatgaagggg

SEQ ID NO: 17584 - DNA, 250 bp, Glycine max
  Clone ID: 700876440H1
gaagattccgcaacagagagtagacaagatggcgcggttgatcacagtggtgtggtgcgcggtggcggtgctactgtgcgccgcggcgggcgcgtcgtgggtggaggaggcgcgaacccgatacgaatggtggcgggggtggaggcggaggtggttcgggtgatagggcagtgcaggcgcgcgctgaagtttgctaggttcatgagcaggttcgggaagagttaccgaagcgaggaagagatgagggaga

SEQ ID NO: 17585 - DNA, 255 bp, Glycine max
  Clone ID: 700876442H1
tccatacgccggatctgctaaaatacgcttgatccatatgggcctcctcgaccacttgtgggacgacaccgtcgccggcccaaggccggaaaacggtctcggcaagctccggaacaccacaccttcactttccgacctagctccggcaaggaagcggagggcgggagcgtgagatcgtacggtgacgaatcgtcggaggaagcgactagagtgacgcgtagtatcatgatcgtgaaaccgccagggtaccagagt

SEQ ID NO: 17586 - DNA, 255 bp, Glycine max
  Clone ID: 700876445H1
tgttactcaacgccaattgcgatctcaaggtgtgcgatttcggtctcgcacggtcagccgcctcgacagaagataatcagggcttcatgaccgaatacgtcgcaacgcgatggtacgcgcgcccgagatcatgcttacgttcaaggagtacacaaaagccatcgacgtctggtctgtcgggtgcattctcgccgagatgttgagcggcaagccattgtttcccggcaaggactaccaccaccagctcacgctcat

SEQ ID NO: 17587 - DNA, 252 bp, Glycine max
  Clone ID: 700876446H1
ctatcttgagatcaatgttaacactaattggttctgttatatgggttgggcactcctcaatagagattcaactggaagttactcagtccaatgaagagggcaatgattcagactcatagcactgacagccaacttcatattcgttgctcgagactcaaaaactgggaaagctgctccagtgaatcgactttcgccagaaactgctcatgaaaaacttctttttgtacaagctgaagcaagaagtaatttgag

SEQ ID NO: 17588 - DNA, 267 bp, Glycine max
  Clone ID: 700876447H1
atccagctcgagatgctgaaggagacggaacataaataatttttaataacagaaatatgaatttatatgctattatgctctcacacatatattaagaattttgtatgatcttatgatccttgctaggttccatgatttatgatctttagcccttcctgatcctaagcaggatcttgatttaatgaccttgtctagttccatgtgcatttagctcttggtacttcgaattcaatatgcttcttttttagctgtgtctagtgtaattgt

SEQ ID NO: 17589 - DNA, 259 bp, Glycine max
  Clone ID: 700876448H1
agctaggtcacctagtaagggccaaggaagagaagttggaattcccagtggttgaaaatggtgataactggagtgtgggccaaaggcaattattttgccttggaagagccctgctgaaggaagcagcatattagtactagatgaagcaacagcctcagtggattctgcaactgatggggttatacagaacatcataagccaagagttcaaagataggactgttgtcacaatagctcatagaatccacacagttattgat

SEQ ID NO: 17590 - DNA, 250 bp, Glycine max
  Clone ID: 700876449H1
gtttccgttaacgctctccaatacaaaataaccactcacagaatattcggtcgaagatgtccgccgccgaagaagctaaagttcccgccgtcgaaaagccggtggaggggtgaaggcgccgaagcttgccaaggagaagcaacctaaggctccgaaggaaaagaagccgaaacaggccaaaactgcttctcatcctccatatctccagatgattaaggacgctttgattgctctgaacgagaaaggagga

SEQ ID NO: 17591 - DNA, 245 bp, Glycine max
  Clone ID: 700876450H1
ggtttaaaattggaagtgatgggaacgtacaaggagtgggattgttcataaatgttgaaccaagaacaggacatttggttgtcttgtcatgtgtagatggcagtccactgctcgtgctggtatacatcaaggggatgaattgattgagataaatggtgagaggcttgatggcattgatagtgaaactgcagcacaaaggcttagagggaatgctggaacaactgttacagtaaaggtcaaagact

SEQ ID NO: 17592 - DNA, 247 bp, Glycine max
  Clone ID: 700876451H1
ctcgagccgtgctaaaagcagtggctgcgtgtgcagtgttatgctcaaactcttccactagcgctataaggcagatgagtagtttctcgcctgcgtttcccaagttctatccgtagaaggcgcagacatacattccagaactaaacctgacggcttcagattcagtcttgtttcgtataacatcgagacacaggcttatgtgaagagctcactgttcccacactctccttccccacgtctcaaatgg

SEQ ID NO: 17593 - DNA, 240 bp, Glycine max
  Clone ID: 700876452H1
cctaggcttcaaccttgtctttcatagatctgatgtctggaggctcagaactactgtacagagatactgtagataatcgatgagaagaacgcagatccagccgcttccgcttgttcgatcgctacagacgcttgtatcggattattcatgattgattcataagcagcatgtcttcctccggctatagttgttgcagatctcggatgttgtaaaattagtgtatgatgtgaagctatgggc

SEQ ID NO: 17594 - DNA, 249 bp, Glycine max
  Clone ID: 700876454H1
ggtcagatcaaacaggaattccatctcaagatcacttgattaatatatatgttgagagatattatcttatatggaggcttcctgatctgcaaaaactgcttagtggtctgcaaaactagtgattgaaacacttgaaagtaataaaagtgaacttaaggattgggcttgtgtcagaaaagaagcattttcatctgagaaaaatgagtatggacatttgttggtatccgagttctctgattcactttcatc

SEQ ID NO: 17595 - DNA, 251 bp, Glycine max
  Clone ID: 700876455H1
ccaatatattccattctctctgtgtatttccctacctctcccttcaagatgcagatcttcgtcaagaccctcaccggcaagaccatcacccttgaggtggaaagctctgcaccatcgacaacgtcaaggccaagatccaggacaaggaaggaatccccccggaccagcaacgtctcattttcgccggaaagcaacttgaggacggccgtacccttgctgactacaacattcagaaggagagtactcttcac

SEQ ID NO: 17596 - DNA, 130 bp, Glycine max
  Clone ID: 700876456H1
cagctgtgaaaaagtttcagggaacttcactattctgctatttcattatgatggccgaactactgaatgggatgagtttgaatggtccaagcaggctattcatgtgagtgtcacaaacagaccaaatggt

SEQ ID NO: 17597 - DNA, 177 bp, Glycine max
  Clone ID: 700876457H1
atccatgatcccctttccttccttcttcctctaattttcttgtatgctaagacttcctcgtcattgattattattcgcatccaacgccgtcagcataatttgtgtattccccttgaatgttgaaagaaacaataacccacagaacctgcgatttcaccacaattaggttttcccttc

SEQ ID NO: 17598 - DNA, 251 bp, Glycine max
  Clone ID: 700876458H1
gctcctttttccaccatcattatgaattacagtccattttctatacattcagaggcacatccagatgttataccaagtgatgggttggctacaccggagggttatcgaaatatcttgcttacttgaagagcaaggtcttgtcatccaattagaatccacccattttatgtgttttttttatcagttctagaacataatttgagggaattcttttaatctgtgacttgcttgcttaaacaagaaggaaaaag

SEQ ID NO: 17599 - DNA, 250 bp, Glycine max
  Clone ID: 700876459H1
atctaagcttgcagctaatgccttcttggcccaaaggatttcatctgtcaatgccatgtcagcactttgttaggctaccggggcaaatgttcaacaggtgtcctattctgttgaacagactcaaggattggacccaagttcctcaacgccagtgttggttttggtggatcctgcttccagaaggatatcttgaaccttgtttacatctgcgatcgcaatggccttccagaggtggctgagtactggaaac

SEQ ID NO: 17600 - DNA, 254 bp, Glycine max
  Clone ID: 700876462H1
ctatcttgagatcaatgttaacactaattggttctgttatatgggttgggcactcctcaatagagattcaactggaagttactcagtccaatgaagagggcaatgattcagactcagtagcactgacagccaacttcatattcgttgctcgagactcaaaaactgggaaagctgctccagtgaatcgactttcgccagaaactgctcatgaaaaacttctttttgtacaagctgaagcaagaagtaatttgaga

SEQ ID NO: 17601 - DNA, 258 bp, Glycine max
  Clone ID: 700876463H1
cagcgacttgaacactaccagcaccttcttcgttgcatcgcttccgactttgctgttctcttctttgattctctgtagtcgtcttcttctctcttcttctctccatgtcttcctcgctcaatccgctctcgccgagctcggcatcaacgtcgaggccaacgatccggttctcacgggcctcgactcctcgctgccctcttcttcctcctccaccgccgcgcatcccatctctcctcccacctccacttccaagctcga

SEQ ID NO: 17602 - DNA, 259 bp, Glycine max
  Clone ID: 700876464H1
cgtcttttcggtactttagagcgattatatcataggaattgaataatgaatgttgttttaggttttagctctatggtctagtatgtcttctatcagtaataacgtttttttctgaatattaccagaatgggcgtgttgcatcctggatctaaggcgatattttacatcgattcccctgtgaagtcgctcaaaaataacgataagaccgctaatagactccaaaattccccaataaacttaaaaatgcgaaaaagtaaga

SEQ ID NO: 17603 - DNA, 248 bp, Glycine max
  Clone ID: 700876466H1
ctcgagccgctcttctcaattctcatattccaatgtcaaatcctcaaacaaacaataaccgccaccagcccagccgcctgcagcgccgcgccccctcctccctgcaataaaccgcgccgtcgagtggaacgtcgccatccccctcctctccccgctcgcatcctctccgccgccgacggagctaaaaccgtcgcaagagccgccgcagcgggaggcggagaaggtcaccgtgtcgttcaagaagtggc

SEQ ID NO: 17604 - DNA, 250 bp, Glycine max
  Clone ID: 700876430H1
atccatctccatttcaggcttctggcagtcttgagtttaatgctggagggagtttctcattgggcactggtggggctgacaaggcgggtcgaaaatatgtgaaagttagcataatagaccgcggaagaagtaagactatttgtttatgaaaattgttatttctgtcgctgctgcaggctgcacttcattaatgctactaattaataagctctaaaggggagtggttcctgagtttgtgtcctgttaggag

SEQ ID NO: 17605 - DNA, 244 bp, Glycine max
  Clone ID: 700876385H1
ctcgagccggctagaaagaaaaaaacaatataggtacactatctttgggttggatcggaatccgaaccttataatttagtctttgcataccttcactactacaataaagtgctttaacgacacactaactacgacagttaagaagaaaacgttgttgaaagatacacggtgacattatagtaattttgacgaaaatatacaacgatggtcgtttaataaccaccttcattactagcaataagga

SEQ ID NO: 17606 - DNA, 244 bp, Glycine max
  Clone ID: 700876387H1
ggatgaacttgccaaggaaaacaacaagagtgcctcatcatccaaggggaaaatcaccttcagtgtcaccaagaccaagcctgagaccggcgaggttatcggtgtgttccagagtcttcagccgtccgacactgatttgggagcaaaggctccaaaggatgtcaagatccagggtatctggtatgctcagcttgagtcatagagtgtttttttttgtttttttttttcatgcctttgttttctt

SEQ ID NO: 17607 - DNA, 213 bp, Glycine max
  Clone ID: 700876388H1
ataccttctataatgagcttcgtgtggccccagaagaacatccagttctgttgacggaggctcctcttaaccctaaggctaaccgtgagaagatgacccaaattatgtttgagacctttaatgcccctgctatgtatgttgctattcaggctgttctttcactgtatgccagtggccgtacgactggtattgtgttggattctggggatggtg

SEQ ID NO: 17608 - DNA, 243 bp, Glycine max
  Clone ID: 700876390H1
gcgattttcgtttttccaaattccaacagcgagagcaaagtccgttctgttctgcagagcagagaatatgtggcaccagaacttaggtgtggattccacgggaactgtgagagagactgtcttcagtgcgagtatatttgtgcttgttgctctagttctctccgtgtatttggtattcgagcatttagctgcctataatcaaccttaggatcagaagtttttgattggtctcattttaatggt

SEQ ID NO: 17609 - DNA, 246 bp, Glycine max
  Clone ID: 700876391H1
tagatcttgaacagtgttttcgtgttcggtgagatggaagaaaggaagcaatcgcgttatgtgaagttgactaaagatcagacacctctcgaagatattacccctggcgaactcaatcagccaattcaggttcctcagttggatgttcgtaagtgccctgaatgtagacagccgctacctgaaagctatgctcctcctgctgatgaaccttggatgactgggatctttggatgtgctgaagacaga

SEQ ID NO: 17610 - DNA, 248 bp, Glycine max
  Clone ID: 700876392H1
cttgaatcttcgttatccttctttttttctccttgaactcgaatattcactatggcagatgaggtggttctgctagatttctggccaagtccatttgggatgagggtcaggattgcacttgctgaaaagggtatcaaatatgagtccaaagaagaggacttgcagaacaagagccctttgctcctcaaaatgaacccggttcacaagaaaatcccggttctcatccacaatggcaaacccatttgtga

SEQ ID NO: 17611 - DNA, 125 bp, Glycine max
  Clone ID: 700876393H1
ttaatatgtaaataaacacatttgatatacaatatggagaatttgtttatttacatagcaatttagtcatttgattttatccgaaccggttctcgggcccaccgaggccgaattccgcttcctca

SEQ ID NO: 17612 - DNA, 123 bp, Glycine max
  Clone ID: 700876395H1
aaaacattcaactttggcttttggacacttattaaggcttctggaaaaaggaccggtggagtatcaacgtgtgattctacttatgctcaaagctctcctccagcacacaccaatggatgctac

SEQ ID NO: 17613 - DNA, 88 bp, Glycine max
  Clone ID: 700876396H1
accactgtgtctcagagggtctgtgacacacagactcacttccaagttccaagctttggccatttattcccactgtttattgagaaca

SEQ ID NO: 17614 - DNA, 253 bp, Glycine max
  Clone ID: 700876402H1
atggtgcaatggcagctgcagatgtccagaaagctgtagagaaggagtttgaaatggctttgcaagatagagtgatggaggaaacaaaggataagaaaaatgcagtagaggcttatgtttatgacacgagaaacaagcttaatgacaaataccaagagtttgtcgttgattcagagagggaatcatttactgctaaacttcaggaggtagaagactggctatatgaggatggtgaagatgaaactaaaggtgt

SEQ ID NO: 17615 - DNA, 253 bp, Glycine max
  Clone ID: 700876404H1
ggagaagaacattgcgacggacctgttcaaactgttgcttaagtaccagccggagaccaaggctgctaagactctgcgtctgcgcaacatcgcttgtaggcaaggaggaagcctcggcccctcctgccgtcgtgaaatttggtctgaaccacgtgacttctctgattgagaacaagaaggccaaggtcgtggtcaccacccacgacgtggaccccattgagctggtggtgtttctgcctgctctgtgccgtca

SEQ ID NO: 17616 - DNA, 254 bp, Glycine max
  Clone ID: 700876405H1
gaccaagggagtaaattgtccttcaatgcctagaaaagataaacctagacgcgttgatgtgtactactctagttggtgcattagagcagtggaatcaaatagaggtaatggcagttaactgcctgtgaagtcttgctcttccatcatgaagaaatgggcattccatgggagattgcaaagcttggagtaaggaaaggaatgtggggaactgttcagaagattgaacccggtttgcgagcttatcaagaagcaag

SEQ ID NO: 17617 - DNA, 254 bp, Glycine max
  Clone ID: 700876406H1
atttttgggtaaactatggttagtagctacagtttatcatgttggatttttttttatttagcattttttatttggtaaggctgatagttttctaaaggattgttgaagtttgtgttgttatttagttcattttacttgttaaatattcatttaatgtgactcttgccatctttatatttacttgattttggtcacgaatagaatcataagataaatgttctccagcacgcagttgagtgttatactgcttatgt

SEQ ID NO: 17618 - DNA, 112 bp, Glycine max
  Clone ID: 700876407H1
gcttagggcgcatttttttttttaactacaaattttagtagggttttgataagggccggctgctcccgtttctcaatatctagctacttctgtccctggttccacacaacat

SEQ ID NO: 17619 - DNA, 216 bp, Glycine max
  Clone ID: 700876409H1
ttttgctacgaaaacatagcaaagaagtttattttgtgtcaatagtatgagtcagtgtatacacaactaatggttaatggatgcaaatgtttttgttgaacatcattcttggtatgcactgctaccaactgaaagtgtgtttatcttttgcaggggaaagtgatgatattagtttcagttttttatacaatcctcaaaatagtgaaaccacattgg

SEQ ID NO: 17620 - DNA, 248 bp, Glycine max
  Clone ID: 700876410H1
ctctctctgctctctgagcacatctccactctgttcctcagattcatcaccatcttgcgtttcgccaatgggaaaagcattcgacatcggagccgttccgttcaagccgagggttggggtccgccggacagcaccaccaccggcagcaacatcaacctccctctgtaacgtccccttcgcccccttctcccgctccgacaaattgaggccgcatcgccgactggactcgcaacttcaacaacccgacc

SEQ ID NO: 17621 - DNA, 242 bp, Glycine max
  Clone ID: 700876411H1
cagagaacaaaagtcagccgggtcttattattaccttgatgactgagttcatacttttgggctgttctttcactaacacaaccttgcatctgtttgagcttttctgggatttcagatttggttcacagttcatgccttgaaatataagattgccatctttaacgttgaaggcatctttctcaatggagattgaagagcctgcatgcaagccctatgttggttggtgcatttgtatatttacc

SEQ ID NO: 17622 - DNA, 232 bp, Glycine max
  Clone ID: 700876412H1
ggctcgagtgtttcaaaagggctaaatcagagagcaatggaattgagatggtgaccgaaaagggacaaagagagttatcagctaaagatacgctttgtgcacttcctgtcagatgcttgtggtttggattcagaatcaactaaaacaaaagaagaccaaggagatagtatccaactatgtaaatcagctgtgcgagagcttgccaagtccaaatggagagtcagtagtagac

SEQ ID NO: 17623 - DNA, 231 bp, Glycine max
  Clone ID: 700876413H1
aaccgactaactgaccataaacaaaatggtgtcgacgttcgagaagaagaagaacctgagcaagctcatcatcccttcatcttcttcttccccaaatccatcccctcaagcccacacgtcattttcagtaggtcccactccttcgtgggcccctctcctcgctttgtcccttcctccacccctctcttcttcctcggagaagaagaagaagaagaagaagaagaagaatta

SEQ ID NO: 17624 - DNA, 246 bp, Glycine max
  Clone ID: 700876414H1
gaagtctccttcagaatactttgttcaaatgatagagttggaggagttattggaaagggaggcaatattgttagagctcttcagagtgagacaggggctacaatagtattggtcctttggtagctgagtgcgaggatcgattaattactattgctgcttcagagaatcctgagtcaagatattcaccagcacaaaaggctgctgtgcttgttttctccaggtccattgaggttggttttgagaagg

SEQ ID NO: 17625 - DNA, 251 bp, Glycine max
  Clone ID: 700876416H1
tttgtcacattaattggaacttcagcttcagcaacaaccccagattagtccatgatgtgaagctcctaggcagtgccaagttctcaaatgaaaagggtgctcttcaaaccccaatgaatcagaagatataagacaccaagctggtagaggcatctattccttcccaattcgcctgctagatccaagcaccaagactccagcttcatttcaaaccactttctctttccaaatgaacaattccactgcctctg

SEQ ID NO: 17626 - DNA, 190 bp, Glycine max
  Clone ID: 700876419H1
ctgctctgaatccaattcttcttcttcttgttctctgtttaaggcaatacaacatttactactcatactcaaagtatcttagtgttttgtttagcatatcatggagaatataatcagtcgttttggcaattcagtgatcagctgaggttactggcatccaatttggcgaacctttctctaaacgattcga

SEQ ID NO: 17627 - DNA, 83 bp, Glycine max
  Clone ID: 700876423H1
gtccttttctggtttcattcaaagcagtgccatcaatgggaacataacatagcaattagcaaatgatcttcacaagacatggc

SEQ ID NO: 17628 - DNA, 132 bp, Glycine max
  Clone ID: 700876424H1
aattaggcaagtagtatattaataatactacgtctccctttgactatagacattatcagacggccatctccaattccaattctcgtgaactccattcattcattttcttttctttgtgctctgcacatccat

SEQ ID NO: 17629 - DNA, 215 bp, Glycine max
  Clone ID: 700876425H1
ataaggcagacagcttcttcttgctttgactgaagattcaaagcttcatattgaagagcttgtcgatgtgtataggttggttgaagatcagatagacataccttctgtgctgtagaagtagctagagactttccaacagttgtcagggatctcctactttcatggagtgaatcagtcttgtctgatggatagctaaatctttggaccacctgcac

SEQ ID NO: 17630 - DNA, 244 bp, Glycine max
  Clone ID: 700876427H1
gcccaagaacaggagaatcatgggtgctggagggcctgatgatgaggacaataggtggccaccgtggttgaagccactgctgaaagagagcttctttgttcaatgaagttgcatgctgattctcacaagagagaatgcaacatgtattgcttggactgtatgaatggccctctctgctctctctgcctcgcccaccacaaagatcaccgagcaatccagattaggaggtcctcataccatgatg

SEQ ID NO: 17631 - DNA, 241 bp, Glycine max
  unsure at all n locations
  Clone ID: 700876384H1
ctgagtaccatatggattccacaggctttagtacagatancttgtatgatgcanggttcccatcggctctttctctgggtggtgttgtgtgtggaatggcatgtgttagagtaactgcaaaagacatggtattttggtttcggccacacactgctgcagaaatccgatggggtggtgcaaagcatgaggctggagaaaaagatgatagtaggaggatgcatccaagatcatcattcaaggc

SEQ ID NO: 17632 - DNA, 248 bp, Glycine max
  Clone ID: 700876428H1
gggaactatatgataaatatgttcagcagggaaagctttctgaaaatgaatctaggcgctactttcaacaacttatagacacagttgatcattgtcatagaaagggttgtaccatagagacttgaagcctgaaaatcttcttcttgatgcttacggaaatttgaaggtttctgactttggattgagtgcattgactaaacagggtgttgaccttcttcacaccacttgtgggaccccaaactatgttg

SEQ ID NO: 17633 - DNA, 247 bp, Glycine max
  Clone ID: 700876429H1
gatgactgctcatagaaaagatgggcactcgtctatctattatctcggtcgtagtgcgggccctgtgcatcatcgtcgccaagattgcagccattggtgtacgcctgtgtacctgatacatggaatgagctgctttatgcactgttgcttaaacatgaaactgctcacagagggaacttgtaacatgcatcagtatgatttactgagaaattcttctaattgtgttgtctggattcatcattcatgg

SEQ ID NO: 17634 - DNA, 162 bp, Glycine max
  Clone ID: 700876331H1
cggctcgagcttccatttgactcttgttctgaacgacttttcaagagaatcaaaccatggcaatgaaagtatacggtccccactgtgcttccaccaagcgggtgctggtttgtctggttgagaaggaagtcgaatttgaggttgtccctgttgatgtcacta

SEQ ID NO: 17635 - DNA, 256 bp, Glycine max
  Clone ID: 700876334H1
gcaacacaacacacataacacgtaacaaagagaatgagagcgctaaattcgcacgtgctcctcgtagatcttcactcccaccatcacgtgcccagctcaaccctctcctacctcagaaactcccgcttcatatcatccctccgtcgacgctccccaagaaccggaatccgatgtacggcgtcgccggagattcgccgcccctccgatcgcttctacggctcctcgccgtcgacgtcgcgcccggaggacctcaacc

SEQ ID NO: 17636 - DNA, 248 bp, Glycine max
  Clone ID: 700876335H1
ctgccaccaacatcccaatcgctcctccataaccatattgaagaataagataaatacaacaaaacctagagatggaagaagcacaggtgcaggtatgggaagggtatgtagattggaggaacaggccaaccataaaaggacgtcatggtggcatgcttgctgcctcctttgttttggccgctgaggtattggagaacctagcatttcttgccaatgcaagcaaccttgttttatatctgtccaagttt

SEQ ID NO: 17637 - DNA, 250 bp, Glycine max
  Clone ID: 700876336H1
ccgcaagtccacagcatggctgccactgccgctgcaggcatagcttccttgttttcttcttctattaacagtgtcaaatgtcttcgttcctccaagaactgctccattatagacccccttataaccacagtgccctcaaaccgtggcatgtttgtgtcacacttggtggaacctttgtccattgggggtgccattaattcgcacaagttgtgggggcctagaatttctgctgctgttgcacaagaagagg

SEQ ID NO: 17638 - DNA, 252 bp, Glycine max
  Clone ID: 700876341H1
cttatttttctctctctaaaatcctctgtgagaacgtgcacagcagtggctacagaggtaagctctctgattagggtgatgggtggcggctacaaggaggagcagcatcggactgtggggaatgagtcacacggtgagaaatcaacggctctcattactcgggacttgctcggtgggtcctcgattgaatcacaggaattggacctcgatttgcaggttcctagtggctgggagaagagactcgaccttcag

SEQ ID NO: 17639 - DNA, 252 bp, Glycine max
  Clone ID: 700876342H1
gtcaaaattggcttgcctgcaaaggcaaatgtgaagacacaacatggggatgcaccttttgctgagttgtgctcacactgtgagaaggaagctgtgaatgtttcccttggaaaccttctaacatacccatttgttagagatggcttggtgaacaagacattgtcactaaaaggaggatactatgactttgataagggatcttttgagctctggggccttcagtttggccttgcatgctctttctccgtatga

SEQ ID NO: 17640 - DNA, 254 bp, Glycine max
  Clone ID: 700876343H1
tggagcatcaaatcttgaaaaggaatcttcttggggcaataactttgtcccagatactcatccactacctaatgcagataaaggagcatcagatataggtggtgaaaataattttaccagagaaactcagcctctgcctaatgcagataaagaagtgttgcatattggtggtgaggagaactctgccagagaaactcagtctcttgctattgcagataatcaagcattacaacatgttggaaaaaatgttcctg

SEQ ID NO: 17641 - DNA, 254 bp, Glycine max
  Clone ID: 700876345H1
ttgacacattgttttttgttctgaagatctacctgctaaatttctaaaattcattcatgtgagttttttttttttttttttaagaagcaaaacatcactatcatacatgaatcggtactcaatgagagctcatgttcagtttcttgttgttttgctctcagtttccctggctatattctctcctctccctcctcctgtgtctcagtttgctggctagatacgtagaattgctgctgcttcttcaatggctcaaa

SEQ ID NO: 17642 - DNA, 158 bp, Glycine max
  Clone ID: 700876348H1
gggaactatatgataaaattgttcagcagggaaagctttctgaaaatgaatctaggcgctactttcaacaacttatagacacagttgatcattgtcatagaaagggtgtgtaccatagagacttgaagcctgaaaatcttcttcttgatgcttacgga

SEQ ID NO: 17643 - DNA, 253 bp, Glycine max
  Clone ID: 700876349H1
tccggcggctccgcctcgcagtcccagcctccgatcgcaacgccggcgttccgcgccttcatctcccgcatctcctcgtccctccgtcacgcctttgcgcacgccgcccgtgggcgagctcatcgaccggagctccatgtcccgacctgacaccctcgccgaagcatactctcggatccgcaagaacttcggctacttccgcgtcaattatctaaccctaatcgcgctcgcgctggcggtctcgctcatcacg

SEQ ID NO: 17644 - DNA, 252 bp, Glycine max
  Clone ID: 700876350H1
aaataatactagtaccccttcacccctcccattccatcatcattcaacaaggaaacacccaaaatggcatcctcagcctcgaccacgctgtcttctcccttcctgcgactagaattccgctcctcaaccaaacaacgctcttcaatctccatcagagcctcggtctccgagaaacccccgctaccggctgtgtcggtgacctccccggagcccagcaagcttccgatccgcaaaatccccggcgactgcggg

SEQ ID NO: 17645 - DNA, 250 bp, Glycine max
  Clone ID: 700876351H1
cccgtttgaaaataatttgtgtttttttccattgtagattgaatggagagcctgagaaagatgatgcggtatggtgttctgtgctccgggaaccctcggcgtttgtacgccacgaaagtggacctgaaaaagctccggccgatgattctgaagagaatcgagaaacgggcacatacttacccggttcgcggcatggttccggttgccaatgaggtcctccaagtcaggaatgatctcatccatggcgttt

SEQ ID NO: 17646 - DNA, 252 bp, Glycine max
  Clone ID: 700876357H1
aacaaattggtctgacctgccagattcgagtttgtgcgggaaaaccgagtgggagcattggagaaattggccagcgatcaaggggagaactgacagagctgcaacgtgacattggcctcatcaaggacaatatgccagacatgaaacagatcaaagaattgatcttggagtgcatgctgagcaagaaaaaggaaacctgcatcgaaaaaaggaagagttccacaatgttcttgaataagaggaccaacactt

SEQ ID NO: 17647 - DNA, 248 bp, Glycine max
  Clone ID: 700876358H1
gcaaagtgattgattccagttccaatggccttgggcacaagcgccttgatcggaaggaaggttcttgtctcacccccaacccccaaaacaaccaaatcatctactccgctacaatttcttttcaagagaagcattttaaatgctcacaattcacaagctgctctagcttcccttatcttttcctccgcgagcctctctgtgaccccacaagcccttgccgctgataacgtcacccctccccctgtaat

SEQ ID NO: 17648 - DNA, 147 bp, Glycine max
  Clone ID: 700876359H1
agagtatatagtttgatagtttcctgttcaaaattccactatacttgcatacatgattttgaacaggaaactatcaaactatatactctactgataaatcatgtgtgcaagtatagtggaattttgaagcaaaaaaaaaaagaagaa

SEQ ID NO: 17649 - DNA, 251 bp, Glycine max
  Clone ID: 700876361H1
tttgtcttcgccgcacgccgaaacaatggccggaaaaggagagggtcctgctatcggaatcgatctcggaaccacctactcttgtgtcggtgtgtggcaacatgaccgagttgaaatcatcgccaacgaccaagggaacagaacgacgccgtcttacgtcggcttcactgataccgagcgtctcatcggtgatgcggctaagaaccaagtcgccatgaaccccatcaacaccgtcttcgatgccaagaggt

SEQ ID NO: 17650 - DNA, 257 bp, Glycine max
  Clone ID: 700876365H1
gcagtgccggcgcgcgctgaagtttgctaggttcatgagcaggttcgggaagagttaccgaagcgaggaagagatgagggagaggtacgagatattctcgcaaaacctcaggttcatccgctcccacaacaagaaccgcttgccctacactctctctgttgatcattttgctgattggacttgggaggagttcaaaagacacagactaggcgctgcccaaagttgctctgccactcttaacggcaaccacaagctca

SEQ ID NO: 17651 - DNA, 250 bp, Glycine max
  Clone ID: 700876366H1
ccttaccgaaaactagaggccagggtctcggagtgtttgggtttgtttatcttaaacaccacaaacacagaacagaggtgtagagaagaaagctaaaaaatatggcggcagagtcatcactgagggtggcgactcccactctttgcaacctcaatgggtctcagagacgaccaaccaccaccactctctctccgcttcgcttcatgggttttcgtcctcgaccctcctctcactctctcacctcctcttc

SEQ ID NO: 17652 - DNA, 250 bp, Glycine max
  Clone ID: 700876368H1
ccgcaagtccacagcatggctgccactgccgctgcaggcatatcttccttgttttcttcttctattaacagtgtcaaatgtcttcgttcctccaagaactgctccattatagacccccttataaccacagtgccctcaaaccgtggcatgtttgtgtcacacttggtggaacctttgtccattgggggtgccattaattcgcacaagttgtgggggcctagaatttctgctgctgttgcacaagaagagg

SEQ ID NO: 17653 - DNA, 245 bp, Glycine max
  Clone ID: 700876372H1
gtggatgctgagcttcttgacacccaagtgaatcctgctgtgtgggaaattagtgggcacatggttctaaagaggaagaaggattatgatgaggcatctgaaggcaatgcttggaggcttcttgcagaggtgtccctctctcaagagaggtttcaagaagtcaatgatcttatttttgaagccattggctgtggtgaattggaggatgtcaacgttgaaagtgtcaaagaggttgatgcagtcag

SEQ ID NO: 17654 - DNA, 250 bp, Glycine max
  Clone ID: 700876376H1
attggaattagcacaattcgcagaattagaagcttttgcccaattcgcttctgatctcgataaagctactcaaaatcaattagcaagaggtcaacgattgcgcgagttgcttaaacaatcccaatcagctcctcttaccgtggaagaacagataataactatttatactggaacgaatggttatcttgattcattagaaattggacaggtaaggaaatttcttgttgagttacgtgcttacttaaacacg

SEQ ID NO: 17655 - DNA, 250 bp, Glycine max
  Clone ID: 700876378H1
tttctttagccgagacaaatcaatccaaagggagagagatgcccattacccaccctctctaaagataagagcttttttctttttttttttctttctcttcatatctctattttccatatattatgaggcgtcttaaagggttggttattgtgagtgtgaggatcactttttgagcgtgttttctgtggattcggtcttgtgtattttgctatacagaataagagaggaagaacaaacatgactgaaagta

SEQ ID NO: 17656 - DNA, 253 bp, Glycine max
  Clone ID: 700876379H1
attcaataatataatgatgattcttcatgttaaatctttgcccttctgattaaccttgcaacttcgagaaatttcaatgacctctctctcccaaaatctcagagtgtgctgcttcagtgtctggtatcagagatggcaacattgactgcttcaagtaactcagtctctagaaattctcatgtccatcatggaccaacaactgcttcatatgagtctaaagcagtagcctagggacttagatctctaaagcaga

SEQ ID NO: 17657 - DNA, 103 bp, Glycine max
  Clone ID: 700876380H1
attgagacgtggctggttcaactgaggtgatggctttgaatttgcgttctcccgcccaagtgaagcccttatttttctcttcaaataactccacaaaacttcc

SEQ ID NO: 17658 - DNA, 252 bp, Glycine max
  Clone ID: 700876382H1
acatgatactagcaccccttcacgcctcacattccatcgtcattcaacaaggaaacacccataatggcatcctcagcctcgaccacgctgtcttctcccttcctgcgactagaattccgctcctcaaccaaacaacgctcttcaatctccatcagagcctcggtctccgagaaacccccgctaccggctgtgtcggtgacctccccggagcccagcaagcttccgatccgcaaaatccccggcgactgcggg

SEQ ID NO: 17659 - DNA, 243 bp, Glycine max
  Clone ID: 700876383H1
aggaatttgagagtgtgatagaggaagcaaaaacacccatgttaaggttgttatctagtgggtttgggttagcattaatgatgaataagccaattgggttattaggtactgatgctaacgttaagagtccaaaatggtcagagaagttcaacgatgtggtcaattttaaggatgttgatacggtacaacatagtcatccactgccaccgatgccaaggcagcatggtagtattcataaaaagg

SEQ ID NO: 17660 - DNA, 257 bp, Glycine max
  Clone ID: 700876330H1
tctggggaaatcctgtgtcccttaagagtccagccgcaaaccctcccctcacactctccaaaccctagcggcactacacacgttatctgtctctctctctctctctctccctctctccttccccaatatgtcgagcgccgatcccgagcaccgagaagaggaggaggcacccgccgtcggcgacgacgaggacaccggagcacacgtcgctcccatcgtcaagctcgaggaggttgctgtcaccaccggcgaggagg

SEQ ID NO: 17661 - DNA, 154 bp, Glycine max
  Clone ID: 700876282H1
aaatcatgtagttcaaatacccctaatggcacaggtggaaattctgtcttctagtgtaagtgatttcagaactgcaatggtgagtaaatatagtcagtctctagctactgcaatgcatgtgggactatagaaattatcattgatagtttctcaa

SEQ ID NO: 17662 - DNA, 244 bp, Glycine max
  Clone ID: 700876286H1
ctttcttatcttaaatcgcccgtcacgacctgagctctgcatgcactggatcacaaccagagaaatgcacgtgatcgtcttgtcgagcgccggggcccactgctgctccggcatcgacatctccctctgggatcaaccgccgcgaattcgggttcctccggcgagagatactggcgatgcaagacgcggtaacggccctggaacggtgccgtaagccggtgactgcaagcatacagggggcgtg

SEQ ID NO: 17663 - DNA, 246 bp, Glycine max
  Clone ID: 700876288H1
gttcaatggtttggcatggctctttttgggtgtccctacaagcagctcattgctatataaggaggaatttgagaagatgcaagagaaatatcctgacaacttcaggcttgacttcgctgtgagccagagcaaacaaacgagaacggagagaagatgtacatccaaacccgaatggctcaatatgcagaagagctgtgggaattactgaagaaggataacacttttgtgtacatgtgtggactaaaa

SEQ ID NO: 17664 - DNA, 246 bp, Glycine max
  Clone ID: 700876289H1
gagagactggactagctgagttagggtgagttgcaggcagtgtcatctctcctttgacgacaagatgagcatcccaattccccatcggcagttattcatagacggagactggaaagtccccgtctcaagaatcggattcccatcatcaacccttccacccaacacatcataccaggatatcccagcagctactaaggaagacgttgatctcgctgtcgctgccgccaaagctgccctctcccgcaa

SEQ ID NO: 17665 - DNA, 242 bp, Glycine max
  Clone ID: 700876290H1
gaaaagcgtgtcgaatggatttcacggagaaggatctattcggcgaagattccgacaacgacaacgggtcccactcctccggttcctcttcttcttcctccgtcgcttcctcttcctcatcgtctccggttcctcttctgcctcttcctccaaagccagcgacgccgccgccgactcctcctccgccagcggcagcgccagcagcggcgccgaagacgacgacgagaatggcgacgtcgtag

SEQ ID NO: 17666 - DNA, 243 bp, Glycine max
  Clone ID: 700876291H1
ctgataagtggtatcgattgatctgttattttctgtgggagactgagaaacgatgccaagccagctatggttttctctgccaatgatttacaagaatggaaagattttcccaaagggctcaaggtcttctccttgagagagacaacatttctgctgccgagataagggcaaagcttgaagccatggactacaatgtttctacattctgtgaggagaatgaagccttgtcagcaatctcaagtg

SEQ ID NO: 17667 - DNA, 86 bp, Glycine max
  Clone ID: 700876293H1
ccaaaagttgcctcgtaaagtaggtcttactcagaagccaacaacaatagagtaattaggcatcagcatgaagggcaaggcttcct

SEQ ID NO: 17668 - DNA, 242 bp, Glycine max
  Clone ID: 700876294H1
gccttgattggactaatgtgggccgtttgcattgtttcttgccttggtgggatgatgctactgtggattttatgacaagtggtggttacaatgtttctccattgataggaaaggtaaaacagaaacactgataatatggggtgaaaatgaccgcatcatcagcaataagtttgcagtgcgactccactgtgaattacctgatgcaattatacgccaaataccaaattgtggacatcttcctc

SEQ ID NO: 17669 - DNA, 245 bp, Glycine max
  Clone ID: 700876295H1
gaggaaagaaaggagagctggaatcacatggacttgtctttctctttctgggtctccattaaatttttcttctctcccttctttctctctctctctctctgaccattctcttcttcttctttttctctcctctctctctctcccctccgccatggctgaggataaggagatgtctacctctgtcatcaatgggaatgattccctaactggtcacatcatatctacaactattggaggcaaaaatg

SEQ ID NO: 17670 - DNA, 262 bp, Glycine max
  Clone ID: 700876301H1
tggacagatacaacatccaaggtctcatttgaataggtttgacatggtaattacacctcatcatgattattatcctttgactccagaaggacagaagcaggttcctaagtttcttagaaggtggataactccacgcgaacctccagatagtcatgtggttctgacattgggagccttacatcgaatagattttgcttcacttcgcagtgctgccattacatggcaagatgtgtttgcaaatgttccaaggccattgctcgtg

SEQ ID NO: 17671 - DNA, 257 bp, Glycine max
  Clone ID: 700876303H1
ggattggagaaggttgctgctgagaaaaaaacagaattagatgagttggttaaacagaaattgaggttggaggaatcacttagagaatctgaggagaaagtgactggtttggagtccagtattcttcaattgcgtgaggaagcaaaggaagccgagagggtgatcatatcgctgaatgaaaaggcggtggagacggttgagacaatcgacagaggtttgaatggtgtacatggtgaagggaagaagggattgaagtt

SEQ ID NO: 17672 - DNA, 254 bp, Glycine max
  Clone ID: 700876304H1
tgaatctcagaattctctaaaagagatctttttctgctctttgaagaaagaagggtctttgcttgattttggagatgtctctgctctcagatctcatcaaccttaacctctccgataccaccgagaaggtgatcgcagagtacatatggatcggtggatcaggaatggacctgaggagcaaagcaaggactctcccaggaccagttagcgacccttcagagcttcccaagtggaactatgatggttccagcaca

SEQ ID NO: 17673 - DNA, 254 bp, Glycine max
  Clone ID: 700876305H1
gtccgtgtctctttctctcttctattactagtagtaatatatctatgttttcttgcacaaccaaactcgtcactctgtggtattaattcaatattcatagacttcactgtctgattgtctttgtttaataccatataggattcattaaggattctctaatgttggcacaaatggacatggaggagcttgtctcatgtaacaacaacgatgccaccaacatagccaaagggaagcgcacaaagcggcgcttgagg

SEQ ID NO: 17674 - DNA, 256 bp, Glycine max
  Clone ID: 700876309H1
gttagtttttctcagcatacggctggtcagattaggaatcgtaaatcaggaacttctgctggcacaaagtcatctgatcaaggtgaatcaatcacatttgctgatgtcgctggtgttgacgaggctaaggaggaactagaagagattgtggaatttcttcgcaatccagacagatatataagacttggagctcgtcctccccgaggggttctcttggtgggtcttcctgggacaggtaagactttactggcaaagg

SEQ ID NO: 17675 - DNA, 257 bp, Glycine max
  Clone ID: 700876310H1
cttatttttctctctctaaaatcctctgtgagaaggtgcacagtgatggctacagaggtaagctctctgattagggtgatgggtggcggctacaaggaggagcagcatcggactgtggggaatgagtcacacggtgagaaatcaacggctctcattactcgggacttgctcggtgggtcctcgattgaatcacaggaattggacctcgatttgcaggttcctagtggctgggagaagagactcgaccttcagtcagg

SEQ ID NO: 17676 - DNA, 258 bp, Glycine max
  Clone ID: 700876312H1
cttatcctccacttccagtttcaaccatgtcctgccggaaaagacaaaagacttcgccggacaaaacctccgacgacttcttcgactctctccccgacgaccttgtcctctctatcctctgcaagctcagctccaccgcaacttccccctccgatttcattagtgtcttaataacgtgcaagagactaaactccttaggccttcactctcttgtgttatcaaaagcttcccacaaaacattctcagtcaaagccaaaa

SEQ ID NO: 17677 - DNA, 261 bp, Glycine max
  Clone ID: 700876315H1
caaaaccttaaaaacaaaacatactaaaccttctccttttcttttctcttccattttcccaactcacacttctcattttctcagggaactaaaaaaaggaaaatgatcggaaacttcatcgacgacattgactgcggcaacttcttcgaccacatcgacgaccgcctcgaattccccgacgacgccgccgccgatgacacctccgccgccgctcctgtccctccaccggcgaacttctggtccgccgagtccgactcgctc

SEQ ID NO: 17678 - DNA, 256 bp, Glycine max
  Clone ID: 700876318H1
ggtgggtgacatgaacgacttgaggaagaagagaaaagccgcaggcgcagagtgagagccgaaacttctcatggaatcgcaaacggatctgcagaaccgacccggaatcttcattatcggatcctccaacgtcggcaaacgcaacctcctatcccgattgacctctgttgatgttgatgatgattatgattcggtttctgaagcgaatcaccaggggtcgactatcaacaataagtactacactgatgatgtctct

SEQ ID NO: 17679 - DNA, 254 bp, Glycine max
  Clone ID: 700876320H1
tgatgatgaattttgtgagtctggcatgtatgcatcttcttattgctttctcaagtttctcaactgaagttcctgatggaaccctcaacatcaacgacaacaatggtagcttatttaacatgagctacaagattagcctctcagtgatatcatattcaaagataggggacaatacttctgtgtttaatttgtcctctgagagagtgaagatctctgcagaaggagtttatgatgccggagcaggaacgttgtgt

SEQ ID NO: 17680 - DNA, 251 bp, Glycine max
  Clone ID: 700876321H1
tctgaatcttcaacaatggtgctcgaggcgacgatgatctgtatcgacaattctgaatggatgcgtaacggtgattactctgcttctcgatttcaagctcaagcagacgctgtgaatctcatttgcggtgctaaaacgcagtctaatccagaaaatacagtgggagttctcacaatggcagggaaaggcgttcgtgttttggtcacccctaccagtgatctgggcaagatcttagcctgcatgcatgggct

SEQ ID NO: 17681 - DNA, 251 bp, Glycine max
  Clone ID: 700876322H1
cccgtttgaaaataatttgtgtttttttccattgtagattgaatggagagcctgagaaagatgatgcggtatggtgttctgtgctccgggaaccctcggcgtttgtacgccacgaaagtggacctgaaaaagctccggccgatgattctgaagagaatcgagaaacgggcacatacttacccggttcgcggcatggttccggttgccaatgaggtcctccaagtcaggaatgatctcatccatggcgtttc

SEQ ID NO: 17682 - DNA, 226 bp, Glycine max
  Clone ID: 700876324H1
tgcaattgaagttgaagtcttgcccttctctcttcaactccaaacacaagacatcagaatccatggctgcctccgtctccactgtcggagctgtcaacagagctcttttgaacctgaatgggtctggacctggggtttcagctcccagttcatccttctttgggagcagcttgaagaaggttattggctcaagggtccccaacacaaagatttgctctggaagctt

SEQ ID NO: 17683 - DNA, 255 bp, Glycine max
  Clone ID: 700876325H1
cgaaaactagaggccagggtctgtagtgtgcgggtgggtttgtttatctcaaacacagaacagaggtgtagagaagaaagctctcaaaagtatggcggcggagtcatcactgagggtggcgactcccactatttgcaacctcaatggttctcagagaagaccaaccactctctctccgcttcgcttcatgggttttagccctcgaccctctcactctctcacttcctcttccctttcacacttcttcgggagcac

SEQ ID NO: 17684 - DNA, 254 bp, Glycine max
  Clone ID: 700876326H1
aggacgatgcattggatagcttgaaagctatggggtcggcttcagtgaatgctaaggaggattcagcttcacctgttcaggcattgcttgggggaatatctgctggagttattgctcttattctctacaagtttgccactaccattgaggcagctctaaaccgacagacaatttcagataacttctctgtatgtctcatctcctgtccttctatatctgtatttattcttttttgttgcacaacatgttatttg

SEQ ID NO: 17685 - DNA, 255 bp, Glycine max
  Clone ID: 700876327H1
cttatttgaagccagaacatcctagtacctctgtgttctctgcggagggtgtctctgttgtcccaggtaacatcatgttgaatggcagtaataatggctttgaatggttattattacaacaatataaagttgggaaatcaacgaagagcaccacacagtctcagttagccaggatcaatttcagttcataaattgccaaagaatagaaggtcaaaatcttacgagtcagggaatgataaatttcctaggttcctg

SEQ ID NO: 17686 - DNA, 257 bp, Glycine max
  Clone ID: 700876329H1
gcgtactttggtgaccttggggtggactcggtgaagatgctagagtactttgcctcgatccctggcacggaagagattcgttcacagtacaacccagctacgtacatgctggaggtgatcggcgctggcatcggtcgcgatgtgaaggactactcggcggagtacaaaagcagcgacttgtgccagaagaatcgtgagcgtacgttggagctctgcaaagtgtcggaggagttcatacgccacctcaacgctaaact

SEQ ID NO: 17687 - DNA, 150 bp, Glycine max
  Clone ID: 700876281H1
tgcaaataaaaataatctaatgtagcactcaattatcgaatatgagggttatgtcagatattttgaatgtacatgcataatttctcttttatttatgtgcctatatgtacagttaaaaattttattatcggttatatatttttaagaagg

SEQ ID NO: 17688 - DNA, 253 bp, Glycine max
  Clone ID: 700876236H1
aagatgagtagcgtgttggagcatggtgttgtgggatgttgcaaatcagggccaggctatgctaccccactggaagccatgtctggtccaagagagtctcttatttatgtaactgctgtctacacagggacggaatagagaagccggactatttggccacagtggacatagatccaaactctccaacttattccaaagtcatccataggcttcgtgttccttatttaggtgacgaattgcatcacactggttg

SEQ ID NO: 17689 - DNA, 251 bp, Glycine max
  Clone ID: 700876238H1
attcattcaagattcagcaagtgcgttttggaagcagagaccgaaatacttcgagatggcccgtacaaagcaaactgctcgtaagtcaactggaggaaaagctcccaggaagcagcttgcaaccaaggctgacgtaagtctgcaccaacaactggtggtgtgaagaagcctcatcgttatcgccctggaactgttgctcttcgtgagattaggaaataccagaagagcactgagctcctaatcaggaagct

SEQ ID NO: 17690 - DNA, 254 bp, Glycine max
  Clone ID: 700876240H1
ggaaaattatcccttcagaagaaccgtcgcatctcatggcaccttgcttctgaccttgttgaagaagagcctgaaaagggtttggttgaagagaaggaagaaacagtgtttcagaagaagaaggttttgccttgcctttgcctgagggcattgtgggagagatctgtcagcttgcaaggaacttgacatgaaatctaactctggaggaggctttggctgagtatgaaggaagggttagtgagaaagattgttgg

SEQ ID NO: 17691 - DNA, 248 bp, Glycine max
  Clone ID: 700876241H1
ggaatgtgtcttataagtctgatatttatagttacggaatgttgttgttagaaatggttggaggaaggaagaatgtagacacgtcttctccagaagatttccatgtgttgtacccagattggatgcatgactagttcatggagatgtacatatccatgttgaggatgaaggtgatgttaaaattgcaagaaaactagcaattgttggactttggtgcattcagtggcagccattgaaccggccatcca

SEQ ID NO: 17692 - DNA, 248 bp, Glycine max
  Clone ID: 700876242H1
ggggaatgaatgttttctttttgccctggtgtatctctttcacatttaagaaaagtctcgaatcttggtttattgattggtggaatactaggcaatccgaaattttcttgaatgatattaaagaaaagagattctaaaaaaattcatagaatttgaagaactgtttttcttagatgacatgttaaaggaatgtccggaaacacatctacaaaacctgcgtactggaatctataaagaaacaatccaat

SEQ ID NO: 17693 - DNA, 247 bp, Glycine max
  Clone ID: 700876243H1
cagatattggtgttagttttggaatttaggaggagtggagggattgagatttggatttggatcaggttgagactgctcagatttccgggcatgaatttcaagagctttggaaacgaggccggcggcggcgagggagacaggcggggaacttctcgctgacgcggcagccgtcggtgtactcgctgacgttcgacgagttcatgaacagcatgggaggttcggggaaggactttgggtccatgaacat

SEQ ID NO: 17694 - DNA, 248 bp, Glycine max
  Clone ID: 700876246H1
gcgttttgtttcccatcgcccccttttgctctccctctgtgcagacatgttgttcttctcgtacttcaaggatttggtggggagggaagtaatcgtggagctgaagaacgatttggccatcaaaggaacatgcattctgttgatcagtacctcaacatcaagctcgaaaacactagcgtcgtcaatcaagaaaagtaccctcacatgctttctgtaagaaactgcttcatcagaggttcggtagtgag

SEQ ID NO: 17695 - DNA, 253 bp, Glycine max
  Clone ID: 700876249H1
ctaagatggcttcctttgtatccttcctagtgctgcttcttgcagcccttatcctcatgcctcaagggcttgctacttactacaaaccaattaagaagccaccagtgtacaagcctccagtgtacaagctccagtgtacaaaccaccggtttataagccaaaaccaccggtttacaagccgaaaccaccggtttacaagccaccatataagaagccaccatacaagaaaccaccttatggaaagtaccctcca

SEQ ID NO: 17696 - DNA, 251 bp, Glycine max
  Clone ID: 700876252H1
cttgtagcactgctacaacaaagtgaagcacagagagaggaacttgtaagggagcataaaataaaggaacaagctgttgccatcagattgaatacaccggcattgcaggaaaactctcgatccttgaaaaccttgcggatgaaatgagtggtccattatctccaatgtcacttcctgcaccaaagcaactcaaattcactcctggagttgttaattggtcaggcagggagtcagctacatttttagatgaa

SEQ ID NO: 17697 - DNA, 122 bp, Glycine max
  Clone ID: 700876254H1
tagagttcgtacatatgcttctagcatattgggtatcttgactcagtaccttgccgctgttcagctaacagcgctgattcgagaactgtcaagtctagctaattcatcaagctggccaccta

SEQ ID NO: 17698 - DNA, 250 bp, Glycine max
  Clone ID: 700876255H1
tacatagagtaccgcaccagaaaggaaatggaaaacgtcagcttcaaaaaccatgtcattcagtggttcgaagtccttgatgggttacttggtccatattggaaagccctggggctagccttcaactgtctttccttctctttggatctgtgatacagcttatagcatgtgcaagtaacatatactacataaatgacaaattggataaacggacttggacttatatttttggagcttgctgtgccaccac

SEQ ID NO: 17699 - DNA, 244 bp, Glycine max
  Clone ID: 700876259H1
cttagtcaaacaaagtaacaaaccatcctcccctctcttctcttcttttgttctctagatttcttctctcttgtttcttagaatccgtacaatctaatcaacataacaaaaatggatgcaattagtgcatggatgagagcaccaccactgagtcactctctataagtgctttctccgacgtcatcgtcggagaaagcgaagcttcttcgatgattacatcgtcggagaaggtttctctgtcccc

SEQ ID NO: 17700 - DNA, 244 bp, Glycine max
  Clone ID: 700876260H1
ctgtggagacaggccaagcacaagcttccaggggtcaaactttctgttcatagaaaccggagttaaaaatcccagattggtggcagaggagatgatttttagagctttcgtgttgatcttgtacatcttcagttacagtgacaatcccaggaagggaggaatatcattgatacgacctcttatctcaacattttgaaattgagatttttgtataagttctaatctgctatttgttttggcattg

SEQ ID NO: 17701 - DNA, 163 bp, Glycine max
  Clone ID: 700876263H1
ctataagaagagactcacatgcccattcaccactgcacttctcttagttttgctttcgtttcaatttcatcatcgtgaagttctttgatcttccattcaagcaatgtcataacaagccgaatcctccgctcgaaatcttggaagaaggatttttccactgcga

SEQ ID NO: 17702 - DNA, 248 bp, Glycine max
  Clone ID: 700876265H1
gcaggattacaccggcgaagatgttactgttgataacttttttgctgctttacttggaaataagtcagcactgactggtggcagtgggaaggttgtggacagtggtcctgatgatcatatctttgtcactatactgaccatggaggtcctggggtgctcgggatgcctgctggtccttacttatacgcggatgatctgattgaagtcttgaagataaagtcggttgctggaacatataaaaacctagt

SEQ ID NO: 17703 - DNA, 81 bp, Glycine max
  Clone ID: 700876267H1
aatcaatgtcatgatgtataggttctctctaaagatccaacaagttcagcatatgctaatttgatcactattttcggctgc

SEQ ID NO: 17704 - DNA, 242 bp, Glycine max
  Clone ID: 700876268H1
ggaaagcatggaaagcctgccatgaggaggaggggagtgagggaaatttctctgccaggagtgaggatggtgaatacaattatccctttgactcggattcgctcgacgaattcgaggagggtgatcagatgagatgaaggaggattccagtgtgaggaagtcgtttagttatgggaaactggcatatgccaatgctggaggggcgtcttactctagcgtgacggtgaatgatgacggtgagg

SEQ ID NO: 17705 - DNA, 249 bp, Glycine max
  Clone ID: 700876269H1
ctggtgaatatggtttcgttgcccagcttaacgagggtcgtcacctcaagaagaggccaactgagttccgagttgataatgtgccttcaaccctttgatgaaaacaaattcaactttaccaaagtcggcaagaagaggtcctcttccaatttgaagctagcgaggatggacaagtccagttctttccaaatgctccagttgatgttgacaattctcccagctttgttgccatcaatgtcagtcctattg

SEQ ID NO: 17706 - DNA, 248 bp, Glycine max
  Clone ID: 700876270H1
caagttcttacgagacatcctaaatgtttataaaagattttttattttttctccaattataagtgcttgtttttcctctcttttcagtatttgttttctttgaattcagcgtcattacatttgctccacccttactactggggtactttttcttattgtgaatgtaaaaagttctttatggcagcgcaattttccttcaatttaatcaacagttacagcataacaacaatggagtctttagccagtgt

SEQ ID NO: 17707 - DNA, 247 bp, Glycine max
  Clone ID: 700876271H1
tcttgacaaagttgcaattaatgaaatctttgaggttgcctctaatcagagtaaaagtggtgcactcgtgttgttcattaaagatatagggaaggcaatgattggcaactacgaaattttaaaaagaaatttgaaagcttgccaccaaatgttgtggtagttggttctcacacccagttggataatcaaaaggagaaggctcaacctggcagtcttctgtttaccaagtttggaagcaatcagacag

SEQ ID NO: 17708 - DNA, 134 bp, Glycine max
  Clone ID: 700876272H1
gtgcgattgaagttattaaatttttcaggcaagaacacgaccgaaatttggatattgtactttgttggttaggataaatttctgtttagggtgcttttagtttctaatcaatttcacttccaaaacaatcttac

SEQ ID NO: 17709 - DNA, 244 bp, Glycine max
  Clone ID: 700876274H1
gttgtggaatgcaatggggagatgctggttgttttgttatcagaattcttagaaattgcaactcttagggtgtggaaatatgatgaagctagtagagggtggcatcagattgcagcaatgcctgagcaaattctcatgagtggtatgggaagaaggcagatattaactgtgttggtgctggtaaccaaatcttcatatgcttgaactcccctgagctatgcacttatgttgtgtgtgatttgga

SEQ ID NO: 17710 - DNA, 244 bp, Glycine max
  Clone ID: 700876275H1
gattagattaaatagattatctatatatatagatagatatctatttgaattgcttcattcgcgaggagccgtatgaggtgaaaatctcatgtacggttctgtaataaagatggaattgagaaacaccatcaattataacccccaaagaaccagatttcgtaaacaacatagagggagaatgacgagaatatcctatcgagggaatcatatttgcttcggaagatatgctcttcaagcacttgag

SEQ ID NO: 17711 - DNA, 244 bp, Glycine max
  Clone ID: 700876276H1
gataaataagagagaataaggtgttgttttgttttgttgtgttgtgttgtgtggatgtgaaactgggaaaatggggagagcctttgtgtatgtgattcttggaggaggcgtggctgctggctatctgctcttgaattcgtcaagaaaggagtctctcatggtgaactctgtattatttccgatgaaccagttgctccttatgaaaggcctgcattgagcaaaggatttttgcttccagaagctg

SEQ ID NO: 17712 - DNA, 253 bp, Glycine max
  Clone ID: 700876234H1
gaagcaacaaggcatgatagcccgcttattgtcaaaattttgcagatgcagtgttaaacagacactccaacaggtccccgcccgcacattgtctatatcagctgatgaaacaaacacttcatatcagtcccaatacaaccatccctagctgaagttctggttttaaatcttcaaactaagaagtattcctttccagagtacatagagaccatgagtgaactaaaagttcttatcatgacaaattatggttttc

SEQ ID NO: 17713 - DNA, 231 bp, Glycine max
  Clone ID: 700876277H1
ggctcgaggtatgtcatgattcacaacagagcatctatggtaagtgacatgatatagaatgtatgtcatgacatacatgctatgacatacattctatatcatagcatgtatgcatgattcacaacagagaatctatggtaagtggtaacaatagttgatattctaaatcaccaagaacccaataagcatagattctctgttgtgaatcatgacatacacgctatgatatag

SEQ ID NO: 17714 - DNA, 248 bp, Glycine max
  Clone ID: 700876279H1
aacgtcccaccgattgaacatctcactcgacaaccactaaataacccggcaatacaacaaccatggtccggatcccccaattcctcaccgcggcactcgacatcaccggcgcctccgccgcgtccgagtcaaagacctcctcccctccaacttcgacgacatcgtcctcaactccggcaagcctcagctcgtcgagttcttcgcgccctggtgcggccactgcaagaccctcgcgcccatctacgagg

SEQ ID NO: 17715 - DNA, 245 bp, Glycine max
  Clone ID: 700876280H1
tatgaaaggcaatttttctggtgtcagctgttgaaaaattggggtgcttaatattctacaaggaaattttccatctggtaattatctggtatggccccgtgaccatagctgattattcaaatggggagcactttcttgtgcagagagaacaaaatctgttgatgcgattcctgaattagaccatctgtcaatattgacaaatggtgaaattgacggctttagtgttggacaactcttacttttta

SEQ ID NO: 17716 - DNA, 237 bp, Glycine max
  Clone ID: 700876192H1
ataagatgtaccagacatataaaggtctcaagcgcttcagcaagccaaaactttcccgaacaaatttcacgattaaccattatgctggagatgttacatatcaagcagattattttcttgataaaaacaaagatttgttgtagcagagcatcaagctcttttatgcgcttccaagtgtccatttgttgctaatgtcttccctcctttaccagaggagacatcaaagcaatcaaaatt

SEQ ID NO: 17717 - DNA, 238 bp, Glycine max
  unsure at all n locations
  Clone ID: 700876193H1
tggaacctattgattctcctgaaactccaactgacatgagatgtgttccatccagtgattccttttattctgntgcttcttcattccaattgatgtctaagttgtgttganggagctctggatgagaagtatcctggtacaaagatcgccacaagttggccctggcaagggaatatcaacttaaagattaggctgataaagcaagagtgctgaggtttggtgacaattctggtttgaa

SEQ ID NO: 17718 - DNA, 238 bp, Glycine max
  Clone ID: 700876195H1
tccaaatgaaatgagtgtataaagattttgttgcttacattaattaatgctgagagggtgagaggaaatacagaagcagatactggagccggcgataaaaggaacagttaatgtgttgaaggcggcgaaggaagcggggtggagcgcgtggtggcgacttcgtcgatctcatccattatgccaagccctaactggccagctgataagattaaggcagaagagtgttggacagaccttg

SEQ ID NO: 17719 - DNA, 241 bp, Glycine max
  Clone ID: 700876196H1
cacctctctacttttctcaatcaacactgtttgtttgtgtcaaacaccataaaccattgtatcttttttctttgttctttgtctaggtcttggcactgaacattattttccatcaaaaataaaaatgcagagcagaaaacaacaattcaggaaaacaaaaaaactcagccacataatttccttcaactcatggcttgtactgagcatggccatggctctgtgttgttgggtttggtgttgt

SEQ ID NO: 17720 - DNA, 261 bp, Glycine max
  Clone ID: 700876201H1
ttctctctgtgttccacccctccgatgaggtcatcaactcggttgtcatagcacgtaaattatatcactctcttgagcaaggccttgttggctctatgatcctacctaacaagtgttccgagattcaagccttcaacccctcaaccatggcaacatgattgaggaattggccgttgaggagcaactcttgtgaattattgcttcttttttttttttatctatctctactccgtctcatgctttagatgggagattattatt

SEQ ID NO: 17721 - DNA, 258 bp, Glycine max
  Clone ID: 700876202H1
ctgtctcctacgattcgttttgccccttttgttgccctaatttcaaccatgcctcgccgtagctccggtggaagatctgcccgtcctgctcctcgggcagctcctcgtcctgctccagttcaccatgctcctcctccacccctgctcagagtggtggtggatctatgcttggtggcattggttcaaccatagctcaaggtatggcttttggcaccggaagtgcagtggcccgcggagctgtggatgcagtcatgggtc

SEQ ID NO: 17722 - DNA, 259 bp, Glycine max
  unsure at all n locations
  Clone ID: 700876203H1
ggtttctccanaggtccctagtggcagctacaatattgcccatgtcacctatgagttgaatgtccttggtactagggggccacgaaggatgaattgcacaatgtactcaattcctgcatcatccatggagcctaatgcattgtcccgggccagccagagctccttccccgtgcccttgaggattctttccggagtacatccttctcaaaatcaattgacaattcaactgagtttagcagctctagattctccgacatca

SEQ ID NO: 17723 - DNA, 130 bp, Glycine max
  Clone ID: 700876204H1
tttcaactgtgggttctcttccgcacccaactagtacacggttaattgcttatgaagagcctaaagaagcaacaaccaatttgaagcagcgagcataccttggagaagaggggttggtagagtttttaaa

SEQ ID NO: 17724 - DNA, 257 bp, Glycine max
  Clone ID: 700876205H1
atcgagataactagaaacagtgtgatgaaaatgaaggtccttgttttcttcgttgatacaatttaggtagcatggcaatgccatgcgtacgatatgttccctctccgaatgaacactggctatggtgcccgtactccgaggtgaaatgcgcaagttggaggcttgctgtggaagcacacaacatctttggctttgagaccattcctgaagagtgcgttgaagcaacaaaggaatacatccatggcgaacaatataga

SEQ ID NO: 17725 - DNA, 256 bp, Glycine max
  Clone ID: 700876206H1
aagatgagtagcgtgttggagcatggtgttgtgggatgttgcaaatcagggccaggctatgctaccccactggaagccatgtctggtccaagagagtctcttatttatgtaactgctgtctacacagggacaggaatgagaagccggactatttggccacagtggacatagatccaaactctccaacttattccaaagtcatccataggcttcgtgttccttatttaggtgacgaattgcatcacactggttggaa

SEQ ID NO: 17726 - DNA, 257 bp, Glycine max
  Clone ID: 700876207H1
ggagaacctattcccactaacaagaggcacgctgctgccaaggttttcagccatcctgatgttgttgctgaagtaaaatggtacggtattgaacaagaatacaccttgttgcagaaagatatccaatggcctcttggtggcctgttggtggtttccctggacctcagggtccatactactgtggtgttggcgctgacaaggcttttggccgtgacattgttgacgcacactacaaagcctgtatttatgctggcatc

SEQ ID NO: 17727 - DNA, 257 bp, Glycine max
  Clone ID: 700876208H1
caggaatgtgttcccaggacttattgtgttttaaatctacaaaatccttttgtgttgaataggtggatggggaaactgactttcccccagggcacttcccgaagtgttaagagaatgcctctttctatagggggagggctggtgcaaagaatgctattctcatgaatatgccaaatgctgttctttcaatgtggagatattttgttggagatctcgtctttgaagtttctaagatgacttctccctacattaaatgt

SEQ ID NO: 17728 - DNA, 256 bp, Glycine max
  Clone ID: 700876209H1
cttgtagcactgctacaacaaagtgaagcacagagagaggaacttgtaagggagcaaaaaataaaggaacaagctgatgccatcagattgaatacaccggcattgcaggaaaactctcgatccttgaaacaccttgggatgaaatgagtggtccattatctccaatgtcacttcctgcaccaaagcaactcaaattcactcctggagttgttaattggtcaggcagggagtcagctacatttttagatgaagcacg

SEQ ID NO: 17729 - DNA, 256 bp, Glycine max
  Clone ID: 700876211H1
ctctcagattctttgttttgaggttctcttctttatacggatggcagcaccattggcatgtcttgttgggagtggtttatctatacagagtaataaattaactcttggcaaggacgtcaatggaagatatctctttcatatcataggctttcagcacagagtaaggagtcaaagacaatatgcataaaggcatccttggatcaaaggaagcatgaagggagaagaggatttctgaaattgttgaatgtgggagttg

SEQ ID NO: 17730 - DNA, 256 bp, Glycine max
  Clone ID: 700876212H1
attcacgaaaaaacaaatcaatattcgaaaaaaaaaaagattattaattttaagatatgagaaaggctccattgtcgaattcagacctaaccattaatcgagaagtgatgggaacgacgaaacctgcaaatacttagattttattaaaaacaaatcttaatgattcattaggtgggatggcggaagaaaccaaaaagcaatcctttttttaggagttgtgccctacattacatctgaatttgattgataataaaag

SEQ ID NO: 17731 - DNA, 259 bp, Glycine max
  Clone ID: 700876215H1
ctatcctatcgtagcaaagaaagaaagatagaaaaccctagcttaccttttcaactttcaagatgcaaatcttcgttaagacactcactggtaagacaatcacccttgaggtggagagttcagataccatagataattaaagtccaagattcaagacaaggaagggatcccaccagaccagcaacgtctcattttagctggcaagcagcttgaggatggacgtacacttgctgattacaacatccagaaggagtccact

SEQ ID NO: 17732 - DNA, 258 bp, Glycine max
  Clone ID: 700876216H1
atgggttcatatgaccagctcatccagcaatatcaacagcaccaaaatcagtcccagttccgccttcaaatgtcagctgtaaatcagtcttttagggatcagggcatgaagtctattcaaactgcacaaccagcaccaatccatttggtttgcttggcctgttaagtgtgatcaggatgagtgatcctgacctgacatctcttgctcttggaattgatcttactacactggggttaaatttgaattcatcagaaaatc

SEQ ID NO: 17733 - DNA, 257 bp, Glycine max
  Clone ID: 700876218H1
ctcgagccgctcgagccgttcgaatctgattttcatcccttaacaccaacgccaacgccaattccatacagatcacagtcccttcgattcctgctgcaacatactttcaaagccctaaaatggaggggactgtctcactcctgcactgcaagaaattgagcatgtaaagtctgatcaaggagaaattctgagcaagcctttcttggatgcgtgcaaacacatattgcctgtaatagataagtttggagctgctatgg

SEQ ID NO: 17734 - DNA, 255 bp, Glycine max
  Clone ID: 700876220H1
cttagtcaaacaaagtaacaaaccatcctcccctctcttctcttcttttgttctctagatttcttctctcttgtttcttagaatccgtacaatctaatcaacataacaaaaatggatgcaattagttgcatggagagagcaccaccactgagtcactctctataagtctttctccgacgtcatcgtcggagaaagcgaagcttcttcgatgattacatcgtcggagaaggtttctctgtccccgccgccgtcaaa

SEQ ID NO: 17735 - DNA, 74 bp, Glycine max
  Clone ID: 700876221H1
aaagagggaaaggtaacaaccgtagatccaggagtttctcaaggtcccgtctcgctgttgaaggcacttagcca

SEQ ID NO: 17736 - DNA, 149 bp, Glycine max
  Clone ID: 700876222H1
ctcgaaccttccacacatggaacgaaacaatggcggcaagtacaagctcggccgcaagatcggaagtggaaaaatcggcgaaatatacctcgcgacgcatattaataccttcgagatcgtcgccgtcaagatcggaatagtaaaacaaa

SEQ ID NO: 17737 - DNA, 247 bp, Glycine max
  Clone ID: 700876224H1
aataatgctaaaaatatctgttgctgcttttgtccttctatataattttcttaagagaaaagttaaaagacaactatacccttttgttgctgattcatctttgatataacaccgctattctatcataaaattacctccaaacttgtccaaaacaaggtcaagtcacagaaacacataaacatgaagacaccaatattttctttttctcttttcttttcctgcttataactgccttttgttttggttt

SEQ ID NO: 17738 - DNA, 250 bp, Glycine max
  Clone ID: 700876226H1
caaccctatcatgatgagtgctggagagttggaaagtggaaatgcaggagagccagcaaaactgatcagacagagataccgtgaagccgcagacatgatcaagaagggaaagatgtgtgctctcttcatcaagatcttgatgcaggagctggtcgtcttggtggaactacacaatacactgtcaacaaccagatggtgaatgccaccctcatgaacattgctgataaccccaccaatgtgcagcttcctg

SEQ ID NO: 17739 - DNA, 253 bp, Glycine max
  Clone ID: 700876227H1
gaacccaacacaacaacacaacacaggataaataaattaaattaaaaactagctaaattcctctctctctctctttctcttcgagggtttgggtttctcttcctcccttggagaaaaagaagagccaccgctggacgccgttcgtgcatttttgaggtgccgctgtcatgtttgggcgtggtggaccaaggaggagtgataactccaaatattatgatattctcgggatttccaaaaatgccagtgaagatga

SEQ ID NO: 17740 - DNA, 252 bp, Glycine max
  unsure at all n locations
  Clone ID: 700876230H1
cacttactagtccaacagcgacggctgagcctctttgttctctctgtctaagaagaagaagaagaagaagaagaagaagaagaatcaaatatccttgagccagacatgtacaggaacgctgcttcacgtcttaggtcatcagtgcccgttcgtgcagcagcagcaggatacctgccagtgccagatttgcaagttccgttgccacacaacaaactacgaanagtttgggtggtttatttggatggctcactg

SEQ ID NO: 17741 - DNA, 237 bp, Glycine max
  Clone ID: 700876190H1
cttactcgaatcgaatcaacacggacaacacgcgacttatcgtcgcttccgtttgaaggagattcgacacactcgaggaatcaccggaaacgatagcattgtttatctcactcaaccgagaatcctgcagcaaagaaagtatagataggacaccaggtgcattctcgggtatcactctcaatcgctcaatagccagctcgaactaagcactggtcagtatgcagacgatcaaatgtg

SEQ ID NO: 17742 - DNA, 254 bp, Glycine max
  Clone ID: 700876232H1
aaggagagaagatcgagccctgaaaagtgatcgtgcatgattccttcccctccaaaacctctcctcttcacaccgctgataaatcaactggtggaaactcaattaacacctctgcgttcgagaaacggattatcaggtcgaacaatcggtcaatatctttcttacggattccgtgataaagatacttgatactctgtaccatgatagacactatgcaaggttttttgtgcttgaaactattgcgagggttcctt

SEQ ID NO: 17743 - DNA, 242 bp, Glycine max
  Clone ID: 700876150H1
ggccaaaactacaaaggtttatccaatgtcaaaaactacttccaccatctcggctacatccccaatgcaccacacttcgtcgacatccacgatcccaccctcgtatctgccatcaaaacctaccaaaagaattacaacctaacgtcaccggcaagttcgacatcaacactcttaaacagttcatgacaccccggtgtggcgtccccgacataataatcaacacaaacaaaaccacatcgttt

SEQ ID NO: 17744 - DNA, 241 bp, Glycine max
  Clone ID: 700876152H1
gtgcgagacatggcgatggcaatggcgcttcgcaggctttcatcttcaattgacaagcctctgcgccctctcttcaatgccggttccctctactacaagtcgtctttgcctgatgaagctgtttacgacaaggagcgaccggagttacatggccgaagcagttgaatgctccacttgaggtcgtggatcctgagattgctgatattattgagcttgagaaagctaggcaatggaaggggct

SEQ ID NO: 17745 - DNA, 239 bp, Glycine max
  Clone ID: 700876153H1
cagatagaccctcttttttttttactttccattctccttcttttcttcctcaaatggctgcacctcgctgcctaacgtgaaattagtctcattttccatctgggtcttgtctcttgcgattggaaccgcgttttctcgctctgggcttggcttagaagtagtcagaatgatgtctgtcacaggcaaaggcattgattttgctggcaaaaacttggtctctggctgctcttcaaatgctt

SEQ ID NO: 17746 - DNA, 242 bp, Glycine max
  Clone ID: 700876154H1
attttattaaaacggatggctttttgtatctacttattccgtggcactattgctctgttgtttgcgattatgaaccgcagaaaatgtcttgcctttttttgtttgctcacttaagatattattggattttattagataaacatgtttgtttttatctgttattttaagattgtacgaggctgcttgatttaattaatgtatcccatgatttccatctcataaaccctactcaaattgattgc

SEQ ID NO: 17747 - DNA, 145 bp, Glycine max
  Clone ID: 700876155H1
gtgcgattgaagttattaaatttttcaggcaagaacacgagggaaatttggatattgtactttgttggttaggataaatttctgtttagggtgcttttagtttctaatcaatttcacttccaaaacaaatcttacacgtattcca

SEQ ID NO: 17748 - DNA, 243 bp, Glycine max
  Clone ID: 700876157H1
tttttctccttgaactcgaatattcactatggcagatgaggtggttctgctagatttctggccaagtccatttgggatgagggtcaggattgcacttgctgaaaagggtatcaaatatgagtccaaagaagaggacttgcaaacaagagccctttgctcctcaaaatgaacccggttcacaagaaaatcccggttctcatccacaatggcaaacccatttgtgaatctctcgttgctgttcag

SEQ ID NO: 17749 - DNA, 243 bp, Glycine max
  Clone ID: 700876158H1
gttcaatacccttccaagatgcttttagcctcgggcaaagtttctggttcatttgaaatatggctatgtgacatatcttctggggaatttgataagcttggctcatataatgcacatgatttggttgtaagttttttttcctctttttatttttatttttttgggtgatagttggaaaaaaaggccatattcctatgctgatttctgcatttttttaaatttctcaaggttacaggtttgacc

SEQ ID NO: 17750 - DNA, 242 bp, Glycine max
  Clone ID: 700876159H1
gtttggtcctcatcagtgtgctgcaaccgaagagaacttggcctctcgagcttctaatgaagcagcactcaagatgggtgactatcgtgacattttgagccttacaagagttctcatacgtggtccccaaagcaaagcagagctgatattgtcattgaaagatgtgcaggtgcagggcatctacgagatgatattctttattatcataaagaatttgagaagtttacagatggtgatgacga

SEQ ID NO: 17751 - DNA, 242 bp, Glycine max
  Clone ID: 700876162H1
aatttgaaaggtcgaaacttgagcatctgggatcgcgaaattggggtttttggttaaaagggtattatcttcggaactgattgatggcaaacctgtacgtgaaggcggtgccaccggcggatctgaacaggaacacggagtgttcacgtaccctggcgtttggaccacatacatcctcatccttttcttttcttggatcctcgtactctccgtcttcggttgttcccctggcatcgcttgga

SEQ ID NO: 17752 - DNA, 241 bp, Glycine max
  Clone ID: 700876165H1
gtgggcttgaacacgctagccccctggctactggaggaatattttcaaatggaggtgccgatgtgaacggatgggcatcacgatttcaatcagaaagacccagcttgttacagtcctcatcaacacaaaactggctgcgccacaaggtagctcatccggtattattgttaaaaagacggtcagagtagatattcctgtggacgcatatcctaattttaactttgttggtcgcctcctaggc

SEQ ID NO: 17753 - DNA, 238 bp, Glycine max
  Clone ID: 700876166H1
cagtcaaaaggagaaaaaaatgtggagattggtggaacatggagacagtctataaaagctgcatatgaagccacttattctgcatttcctggtggtgaaattcttgcacatctagaccacaagaagaaggcatgttatggcatatgttgaaagttaagaaaactaagtatgattttagctgtgccaaggagtttcaagggctggcagaagaatgccataacaggattccttgcggaca

SEQ ID NO: 17754 - DNA, 237 bp, Glycine max
  Clone ID: 700876168H1
cttcaagaacaagctggacatctcattgggtgttgcattaggttcagcaactcagattgccatgtttgtggtcccattatgtgtaatcgttgcttggataatggctatcaatatggacatgaacttcaacctcttaggacaggttcccttgctttggcaataatagtcacaggcttcactttacaggatggaacttctcactacatgaaaggccttgttctcctgctgtgctacatt

SEQ ID NO: 17755 - DNA, 131 bp, Glycine max
  Clone ID: 700876170H1
tggaaattgacaatagtttgatgcattgcggtcctgatacgccctgaagcgaaggatacttaatacgacatccacgagttacttcatcaagcaccagtagcctcaaccatttcttgttccacggtgcttgg

SEQ ID NO: 17756 - DNA, 240 bp, Glycine max
  Clone ID: 700876172H1
cgcatatccaatttttgcacagcagggttatgaaaatccccgagaagcaaccggtcgtattgtctgtgccaattgccatttagctaataagcccgtggatattgaggttccacaagcggtacttcctgatactgtatttaagcagttgttcgaattccttatgatatgcaagtgaaacaagttcttgctaatggtaaaaagggagctttgaatgtgggggctgttcttattttaccggaa

SEQ ID NO: 17757 - DNA, 241 bp, Glycine max
  Clone ID: 700876173H1
cagtcaaaaggagaaaaaaatgtggagattggtggaacatggagacagtctataaaagctgcatatgaagccacttattctgcatttcctggtggtgaaattcttgcacatctagaccacaagaagaaggcatgttatggcatatgttgaaagttaagaaaactaagtatgattttagctgtgccaaggagtttcaagggctggcagaagaatgccataacaggattccttgcggagcaaa

SEQ ID NO: 17758 - DNA, 240 bp, Glycine max
  Clone ID: 700876175H1
actcactatgctgtcatgagctcctacgagtaccttagcactggacttcgccagtacttggacaacaacatggatggattttacattgctccagcttttatggacaaacttgttgttcacattaccaagaacttcatgccctgcccaacatcaaggttcctctcattcttggtatctggggaggcaagggacaaggaaaatctttccaatgtgagcttgtctttgccaagatgggaatca

SEQ ID NO: 17759 - DNA, 239 bp, Glycine max
  Clone ID: 700876176H1
ccaaaagtgatttattggatcaggagttcatgctgaaaggaaaatggtatcaacggaaggatgtagagataaaaaacagtcggggtgatgttcttcaatgcagccattacttgcctatagtcagccctgaaggaaagctctgccgtgtgtaatatattgtcatggaaatagcggatgtagggctgatgctagtgaagctgctataattttacttccctcaaacattacagtttttactc

SEQ ID NO: 17760 - DNA, 238 bp, Glycine max
  Clone ID: 700876177H1
tcttgttttggatggagtcattcagctcacagaaagggatgagtgtgcctaccaagagatgatcactcatcttcctctttgctctatttcaaaccccaaaaaggttttggttattggtggaggagatggtggagtcctcgggaagtagctcgtcatgcctcagtagagaagatagacatttgtgaaatagacaagatggttgtcgatgtctctaaacaatttttccctgatatagcag

SEQ ID NO: 17761 - DNA, 241 bp, Glycine max
  Clone ID: 700876178H1
gctgaagttatgcaaggaaagcctgaattcactgaccatttgactcataaactaaagcaccaccctggtcagattgaagctgctgctattatggaacacattttggaaggaagctcttacgtgaaagctgctaagaagtgcatgagattgatcctttacaaaagcctaaacaggaccgttatgctcttaggacttcaccacaatggcttggtcctctaattgaagtgattagattctctac

SEQ ID NO: 17762 - DNA, 242 bp, Glycine max
  Clone ID: 700876179H1
gtcttgcaattgaagttgaagtcttgcccttctctcttcaactccaaacacaagacatcatcatccatggctgcctccgtctccactgtcggagctgtcaacagagctcttttgaacctgaatgggtctggacctggggttcagctcccagttcatccttctttgggagcagcttgaagaaggttattggctcaagggtccccaacacaaagatttcctctggaagcttcaagattgttgct

SEQ ID NO: 17763 - DNA, 105 bp, Glycine max
  Clone ID: 700876180H1
ctattcataaaattaaggaaaatgttttatcaacacccattaacctgtttaacatcgagaaaaaaaaacaaaggagaaaaaaaagaaaaaagagaaggagaaagg

SEQ ID NO: 17764 - DNA, 234 bp, Glycine max
  Clone ID: 700876182H1
ttcttatggtggactaggaggaggaatgtatggatcatcttatggtggggggatgtatggtaacagtatgtacaggggatgatatggtggcatgtatgggtcatccgggatgtacgggggtggaatgtataacgtggcttagggggtccaatgggtggttatggcatgggtggtggtccttatggagaacaagaccccaacaatccgtatggtgcccctccatccccacctgga

SEQ ID NO: 17765 - DNA, 235 bp, Glycine max
  Clone ID: 700876183H1
caaaaacatctcagtgtaagtatgctagtaactgccaaggtttgctgaatctgtattcgctcaatttaaagaggcaacaggtgacttcatctcatattagacgacagaaacaatggcaatgcagggttgttatttcactatacgaagttggcaactcaaagaagaacactggaaaatctcagtttttcaggctcaatttcggttaacaaattgtcaaagaatgaaaggaccagaa

SEQ ID NO: 17766 - DNA, 235 bp, Glycine max
  Clone ID: 700876184H1
aaaacaaccaacaacgctttcgtacaataaccttttacattaactacaatggacgttgaacaacaatcacgttataacacaagatgtcatgataatgacaatcaacaaagtgccaagaacagatctcaacaatcagcaacaagggtagataccagtcaagaactagaaccccaagtgaagacagagatagtgatgactacaaccaaagaggtgaacctaaagtcaatgatggtag

SEQ ID NO: 17767 - DNA, 236 bp, Glycine max
  Clone ID: 700876185H1
gccaattgctgctgctagtctcggtcaggttcatcgtgctattctgcataatggagcaaaagtagtcatcaaagttcaaaggcctggtctgaagaagctgttcgacattggtttgaaaaacttaaagttgattgcgagtattttcagagaagtgaaacttttggtggtccacttagagattggattggaatatatgaagaatgtgaaactattttgtatcaagagattgattatat

SEQ ID NO: 17768 - DNA, 236 bp, Glycine max
  Clone ID: 700876187H1
caactcctccataaccaattccatcttcaaatattccaattccaattccaattctattcctttcgattcctcttcctcttccccccacggttaggaaattttgttgctggaagaattgcttaagggcatatagctgttttgtgcacatgggatcagagagtgtggctccaatggttgagacctcgaaaaacaggttcttcatctggattcagttcttgtaaacttgatttgcttca

SEQ ID NO: 17769 - DNA, 242 bp, Glycine max
  Clone ID: 700876149H1
ggcggctctcagaaaagccgtgttctttgtaatcgctcaatgcttcaccttttccgcatatgctgcaaggtttgaaatcacaaaccgatgcacatacactgtctgggctgcgtctgtgcctgttggcggtggcgtgcaattaacccgggccagtcatggtccgtggacgtgcctgcaggaacgaaaggggcccgcgtttggtcccgaaccggctgcaacttcgacggttcgggccgcggtgg

SEQ ID NO: 17770 - DNA, 220 bp, Glycine max
  Clone ID: 700876189H1
ggctcgagctccgttggctgcgcacgaggtgggcttccaggattttcgatttgattttgtaaaggggttttcaccaaaatatgtgaaagaatatattgaaggagcaaagccattgttttggttggggagtactgggattcttgcaactacaagggttctaccttggactataaccaagatagccatagacagcgaataatcaattggattgatggcactg

SEQ ID NO: 17771 - DNA, 252 bp, Glycine max
  Clone ID: 700876115H1
ctaagggataggctcaaggccattgaaggaggccaagattatgcctttgctatcctagaagagttgttcctagtacctaatatcatcacccctcccaagttcaaggtgccggactttgacaagtacaaggggactacttgccctaagaacatctaaagatgtgttgccggaagatgggggcatatgcaaaagatgagaaattgctgatacatttttccaagaaagtcttactgggacaactgtcacctggta

SEQ ID NO: 17772 - DNA, 252 bp, Glycine max
  Clone ID: 700876116H1
tgcagccatggccacccacgcggctctagcttctacaaggatccccactaacaccaagttcccatccaaggcttcacactctttcccaacccaatgcgcctcaaagagacttgaggtgacagaattctctgggctaagatccacttcatgttgacatatgctaacgatgctagagaatcttccttttttgatcttgtagcttcccaactcactcccaagaccaatggatcatcaactcctgtgaggggagag

SEQ ID NO: 17773 - DNA, 249 bp, Glycine max
  Clone ID: 700876117H1
cagcatcaattcttcttaaaccccacttagaagaatcgatcgatcgagttcaaatatctttcttagaccattcagcaaattacactagtaattagctagctagcagtatggcaccaccccatggagagtctttgcctagctcattcctaagaacaacaacgttaacatgtcgaaacctccaaggctctcatctgatcatcacattcaaagaacaatctcagacatctcgtttgagctaaccaaggaagg

SEQ ID NO: 17774 - DNA, 246 bp, Glycine max
  Clone ID: 700876118H1
gatcaaagggtgccagacaaatttcagtcacttgaatctataggaaatgtgagtgtggattcaacggtgtctttgcctgcaagggtggtggtaagaaagccttttacaagatttgtgtgatttattctgttctattcttttcttctttttttttaaccattttattttgtccatgttggtggtgctatcagttacattatgattatgatttgagtgtattggtgatagtttgataacaggtatacc

SEQ ID NO: 17775 - DNA, 246 bp, Glycine max
  Clone ID: 700876119H1
ccttgttttcgttctgctatggcacccgatgccgccgccgccgccgccgccaacggcaaaaagagaagacgctatcttcctcacaataaggcagtcaagaagaagggttcgtaccctctgcggcctggcgtgcaaggctttttcacacttgcgatggcggcagagaacaccaagcctctcgtgaagctctcaatattctcgattccttttatgaagagctagttgatggggaaaaggagttaccca

SEQ ID NO: 17776 - DNA, 249 bp, Glycine max
  Clone ID: 700876120H1
ggctccaagttggcaggggctcaaagctttagggaatcgattactatactagtaataaattgtacggtccatagaacgtataaataatatacctataaaacaggacaaacacaaattctatgtgattagtcgcggtatttaaaataataatggcagtagacaaataaacaatgagaggagatgtttgaataaccataattccccctcaagttcttatgttttgacctgactggactctatgaatgtttt

SEQ ID NO: 17777 - DNA, 247 bp, Glycine max
  Clone ID: 700876121H1
ctctaacagccaaagcctggcttctctctcttgctccgccaacgaccttgccccactcttcaacgacaccgccgccgccaactacctctgcgcccaattcgattccatttctagaaagctcgccgaaacaacctacgccgtcgacacacctaccttctgttttcagcgtatcttgtcttcgccatgcagctcggcttcgccatgctctgcgccggctccgtcagagccaaaaacaccatgaacatca

SEQ ID NO: 17778 - DNA, 246 bp, Glycine max
  Clone ID: 700876122H1
cggctcgaggtcgtctgttgctgcgctgtgcttttccccattgtctggtccatcaagaacctccgtgaggccgctaggaccgacggcaaggccgctgttaatttgatgaagcttactctcttcaggcactactatgtcgtcgttactgttacatttacttcaccagggttgtcgtttatgccttggagactattacctcctatcgttattcttggaccagtgtggttgctgctgagttggccaccc

SEQ ID NO: 17779 - DNA, 247 bp, Glycine max
  Clone ID: 700876123H1
gcttgtagcagttgaaaatccaggttctgataatttaaaatcaatggtgatacctccaccaacagtcagagatcgtgtgctgaaagaactgtttattgaggggttccaagtaacataattgagaagctaatcaatatccaacgcagtttctttggggaggtgggctggaacaaaaaaggatagcgtgggtcaattgggagacaatatgtctcccaaaagctttaggcaggttaggcataaaagatct

SEQ ID NO: 17780 - DNA, 249 bp, Glycine max
  Clone ID: 700876124H1
attttcttgccacctcactcccttcagtttcagctcatggcccatatgcatgggatggggaggccacatataaattcactacttaccaccctggccaaaactacaaaggtttatccaatgtcaaaaactacttccaccatctcggcacatccccaatgcaccacacttcgacgacaacttcgataccaccctcgtatctgccatcaaaacctaccaaaagaattacaacctcaacgtcaccggcaattt

SEQ ID NO: 17781 - DNA, 248 bp, Glycine max
  Clone ID: 700876125H1
gttgaatatttacatcaagactatggttgaagatgatgacaaggaagtggttgctcaagcatgcactagtgtggctgacatcattagagattttggttatgcaactcttgagccgtacttgtcccagcttgttgatgcaacttcatgttgcttcaggagaaatcttcttgtcagcagatagagtcagacagtgaaattgatgatgttgatagtgcacacgatgaagtgcttatggatgcagtttcaga

SEQ ID NO: 17782 - DNA, 247 bp, Glycine max
  Clone ID: 700876126H1
gagaaaggcacaaaaagcttgctcaatattgtgattaagaatcagaaggcttgctcaatagtatgatttaagaaccagagattaataggaggtattgactgtctggccaacctttaatgctgcctctccattggtttttcttgtttggtcgctatcctttgtagcgagggcaggaagctgtgtatagtttggactgacatcttaggccttatgatcaatcacatgattactgcctttgtctcatttc

SEQ ID NO: 17783 - DNA, 247 bp, Glycine max
  Clone ID: 700876129H1
atctttaaagccatggcggttgtgggagacgaaaaggagcaggaggagcttattcctggcttaccctacgaaattgcagagctgtgtcttcttcacgttccgtacccttaccaagctttgtcgcgctctgtttcgtcgacgtggacagagcaataacgcacccttcttttattttctccaagaagaccctctcccgtcctcacctcttcgttctcgcgtttcattcacaaactgggaaaatccagtg

SEQ ID NO: 17784 - DNA, 65 bp, Glycine max
  Clone ID: 700876130H1
ttgtgtcaatagtatgagtcagtgtatacacaactaatggttaatggatgcaaatgtttttgttg

SEQ ID NO: 17785 - DNA, 92 bp, Glycine max
  Clone ID: 700876133H1
cagagttttgatgtacctaatagacaaagcaacttggtagcatttaatgtttcaatcatgtcaattctttgttataaccttttcccacacaa

SEQ ID NO: 17786 - DNA, 244 bp, Glycine max
  Clone ID: 700876134H1
cgaaaactagaggccagggtctgtagtgtgcgggtgggtttgtttatctcaaacacagaacagaggtgtagagaagaaagctctcaaaagtatggcggcggagtcatcactgagggtggcgactcccactatttgcaacctcatggttctcagagaagaccaaccactctctctccgcttcgcttcatgggttttagccctcgaccctctcactctctcacttcctcttccctttcacacttct

SEQ ID NO: 17787 - DNA, 244 bp, Glycine max
  Clone ID: 700876135H1
gaaacgaaccctaagagagagagagagagagagagacagagagtctttgctttgatttcaagctcctttaccattgcatttcgggatctcgaatcttcaatctgcaaaggtattgttgattctgcttctatggcaaattcaagggctcatcaggtttcagaaattttatgtatcctggaaagcatcctctacttcctcctaaaagtccgtttcctagtgtttcccaagcatatgctgattatgt

SEQ ID NO: 17788 - DNA, 243 bp, Glycine max
  unsure at all n locations
  Clone ID: 700876136H1
acactgaggtgagggatcaaacactaagtcggataaaaagcaacatagaacttatggttgctactaatggtggaaataaggcagttattattccacattccatgggaggggtgtacttcctacattttatgaaatgggttgagcaccagctccaatgggtggtgggggaggaccagattggtgctccaaatatataagccnnctttgtaaacattggtggaccatttttaggtgttcccaagg

SEQ ID NO: 17789 - DNA, 242 bp, Glycine max
  Clone ID: 700876137H1
gtgcagtgacttgagaatggccttgccagtggtcgtcgacgcagagtacctcaaagaggtcgacaaggctcgccgcgatctccgcgcactcatcgctaacaggaactgcgctcctctcatgcttcgattggcctggcacgatccggaacttacgatgctaagaccaagactggtggacctaacggtttgatccgtaacgaggaagagtattctcacggcgccaacaatggcttgaagaaggc

SEQ ID NO: 17790 - DNA, 244 bp, Glycine max
  Clone ID: 700876138H1
atcggtctatggatcaacgggtacctcagcgaatgggtcgggtacaagaaaactatgtacattgccttgatcgcctcggttctgatcaacttcattcactttttcgcccagagcatcggtatgattgttgctggttccgtcttctaggtcttccctggggtatcttccagacgctcaccgtggcgtacgctagcgatattacccccagcacaattaggccatacttgactacatacatcaatct

SEQ ID NO: 17791 - DNA, 124 bp, Glycine max
  Clone ID: 700876139H1
caaattcatctcagcaggttacgatagttttgaaaaggagagaggttcaggggtttcgcaatgacagagctctcagtccacggtggccaaagggatgccgaacatctcgtccacaagcatgact

SEQ ID NO: 17792 - DNA, 243 bp, Glycine max
  Clone ID: 700876140H1
caaaagaatcaggggatcggcaccttgacacagttgagaggttgaagaagcgaagtgagcggttcaagctcccaatgcctagtgaaaaagaggccctcgtcatcaagaagttagaaagtgaacctctgccttctgccaaaagtgaaatccagtagtagattcagaagtcaaacaagaacgacctgcccggaaaagaagatgggttactaactgaataagaaatctgggggcatcattattttg

SEQ ID NO: 17793 - DNA, 245 bp, Glycine max
  Clone ID: 700876142H1
gaaattttcacaagaggaatttcttacagcttggtcaactcaggtgcgtcctacaacaactctgttggctgatggttgtccatatttgtatgctatggtgcatgatagttcagtgtctacaataccaggtgattttgtcattgtgttaagttgacaaccataaacaatatgtgtgcatatgggctcaatcctggtatttcaggttctcgtcttttgggcaccattcctcagtctatttcacagca

SEQ ID NO: 17794 - DNA, 245 bp, Glycine max
  Clone ID: 700876144H1
aaaagaatatgttggaaggagatgggcagattgggttggaattgagaagtttttcaaggagaaaaaatggcaattcagtataactggaacgtcagagagagcaatggtcattggcctgggtggcctcaatctgtttggagttatattcttggaaccatgttgaaagatacggctgttgcacccagtagcttcattaaatttgtagccgacatatttcctcttcttcagatttatgctggttcctt

SEQ ID NO: 17795 - DNA, 247 bp, Glycine max
  Clone ID: 700876147H1
attgaagttgaagtcttgcccttctctcttcaactccaaacacaagacatcatcatccatggctgcctccgtctccactgtcggagctgtcaacagagctcttttgaacctgaatgggtctggacctggggtttcagctcccagtcatccttctttgggagcagcttgaagaaggttattggctcaagggtccccaacacaaagatttcctctggaagcttcaagattgttgctgtagaagagaaga

SEQ ID NO: 17796 - DNA, 249 bp, Glycine max
  Clone ID: 700876148H1
tgcaattgaagttgaagtcttgcccttctctcttcaactccaaacacaagagctcatcatccatggctgcctccgtctccactgtcggagctgtcaacagagctcttttgaacctgaatgggtctggacctggggtttcagctcccgttcatccttctttgggagcagcttgaagaaggttattggctcaagggtccccaacacaaagatttcctctggaagcttcaagattgttgctgtagaagagaa

SEQ ID NO: 17797 - DNA, 251 bp, Glycine max
  Clone ID: 700876114H1
ctttgcctctgaaagaaatgggtagtcttgaagcggaaagaacaacagtaggattggcagcaagagacccttcagggattctctccccatacacctacaatctaagaaacacaggccctgatgatgtttacattaaagttcactactgtgaatttgccattctgatctccaccagattaaaaatgatcttggcatgtccaactatcccatggtcccaggacatgaagtggttggtgaggtactggaggtgg

SEQ ID NO: 17798 - DNA, 253 bp, Glycine max
  Clone ID: 700876074H1
ttcaagaataagtgtaatgtgggttatgcttttatcaatatggtgtctccttcacacatcatcgcctcttacaaggcctttaatgggaaaaagtgggagaagttcaacagtgaaaaggttgcttcactggcattgcacggatacaaggaaaggctgcgcttgtgatgcatttccagaattcaagcttaatgaatgaggacaaacggtgccggccaattctctttcattcagagggccaagatactggtgacca

SEQ ID NO: 17799 - DNA, 99 bp, Glycine max
  Clone ID: 700876076H1
cacggcggtggccggagaaggggggcccgctcccattttcgctctcttccctctctctctgctgctctcaaaaccgatacgacaccgctcgccattgaa

SEQ ID NO: 17800 - DNA, 92 bp, Glycine max
  Clone ID: 700876077H1
ctttctctctcatgttgtagtatctcactagtgtttttcattcgtttctgaaccacacaaacatcaccatcgaacaatgccgacggggttac

SEQ ID NO: 17801 - DNA, 251 bp, Glycine max
  Clone ID: 700876079H1
gattttgactttgggaaaaagaaatcattgccattccgtgaccagcatttctttgcatgaattgagaaagcagagagagtgcttgggtgggaacctgaatttgggcttgtagagggtcttgcagactcgtacacctggactttggtagaggaacataccggaaagaggctgatttctcaacagatgagataattcttggaaagagtcttgttagtgtataaacttttctatttcaattatcagtatttcac

SEQ ID NO: 17802 - DNA, 249 bp, Glycine max
  Clone ID: 700876080H1
gttttggtgcattcaaatggctgggattgtagtgacatttgactttgactcaacaatcattgagtgtgatagtgataattgggtgcttgatgagaccggtttaactgaaaagttctatcagcttcttcctacatggcttggctccctctaatggataagatgatgaatgaacttcattcacaagggaaaaccattcaagacattgtagaaattctgaataggacaccaatgcatcctaggactgtccct

SEQ ID NO: 17803 - DNA, 251 bp, Glycine max
  Clone ID: 700876081H1
gaagttaaaagccttagccttccctacaactccacacatcgagacatcttcatccatggctgcctccgtctccactgtcggagctgtcaacagatctcttttgaacctgaatgtttctggagctggagcttagctcccagttcagccttctttgggaccagcttgaagaaggttattgcctcaagggtccccaacagcaaggtttccggtggaagcttcaagattgttgctgtagaagagaagaaagagat

SEQ ID NO: 17804 - DNA, 250 bp, Glycine max
  Clone ID: 700876082H1
accggtgcggcaccgttgggaggggaactccaagaagccgttaaggctaggctaccacacgctacttttggacagggatatgggactacagaagcaggaccacttgccattagcatggcatttgcaaaagaccctcgaagattaaaccaggtgcatgcggaaccgttgtgagaaacgctgagatgaaaatcgtggatacagaaacgggtgattcacttccaagaaacaaatccggagaaatttgcataag

SEQ ID NO: 17805 - DNA, 240 bp, Glycine max
  Clone ID: 700876083H1
aaataactagcatagaaatgactagctattatcaatcccgaggcaatgtatagccctggaaggtttagggtgcttccatgcattttagctagcattttacatatatcacatattaaaggcatatatagtatgtcctacttatgtttgctagaatgttacgttgatcacatttaaggtattatttatttttacacttatagatctttacgattttgccctttaaaatatgtctcagtaaat

SEQ ID NO: 17806 - DNA, 252 bp, Glycine max
  Clone ID: 700876084H1
ctgtgtttaacagtgtaagctcgggatccggagccgactctttgtccttcactgtgaaggatgtccaacttgtgatgatgatgttatcacaaagtgcccccttcaggaaaatggtgtttggattgcctttctttaaagcttggcaatttctgctgcataattcttttccaagaatttaaaaagccttctaagttctttgaccttaaccatacttccatgtctgtgatgtggtcatgtaaactccccctctgc

SEQ ID NO: 17807 - DNA, 252 bp, Glycine max
  Clone ID: 700876086H1
atctggtgctccaataagtagttgtttttggggatggaaacctaaactcaatgtgcactatgagaaggccgggtgcgaaaacgtcaatgatttgcctcgtgttctctttttaccaggttttggtgttggctctttccattatgagaagcaacttaaggatttggggcgtgactacagagtgtgggctctggattttctaagccaaagggatgtctatgcctttttgaagatcctgcacctttggtctaatga

SEQ ID NO: 17808 - DNA, 252 bp, Glycine max
  Clone ID: 700876087H1
aaactcttgaggaatctaatgcaaacttggatgatgtggttgcccttgctcaagagctccagactaaggctaaactaagagtgttatggggaacagctcagttgttcatgcatcctcgttacatgcatggtctgctactagctctgaattaaaggtctatgccatatgctgctgctcaagtgaagaaagccatagaggtgacacattatgtggggggagaaaattatgttttctggggtggtcgtgaaggtt

SEQ ID NO: 17809 - DNA, 247 bp, Glycine max
  Clone ID: 700876088H1
gagccattaaatcttctctcaaaatatttgtgattccatgcccaacgccctaccctgaaaatatggtagccgagagagaggttaacggtaacggcgtcggagagggaagaacaacgctaatattcacctacgaaccctgaagcgaggcttctccaaccacccccttctccaagacctcattcgctccggcgacgcctccttcgtcggaacctaccgcaccgccgccaaatatcctctggtctgtggg

SEQ ID NO: 17810 - DNA, 249 bp, Glycine max
  Clone ID: 700876089H1
gtcttcctccgtcacctcgtggccacgtcggtcaaatttggtcgctctgctacacgctctatggcaacgtttgatcgtacgaaacctcatgtcaatgtaggtacgattggccatgtggatcatggtaaaacacgctcacagccgcgattaccaaggttctctcggagacaggtggggctgaattcacgagctatgcagatattgataaagctcctgaggaacgtgcgcgtggtattacaatttcgacgg

SEQ ID NO: 17811 - DNA, 245 bp, Glycine max
  Clone ID: 700876091H1
gtggaagttcaggaccttcccttctttgacactgtgaaggttaagacttctaatgcacatgcaattgctgatgctgctctcaagagtggaataaatttgcgagttgtagatggaaacactatcactgttcttttgatgaaacaaccacattagaggatgttgataatcttttcaaagtttttgctggtggaaagccggtccccttcactgctgcatctcttgcaccagaagttcagagtgcgatt

SEQ ID NO: 17812 - DNA, 249 bp, Glycine max
  Clone ID: 700876093H1
aattgatgcatgaaagttggaagagtgggctcgagttcaaagttcaacctctcttgttgagttttcattcaaagaaggagaagctgagaggattttaaaggacattgcagaaagggctggggggaaagggaattcagttatagtcgtttctttgcagttggactctttcgtctagttgagttggcaaatgccacggaaccaacaattttggacaagctttgtgcggctttgaacatcaacaaaagaagt

SEQ ID NO: 17813 - DNA, 249 bp, Glycine max
  Clone ID: 700876094H1
acccaagcctgatccacgtccagagcatcctcgccatctgggccacacaagttatcctaatgggtgccgttgaaggttaccgtattgctggtggccccctcggtgaggtcactgacccaatctacccagtggcagcttcgacccattgggccttgctgatgacccagaggcttttgctgagcttaaggtgaaggaactcaagaacggacgattggccatgttctctatgtttggcttctttgttcaggc

SEQ ID NO: 17814 - DNA, 249 bp, Glycine max
  Clone ID: 700876095H1
cagaaactgcatcaatgctgtcatcagctacttgtaattcattggtggctctggatgagcttgggcgagggactgcaacttctgatgggcaagccattgcggaatcagtattagaacatcttgtgcggaggtgcagtgtcgcggattgttttctacccactatcatcgattagctgttgattatctcaaagatccgaaggtctgtctctgccacatggcatgccaagttggtagtggaattgcaggttt

SEQ ID NO: 17815 - DNA, 228 bp, Glycine max
  Clone ID: 700876096H1
attctcctcaagcaaaacctagagctcccacactcttccactacatcagatattaaaagcgccttccttcatcaaggtactactgtttcatcttcgcctcaaagattggaacaatcacaggatacatgggtacctaactactgttcctgtgctcccttctaagcttaacaagccttcgctttctccgcgtcacaattctctttttccctactacggaagacgcgtcgg

SEQ ID NO: 17816 - DNA, 252 bp, Glycine max
  Clone ID: 700876101H1
aaggaaggtaaaggaagcaaacgcaagagcaagagcaagagcgaaagcggcagagaagatggaaggagaagagggttctcagcagccacagttggtgctcgcggacgagctattccttctccggcaacccgatgtgcaagacattgacaggttcgctacaaagaggatgtcttcactcatgtcaaggaaaacgatatggtccctctgtacgaaaccctagtcgctgattccgtgttggacttggatcgtgcc

SEQ ID NO: 17817 - DNA, 249 bp, Glycine max
  Clone ID: 700876102H1
cttctcctttgtttggccgacaaatctatccaaagggagagataccccattacccaccctattctctcaagataagagctttttccccccctttctgtctctattttccatgtattatgaggcgtcataaagggtcgtttatcgtgatgtgaagatcactttttgagcgtgttgctgtggattcgggttttcctatttgctatcgagaataagagaggaagaacaaacatgactggaagtaatgaagtc

SEQ ID NO: 17818 - DNA, 243 bp, Glycine max
  Clone ID: 700876103H1
tgcttccgcaaggaaagaattctacagtactcgccgataagataggagtacttccacacaccatgcgattttaaagacatctatttaatcactgtgaccaatttgaatagcagtgattgttggcaaagttttaaacaactcaacaagcttaatgcagaaactaaaaaaacattccaaacccgtaaaattagaacctattaggggttttccaaagcaggagcaatgtcttcctcttatcttcct

SEQ ID NO: 17819 - DNA, 247 bp, Glycine max
  Clone ID: 700876104H1
ctgttcttagcttctgcatgtgaagtgaattcttgcaatgcttccttttctccacgtgtgacccagatggtgttttgagtatttgtttggagattcattcagtattttgagagctttgtatgataaatatggatactttgctcaaacacccaacaagcttgagtttttgcacccacttcacggttactcggaaaaattgagcagttcaggttcctctagggtgcaaaatcagtattttgggtttggt

SEQ ID NO: 17820 - DNA, 248 bp, Glycine max
  Clone ID: 700876105H1
agccaagtgaaattgagaaaaaataaaaatcaaagagcataatgtcagggatcattcacaagattggggagacccttcatgtgggagggcacaagaaggaggaggagcataagggtgagcaccatgctggagaatacaaaggggagaccatggtgaacacagtagtgagtacaaaggagagcatcatggtgaacacaaagctggagagtaccatggtgagcacaagccagagcacaaagaggggttcc

SEQ ID NO: 17821 - DNA, 251 bp, Glycine max
  Clone ID: 700876107H1
ctctcattcaagacaggcctgtttttgctgcccctgcccccatcatcaccccaactgtgagagaggatatggcaaaggaatacgagaaagctattgaagaacttcagaaattgttgagggagaagagtgaactcaaagcgacagctgctaaaaagtggagcagataacagcttctctagggacatcatcatctgatggcatcccatcatcagaagcctcagacaggatcaaagctggtttcattcacttca

SEQ ID NO: 17822 - DNA, 248 bp, Glycine max
  Clone ID: 700876108H1
tccaattccaaattttcagtttcttcctcgcttttctgcaaaatcatctaaatccgtttctgatcctgaatcatcagtttttcccttgaaagatgggaggtggcaaggacaaacacaatgaagaagagaaaggagttttctcacatctgctcatggagtagctcaagctgctcatggttaccctccaggggcataccctccacctcctggggcataccctccttaccaagggtacccacctgctcatg

SEQ ID NO: 17823 - DNA, 251 bp, Glycine max
  Clone ID: 700876110H1
gaacccaccaatcatctgatgcaggagcttcatagcaagtctgagatgcagatcaaacatgaattgcccagtgtaagaggaactgatcagctgaagttcaaagggactgttgctgatcagatggaagcttcttctggaacatcttacttattgatcctaataatatccaccagaacttcccacttcccaacttctgcatggatggggatgtccaatcacacccaagaaataatcttccatttgcctctaat

SEQ ID NO: 17824 - DNA, 253 bp, Glycine max
  Clone ID: 700876073H1
ctttcttcttcttctcttaaaagagcctttgctttttctttaggcctttccgaattaagtacttgtttcattttctctcgaagcaagaaaaatgttcatcgagagtttcaaggttgagagtcctaacgtgaagacacagagactgagattcagtccgtgtacaactatgaaaccactgatattgttcacgagaacaagaatggcacttatcagtgggttgtcaagcccaaaactgtcaaatatgaatttaaaa

SEQ ID NO: 17825 - DNA, 256 bp, Glycine max
  Clone ID: 700876031H1
atttttatttgctgcttatgaggtgtttgttgtttttgggagacctgtgaatagggatatttgaagttggtgcaaattaaggatttttgggttccctaaagttgaaatattgatgaatctcagttggtaaaggtgttgcttttgatgaacagagcaggcccccatatctgttgtgtgtgaaatacttttataaagttggagattttaaagaggggaattttgtgtctgttgtaatcctatatcagctttttagatc

SEQ ID NO: 17826 - DNA, 261 bp, Glycine max
  Clone ID: 700876032H1
cccaaattattcattcctctttttttccccattaacaatatcacacaatccaattaatttccatgaccatgtccatatcactcttactccaagccaacccctcccacttgaaatggaaccagttaccttcccttccacgcgcacaaggcctgaccgtttcactccaatacccgactcgaaacgccgcgtttcaagcgtcaaatgtatctcctcgtcgcggaagccggataacacgtttagttgcaagtccccgtgggaggt

SEQ ID NO: 17827 - DNA, 264 bp, Glycine max
  Clone ID: 700876033H1
gtccagattagtaccacaaaaatggagaaatagaataactgaatatcgtatagctcaaaataaagatttaaccaaatgcaattcatatgaaaaaagccaattaattctttacaaagaacaacaagtaaacgcattaaaaaaaaaattagaaaacaatatagatacgatcttttatcctataattttatcaattatgcagataagaaagactcatatatttatggatatagatccctatttcaagtaaaaaaaaaccaagtgatt

SEQ ID NO: 17828 - DNA, 259 bp, Glycine max
  Clone ID: 700876034H1
caagtacaagaacaagaagaaacaatgtcttgctccaatctcacaatgttggtgtcctcaaaaccttccctttccgatccctccaatctctccttccgctctgtcctcaacccttttcagctcccttcacaaaacccacttcatgcactccttcacgctcctcaaccacccaaattcagtgtggtctgagagaactcagaacccgcattgattccgtgaagaacactcagaaaatcaccgaggctatgaagcttgtggc

SEQ ID NO: 17829 - DNA, 258 bp, Glycine max
  Clone ID: 700876036H1
ggaagagtacaagaatatggacgatgttggaacacttcaaacttgtggacatgactaccatgtgagctgcattaaaaagtggctatctatgaagaaattatgtcctatctgcaaagtatctgctttgcctgaggatacaaggataaataacttctgtaatataaattaatcccattttgtgtatatatttggacatccctaaaaaatgaggaaacgaacctgtttttggaaatgttataacaggaatgctactctata

SEQ ID NO: 17830 - DNA, 108 bp, Glycine max
  Clone ID: 700876037H1
gccaaaggaaggacgtgattgagtgagcaaaatggaacctgaaagcccagctttgttgcttattttgtttgcaaccctactttggttcttagccacaaccctttccag

SEQ ID NO: 17831 - DNA, 254 bp, Glycine max
  Clone ID: 700876038H1
attgtttgttgttgtaactcgttcttcttcttttgttgttctgtgtttgtgtttgttttttctctcacctgaaaatgtcttgctgcggtggtaactgtggttgcggaagctcctgcaagtgcggcaacggctgcggagctgcaagatgtacccagacttgagctacactgagtcaaccaccaccgagaccttggtcatgggagtggcactgttaaggctcatttgagggtgctgaaatgggtgtgccgctgaga

SEQ ID NO: 17832 - DNA, 258 bp, Glycine max
  Clone ID: 700876039H1
atcatgcattcctcgaggaggatgtcaatatgtcttttggcagcatgctattacacagtcttactttgggtgaaaatggtgatcttgagacttgttgcagagctgctagtgttctatctcatatgttgaaggaccatcccaatgcaaggaaagggttttaagaattgaaattgaggcagcacccatgcaatctttaggagctccagagccactaatgcatcgaatggtgaaatatttggctgttgcttcttccatgaa

SEQ ID NO: 17833 - DNA, 255 bp, Glycine max
  Clone ID: 700876040H1
ggcttgtaatattttgcagggcaatctatattgaaaacgggagataggcaatggttctttttctgtcacagagataggaaatatcctaatggtggaaggtctaaccgagcaaccagacgtgggtattggaaagcaacagaaaggatcgtaacgtgatatgcaattctaggtcagttggagtgaaaaagaccctggttttctacgcaggcagagctcctagtggtgagcggactgattgggttatgcatgaataca

SEQ ID NO: 17834 - DNA, 257 bp, Glycine max
  Clone ID: 700876041H1
agtcgaataccttctaaggaaaggatggattccttgcttggaattcgagttggagcacggtttcgtgtaccgtgagcacaacaggtcacctggatactatgatggacgctactggaccatgtggaagctgcctatgttggctgcactgatgcttctcaggtgttgaaggagcttcaagaggctaagactgcataccccaatggcttcatccgtatcattggatttgacaacgttcgccaagtgcagtgcatcagctt

SEQ ID NO: 17835 - DNA, 86 bp, Glycine max
  Clone ID: 700876043H1
ggggccgcacagcgcgccgatccggcaagaaagcgcgctccgatgcggtgcggggcgagtaaataaggccaatttacaataagtct

SEQ ID NO: 17836 - DNA, 258 bp, Glycine max
  Clone ID: 700876044H1
gataagtttatccagaagcaattccactagaagaaaataagaagaaaaaaaatgaaatgattttagctttcggagaagtccatttcatgtttttcttctcccagaaatgcttctagaaaagtttgtccaaacagcctagaaaatttcatccttagaattgtgagttgtttgaatgatcctaataggtgataagcattgtagctctgctatgttttcttgcctgtgtttcgtgatggaaatgaaaggaacccgactcag

SEQ ID NO: 17837 - DNA, 257 bp, Glycine max
  Clone ID: 700876045H1
attgcaatagagaaagaaagatagaaagaaagaacaacaccacagctttagcacccagaatcaccaaaatagacacaacacaacacaaaactctcctatatctcccttttctgcacgaaagagaaaaccctctcaatgctcaccaatatccctcctctaatgaatctgacagccatatcattcctcctcaaccgttgaaattgaagaaaccccaccaacccaaaggaaaacaaatggggcaagaaaaggaagatgaa

SEQ ID NO: 17838 - DNA, 257 bp, Glycine max
  Clone ID: 700876048H1
attggttgttgccaaagttggaaatcacaaacaaattgttggtttccatgttgctggaagcataggaagactgggatatgcttcattgataccatacgttgagccagttgtgcaagctcaaagtgctgaagtttacttgacttcttccctgtggaggttgatagtcaagagggagttgctcacattggtgaattgaaatctggtgtctatgttccactgcctacaaaaatctatttggtggaaactcccaaggaatg

SEQ ID NO: 17839 - DNA, 73 bp, Glycine max
  Clone ID: 700876050H1
gttcaactgaggtgatggctttgaatttgccttctcccgcccaagtgaagcccttatttttctcttcaaataa

SEQ ID NO: 17840 - DNA, 255 bp, Glycine max
  Clone ID: 700876051H1
tctggctcagagctttaccaagcgcccaatgaagggaatgcttactcgtcctgttaccattcacaactggtcctttgttagaaatgaccaacctagatctgagaccacctaccagattgctttgtctatcaagacgaagtggaagaccttgaaaaggctggcatcactgttatccaaattgatgaagctgctttgagagagggtcttccactgaggaaatcagagcaagctcactacttggactgggctgtccat

SEQ ID NO: 17841 - DNA, 245 bp, Glycine max
  Clone ID: 700876053H1
gtacttcactgtgcattggcagccctcttgctttaaacaggagtcaaattttgacaggcgaaggtctccggttggtttttccagtattaacatttcatgttgttgccttcactttaggatattggttctcaaagattcatccttgaggcaggaagaacaggtgagcaggacgatttcactatgcactggaatgcagagttccacccttgcaagactccttgcaacgcaatttttggatagtagtc

SEQ ID NO: 17842 - DNA, 254 bp, Glycine max
  Clone ID: 700876054H1
ctgctcgagcggctcgagcttcagtgcaatgctttggatcttttatgcctatgtgaagaccggagaaacgctacttatcaccatcaatgcattcggttgcgtgattgagacaatttaccttgccgtatttatcactactgcccgaagaaagctaggatgtcgacattgaggatgattgttttgttaaattttggggggatttgcacgattggtctcttaaacccactactagcaaaaggagagaagccgtgtca

SEQ ID NO: 17843 - DNA, 256 bp, Glycine max
  Clone ID: 700876056H1
ggcattagaactcctgaataccttcaagtctttataaataagcttgaatagagttatgatttgtgcagagtgtatattaggcttttgagccagtctgatgctttggggatcatgaagcagtacattgcagtaaccagcctctctatagttcatatggactcctacctgacaattcaacgtggcaagagtgctttattgttcttctgaacttttggatgagattggcagatgatatgaaggaaattgcattggagga

SEQ ID NO: 17844 - DNA, 256 bp, Glycine max
  Clone ID: 700876057H1
ttaacatatagaacactaccctgaacatagtaaagaagccagtgctaggatttgttagtgaagcaatggctcaaaccatgttgctcatgtctagtgtctctagcagttattccgtggatttgaagaaagacctttcctccaattgcagagtcaaagtttaaggcctaagttctctcagctctcattcaacccacttccatcatcaacttcttccttttcttcaccccgtacattcacaactctggccctcttcaaa

SEQ ID NO: 17845 - DNA, 255 bp, Glycine max
  Clone ID: 700876059H1
gctagttccgacacagacaaagcaatggcaaagaccgagttagaggtgactgttgagagcaagaacaaagacctcaagcacctggggtttgtgaggattgctgctattcaaacatttgtgattgtgtcaaatctgatgagtacgcaaagcagaattctgggcctttgagatccgtcgtaggaacggttgagaacactgtaaccaccattctcggtcctgtctgcaacaaattcaaggacgtccctgatgatgtcc

SEQ ID NO: 17846 - DNA, 255 bp, Glycine max
  Clone ID: 700876065H1
cattgtcgcccgtgtggagaaacttgttgctgctggagaaaggagaattgctgctcaggctcctcctcaacctgcttaggtggcttagaaaaataaacttgtacagctaactgaggctagtgagagctgcttctcggttgtgtagcgaattggaaataaagttgtcgattgtactgcagaactgtacattttgtagcttttaagtttatacaaagaatttaagcgagatgaggctcatcagatgttttaatgcac

SEQ ID NO: 17847 - DNA, 147 bp, Glycine max
  Clone ID: 700876066H1
ctctctctcgttttaaaccattttcctctgcccatggcggctgtcccagcatcgcggaccgatccaccaccggcaatggctcagccgccgctgctcgtctctgaccccttcgccaaggacgccattctcgcctgttccacagagcat

SEQ ID NO: 17848 - DNA, 253 bp, Glycine max
  Clone ID: 700876070H1
gaattattcatcacatcaaaactatggtccactgatgctcatcctgaccttgttgttccagctcttaagacctccctgcagaagttgggattggagtatgtagatctctatttgattcattggccagtgaggcgaaacctgaagccaaagggtaccataatatattaaaggagaatgtgcttccctcctttgacatgaaaggaatatgggaaggctatggaagagtgttacagattggggcttagccaagtct

SEQ ID NO: 17849 - DNA, 247 bp, Glycine max
  Clone ID: 700876071H1
cttagccttccctacaactccaaacattaagacatcttcatccatggctgcctccgtctccactgtcggagctgtcaacagagctcttttgaacctgaatggttctggagctggagcttcagctcccagttcagcttctatgggaccagcttgaagaaggctattgcctcaaggagtcccatcagcaaggcttccggtggaagcttcaagattgttgctgtagaagacgtgatagagattgatgaga

SEQ ID NO: 17850 - DNA, 254 bp, Glycine max
  Clone ID: 700876072H1
ctcatggttctgatcgttgtacaaaacaagcttagtttttcaaggattgaatacatagtagatggccttgtggttttctcctttcttcttctaccacttgctgtggtgtttagagaggagataaaccaattgaagccaaaacgcaaggtttaactgattcaccacctcagttgaaagtagtcactgaagctattccatcttcaaacgtggtggagcaagatgtagtaccagcagctactacaagttcccacgag

SEQ ID NO: 17851 - DNA, 259 bp, Glycine max
  Clone ID: 700876030H1
gttaactgaagctggtttcattcaatttgctcctatgacctctttctataaaaatgttagaccaatgatcgtaactgtttcatgtgaaataatcttgtttaaaatagggataataaatgtgtattcaagttgctgtagagtatttgcatgtcgtgcaaacagtactatgctacttgaaagaagttggtgattttatgtgttgtgtgttgtcacgattggacatcttagcataatgatgccaacaaaataattgaactat

SEQ ID NO: 17852 - DNA, 238 bp, Glycine max
  Clone ID: 700875988H1
ccgagcctcacgttccgccgctcgtgccgcgaggggatctgcggctcctgcgccatgaacatcgacggttgcaacggcctcgcgtgcctcaccaagatcccctccgaaggcgccgccaccacgatcacccctctgccacacatgttcgtgatcaaggacctcgtcgtcgacatgacgaacttctacaatcagtacaagagtatcgagccgtggctcaagaggaagaacccaccggagc

SEQ ID NO: 17853 - DNA, 236 bp, Glycine max
  Clone ID: 700875989H1
cttgactcggccttgttgagacctggccgttttgatagacaggtgacagttgatgttccagatataaggggaaggactgaaatcctaaaggttcatgctagcaacaaaaagtttgatgctgatgtttctcttgaagtgattgcaatgagaacacctggctttagtggagctgatcttgcgaatctgttgaatgaagctgctatattagctggtcgccgtggaaagacagctatttc

SEQ ID NO: 17854 - DNA, 231 bp, Glycine max
  Clone ID: 700875990H1
ggaggcagcagaagaggcaagttgaaggagtaatggttgagtgcgatgaaaacgttaacgaagcagcaatgtcaatgtccatggaccctcgcgcgaggcacgcacaagccataacatcacacatcaaagaccgcgcagtgtggaacaacctcataacccactactccaaatccgacctttcttcctacgccgtttctctcttccagcgactcccttttcctcccaacgttg

SEQ ID NO: 17855 - DNA, 233 bp, Glycine max
  Clone ID: 700875992H1
cgaaacatggcaagagtggtggcactccaacagaaccaactatctttctctaccttagcttcctctctttctgacttcaatggaaccagacttcaaactcaacttcagttcaagagaaagcaatgccatccaaaaggggccttccacggcttcggatcgagcaaccaggaaatcctaataattggaggcaccaaggttaatgggggggttttggccaaggtccctgtcaaaga

SEQ ID NO: 17856 - DNA, 241 bp, Glycine max
  Clone ID: 700875994H1
cggctcgagcgcgacaaaaaacaccacctcgtttggttgttgttttgccaacgttacgaaacgaaacgcagcattgtctccactgcacgcatgccgtttactatataataataatctttcaaaacgttgattgtgttggttcaattattgcgtgtctggtaattttaatggttgatgcgtgtttgatgggatgggagctcagaagagcatccatgctggcaaaggtttagacataatatgc

SEQ ID NO: 17857 - DNA, 241 bp, Glycine max
  Clone ID: 700875995H1
cagaagaacacaagccaagttagaagacctcaatcttcacccaaacctcatcacctttgtccccatcaatgttcctcacgttgatggtcttccttatgatgcagaaaccacttcagatgttccctcctctttgttcccactcattgccactgccatggacctcacagagaaaaacattgaacttctcctccttgatctcaaaccacacatcgttttgttcgatttttccacatattggcta

SEQ ID NO: 17858 - DNA, 229 bp, Glycine max
  Clone ID: 700875996H1
gagctgcagcagaaaatacagaaacatgtggcttcagctagtgcttaatctagctcaccttcagaaactttatatatgcgctttcttttcataatcttgtactagacttatgttggtatttctgttattgcaccaatcagcttttcaaaggtgatgactcctatcatctatttctgaatagtagtaactggtcctttcttccgtcttaaataatagtggatggtgctat

SEQ ID NO: 17859 - DNA, 260 bp, Glycine max
  Clone ID: 700876002H1
agttgcagtttgacggttaaacgtcttcttctcttctcttctctgcatcgatcagatccaaattttctcgcgatacgagggagcaatgtcagatgctaaggttgaggatttgaagaaggaagaggaggttggtgatgatttcctaggaacgaagttgacagtgaaaaatctgcggatgatctgaaagattcggataacgataaaagcgatggaaaccccatgccctcatcccagcaggaggaagcagctgttaagaaaaa

SEQ ID NO: 17860 - DNA, 263 bp, Glycine max
  Clone ID: 700876003H1
gggtgtttgagttggctcgattcacaaccgagtcatagtgttgtgtttctgagtttcggaagcatggggagattctcgaggactcagttgagagagattgctattgggttggagaagagtgagcaaaggttcttgtgggtcgtaggagcgagttcgaagagggtgactcgggggagccaccgagtttggacgagttgttgccagaagggtttttggagaggacaaaggaaaaggggttagtggtgagggactgggccccacag

SEQ ID NO: 17861 - DNA, 264 bp, Glycine max
  Clone ID: 700876004H1
aagcaatttggcattttaaaggctggggcagttgggttggtatttcaagcgttacttctcagcatggctgttgctgtatattggagtggaacaatttctcatcagagccctcttcttactttcctatttctgattattctgtcaggttaggacacatgtcatatgatgttgtaggggctcagattctccagacaggaatcccatcatccaaagcaaatctcattgggacgacagagattgctgttgctagtttggcggagtcta

SEQ ID NO: 17862 - DNA, 104 bp, Glycine max
  Clone ID: 700876006H1
ctcgagccgatttgtatctggtgttgtcaaacagacgcaatacgagagacaaatatgttatcatatggttcaatttcaagttttgtagggtcattttctggctc

SEQ ID NO: 17863 - DNA, 265 bp, Glycine max
  Clone ID: 700876007H1
ttcagtgcaaatgtcgttgtggatggaagcactgtgaatcttgggttgtgggatactgctggccaagaagattacaatagattgagacccttaagctatcgtggagcagatgtattcctgcttgctttctctctcataagcaggccagctatgaaaatgttgcccagaaatggattcctgagttgaggcattatgctcctggtgttccaattattcttgttggaacaaaacttgatcttcgggatgataagcagttctttcaaga

SEQ ID NO: 17864 - DNA, 137 bp, Glycine max
  Clone ID: 700876008H1
caatgcttgggcttatgccactaactttgtccctggacaatgaggatgcctacatgcaatgcaatcttctgctcccttttgcagttcccttgtgtttaactccattttcactaatgtaactacacctgtgtagcaga

SEQ ID NO: 17865 - DNA, 263 bp, Glycine max
  Clone ID: 700876010H1
atttttcctttgatattaaatctcgctctagattggaaaaagtttcctctacaaaagcacaatttgttagtggaaaaaccttcaaatatgatataattggtgctggttcacattcttcagaagattttcctgaaaaggaagataagaaaaacccaaaaagattgataccagattgagacaaagaatagatcctcaatacaatgaggttcaggctcagatggaaacaaatttgtttaaattgtctcttgatgatgttgaaactc

SEQ ID NO: 17866 - DNA, 261 bp, Glycine max
  Clone ID: 700876011H1
cagaaatctatggtgattcttgactgcttctgatagcagcaagaagggagccctcatgagtaatgaaagcgcaaaagatttatcagtcatggttctgaaacagcagcagtacaagaagatcaaaccaaaattaagctctactcacaagagagatgcgatcaatcccactgcctgatctgtaggggaaacaacagttgtcaaacagttcatgcaagaacaaaactgatgaatgctttgattggaaaagggaagccacatgaa

SEQ ID NO: 17867 - DNA, 263 bp, Glycine max
  Clone ID: 700876015H1
gaaggagcctactgccaccacacaacatacgactcatctcttttgggaattactcgaatgctgcattgcagtatcctgttcttgcccacatgcaaagctactatggatttgtctgctgctgcaacaagtgcctcccccgtcttgttgctgctccagcagagaaaggccattttcttatagactttctcatgggaggtgtttcagcagctgtctcaaaaactgctgctgctcccattgaacgtgttaagcttttgatccagaac

SEQ ID NO: 17868 - DNA, 261 bp, Glycine max
  Clone ID: 700876018H1
cttccttcccctctctcattcaagacaggcctgtttttgctgccactgcccccatcatcaccccaactgtgagagaggatatggcaaaggaatacgaccaagctattgaagaacttcagaaattgttgagggagaagagtaactcaaagcgacagctgctgaaaaagtggagcagataacagcttctctagggacatcatcatctgatggcatcccatcatcagaagcctcagacaggatcaaagctggtttcattcactt

SEQ ID NO: 17869 - DNA, 264 bp, Glycine max
  Clone ID: 700876020H1
aaatgatgcttctaacaatgaagccaagaaccttctgggtcctgctgcacctcctccaagacctggtatgccttcagttcgtcctctgccactaccacccggactggcattgaatcttcctcgtgttcctgtccaatattctgctcctcatagtggtgcccttccaatgcctccacctagatccatgatgccatctattcggcctgctcttcctcctccaatgccaatgaatactggacagcagtcaattatagctggccaacc

SEQ ID NO: 17870 - DNA, 258 bp, Glycine max
  Clone ID: 700876021H1
ggcgcttacaaccaatcacaagtttctttccagatgggaaaggttggagagaagcttgatatcgactttgtagtttccactggagacaacttctatgacaatggactaactagtgaccatgacaacgcgtttcaagagtcatcactcaaatttacacagcaaaaagcttgcaaaagcagtggtacagcgtgttaggcaaccacgactataggggtgatgcagaggcccaattgagcccggtccttagagaaattgata

SEQ ID NO: 17871 - DNA, 261 bp, Glycine max
  Clone ID: 700876022H1
cacaattcctctcatttctcttctgccaacagccgtctaggcacctcagaacagacctcggtatcacctggtagtcaaaggcctgcccggggtggttcagatgtccctagatccgggtcttttatgcatcccttccttgttgtcacagttctgctgctagggctgggaactctgttgcatcttcaatgatccctccttatccaggcagctatgctcgggcccgtgatagagtccaagctcttcaagcatattatcaacctc

SEQ ID NO: 17872 - DNA, 260 bp, Glycine max
  Clone ID: 700876024H1
ctcgagccgctattatcatccgcagctgcttttattcgcaccgcaaacagtgagccatggccgtcggaaagaacaagcgcatctccaaggggaagaagggtggcaagaagaaggcagctgatccctttgccaagaaggattgtatgacattaaggctccttctgtttttcaagtgaaaaatgttggcaaaacgctcgtctctcgtactcagggtaccaagattgcttctgaaggactcaagcatagagtgtttgaggtct

SEQ ID NO: 17873 - DNA, 259 bp, Glycine max
  Clone ID: 700876025H1
cttcaaattctgatgaaggttctgtagtatctatggagtatgcagattataggatagaagagattgatgatgagattgttagtactagtggctcttcaaggggtagcagtggttatcgcagatcccatagatgctgttccgcttttatgacaattaggcagcatgtgaattgaatgaaagaaaaagtcaagggggcatggaaaacattgtgtttcaccatgcaaagatattacatttagcttgtttgttgcttttacca

SEQ ID NO: 17874 - DNA, 259 bp, Glycine max
  Clone ID: 700876026H1
ctccggcttgcctcgcgcctggacgccgtcgtggcccgcctcgacacgcaggcgaagatgacgacgatcagcaagtcgatgggcaacatcgtcaaatcgctggagtcgtcgctggccacggggaacctccagaagatgtggagaccatggactcgttcgagaagcagttcgtgaacatggaggtccaggccgagttcatggagagcgccatggcgggatccacctccctctccactcccgaaggagaggtcaacagcct

SEQ ID NO: 17875 - DNA, 78 bp, Glycine max
  Clone ID: 700876027H1
ctcgagcctcgtttggtagccagagtggctctgcagagagacgatgttgaactcgttgccgttaacgaccctttcatc

SEQ ID NO: 17876 - DNA, 261 bp, Glycine max
  Clone ID: 700876028H1
caagagcctatggcagtgtgctcgatcttttcactactttcaccaatatctccattgcccatcaaaggtggaacttaattgtgtgtcatcgactactgtgaaccatcttcattcgatttcggagcctaaataatttcataatcaaacccaaaaacaccatgaaaggagacaagaagccttatctagttgcgatcctcatagaagccatctatgctggcatgtttcttctctcaaaagctgcatttgaccatggcatgaaca

SEQ ID NO: 17877 - DNA, 244 bp, Glycine max
  Clone ID: 700876029H1
aggcagaggatgttattgaagacatcaaagcctggggattttccccaaacatagttacttataacactttgattgatgggcattgcaagaagggcagtgccggaaaaatgtacagagctgatgccattttgaaggaaagcttgctaataaaatttgtccgaatgagattacctttaacactcttattgatggtttttgtaaggatgagaatgtgttggctgcaaagaaaggctttgaagagatg

SEQ ID NO: 17878 - DNA, 236 bp, Glycine max
  Clone ID: 700875987H1
gtgtaacttcgtctcaacatattgagaaaatagatgtaaattatttttgtgcgtaaatgttagttttgtttttgtgaagcattttatatactgtggtatttgatagataaaaaccgtagatacatacaattttgcggatatagtacaaatactggtggtggctaataggattctgttgttgaatattgctggaaacttttcatttgtttaatattgctgctacatgatgatgctga

SEQ ID NO: 17879 - DNA, 77 bp, Glycine max
  Clone ID: 700875940H1
actatgagtgaaatactctgaatgtcttttcctatttccttgaatgtacataaataagcgattttttcaggaagcta

SEQ ID NO: 17880 - DNA, 243 bp, Glycine max
  Clone ID: 700875941H1
ctttcttctgggaattcttgtgttgagttaaaattagaatcagagacagatgggggggacactgatcttttcatctccagacatcctctcatatttcctacacgacaccagcatgagtggtcttctcatgatattggctcaaagactttgattcttagctctaaagataaaaacatgggtgcagggacttacagcattggtgtatatggcttcaagggaattaccaggtataaaatatcagtt

SEQ ID NO: 17881 - DNA, 241 bp, Glycine max
  Clone ID: 700875942H1
ggatagaagtatgttttaactggtctgatgacttcatcaaactaggcagtccttagctttagcagcttatactgttctgtatcttccgagtataagctgctaaagctaaggactgcctagttacactcaagtcatcacaccagttacaaggatagaagtatgttttaataaaaaaaaaaagaggatagtagtatgttggaccatctcagcttatggacactgcgagttaagaccaggacaa

SEQ ID NO: 17882 - DNA, 246 bp, Glycine max
  Clone ID: 700875945H1
gtacacatatgagtattgtttaatattacaattgtctacattgtcagcgaaccatagtttcttatttgagattgaatacaacaattaatacagtttggattaatcgttgtaagtgaaaacatacatgcagcaaaaagtagcattgtattgctgaaaatatagaattgagtcagtgttttatacagtaccacattaaattattgtctcctcgaccccgactccccaacatgtccccatacctgtacc

SEQ ID NO: 17883 - DNA, 246 bp, Glycine max
  Clone ID: 700875948H1
acaaaattagccatttttgaaacaggaataaaagtagtagatcttttagctccttatcgtcgtggaggaaaaataggacttttcggtggagctggagtgggtaaaacggtactgattatggaattgatcaataacattgccaaagctcatggaggtgtatctgtatttggcggagtaggtgaacgtactcgtgagggaaatgatctttatatggaaatgaaagaatctggagtaattaatgaacaa

SEQ ID NO: 17884 - DNA, 247 bp, Glycine max
  Clone ID: 700875949H1
ccaaagaatgctcttgggaagcaatacaagaagatgttccaaatgaatggggtaaagctacattttacagaaaacgctctaagatcaattgccagaaaggcaatatctaaaaatactggtgctcggggattacgatcaatattagaaaatgtgttggtagatgccatgtatgagattcctgatattagaacaggcgatgatgttatagatgctgttgttgttgatgaagaggctgttggaggtgagg

SEQ ID NO: 17885 - DNA, 240 bp, Glycine max; identical to SEQ ID NO: 353
  Clone ID: 700875950H1

SEQ ID NO: 17886 - DNA, 241 bp, Glycine max
  Clone ID: 700875955H1
ttcttctccatgatttctgctttgggtctcacagggaagtcaagtagcggaaatcaggaagtgtggttggttgtgaaagcgcagtggctatcttatttaaatgatttggtgatctctaccctgaatttagaattcttggattgttcttttgcttctacttttcgatggtctagtatgagagcatttcttaaattacttctccgttgtttcgtcttgggtctcgtgatgtgggatggctgtt

SEQ ID NO: 17887 - DNA, 243 bp, Glycine max
  Clone ID: 700875956H1
gtgagtctttcaagccctagcagggtatttgctaatgctaagggaatagactcagcacaaaaggcccaggccgtgaggtttccagctctgtcgaggcccattcaaaagtggcctggtttggtgaagacccggcccgttcgggcgacgccggagaagatatcggagaaggtagaggagagcataaagagcgcggaggaggcgtgctcgggaggcggcggtgacgcggaatgcgcggcggcctgg

SEQ ID NO: 17888 - DNA, 240 bp, Glycine max
  unsure at all n locations
  Clone ID: 700875957H1
gtgttgttgcacactctccacacttacacagagttgtnagagagagaaagaaaaggatcaaatagttaaaacctttggttctttccctcgatagttccatttttccattcaacaacacaactcctcagncagacatcatggaggcaggttacaatcctcgtaccgtcgaagaggtctttagggatttcaagggtcgcagagctgctttgattaaagccctcaccaccgatgttgaagagt

SEQ ID NO: 17889 - DNA, 239 bp, Glycine max
  Clone ID: 700875958H1
ctcgagccgaatcggctcgagaccaaaccaaactaacaaggatcattcatggcttggttaagaaacctctcaaagtttgccaccatgaaaagagcatcatcatcatcatctcaaagacccaaaaacactgacccattttgtctattaccctccttcacttttttttccaacttcagcactaacaccattgactgagaagccctgtgtgaagccagttgagtataataattattcgggct

SEQ ID NO: 17890 - DNA, 242 bp, Glycine max
  Clone ID: 700875960H1
tggtgatgaaaaattgatgcgtgaaaggacacacctgctgttggcttgttgttcaagaatggcaatttgtaagaaagatgtttggagagttgaatgtggaatcccttctggatttccgctcacagttatttgtaatagcatttttaatgagatgctcattagatatagctatgaaaaattactgcgccaggctaaagctctaagtatgtttttacaatccttcaaaaattttgtttctttgt

SEQ ID NO: 17891 - DNA, 244 bp, Glycine max
  Clone ID: 700875962H1
ctcacgacccgaatcctcgacgccgcgcacgtgtcctcaccgtccgtggattttaaggtcttgccttttagaaatgggagggtgctggcttcttcggagagtggtgacacgtggcgcctcgggtggatcgcgctggaggaagtgaagggtctattgggtgcggatttgagcgcggactcgttcgtttatttggggtcagactcggactcagactcggtggtgtactgggcgatcgacgtgtcga

SEQ ID NO: 17892 - DNA, 246 bp, Glycine max
  Clone ID: 700875963H1
gcactatcgtgacaccatgaatattaattcacttgcccgcaaatccttggtcaatgcagacggtattatagagaaaacatttttgtggggtaggtacgctttggaaatgtctgctgttgtttacaaggactgggtttttcctgatcaagcactgcccaatgatcttgtcaagagaggagttgccgttaaggatccatctgctccccatggagttcggcttttgattgaggactatccttatgcttc

SEQ ID NO: 17893 - DNA, 251 bp, Glycine max
  Clone ID: 700875964H1
tgaaattctaccagctacggaacgatctttgccatacactccttccatacatttgctgtatggtctgagagcttctcttgatccgatttttgaggaaggacttgaaaatgtgattgcaagacacagtcgtttaggcaaagcaaccagacttgctgtagaggcatggggtttgaagaattgcacccaaaaggaagagtggtacagtgacactgtgactgctgttcttgttcctgcttacattgatagtactg

SEQ ID NO: 17894 - DNA, 246 bp, Glycine max
  Clone ID: 700875965H1
tgcaattgaagttaaaagccttagccttccctacaactccaaacatcaagacatcctcatccatggctgcctccgtctccactgtcggagctgtcaacagagctcttttgaacctgaatggttctggagctggagcttcagctcccagttcagccttctttgggaccagcttgaagaaggttattgcctcaagggtccccaacagcaaggtttccggtggaagcttcaagattgttgctgtagaag

SEQ ID NO: 17895 - DNA, 242 bp, Glycine max
  Clone ID: 700875966H1
ggtagccctaggaacaggaaaaaaacaaatggaaaagcagcttgaggaacttgaaatatcataccctgataaggccagaggagtggcaaaattcaatgttcccctagcccacatgataatagctggagctgattttatattggttcctagcagatttgagccttgtggtctcattcagttacaagctatgcgctatggatctgtaccaattgttgcctcaacaggtggattagttgacactg

SEQ ID NO: 17896 - DNA, 240 bp, Glycine max
  Clone ID: 700875968H1
ctctcagaaaatccgtgttctttgtaatcgctcaatgcttcaccttttccgcatatgctgcaatgcttgaaatcacaaaccgatgcacatacactgtctgggctgcgtctgtgcctgttggcggtggcgtgcaattaaacccgggccagtcatggtccgtggacgtgcctgcaggaacgaaaggggcccgcgtttggacccgaaccggctgcaacttcgacggttcgggccgcggtggat

SEQ ID NO: 17897 - DNA, 238 bp, Glycine max
  Clone ID: 700875971H1
gcggttcttccatttgactcttgttctgaacgacttttcaagagaatcaaaccatggcagtgaaagtatacggtccccactgtgcttccaccaagcgggtgctggtttgtctggttgagaaggaagtcgaatttgaggttgtccctgttgatgtcactaagggggagcagaaggatcctgagtacctcaaactacagccatttggagttgttcctgtcatcaaagatggagattatac

SEQ ID NO: 17898 - DNA, 240 bp, Glycine max
  Clone ID: 700875972H1
cttaatctcccaatcaactcctcccttctaagtcataacaccaaaatttgatcacctttttgcaacctatcttgctgtgctgtggtagcttctttgatgtagtcaatcatcttgtgctcaataagactacccctttaaaacttgcttataaagttagtgctttgcctttaggtgacacctccatctcaagctgtggtgaattaaccatacaaactatccaattataccaaagcttgattg

SEQ ID NO: 17899 - DNA, 239 bp, Glycine max
  unsure at all n locations
  Clone ID: 700875973H1
aaccaggcttgggaccaatggtattcttggtacttcgctcgagtctttgttgccgttaaagaccttgtccactacaacaatccctccactgaggcgtgcttctgagaacatagatccttctgcagtatcaatttgttgcccacaatgtatgcagcgctgcgagcaagaagtagcagaatngttggtcgaaactaagaaatcagatactgagctcaaatcagaggcagctaaaccgtccc

SEQ ID NO: 17900 - DNA, 238 bp, Glycine max
  Clone ID: 700875975H1
ggaagatgccttttgttaaggtattgaaaaataaggcgtactttaaacgctaccaggtcaagtaccgtcgtcgtcgtgagggcaagacggactaccgagctcggaaacgtctgattacgcaggataagaacaagtacaactcgcccaaatatcgtttagtggttcgcattaccaatacaaaggtgatttgtcaaattgcgtacgctgaaattgatggggacaagattttggcgcaacg

SEQ ID NO: 17901 - DNA, 240 bp, Glycine max
  Clone ID: 700875977H1
tgttctagaggacttgaaagatggggtgcaaaggtttcatgaacaagatattgaggagaagaaagagctatatacccgtgaccatatgaaacctctggtgtataatagcaattttgatctgtacagttcaccagccctcaattggagggacagtttcatgtgttacctggctcctaatcctcccaaacctgaagacttgccagtagtatgcagggatatacttttggaatatgggacata

SEQ ID NO: 17902 - DNA, 242 bp, Glycine max
  Clone ID: 700875978H1
cgcccatacatgtgtgccactagtcatcgccattcaaactgttttgaacaatacaaaaagacatatacgaaagcaacttctgttcaaagcttgcagctagaagcaaacaattccaatattgatttaagcacaggtgaatctaaagacgatactgaagttcctgagcttctttgccccctttgtcgccggcaggtgaaaggttggacagtggttgaagtggcacggaagtgtctgaatgcgaa

SEQ ID NO: 17903 - DNA, 243 bp, Glycine max
  Clone ID: 700875979H1
gcccgaaccggatatcagcaagctcagagacgcggttgcaaggaagaaagtaagagataggacaaggaccaaacgtcaaaccccattaaattgcattcatcctgaggagtattggactccatcaactcatgctcttctctcttcaactagaagcactactactccaaccccacttgaaaagccttcagttactaccacaggacagaaaaaaccaaatgaaacatatgagaatcaaaatagccc

SEQ ID NO: 17904 - DNA, 271 bp, Glycine max
  Clone ID: 700875981H1
cgttcggatcctcagaattcgtgctcgagcaaccctacttctacttccctttgttctcaaaccttatcccttatcctcccaaaaccaaaccatgtctacctccgcagcttctctcgcactcccaaccctcactctccgaactcgacaacctctctgttctccccaatgcttctcctcgtccctctccctcacccctaactccaaacccatttccatttccgccgttttcctcaaaacaacgctgtcgtcgtcgtcgccgttgtcgctgtcg

SEQ ID NO: 17905 - DNA, 229 bp, Glycine max
  Clone ID: 700875939H1
ggctcgagcttctcccgggaaaaaaagtagactaaaaaaatatgctaagtataaattgtctactgatgacatacgaaagctgatgatattgaaaaaaaaagaattgtaaataaggttcaggttcgacttccatagagaatatagatgatattgtctataatgatagaaaaaaataaaaaactttcgaaagattttatccaattgaacttttaaaaatgactgggataaa

SEQ ID NO: 17906 - DNA, 268 bp, Glycine max
  Clone ID: 700875902H1
cacgcgttcggctcgagaccaacttctccatcgtcttcgttggctcattcgattccttagcttcacatctccatggcgctgcaccggttactgaagaggaaaggaggcgtcgatgaacttaacgacgatttccctctcgcttctccggcaaccaagattcgccgtctcgacgctgagttgccgccaattttggaagaggacgaaccgttacctaacgaggagagagctctcgttctcttcaagcctctcgtccattccccttcctctt

SEQ ID NO: 17907 - DNA, 248 bp, Glycine max
  Clone ID: 700875903H1
gcctctggtcgatggaacaatgtaggcaagggaagtcggcaaaatggatccgtaacctcgggaaaaggattggctctgagggctgggcacgggggtcccagtcccgaacccgtcggctgtcggtggactgctcgagctgcttccgcggcgagagcgggtcgtcgcgtgccggtcgggggacggattgggaacgggcccttcggggcctcttccccgggcgtcgaacagtcaactcagaactggtacgg

SEQ ID NO: 17908 - DNA, 249 bp, Glycine max
  Clone ID: 700875904H1
gtactgaataagataccttggagagtatcatgtgttatataattcttgcctccagctaattagctaaaaattgaaagaaacggttatacctccctaaatcaataaattttcctatataaagactgccttcctaaccagcctttctaaatgattctccttctcttgctcctctcttaacagaattgttatgtcctatgtgcgattgtgcctcctgattctggaagattcacctcctgatggttcttactg

SEQ ID NO: 17909 - DNA, 249 bp, Glycine max
  Clone ID: 700875905H1
gtgcatacatagctatctatttatctatagcaagtgcgtcaagagacacgtggtaccctagctagagtgccattctgtggtttctttctttctttctttctgcatcacatcacaatttgctttgcctcgtgtcctttttcttctttgctctccaaaaatctcacacacacaggtatctagcaaatgggttctcaccaacaagaaccatggctattggagaatgggaaaccaagggttttgaccaaggag

SEQ ID NO: 17910 - DNA, 246 bp, Glycine max
  Clone ID: 700875906H1
atggggactcacccttgatacctcttcctctcaatctcttccattattcccttccaacgataataagatgtttcctctcctcggattccccgtcaacctcagcctcgcctccaaggaagacgatgaaaaccgcaaagttgtcggtgaagttgacttcttctctgacagaaacaaacctacacctccaccctctcacgaccacaacgttaaacccaacatcgtcaagaaggaaatcgatgaaacacc

SEQ ID NO: 17911 - DNA, 246 bp, Glycine max
  Clone ID: 700875908H1
aattgaagttgaagtcttgcccttctctcttcaactccaaacacaagacatcatcatccatggctgcctccgtctccactgtcggagctgtcaacagagctcttttgaacctgaatgggtctggacctggggtttcagctcccagttcatccttctttgggagcagcttgaagaaggttattggctcaagggtccccaacacaaagatttcctctggaagcttcaagattgttgctgtagacgaga

SEQ ID NO: 17912 - DNA, 247 bp, Glycine max
  Clone ID: 700875909H1
ggagtggccagcgtaagaagaatggcttctcaaagtttgagtttaccaccaacacatattccttacaataggataattgggaagcttgattccaagtttttgttgtggccttcttgtgctcatatcaaacccagaagaatttctacctcaattcgggcaatgggttcctccgcttcttcccactcccagtcacaatatgcagacagcgttgaatctgaagcaggagctgatactattgactataaat

SEQ ID NO: 17913 - DNA, 247 bp, Glycine max
  Clone ID: 700875910H1
gttgactaccgcaaaatggcatcgggtgagcaaggattctatttggttggcactgatttatctggctttcttaagcagaagtttcaacagttgattggagaaggaacagctaccccccaagaagtagaagtagtaatgggaaggacactgcatgttccattgggagctaacggatgtgcctattttccttttgaggaactttgtgagagacctgttggggctgcagactattttgggctattcagga

SEQ ID NO: 17914 - DNA, 246 bp, Glycine max
  Clone ID: 700875911H1
gggtagacttgtaactgcaatacactttgaacatattaattactttcaggggtgtttatgaagaagttattaaatggtcctggactaccacttttctttgatatcgattaatctttatgtaacatgtatttaagattttaatttaagagaaaaagaattaataaaacttaattaaacatcttcaataatatatatatatatagactaagttgaacaattcggagcataactcaaactcattttcta

SEQ ID NO: 17915 - DNA, 252 bp, Glycine max
  Clone ID: 700875914H1
gttccgcagtctccctctcttcttcctcttctctgtaactgcaacgcttcttcttccaagtataagtgatgttaactttaacacttcgtctgtgcttgagggtaaaaatcactcaaacaggggctcagcaacggcaacacttaaaattgtcaacaagcgcagtaaggggcgccactttaaagtcgattatgttttcatggcatgcgatgataggaaaaattgcagcagtagcgtgatcacacgctcactggg

SEQ ID NO: 17916 - DNA, 251 bp, Glycine max
  Clone ID: 700875915H1
cgttgcgttgtgtttcctttcgccgaaaccctcgctcgcaacttctacagaatccctttcaccatggatattgaggaggacatccgttctttacagctcgattcagcagaagacaataatggggtggtaaatgcagaggatggaaggccagaagaagttgagaaatctgataagatggatgaagatccaaagcaggatgttgaggctgagccaaaggctgttgaggctgagccaaaagtgaaggataagga

SEQ ID NO: 17917 - DNA, 253 bp, Glycine max
  Clone ID: 700875917H1
cagtaaggttatgaactctttagtccactacaagccgaaggtatatggaggtggctattacatatgaaattgcaggcactatggagctcaaccctgataggctgggtgagctcaaagcatttgatgacacaaaagctggtgtgaaaggccttgttgatgaaggggtcgcaaagatcccaagattatttcatcatccacctgatgaatttgtcatggcttcaaagttaggcaacacagaatacactatacctgt

SEQ ID NO: 17918 - DNA, 249 bp, Glycine max
  Clone ID: 700875918H1
cgaggaggaatatttggcaagagtcaattggatgcatggaaacattctcactgctcagatcttgaacaggcaccacactaaaataaagattgttaagtttgatattagaacaggtcaaaggaaaaatatattggtggaagaaaacagcagttggatcaatatacatgactgtttcacacctcttgataaaggagttaccaaattttcgggtggatttatctgggctagtgagaaaacaggatttagaca

SEQ ID NO: 17919 - DNA, 248 bp, Glycine max
  Clone ID: 700875919H1
ctcgagccgtgtaagacttgaagagcaggttgtgcatttcagacaggatttgtaccaggaagctgtctacatgtcatcttctatgaggaaattggaaaattcagtttccgctcctcctaacaagtcaaatccaacaatggatagtcccaagttggataaattgaagtctcttacccaaacaagtggtaattcaacagcaacatctgcaactaagcctaccacaacactccctgatgataatagacaag

SEQ ID NO: 17920 - DNA, 244 bp, Glycine max
  Clone ID: 700875920H1
catttacttacggacgacgtattcagcgaggcttacctatagacttgaggacgtgcgagatgcccaagggtttggttcccaaatcccgtctgacgtgtcgtcccaagtaaattatgatattttcatgacggtgggaggaaagtcaaaaatactacatgtaacaggcaacaaatttttagttttctcccgaagcgatgaaaaaattgtaaaacgagtgtgaacaggtgtttgtataaaaataaaa

SEQ ID NO: 17921 - DNA, 246 bp, Glycine max
  Clone ID: 700875921H1
caacagcgccggaaacgacagcgtcgttccagttcaaaaaccctctctcgcccctcccctaatcaataatcaccaccaccaccaatcagaaacttgcttcgacgtcgatttttgtcgctcgaagctctcctcctttaactacccttccaattctcttagccaaagcgtttcgtcgtcgtcgcttgatgttggagtggtgccggacgggaacacggtgtcagacatgtcgtattctttgggtcggaa

SEQ ID NO: 17922 - DNA, 245 bp, Glycine max
  Clone ID: 700875922H1
aatgattttcataatccaaagttatcaggtcagggaaatcgaagacctcctgtatctcgtaaatttcagtatcacccgatgggggatctgggtgttgaagtggaaccttatggaattggaaacaaacatgtcataaattcacagcctatgccccatcaacccttgggagtatttaaaggtcaggaccaaagctatcttggacagtcaaagtatggtcattctgacaggaattataatgaaatgaa

SEQ ID NO: 17923 - DNA, 246 bp, Glycine max
  Clone ID: 700875923H1
gagactacatgaagcaaaatgttcaatgtccagaagcaaattatccaacatttctttatgcaatgcccatgtcccatacaaaagtgttctttgaggaaacctgtttagcatcaaaagatgctatgccttttgatttactaaagaagaagctcttttcgagattaaatacaatggggatcagaattaagaaaacttatgaagaggaatggtcttatatcccagttggtggatccctaccgaacacag

SEQ ID NO: 17924 - DNA, 238 bp, Glycine max
  Clone ID: 700875924H1
cggctcgaggttgaacctgaaaatgggaagttggagatcaatgatggaaaacagactaatggcactagtaaagactccaggttagaggattctgatgctttacatatgaaattggttcaaaatgagaaaccagatggtcttgattgtgaattaacaatagatgggatgcaaggcaatcagaattaccctaggcatgttactgtgcacgttgttgatgggaacttggaacaatactcaa

SEQ ID NO: 17925 - DNA, 245 bp, Glycine max
  Clone ID: 700875925H1
cagggcccattttaaatactttatcaagtgccaatgtcttcggtcagtcaagtggatcatctaggcgggctgctgtttctagtagccgtgatgcatttgttggtgctgagtcagatattcggactcgcactgctgaggctagccctggagcagcacatcgaggtttgagtgggcaaagaagttcaccaattggatcttctgatcctaagagagttgtatcatccgggagaaatgcttctcatgtg

SEQ ID NO: 17926 - DNA, 249 bp, Glycine max
  Clone ID: 700875930H1
ggctcgaggaattggaaactaattgtactgagtttccttatcctgatctactaatacgaactagtggcgagcttagagtgagtaacttcttgttgtggcaattagcctacacagaactttattttaatcgggaactctggccagattttgggaaggatgagtttgtagatgcattaagttcatttcaacaaagacaaagacgctatggtggtcgacattcataaacatttgtttgcaatatatagtgat

SEQ ID NO: 17927 - DNA, 250 bp, Glycine max
  Clone ID: 700875933H1
atagaattgaatgctatctagcatggagaggagcttttgttatgtacccttggtctcttgttaagcgtgtaaaaaggtgctgggatagaataaaaacctggttgaccaataattttcctgaagcggaggccactctttgtaaaggtgcaactgaagctgacattcaggagttggagaatgtattaaaggtgaaattgcctcttcctacaaggatcctttatcgctttcacaatgggcaagaatttgcaaa

SEQ ID NO: 17928 - DNA, 246 bp, Glycine max
  Clone ID: 700875934H1
ttcaaaatttgtggtaaagcaaatggcgaaagtattctgtgattttcggtttcttctcttgattgcagctggcgtcttcatctatatccagatgaggcttttcgcaacacaatcagaatatgctgatcgcctcgctgcagctatcgaagctgaaaaccattgtacaagtcaaacgcgatcgctgattgatcagattagcttgcaacaaggacgaattgtggccctggaagaagagcagaaacgtcg

SEQ ID NO: 17929 - DNA, 246 bp, Glycine max
  Clone ID: 700875935H1
gtatttttgaagaaatatcgtggatttacaaagaatctggttaggcttctacaattctttaaggtgaagataacttcggctctttacacaagcatagaatgatattttttcttggtatcaagttattcagtatgtatgtttgtttgttttaattcccttgtgctgcaattattttgatagatctgctgcgattattcagtataattaagttattcagcgtatattcagttatttagtacattgtta

SEQ ID NO: 17930 - DNA, 238 bp, Glycine max
  Clone ID: 700875937H1
gtgtgaaccaaaccgaaagcagatgaagcagagtagcagaagcagggttcagtcgaattttccaaatcttaatccacttcttatcctagtaacaaacaactacacgtttttgtttatcattccgaaaattttaatttgttaatatattcttataaatagaggaatcgtttgccattgccctttccaaaccgtttcatcttgttgcacttgcaaccgttgccatattaattatcttcca

SEQ ID NO: 17931 - DNA, 258 bp, Glycine max
  Clone ID: 700875894H1
ggaatgctcagggcacatgcgcatagagatgatatgcaacgagcatggactcttcttggagattgctcaggtgatccggaagctggatgtcatcatcttgaaagggatcttggaaaactgttccagcaacagttgggcttgtttcattgttgaggttccaagaggttttcacagaatggatgttctatgtcctttactgcatcttctgcagcttaggagaaaccctgtctcttgtaaaagctgaccctaccatgccag

SEQ ID NO: 17932 - DNA, 257 bp, Glycine max
  Clone ID: 700875859H1
caacaacatacctttcaatgttcttatctctgactgtggaaagcaagtctatctgttaccacagtgttatgcagagaaacaagctcttggagaagtggatgctgagcttcttgacacccaagtgaatcctgctgtgtgggaaattagtgggcacatggttctaaagaggaagaaggattatgatgaggcatctgaaggcaatgcttggaggcttcttgcagaggtgtccctctctcaagagaggtttcaagaagtca

SEQ ID NO: 17933 - DNA, 264 bp, Glycine max
  Clone ID: 700875861H1
caactctttcaaaagggagaagaaaaggaaaggaaacaaaacgcacaaaggattattatagcaatggcagaacaaaaccaaaaccagacaactgaagctggaaggcaccaagaggttggccacaagagccttctccagagtgatgctctttaccagtatattctggagaccagtgtctacccaagagaacctgaatccatgaaagaactgagagagttgacagcaaaacacccatggaacatcatgacaacctctgcagacgaa

SEQ ID NO: 17934 - DNA, 264 bp, Glycine max
  Clone ID: 700875863H1
tagaaacataactaaccttgtagtccactggaccagccgtaccagatatattagggacacagtccaacacacttctgaatttgcttcaagaaatcatttgccccatcgcattcaggatcaaatgttgtcacatctatgtttaaggttcataacagaaggactgaagcagcaagaaacattgaatgatcttccaaaggcaattcgttcaagcattgcacaccatctgttatcccctgtcgtgcaaaaggtctaccttttccaagg

SEQ ID NO: 17935 - DNA, 266 bp, Glycine max
  Clone ID: 700875864H1
gatatttcgtatctcactgggtcgcgctgctgtctacttggatatgggaaagtatgaggaatgcataaaagattgtgacaaggctgttgcatgaggaagagaactaagatcagattttaagatgatagcaagagctttgacaaggaaaggaaatgccttggtgaaattggcgaagtgctcaaaggattatgagcctgccattgagacataccagaaagcactcaccgagcaccgcaaccctgacactttaaagaaacttaatgaag

SEQ ID NO: 17936 - DNA, 265 bp, Glycine max
  Clone ID: 700875865H1
ggcttatggtggatacctaggcacccagagacgaggaagggcgtagtaagcgacgaaatgcttcggggaattgcaaataatcgtagatccggggattcccgatataggtcaacctttcgaactgctgctgaatccacgggcaggcaagagacaacctggtgaactgaaacatcttagtagccagaggaaaagacagcaaaagcgattcccgtagtagcggcgagcgaaatgggagcagcctaaaccgtgaaaacggggttgtggg

SEQ ID NO: 17937 - DNA, 257 bp, Glycine max
  Clone ID: 700875867H1
atcatcatttggtgcagatcaatttgatgatgctgatgaagctgagaaggagcacaagagctcttttttcaattggttctacttgttaataaatatttggtgctcttattgctgcttctgtgttggtgtgggtacaaaccaatgtcagttggggatggggatttggaattccagcagtggccatggcaattgctgtggtgagtttcttctcgggtacgaggttgtatcggaatcagaagccaggaggtagccccctc

SEQ ID NO: 17938 - DNA, 255 bp, Glycine max
  Clone ID: 700875869H1
gagaaatttgctaggggaaagagtggactctgtgctgctcacagcagcttggtgcaagagtcggaaatgaacaagggcagtctgattgcacccggacttttccgtggtcttgtaccttctgcttccacggcctgtagcagttttgagaacaattcttcctcaggcgtcagtgttctgtccgactcctacgattccgtggaaactccagcaaaaagacagcacttgatactcaaggaggtgttagttccgctctcg

SEQ ID NO: 17939 - DNA, 249 bp, Glycine max
  Clone ID: 700875870H1
atatcttgctagggttttaggaaaagacactgtctcgcgagtgaacacaggttacagcaatggctttctttggtagaattgggaatttattaagacagacagcaagcaggcaggttagttcagaattgcgatcatccccttcgttttttcaggctatacgcatatgtcatctgctccaagcacaaagctgtttatcggaggtgtttcatattctactgacgagcaaagtttgagggaagcttttcaaaa

SEQ ID NO: 17940 - DNA, 251 bp, Glycine max
  Clone ID: 700875871H1
gtttttaccaaggaagatgtgctgccctttgatatagaagggacatggaaagctatggaagagtgttacaagttgggaatagcaaagttcattggcatatgcaattatggtatcaaaaaactcactaaactcttggaaatagccaccattcctcctgcagtcaatcaggtggaaatgaacccatcttggcagcaagggaaactcagggagttctgcaagcagaaaggaattcatgttagtgcttggtcagc

SEQ ID NO: 17941 - DNA, 258 bp, Glycine max
  Clone ID: 700875872H1
tttcactctatcgccacccagttccgatggctctcctcgccgtcacttcgcgcgctcccttcctcttctccccaaaccctaaaccactttctccatcctctttctactcccacctctctctctctcctcgctctcccaggttcccttctctccgcttccgctctgccaccggagacgccagcgacgccggcaagcccgccggtaagatctccgacgagtggggcgaggactacgatcccgaggccgaagcattgacct

SEQ ID NO: 17942 - DNA, 247 bp, Glycine max
  Clone ID: 700875874H1
accgccgtatcgttcacactgaaccaatcctaaccccactctctctctctccgccgcaaacgacccttctccggggcggcgctaccgtacatcccccgatttaactaaacgagtaatagaaggcgctgcttggttacaaatcgcggtcaccgcaagcaacaatgacgtcgtcgtcgccaacgacgatcccgtgatgagccttatcaacaagcgcctccgcgctctccgcaagatgctgatccgcatc

SEQ ID NO: 17943 - DNA, 258 bp, Glycine max
  Clone ID: 700875875H1
gccaaagatcctgcggacattgtaagtaaatcttatgaagatggagatgataactaatgttaccgagtatgaggccattgcaaaggcaaaattgccaaagatggtttatgactactatgcatcaggggcagaggatcagtggactttgaaggagaaccgaaatgcattctcaaggattctgttccggccgcgtattcttgttgatgtgagcaagatagacttgactgcaactgtattgggcttcaaaatatcaatgcc

SEQ ID NO: 17944 - DNA, 260 bp, Glycine max
  Clone ID: 700875876H1
cgccaccaccaactcctcctccacaatctcagcctcccacttcgtctccacagcagctaagaaccacaaatttgaatgatgaatcaatgcaagtgtgcactgtagctaagcaacagatgctcatcaatccatccactaaggttgaatccacagattggatagccacttcctatgaccagaaggtttgggataggagctggtcttgcatgggttagctttcttgcatttggtgacatctcagaacaaatcaagactcgcct

SEQ ID NO: 17945 - DNA, 261 bp, Glycine max
  Clone ID: 700875878H1
gacgtgagcaaaactcaaattggagaagaatatggtccgtgggttccttttattggaactttgtttctatttatttttgtgtctaattggtcgggggctcttttaccttggaaaatcatacaattacctcacggggagttagctgcacccacaaatgatataaatactaccgttgctttagctttacttacatcaattgcatatttctatgcgggtctttcaaaaaaaggattagcttattttaataaatacatccaacca

SEQ ID NO: 17946 - DNA, 263 bp, Glycine max
  Clone ID: 700875879H1
atttaaatttccttcctgctgtgttgcaaaaataaaatatctaggagactacaagctaaaagtataattaaatgttaactgtttgatcaaattagtttgtttatatagttttgaaaagtattacagtgggttgagcagagcagatatttctacattgtgagatttttatagtatatgatggaattgtatgaatagaggctggtgtatgtcctgccatgttttcttctttcaggcagagatacttggagttgatccaagagagg

SEQ ID NO: 17947 - DNA, 262 bp, Glycine max
  Clone ID: 700875880H1
cagcacccccatccactggtccctccccactccatcatttcttatactttcttcttcttctttattattgttgattaatataacattctcccacatatttcatatgggtacttgttaatttgggtgtggattgttggtttgttacttgttttgttccgttcaggtgattgtttgattgagccttgaagaaatggaccacagcgctgatgcacatcgcacggacttgatgaccataacgcggttcgtgctgaacgagcaatcc

SEQ ID NO: 17948 - DNA, 254 bp, Glycine max
  Clone ID: 700875882H1
aaaccctacttctacttccctttgttctcaaaccttatcccttatcctcccaaaaccaaaccatgtctacctccgcagcttctctcgcactcccaaccctcactctccgaactcgacaacctctctgtgctccccaatgcttctcctcgtccctctccctcactcctaactccaaacccatttccatttccgccgttttcctcaaaacaacgctgtcgtcgtcgtcgccgttgtcgctgtcgtctcgcttcgtt

SEQ ID NO: 17949 - DNA, 252 bp, Glycine max
  Clone ID: 700875884H1
aaacagcggaagtgaaataccactacttttaacgttattttacttattccgtgaatcggaagcggggcactgcccctctttttggacccaaggtcggcttcggccggtcgatccgggcggaagacattgtcaggtggggagtttggctggggcggcacatctgttaaaagataacgcaggtgtcctaagatgagctcaacgagaacagaaatctcgtgtggaacaaaagggtaaaagctcgtttgattctga

SEQ ID NO: 17950 - DNA, 251 bp, Glycine max
  Clone ID: 700875886H1
acacaatatgccaaatttcactcgccttcatacattgtaaattcttgtcatttggcatattgtgttgagtaaaaacatacaaaaataaaataaaaagacgagaatttacaatgtatgaaggccattgatatttgaccttttttaaatttctgtgtcctcttgtgtataataatagatggaaattcattggtcttagagatgtttgtctgtctcattaatcaaagggatgacagagacatgttcttcattga

SEQ ID NO: 17951 - DNA, 254 bp, Glycine max
  Clone ID: 700875887H1
ataactttgcataggtaggcgcttacatcacagaaatactttatcaaaatgatagcattttaataaacaagagcatttgagaattgaaaatagtgtctgttattcgaccaatctaaatccaaatggcatcccaagaacctacagcttcactttgttctgtttcctctcatgtccccaggccacttgctccccatgacagaccttggaacaatattagcacagcataacatcattgttaccgtagtcacaacccc

SEQ ID NO: 17952 - DNA, 255 bp, Glycine max
  Clone ID: 700875888H1
ccttcacttccatctccttcctctcaacttcacaatgacaatcacacctttctcctttcaagttaactgtgaagacaccttggcaatggcagcatcatcactatctcacttctaaagtgttggtctctgcctctggcaacacccaaattcctaatactgaacttcttcaacgccctactcctccagaccctctcgatgacgctcgtcaggctcggagatcgtcagattggacggctgcaaagacatatcaagata

SEQ ID NO: 17953 - DNA, 251 bp, Glycine max
  Clone ID: 700875889H1
cttgactcggccttgttgagacctggccgatttgatagacaggtgacagttgatgttccagatataaggggaaggactgaaatcctaaaggttcatgctagcaacaaaaagtttgatgctgatgtttctcttgaagtgattgcaatgagaacacctggctttagtggagctgatcttgcgaatctgttgaatgaagctgctatattagctggtcgccgtggaaagacagctatttcatcgaaagaaattgc

SEQ ID NO: 17954 - DNA, 253 bp, Glycine max
  Clone ID: 700875891H1
cgtaactctcatacacaacgcaacctttttagtttttctcgccatcttccgaaactgaccaaccattttcttgggatgtacaatatttccccttttctctgctcttttttcatcattattcacttcttcttcttcttcttctttctctaaccagaacgaacaaatggggttggtgagcagtttcttggggattcttggtttcgccgttcgaatacctcttggcctctctgtggggttctttcctcttgtctac

SEQ ID NO: 17955 - DNA, 252 bp, Glycine max
  Clone ID: 700875892H1
aaaatgtggaagagaacgggttttgaagaagaagcagttcaattgatcaactcagatttcagggacctaagtctagctgctaatagactcgcccatcatgccatcaaacttggtggcattggctttggagcctcttttttcggattgtttgctgccattgctgctatttatctgttgattttggatcgtacaaatcggaaaacaaatattctcacagcactactcattccatacattttcttcagcttgcct

SEQ ID NO: 17956 - DNA, 254 bp, Glycine max
  Clone ID: 700875858H1
tggtgggttgccatcacaagcctttgagtacatcaaatacaatggaggacttgagacagaggaagcatacccctacactggaaaagatggtgtatgcgcattctcagctgaaaatgttgccgttcaagtcattgactcggtcaatatcaccttgggtgctgagaatgaattaaaacatgcagttgcatttgttcggccggttagtgtggcctttcaggtggtgaatgggttccatttctacgagaatggagttt

SEQ ID NO: 17957 - DNA, 263 bp, Glycine max
  Clone ID: 700875827H1
gtttattaaattttttgaggccttgaaaaatcatcaatgcttccagatgtaacgtagcaacgggggagagaagatctgtgtcacttttcacaccaaaccccgatctgagatcttctcttaccctcgcacaacaatgacatccccgacggcgctgaaggccgtgacgctgacgcacgtgcgctaccagaggggcgaccgcgtcggccacttcctggcctagatatcccttgtccccgtcttcatctccctgggcggcttcgtct

SEQ ID NO: 17958 - DNA, 261 bp, Glycine max
  Clone ID: 700875828H1
cacagctgcagttgctgctgctgtggcagggtccaaacaagagcaaacagatgcttctcaacagtctccaaaataattatcggtattgtttcttccagttttacactgtgtgttggtaagtttctgtagcctagttgaatattccaagtggaagaaagaggccatatgtgaattatagtcttgacacatggtgataacctcttcgcagtctttgtaataagattacactaaatttatacagttcctgaagttttagatgga

SEQ ID NO: 17959 - DNA, 259 bp, Glycine max
  Clone ID: 700875829H1
tagacatttcggtggagtttcacataagtctgatgtttatagctatgggatgatgttgctagaaatggtaggagggaggaagaacattgatgctgaagccagtcgcacaagtgagatatacttcccgcatttggcatacaagaggctagagttggacaatgatttaagaccagatgaggttatgaccacagaagaaaatgagattgcaaagagaatgaccataatggggttatggtgcattccaacattcccaatgatc

SEQ ID NO: 17960 - DNA, 268 bp, Glycine max
  Clone ID: 700875830H1
gccaaaagaaaccctccatgtaacctaacttccctctttctattcctctgtattatttttattattttttattgacggtgagtgctgacaattgaaacagtgcagacgacgatatcatggagctgctatggcacaacggccaggtcgtggtgcagagtcagaaccaacgttctctgagaaaacttccgccggtgaccaactcccacgacgcctctcccgccggtccttcaatgacgagagagattcgaccgctggtggagaatttcaa

SEQ ID NO: 17961 - DNA, 269 bp, Glycine max
  Clone ID: 700875831H1
ggccagagtatatgatgatgaagtgaggtagtggatttctggtgttggtgttgacagtgttgggaagaagcttgtgaactcaaaagatggacctccaacctttgagcagcccaagatgactctggagaagctcttgctgtatggtaacatgcttgtccaagaacaagagaatgtcaagagagtccaattggctgacaagtacgtgaacgaggctgctcttggaaatgctatcgaggatgctattcagaggggaactttcttccagtctt

SEQ ID NO: 17962 - DNA, 271 bp, Glycine max
  Clone ID: 700875833H1
gtgccttctatccctcccttccctcttctacgccaaaaacaataccctttctctctcaattcccaccaagcccctacaacctccatcttccatgctccaactcttcgctctttcccctcaccaccaaaacaacgcgccactcttctctcctcacattcgtggctcagacatcggattgggccacagcagccgaggaagaagacacctcgtgggcgacccaaggcgacaccgcgtggggaactgacgctggtcgccacgaagaagggggttt

SEQ ID NO: 17963 - DNA, 264 bp, Glycine max
  Clone ID: 700875834H1
ctgatgctagtgatttgacaggtcctgctcagtcagtggtctgggatgccatggtgccttccaagaagaggacatgtgcaggtcgtccgaagccctcatctgttaagaagctcacaagagacctgtgcgatattcttcatgaacaacagtcttatatgtctgcatcttctgaagaggatcttctttttgaaagtgatacaccaatggtctctgttgagataggccatggaagcattctcatcaggcatcctagctctatagctc

SEQ ID NO: 17964 - DNA, 260 bp, Glycine max
  unsure at all n locations
  Clone ID: 700875836H1
catttactgacggacgacgtattcagcgaggcttacctatagacttgaggaacgtgcgagctgcgcaagggtttggttcccaaatcccgtctgacgtgacgtcccaagtaaattatgatattgtnctgatggtgggaggaaagtcaaaaatactacatgtaacaggtaacaaatttttagttttgtcccgaagcgatgaaaaagatgtaaaacgagtgtgaacaggtgtttgtataaagataaaataacaataaagttaa

SEQ ID NO: 17965 - DNA, 258 bp, Glycine max
  Clone ID: 700875838H1
tggatacactgtcatagtacacaagagcaggaaaattgctcccgctgatgagaccgttcttaccaacggtttcaaaattggtgaacctggcaagattgtactcaccatagacaaccaaacatccaagaagaagaaactcctctacaggtccaagaccaaacccattgcagagtaccttgaataaggatgttactgttactgttatattcatcattacaaccacaacaacattggtgggtggggcgagggacttaattc

SEQ ID NO: 17966 - DNA, 257 bp, Glycine max
  Clone ID: 700875839H1
gttcaactgaggtgatggctttgaatttgccttctcccgcccaagtgaagcccttatttttctcttcaaataactccacaaaacttccaagagacttttctttgaagagaaaagatagtgacacaacagtagagagacgagtttattgctctgccgctgctcaatcaccaccaccagcatggtcaggaacagctattcccgagccttctgatttcaagacatgggatgggcaaaaacctatttctgtcttagttcta

SEQ ID NO: 17967 - DNA, 259 bp, Glycine max
  Clone ID: 700875840H1
atttaaatttccttcctgctgtgttgcaaaaataaaatatctaggagactacaagctaaaagtataattaaatgttaactgtttgatcaaattagtttgtttatatagttttgaaaagtattacagtgggttgagcagagcagatatttctacattgtgagatttttatagtatatgatggaattgtatgaatagaggctggtgtatgtcctgccatgttttcttctttcaggcagagatacttggagttgatccaaga

SEQ ID NO: 17968 - DNA, 258 bp, Glycine max
  Clone ID: 700875841H1
ggcaaagaagccacactttgtgagaatggaagaagctcttgagaggctggaagaagtgttcaacaagtgcagtgaaggaagggcttattttggaggagatacaattggaattattgacattgcttttgggagcctttggggttgggtgagagtgatagaggagatgaatggaagaaaagtgtttgatgaagcaaaaaaccctgctttggctaaatgggctgataagttttctgctgatcctgctgtgaagggtgttct

SEQ ID NO: 17969 - DNA, 256 bp, Glycine max
  Clone ID: 700875842H1
tgcaagcgacaggaggaggagattactggggcgagcacgagggagtcaaagccaaagtctatttcagagcctcggagtaccaagctgagggtcgatcctatttgcaagtagaagacttaaaaatggacttcagtgttaagagcattcaaatgggtatacaaaacgtttataacgggaacgcatcattgaggccgcattgaatctattcatcaactctaatgctcaagatctgcttcgggaaatgaaaccgtcgata

SEQ ID NO: 17970 - DNA, 260 bp, Glycine max
  Clone ID: 700875843H1
ttggatttgccattgtgcaggcaattggccaagttcttttcctacgtccctatgtcaatgacttttctacagagtgggttatttcttctgttatcttattgactcttggctctgtgtttacaatgtacatcggagaacgaattacagacctaaaacttgggaatggcacctctcttttgatattcacaaacattatctcgtacttgccagcttcttttggtaggacaattgctcaagcatttaatgatgcaaactacatt

SEQ ID NO: 17971 - DNA, 267 bp, Glycine max
  Clone ID: 700875847H1
gtgaaaagaatgcagactatgctgtgaaggtgagtggagtggaaagattgcctgaccccgtggagagaggagtgccattcacctttaagatcccagcttatactcctgaaccaattcaaagcggggacttgttatatgaaatttcttatgctggaatagaagcacaacctgctacatttctccatgatctctgtgaggaagcaccatgcccagtacctgcaggcaactttgtgctcgttcacaccgaattattgcctccggttaccc

SEQ ID NO: 17972 - DNA, 268 bp, Glycine max
  Clone ID: 700875848H1
gtgaaaagaatgcagactatgctgtgaaggtgagtggagtggaaatattgcctgaccccgtggagagaggagtgccattcaccgttaagatcccagcttatactcctgaaccaattcaaagcggggacttgttatatgaaatttcttatgctggaatagaagcacaacctgctacatttctccatgatctctgtgaggaagcaccatgcccagtacctgcaggcaactttgtgctcgttcacaccgaattattgcctccggttacccc

SEQ ID NO: 17973 - DNA, 262 bp, Glycine max
  Clone ID: 700875849H1
gattttgactttgggaaaaagaaatcatttccattccgtgaccagcatttctttgcatcaattgagaaagcaaagagagtgcttgggtgggaacctgaatttgggcttgtagagggtcttgcagactcgtacaacctggactttggtagaggaacataccggaaagaggctgatttctcaacagatgacataattcttggaaagagtcttgttagtgtataaacttttctatttcaattttcagtatttcacttatatgtag

SEQ ID NO: 17974 - DNA, 265 bp, Glycine max
  Clone ID: 700875850H1
gagtggtgagataaagtcatggtggaaatcctctctagagaaatggttctgttgatcaagggcatatgcatatgctattccatatgtacctggtagtcttggttacctccaccgcataggcttcaccaggaagagagaaaggctcatcaacccaatggaccgaacctcaccactgccaccatcttcggttcagaaacaacaaggcatgtcagagtcacttccactaccctttctccctgatgaactcgttgttgaaattctctcg

SEQ ID NO: 17975 - DNA, 258 bp, Glycine max
  Clone ID: 700875851H1
tgaagttgaagtcttgcccttctctcttcaactccaaacacaagacatcatcatccatggctggctccgtctccactgtcggagctcttcacagagctcttttgaacctgaatgggtctggacctggggtttcagctcccagttcatccttctttgggagcagcttgaagaaggttattggctcaagggtccccaacacaaagatttgctctggaagcttcaagattgttgctgtagaagagaagaaagagattgaag

SEQ ID NO: 17976 - DNA, 254 bp, Glycine max
  Clone ID: 700875852H1
atctcttcactcttattattccttctcttctcaacgacgatggaggacccatcagcagcaacaacgttgttgctgaacagcgaatattcgaggctgttcgtcgaggacacggacttgtacaatcgcattgtgttgggaaccctcttgccgcacttcgtgtggggcccactcccgcacttcctccagacgtggcttcgcaattacctcggcggcgtcctcctctacctcctctccggcctcctgtggtgcttcta

SEQ ID NO: 17977 - DNA, 258 bp, Glycine max
  Clone ID: 700875853H1
ttccaatatattccattctctctgtgtatttccctacctctcccttcaagatgcagatcttcgtcaagaccctcaccggcaagaccatcacccttgaggtggaaagctctgacaccatcgacaacgtcaaggccaagatccaggacaaggaaggaatccccccggaccagcaacgtctcattttcgccggaacagcaacttgaggacggccgtacccttgctgactacaacattcagaaggagagtactcttcacctc

SEQ ID NO: 17978 - DNA, 253 bp, Glycine max
  Clone ID: 700875855H1
ttgaaggctgatatgctgctgaatagatccttgtaaacccttaattcctattcaattttttcccgttccttgtaaccctacgttcctccaagtttcgggttggggtgaactgcatattttagatgaaaaggctgcatacatgatctgtgttggtttcctttttactagtttatcattgactgggttagtatatcatgttctttcattagctatacagaaatacactttccattgtataatattctaattgatt

SEQ ID NO: 17979 - DNA, 255 bp, Glycine max
  Clone ID: 700875856H1
gctgtgttggtgagtgagttgtggtgcttttgaaagatgatgccgattctgatgaaaggtcatgagaggccattgacgttcctgaaatacaacagggacggcgatctcctcttctcctgcgccaaggaccacaaccctaccgtctggtttgccgacaacggcgaacgcttgggcacttatcgcggccacaacggcgccgtttggacctgcgacgtctcaagagattcggctcgactcatcacgggaagtgccgat

SEQ ID NO: 17980 - DNA, 259 bp, Glycine max
  Clone ID: 700875826H1
gaaaaattgttctcaccgtgtgtgtgttgtgtgtgtgtgtgagagagagagagagagagagagagagagagagagagagagaggttaggctatggctgatgagagcgtcgttgagtccccagtgaagaggcagagagatgatgatgaagaatatgaggtctctgtctccatagatgtagagggtggcaaagactctcttagtaacggtttatcatctgtgattcctgggtggttctctgaaattagttcaatgtggcct

SEQ ID NO: 17981 - DNA, 245 bp, Glycine max
  Clone ID: 700875790H1
ccctactcattctccatacctcaacgattatgttaaagagacggcaacactttgctgtccgccttgaccgagcagagcttcgtcttggccctcgatcttgccctaaagtactctcagtcacaacagacaccgtcgtcgtcgtcgtcgtcatcaatggcaccgaagcagaccaaggctgagaagaagatcgcttacgatggaactgtgcgacctaatggaggagtacggccagatcctcgttgtga

SEQ ID NO: 17982 - DNA, 239 bp, Glycine max
  Clone ID: 700875791H1
gacaagataagtgagaagaagatgcttactccaatagaggtcttatgcaagtcatatccattggagtttacatcatacttccactactgccgaacgttgcggtttgaagataagcctgattattcttatcttaagagactatttcgggacctattcatccgagaaggttatcagtttgactatgtatttgattggactatctgaagtatcctcaaattggatccagttctagagcccga

SEQ ID NO: 17983 - DNA, 250 bp, Glycine max
  Clone ID: 700875792H1
ctctcaactcccaattactttgttgcattccacacaccatatgacaccagaagagagaagagagaagagactcttccttccatcctgcaacttcaatcatcatgcaagactccagctcaatgaagatctcccctctggatctgcatgtccgccatcttcaagggcaagctcgacccctccaacgtctcctcctccaccaacgcgccgaccccgccttcctcctcgagaaccgcgacttcctcatgctcct

SEQ ID NO: 17984 - DNA, 216 bp, Glycine max
  Clone ID: 700875793H1
gcatagcttcacagtagaacgatactatagctagctacactctttcaaatcacgctcccgatatcgctgctcgtcgtcattcaactcgtgtagcgcgaacctttcgatatcatgctccagtgtatgcaatctctgtgcagtagactcaaaatcgtgatgtctatagatgatgctgccggcatctcgagcatctatcgggaggaaacctattgacca

SEQ ID NO: 17985 - DNA, 249 bp, Glycine max
  Clone ID: 700875794H1
gttattgatgcgcctggacatagggatttcattaagaatatgattactgggacatcccaagctgactgtgctgttcttatcattgattcgaccactggtggttttgaagctggtatttccaaggatggacagactcgtgaacatgctctgctttcattcacccttggtgtgaaacagatgatttgctgctgtaacaaaatggatctactacacccaagtattccaaggccaggtatgatgaaattgtga

SEQ ID NO: 17986 - DNA, 274 bp, Glycine max
  Clone ID: 700875801H1
gttgacgcaatgtgatttctgcccagtgctctgaatgtcaaagtgaagaaattcaaccaagcgcgggtaaacggcgggagtaactatgactctcttaaggtagccaaatgcctcgtcatctaattagtgacgcgcatgaatggattaacgagattcccactgtccctgtctactatccagcgaaaccacagccaagggaacgggcttggcggaatcagcggggaaagaagaccctgttgagcttgactctagtccgactttgtgaaatgacttg

SEQ ID NO: 17987 - DNA, 273 bp, Glycine max
  Clone ID: 700875802H1
ctagcattgtttttcttatctagaaaaagaccatttgaccttccttccatctttcttgggcacgccaagctctaaaaaaacccttttttcttacgttttgttccctctaaaattctctttctgcttagtctccacgctcttgcttgcttttgtgtgagagcacaatggcaatggtgaagtctcccaagaagcaagtgaacctcttctattcccttgactgtgaagaccttgcccagaacgttgctcttgcatcaccccacatcgttctccaga

SEQ ID NO: 17988 - DNA, 267 bp, Glycine max
  Clone ID: 700875803H1
gaagaagcagcaaccaagggacactgtggcagtggcaaacaaacagtgattacttaggagccttctgtggtttttctattcttaaaagatggaataataaaagatgactgctggagattcattgagcattgttggttcgtagttggtgccccatataaatgtaagggggaaaataataaagaagcgatctaagggtgcaaggttagtgcacagtagaaaattaggaatgttcataggcttcgtgatggaaaggttagttcttagtta

SEQ ID NO: 17989 - DNA, 261 bp, Glycine max
  Clone ID: 700875805H1
gaatgcatcaatgtggactataaatcaactagaaaggagtcattttatgaccttcagcttgatgtgaatcgctgtcctgatgtttatgcttcctttgacaagtatgttgaagttgaacgtcttgaaggggataacaaatatcatgcggaacaatatggtttgcaggatgctaagaagggtgtcctgttcattgatttccctcctgttcttcagcttcaactgaaaagatttgaatatgactttatgcgggatactatggtc

SEQ ID NO: 17990 - DNA, 262 bp, Glycine max
  Clone ID: 700875806H1
cttgtctttgccaagatgggaatcaaccccatcatgatgagtggtggagagttggaaagtggaaatgcaggagagccagcaaaactgatcaggcagagataccgtgaagctgcagacatgatcaagaagggaaagatgtgcgctctcttcatcaacgatcttgatgcaggagctggtcgtcttagtggaaccacacaatacactgtgaacaaccagatggtgaatgccactctcatgaacattgctgataaccccaccaatg

SEQ ID NO: 17991 - DNA, 261 bp, Glycine max
  Clone ID: 700875807H1
gttgctgcaacaattttagtagggatcaaaattcagtaacaattgttgttgatgaagatcagcaaaggcccaagaggaaacagaaagatgatcatcatattgacttggaggcaacacttgaagatcaagaaacaggtgctgtaaccaatatatgtgaggataaaacttcagaaaaaatggacgttgaggaagattggcaatggcttaagaggaaacagaaagctgatcactatattgacttggaggcaattttcatgaaga

SEQ ID NO: 17992 - DNA, 257 bp, Glycine max
  Clone ID: 700875809H1
gaagaagcagcaaccaagggacactgtggcagtggcaaacaaacagtgattacttaggagccttctgtggtttttctattcttaaaagatggaataataaaagatgactgctggagattcattgagcattgttggttcgtagttggtgccccatataaatgtaagggggaaaataataaagaagcgatctaagggtgcaaggttagtgcacagtagaaaagtaggaatgttcataggcttcgtgatggaaaggttag

SEQ ID NO: 17993 - DNA, 263 bp, Glycine max
  Clone ID: 700875810H1
gtcaccgtagcgctctttatcattcacatacttgagtatttcttccgatactcgtattaaggtcagtgttcaaactgatagtgcacctgcggctttaggaccatattctcaagcaatcacatccaacaacctgatgcttgtgtctggtgtatcttggaccttcttcccgagacagggaagttcatatcggatgatgttgaagatcaaacggaacagttctgaaaaacatcggggaaattctctaaagccggtggtactagcta

SEQ ID NO: 17994 - DNA, 150 bp, Glycine max
  Clone ID: 700875811H1
gttgaggtgattgcatttaataatgtagagggtgatagatttctgactactatcttgagcagtagtgcgatagctcatatgatactctggcacaacattggatggatctgatacgatggaggtgatgagtaaagattttcttaaggagaa

SEQ ID NO: 17995 - DNA, 264 bp, Glycine max
  Clone ID: 700875813H1
ggacaggtaaggaaatttcttgttgagttacgtgcttacttaaacacgaataaacctcaattcaaagaaatcatatcttctaccaagacattcactggggaagcagaagtccttttgaaggaagctattcaagaacagatggaactctttttactacaggaacaggtagaaaaaaattgattaatcatttaataactttataatttcactttcaaattcttataattagtatcttttaatatctttttatttcatttgaatata

SEQ ID NO: 17996 - DNA, 269 bp, Glycine max
  Clone ID: 700875814H1
gaaatttaaatggaatgtatagggtgggggcaacaatatcataaaaaatacttagttaaaaaaacgaaaatactgtattgcaattgtattgcaattcgaaacgaaatatagttcgagatcattgtattatttttgtactatattaatcttaatcttaattggaacgaaatctttcaaaattggatttctaattcttaatttatattttcgttttttcgttcttttctttttcttagattataatccgaaaacaaaagagttaagtgaat

SEQ ID NO: 17997 - DNA, 273 bp, Glycine max
  Clone ID: 700875815H1
attcagcctccaaaagaacactctcatcactctattggaatgttgatgatgataatgatgatgatgatcacaaacacttcaatttggacagtaatgggaatgtgagtgttttgaggactgaagagaataataataatactaatggtacttctggctcctttgccactactgcttaaccaacttccacaaacaccttcattgccccaaatagatgggttacttcgaacaccatatcaaatacaagggaccaattggtatggttaactccatttt

SEQ ID NO: 17998 - DNA, 206 bp, Glycine max
  Clone ID: 700875816H1
taacatttatacaaaacaaaaaaacaagttctggccatggctgcatcatcatttaggcctccagccatagtggcggaagcagcgaggttcaaacccgaagtggcgaaggttcaaccatggtgaaactctgaaaggttcaggctaacaaaagggccttacacagcaagagatgtagtgtccctccgaggcaacctcagacaaaccta

SEQ ID NO: 17999 - DNA, 268 bp, Glycine max
  Clone ID: 700875817H1
ctcgagcgattcggctcggtgcgatgggatctcagggtagctgagcagtggatgcacgtgtgatagttgctcaaaatggcggaagttgcctgttgatgcacttattcccccaaagtggacatgtgtggagaatttatgggatcagagcaggtgttcatgtgctgctcccaatgaattgaacccaagggaactggataatcttctgaggctgaataaagaagtcaagaaacaaagactggcagcaagccagagaccggccctggaacgg

SEQ ID NO: 18000 - DNA, 264 bp, Glycine max
  Clone ID: 700875818H1
ctggggttggctatgggcagtggcttcatggagaggctgttgcagctggcacggtattttttaaaaaacaaaaatatcatgaattgtacttatatttgtgtttaatactaaagtctataggtctattctgatgaatctgtatgccaatgtacacaggtaatggctgttgacatgtcatatcgcctaggttggattgatgattctctagtgaagagagttggagatattttaaaacaggctaagttaccttcagcccctcctgag

SEQ ID NO: 18001 - DNA, 264 bp, Glycine max
  Clone ID: 700875819H1
gaaagaatcaagcttagtcaaagtgtctgtgactgtcacacacagtctttaagatctggaagcgcttctcacttgcccacaacaacaattcgagacaatttcaaaatgttcagcttcaaaataataaaaccctaagagaggggttgcaagcaaaatgagaagcgcaaagatgtggacggttttgatgtgtctgatggtgagcttcttcgctcgcattgaatcgctgtctgtgacggtgaacgacgtcgagtgcgtctacgagta

SEQ ID NO: 18002 - DNA, 247 bp, Glycine max
  Clone ID: 700875822H1
gccgccgtcgccaccgccgcgatggcgtggcgcgtccgacgccgacgacatcctgatccgtcagtggtgccaatttggcgaacgaagaagtggacaacctgctgaacgccgagcaccacttcgcgacctccaaggccaagttcgccaagacctacgccaccaaggaggagcacgatcatcgcttcggcgtcttcaagtccaacctccgcagagccaggctgcacgccaagctcgacccctccgccgt

SEQ ID NO: 18003 - DNA, 256 bp, Glycine max
  Clone ID: 700875823H1
tgaagattccgcaacagagagtagaaaagatggcgcggttgatcacagtggtgtggtgcgcggtggcggtgctactgtgcgccgcggcgggcgcgtcgtgggtggaggaggcggcgaacccgatacgaatggtggcgggggtggaggcggaggtggttcgggtgatagggcagtgccggcgcgcgctgaagtttgctaggttcatgagcaggttcgggaagagttaccgaagcgaggaagagatgagggagaggta

SEQ ID NO: 18004 - DNA, 261 bp, Glycine max
  Clone ID: 700875825H1
agaatttcacattttatcttttgcattgagcaactaactcactcgcgcgatggctgctgccatcatcaccacatgcaagctctcactgcttttgagtcttctctcagtttcacttttgctgggtgtgaggtctgatacccttcagaatgtaggcgcaattccccccacatgcaagcgcatagagtgtcccagctatgatgtcattcacgtaggcaacggctacgaaatccgtcgctataattcacccgtttggatttcaaa

SEQ ID NO: 18005 - DNA, 246 bp, Glycine max
  Clone ID: 700875788H1
aaagccttagccttccctacaactccaaacattaagacatctccatccatggctgcctccgtctccactgtcggagctgtcaacagagctcttttgaacctgaatggttctggagctggagcttcagctcccagttcagccttctttgggaccagcttgaagaaggttattgcctcaagggtccccaacagcaaggtttcggtggaagcttcaagattgttgctgtagaagagaagaaagagattg

SEQ ID NO: 18006 - DNA, 250 bp, Glycine max
  Clone ID: 700875745H1
gaagattccgcaacagagagtagaaaagatggcgcggttgatcacagtggtgtggtgcgcggtggcggtgctactgtgcgccgcggcgggcgcgtcgtgggtggaggaggcggcgaacccgatacgaatggtggcgggggtggaggcggaggtggttcgggtgatagggcagtgccggcgcgcgctgaagtttgctaggttcatggcaggttcgggaagagttaccgaagcgaggaagagatgagggaga

SEQ ID NO: 18007 - DNA, 262 bp, Glycine max
  Clone ID: 700875747H1
aaggctctcttccctcctccacttcatccaaatctttctcattttctctcccaaatcacactctcaattacaataacacacactcatcttgataattttccccaaaaatcccaagagctcgcgccatggtttccccggaaaacagcaattggctgttcgattacccgttgatcgacgacgacgttattcccgtcggcgactcctccttcgccgctccgcttccaccttctcctggcccccacctcccgccaatgtcagtgtg

SEQ ID NO: 18008 - DNA, 259 bp, Glycine max
  Clone ID: 700875748H1
cagcttttcaaagctgcagagctgatcgatgccggtaatctggaactcgcgcatgggatattggcgcggctcagtcaccaactttctcccattgggaagccttttcagagggctgctttttatttcaaagaggccttgcaattacttctccatccaaatgccaacaacagttctttcaccttctcacccactggccttttgctcaagattgggcttacaagtcattctcagaaatctcaccagttctgcagttcgccat

SEQ ID NO: 18009 - DNA, 253 bp, Glycine max
  Clone ID: 700875749H1
cttgaccaagattgacaggcgatctggtaaggaacttgagaaggagcccaaattcctgaagaatggtgatgctggtttggtcaagatgattcccaccaagcccatggtggttgaaaccttctccgagtatcctccacttggtcgttttgctgtgagagacatgcgtcaaactgtggctgtgggagtcatcaagagcgtcgagaagaggaccctactggagctaaggtcaccaaggctgcacagaagaaggcca

SEQ ID NO: 18010 - DNA, 250 bp, Glycine max
  Clone ID: 700875750H1
gtcgagtctcttctcttctaatctcctccatagcatatttttactcgatccaaccctcgctttgctagatctcttgatgatgggttccgttctagaggacaagatagaccgtcttagttttcacgaccaccacgacgccgacgccactcccttagcatcttcctcttctaaagtcctccaacaattacacatcttcagattttgagacacaagcgttgtagatttgcgggctcatgccgctttgacacaa

SEQ ID NO: 18011 - DNA, 110 bp, Glycine max
  Clone ID: 700875752H1
aaaccgaattatgttcagttcttcttattacaaaacagttttgttagaactcagaagccatcttgtaacagtttcataattgatataattgacatgtcaatggttgattt

SEQ ID NO: 18012 - DNA, 249 bp, Glycine max
  Clone ID: 700875756H1
aggagcaatgcatcatgattgccctgtttgttttgaatatttgtttaaatcaagaaacgatgtcactgttatgccatgtggacatacgatccataagagctgcctgaatgaaatgagagaacatttccagtatgcatgccctctctgctcaaagtcagtctgtgacatgtcaaaggtttgggagaaatttgaccttgagattgtgctacacgaatgcctgagcaatatcaaaataaaatggtttggatc

SEQ ID NO: 18013 - DNA, 247 bp, Glycine max
  Clone ID: 700875757H1
cttcgtttcttttcgtgaaacaacagaaaacacaagattaggacttgtgatgtcgggcatagagaggcttcagaggatgttcgcgggtgcatgtggagcgctgggccatcccccaccggattcccccaccctcgattcctccgagcaggtctacatctcctccctcgcccttctcaaaatgctcaaacacggaagagctggggtaccatggaagtgatgggtctgatgttgggggagttcgtggatg

SEQ ID NO: 18014 - DNA, 96 bp, Glycine max
  Clone ID: 700875758H1
gtggctggttcaactgaggtgatggctttgaattcgccttctcccgcccaagtgaagcccgtatgtttctcttcaaataactccacacaacatacg

SEQ ID NO: 18015 - DNA, 252 bp, Glycine max
  Clone ID: 700875761H1
aagaaaagcatggctaggagagcacattgtcttgtgttaccatatccacttcaaggacacatcaatcccatgcttcaattctccaagctattggaacatcaaggggtgagaataacacttgttacaactcgtttcttctataataacttgcaaaaagtgccaccttctattgtacttgaaacaatctctgatggttttgacctagggggcctaaagaggctggagggtccaaggcatatttagatcgctttt

SEQ ID NO: 18016 - DNA, 127 bp, Glycine max
  Clone ID: 700875762H1
cctcgagccgaatcggctcgaggtttcctttctgggtattctgacgggtttttggagggacttttctttctcattttttatccaccatgcccgagtcacagaaacaaccggcttctagaccgaagca

SEQ ID NO: 18017 - DNA, 213 bp, Glycine max
  Clone ID: 700875767H1
ccaatatcgtgctcaccatcaggaacctggaagtcggagagcatgacccccaatgccatgacatgaatgctgtgacagatcagcgtactatcggatgcgcacgaatcatgcgactcattactctactacactaaagcagtctggtccaactgctgccgagaataatgcaaatctgggtggaccatgctacatcactccgtcgttcgagcagtt

SEQ ID NO: 18018 - DNA, 247 bp, Glycine max
  Clone ID: 700875768H1
gccactgaaacatttaattaattagaagagtatttgcaaacgccaaataagaaatgggagagttatgtttactcatatttatatgtttccaccggcacacagttaaattaattatttgaaaaacatgacaaagaaataaggagaacggatttccctagccaatacctctagagggagtaaaattctccaaagccttggcatccataaaactttcatggacccaaatattctctggaatgcccacatc

SEQ ID NO: 18019 - DNA, 89 bp, Glycine max
  Clone ID: 700875769H1
cttgcaagcatctcatttctctctttctctctttctctctctttgggagaaaacccactcttcttttctctctcttccacacaacatac

SEQ ID NO: 18020 - DNA, 244 bp, Glycine max
  Clone ID: 700875770H1
tacaaacctctctccgtatcactccatgttataggtcacattgtcacaatgtggtcaccaattgttctactgttgtgccttattcctcctgtgttcttgctattcttcttccaataccgtagaaccttcaagaactcaaaccttccaccaggtcctagaggtcttcccataatagggaatctccatcagctagatagctcaatcttcatcttcagctatggaaactctcaaagaagtatggccc

SEQ ID NO: 18021 - DNA, 214 bp, Glycine max
  Clone ID: 700875771H1
aattcttacatttagcaatgtgtttttagtcctttattggagactaaaagcacataattttaaaccaattgaggtcagatttggtggaaggggctagtcatccacaaagtagcaaatctagtaattattatcagtgtctttgatggccagacatgtctgtaattgttgcatggcacttccttgggccactggctatgccagagctcccacacaa

SEQ ID NO: 18022 - DNA, 245 bp, Glycine max
  Clone ID: 700875772H1
ggcaaatctcaagagagtgtgagtgaagccattaacgcctattacagcgtgtacctggtgggcaagtccttccaggttccagaagtggagcacatgggtcatattctacttgccttggagatccgcggtgcacagacgtactggcagatgccgtctacctctaacatttacgagcctatttatgcggccaacaagatgacggtcaagtcgctgccacgaaagtgtcttatacgacgtggtttgga

SEQ ID NO: 18023 - DNA, 246 bp, Glycine max
  Clone ID: 700875773H1
ccagtgggttcttcttcttctattacagcaacgttgcccaagaccatgaccatggccatggccacgatcctgctcctgtacacggtcttcgcggtttcatcggccctagacatgtcgataatctcgtacgacaacgcccacgccgtcacgtcgcgcagcaaaggatgctgatgtccatgtacgagcagtggctagtaaagcaggcaaggtgtacaacgcgctcggagagaaggagaagaggttcca

SEQ ID NO: 18024 - DNA, 245 bp, Glycine max
  Clone ID: 700875774H1
ctccaagtatgtttttacaatccttcaaaaatcttgtttctttgtgtgtgtatggtgatgataatctaattagtgttcatgaatatgtcaagccttactttagtggttctaaattgaaaagctttctagctggtcataatatcaccattactgatggtattgacaaaactagtgcaactttgcaatttagaaagttagcgattgtgattttctcaagagaaactttaagcagatgtctaatgttt

SEQ ID NO: 18025 - DNA, 247 bp, Glycine max
  Clone ID: 700875776H1
aaaaagaaagagaagtcgagccccagtgacaatcagttgcgtgatgcgatatgtgaaattcttaaagaagttaacttcaatacggccacatttaccgacattctgaagaaacttgctaaacaatttgatatggatctcactccgagaaaggcatctataaaatccatgattcaggaagagctgacaactagctgatgaagcgatgacgaggacagagaagaggatgctgagaaagatgaagccccat

SEQ ID NO: 18026 - DNA, 227 bp, Glycine max
  Clone ID: 700875779H1
tggaccacctagacaaccctgtggccaacaatgcttgggtctatgccactaagttttccccagggtcttaaaatgtatatgacttcttcttccctaatccctatgatcccatccctcgtgcttacctttgtgatttatgtgtagattatatgatcacaataattgttggattagtgtacttcttaaggactaaggttcaatttaaactcggatgtctcttgtttgtt

SEQ ID NO: 18027 - DNA, 250 bp, Glycine max
  Clone ID: 700875781H1
ccttcacttccatctccttcctctcaacttcacaattccaatcacacctttctcctttcaagttaactgtgaagacaccttgtcaatggcagcatcatcactatctcacttctaaagtgttggtctctgcctctggcaacacccaaattcctaatactgaacttcttcaacgccctactcctccagaccctctcgatgacgctgtcaggctcggagatcgtcagattggaaggctgcaaagacatatcaa

SEQ ID NO: 18028 - DNA, 248 bp, Glycine max
  Clone ID: 700875782H1
gttggttcctaaagcagcatgcatgccagattgtgcaggaatgactctgtctggaatttgttatttttttcttcctctgttaaggctgttgtggccatttgcggatatgactattgtgtatatggggaaaaaaatcaattcatgggggaatggtttgtatagaatgggaacaaggaactatcctgttatttatcaatgctgtcatcatgtagccaaaaaaaatgtgaatgtctgtatagatttgaagt

SEQ ID NO: 18029 - DNA, 245 bp, Glycine max
  Clone ID: 700875783H1
gtcagggtgcacccattccatgttcttaggatcaacaagatgctttcgtgtgctggtgctgataggctccaaactggaatgagaggtgcttttggaaagccacagggtacttgtgctagagtggctattggacaggtccttctttctgtccgctgcaaggacagcaacagccatcatgctcaggaggctcttcgccgtgcaagttcaagttccctggtcgtcaaaagattatagttagcaggaaa

SEQ ID NO: 18030 - DNA, 244 bp, Glycine max
  Clone ID: 700875785H1
gtgacatttgggctgtttttggcgaggaagttgtcgttgcccagggcgattttctacatcgtgatgcaatgcttgggtgctatttgtggcgctggcgtggtgaagggtttcgaggggaaaacaaaatacggtgcgttgaatggtggtgccaactttgttgcccctggttacaccaagggtgatggtcttggtgctgaattgttggcactttcatccttgtttacaccgttttctccgccaccga

SEQ ID NO: 18031 - DNA, 252 bp, Glycine max
  Clone ID: 700875744H1
ggaagagtatgagaatatggacgatgtcggcacacttcaaacttgtggacatatctaccatgtgagctgcattattccatggctaacgatgaagagcttctgtcctatctgaaaagtatctgctttacctgaaagtacgaaggcatcatgcacttctggaatataaattactcccattatgtgtatagatttggacatccccaaaaatgacgacacgagcctgtatttggaaacgtaatcacaagcatgcta

SEQ ID NO: 18032 - DNA, 244 bp, Glycine max
  Clone ID: 700875786H1
cgatcttcgatcttcgtcgctgaaaatgagagagtgcatttcaatccacatcggccaggccgggattcaggttggaaacgcctgctgggagctttactgcctcgaacacggcattcagcctgatgggcagatgccaagtgacaagaccgttggtggaggtgatgatgctttcaacaccttcttcagtgaaactggggaggaaagcacgtgccccgtgcgatttttgtagatcttgagcccactg

SEQ ID NO: 18033 - DNA, 243 bp, Glycine max
  Clone ID: 700875787H1
ctcgagcgaatcggctgagcggctcgagcggggatgtcagtagtaagccttgtgtcaatggctaatgctggcttctcagagattagagggaagcatttgaactattcaaagttttggaatgctaatccctctgcagaaaagcaggtcaagttgtctagcaaagctggcatgcttttgctgtacactcctgcttttctgctggccttgcatccttctggatctttcctcatcaaggcctcagat

SEQ ID NO: 18034 - DNA, 252 bp, Glycine max
  Clone ID: 700875710H1
tgcaagactatgatgtatcttatgaggaaaccacccaaggagtttggagtgctcatcaaagaacattttaggagccggggtcataaaatccttaaggcttgtgatgcttatatgaaaggtttcttgattggctcgctgactagagaagcctctgtaagtgaaaagagcagtcagaattcaacctctgtgggtttcaagttgatgttaccaagatagtgccaaagcttttcttgtcactatgtgaggttggag

SEQ ID NO: 18035 - DNA, 255 bp, Glycine max
  Clone ID: 700875713H1
actcaacgctgttagaccggcaggatcggcacttgttgatgattggcactgccttacaaccatggtgaggacttttgagacacattgtggatccttgtctcagtatggcatgaaacatatgaggtcctttgcaaacatctgcaatgtagggataaagaatgagcaaatggctgaggcctctgcacaagcttgtgtctctattccttccatccttggagttctctgcaaaggggtttcagtgcataataattcctg

SEQ ID NO: 18036 - DNA, 166 bp, Glycine max
  Clone ID: 700875715H1
tgaaattctgagttctaacgccactaaccctatgctgacgcgacttcttgagaactgtaagagtctcaaatatctggttgatgagtgtccttttgcatttgtgaactagtatgtaatattttattcacttaaataaagcgcattactatgtgcaatgagtgtgttt

SEQ ID NO: 18037 - DNA, 261 bp, Glycine max
  Clone ID: 700875716H1
cttctacctctaatctaggaataggaaaaagatgggcagcactagtgcgagtgccctcaggctatcgtcgatggtcagcgtgtccccgaattgcaattgctcatcgatgacgcttatgaagaagacggcgatggcgatggcgatggctcctttttcacttgcaatgaaaatcaaaagcaaaaggggtggtattaggtgcgaggtggctattaatcggtggatgaggagtcgaggacgtcaccggaggagacgaagatcgga

SEQ ID NO: 18038 - DNA, 258 bp, Glycine max
  Clone ID: 700875717H1
gagcgttaagatgagtgagaaagagaaaggcaataatagtgagggacagtcgacgttgctgcacggcaagtacgagcttggtcgtgtgctggggcacggaacgttcgccaaggtgtaccacgcgcggaacctgaatacagggcagcacgtggccatgaaggtggtgggaaaagaaaaggtgataaaggtcggaatgatggagcaggtgaaagggagatctcggtgatgaagatggtgaagcaccaaaacatcgtcgaa

SEQ ID NO: 18039 - DNA, 255 bp, Glycine max
  Clone ID: 700875718H1
cggttgcggcaaccttcgatcttaatcccacggggcaacgttggatctgttgaacttcttcttttatatgcactctgtgatttcgctacaccctcactccgcttcgccaccctatgggggacaacaacagcaacaacgatgccttcatgcgcaaccaaaacgccgccgttcaggcccgcaccaaagcgcagaaccgttccaacgtccttcactcaaactgattggacagagtcacccaaccggtctaacagcgaa

SEQ ID NO: 18040 - DNA, 249 bp, Glycine max
  Clone ID: 700875719H1
agctcttgctgtatggtaacatgcttgtccaagaacaagagaatgtcaagagagtccaattggctgacaagtacttgaacgaggctgctcttggaaatgctaacgaggatgctattcagaggggaactttcttccagtcttgaattggaggcaaagcaaacttggcaagtaaatatttctgttcgtgaaggttgttgtactaatccagtgctagaagttgtgatggaacttgcgtgtaacattcttagc

SEQ ID NO: 18041 - DNA, 68 bp, Glycine max
  Clone ID: 700875720H1
atcgagcgaatcggctcacccaaatcctactcttgtgaacacaagccttcacttacactctctctctc

SEQ ID NO: 18042 - DNA, 252 bp, Glycine max
  Clone ID: 700875721H1
ccttggcttagctggatgtggatgctaacatagttacaatttcagggtagggagaacttgctaaatctgaaccagaaagagagaacagaaaaggctaatgaacctgaagatctgctttctccatgtgatagtgactcatgcagagaacataaaaagctaacatcagataatacaaggatgtctgatcattgtttgaagagcagcaagtagattctagtagtagtgagctttatgcagatgataccatcttag

SEQ ID NO: 18043 - DNA, 247 bp, Glycine max
  Clone ID: 700875722H1
attcgcggttgttgaattctgagcagccaccgtgaaccggtctcacctcgttgactcattctccgtccacttgcgaaagagaagagatctgaaaccctaacctaaccctaacagaggtaatggattcagtgcctcgaagaagcagaggaggaggcgttttcgaaagcctctacaaggtcctcatgcgccgcaactccgtctacgtaccttcatcatcgccggcgccttcctcggagagcgggctgtg

SEQ ID NO: 18044 - DNA, 253 bp, Glycine max
  Clone ID: 700875723H1
tgaggagctaaaaaaacaccagtcaagcactgaccctaatgtcgtggagtgggctaatgaagctctccaaggccttggaaaaggtgctcccttttcccttttcttgaccaacaagtacttctctttggttgcctctgcagtggggaataatgacggcgaactatccacgcttagtggcataatgaaaactgagtatcgtattgcctgaggtcttcactacgacatgatatttcagaaggtgtccgagcagtgc

SEQ ID NO: 18045 - DNA, 248 bp, Glycine max
  Clone ID: 700875724H1
cacgagacaagaaggaaaggacttaacatgtgtgggagtcctttggccttcaatagtttcaaagcctctttatcatacaaaacaccagccactttcacgttcagaatgtaagaagtaagaggctttgaaactattgaaggccaaaggactcacgagacaagaaggaaaggacttaacatgtgtgggagtgcaatgctacaaaatggctttatcataatcacggcttcaacgttggttggttgttttgc

SEQ ID NO: 18046 - DNA, 253 bp, Glycine max
  Clone ID: 700875725H1
gccagttctgatatttacaccatctgctctcaagactgtgaattgtggaatcctgcttgcacaaaagcaatgactatgtcatttaatccaaacccgtgttctgatgcatggagtttggaatttctgaagcgtaccggatttcattgtgatatcatttgtgtcactggatggactgccactccaatgcaggatgttcaggttacaattgattggtttatttcctctcaggaatgtgttcccaggacttattgtg

SEQ ID NO: 18047 - DNA, 252 bp, Glycine max
  Clone ID: 700875726H1
cccaaaatgaactgagccaaacacgaacacccattctaccaaaacagccaccatcggacatcgaggccagcaaaaacagttttaggagcaaagaactcaggaacagatatgactactagacgtgttcgttattcccctcttgccacagctgaggatgattatatcggtgataggaatagaccttttgacccaagatttgattatacacaaaagccttggataaagttccctggaaatccattgcccttgcac

SEQ ID NO: 18048 - DNA, 252 bp, Glycine max
  Clone ID: 700875727H1
tatgcatccaagacgttttatgatcagaataaggagaggagagttttgtggggttggattggggagtctgacagtgaatatgctgatgtggccaaaggttgggcttcagttcagagtattcctagaactgtggagcttgataggaagactggcagcaacttacttcagtggcctgttgctgagatcgagagtttgagattgagaaggatgaatttaaaaatttgaaggctaaaccagggtcagtggtgtcat

SEQ ID NO: 18049 - DNA, 254 bp, Glycine max
  Clone ID: 700875728H1
gcggcgcctatccccgccgcatatccgccttttcccggcgcgggtcttccgatgagtctatctccggtggtgttgccggtgagtggcgagagactgaccaagccgatcaggccgacgccgattgtaccggtgcctccgtcttcgaagatggctaatttgaacttgaaagggaaagcttctcggacaaatctcattgagcctttgccgtgtcgttgaatctgccatcgccaacgccgcggtctcaggatcagtcg

SEQ ID NO: 18050 - DNA, 257 bp, Glycine max
  Clone ID: 700875729H1
cttgcaattgaagttgaagtcttgcccttctctcttcaactccaaacacaagacatcatcatccatggctgcctccgtctccactgtcggagctgtcaacagagctcttttgaacctgaatgggtctggacctggggtttcagctcccagttcatccttctttgggagcagcttgaagaaggttattggctcaagggtccccaacacaagatttcctctggaagcttcaagattgttgctgtagaagagaagaaaga

SEQ ID NO: 18051 - DNA, 258 bp, Glycine max
  Clone ID: 700875731H1
atagagattttaagacttcaaatgtcttgctggattcagtatgtgaactttgaatctttttcattgaatgcataatgaaagaaaaaaagatctgacgagtgtagaaaccatttggatagcagatctgaaatatgtgttgttgatttgatcacagaaatataatgcaaaactttctgattttgggctggcaaaggacggaccaacaggagacaaagtcatgtctccaccagggtaatgggaacatatggatacgcagca

SEQ ID NO: 18052 - DNA, 262 bp, Glycine max
  Clone ID: 700875732H1
gggtttcttttttgtttgatcaaattaccccatgtccgaatgttaaggtacagacgaaggttcttgtttggaggagaattttcccttgctttcatctcactcctcacctgctctcagggataatttgggcttgcaggatgaagacaacagaatgaaagcggagaatgggttaacttgtagtgaaactgatgaagaaatcatacatccttctagattgattttgaagtcaatgaaaggagaagggttattaactaccaagaaa

SEQ ID NO: 18053 - DNA, 255 bp, Glycine max
  Clone ID: 700875733H1
attttgattttcattacatcacgtaacaataataatacagccaagcacgcacgcacgcacccacaggcacaagtctctccaactcaacttcttccactctcactaatggcactcaccaatgctttcctcgctccttccttcgccgtccacggtgttggtagggtttccgatccgcgctccattcctctcttctctcttccctccgaagcctcttccgctccccaacctccctctccagggacaagactttctaaa

SEQ ID NO: 18054 - DNA, 257 bp, Glycine max
  Clone ID: 700875734H1
ccttcgctcgctcgccctgatgcggttcattggcgctttactggcactcgtagccttcattatcgcttcccacagcacgcaagctgaatctgtggccctaaatgaggctacctttgatcaccagacaagcaacgatgtgtggtttgtcaagttctacgcgccgtggtgcagtcactgcaagaagctggcgcccataatcgacgagctgtaacggccaagagtctgttggacacggacgtacacgtagctactgtgga

SEQ ID NO: 18055 - DNA, 247 bp, Glycine max
  Clone ID: 700875735H1
aaaagaggtgcaagatgagtggtagggtttctgggaaggtgaagtggttcaatgatcagaaggggtttggattcataagccctgacgatggcagcgacgatctcttcgttcaccaatctcagatcaaatctgacggtttccgaagcctcgccgaaggagagtccgttgagttcgccattgaatctgaatctgacggacgcgcgaagctgttgatgtcactggccccgacggcgccacgtccagggaa

SEQ ID NO: 18056 - DNA, 248 bp, Glycine max
  Clone ID: 700875737H1
caaagttggagttggattctgtctttgagcagaagaatgatatagcaaaggctgtggaggaggagcttgagaaggccatgtcaacctatggatttgcgatagtccagactctcattgttgatatagagcctgatgttaatgtcaagagagcaatgaacgagattaacgcagctgctagattgaggttggctgcagatgagaaggtgaagcagaaaaaatactgcagatcaaaaaagctgagggagaag

SEQ ID NO: 18057 - DNA, 248 bp, Glycine max
  Clone ID: 700875740H1
aatggaatcaattttataagtttaaaaaagacctaaagttagggatttctcaataggtaatgttgctccaatacctaaccaaagggcaactacagtaccaatcaaaaagatggtggttgctactggacggcgaaatgggttttggaatttattaacattctccaaaaagggtactgttaataatcctgtaggtaccgaaaccattaaagaacgcccaataacttattgggcactgtacgagtatttga

SEQ ID NO: 18058 - DNA, 250 bp, Glycine max
  Clone ID: 700875741H1
tctgctttgggtctcacagggaagtcaagtagcggaaatcaggaagtgtggttggttgtgaaagcgcagtggctatcttatttaaatgatttggtgatctctaccctgaatttagaattcttggattgttcttttgcttctacttttcgatggtctagtatgagagcatttcttaaattacttctccgttgtttcgtcttgggttcgtgatgtgggatggctgttgaaggcttgaagcagtggctatctt

SEQ ID NO: 18059 - DNA, 254 bp, Glycine max
  Clone ID: 700875709H1
ttaaaggagcaagtgggactagtattgattgaatgattgatagaggagtgagtctcggggcatcaaagaagaaagatgggagacgtagcagataaattggcgtatttccaagcgataaccggtttagaagatccggagctctgcacagaaatcctggctgcccacaattgggacctggaactcgctatctctactttcacctcttcctaaaccctaacaacctgccaccgcctcccgctctggcttggaaactc

SEQ ID NO: 18060 - DNA, 235 bp, Glycine max
  Clone ID: 700875678H1
atgaaataagactcgcataggtattttagctgcttggagaaaccattatttgttgtgtacataattcattcccgtgctctcttaggtcgtgctgcctctgattactaaaaaaaaaaaaaacgggcggccactgataaaagagctcgtacaacccgggaataagtctcggccgggaacctgggggcgaataagtttgcccatatgtgatttgatgcagtcattggcataaccatgg

SEQ ID NO: 18061 - DNA, 256 bp, Glycine max
  Clone ID: 700875679H1
actcttgtgacttacacccaacttgccaactggggtcaatgctcctcatggcagaacttcactgcttctccattcactgctggtgctaaaacaatcacgtttgacaacagctgtgattacttttcgactggtaaagtgaaagctatgacactgtctctttctgtgttggtagccattgaaatgttcaactctctcaatgccctgtctgaggatggaagccttttgacaatgcccccttgggtcaacccttggcttc

SEQ ID NO: 18062 - DNA, 257 bp, Glycine max
  Clone ID: 700875680H1
catggataaatccgagtcagtaacttcaacgagtgtacttgatttaactcatttgtattctttgtgtcatatgcttataaactcacaactgttgagagttaagctcaagaatcaagatacatatctaatcaagatacatgcaattgtaatatatattgaatattgaatacattatttggtcaagatctatgcaataatccaacccattgttatgaacttctagtcttctaccatcaagtttgccagtaactcaattg

SEQ ID NO: 18063 - DNA, 255 bp, Glycine max
  Clone ID: 700875681H1
ttcattctctttgcgcagttccctacctctcctttcaagatgcagatccacgtcaagaccctcaccggaaagaccatcacccttgaggtggaaagctctgacaccatcgacaacgtcaaggccaagatccaggacaaggaaggaattcccccggatcagcaacgtctcatcttcgccggaaagcagctcgaggacggccgtaccctcgccgactacaacatccagaaggagtcaacccttcaccttgtccttcgt

SEQ ID NO: 18064 - DNA, 251 bp, Glycine max
  Clone ID: 700875682H1
cgagctagtcctcttactcttaccattctatcctgaaaaaagattaaaagtgtctcccaagccgaatctcatactgatttgaatcttggtgatgctattgaaatgatataaaatctaagaacaataaatttctatttatagatgcatctatattccttcttaatgtgggtagatgataaccatatgagttcgaacttattattattacaaattggaattcatatggacataaatgtcctgtgaattaggat

SEQ ID NO: 18065 - DNA, 251 bp, Glycine max
  Clone ID: 700875683H1
agaatcgaaacatcatatataaagagttctattcttaatggaaacatcatatataaagagttctattattttagtatgatgtttccattaagaatcgaaacatcatatataaagagttctattcttaatggaaaatagttgaaaactacactaatttcgttattaccacaaaacttctgttgtcttcatgactaatgcctttatcagcagtgacttctttactagatgtttctttgtaatgcaattataca

SEQ ID NO: 18066 - DNA, 247 bp, Glycine max
  Clone ID: 700875684H1
acagaatctactctctttttttctaccttagattccttctccaacaatggctctcgccgtttccactacttctaccacttcagcagctgctgcagcttctagctccttcttctctcgtctcggatcttcctccgacgcaaaagctactcaaatcggttcgtttcggtttccggagaggtcgcttgtttcgtctgttgttgtcaatgtaactcaacgacgctccttggtgaggccactcaacgccgaa

SEQ ID NO: 18067 - DNA, 248 bp, Glycine max
  Clone ID: 700875685H1
cgggattcgaggtcaagaatcacgtggggcccggtgtggttctgtcctacgttatctctggaatctctgccatgctctctgtcttttgctacactgaatttgccgtggagattcccgtcgctggtggttcatttgcttacttgagagtggagcttggtgatttcgtagcattcatagcttcaggcaacattcttctcgaatacgtgattggtggtgcagcagtggcacgctcatggacatcctacttc

SEQ ID NO: 18068 - DNA, 249 bp, Glycine max
  Clone ID: 700875686H1
gtttacaaaagggagatcgtactcttgctgattacatgaaagatcgcaactttccttcaaacttggaatctgtgatgtttggacgtgtcttgcaaggagtagactcttcgaaacgaaatgcattgatcatcaaacaaataatgcgatttatcattacatctcttaggaaaattcacgatacaggcattgttcatagggatgtaaagccagccaacttagtggttactaaacgagggcagagttaaactc

SEQ ID NO: 18069 - DNA, 250 bp, Glycine max
  Clone ID: 700875687H1
tcttgtagttaatcgaatttctcattccgcagaaaccttcaacactggccgctgaaacgattccctaccagaacggcgtctttgccagctccaacgattccaccgccacgggcaagcaatcgcgggagaacgaccgccgccgccgccgccggaagcagaagaagaacaacaaggcatctgaggccccggctcctaactcttccgaagagagtgacgatgcgaaatagaacaacgattcaaaacagcttgt

SEQ ID NO: 18070 - DNA, 250 bp, Glycine max
  Clone ID: 700875689H1
tccactcccaccgaccaaaacgcgcaacacgttgtaattaaaacgacaccgaaactaatgggcgtcttcagcgaaaacccgaatccggacccggttgtgatccgccaggtttgggcttcaaatctcgaatccgaattccaactcatccgcgaactcatcgaccactatccttttatctcgatggacacagaattccccggtgttgttttccgaccacacctggaccccacaaaaccctacaaccaccgca

SEQ ID NO: 18071 - DNA, 249 bp, Glycine max
  Clone ID: 700875691H1
aaggcagaaagcaagctcatcctagagttttcaaaatggcagcagcctcctccatggctctctcttccccatccttggctggcaaggccgtgaagctgggcccatcagcccccgaagtcgggagggtcagcatgaggaagaccgtcaccaagcaggcctcctccggaagcccatggtacggcccagaccgcgtcaagtacttgggcccattctctggcgagcccccgtcctacctcactggcgagttcc

SEQ ID NO: 18072 - DNA, 252 bp, Glycine max
  Clone ID: 700875692H1
tgccaatcgccgtctccggtcgggtcattttcaacatcatctgcttcgccgagcattcttgcagttagttctatcaacggaaacgtcgttgctcccacctccaacttcaaccaggctcgagtaaccgtctatggacagatcatcgcaggcaacttcgctaatgtcatccagatctaccggccctcatgcggatctactactggatctaactctggcactgtccctccaggaacgcagacgtcgaactctggt

SEQ ID NO: 18073 - DNA, 249 bp, Glycine max
  Clone ID: 700875693H1
ccacccccttaatttccttaattaaccaactgggaaatttggtctaattgtgattcattctctttggggggcttttgtggattaaggttagtatttgcttgattagggaagtctttatgtgacctgggtggaatgattctgtgtctgcatgtgtgaattctggcaagggaactagggatctgaagataagatatgcaatctaaatctgaaactgcaaatcaactgaggtctgatccacattcctttaca

SEQ ID NO: 18074 - DNA, 255 bp, Glycine max
  Clone ID: 700875694H1
ggttaagcagatgataaagaaaatatctaggcatgcctcatctttaaaggttacaaatttgaatgaagtgttgatatctctaacttgcgctattatatgtagaattgcttttgggagaaggtacgaagatgaaggaactgaaaggagtaggttccaggagctactcaatgagtgtgaggccatgttgagtatcttctttgtttcggattatgttccattcttgggttggattgataaactgagtggactgcaagc

SEQ ID NO: 18075 - DNA, 257 bp, Glycine max
  Clone ID: 700875695H1
caacttcaagggcacccggtgggccgtcctcctcgccggttccaatggttactggaattacagacatcaggctgatgtttgtcacgcctatcaaatattgaggaaaggtggtctgaaagaagaaaatattattgtttttatgtatgatgacattgcattcaatggggaaaacccaaggcctggagtcatcattaacaaaccagatggaggtgatgtttataaaggagttccaaaggattacaccggcgaagatgtta

SEQ ID NO: 18076 - DNA, 258 bp, Glycine max
  Clone ID: 700875701H1
cgaaagtacgggatacattgactatgaccagatggagaaatcagcaacactcttcaggccaaaattaattgttgctggagctagcgcttatgcacgtctgtatgattatgaacgtgtacgcaaggtttgtgataaacagaaagctatattattggcagatatggcacacatcagtggattggttgcagctggtgtcatcccatcaccttttgatatgcagatgtagttactaccaccactcacaagtcacttcgggga

SEQ ID NO: 18077 - DNA, 259 bp, Glycine max
  Clone ID: 700875702H1
attgaaattttaaaaatgattgggataaacttaagaattcaattatggaaattgaataagtaaacaatttaattggattggtcgaatggtatcagaagaatggagtactgactcccatttcttatttattattgacttaaccgatcaacttgctttgttatcgaacatgtctagttgatttcaaaaattttccggaaaaaatttgaatctatttcatatgcgaatcaatcctactacttctggtactgaggtatctgcg

SEQ ID NO: 18078 - DNA, 257 bp, Glycine max
  Clone ID: 700875703H1
atttcagggaatctaataacgtcctgcaccaaggtgaaagatgttttgtctgccaactggatggatcaatattcgctttatgacccgaccgtgactatagaatggtcgaaacctgactgcaaacactgtgaaacacaaaaccagaaatgtaaatggaagaatagtaccaaagttgaaactgaatgtttcgtttgctcaacaaacacgaccccacatcaactattgtactcattgctgcaggaggaatagttggtttg

SEQ ID NO: 18079 - DNA, 253 bp, Glycine max
  Clone ID: 700875704H1
gctttggctttggaagaccttggatttttatattaagcttacttggacttacaccacttgctgaacgtgtgagcttcattacagaacaagttgccttttacactggtcccacagttggaggacttctgaatgctacatgtgggaatgttactgagctcataatagcaatatttgcccttagcagtaactatattgccgtggtcaagattctctgttgggttctattctttcaaaccttcttctggttcttggg

SEQ ID NO: 18080 - DNA, 253 bp, Glycine max
  Clone ID: 700875705H1
gaaaatatacactgtttggagttaggttcagatgaaggtgattatgtgtatagattatggagtgtgctgaacaaaaaatgattttaggcgatggagaactattcccaagatgctggaccaacaagctctactatttctgtagatgcatggaaatgaaaggagatgcagctggtcgacaagctaggattaagattcacgatgccagtgtttgttttactagttgctttctcatttttggaacatacactgattt

SEQ ID NO: 18081 - DNA, 252 bp, Glycine max
  Clone ID: 700875706H1
ggcttatggtggatacctaggcacccagagacgaggaagggcgtagtaagcgacgaaatgcttcggggagttgaaaataagcgtagatccggggattcccgatataggtcaacctttcgaactgctgctgaatccacgggcaggcaagagacaacctggtgaactgaaacatcttagtagccagaggaaaagaaagcaaaagcgatcccgtagtagcggcgagcgaaatgggagcagcctaaaccgtgaaaa

SEQ ID NO: 18082 - DNA, 253 bp, Glycine max
  Clone ID: 700875707H1
gcggtggatggagctccttatctaagaaaagtgctatgaagatgagttgcaagttggtgaaggtggcggtggatggagctccttatctaagaaaagtggatcttgaaatgtacgagacttatgagcatttgatgagggaattagagaccatgttttgtggcttagccattcgtaatcatttgatgaatgagaggaaactgatggagctggaaatgggattgaatacatgcccacctatgaggacaaagatggt

SEQ ID NO: 18083 - DNA, 254 bp, Glycine max
  Clone ID: 700875708H1
tgcctctcttccatctccccagccaaatcctctctcaagaaggccacattaggcccttctgtcttcgcaaccgttagcactccttcttctccttcttcttcttcttcttcttccttcccttctctcattcaagacaggcctgtctttgctgcccctgcccccatcatcaccccaactgtgagagaggatatggcaaaggaatacgagaagctattgaagaactccagaaattgttgagggagaagagtgaactc

SEQ ID NO: 18084 - DNA, 252 bp, Glycine max
  Clone ID: 700875677H1
cttgagagaaaaaatattccatttccagaattagtagcactagtgctctcttttgtttcgaaaaaaatggttcaacaggaagtgcgtaaaggtccttggacagaacaggaagacttcaaattggtgtcctttgttggattgtttggagaccgtagatgggactttatagctaaggtatcaggtttgaaggtggcgggagaaagtaaaataggcattagacaaaaaaaatcaaatgcttatttgggcatcatg

SEQ ID NO: 18085 - DNA, 261 bp, Glycine max
  Clone ID: 700875630H1
gttgataccactgtcaagatttacaatgggaaaaccactattcgttgtaggatcactgagggaaaagtgggtcataagtttggagagtttgctctcaccaggaaacgcaagaccagagaacaagccaatgccaaaaatgttaaacaacttaagaaaaagaagtgatatttaccttctgtacttttggacaaaaataattttgcagatattttattttctgcaattatttacatcaatctgtatgtttcttaggttctctag

SEQ ID NO: 18086 - DNA, 268 bp, Glycine max
  Clone ID: 700875631H1
tactcgagccgaatcggctcgagagaaaacggaatatacgcgcggacttttcgttcccaaaagaaccaccttttccccgccgccgcagcaaaagctccctctccttgtttacacccacggcggcgccttctgcatcgaaaccccgttttctccgaactaccacaacctcctcaacaaggttgtttccaaggctaatgttgtcgctgtctccgtccactaccggcgggcaccggagcacccggttcccaccggccacgaagattcgtgg

SEQ ID NO: 18087 - DNA, 266 bp, Glycine max
  Clone ID: 700875632H1
ggcttctatctcacagggccttcttctcaccactgccatgcttctctccaccaccctgctttatgttgctttctccaggccttcatttcaaattcaccactctaacaaacccaccttgcgctcttgcttgtattcaggtaaattcctttcatttttctctctctagaaactagaaactgtttgctaaaacaattaattctacactattcaacgattcatttcttatccaaaattcattagattttgattattgttttcaaaataac

SEQ ID NO: 18088 - DNA, 197 bp, Glycine max
  Clone ID: 700875633H1
gctggtgcaaagaatgctattctcatgaatatgccaaatgctgttctttcaatgtggagatattttgttggagatctcgtctttgaagtttctaagatgacttctccctacattaaatgtacagtctctttcttcatagcatttggaaatttggctgatgacaccatcaattttgaggcttttcccacaagctggtg

SEQ ID NO: 18089 - DNA, 255 bp, Glycine max
  Clone ID: 700875639H1
aaacagagttgatcaaatctgatgcctcacattgtgggtgagatacaatccggtctaagacgcagtaagagggcaactaaaaatacgtataaattaccgacaatgtgaggcatcagaatcagaaacagagttgatcaaatctgagaagtctaattcatcagctgatcactcagatcccagtgagaatggtgaatacatgatggaaagtgaagcatcagatggcagtgataatgaagaacaagaaaagaaagtaga

SEQ ID NO: 18090 - DNA, 253 bp, Glycine max
  Clone ID: 700875640H1
gccactgaaacatttaattaattagaagagtatttgcaaacgccaaataagaaatgggagagttatgtttactcaaagaaataggtttccaccggcacacagttatcttaattatttgaaaaacatgacaaagaaataaggagaacggatttccctagccaatacctctagagggagtaaaatcttccaaagccttggcattccataaaactttcatggacccaaatattctctggaatgcccacatcatgca

SEQ ID NO: 18091 - DNA, 257 bp, Glycine max
  Clone ID: 700875641H1
cttctgtcccttctcaatttttctcttcttccaattccatccaaacaattaaaaataaaaataaaaataaaataagcagacatgtccacacttccctcctcaacctttccaaactccaacctctccctctctacctccttatcctcacaaaaactcccacttttccacacccttttccccaaacccctcccttttcctcatctgcgaattcaaaccccaccaccattccttcccccgcttctctgcaagtcccccga

SEQ ID NO: 18092 - DNA, 254 bp, Glycine max
  Clone ID: 700875642H1
atttggaagacattgtcaatttaatatatgaaacgctgtcaaatccatcttacaaaggtgttatcaatggaactgcaccaaatcctgtgcgattggcagaattgtgtgatcagctgggacatgccttgggtcgtccctcatggctaccagtaccagactttgcgctcaaggctgtccttggagaaggtgctactgtggttttagaagggcagaaagtgcttcctactcaagctaagaagttgggtttcccattc

SEQ ID NO: 18093 - DNA, 258 bp, Glycine max
  Clone ID: 700875646H1
caccactccacccatgaaagacaataccaccctcaccacaccactctacatctttccaaccatgtttttctgaacccacttatttctttcatgatggccgttcgagcagtgacctcctgctccctcttccgcccttcctctccgcccctcttttcctccgccctccgtttcttcccctatcgctcccgcggccccccttccctctctctccgctatggggcccacacccagacgcgctccgtccaaagcctcttcaac

SEQ ID NO: 18094 - DNA, 262 bp, Glycine max
  Clone ID: 700875648H1
tatgtttttacaatccttcaaaaattttgtttctttgtgtgtgtatggtgatgataacttaattagtgttcatgaatatgtcaagccttactttagtggttctaaattgaaaagctttctagctggtcataatatcaccattactgatggtattgacaaaactagtgcaactttgcaatttagaaagttagcagattgtgattttctcaagagaaactttaagcagatgtctaatgttttgtgggtggctcctgaggataag

SEQ ID NO: 18095 - DNA, 255 bp, Glycine max
  Clone ID: 700875650H1
ggctcgaggcagtggaagtagccaaagggcaaggtgtgttagaacaaatatccaatggtggcatcccatggttcttggggacaagtgtggtccttacccttgcttccttgattccactcttccaaggtgtcagcgtggagtctaagtccaaagggttcatgtcctcagatgcagaactgtggaatgggagatttgctatgttgggtttgattgctctggcttttactgagtatgttaagggtagtactttggtat

SEQ ID NO: 18096 - DNA, 259 bp, Glycine max
  Clone ID: 700875651H1
cctgcctgtatacttcacatggcctaatcccacagtcgcacactcttccaccctgccatcaccattcatcagcacaacgcccattattatttaaaaatccttagtatattattgttcttcgtccgtcgctttttcttgaagactacttcatccttcttgtgagtttctcagtatttcaatctttctcactcgaacggacgcacgcacagtctctagtggtaccgtgccggttcattagcttcgtgcggcagctcatttt

SEQ ID NO: 18097 - DNA, 252 bp, Glycine max
  Clone ID: 700875652H1
ggtggtgccccagtgccagtggtatgttctagtgttcggaaccatcgatttcgcgtttctttctcttcttcttctccgtcgctgggacccaaaacggtggaacaagtgggaattggagctctgaaatctgactacaaacccggtgtgtttgatgacttgtttctcaaattgttccgtaacaaattggtacaggaggtggggtgggactcgaagaaagctggatatgatggactaattgaagtgcccaatcgt

SEQ ID NO: 18098 - DNA, 252 bp, Glycine max
  Clone ID: 700875655H1
gtgccacaatccctctctctctccgacgtacatttccatctttttagggtttcatttcatggactccgattcctggatttccacgcgcctctcttcctcttcacgccgccaccattatctatctgatctgtacgcggaggagagtgaagggaacgatgatttcagggcggagtttctatgcgctttctgcgccgaggattacgacgtcgtttccctctgttgccacattgacgaccaccaccctatccaagc

SEQ ID NO: 18099 - DNA, 246 bp, Glycine max
  Clone ID: 700875656H1
gaggaatcagcccttttccgtatactttacttgaacaagccgtttgagttcggcgtgtctaataaataaaatcacaagacaacgttgtcttgcgcctgaaagtgttctggagacaaaaccacaatacagttttagaatggagaagacagcagttaaagttcgatgccagaggattgggtgcgacgccatgttctccgaggccgacaaccccgacggtatctgtcgataccatgattcgggacctat

SEQ ID NO: 18100 - DNA, 249 bp, Glycine max
  Clone ID: 700875659H1
gtttttccaattgaagatgggctagattgggtgctatatatttgtggatagttcctatattttaaattgtgattactttatttaaaaaaaaaaaaaaaaaaaaaaaaaaaaaaaaaaaaaagggggggccccccaacagggggcccccccccccggggaataattccgggccgggcccccggggggcaccccgctcccccaaggggggcccaataagggcctgggggaaaccggggccaagggtttccc

SEQ ID NO: 18101 - DNA, 257 bp, Glycine max
  Clone ID: 700875665H1
gtggagatattttgttggagatctcgtctttgaagtttctaagatgacttctccctacattaaatgtacagtctctttcttcatagcatttggaaatttggctgatgacaccatcaattttgaggcttttccccacaagctggtgcagtttggagagattcaggaaaaagttgtattgaaattttcacaagaggaatttcttacagcttggtcaactcaggtgcgtcctgcaacaactctgttggctgatgggtgtc

SEQ ID NO: 18102 - DNA, 253 bp, Glycine max
  Clone ID: 700875666H1
cttcttcttcttcttcttcactctacaaccactttactaagtggatgctcttggtttagtttcatttttatgaagctcttaaacttaaggcttaagccatggcatcctcatcctctctgcatctatctcaggcccttctggcacgtgctgtgtaccttcatggctcttcttcttctgaccgtgtctcactctccttcccatcattctctgtcctcaagtcacattctacatgcaaagcagcagcagccacgtc

SEQ ID NO: 18103 - DNA, 244 bp, Glycine max
  Clone ID: 700875669H1
cttccttaaggtgaaaatggtctctgtgaaggaccaaaactactacttttttattttagtttaagaaccaaattaatcaaaattaagtatagagagtcttaaattaagctggttttagtctgagactatgcatttggtctgctttgtagtcttgtagatcagccttgctagttagttgtcacagattgctgtaattggctgattacataattcgataaatgtcattttggtctgttttgaacgt

SEQ ID NO: 18104 - DNA, 249 bp, Glycine max
  Clone ID: 700875670H1
ggcgatctggtaaggagcttgagaaggagcccaaatttttgaagaatggtgatgctggtatggttaagatggttccaaccaagcccatggtggttgaaactttctctgagtatcctccccttggtcgttttgctgtgagggacatgcgtcagaccgtagctgttggagtcatcaagagtgttgagaagaaagaccccaccggagccaaggtcacaaaggctgccgccaagaagaagtgattgcattttg

SEQ ID NO: 18105 - DNA, 76 bp, Glycine max
  Clone ID: 700875671H1
cattgataccaaaatttggcaacacaagtatgtcattctggttcttctttgtggcctacaatataatctgtggtta

SEQ ID NO: 18106 - DNA, 251 bp, Glycine max
  Clone ID: 700875672H1
atccaggacaaggaagaaattcccccggatcagcaacgtctcatcttcgccggaaagcagctcgaggacggccgtaccctcgccgactacaacatccagaaggagtcaacccttcaccttgtccttcgtctccgtggtggcatgcagatcttcgtcaagactctcactggcaagaccataaccctagaggtcgaaagctctgacaccattgacaacgtcaaggccatgatccaggacaaggagggaatccc

SEQ ID NO: 18107 - DNA, 252 bp, Glycine max
  Clone ID: 700875673H1
ggacaagaagcggtgttcgaatttgaggggtgaatggatcaatcgttccttgtaatggtctcgaatctcctccagctccacaactccctggacttcaccagcttcctcctctccaacgccgacgtcgtatcctccctcctccacttctcctccgtcgtccctctcctcttcttcaccatcgcctccgtcctctccttcgtcgcctccacgcgcccctctccttcctcggactactctgtctctgccttccgc

SEQ ID NO: 18108 - DNA, 251 bp, Glycine max
  Clone ID: 700875675H1
gagatacatttcccctcggatgtgcttttgatgagtcagatgttcaccacaagcatttcaaggacaatccggataacacaaatcctacttataacacgagaaatggaatctacaaagaaggaattggactagacaatgttgtgatgtcatggggacatgatgagtatatgtatttggttgcaaaggaaaacggcaccactttgcctccagtagcattgttcattatcaaataccattctttttacgcttta

SEQ ID NO: 18109 - DNA, 251 bp, Glycine max
  Clone ID: 700875676H1
agttgcgttacccttcgtacccagagcaaaatgggacatggaaattcccaggaattggtgctttccaatgctatgacaagtatatgttgagtagcttaaaagctgctgctgaagctcacggtaagcctgaatggggaagcacaggccctactgatgctggccactataacaactggccagaagacactcaatttttccgcaaagaaggtggtggatgggatggtccatatggtgagtttttcctcacttgg

SEQ ID NO: 18110 - DNA, 252 bp, Glycine max
  Clone ID: 700875627H1
tgaaattttaaaaatgactgggataaacttaagaattcaattattgaagttgaatgagtaaacaatttaattggattggtcgaatggtatcaaaaaaatggagtactaactcccatttcttgtttattattgaattaaccgatcaacttgctttgttatcgaacatttctttttgatttcaaaaattttccggaaaaaatttgaatctatttttatatgcgaatcaatcctactacttctggtcctgaggtt

SEQ ID NO: 18111 - DNA, 242 bp, Glycine max
  Clone ID: 700875595H1
ctcgagccgctcgagccgattcggctcgagtcaggggcgaaggagagctactgaggtttacatgccagaaagcctgtcagagaatatttattcggatggaggaaggtatttgatccccaggcaagatcctttgactgcggtaaatatgactgattgggctgctaataatgctcgcatagcagggccttcccaatctcacttgaacactggagattttattgatcatcattggttccctgctg

SEQ ID NO: 18112 - DNA, 234 bp, Glycine max
  Clone ID: 700875601H1
atcgattattgaaataatctaatcttctaaacttgatgtttttatttgtaataacagcttcgactttttcttcttttttttttatactatagattgactcttaaatttttggtccttggagtgagaccttttactcttttttctccttcatagaacctggtcctctagtacaactaggatgtgggacaatttctggggctgttggagctacttgtgtctatccattgcaggtta

SEQ ID NO: 18113 - DNA, 206 bp, Glycine max
  Clone ID: 700875602H1
tcacctttctcctaaaacatctccagtgggttcttcttcttctattacaacaacgctacccaagaccatgaccatggccatggccacgatcctgcccctgtccacggtcttcgcggtttcatcggccctagacatgtcgataatctcgtacgacaacgcccacgccgccacgtcgcgcagagagggagctgatgttcctgtacgag

SEQ ID NO: 18114 - DNA, 257 bp, Glycine max
  Clone ID: 700875603H1
tgaaattcgaacaatgattttttcattttctttttaatacttttttggtttagactccctaagaatctgtcgatatttccaattaaatcttcttgttcctgtgaaggtcctataaaaaaaagggctatgcctttctttactcagaagggccttattccaagttccaccaaacaagtttttattcatttgaaacatctttttttccgaatacaagaaaaaattcatttcaatttcaattatttctataagataaaatc

SEQ ID NO: 18115 - DNA, 257 bp, Glycine max
  Clone ID: 700875604H1
caaaggtgttcggatgcggaaatggggcaaatgggccgcggagattcgtgaccctttcaagggcacgcgaatctggttgggcactttcagcactgcagaagaggcttctcaagcctatgagaccagaaggcttgagtttgaggtcatggccaaggctctatctgatgagaagagcaacaatggcagcagcaacaacaatgttgttgcttctgctgaaactgaaactgtggctgcccctgaaaataacagttcaaact

SEQ ID NO: 18116 - DNA, 257 bp, Glycine max
  Clone ID: 700875605H1
gtaagaacgaagcctcctcgttcttcttcttctgcgctttctctctccctctctagaaccgtaaccgtcgtttctttctttctctctcctcaaccagagataaagagtcaccttcttatttttctgaatctcgcggcgttgttctttctgctgctgcggctgtggttccggcggcgatgggacagcaatcgttgatctacagcttcgtcgctcgaggcaccgttatcctcgcggagtacaccgagttcaccggaaac

SEQ ID NO: 18117 - DNA, 255 bp, Glycine max
  Clone ID: 700875606H1
attgatagttgcattgagagtttcaatttaggtgatattgacaaatacaatgatatttatttttatagttacatttttttgaagggcagaaattgtagtgaaagcgataattctagtactagtataataactagtacgaatgatacaaatgatagtgattccactataggagaaagttctaataatctcgatgaaagtcaaaaatataagcatttgtggcttgaatgcgaaaattgttatggattaaattataaa

SEQ ID NO: 18118 - DNA, 257 bp, Glycine max
  Clone ID: 700875607H1
ctcctaccatttcaaacacgcttgttagtccttttctcaatgtttcgtcaccaagaagttaccttgtgaagaaaaagcatgtgaaatttagcaaacacatcagtgctgctgctgttgcaacaacaacaacaactgaggaaattcaagagtacaagcttccatcatgggctaagtttgaaatagggagggctgctgtctattggaaaaccatgaatggcctccctccttcttcaggagaaaagctaaaacatttctat

SEQ ID NO: 18119 - DNA, 257 bp, Glycine max
  Clone ID: 700875608H1
tatcgagccgaatcggctcagcacaagaagactcctcaatcataccatagacatggccaccgtcacttctgcagcagttactattccctcattcactggcctcaaggcaagcgcaggcaaagtgagtgccgccgcagttaaagtctcagctccccaagccacaaggttctgcggcatcaaggcttccctcaaagacgttggagtcgctgttgtggccactgctgcgagcgcagttctagctagcaacgccatggcca

SEQ ID NO: 18120 - DNA, 257 bp, Glycine max
  Clone ID: 700875609H1
atcaaacaaagtttcagtttttggtgttccatttttcttcctccatctttatcttaaacataacttgaactctccattccttaaattttagctacgagctagttccgacacagacaaagcactggcaaagaccgagttagaggtgactgttgagagcaagaacaaagacctcaagcacctggggtttgtgaggattgctgctattcaaacattgtgattgtgtcaaatctgtatgagtacgcaaagcagaattctgg

SEQ ID NO: 18121 - DNA, 255 bp, Glycine max
  Clone ID: 700875610H1
ggcttatggtggatacctaggcacccagagacgaggaagggcgtagtaagcgacgaaatgcttcggggagttgaaaataagcgtagatccggggattcccgatataggtcaacctttcgaactgctgctgaatccacgggcaggcaagagacaacctggtgaactgaaacatcttagtagccagaggaaaagaaagcaaaagcgattcccgtagtagcggcgagcgaaatgggagcagcctaaaccgtgaaaacg

SEQ ID NO: 18122 - DNA, 258 bp, Glycine max
  Clone ID: 700875611H1
cacatgtcctccacattttcaagtctaaatgtctctaccttgctgcaaaaccctgcagcccatgctgcagcgagttttgctgctacattttggccatatgcaaatgcagaaacttctgcagattctcccgtgtgcactccagattttccatcaagacaaattggctcgcctccaagtgtgacagctattgcagctgctacagtagctgctgcaactgcatggtgggctgcccatggactgcttcctttatgtggtcca

SEQ ID NO: 18123 - DNA, 257 bp, Glycine max
  Clone ID: 700875612H1
tcttgttcttggacaagcatgttaccatacagcaagagcttccccagagtcatcttgggctgctcaaaggttggaggtccatcttttgagttcacaagcttcttcccaacactgtcaacaccaacaccagaaatccacttcctcacttcatcatcatatactctggccctcagtgcaccaaagaaatcaatggattggccagggcaggtgtcaacaagcttgacaatgtcctgttcaggaataccatcagtgcggaa

SEQ ID NO: 18124 - DNA, 257 bp, Glycine max
  Clone ID: 700875613H1
gaagattccgcaacagagagtagaaaagatggcgcggttgatcacagtggtgtggtgcgcggtggcggtgctactgtgcgccgcggcgggcgcgtcgtgggtggaggaggcggcgaacccgatacgaatggtggcgggggtggaggcggaggtggttcgggtgatagggcagtgccggcgcgcgctgaagtttgctaggttcatgagcaggttcgggaagagttaccgaagcgaggaagagatgagggagaggtacg

SEQ ID NO: 18125 - DNA, 262 bp, Glycine max
  Clone ID: 700875615H1
ctcgagccgcacgccatcatgaggaggacgggactccccgcgcgtgacctgcgtatattggaccctctcttgtcatacccttctacccttctgggtcgtgagagggccatcgtcatcaacttggagcacatcaaggccatcatcaccgcccacgaggtcctcctcctcaactctcgcgacccctccgtcacccccttccttcaggagctccaggccaggatcctccgccaccaccaccagactctggccgatgccaacccca

SEQ ID NO: 18126 - DNA, 265 bp, Glycine max
  Clone ID: 700875616H1
tttcattggtgtgcactttcacttgtggagctgcatcaactgcagtggaaattgtgctttgttcttgagatgtctggtgttcttctttgggtgagttgtggacccaaagagaacatcaactccttggtgagtttttcatgcaggagtagtagtggtggtgaaagaacacaaaagagattttctggaatcagttttgctagtggtacttctgctttttcaagtgcagtggcagctactgatacttcaagatcttcagaggagaggg

SEQ ID NO: 18127 - DNA, 258 bp, Glycine max
  Clone ID: 700875618H1
ttgaggtgctggagaagaagggataaagtgtatggtatgggggcgtggtgaccgagggcacgaaaggaggaaactattggctacagaaagtcgtttctttagccgggtttctttcaaaaaatggtgcagagtctctgtttgatggcttctcatggttaccctcctggccttgtcttgcacccacaagtactgggcttgccctgcgctaccatgaagggctaccaaacattctttccttctccagtagcaaaagcagac

SEQ ID NO: 18128 - DNA, 257 bp, Glycine max
  Clone ID: 700875619H1
tcgtgcatgtatacttcagatggcctgatcccacagtcggacactcttccaccctgacatcaccattcatcggcagaacgcacattgatgtgtgaaaatccttagtatattattgttcttcgtacgtcgcgttttcttgaagactgcttcatccttctggtgagagtgttattatagcaatctttgtcactcgaacgcacgcacgcacagtctgtagtggtaccgtgccggttcatttgcttcatgtagcacctcat

SEQ ID NO: 18129 - DNA, 256 bp, Glycine max
  Clone ID: 700875620H1
gtgtaacttcgtctcagcatattgagaaaatagatgtgaattgtttatgtgcgtaagtgttagttttgtttttgtgaagcattttatatactgtggtatttgatagataaaaaccgtagatacatacaattttgcggatatagtacagatactgctggtggctaataggattctgttgttgaatattgctggaaacttttcatttgtttaatattgctgctacatgatgatgctgacagttagaagcatattctgt

SEQ ID NO: 18130 - DNA, 240 bp, Glycine max
  Clone ID: 700875622H1
cagatgtcaagtccatggttcataccttttgcatatgtcatacttggcgattcctcctactgcctgttggagtttttgtggtcaggaggcacaatccagggttggtggaatgacacacggatgtggctttataagagaataagctcttacctccctgctttttttgatatcatcttgaagtttttcgggttttcagaatcagcctttgttatatctgcaaaggtagcagaagaaaatgtt

SEQ ID NO: 18131 - DNA, 254 bp, Glycine max
  Clone ID: 700875623H1
gcaattgaagttgaagtcttgcccttctctcttcaactccaaacacaagatctcatcatccatggctgcctccgtctccactgtcggagctgtctacagagctcttttgaacctgaatgggtctggacctggggtttcagctcccagttcatccttctttgggagcagcttgaagaaggttattggctcaagggtccccaacacaaagatttcctctggaagcttcaagattgttgctgtagaagagaagaaag

SEQ ID NO: 18132 - DNA, 252 bp, Glycine max
  Clone ID: 700875624H1
ggcagggaaggaggagaaggaggggaaacttcagaagggaatcgcggagttctacgacgagtcttctggcttatgggagaacatttggggcgaccacatgcaccatggcttttatgacccggattccactgtttcgctttcggatcatcgtcttgctcagatccgaatgatccaagagtctcttcgctttgcctctgtttctgaggagcgtagtaaatggcccaagagtatagttgatgttgggtgtggcat

SEQ ID NO: 18133 - DNA, 180 bp, Glycine max
  Clone ID: 700875625H1
cgtgcctgagtctctaatgtgcacacacacattggaggtactacatgctgcgtgttcagcagcatattagtgtatccgaaggtcgagatcatcacaacgagcatggggactgcgtcgttgtactgtgattgtaaagtgttgagtatgcggcatgcttcatagaactcctcagtcgcatag

SEQ ID NO: 18134 - DNA, 256 bp, Glycine max
  Clone ID: 700875626H1
gtgactttgggttgggtttcgtctcaactcaacaaacgtcgtcgttctcccatttccaatctttctccaatggcttcttctgcttccttaatcaactcgttgacttgctcttcgcctgcacccactcagcactgtttcgccttcacccgcaccaccgccaccgctaccgccacgtcactgagacaattcaacagccaccgtccgcccccactcaccacgaggatctcctcgtcgccttccaccgttgtctgcaaag

SEQ ID NO: 18135 - DNA, 243 bp, Glycine max
  Clone ID: 700875594H1
gaactctttgtcttcggggatcccttcggttggttaccaagagatagatactgcaagcaatatcaatagggataaaattttggacagaacaaacaatgatgagaatcagcaaaggcctaaaaggaaacagatggaagatgatcttgatattaacgttgaggcaacgtttctgggagacctgactgtgaaagcggtcaactgtcaactacctaatgataaaaaagttaagcatatagatctttc

SEQ ID NO: 18136 - DNA, 266 bp, Glycine max
  Clone ID: 700875557H1
cttcacagcgccgtcgcagagaatccaactgcgccgatcctctgaaactgttcgcccggcgcgtgagaatatcccgaagtgagaccaaactacatagtaaaagaaaatgttcgagtttggaacttctgtacttgtgccttctgttcaggaacttgcaaagtgagccatcatcaatgttccagagaaatatcttcgtccaaatcaagactctcatgttatagtagactcaaccttaacacttccactcgattgaccttagcaaatta

SEQ ID NO: 18137 - DNA, 264 bp, Glycine max
  unsure at all n locations
  Clone ID: 700875558H1
ggaattcagctcgaggagacatagtgaagaattgtactcccacacagcatagtagttagcnagcgtnactatgtacatgatcaagtactaaatgctatatctataaaagatccaccaaggaagaggcttgttcttttaatttaataattagcaggtaggttagtttctattcagtacattctggctcttgattctggtttgtgtgactttcaatgtttatagacaatattgtgtatcgtatttgcaccatatgttgttgaaggc

SEQ ID NO: 18138 - DNA, 250 bp, Glycine max
  Clone ID: 700875559H1
aaactttttgctgggtcttgttgattctgacacattgccacttaatgtatcgcgagaactgcttcagcaacatagtagtctaaagacaatcaagaagaaacttattaggaaagcccttgatatgatccgtaggattgctgatgaggatcctgatgagtccactgacaaagaaaagaaagaagatacgtcatctgacaataatgagaagaaaggtcaatattccaagttctggaatgagtttggtaaatcc

SEQ ID NO: 18139 - DNA, 240 bp, Glycine max
  Clone ID: 700875560H1
gagtatcaacaaatggcaaccactgtgatgaccactctcccccaattcagtggtcttagaccccaattctcagctgcccctgtgaagaacttggttgctgtgcaacccatgagtcgcaaggggaagggtgcattgggagctcgatgtgactacattggttcatccactaatctgattatggtggcttctacaaccctgatgctgtttgctggaaggtttggattggctccatcagcaaac

SEQ ID NO: 18140 - DNA, 245 bp, Glycine max
  Clone ID: 700875561H1
gctcggcgtcttctccaaagccgaggagctcggcttgctcagcttgctcgaccgagccgccagcttctccccctccctcctcgcctccgccgccctccccgccttcgtcgctgccattgccgccattgtgctcattcccgacgactctgccaccctcgtcgccgtccaggctgttgttgctgccgcgctcggcgtcggagccgtcgggcttttcgttggctccgtcgtgctcggcggcttgcaag

SEQ ID NO: 18141 - DNA, 254 bp, Glycine max
  Clone ID: 700875565H1
gtggagatattttgttggagatctcgtctttgaagtttctaagatgacttctccctacattaaatgtacagtctctttcttcatagcatttggaaatttggctgatgacaccatcaattttgaggcttttccccacaagctggtgcactttggagagattcaggaaaaagttgtattgaaattttcacaagaggaatttcttacagcttggtcaactcaggtgcgtcctgcaacaactctgttggctgatgggt

SEQ ID NO: 18142 - DNA, 252 bp, Glycine max
  Clone ID: 700875566H1
gagagagagaacttcaactgagggtgagagtgacacaaatctagggagcactactctaaaagttctattagattcttcaaaacatgaccatgcatcgcgagtcttgggcttttgtcttcggcgttatgggcaacatcatctcctttggagtgttccttgctccattgccaaccttttaccaaatctacaagaagaaatccactgaagggttccagtcacttccttatgttgttgcactgttcagtgcaatgc

SEQ ID NO: 18143 - DNA, 243 bp, Glycine max
  unsure at all n locations
  Clone ID: 700875567H1
aatcgtcaggctggtcactgagtatggcttgaattgccttctccgcccagtgaccctattttctctcaataactccacaaaacttccaggaccttntctttgaagagaaaagatagtgacacaacagtagagacacgagtttattgctctgccgctgctcaatcaccaccaccagcatggccaggaacagctattcccgagccttctgatttcaagacatgggatgggcaaaaacctatttct

SEQ ID NO: 18144 - DNA, 254 bp, Glycine max
  Clone ID: 700875570H1
gcactaaacctttaactggatactcatttggtcgggatgggaatataatggatgaaggtactgcttactatattacactctcagagctgaaagaagctactaataatttttcaaagaatattggcaagggaagctttggatctgtttactatgggaaaatgaaagacggaaaagaggtggcagttaagactatgactgatccatccagctatgggaaccagcaatttgtaaatgaggtagccctcttatcaaga

SEQ ID NO: 18145 - DNA, 253 bp, Glycine max
  Clone ID: 700875571H1
cggaaaatgtggaatttctgggtcaaaagattgaccttacacttttcaaaggcatccttacctctgtccaagacacagccacatcggtagtgaaaacaatttcaagtaggcctcccttgaagatcccaatttccaacagcaatgctcagtccgggttactcaccacatacctcgacgaagaattgcgtatctcaaggggcgatggtggcagtgtgtttgttcttatcaaagaaggaagctctcttttgacaag

SEQ ID NO: 18146 - DNA, 254 bp, Glycine max
  Clone ID: 700875572H1
atcccgtctctggtccgacgtccagccgctgggcaatagcaggcatgttgactcctaccgccctcttacagtctctgctgcattctttatcaagtcctgtcatgccaacgtgcaatccgtcctcgttcggaagagtggcaatctgaatcgcatagtacattccaagatcgccgtcactcggccagccactgctatctccaccccaggcaccgagggcgagggcaacacattgcgctcacgaacgcatcctggtc

SEQ ID NO: 18147 - DNA, 250 bp, Glycine max
  Clone ID: 700875573H1
gggctacgaaaaacgacgtcgttttcccaattttccccggcgaccgggaaatggtggagccggtggagcttcgcggcgaggagcagctctcgttgctgtcagattccagcaatggtgaccggtcgtggcggttgaacttcgacggagttcagctatcttcggagcacacggagaagcaagtgaaaccccctcgcggactccatgactgttatggggttcttggtcaagaagataatattgcggagtacta

SEQ ID NO: 18148 - DNA, 242 bp, Glycine max
  Clone ID: 700875576H1
gggctacgaaaaacgacgtcgttttcccaattttccccggcgaccgggaaatggtggagccggtggagcttcgcggcgaggagcagctctcgttgctgtcagattccagcaatggtgaccggtcgtggcggttgaacttcgacgggtttcagctatcttcggagcacacggagaagcaagtgaaaccccctcgcggactccatgactgttatggggttcttggtcaagaagataatattgcg

SEQ ID NO: 18149 - DNA, 243 bp, Glycine max
  Clone ID: 700875577H1
caaaatctatcaaattttgtaatggcacgcatgctttgatttgcattaaacgtaggctaactaagagcagtaaagcatgcgtgccattacaaaatctatcaaattttcaatttaattcaattcacatcttgtaaataagtttgcccatctacgagatttcattgattaatgacttaaaaaaaaaaaaaaaaaaaaaaaaaaaaaaaaaaaaaaaaaaaaaaaaaaaaaaaggggggggccccc

SEQ ID NO: 18150 - DNA, 237 bp, Glycine max
  Clone ID: 700875579H1
cttattctacagttatcatgatgagtatccactagctgtcaatgacatgtaccatgttgttggctgaagaaagatctgaatgccccttttcattaatctggtttgtatgtggagctgatttatcttccccttgaccagtaatgttagcttcgtgtacttttaggcctacaatgtatatcacaattctagattgagttaaatttttgcatgcaaaaaaaaaaaaaaggggcggccgcc

SEQ ID NO: 18151 - DNA, 253 bp, Glycine max
  Clone ID: 700875581H1
tggcttttctacctattggtggcagaacagcttccacaccaacacttcagatattctactcgttcttcagtctttatgaatataaatactataattcattgatagataagttgtgagatgcaaatataagttgagtgtcatatcgatggtatcacagtatgtatcacggttaaaagaaatacagaaatacatatcgatggaacatatacttctcatattcggcagcaataggataacacacgcaagaaccggc

SEQ ID NO: 18152 - DNA, 250 bp, Glycine max
  Clone ID: 700875582H1
attagattctcctcaagcaaaacctagagctcccacactcctccactacttagaatattaaaagccccttccttcatcaaggtactactgtttcatcttccctcaaagattggtacaacaacaggaacatgggtactctaacaactgttcctgtgctcccttctaagcttaacaagccttcgctttctccgcgtcacaattctctttttccctactacggaagacgcgtcgggaagaagaacaaagcaat

SEQ ID NO: 18153 - DNA, 249 bp, Glycine max
  Clone ID: 700875584H1
tacgatttctttggcacttcgatactgtggtttcttcaaccatctgatgtgaatggttttttttttcatgttgattttttttcttagtgttcttttgtttctggtgtttaggggagttggggtttggtaattattttgtggggttttcattttcttctttaccctacaaaatttaaacaaaaatcgatttttttgttgaatttgctgactggtatgagtgtttcagcaatcagaagtacttcataagtt

SEQ ID NO: 18154 - DNA, 249 bp, Glycine max
  Clone ID: 700875585H1
ccgccgacgagaccacagaggcaccagcaaaagtagaggctgcaccggtcgggttcaccccaccagaacttgacccaaacaccccttccccgatcttcgggggcagcaccggcgggctcctgcgcaaggcacaggtggaggagttttatgtcattacgtgggactcacccaaagaacagatctttgaaatgcccactggcggcgccgctatcatgagggagggtcctaaccttctcaagttggccagga

SEQ ID NO: 18155 - DNA, 70 bp, Glycine max
  Clone ID: 700875587H1
caccaatgtcatgattgtaaacgataatagctctgacctgccacaagagatagtcgaccaactccacaca

SEQ ID NO: 18156 - DNA, 250 bp, Glycine max
  Clone ID: 700875588H1
gagactggtatgccggtttccatcttgtttttgtcgtgggttttggcagaattgggttcgactcccatagtcccgcggcattccccctgacctcgagataaaatgaaaaaacggacgataaacagtttgattgttaagggtaccattatttcattagtaagggaatttttattggaacgggcttcgattccctttatacgcgatgtggcgaattagactgatttaacgacgacgagatatgcgatttaaa

SEQ ID NO: 18157 - DNA, 246 bp, Glycine max
  Clone ID: 700875589H1
tccaaatccaatttcaatatgatacggattcccacttgttgccgcaatcacacaacatatttccttcttctttctctgccctttcgtgatttgctaagtcatactctctctccactgggtaaacatgcttaattctgaaggagatttaaaaataagttttggctataaatgcaatagcgatagaggtattccttgtgaagttgccagtggctgcaaaatccttcctggagtacgtagaacaagcag

SEQ ID NO: 18158 - DNA, 246 bp, Glycine max
  Clone ID: 700875590H1
gagtaatattcatatttccggcttattttacgacggcagatacaaattctggactaaacacgagaaaaatcttgctttgacagaagaggaaaagatggaggtgattagaaatagaggcattcctgctgatgttcttgcaaagcgagctcatgaatttgaaaaacatgttgctcatgaaagcctcaaggatcaaattcctgctgttgacaagttgtattctactaaggttaataagtttgcaaaaat

SEQ ID NO: 18159 - DNA, 246 bp, Glycine max
  Clone ID: 700875591H1
cacctctctctcccaaaatctcagagtgtgctgcttcagtgtctggtatcaaagatggcaacattgactgcttcaagtaacttagtctctagaaattctcatgtccatcatggaccaacaactgcttcatatgagtctaaagcagtagcaatgggacttagatctctaaagcagacaaatactcatagtggacttagaatttttaacccggtggatgagctacttaacagaaccccaattaaaacc

SEQ ID NO: 18160 - DNA, 245 bp, Glycine max
  Clone ID: 700875593H1
cagcacttttgctcacattatcttcatcttcttcttcatcgaactgcggacgcacctagcagcagtagcagcaatggctaccacttctccttcattcgctcgcttctccgtcatatcgcgaccttcttcgtcaaatccccaattactcctcttcaacgccgctccccgaaccggaacccctcattcccgaaccggctcggcccggttcaggtccttggctcgccagaccgggttcttcacgaaac

SEQ ID NO: 18161 - DNA, 256 bp, Glycine max
  Clone ID: 700875556H1
gggatttccaaagtttttaatagagggtaagtctcaaaaaatcgaagaattacagacgaatatgcaaaaaaaactgaattgtgtgaatcgaaaactaaacattgctattgtaaaagttgcaaatgcttataaacaccctaatattattgcagaatttatagctggacaattaaagaatagagtttcgtttcgtaaagcaatgaaaaaagctattgaattaactgaacaggcgggtacaaaaggagttcaagtacaa

SEQ ID NO: 18162 - DNA, 248 bp, Glycine max
  Clone ID: 700875520H1
gtccaagaaatgatactaaagaacctgaaaaggaacataaagtcaccacaggtatctctgaatcagtatctgcagataccacagagcaaacagacacaggaaaaccggaaactccagaggccgaaatcactcaaccaggcatcacaaaagaagacgaagcaggagacgaattcgaaaaaataagcccatcatctagtgtgagtgtgatatccagagactctcaagacaccgacacgaaagtttcacac

SEQ ID NO: 18163 - DNA, 257 bp, Glycine max
  Clone ID: 700875521H1
gtgccacaatccctctctctctccgacgtacatttccatctttttagggtttcatttcatggactccgattcctggatttccacgcgcctctcttcctcttcacgccgccaccattatcgatctgatctgtacgcggaggagagtgaagggaacgatgatttcagggcggagtttctatgccctttctgcgccgaggattacgacgtcgtttccctctgttgccacattgacgaccaccaccctatccaagccaaaa

SEQ ID NO: 18164 - DNA, 256 bp, Glycine max
  Clone ID: 700875522H1
agcatattgtctcatcctggactggtattcctgttgagaaagtctcaacagatgaatctgatcgcctcctgaagatggaagagactttacataagcgagtcattggtcaggatgaagcagttaaagccattagtcgggctatccgtcgagctcgggttggactaaaaaatcctaatcgtcccattgccagcttcatcttttctggtccaactggtgtggggaagtctgaattggccaaagcattggctgcatacta

SEQ ID NO: 18165 - DNA, 256 bp, Glycine max
  Clone ID: 700875523H1
ccagcgaaccccctatggtgcattataattccggcgggctacgattgaatcctaatttgtatgagtccgggaaagtctgtctgagtctcctaaacacgtggactggtacagacaccgaagtttggaaccctggagcttccacaattcttcaagtccttctttctctgcaggcccttgtacttaatgataagccttatttcaatgaggctggatatgatcaacaaattggtagagccgaaggggagagaaactcagt

SEQ ID NO: 18166 - DNA, 258 bp, Glycine max
  Clone ID: 700875524H1
cttccataaacgggtggtgcctctcttccatctccccagccaaaacctctctcaggaaggccacattacgcccttccgtcttcgcaacccttaacactccttcttctccttcctcttcatcttccttcccctctctcattcaagacaggcctgtttttgctgcccctgcccccatcatcaccccaactgtgagagaggatatggcaaaggaatacgagaaagctattgaagaacttcagaaattgttgagggagaaga

SEQ ID NO: 18167 - DNA, 252 bp, Glycine max
  Clone ID: 700875526H1
gtactgcgtttcggaagcagacacagatggctcgtactaagcaaacctctcgtaagtccacaggaggaaaggctcctaggaagcagcttgcaaccaaggctgcacgtaagtctgcaccaactactggtggtgtgaagaagccccaccgttatcgtcctggtaccgttgctcttcgtgagattaggaaataccagaagagtaccgagcttttgatccggaagctccccttccagaggctggttcgtgaaattg

SEQ ID NO: 18168 - DNA, 251 bp, Glycine max
  Clone ID: 700875528H1
tgaaaacattccaaatctcttcaagaaaataaagggcggtatttacactcttcccagtcatctatctcccaatgctagagatttgataccagggatgcttgtggttgaccctatgaggagaatgaccatacctgagatccgtcaacacccatggttccaagctcgacttccgcgttatttagctgtgccaccaccagatacaatgcaacaggccaaaaagattgacgaggagatccttcaggaagtggtga

SEQ ID NO: 18169 - DNA, 262 bp, Glycine max
  Clone ID: 700875529H1
ggacttcggctcgagcacaattgaatctggaaactggaattccctttatgaagcggagctcttcttctgtttttcatcctcttcaccctgctaggagccattggaggtttaggtgaccgtggaaaatttgttgatgacgaacctactactggaggtgttattcctccaggcaaaggcttcagggaagctcttggtcttggttcaggtcctttatttggattcacgaaagcaaacgagctatttgtgggaagattggctcaat

SEQ ID NO: 18170 - DNA, 249 bp, Glycine max
  Clone ID: 700875530H1
gacattaccagggtgtcgattcctaaagattatgagtctggtgctgtcaaggggtttgcttacgtagacttcagtgacgttgatagcatgggcaaagctctagaactccatgaaactgaacttggaggttataccttaacagtggatgaagccaaacctagagataatcagggttctggtggtagaggtgccggtggaaggagtggtggcggtcgatttggtggtaggagtggtggtggtggtggtggt

SEQ ID NO: 18171 - DNA, 248 bp, Glycine max
  Clone ID: 700875531H1
ccctaatgaagaatttggaattgcttttaatggaggttttaatcagccaattatgtgcggtggtgagccaagggccatgcttagaaaagatcgaggcaaagctgatgccccaatatattccattcagatatgcattcctaagcatgctttgaacttgatcttttcatttacaaatggagtagactgggatggtccatatagactacagtttcaagttcccaaggcattacaaaacaagccaattgact

SEQ ID NO: 18172 - DNA, 259 bp, Glycine max
  Clone ID: 700875533H1
gttctccaaattcaaaacagagaacatgtgactattgcgggagcttcacggctcttctgtactgcagagccgattctgcgaagctttgtttcttctgtgaccgtaaagttcacttcccaaaccagcttttctcgaagcacaagcgcgcgcagctctgtgatgcgtgtggagattcccctgcctcggtgctctgttctgcagaaaactctgttctgtgccaaaactgtgattgcggaaagcaaaaacatttggcgtctga

SEQ ID NO: 18173 - DNA, 257 bp, Glycine max
  Clone ID: 700875534H1
gtttcgtctcaactcaacaaacgtcgccgttctcccatttccaatctttctccaatggcttcttctgcttccttaatcaactcgttgacttgctcttctcctgcacccactcagcactgtttcgccttcacccgcaccaccgccaccgctaccgccacgtcactgagacaattcaacagccaccgtccgcccccactcaccacgaggatctcctcgtcgccttccaccgttgtctgcaaagctgtctccgttaagcc

SEQ ID NO: 18174 - DNA, 258 bp, Glycine max
  Clone ID: 700875535H1
ctctccaagaatgaagattgagaaagaaattgctactattatggactgtggcaaagaagtgggggactctagtggtggtttcaacttttggaagtggagcttgagtggtgttggggctatatgttcttttggatttgctgctgccacaatctgtgtcctaattcttggaagccagcaaaggcacaacaaaatccagcaggatcagaagattcggttccagatctatactgatgacaagaggattaagcaagtggttcc

SEQ ID NO: 18175 - DNA, 257 bp, Glycine max
  Clone ID: 700875538H1
ccctaatgaagaatttggaattgcttttaatggaggttttaatcagccaattatgtgcggtggtgagccaagggccatgcttagaaaagatcgaggcaaagctgatgccccaatatattccattcagatatgcattcctaagcatgctttgaacttgatcttttcatttacaaatggagtagactgggatggtccatatagactacagtttcaagttcccaaggcattacaaaacaagccaattgacttctttaata

SEQ ID NO: 18176 - DNA, 256 bp, Glycine max
  Clone ID: 700875539H1
tgagaacgaagatgaagtgagggagatataagtacttctggtttttatgttctgttatttatctttactgttgagtgtgttattacctaataaataaatttgggggttatgatgtgagagtgaagcaatgaacttattgtgtagcttcacttaatttgtgtgattatgcagatgtttttttcgtttctactgccaactcatatgggagactcttatatgaggctgttgcacttgtattttattttatataaataaa

SEQ ID NO: 18177 - DNA, 249 bp, Glycine max
  Clone ID: 700875542H1
caaacctctctccgtatcactccaagttataggtcacattgtcacattgtggtcaccaattgttctactgttgtgccttattcctcctgtgttcttgctattcttcttccaataccgtagaaccttcaagaactcaaaccttccaccaggtcctagagaccttcccataatagggaatctccatcagctagatagctcgaatcttcatcttcagctatggaaactctcaaagaagtatggccctatatt

SEQ ID NO: 18178 - DNA, 253 bp, Glycine max
  Clone ID: 700875543H1
tcttgttcttggacaagcatgttaccatacagcaagagcttctccagagtcatcttgggctgctcaaaggttggaggtccatcttttgagttcacaagcttcttcccaacactgtcaacaccaacaccagagatccacttcctcacttcatcatcatatactctggccctcagtgcaccagagaaatcaatggattggccagggaaggtgtcaacaagcttgacaatgtcctttcagggaaataccatcagtg

SEQ ID NO: 18179 - DNA, 248 bp, Glycine max
  Clone ID: 700875545H1
gaggaaaagtgctgctcttcaaatgcaacagtttgttggagaagaaaagaatgatttattggattacttgagatctcttcaacctgaacaggttgctcagctttcagaatttacatcccctgagctctaggacactatcctctctgttgtccatggtctcctagctactctttctcctaagatgcattctaaaccttccaccatgtcagaaaatacaacagttggagcaacaaatgctgggagtgagg

SEQ ID NO: 18180 - DNA, 198 bp, Glycine max
  Clone ID: 700875546H1
cattgactagtatcattaagatggctaattcctacttatccttgcttgtcttgatccttgtagctctgctcctcacccctcaagggcttgctgatgaatctgattcttactataagccaccagtttacaagaaaccaccagtgttacaagacccaatgctccaagccacgccatttcactaagtcccatagcgcaccc

SEQ ID NO: 18181 - DNA, 249 bp, Glycine max
  Clone ID: 700875547H1
attaaaatatattcaattttgcgtttctctgcctaaaaggattgaaagatgggtcaagcattcggttgctaccaagtcgatcagtcaaatgtggctatcaaggagcattttggaaaatttgatgatgtcctagagcctggatgtcactgcctgccttggtgtcttgggtaccaagattgctggtagtctgtcgctgcgagtgcagcaacttgatgttcgatgtgagacgaaaaccaaggacaatgtctt

SEQ ID NO: 18182 - DNA, 247 bp, Glycine max
  Clone ID: 700875548H1
tgagggctcacgggaacaaaccacccaacaagtccaagtccgaggcgaagaagacaacctggattttgtcatccccaccgtgccgttgatccctacagtttcggaagtttgtggggttaaacaaatggatcacataaaatcactttttatttttatattttaaattttctggcaccactcaaagattcagatagcggaaaatctttcggatttgaggaccatgtagggataagtcgatggggttgta

SEQ ID NO: 18183 - DNA, 255 bp, Glycine max
  unsure at all n locations
  Clone ID: 700875550H1
cagtattccagcatctgtttctgctgcgcctcgacagactgctgtcgctcccagtgcaattgtctccgcttcgacgacatccaagtcttctaacccctcacgtgcgttggcaacgtcgagcaacaacgacggcagcagtgacgaggacggcattggggacgtcgacgctcagaataagaaggagcggcgtcgacagcaggttcgttacgcgtcgcgccgccggccanatatgcagagggacgtggagagtttcct

SEQ ID NO: 18184 - DNA, 255 bp, Glycine max
  Clone ID: 700875551H1
cattgactagtatcattaagatggctaattcctacttatccttgcttgtcttgatccttgtatctctgctcctcacccctcaagggcttgctgatgaatctgattcttactataagccaccagtttacaagaaaccaccagtgtacaagcccaagcccaagccacccattcacaagcccaagccacccgtttacaagcccaagccacccgtttacaagaaacccccttatggtaagtacccaccagttcaagaca

SEQ ID NO: 18185 - DNA, 254 bp, Glycine max
  Clone ID: 700875555H1
attaatttcaggaaattccagcaagatagatgacgactttgaaagtgaagtaatgcttataagtaatgttcatcatagaaatctggttcagcttcttggttgttgcagtaaaggccaagatagaatccttgtctatgaatacatggcaaacaacagcctcgacaaatttttatttggtaacagaagatgttcccttaactggaaacaacgctatgatataattttgggcactgcaaggggattgacttatctac

SEQ ID NO: 18186 - DNA, 254 bp, Glycine max
  Clone ID: 700875519H1
gcgacaacacatgtttctctcattcggtgctcaattctccttcgtcttctgcactgcaatttgattggactaacagtttaacattcattctcaaaccccctcacaggtatgcctttcttgaatgttttgcttttgggtagttgaaaggataccaggtgctgctttattcttgactgctcgagaaggtttctcaggagttcatcttcaatattctccagtttactttaccaaatccagggaatgctgaaagatgt

SEQ ID NO: 18187 - DNA, 230 bp, Glycine max
  Clone ID: 700875481H1
agaaggtggaaccggcattctgacctctgacgaggtcctccgcgcctacgccattgcccgaggtttctccacacaaggtctcggtcaaccagatgagtcccgagccgcacgctacatcctcaaggactacgtcaagggcaagatcctcttctgccatcccccacctaccgatcccccgctggaccccaagcacttcaaccgcgaactctacgacgtaaaccacctccccg

SEQ ID NO: 18188 - DNA, 191 bp, Glycine max
  Clone ID: 700875482H1
tgtttctctctctacggtagatcggcggcgaggaggatatggacgacgacgacgagatccagtcgcatccttcgccggcgagcggatcccctccgtcgtcgccgagggcgaacggtcggataactctgacggtcgcggctccggcgccgccaccaccgccgaacagtctggcattagcgcttccgattcag

SEQ ID NO: 18189 - DNA, 217 bp, Glycine max
  Clone ID: 700875483H1
ctcgagcgaatcggctcgaggttggtgtctgcaagggaatttaccgcactgacaatgttacctgaggatgaaattgtcaagcttgttgacaccttccctggccaatctattgatttctttggtgcactcagggctagagtatatgacgatgaagtgaggaagtggattcctggtgttggtgttacttaattgggaagaagcttgtgaattccaagga

SEQ ID NO: 18190 - DNA, 232 bp, Glycine max
  Clone ID: 700875484H1
ttgaagttaaaagccttagccttccctacaactccaaacacaaagacatcatcatccatggctgcctccgtctccactgtcggagctgtcaacagagctcttttgaacctgaatggttctggagctggagcttcagctcccagttcagccttctttgggaccagcttgaagaaggttattgcctcaagggtccccaacagcaaggtttccggtggaagcttcaagattgttg

SEQ ID NO: 18191 - DNA, 232 bp, Glycine max
  Clone ID: 700875486H1
aagaagggcacgatcgagaaactgcaaccaagcagcgatgttgctcatagccgaaatatcgaatcctcggagatcgaagacaggaagccggagattctgaaaagcggaggaggttgtcttccgccgcctgtgccggtgcctgcgccgccgcaagcgacggcgaagacggattacatgtacttcgacccgtcggattcaatcccgaagctgcacacggactcgagctgttcgg

SEQ ID NO: 18192 - DNA, 233 bp, Glycine max
  Clone ID: 700875487H1
gcccaagctagatcaagtacacactatgatccacaccacaatctacttgtgcatagtttctggctgcaaacaagttgttttgtggcctccttctgctagtccctcactctatccaatgcctatatatggggaggcttctaatcacagttctgttactttagaaaatcctgattactcaatttatccaagggcagaatgctcaatggagtttgcgcaaaaggctgttcttcagg

SEQ ID NO: 18193 - DNA, 233 bp, Glycine max
  Clone ID: 700875488H1
ccgcaagagagagtagaaaagatggcgcggttgatcacagtggtgtggtgcgcggtggcggtgctactgtgcgccgcggcgggcgcgtcgtgggtggaggaggcggcgaacccgatacgaatggtggcgggggtggaggcggaggtggttcgggtgatagggcagtgccggcgcgcgctgaagtgtgcgaggttcatgagcaggttcgggaagagttaccgaagcgaggaaga

SEQ ID NO: 18194 - DNA, 235 bp, Glycine max
  Clone ID: 700875489H1
tcctcatccaccttcgttagatttccccctcaacattttttgtttttctctccatcccaattatcgccacctcctctttcttcaaatttcaatctcagaggatgggtggtgaggaattgtgtttgatggagaactcagggaaagggaagaggctgtggaagaaggtgaagtaccagctggtggagtaccactccttgcccggttatttgagagacaacgagtacattctcggtca

SEQ ID NO: 18195 - DNA, 233 bp, Glycine max
  Clone ID: 700875490H1
ctccaagtatgtttttacaatccttcaaaaattttttttctttgtgtgtgtatggtgatgataacttaattagtgttcatgaatatgtcaagccttactttagtggttctaaattgaaaagctttctagctggtcataatatcaccattactgatggtattgacaaaactagtgcaactttgcaatttagaaagttagcagattgtgattttctcaagagaaactttaagcag

SEQ ID NO: 18196 - DNA, 247 bp, Glycine max
  Clone ID: 700875491H1
gaaaaaagaaccacttccagagaaacatgattgtgacgaagggctaacaactgtaaaagaaaataaggatgagaaccacgcaaaagtatttactcttctccaggaggtaccctgttcctctgtatcttcagcaaatgagagttcaataacaatgtctgtgccactgggaaatccatgtgccttcaaggagattacaccttccgtgaaagaggtaatagcacgagatgaaaaaactgaatcttttgtc

SEQ ID NO: 18197 - DNA, 233 bp, Glycine max
  Clone ID: 700875493H1
acggttatgatgactaagaaagactgatgtgaccgcagtggactgatatttaaaacaaatgatatatctgtggtcacatcattttgggaaatgcacgatgtaaagaaggggagatatctactttgacgttgctgttgcggccactctccgtggtgacacacatagcaccaggaagagagagtaataaaaaggtgatgaaggaaactgtggccttcaaatgatggtcgtcgtgt

SEQ ID NO: 18198 - DNA, 233 bp, Glycine max
  Clone ID: 700875494H1
acaaaattgaacaggagctggaaaagttatcacaaaagtttggggaaaatgttctggatgcaacaaagaagtttgaaaagctaatcactgataagacggaaattgaaggattacctgctactgctcttgggttggctgcacagagtgcagtatccaaggggcatgaaaatgccaccgctgagaatgggccatggataattacattagatgctcctagttttattgctgttatg

SEQ ID NO: 18199 - DNA, 235 bp, Glycine max
  Clone ID: 700875495H1
ctcgagccgaatcggctcgagaaaaaagcctcgtctctcgtgccgattctccaggacaaaccccttcacccaacctaatagcacttagtgtagaagatgagtacgttggatgcaacaagggctgaacttggtcttcttgttttatatttgggcaaggctgaagcaagggacaaaatatgcagggcaatacaatatggttccaaatttttgagtaacggggaacctggtactgctc

SEQ ID NO: 18200 - DNA, 237 bp, Glycine max
  Clone ID: 700875496H1
catgcttgcaagctcttcaatcattgaagagtgtcccactactggtactatgaaagtgcagtggatacggaagtttccctttttctgtaaagatagagaatacataattggtcggagaatatgggaatctggaaggcattactattgtgtgaccaagggagtaaattgtccttcaatgcctagaaaagataaacctagacgcgttgatgtgtactactctagttggtgcattagagc

SEQ ID NO: 18201 - DNA, 259 bp, Glycine max
  Clone ID: 700875501H1
atatctttcaccttctatccatacttctgtacttctcgatttccaaggaacttatggattcttagctgccatcctcatatgatatttcttgaaaccttgtgttaataattgtgtccttgtgaacttcaataaaaatttgattctcctttcttagtctcatacccacatacccattgttggatttgaactagttttacttgcctcatagctcttcatataagcagcgggtaggttactgtgatgtgaactctagagttca

SEQ ID NO: 18202 - DNA, 258 bp, Glycine max
  Clone ID: 700875502H1
gcaaaacccattttactccctctttcacaaaagaacaatatctctattttccaaactacacacatcatttagaaccatgtctttctctaccaaatggccttttgtcctattatttttatcccttttcatccatgcatcttttgctgagatggtgtgtgaggacctgccaaaggaagtgtgtgctttctcagtagcttcatcagggaagaggtgtttgttggagactgagaaggcagccgaccgtggcgtcgagtacca

SEQ ID NO: 18203 - DNA, 258 bp, Glycine max
  Clone ID: 700875503H1
ctctccaagaatgaagattgagaaagaaattgctactattatggactgtggcaaagaagtgggggactctagtggtggtttcaacttttggaagtggagcttgaatggtgttggggctatatgttcttttggatttgctgctgccacaatctgtgtcctaattcttggaagccagcaaaggaacaacaaaatccagcaggatcagaagattcggttccagatctatactgatgacaagaggattaagcaagtggttca

SEQ ID NO: 18204 - DNA, 257 bp, Glycine max
  Clone ID: 700875504H1
aaacctaactactaaaacaaataaactaacatataaaatcattccaagaaagtctttatagtaaaaataggggtaaaacactactttatcataagaactgataaggcccgacggattattagattcagaaaattttattgcagctaattctttagttactccccctcatattcagcctgagtggtattatttattttcttacgcaattcttcgttctattcctagaaaattggggggagtcttgtctcttatgggat

SEQ ID NO: 18205 - DNA, 256 bp, Glycine max
  Clone ID: 700875506H1
ccgcactgatggtattcctgaacaggacattgtcaagcttgttgacaccttccctggccaatccattgatttctttggtgcactgagggccagagtatatgatgatgaagtgaggaagtggatttctggtgttggtgttgacagtgttgggaagaagcttgtgaactcaaaagatggacctccaacctttgagcagcccaagatgactctggagaagctcttgctgtatggtaacatgcttgtccaagaacaagag

SEQ ID NO: 18206 - DNA, 255 bp, Glycine max
  Clone ID: 700875511H1
gagtatagttgcatttccagtttgttttacggttctcatttcacgctccacacatctagtcccccgtgccttttgcatattcggtatcacttgcgagcagaactttctttggctattttaggtgtgaaaaatttggtagcctcttaccggccttgtccacagaagtgttttggaggggtatataattcaaatgtactttcgacaatttgtgttctaaattctaattatgtacacccttacaggttagtgtcttgt

SEQ ID NO: 18207 - DNA, 252 bp, Glycine max
  Clone ID: 700875514H1
attttggagaatccgaaaaacacgttaaagaaagtcccattcccactaccgaagcaacttaagaagatgaagcagcagagagtggagtttatgggcatgggcatgggcatgggcatgggcctgggccttttggtggtgatgatggcatgtgggtcggcgagtggtgcggatgatttggcaaccaagtgttcagcggtgattcagaaggtaataccgtgtttggatttcgcgaaggggaaggaagaaacgccg

SEQ ID NO: 18208 - DNA, 253 bp, Glycine max
  Clone ID: 700875515H1
attctaccgccaagcaacgctcagtttgtttccttcaacgctcgccaccgctcttcctctcccactctcccaaggtggggatggagaaaagagcaagacgcaagcatagttgccaatagaacccgaggtcaagcatttcaagtcctggtagcttcaggaaaggaaggttcaaaagatgatgtggtcatggttgatcctgtggaagccaagagattggctgccaaacaaatggaaaaaattaaagcaaaagaga

SEQ ID NO: 18209 - DNA, 252 bp, Glycine max
  Clone ID: 700875516H1
gcgaaattgatgaatggtcaagaactccagcttataaatctcttttgaaacgaggaattcagatcaaatcttagaacgaaatgtctagcagtgcatgcatggaatttgttgaaagtgcacagcagctcaaggttcttcaagttagtgcgtggtggcagatgttcaaatggtttcaggcggaagtagcatttattatgcatctatctacggctgctgcaaacgtgtatgtattcactgtgttatattagtcaa

SEQ ID NO: 18210 - DNA, 247 bp, Glycine max
  Clone ID: 700875517H1
ggctcgaggtgacatttgccaagacaagcacagcattcatattttgtcgttgaagacagagcactcttctgtcaggattgtgatgaaccaattcattcagccggaagcctttctgcgaaccaccagcgcttccttgctactggtatccgagtggcatcgagttctaattgcaccaaggacaatgaaaaaagtcacttggagcctcctactaggaatgcacaacaagtttctgcgaaaattcctcctc

SEQ ID NO: 18211 - DNA, 255 bp, Glycine max; identical to SEQ ID NO: 18095
  Clone ID: 700875518H1

SEQ ID NO: 18212 - DNA, 236 bp, Glycine max
  Clone ID: 700875480H1
caggattacaccggcgaagatgttactgttgataacttttttgctgctttacttggaaataagtcagcactgactggtggcagtgggaaggttgtggacagtggtcctgatgatcatatatttgtatactatactgaccatggaggtcctggggtgctcgggatgcctgctggtccttacttatacgcggatgatctgattgacgtcttgaagaaaaagcatgcttctggaacata

SEQ ID NO: 18213 - DNA, 240 bp, Glycine max
  Clone ID: 700875441H1
ccaggtcctaaaggccttccaataataggaaatttacatcaatttgatagttccattctttatctgcagctatggcaactctcaaagaaatatggccctatattttctcttcaattagggttaaggccagccatagttgtttcctctcctaaactagccaaagaggtactgaaaaaccatgacctagagtttagtggacgacctaaattacttggccaacagaaattgtcctataatggg

SEQ ID NO: 18214 - DNA, 233 bp, Glycine max
  Clone ID: 700875443H1
cggcggcacggccaagagaggaggcaaagcagcagctgctttgtcgaaaacgacgtcgtcggagaaggccgccgacaagcttgccaacggaattggggaaattcagatatccgatcgaacctgcaccggtgtcctctgctcgcatcctctttccagggatattaggatagaatctctgtcagttacttttcatggacatgatttgatagttgattccgaattggagctaaatt

SEQ ID NO: 18215 - DNA, 240 bp, Glycine max
  Clone ID: 700875445H1
gggaactatgcgagtgacctacctaatcttattgtagaaattttcaggatcaatgattagaccatgcaaactagaaatgctttttcttgtataaaggaagggattactcgatccatttccatatcgatcatgatatatataataattcgagcacccatttcaaacgcatatccaatttttgcacagcagggttatgaaaatccccgagaagcaaccggtcgtattgtctgtgccaattgc

SEQ ID NO: 18216 - DNA, 238 bp, Glycine max
  Clone ID: 700875447H1
gtggatcatctaggagggttgctgtctctagtagccgtgatgcatttgttggtgctgagtcagatatccgtactcgcactgctgaggctagccctggagcagcacatcgagctttgagtgggcaaagaagttctccaattggatcttctgatcctaagagagttgtatcatcagggagaaatgcttctcatgtgaaaaattatgacactgcacttaggggcatggaaggtttgcaatt

SEQ ID NO: 18217 - DNA, 241 bp, Glycine max
  Clone ID: 700875448H1
cgctcgagcgaatcggctcgagcaattttggtgccaaaccttccatcattgttcgcagcccggttcattttctttcgaaggatatgatgtattatgcgtcgcttatgctgaattacttgtcgctgagtacggtggagaaggtgttggtgatggttagcaaggttgtgtatggagatctgagtgagtatgggataccgtatccgagtgaggggcctttcaccatgaagatgaagtatgccaa

SEQ ID NO: 18218 - DNA, 233 bp, Glycine max
  Clone ID: 700875451H1
ttcttcttggaagagcagcttttgttttccccttatccttcatatccaacttggctaaaaaatcaccaaatgagaaaatcagcttcagacagcaagtgatcatttggtgggctggccttatgagaggtgctgtttcaatcgcacttgcatataatcagttcaccatgtcgggggcacacttccatgcggagcaatgccattcatgatcacaagcaccatcatggtggggcttt

SEQ ID NO: 18219 - DNA, 236 bp, Glycine max
  Clone ID: 700875454H1
aaaaaaaagaataataaatagaaaaaggagcatgttgattatatagaaagtaaagggcaacaatcatttttgtttaccatgggtaaggacaccatcgctgacataataacctatataagaaatgctgacatgaataaaaaaggaatggttcaaataccatttactaacataacagaaaacattgtaaaaatacttttacgcgagggttttgttgaaaacgtcagaaaacatagaga

SEQ ID NO: 18220 - DNA, 237 bp, Glycine max
  Clone ID: 700875455H1
tgaattaggctacagcaatgaatcatcatctaaaaccaaaggggagttgtactcagttgtctgcagcccaatagatgcagccttggtggctactgcaggcggtgatgacagaggatttctctggaagattggccaagcggattgggcttttgagcttcaaggtattttcatgacactagagttactgatggatgaatatttttccatttatcacctctagtgtcaaaatatttggta

SEQ ID NO: 18221 - DNA, 206 bp, Glycine max
  Clone ID: 700875456H1
taaacttgaattatgtatatcactttcccattaagacattagcaatggggaaaataattataagatggtatgaaatttattttccccattgctaatgtcttaatgggaaagtgataaacttgaattatgtatatcttgtaaaaatgtaatttatgcacaaaaaaaaaaaaaaaaaaaaaaggggggccgaccgctaggggacctcg

SEQ ID NO: 18222 - DNA, 239 bp, Glycine max
  Clone ID: 700875457H1
ctaagaagttaaccagcttttcaagtgagctgactggagtcacaaataaagcacctgctgtggctattgatgtgttgcgccgcacaattatagttgtagagagttctctaacaagtggggcttcatatgttgtctacctatatggctcagcaaaggagctccttccagcaggaattagggatacagtcaatgtatatgaagataaagcaacagaaatcttgaggccagttgggtctgca

SEQ ID NO: 18223 - DNA, 238 bp, Glycine max
  Clone ID: 700875458H1
tgctatgcctcgtttgtcaggtgaaaacaaggacagattagagaagcctgagctaagattgaccaagacagcagtcccttctaatatggatttgataaagcaacttgatagtaaggcagctaaacaggggaagaaggctgatacattctctctggttcgcacctctcaaccacagtctttgctacagctcaaagatgttgtcttgtctactgctatcgatttgaagcgaacagctcca

SEQ ID NO: 18224 - DNA, 241 bp, Glycine max
  Clone ID: 700875459H1
aaagaggggttcatagatttagggaatcgattactatactagtaataaattgtacaaaaaataaaaatataaataatataaatataaaaagaacaaacacaaattttatgtgattagtcgcggtatttaaaataaaaaatgaaagtagacaaataaaaaaggaaaggagatgtttgaataaaaataattccccttcaagtacttattttttgagaggacaggacaatatgaatgttttatt

SEQ ID NO: 18225 - DNA, 236 bp, Glycine max
  Clone ID: 700875460H1
cttttggcatcaatatgggtgcaggcattcacagggacaaactttgacttctcatcctactcatctgagctcaaatctgtgcttaacataactcagcttcagctcaattacctctctgtggcctcagacatgggaaaggcctttgggtggtgttctggggtctcactcatgtacctccccttgtgggtggttatgttcatggctgcttttatgggactttttggctttggcttcca

SEQ ID NO: 18226 - DNA, 239 bp, Glycine max
  Clone ID: 700875461H1
cctcgagcgaatcggctcgagcagttgttgatttctttacagtctggcttcctgcaccaactttgtcattcctttcatatgctgatgagatgaaagcacccgacaacattggttctctaatgggacttcttggctccatcccggacaatgcatttcaaaagaatcctgcagggataaactggaatctcaatcataggattgcatcagttgtatttggtggtttaaaacttgctagtgtt

SEQ ID NO: 18227 - DNA, 239 bp, Glycine max
  Clone ID: 700875462H1
ggcgatctggtaaggagcttgagaaggagcccaaatttttgaagaatggtgatgctggtatggttaagatggttccaaccaagcccatggtggttgacactttctctgagtatgcctccccttggtcgttttgctgtgagggacatgcgtcagaccgtagctgttggagtcatcaagagtgttgagaagaaagaccccaccggagccaaggtcacaaaggctgccgccaagaagaagtg

SEQ ID NO: 18228 - DNA, 236 bp, Glycine max
  Clone ID: 700875463H1
tgaactttctgaatatgaacgggaggaacttgagtctaaaatttaagcaatcaatggattgactgtgatgatgaactttctgaatatgaacgggaggaacttgagtctaaaattgactgtgccttagatcagtgctttttctgtttatatggattacatctgagatctgatgcatcttatgaggatgatctagtggtgcacaataacacaagccgtggagattatcaaaccaagga

SEQ ID NO: 18229 - DNA, 241 bp, Glycine max
  Clone ID: 700875464H1
caaaaactttgcaatttcgtaggagatgctcaggagcagcacgctaacacagagtgttacagtcacctgtgttcatcacagtcacagacaatggttccaatcaattcccgtaaattatagattctgtgacgctgctcggaactctctatcatccaactccgccatcttcaactggaaaagaacggctaattataatcgtaaccgttctggaatgggaaccttcaccacgcgcgcgttggcg

SEQ ID NO: 18230 - DNA, 232 bp, Glycine max
  Clone ID: 700875465H1
agctatccaaacaagcacgccatttgtctcatttgtgttcacttcaatgttgtcaaaagtgaaaattcatttctttgaacatgttggattttgtttgacaggttgcctcaaagaacaatgatgtgcaattggcagattttattgaaagcgagtttttgggtgaacaggtggaagccataaaaaaaatctctgagtacgttgctcagctcagaagagttggtaaaggacatgg

SEQ ID NO: 18231 - DNA, 227 bp, Glycine max
  Clone ID: 700875466H1
gagctctggaactccactcgtgatccaacacgatagagagagaaaaagggtcttgcctttttttctgcttttgatttgactctttacaaatacaaataaataataaaatcccatcaagaagaaataaatatcaagcccaacccagtgcagtgctgcagggactgtcactgaactcaaaaatgaactgtcgccggaatctttctcgattctctgttttgcccttcgaa

SEQ ID NO: 18232 - DNA, 230 bp, Glycine max
  Clone ID: 700875467H1
ccgattatggctaacttgtcactcactcttgctatgatataaccgagtcagtcaagatgtgagaaaaaggattgtatatagactagtacaaagtttgacagtgcaagggagattgaatataaaggtgattcagaacaagctttatgttctgccatggccttgtgtaagtgtctctcctttttactgggaaggaagaagaaaaccaggggacctgaggggcttccaccagg

SEQ ID NO: 18233 - DNA, 232 bp, Glycine max
  Clone ID: 700875469H1
gctctatgtccatttgaagctgttaaagtgagggttcaagcacaaacctgttttgctaagggattgtatgatggctttccaaagttatatgcatcagaaggcacacgaggattctcccgtggactaattccacttttgggtcgaaacattccattttccatggttatgttctcaacatttgagcattccgttgattttttgtatcggaatgtggtcaaaagaaaaaaggagg

SEQ ID NO: 18234 - DNA, 231 bp, Glycine max
  Clone ID: 700875470H1
gtttgagtgggatctaaaacattttgaagtgattaaggtgccaagatgtgactatgattgtgttgggtgaaggaacatggtttcatggttgtgttgttgcctttgtgatccgtgagatgaaatgagatgagaggtcaagaaacatgtatcctaggttgttgtgttgtgaccagacccattcgaagatggtatgggttaagcatcaaatccagcaaaaagatggttacttga

SEQ ID NO: 18235 - DNA, 236 bp, Glycine max
  Clone ID: 700875474H1
aaaattgataacatcacacagcattagtatctatcagcaacaagggtcagctccaacaaagcaatcaccggcaaccggttttccggtgagctatagcaattcaacaacgtattcgaccaacgaggcttcctacgctccagtcccacctccccagcccaaacctcttgtcgattggtccaccggcctctgtgactgcttctccgaatgtggaaactgttgcatgacgtgttggtgtc

SEQ ID NO: 18236 - DNA, 238 bp, Glycine max
  Clone ID: 700875476H1
ggtatcttctcccagcgagttcatcctccccttcgataacaccaacacatcaaacatcacaacaaaggacactaccaggatctccctcaacaagttcctctccccgacctccatcttcttcaaggactttgaagaggatgatgaggcccacaccgtcaacctctccagacctctggctcaatcagcacccgccatcacccaatcctccctcaaagccagcttcgatgccttcttccaa

SEQ ID NO: 18237 - DNA, 238 bp, Glycine max
  Clone ID: 700875477H1
attttgttccttagaacgtacgagttggagcaagagcgtaacagcaacaaaggactcaggcgacaacaccgcgacccacacgaattttttcgagaaatttaaacgctttaaccctctcgagtcttccttgggagtactagccttcttcttcgtcgcttctctcttcattgccagcttcttctacttggattacaaaggcttccgctccaggggcactgccactgtccttcacttggat

SEQ ID NO: 18238 - DNA, 234 bp, Glycine max
  Clone ID: 700875478H1
cggcaattgcctggcaggcatgaagaacgacgttaccatcatcggcatggaagaagaacccatggagcgtgtcatgggcaaaaaggttggaaagatcttccgtggattgctagagaagaacggcgtcagatttaagatgggagccagcgtggagaaagctacagcttcaaagagcgattcgtcgaaggtcggcgccgtgcatctgaaggatggcaccacacttgaggccgatct

SEQ ID NO: 18239 - DNA, 239 bp, Glycine max
  Clone ID: 700875440H1
cagccatttacaaaaatggtaaccattaaagcatcttacacagtccttccaaatgaaccaactccggagggccttttatggctatctgatattgatcaagtggcacgtctacgccacacacccaccatctacattttccatgcaaaacacaaccatgatacattaattgagaggatgagaaactctcttagcaagattttggttcactactatccaatagccggtcgattgagaaggat

SEQ ID NO: 18240 - DNA, 241 bp, Glycine max
  Clone ID: 700875408H1
cggctcgagctcgagccgaatcggctcgagcgcacgtcgttgactcgcaactcgtaactacgcctaccgcgccgatggcgtcggtccccagcaccgtcgctccccgcaccttcctgccgtcgattcccaagccgagagctcctcttcacgccgcgaaatccgtcgccagcgccgcgcgcaacttcccgagactttcgcacaacctcattctctccggaaacaaacgcgaggtggcggtgaa

SEQ ID NO: 18241 - DNA, 244 bp, Glycine max
  Clone ID: 700875410H1
cttctcgcggcttctttctccaagattaagtttcagtagtaatgggtaaggaaaaggttcacattaacatcgtgggcattggccatgtcgactctgggaagtcaaccaccaccggtcaccttatctacaagctcggaggtattgacaagcgtgtcatcgagagattcgagaaggaagctgctgagatgaataagaggtctttcaagtatgcctgggtgcttgacaagctcaaggctgagcgtga

SEQ ID NO: 18242 - DNA, 244 bp, Glycine max
  Clone ID: 700875411H1
attcccataaagttgagaaatatgagaattccacgcaattgcgagtgcagacgaatcacgcccgctgctttcagctaccaccgtctcaaatcctacgtttccgactgcggagccgtgcttctcccctcattcggcggcccgcacgtgctccagcttcgctcgcacgtgccagtccctccgctcaagcctcacgatgtcctcgttcgtgcgcgcgccgtctccgtcaaccccttggacacccgaa

SEQ ID NO: 18243 - DNA, 244 bp, Glycine max
  Clone ID: 700875413H1
gaacaaggttgtaagagacaaccttagggttaggcttggagatgttgtttcagtgcatcagtgtcctgatgtcaaatatggaaagcgagtccacattcttcctgtggatgatactattgaaggagtaacaggaaacctctttgatgcctacttaaaaccttatttcctagaggcatatcgaccagtgaggaagggtgacctcttccttgtgagaggggggatgagaagtgttgaattcaaggtt

SEQ ID NO: 18244 - DNA, 245 bp, Glycine max
  Clone ID: 700875414H1
caactactgaaagtgtttgtgctggagtgccaatgttgtgttggccattttttgcagaacagccaacaaactgtagatacatttgcaatgagtgggaaattgggatggaaattgataccagtgcgaagagagaggaggtggagaagctagtgaatgacttgatggtgggagagaagggaaagaagatgagagaaaaggtcatggagttaaagaggaaggcagaggaggtcaccaagcctggtggt

SEQ ID NO: 18245 - DNA, 243 bp, Glycine max
  Clone ID: 700875416H1
gcttcatgtcgctggcggtggagccgttggggaagatggttgggggagtgaagaggctgtgggcgattgtgaactttattctggcaattgggttcggaatgacggtggtgatcaccaaggtggcggagaccagcgcaagatgaatcccgccgccgtgggtcacccctccgaaggggtggtggttgggtccatggttttctttggggttctcggagttcctcttgcgattactttcagtgttcc

SEQ ID NO: 18246 - DNA, 239 bp, Glycine max
  Clone ID: 700875417H1
cgcaaaccatcctgatacacatccggattgatagttcgttgcatgcaaccatagttttattaggattttttcttctttgttttcaattaggtttttttgttgctctccttcaaactccatctttccaaatcctctctttgcgattgtgttttgatctgcttcctactgcgatagtttctctactgttacatggccatggcggtttccgcaattggttttgaaggtttcgagaaaaggtt

SEQ ID NO: 18247 - DNA, 180 bp, Glycine max
  Clone ID: 700875418H1
taaaaatatactgataaagatagaataagagagagagagagagaatggaagggagagagagttgtcacccattgctgagaggaggtaggagaagagaggagaaaggttacaaccatggcttatccaccactcagatgcatgtcatggctgccatatgtgatgccctcattccttccctcc

SEQ ID NO: 18248 - DNA, 221 bp, Glycine max
  Clone ID: 700875419H1
tccaattgaaattttaaaaatgactgggataaacttaagaattcaattattgaaattgaataagtaaacaatttaattggattggtcgaatggtatcaaaaaaatggagtactaactcccatttcttatttattattgaattaaccgatcaacttgctttgttatcgaaccattcctttttgattccaaaattttccgggaaaaaattggatccaatttta

SEQ ID NO: 18249 - DNA, 237 bp, Glycine max
  Clone ID: 700875420H1
ggcaaatgttgtcggttctcgtgtgtccatctcatgagttggccacaccctttcagtgccttcacttcccaaacacagattatagcctgacatgttcaccgaaactgcaattgggaagcactccctcccaacgcaaccctttcaagtgcttttgcaataggaaagaacacgtcacacccttttctcagggtttctcagagttgcaagaggatgatagtccatgggagagtgggaacg

SEQ ID NO: 18250 - DNA, 114 bp, Glycine max
  Clone ID: 700875421H1
cagattattgattattaataatggaagccatattcgtcaccaaacccgcttcccattctctcctcttaactaaactctctccgaatcccaaacacttgtgccctccacacaaca

SEQ ID NO: 18251 - DNA, 239 bp, Glycine max
  Clone ID: 700875422H1
gaggatccttgtatctgccaaaggaatatttgaaacaactggggtgaaactatcagggaaagttgcaggaatccactggcattacagagtaagatctcacgcagctgaactaaccgctggctactacaacacacgaaataacgatggatatctgcctatagcaaggatgctcgcaaaacatggagttgtcttcatcttcacctgcatggaaatgaaggacagagagcagccagactttg

SEQ ID NO: 18252 - DNA, 241 bp, Glycine max
  Clone ID: 700875423H1
cgcacttcccataataacaaggatttggagttttaccagaagacgcaaacccggagccctaaccttgggcacaggtaaccaacaatggcggcggcggcggcggcaaagcgttgccactacgaagtcctcggcctcccccgcgactgcgcccccgacggcatccgctccgcctaccgccgcctcgccctgcagcgccaccccgacaagctcgtgaaatcgggtatctcccaagaagaagcca

SEQ ID NO: 18253 - DNA, 242 bp, Glycine max
  Clone ID: 700875424H1
aaagcatctaagtgacagtaaagcattagaaggccacttttcagatcattctcagtcacattctgtgggatcaggtgatggttgcctgtcattgttgaagaagagacattctggaattaggcctcatgctgttcgaaaaaggactccccgtgtccctatttcatattctattggtaaagatatgggataggtttttttcatctgccaggcaaggctccaaacaaatggttgatgctaatgat

SEQ ID NO: 18254 - DNA, 243 bp, Glycine max
  Clone ID: 700875425H1
gagttgatcatgatgttttggctgaaatggatgtgctgtataggtgcatcaaagaagcgttgagactccatcctcctctaatcatgctgatgagaagctcacacactgattttagtgtcacaacacgagaggggaaagagtatgacattcccaagggtcatataattgccacatcacctgcttttgcaaacaggctaggtcatgttttcaaagaccctgataggtatgatcccgatcgatttg

SEQ ID NO: 18255 - DNA, 242 bp, Glycine max
  Clone ID: 700875426H1
ccacaactctttctcacccgctagggtttccttccatcgcatcttgatttcgcaacctcgtctagcaattctccatggagggtgctgggatggaagagaataatattattaatgatgataataagtctgaggtgcattttacttctgctgctgcttttgtggagggtggaattcaggatgcttgtgatgatgcttgcagcatatgccttgaagctttctgtgatagtgatccctccacggtg

SEQ ID NO: 18256 - DNA, 242 bp, Glycine max
  Clone ID: 700875428H1
gcactcatattgccaatctcttacacttacatagccatgatgggttctaaaggactcaccgatgcatcaaagatagccattttgaatgcaaactacatggcaaaacgattggagaattattacccggttcttttccgtggagtcaatggaacagttgctcatgaattcatcattgacttgagaggctttaagaatactgctggaattgagcctgaagatgttgcaaagcgcctcatggacta

SEQ ID NO: 18257 - DNA, 245 bp, Glycine max
  Clone ID: 700875431H1
cagaaagagaagcattagcaaaagcaagaagaactagtctaagcagaaatggcctcttcagtgatggcatctgtggccctcaaacctgcccctttcactgttgagaagtcctcagttagaggccttccctccctctcaaggaactcctcttcattcagagttgtggccagtggtggcaagaagatcaagactgacaagccttatggaattaatggtggcatggctttgagggaaggagttgatgc

SEQ ID NO: 18258 - DNA, 244 bp, Glycine max
  Clone ID: 700875432H1
gtcgacctcatctaaagttccgtcgatggttgttcatgtgtccagcacccccgatgaggtcggcctcgccgtcagtcagctcatctttgacctgagcaagcaggctattgccaccaacggtcgatttaccgtggcgctctcgggtggctccttaccgaagatcctgaacaagggcctgcaaaccgttaaaaacgatgtggatttctccaagtggtttgtgtactttgctgacgaacgctgcgtg

SEQ ID NO: 18259 - DNA, 234 bp, Glycine max
  Clone ID: 700875433H1
gcttaatggaaggcccttgagcttttctttctttctctgctctcttttcttttaggtttccactctcacacactctccctcttctctttctctgcaataatctctcttctcttcttcactctctcaactcctgccaaacccccatttccgcagttcttaaatttggagtctgatgtctccgccattgctggttaccgaagatgaagggcagtgccatgcctcgatggtagcatc

SEQ ID NO: 18260 - DNA, 236 bp, Glycine max
  Clone ID: 700875434H1
caaaaacattgactgcagatgaactctattatctgagggagcaatttgcactgctagaaccaagcaaaaatggcagcatatctttagagaatgttaacaaggccttgatgaaatatgcaacagatgccatgaaagagtctcgcatccttgacttcctttcatcgctgaactcgttacaatatagaaggatggattttgaagaattttgtgcagctgcattgagtgtgcatcaactt

SEQ ID NO: 18261 - DNA, 204 bp, Glycine max
  Clone ID: 700875435H1
cctctctccttctccccatgttttctcttccttacttctttgtctgttaaaactgtcatcaacctcctcctcttcccactctctttcttccccgcccctcccttttttttattcttcttcttttttcccttgcaaatatacatcatatatattataattgatgtgttgaaaggcatatgtgcttaaagagctgaaacacatcat

SEQ ID NO: 18262 - DNA, 233 bp, Glycine max
  Clone ID: 700875436H1
gtttgattttcttgatgctgttttctgcgttatctatagattccttgatgaacgcgttgaaggggaggcttccccttgttgctgttctaaccgggaaatgctgaagaggaggatgaatgtgacagatgatgatggtctatcagatagcttgtatgagaggaaaaacacgtttagagaaatggggttccttcaatttgggagaaaatgtgaagattccaatagaaaccgtggta

SEQ ID NO: 18263 - DNA, 237 bp, Glycine max
  Clone ID: 700875437H1
cgctcgagcgaatcggctcgagcggctcgagctctttctcactatcctctgatatttctagattttggtgctctgtgtatctacgatctggatccaacggtccaaaatgttcggggcttgtgctgcttgttttcccaggttttagagctccaaaccttcagatccacctcattcgtctccagatcttccttccttgataacgttttcgggttcgagaaggcacttgtttgtttgtcg

SEQ ID NO: 18264 - DNA, 235 bp, Glycine max
  Clone ID: 700875438H1
gagaaacaaagttagaagtaaagaagatcatggcttctctagcaaccttggctgctgttcaaccagctacgatcaatggccttgctggaagttccctctctggaactaagctctctttcaagccctctcgccacagtgtcaaatccaagaacttcaggagtggtgccgtggtagcaaagtatggtgacaagagtgtgtactttgatttggaggatctgggcaacactacagggca

SEQ ID NO: 18265 - DNA, 238 bp, Glycine max
  Clone ID: 700875439H1
gaaaaatggcagaaacaaagttgagctccttcaaagacaaaagatggtcactccatggcatgacagctctagtgacaggaggcacacgaggcatagggtacgcaatagctgaagagttagcagaatttggggcagctgtgcatatttgtgcacgtcaacaacaagatattgataaatgtttagaagaatggaataagaaaggacttcccataacagggtcggcatgtgatgtactatc

SEQ ID NO: 18266 - DNA, 242 bp, Glycine max
  Clone ID: 700875407H1
tttccttcccttccctcacgatctgaggaagacaccaatcttctctccacgcccttcttgggtaaccgtctgaagtgcagcaatggcagatggattgcattcgcagcatccatcggtagttcagaagttatctggacagtcttatcttgtgtccaggcttgctcctaatcactccagaaactgttctaccactggtagttacttcaatggaggtttgcagtcttcaggtttggttccagtca

SEQ ID NO: 18267 - DNA, 242 bp, Glycine max
  Clone ID: 700875360H1
actcgagcgaatcggctcaggtcgccttctgcagaatgtgtactgttcgtaaagtcaacgatcctgaaagcccctaagtttgatcttgggaaactgatggaggttcatggagattactcagaggatgttggtgccaaggtagacagacctgctgatgaaatagtggcagaggaacccactgaaattgttggagcttgatttcatgatgcattcagtttgttctaggttttctttttcttacg

SEQ ID NO: 18268 - DNA, 242 bp, Glycine max
  Clone ID: 700875361H1
gatcctccaaataatatatgcacattttatcagaaaggagtctgtgcttatggtagtcgctgcagatatgatcatgtcaaagcttctcgagagcaatcttctgctccatcttcttcagtaaccgaaccccagaccccatattcagatactgttgcttttggaaatactagagctacatttaatggtgttgctacagctgcagagttttctctttccaggagtccttactttcttcctagtga

SEQ ID NO: 18269 - DNA, 247 bp, Glycine max
  Clone ID: 700875362H1
ggcggaaacagcatcttcgaaaccctcaccaaggacccacaaattcaaaaccccgcagcactctccaatcccttctgctccttctcacaacatgcagcgacagtctccaatccatgcagcgaatcgccgtccctctctcgcctcaatcagattcagactcagcagcatcccggattgtatggcggccagatggggcagagagggcacttccccatgctgttcggttctggaacgcagtttaatttac

SEQ ID NO: 18270 - DNA, 244 bp, Glycine max
  Clone ID: 700875363H1
tcgaggtgctcctggatcgcatgcgttgagtgatgtgttgtcagaggtcgtctttttctgtctcgatttctctgtgaataaggcaactgatggctccgtcattcatcgcttgtatgacgatctctggttctggaacaaagactacgataaatgcgaagaagcctgggcgaaggtcttggagtttaaagatgccatgaccgttaacctggacgaaaagaagactggtagtatccgtgtggcgaac

SEQ ID NO: 18271 - DNA, 235 bp, Glycine max
  Clone ID: 700875365H1
tcttctagtatttttcaagtaacttaaggtttcaaacctaggaagttggaagtcatggcagcaacattgatggcagcaacaagttctggcactcttaaagcaactcctttcctaggccaaggcaagggtgccaatgccaatgctcttagggatgttgtttcccatgggactgggaagtacaccatgggcaatgatttgtggtatggaccagacagagtgaaatacttgggaccct

SEQ ID NO: 18272 - DNA, 242 bp, Glycine max
  Clone ID: 700875368H1
actcctcagagtggaatatacaagttcttgtcatcatctgagcttaatatcatgctatatgacagacaggaattatctggacagaaacgctgtcgtcatgctcaagttttaggcgagaatatagaaacagttggtccgattgtcgcactagatggttttatcccagtatgatgctctcaacctactgtttccagcttgtttaagtgctggacagatgaagaggtaaaactagcaactggagt

SEQ ID NO: 18273 - DNA, 242 bp, Glycine max
  Clone ID: 700875372H1
aaattttataaggttgtttcggaaagcacatgaagagaatatcaaacaagcagagttagagaagaagaaagctgagaaagaggctgaaatggagaaggcaaagggcattaacttgacaaagaagggggcaaaagatagttgacgactgtgttttctgctcctttgcatcaacatgaagctcttgccaaagagcaggaatgtaccccgcgtaaggggaatgcttctgagaccacttaagaagc

SEQ ID NO: 18274 - DNA, 241 bp, Glycine max
  Clone ID: 700875374H1
ccacgctttcttcagagcctgcacttgttccacccttcaacataccactcctcctcttccccaattctcttatccgtaatctggcactcttcagagaagactttgtaagataaaaagagaaatggccttagaccagtattttgatgaggctgtgccccagttggattccttggaagataaatcgtctctcgaaacatggaaatgtggcagtgacgatattgcagattcggatagaaatgcc

SEQ ID NO: 18275 - DNA, 239 bp, Glycine max
  Clone ID: 700875376H1
ccaaaggagaagagttgaaagcaatgcaagtagatacaaccgtgttgggcctttcaaaggatgaggctcagaagaaaccatacattgcttccatgggagtgtacgtcttcaagaaggagatacttcttaatctattaagaaatatgcaccgagaataaattgatcttgttccaaagcttgttttttaagtgctacaaattaatttaatttagatggcgatttccaacggcaaatgattt

SEQ ID NO: 18276 - DNA, 241 bp, Glycine max
  Clone ID: 700875377H1
actcgagcgaatcggctcgagaacaaccacaaaagacactgaacgaacagcaatggaagctgcattatgcagtgcacatgctctttcacccaaccaagtattcaacgcagcaaatcctggagataaaaatgttcctttgaaatatagcaaagatcggagtgttgtaatgacagtggcagccactggaatattagggaaaggtggtgggttgttggagaggccaaccatagagacaacatca

SEQ ID NO: 18277 - DNA, 243 bp, Glycine max
  Clone ID: 700875379H1
ggaggcagcagaagaggcaagttgaaggagtaatggttgagtgcgatgaaaacgttaacgaagcagcaatgtcaatgtccatggaccctcgcgcgaggcacgcacaagccataacatcacacatcaaagaccgcgcagtgtggaacaacctcataacccactactccaaatccgacctttcttcctacgccgtttctctcttccagcgactcccttttcctcccaacgttgtctcctggaccg

SEQ ID NO: 18278 - DNA, 243 bp, Glycine max
  Clone ID: 700875380H1
attttgttccttggaacgtacgagaggagcaagagcgtaacagcaacaaaggactcaggcgacaacacagcgacccaactgaattttttcgagaaatttaaacgctttaaccctctcgagtcttccttgggagtactagccttcttcttcgtcgcttctctcttcattgccagcttcttctacttggattacaaaggcttccgctccaggggcactgccactgtccttcacttggatttctca

SEQ ID NO: 18279 - DNA, 243 bp, Glycine max
  Clone ID: 700875381H1
gtgttttcctgcaaccattttcttccttcgtcggttgattggtgaagttgctggtgaccccagaagaaggggtagtgttggaatattattgttaagctttgaactttgaagtagtggcagaaaggttcattgacccttttttggcagacttacttgtttgtggtccgaaactgctgattgcaactgttcagtggtcacaggaagcaccaccctccaaagccagcacttaaaacctttccttct

SEQ ID NO: 18280 - DNA, 121 bp, Glycine max
  Clone ID: 700875382H1
attaagaaaaataaataaacttaacacaaaagcggaaaaagatataataataacttggtccagagcatctaccattatacctacaatgattggccataccattgctatccacacaacatac

SEQ ID NO: 18281 - DNA, 241 bp, Glycine max
  Clone ID: 700875383H1
gcgcctagttgtgagcaccaaaccaaaccacattgtttgcaaggcagcacagaagcaggttactgtccaagagggtgaggacactactactggccttgtctctcgcaggttggccctcactgtgctcattggtgctgctgctgttggctctaaggtggcacctgctgatgcagcctatggagaagctgccaatgtgtttggaaaaccaaagacaaacacagacttcctttcatacaatggg

SEQ ID NO: 18282 - DNA, 240 bp, Glycine max
  Clone ID: 700875384H1
ctgcctcgatgcgcccctgttccgcacccgtcaccacataaaattcaagctctcctccgccattggtgttggaaccctgcctagccgtctgcagagtttcttcctcgttggctactttgcggtcaacattggcttctgtgtctggaagatcgactacagcatcttctcctcgggtgccggcgaacttctcagccgctcgggtatcatggctgtcatcaacatgattccattgttcctact

SEQ ID NO: 18283 - DNA, 78 bp, Glycine max
  Clone ID: 700875386H1
atgacataagactcgcataggtattttagctgcttggagaaaccattatttgttgtgtacataattcattcccgcgct

SEQ ID NO: 18284 - DNA, 239 bp, Glycine max
  Clone ID: 700875387H1
tgattataaaaacatgggtttaattagtcgatttattagtgaacaaggaaaaatattatccagacgcgtaaatagattgaccttaaaacaacaacgataaaatacgagcttgttttatagcaattgttattaatcgttgttgttttaaggtcaattgctataaaacaagctcgtattttatctttgttaccttttcttaataatgaaaaacaatttgaaaaaagcgagtcaaccgctag

SEQ ID NO: 18285 - DNA, 225 bp, Glycine max
  Clone ID: 700875389H1
ctcgagcgcggctacatccccaatgcaccacacttcgacgacaacttcgatgacaccctcgtatctgccatcaaaacctaccaaaagaattacaacctcaacgtcaccggcaagttcgacatcaacactcttaaacaaatcatgacaccccggtgtggcgtccccgacataataatcaacacaaacaaaaccacatcgtttggcatgatctcggactataccttc

SEQ ID NO: 18286 - DNA, 236 bp, Glycine max
  Clone ID: 700875390H1
ttatcttctttctctggctcgagcatccaaaagggttgtctttcttttttataagaagaagaggagagggaagatgacgatgatgacaatggaggggatgatggacaagggggtgttggatgatgtgataagaaggcttctggaagggaaaggagggaaacaggtgcaactctctgagtcggagatccgtcaactctgcgtcaacgccagacaaatcttcctctctcagccaattc

SEQ ID NO: 18287 - DNA, 235 bp, Glycine max
  Clone ID: 700875391H1
gtgtttctgtaaccatggcatccaccactctatcccctacaaccccttctcagctatgctcaggaaaaagtgggattttcagttcctcacaggcacttcttgtgaagccagtgaagaggcagatgatggggaagagcaagggattgagaattgcatgccaagccaccagcatttccgctgatagagtccctgacatgggcaaaagacagctcatgaatcttcttcttcttggtgc

SEQ ID NO: 18288 - DNA, 237 bp, Glycine max
  Clone ID: 700875394H1
gttggttttgagttcaaactcacttcaatggatattgctaagaaacatgtgagtttttttagtggaacattaaagaatggaagcaatttcgataatagcccggttacattcagagggaagcaatcaaatattttgaaattcaatttgttccctcgaatatatcataatttacatgagctaaagctcatacagcctttatttcacgagttcctcccaggttcagcttctcgtgataca

SEQ ID NO: 18289 - DNA, 242 bp, Glycine max
  Clone ID: 700875401H1
cttcaagcttctggaagagacaaccgttccgggaatggtggacaagttcggttggtgcacgtgggacgccttttacctgacggtgcaccctgagggcgtcagagagggcgtgaagggcctggttgacggcggttgtcctccgggattcgtcctgatcgacgacggctggcagtgcatcagccacgattccgatccggagaaggaggggatgaatcagacggtggccggggagcaaatgccct

SEQ ID NO: 18290 - DNA, 240 bp, Glycine max
  Clone ID: 700875402H1
catcaatgtcagtcctattgagtatgggcatgttttgctgattccgcgcattttcgagtggttgcctcaaaggattgaccgtgagagcttcctccttgcacttcacatggcagtggaagctgataatccatattttcgattgggttacaacagtttgggtgcttttgcaaccattaaccatcttcacttccaggcttattatttggctctgcccttcccaattgagaaggcccccactaa

SEQ ID NO: 18291 - DNA, 195 bp, Glycine max
  Clone ID: 700875403H1
gttgtggaaagctgtgataatgatggtgctgaggaatgcggcgtggtttcgagttctgaagaggagtctgatgtggaaagtagtgagattgttgatcttgaggacattgctggtaaagctccttcgcggcggaaggtggtggctaatggggaagagagcaatgggaagttgaatggcagtagagaaatggtcact

SEQ ID NO: 18292 - DNA, 239 bp, Glycine max
  Clone ID: 700875405H1
ctatttatctaggtaacctgtgttctgtagtttggaaaaatgattttccccccaggtgtagccaaattgaagacgggatctttgagaatggcatttgattttaccatgtgctgaagtatgttcacaagattttggtgtgtcaagttgccatccgttctgcaagcagcagcaaattagaatggctagcaagtctagatgaatttggtttttcttcaatgggatattcattattgttagtt

SEQ ID NO: 18293 - DNA, 240 bp, Glycine max
  Clone ID: 700875359H1
agagatgctggtgttgtgtttgagcaaatggatgaaaagagtgtggcttcgaggagttccatcattggtgctcatgctagtgtggagatgtggcatgagtgcttgatgcttcttggggacatgagcggcgagggacgccatagggctgaagagagcattctggttagtgcactttctgcttgcactcatttggggtctcctaatcttggaaggtgcatacatgggatcttgttgaggaac

SEQ ID NO: 18294 - DNA, 240 bp, Glycine max
  Clone ID: 700875406H1
gcaaaaggtcgcttctagttaagggtgctgtggaaaatgtgttggacagaagctctaaaattcagttgcgtgatggttctatagtgaacctagatgataatgcaaggcaccttgtattgcaagctctccatgaaatgtcgactagcgcattgcgctgtttgggatttgcatacaaggatgaactccccaaatttgaaaactacagtggtaatgaagatcatccagctcaccagcttttgc

SEQ ID NO: 18295 - DNA, 251 bp, Glycine max
  Clone ID: 700875306H1
ataagtatatatttccaatactgtgaatagatccctaaaaagattggatctgaacaatctaatgagatctggaaacaaatcaaagagaaagaaaagcaactagaatatacacttatattaacacaatcaacactaactcatatataagcatgttgtcagggtttggtttttggtctagtaaatgattttttttttcgttagaagagataaaatttattttaatgaagtttatgtatggaaagaaactaaat

SEQ ID NO: 18296 - DNA, 253 bp, Glycine max
  Clone ID: 700875307H1
ctccctctttcctatcacactttctagatagctagcctgtaagatatatatatagatatttcatatatatcctatggtccgtgagtgcccttgttctgtaccaaccctttcttccacatgttgagtttgacaatcgtcctctcttgagtccccatatcaaatagccaccgaattcaaccccccatataacaaatctcctcccatcccatttttcagcaccaagttttgaaacttttctcaattgggttgagga

SEQ ID NO: 18297 - DNA, 253 bp, Glycine max
  Clone ID: 700875309H1
gcctcctcaaggagaaagacaacttaaaagctgaggtggcgagcctcaatgagaaggtgcttgcaagagggaaacaagaggggcacatgaagcagcaggctgaaagtgaagaagaaacaaaaagattattgcatttgcaggaacaggaaccaccccagaggcttttactggaatcagtttcggagggagaaggatccaaagtctcttctgttgtcgggggttgtaaacaggaagatatcagttcagccaggag

SEQ ID NO: 18298 - DNA, 233 bp, Glycine max
  Clone ID: 700875314H1
cattatctatttaatttgtgtttgtgtttgactccttcatcttgctctcgggacatatcacggtgcctgtgttttccgcacgccacattgatatgttatacgagtgcattattgtattttgagtgattatttcaataatgagtgtactcctttccctgttgacttgttatcgtttttccccaaaattttaacgcagcgattggacgttgaaactgagttcactgcttttggct

SEQ ID NO: 18299 - DNA, 251 bp, Glycine max
  Clone ID: 700875315H1
caaaagggggaaatagttatgaaaggagaagtgcgttattttgagttgaagcagcttattttgctgtcctattgccaagctataactttctaccttctcctcaagtctgaagggcagccagtttatgatcatcccataatagctcgccttgaagagatcaagaaattattggatcagataaaacaacttgacacaaaacttccatttgaacttgaggacattcttaaaggaaataatgggttagaaacagt

SEQ ID NO: 18300 - DNA, 252 bp, Glycine max
  unsure at all n locations
  Clone ID: 700875316H1
gaaaaaaataagagaaaaaccaaaacgcaacgattttttttctccgaaattcttaccaattcgagattaagggggaaaagccatggaagagatgtcgggtttagcaacagcaataaactcttccaacataggatttcagctattgaagaagcatgggtggaaagaagggactggtcttggagtctctgagcagggtaggttagaacctgtggagactcatgtanagaataataaacgaggtttgggagcaga

SEQ ID NO: 18301 - DNA, 240 bp, Glycine max
  unsure at all n locations
  Clone ID: 700875317H1
gtctcaaaggcccacggttcctcactcctcttccatagcctgcggccttcactctcatctcctggtctccagtgagatgaaccctagctccaattggtccctttaatcaattacctcttaattagtaattacttaatctcaattagcctttcactctcccacacaacaaatgaggganagtcaaaggttttgtcgaaggaggcatcgcttccatcattgcaggatgttccacacacccat

SEQ ID NO: 18302 - DNA, 249 bp, Glycine max
  Clone ID: 700875319H1
aaacgattagtcgttaggttggacaatttggtatatatagcttttggttattctgatggaattatgtgtggtacctgtgttggaagtgtaattgataaaacgtgttgtttatgttggtgtgattggcaataggtgcctacaagtatgtttcagagctatggcgcaagaagcagtctgatgtcatgcgcttcttgcagcgggtgaggtgctgggagtataggcagcaaccttccattgttcgtttgacaa

SEQ ID NO: 18303 - DNA, 247 bp, Glycine max
  Clone ID: 700875320H1
ctcgagcgctcgagccgcaatggaatacactattgtagtagctgaaacagcggattctccagcgacattacaatacctcgccccttatacaggagcagctctggctgaatattttatgtaccgtgaacgtcacactttaatcatttatgacgatctctccaaacaagcacaggcttatcgccaaatgtctcttctattacgaagaccacctggtcgcgaacttatccaggggatgttttttatttac

SEQ ID NO: 18304 - DNA, 62 bp, Glycine max
  Clone ID: 700875323H1
ctagttctagatcgcgagcggccgccctttttttttttttgtgaaaataaatggactccaaa

SEQ ID NO: 18305 - DNA, 245 bp, Glycine max
  Clone ID: 700875328H1
cgcacgtagcacaagtgatgtagttgaagcttcagggactgcaaaacctggcgaaatagttccagcgtccgataagactgcaactgtcaataggaatgctcttgggagaccccttcccacaaggccatgggaccagactaatgggagtaccagctatggaggttatggttccacaatgaattataatcctggatatggaacatatggaggagtgggagggttgtatggcggaggaatgtatggca

SEQ ID NO: 18306 - DNA, 274 bp, Glycine max
  Clone ID: 700875330H1
tagtcaacaacagctgactctctgtactcggctactgtgagcgttttacgctactgtcagctacacttctacattacatagtcatttccagccgttacataggaacatgataagcgtgtggggtaacacgcccttggcgacggtggatcccgagatccatgacctcatcgagaaggagaagcgccgtcaatgccgcggaatcgagctcatcgcctccgagaacttcacctccttcgccgtcatcgaggccctcggcagcgctctcacgaacaaa

SEQ ID NO: 18307 - DNA, 246 bp, Glycine max
  Clone ID: 700875331H1
tcaacccatactccatggaatggactggtttggccaatagattactgagtaagggcaacgatattctgtgttgcgattatgctagttttgatggtttgattaccaagcaagttatgagcaagatggcagaaatgataaacagtctttgtggtggtgatgaaaaattgatgcgtgaaaggacacacctgctgttggcttgttgttcaagaatggcaatttgtaagaaagatgtttggagagttgaat

SEQ ID NO: 18308 - DNA, 250 bp, Glycine max
  Clone ID: 700875332H1
ctggtaatgcattcattgctttgtttgctagaacgaaaaaagaaatcaatttgtacttcagaactacgaatttttcattgttaaatttgactctccttgtccatcacagagaaaatctagttgaattttcactgaatcatttgtttttttttggttagtgcagaacagtttctaggtatggaaactctttcatatgggtcagcaccatgctgccaagttgtgaactcaaagtggaaattagttgaaaaga

SEQ ID NO: 18309 - DNA, 244 bp, Glycine max
  Clone ID: 700875339H1
ttcgagcgaattcggctcgagcagatttagtggactatcaacgctaaacaggtatgatccattcttgacgagacaaagcaagcagttggtgctaaggcaatggtggttggacatactcctcaaagtatagtaaatacaattgtagcatatggcgcgtagatgttggaatgtccagtggagttctgaattcaaaaccagaggttctagaaattatagacgataaagcaagagttataaggtgcaa

SEQ ID NO: 18310 - DNA, 245 bp, Glycine max
  Clone ID: 700875342H1
caaacatttttccatgaaacttgcatcttccattattattctatcacatccatggccacagttgtgaagctatctgttgtcccagaatgtttgaaccaacagaaaacgatgtcgctcaggaggggatttggctcatgcccttcccctggggtgcttggttttggccattattgtgatcggttctctgtgaaagtgtgcagggcttttaggactgaggatggtggggatgtaaaggagaaaaagtt

SEQ ID NO: 18311 - DNA, 241 bp, Glycine max
  Clone ID: 700875344H1
tacagtgctcctattcgtctggaatctgatctcactgatagcgacctgtttttcttactagccaatgattccgatgaattcaaccgttgggatgctggacaagttttggcacggaagttgatgcttaacttagtggatgatttgcaacgtaacaaaccattggttttaaattccaatttggtgcaagggttcaaacgtatgttatgtgactcaagtctgtacaaagagtttgtggcaaagg

SEQ ID NO: 18312 - DNA, 242 bp, Glycine max
  Clone ID: 700875345H1
aagccatttacaaaaatggtaaccattaaagcatcttacacagtccttccaaatgaaccaactccggagggccttttatggctatctgatattgatcaagtggcacgtctacgccacacacccaccatctacattttccatgcaaaacacaaccctgatacattaattgagaggatgagaaactctcttagcaagattttggttcactactatccaatagccggtcgattgagaaggataga

SEQ ID NO: 18313 - DNA, 247 bp, Glycine max
  Clone ID: 700875347H1
ctctctctctctcttttctctgtgtgtgtgcgtggattggtgaatttgagattgaagaagatgatgcaggctggacccggcggcatggcccaacaagcgaaccagcaatacgcacagcaacagcaacaacaacaacaacaagcctacatgatgatgccgccgcagcctcagccccctcagatgtgggccccatcggcccagcctccgtcccaatcggtagctcctccgcaacccaccagagccgatg

SEQ ID NO: 18314 - DNA, 247 bp, Glycine max
  Clone ID: 700875348H1
ggagaagtttacacatggggatggagggaatgtgtaccctctgggaaggtgtttggtgaatcattaactggggtaagccctgaaaaggatgtacccagaaggcaaagttcattcttgacggagcaagtgagccctcgttctcaaggttcaaaatctactggaggaactgcctctggtaccagtggagaagaaagttcaaagagaagaagagtatcttcagcaaagcaaacagctgaaacctcatcat

SEQ ID NO: 18315 - DNA, 248 bp, Glycine max
  Clone ID: 700875350H1
cacaaacataacataaaaattcttcccgctgattcggaacattctgcaatttttcagtctatccaggggttgccaaagggtgcacttaggaaaatccttttaactggatcaggaggtgctttcagagaatagcctgctgaaaagatgaaagatattaagcttgctgatgcattaaagcatcccatatggagtttggggagaaaaataactattgactctgctacccttttcaataagggtctagaagt

SEQ ID NO: 18316 - DNA, 246 bp, Glycine max
  Clone ID: 700875352H1
atcacttcatcatggcttcctcgtgtgcttcctctgccattgcagctgttgccatctccacaccaagttcccagaagaatggatcactcttgggaagcacaaaagcttcttttcttagtgggaggaaactgaaggtgaacaactttacagcaccagttggagcacgatccagcactacagtttgcgcagttgctgagcctgataggcctctgtggttcccaggcagcacccctcctccatggctag

SEQ ID NO: 18317 - DNA, 244 bp, Glycine max
  Clone ID: 700875353H1
catgtcacttatgcggaaagaaactccacggcaaagacatatacatgtacagaggagagaaagcgttttgtagcccagagtgtcgttcgagtcaaataatgatggacgaacggaaggaacggtgtaggtcagaagcttcaaggtctgtggaaatgtcaagctcgccatatgcaagggaacagatattttcaactgggattcttgcgctttagcgttactctctgggtgcggaaataaattaatt

SEQ ID NO: 18318 - DNA, 243 bp, Glycine max
  Clone ID: 700875355H1
ctcatttcttctcatcttctttttcttccctttaaaattattattccgtgcaaacacaacaacaacttcatcaccaacacgaagaacaagattagcgttatgggtctcttcctttctaggaatttggcttgcaaattcatatacccttttcttttttccaataaggtttcaaaggatttgttccccaagcagttggagaacatgatgtctctggtctctcctcgtactggcaggcatttgcag

SEQ ID NO: 18319 - DNA, 247 bp, Glycine max
  Clone ID: 700875356H1
gtcatcgttgggatctccatacgccggatctgctaaaatacgcttgatccatatgggcctcctcgaccacttgtgggacgacaccgtcgccggcccaaggcggaaaacggtctcggcaagctccgaaaacaccacaccttcactttccgacctagctccggcaaggaaacggagggcgggagcgtgagatcgtacggagacgaatcgtcggaggaagcgacgagagtgacgcgtagtatcatgatcg

SEQ ID NO: 18320 - DNA, 255 bp, Glycine max
  Clone ID: 700875303H1
aagatgctgacctctcttcatcttctggacatgattctcaaataccaaacccccatctagcaaacgggcaaccgatgtctggtgagtttccatgtgctacttctgatgctcaatctatgcaaactacatctataggtcaatccgaaaaggttcactcactttcatatgctgatccaaagcaaccaggtcctgagagtgatgaagagataagaagagtgccagagattggaggtgaaagtgccggaacttcggcct

SEQ ID NO: 18321 - DNA, 249 bp, Glycine max
  Clone ID: 700875254H1
aacagactaatggcactagtaaagactccaggttagaggattctgatgctttacatatgaaattggttcaaaatgagaaaccagatggtcttgattgtgaattaacaatagatgggatgcaaggcaatcagaattaccctaggcatgttactgtgcacgttgttgatgggaaccttggaacaaatactcaaaatccatcacaagatatgttgtttcgagattccatgtttcagccaataggaggggtta

SEQ ID NO: 18322 - DNA, 249 bp, Glycine max
  Clone ID: 700875255H1
acttacaccacttgctgaacgtgtgagcttcattacagagtaaggaacctcgatgaacttgttgcaccctttcttttctttggatgatttgttatacaacaagcttttgtttctgggttgattgctgatactttttctattttctctgttggtgattgtcccttcaaatgtcgcagacaagttgccttttacactggtcccacagttggaggacttctgaatgctacatgtgggaatgttactgagctc

SEQ ID NO: 18323 - DNA, 253 bp, Glycine max
  Clone ID: 700875256H1
gcttcaagttgttatgtctttccatcagtgtgggggaaatgttggagacaattgcagcattcctctaccaccatgggtgttggtagaaatcagcaagaaccctgagctggtttacacagacagatcagggaggaggaatcctgagtacatctccttgggctgtgattcggttcctgttctaaatggaagaactcctctccaagtgtactctgactacatgagaagctttcgtgacaaattcagagattacttg

SEQ ID NO: 18324 - DNA, 251 bp, Glycine max
  Clone ID: 700875257H1
aaggaaggcaagacgagccatggcagctgctgcggcttctgcatcgggaaatggaacagtaattgtggaagctaagaaatctgtgaagggacggaacaagttgcagaagaagaaagagaagaagacaagaactgagggtgcagcacagatgaaaaagaagcggaagcttggagttggatcagcaaaggcatctcaaagtagaaacaagtttggttttgaggatttgacgttgcgcttgagaaagaacttgg

SEQ ID NO: 18325 - DNA, 248 bp, Glycine max
  Clone ID: 700875258H1
ctttgatttgccattgaaggatgatgacagcctcacaagctgcccaccattttcagtgccaaactacatggctccaaccctttcagcccgggccaaagcacgtgctagtagtaatcctagagaaaggcttggtggaactccaactagtactgattcaaagaggaggctctcattccctttatcacaaggaattggatcattcaagtggtctaaagggttctcaagcaaggatcaaagggtgccagaca

SEQ ID NO: 18326 - DNA, 251 bp, Glycine max
  Clone ID: 700875260H1
ctgtcatgtgataatacttgagctaaaaccaggtgatctcttagcatctttcttggattttgtgattaaagataatgaaaaaaatttagctcttgatttttttttaaaaggagctcttgaatcttgatagccagacacaattttaactactatcattttcgtagacgggaagcctcaatgaacatcgtcgtctacatttaatagattttgttaaatataactttaaagtacttattgaaaaaaatattaat

SEQ ID NO: 18327 - DNA, 254 bp, Glycine max
  Clone ID: 700875262H1
aacaaattgagcaatgaatttgtaaatagggcaaaagtaatggataaggaattaatttctctggatatattagaaaaccgaattcgattgtctaatgatgaaactaaaacaaaatatttaactaaaatatatgatcctttcctgaacggacgctttcgtggacaaatcgaaaatgttttttcaacctcaatccaatatgaaaaaaatgacaaaaaaaataccattttgataaataaaattcatggtatccttat

SEQ ID NO: 18328 - DNA, 251 bp, Glycine max
  Clone ID: 700875263H1
gcaggaactgggcataactgctcttcacatcaagctccgtgcgacgggtggaaacaagacaaaaacacctggtcctggtgctcaatcagctcttcgtgcccttgctcgttctggaatgaaaattggcagcatagaggatgtgacccccattccttccgatagcacacgtagaaagagtggtagaaggggtagaaggctttaaggttctcgtggtattttaatttccatgtcaaacagaattgtggcatttt

SEQ ID NO: 18329 - DNA, 286 bp, Glycine max
  Clone ID: 700875264H1
tacgcgtactcggcttgcggttcggctcgagtaattctcatttcttcatcgttcgattcttctcctcctaaagatgcagatcttcgtgaaaactttgaccggtaagaccatcacccttgaggtggagtcctccgacaccatcgataacgtgaaagctaagattcaagacaaggaagggatcccacctgaccagcagagacttatctttgcgggtaaacagcttgaggatggtcgaacccttgccgactacaacatccaaaaggaatccactctccagctcgtgctt

SEQ ID NO: 18330 - DNA, 248 bp, Glycine max
  Clone ID: 700875267H1
cgaaactgatgatattgaaaaaaaaagaattgtaaataaggttcaggttcgacttccatagagaatatagatgatattgtctataatgatagaaaaaaataaaaaactttcgaaagattttatccaattgaaattttaaaaatgactgggataaacttaagaattcaattattgaaattgaataagtaaacaatttaattggattggtcgaatggtatcaaaaaaatggagtactaactcccatttct

SEQ ID NO: 18331 - DNA, 246 bp, Glycine max
  Clone ID: 700875270H1
gttggagatgtgtgacagggagtggcatgcctggtgctggaaatcctgggggcatagctcctcctcctagacttgatcatgttgctgttagtcttccaggtgggagaattctaatatttggtgggtctgttgctggtcttcactctgcctctcagctttacattcttgatccaactgatgagaagcctacatggagaatcctaaatgtacctgggtgccctccaagatttgcttggggacacagta

SEQ ID NO: 18332 - DNA, 248 bp, Glycine max
  Clone ID: 700875279H1
aataaaccgaatgagagcattaacctcttcttcttccactttcattccaaagcgttattccttcttcttcttcctctccattctcttcgctcttcgatcctcgtccgggggctgctccgaatactaccaccaccacgcgccgatggccacgataggaggcttacgcgactcccaaggctctcagaacagcgtccaaaccgaggccctcgctcggttcgccgtcgatgaacacaacaagaagcagaatt

SEQ ID NO: 18333 - DNA, 248 bp, Glycine max
  Clone ID: 700875280H1
gtaaagaaagaaagagaagagaagaatcgaagacgaagatggaggacgcatcagcatcaaagttcattccacaccaaatcggaggggtccaaaacgacgcgcttcgattcggtctccatggagtcaagagcgacatcgttggttctcaccctcttcaatcttcactccaatctacaaggagaatggatgaagcgatgaagaggcaatgcaaagttaacctgtacggaactgcttttcccatgaaggag

SEQ ID NO: 18334 - DNA, 250 bp, Glycine max
  Clone ID: 700875281H1
ataagaataatatatataaggtacaaatagtaaatcgaggtacccattttatgataaactttccttccatttttgttcctctagtaggcctagtatttccggcaattgcaatggcttctttatttctttatgttcaaaaaaacaagattttttagatacagataacaaagtaaaattctggggttttttattccccaattataatactaaattcaaaaaaaggagagtaatgagtataatctttcgctca

SEQ ID NO: 18335 - DNA, 243 bp, Glycine max
  Clone ID: 700875283H1
atttgctaggatttcaggtgtgcagctgaaacctccgtgtcccacgaaaaccttacaaaattgaattgtggtattacagtatccaacagcaccatgctggattctgccactccccatgacaaaatcaccacagcagcttctggcttcgtacttgaggatgttcctcatctatctgcttacatccctcacctccaaacatatcctgacccgttgcaagacaatccttcctattctgttgttgcg

SEQ ID NO: 18336 - DNA, 240 bp, Glycine max
  Clone ID: 700875284H1
cgcatgtaagaaatgtttgattggaacgacgaagatctcgctaacatagtatggggtgaggcgggtgagagtgatgatcatattgtgccttatccggaggcaagtgaagatcttaatgacaagaaagaatggaatcaggaagcttctgctactaaactgattgagcagaggagaatagaggctaaaactgattttcatcaaggaaagctaggaagcagttcaaacttgatattattgagg

SEQ ID NO: 18337 - DNA, 241 bp, Glycine max
  Clone ID: 700875285H1
cggagctcttcttctgtttttcatcctcttcaccctgctaggagccattggaggtttaggtgaccgtggaaaatttgttgatgacgaacctactactggaggtgttattcctccaggcaaaggcttcagggaagctcttggtcttggttcaggtcctttatttggattcacgaaagcaaacgagctatttgtgggaagattggctcaattgggtttcgttttctcattgattggagaaatt

SEQ ID NO: 18338 - DNA, 246 bp, Glycine max
  Clone ID: 700875287H1
caattgtttacattttttccccaaacttatccgatacaatcgagcaaatgcaacaaacgaaaccagagattcataattgcacgttctcttttgttgtctccagctcatagaatattacattaactctgattcattcagaatttcagattcaccttttcttcttctctttttgttttcctctgaaagctttttgcagaaagttgtgatttttccttgaaagatggcatctttgagcatgacccagat

SEQ ID NO: 18339 - DNA, 249 bp, Glycine max
  Clone ID: 700875288H1
gccgaaagcatcactagcttacgctctgacccgagtagcatggggcacgtggaatcccgtgtgaatcagcaaggaccaccttgcaaggctaaatactcctgggtgaccgatagtgaagtagtaccgtgagggaagggtgaaaagaacccccatcggggagtgaaatagaacatgaaaccgtaagctcccaagcagtgggaggaggctcgggactctgaccgcgtgcctgttgaagaatgagccggcgac

SEQ ID NO: 18340 - DNA, 245 bp, Glycine max
  Clone ID: 700875290H1
cgaagtttgttggcggcaaagcaaatctgcatagcgatggcgcctccgaagctcttcgtatttgcgctttcagtaaccctgatttttgccatcgttggggccgaagccgatgtttccgtcgaaggagccactccagagcctgatacctccgccatcaagatccaattagatcaactcaattccaagatccaaattctcgagtctcaaatcagtgaaaagttggaagaagtgaagaagaaggacaa

SEQ ID NO: 18341 - DNA, 245 bp, Glycine max
  Clone ID: 700875291H1
gaattttacaattccaactgaagcaagtgatttcagttcatggagaaatcttcccaacacggactttgagcttgagaggccacctcccccaatcaagaatggtcctaatgcacacccgaagaagctgcttaatggatctggacttaacggatctggtcttaacggatctggtcttaatggatctggacttcacctatctaaccacagtaatggtgatgggttggacctctctcctgtcagcagca

SEQ ID NO: 18342 - DNA, 246 bp, Glycine max
  Clone ID: 700875293H1
gtaacagttctctccgatcagtctaaaaggtcaatgtacgatgcggggctctacgatcctttggaggaagaagaccaagtccgtaaagttttttcctttcattttttttcaattactatttttataagaaaaaaaaatgttttttttttaatgagcaggatttttgtgacttcatgcaagagatgatctcgatgatgaacaatgtgaaagacgaggtagtgattttgatgatgggttttgtttttg

SEQ ID NO: 18343 - DNA, 257 bp, Glycine max
  Clone ID: 700875301H1
ccaaaacaaaacttcaatttctgtttcagttcgcggagatcaatattttatctaggtccatcgtcgatagaagatacgagaaaccaaaggcaatgtttttgtgggattggttttatgggattctagcgtcgctcgggctgtggcagaaggaggccaagatcttattcttgggcctcgataacgctggcaaaactaccttgcttcacatgctcaaagatgagagattagtccagcatcagcctacccagtatcctaca

SEQ ID NO: 18344 - DNA, 266 bp, Glycine max
  Clone ID: 700875302H1
tcggctcgagcaataagcgttaaccatgtctgcctttgttggaaagtacgcaggtagtatctcatatctcctcctcttctcttaatattactcactcttacatctctcacccacacgtaaacaagaacatttcttcattgaatgaagtacaagcttgtcaaacattccactttaatgcactgattaacaagaaacgagtagccgagaaatgcatcatcatattctcattagttattggaacataatctcaaattataaaagattca

SEQ ID NO: 18345 - DNA, 247 bp, Glycine max
  Clone ID: 700875253H1
ctgaatggttctggagctggagcttcagctcccagttcagccttctttgggaccagcttgaagaaggttattgcctcaagggtccccaacagcaaggtttccggtggaagcttcaagattgttgctgtagaagagaagaaagagattgaagagacccagcagatcgacaaggacagatggaagggtcttgcctatgatatctcagacgaccaacaagacgtcacaagaggaaagggtttggttgact

SEQ ID NO: 18346 - DNA, 267 bp, Glycine max
  Clone ID: 700875202H1
gcttgagctctagccgcaatttcagtgtgttttttaagagagagagagaatcacgtttacatgtctctgaatttgcaactaaaaaatgttgaaacaattggttttcagtttcttcataacaacgctttctctttcacttatccttttcaccatcaatatcatacccatgcctcgctctcttttccctcaccaccacaaactcgctttcgccctccgacaaccgtcttctccgccctgacggcggagcatatcgccgcgccgtcggtg

SEQ ID NO: 18347 - DNA, 258 bp, Glycine max
  Clone ID: 700875203H1
cttcctatttgtaggccatttatggcacgcgggaagagctcgcgcagctgccgcaggatttgaaaaaggaattgatcgagattttgaaccagttctttccatgactcctcttaattgagacatgagatcctatgaagtagaaatcacttttattttactataaatattactataaatattgggttgaattgagcgggtcgtatttaaataagaatttcttttcctttgttcttagtttctatcgaaaaaaaaaagatt

SEQ ID NO: 18348 - DNA, 257 bp, Glycine max
  Clone ID: 700875204H1
ttacaccgcgcgctgtaaatctgagtatcagacaacttcccctcaccaccacataacctcaaacaacacaacaccgccaacatgggtaaggagaagatgcacatcaacgtggtcgttatcggccacgtcgattccggaaagtccaccaccaccggccacttgatctacaagtgcggtggtattgacaagcgtaccatcgagaagttcgagaaggaagccgccgaactcggtaagggttccttcaagtacgcatgggt

SEQ ID NO: 18349 - DNA, 256 bp, Glycine max
  Clone ID: 700875206H1
atctcgagcgaatcggctcgaggaggaattgaacctgacaacttgccctacccgtttgtgactcaaggcatgctctctatacgttgctctcaaggaaggagtgcaaattcatgctcatgtttttaaggctggtcttgaggttgatgtctttgtgcaaaatggcttgattagcatgtatggcaagtgtggggcaatagagcatgctggtgttgtgtttgagcaaatggatgaaaagagtgtggcttcgtggagttcc

SEQ ID NO: 18350 - DNA, 255 bp, Glycine max
  Clone ID: 700875209H1
gtgggttcttcttcttctattacaacaacgtcgtccaagaccatgaccatggccatggccacgatcctgctcctgttcacggtcttcgcggtttcatcggccctagacatgtcgataatctcgtacgacaacgcccacgccgccacgtcgcgcagcaaatggcagctgctgtccatgtacgagcagtggctagtagagcacggcaaggtgtacaacgcgctcggagagaaggagaagaggttccagatcttcaag

SEQ ID NO: 18351 - DNA, 251 bp, Glycine max
  Clone ID: 700875210H1
tcgacctgcaatccctcccaaaggacctcatcagcagaggcatggccgtggaggaccccaccgcaccccacggcctcaagctaatcatcgaagactacccttacgccaacgacggcctcgtcctctgggacgccctcaaaacctggttcaccgaatacgtgaacctctactacgccgacgatggttctatagtgtcggacactgagctccaagcctggtgggaagagatcagaaccgttggacacggggat

SEQ ID NO: 18352 - DNA, 257 bp, Glycine max
  Clone ID: 700875212H1
ctcgctgaagcttcacgctctctcctacctcaacaacttggtcgacaccttctggcccgagatctccaccagtctcccgaagatagagagtttgcatgaagatgaggagtttgatcaacatcaaaggcaacttgctgcacttcttgtatcaaaggtcttttattacttgggtgaactttatgattcgtgatcctatgcccttggagctggacctctgttatatgtctcagaggattctgactacgtgcacacgcttc

SEQ ID NO: 18353 - DNA, 259 bp, Glycine max
  Clone ID: 700875213H1
cggctcgaggctgctccctcagaacacataaccacatacacttcggttaatccgaaagaagctcatcggaatcgcaagacaccgccgacgacatggccgccgccgtgaccgatatggcccgccgtcacacgattagccaaatactggtcgacctcgtcaagttcgccgtcggttccgccatcgacggctcacgcagaatcatccctggtaggaagcaggtaactaagatggtgccagaaggattaataaacataccctt

SEQ ID NO: 18354 - DNA, 260 bp, Glycine max
  Clone ID: 700875215H1
gattcatcttcggtcattttattttgtataatactagacagataataaagagaataatcatattaaatattaaatagaaaaaatggcccgatcatttatcaaaggccaatcttcggtagaagataaggttcctttggaacacttatttctatttcagtataccgggtctctttctttcatttcaaaaaatttatagaatttcgattttgaaatgaaagacaagtgtggggataaatatgaatgacataaagatattggac

SEQ ID NO: 18355 - DNA, 274 bp, Glycine max
  Clone ID: 700875216H1
gggtttgggctcgaggttgtaagtcatgtcaacattttcgatcgttttgatcaattttgattgagtcatacaatgatgagtaagaattcgaagcggagatgttaaattttcaagttgagctgacatgtgacagtttggcaggatatattgtttctagaatttatgcccaaatattgccctacagaagccttagttatggataccctccactctcagagatacgaattgttggagatgagcactcttctttttcgatctcacattcatcgatcgc

SEQ ID NO: 18356 - DNA, 258 bp, Glycine max
  Clone ID: 700875218H1
ttcaaggacgagaccaacgtggttggcgacctccccgaggcgcagaggaaagcccttgatgagctcaagaggcttgttcaagaagcgctcaacaaccatgagctaactgctcccaaaccagaaccagacaagaagtcaacggaactcaaagcactggagaagaaggaggaagaagtctctgaagagaagaaggaagttgaagtgacggaagagaagaaggaagcagaagtgacggaggagaagaaggaagcagaagtg

SEQ ID NO: 18357 - DNA, 256 bp, Glycine max
  Clone ID: 700875230H1
ataacttctattcaagcagtttatgtacccgcagacgatttaaccgatcctgcgcctgctacgacatttgcacatttagatgctactactgtactatcaagaggattagcggccaaaggtatctatccagcagtagatcctttagattcaacctcaactatgctccaacctcgaatcgttggtgaagaacattatgagactgcgcaaagagttaaacaaactttacaacgttacaaagaacttcaagacattatag

SEQ ID NO: 18358 - DNA, 256 bp, Glycine max
  Clone ID: 700875231H1
gccagacacaaacatgaacatagtctgtttcaaaccctgcattccttcctcattactatgccccagaaccagcttcagaaaattcccactaacaattccacgtttcagtcttcaagattctcagcagcagcagcagcaacaacaacaacaacaactcaacctctccgttcttcgcttcacattggggattccagggttggatgagtcttacttgcccagatggattggttatggctttggttcacttctgctcttg

SEQ ID NO: 18359 - DNA, 256 bp, Glycine max
  Clone ID: 700875232H1
caaggattaggttcaaccataccactttctactaaattgtgtcactcaagttcgacacaaagtgcagaaatggagaaaaaggaaatatgtgtcttcctttcctgggagtgatagggtttatcgccatggtgtttcaattcaaaagtttgaagtttctttgtctttgatttcatgtttaattttgttagcctgattgatatcatattttttttcttatttaacaattgatataatacgtgctgcctttctttcaaaa

SEQ ID NO: 18360 - DNA, 256 bp, Glycine max
  Clone ID: 700875234H1
aaaagaaaaaaaagattctaaagaaatataactaatattctttagaataatcaaaaagaatattaaattcaaataaattttagatagaaaaaaagacttaaaaaggaggatttgaaatgcgagatctaaaaacatatctttccgtggcaccagtagtaagtactctatggttcggggctttggcgggtctcttgatagagatcaatcgtttttttccagatgcattgatattcccttttttttcattctagttatt

SEQ ID NO: 18361 - DNA, 254 bp, Glycine max
  Clone ID: 700875235H1
ctattgaattaactgaacaggcgggtacaaaaggagttcaagtacaaattgcaggacgtatcgacggaaaagaaattgcacgtgttgaatggatcagagaaggtagagttcctctacaaaccattcgagcgaaaatcgattattgttgctatacagttcgaactatttatggggttttagggatcaaagtttggatattttctaaataaagaaaaatatattattctttatcttaaatgtgctatattttatct

SEQ ID NO: 18362 - DNA, 251 bp, Glycine max
  Clone ID: 700875242H1
cttgaatgccttatcttccatgaagtgtcttctcctcggagctggaacacttggatgccaggttgcgcgcatgcttatggcatggggtgttcgaaaaattactctagttgacaatggaagggtggctatgtctaacccattgaggcagtctctttatactttggatgactgtcttaatggtggggaatttaaagctacggcagcagttgaaagtcttaaacggatatttccagcagtggaagcagaaggca

SEQ ID NO: 18363 - DNA, 255 bp, Glycine max
  Clone ID: 700875243H1
aggaagctcaaccacatccaatacctcagaccacacaacagtgtagaagggagatttgaaagtgcatgtgaagaaacgcattagaagagaaaaaagatgagcaaaaaacagacggtgaaattagacgaggagcaaatcgcagaattgcgcgaaatctttcggtccttcgatcggaacaatgacgggagcctgacgcagttggagctgagttcgcttctgcgctcgcttggtctgaagcccagtgcagaccaactc

SEQ ID NO: 18364 - DNA, 254 bp, Glycine max
  Clone ID: 700875244H1
taagttaccaaataaactaatgcataattaaaataatagaggaaaaattcacaaaaacagaaaatatatagaaagcatatatagaaaagctttaaagagagaacagtgtagagaaagcatatatagaaaaccatggacgttgtatgtatactataaagtcaacaaaaagtactaataaaattgtggatgctgaaagagttagttaatataagcaacatagcttcttgtattgtattacatatttgtattgtatt

SEQ ID NO: 18365 - DNA, 246 bp, Glycine max
  Clone ID: 700875245H1
tcgcgagattggaggttcaagagaataatccctgctcactttgctgctccaataagtgcaagtaggtctgatttcagggctgcatttgcatttttggatgagtttttgggggaaagtaatgctgcatggccttcactttcccttctcttctcatcaatcatgggaaatgcagccagctattttcctccggatgacatgaggaccctatcatcccttgaccagtttttggtgtctgttggtgctgtg

SEQ ID NO: 18366 - DNA, 254 bp, Glycine max
  Clone ID: 700875247H1
cttctaacttggtgcattgactcaccatctttgctttgaatcgacatggaagataaactagcaacaacaagtgaaggacaacccataagatgtaaagctgcgatttgtcgcaagccaggttctccattgagtattgaggagatcattgtggcaccaccaatgcctcgtgaagctcggattcgtgttatatgcacttctctttgtcacagcgatgttactttttggaaaatggaggttattaccatcattttctt

SEQ ID NO: 18367 - DNA, 253 bp, Glycine max
  Clone ID: 700875248H1
ggtacccatattgttacatctgcaactgttggtggaagagatgtagtgtatatcaggcagcaccaatcatcttctttgtctgcttcagacattgaaaactatgtaaaggacattggagatgataggtttcgtgatgttaagaacttttccggtcctggtcctttaaagtacaaggagaaggatgttactgtcatatttaggaggagaggaggggatgatcttgagcaaagtcatactaaatgggcggaaactg

SEQ ID NO: 18368 - DNA, 252 bp, Glycine max
  Clone ID: 700875249H1
atccatcacacataaataaccaagtggagattgacctagtccttgacttcagaggatggacaaagaacaaggcaaaattctaaaaaatattatatcgttataattttttttccccaatgtaattaggaaagtgagagtacaactaattggaggagaaaaataatgtaatctgggacgatatgatttgtacatattattattgcaacattctacttttatttatcatgggtttttaatgtaaataactgatta

SEQ ID NO: 18369 - DNA, 250 bp, Glycine max
  Clone ID: 700875251H1
cataatatagtgcaacttcatagttcataatcaggcttatacttaattggaaggaatctcttattgtttgagggctatatctttggcaaatactgttatgcctgcccgtcctgtatattgataaaatgataacatcatagattaggatgaaaaagaacttttagatcatttgagatagctgaagggaaaaagcaacttgcttctcatttattcataggaaaaaaataagtcatgaatggactgcatcttt

SEQ ID NO: 18370 - DNA, 277 bp, Glycine max
  Clone ID: 700875201H1
ttgcaattgaagttgaagtcttgcccttctctcttcaactccaaacacaagacatcatcatccatggctgcctccgtctccactgtcggagctgtcaacagagctcttttgaacctgaatgggtctggacctggggtttcagctcccagttcatccttctttgggagcagcttgaagaaggttattggctcaagggtccccaacacaaagatttcctctggaagcttcaagattgttgctgtagaagagaagaaagagattgaagagacccagcaga

SEQ ID NO: 18371 - DNA, 236 bp, Glycine max
  Clone ID: 700875157H1
gtgatcttgtcatccgacctttgccatgacaggtgcgcttgcttggcaggtcaaaatatgttaataaaaaaagttttattggtttagggagagatcgcacgggagttgcccggggtctctctctcgtgtggtgtgtggtgttcgctgtgctctccttttcgttatgccttttattattacctatctgtcgctccactccgtattacgactctggatcagagggatacatcagagga

SEQ ID NO: 18372 - DNA, 234 bp, Glycine max
  Clone ID: 700875158H1
gcttgtttcacccaagtcacatgccagtgttttcgttagagcgataaaaactagtgttttgttgtacgggaagatacaatcttggccttagatttgtaatattttatctggggaactagaccagactgtttttgttttttggttatatatatcagtttctttcacctgttgatgctcttttctctcctgcttgggcgagtgaagaggtgagagagcagataaaagcttgaggct

SEQ ID NO: 18373 - DNA, 237 bp, Glycine max
  Clone ID: 700875159H1
ggcatctgcgacgcgtctggtgcactgcgagctgcgctcggcgaggcccgcggttcggccgagggaaccggccggtccggttcaggttacgatccccaaacccaaacccaaagcggcggaggcggaaggcgcgaacatcgttttgcagccgcggttgtgcactctcagatcctacggttcggatcgagccggggtgcttatcaagactcgcaaggagggtgaccatgatgacgtgtc

SEQ ID NO: 18374 - DNA, 237 bp, Glycine max
  Clone ID: 700875160H1
acaaacaaagaaaaacaaaaaacccttagccaacacaaccatcatggccacctctgctattcagcaatcagcattcactggtcaaactgctctgaagcagctcaatgagttcgtccgcaagaccggtggcgccggcaaaggtcgcactaacatgcgccgcaccgtcaagagtgctcctcagagcatttggtatggccctgaccgtcccaagtacttgggtccattctcggagcagat

SEQ ID NO: 18375 - DNA, 240 bp, Glycine max
  Clone ID: 700875162H1
gcggcttcaaccttgtagttattctctttcttcttttttagctatccctctcttgaaaaatctagctctcgttcttccttgatctacgttacgcttttagtgaccggatctgtatggatctgaaccagatctacacgccgatggtggttttggcctggtctttcatagatctgatgcatggaggctcagatctactgtacagagatactgtagataatcgatgagaagaacgcagatcca

SEQ ID NO: 18376 - DNA, 246 bp, Glycine max
  Clone ID: 700875166H1
gtttttcattgtgcattattcaatggccaccacagcagctctatccggaaccatggtgagcacctccttcatgaggaagcaacctatgacgaccaagagcctaaagacattccccaacgctctttttggtctgaaaggtggacgaggtggtcgtgtaacttgcatggcctcgtacaaggtgaagctcataaccccagaaggagaagtggagtttgaatgcccagatgatgttttcattgttgacaa

SEQ ID NO: 18377 - DNA, 244 bp, Glycine max
  Clone ID: 700875168H1
gctatgcaatcaatccttgcaaaccctatgatccgcatttccagcgggtctagggagaaccattttggtgttcctgcttatcacatgagaaggaatgttggcctgagagttaggtccatggctgaggaagagcaaccaagtcagcctgcgaccccagttacaccaccaccagcagaacccaaaccacagccagtctctactccttcaccaaaggtgagcaccaagttttctgatgtgttggcgt

SEQ ID NO: 18378 - DNA, 244 bp, Glycine max
  Clone ID: 700875169H1
gagacactcacctcctgttgcatcaacagttgctcccacaacatcagcatcaaacagaggatccaagtcaaccttaagctctgatcttgaaaaggagaaacggccgcctcagagacgaaagtttcaagaattgccagttggttcaaaagacacaacaaaactcaatcagagattgcaacctctaaaaactaatgaacaatctgatggtccggttgtgaggaatatatcaacaatgcctgcccct

SEQ ID NO: 18379 - DNA, 242 bp, Glycine max
  Clone ID: 700875171H1
gatcttctaagaatggtagtgattttgatagtgctcgttctgtgtttcttgaacggacatcctcatcaaattcccggaggagttctataaatggttctgccaagcatgcctacagtagtttcaacagaagtcatcgtgacaaggaccgtgacagagagaaagatagatccagttttggagatcactgggactgtgatggttctgacccattggccaacctctttcctggaaggatggagagg

SEQ ID NO: 18380 - DNA, 234 bp, Glycine max
  Clone ID: 700875173H1
cgcaaattttctcccccaaatcgtagatctacggttaaattggtgtagtgtggtaagatgggaggaggatttagagtgcttcacttagttaggccatttctctcgtttcttcctgaagttcaaactgctgacaggaaagtgccatttagagagaaggtcatatacactgtgatctctcttttcattttcctggtttgtagtcagctccctctatatgggatacactcaacaaca

SEQ ID NO: 18381 - DNA, 235 bp, Glycine max
  Clone ID: 700875175H1
gtgaagtatagaaaagaataattggaaaatctaataggagatggaaaaggagagcgcaaggaatatgataggatctatgattatgatgtctataatgatttgggtaacccagacaagagcaatgatctagctcgtcctgttcttggagggtctagtgcctatccatatcctcgcaggggaagaactggtagaaaaccaacaacaaaagactctaagagtgagtcaccatccagca

SEQ ID NO: 18382 - DNA, 235 bp, Glycine max
  Clone ID: 700875176H1
cttctcttgcggctagggttttagcgcagcttcttctagatttagggaagatgggtaaggaaaaggttcacatcagtattgtggtcattggccatgtcgactctgggaaatccactaccactggtcacctgatttacaagcttggaggcattgacaagcgtgttattgagaggtttgagaaggaagctgctgagatgaacaagaggtctttcaagtatgcctgggtgctggacaa

SEQ ID NO: 18383 - DNA, 237 bp, Glycine max
  Clone ID: 700875177H1
cagattagtaccacaaaaatggagaaatagaataactgaatatcgtatagctcagaataaagatttaaccaaatgcaattcatatgaaaaaagccaattaattctttacaaagaacaacaagtaaacgcattaaaaaaaggaattagaaaacagtatggatacgatcttttatcctataattttgtcaattatgcagataagaaagactcgtatatttatggatatagatccctatt

SEQ ID NO: 18384 - DNA, 201 bp, Glycine max
  Clone ID: 700875179H1
tagcgtacacccaagtaactcgcctcattaattaacacaaacagtgatcaaggacacaggcaaagaatcttagaggtacgttgcaactggaaatccatggcaacgagtttgccaaaggcaaagcaagtgttggtggttgaaatcgacgacagtgatttcagcacttacgctctccaatggactctggatcacttgctagcc

SEQ ID NO: 18385 - DNA, 164 bp, Glycine max
  Clone ID: 700875180H1
gcggaatccatcgtcaaagcctccgccaccgcctctttcgggttcgtcgtcccctccgacgatggcgctgcctccgacgtcttcgcacccgacgactccgactccgccgcctggctcatcccgaaccccaatttcgggtccaaattcatggacgcccccgaaat

SEQ ID NO: 18386 - DNA, 106 bp, Glycine max
  Clone ID: 700875181H1
taacagcgtcatagcgttctctaagctatcgtgcgaggtccctcgacatccgcacgagcccagcacgaaggggctgtgcctgtcgtcgtcttccacacaacatacg

SEQ ID NO: 18387 - DNA, 242 bp, Glycine max
  Clone ID: 700875182H1
agcgactatggacttgatgaagaggtgtatgtgaatgaagaagatagaggtttcccaaaaagaaaagctgtctcaaccaatgttgagaggagtttagacaatcagagggaacgatctatggcactgaacagtgaaggtcttgagggcttgatacctcgtgctaaacttcttttgacaattggaggaacattcttcttgggatttgggccgttgatcctcataattgttgcaaccttttctgc

SEQ ID NO: 18388 - DNA, 79 bp, Glycine max
  Clone ID: 700875183H1
gtgggagggagatccaaaaagagagagtggaaaagatggcgcggttgatcacagtggtgtggtgcgcggtggcggtgct

SEQ ID NO: 18389 - DNA, 102 bp, Glycine max
  Clone ID: 700875184H1
aaaaacctttcataacttcttttcttcctccttcttcttcgggttgtgagtgtatacgcatcacgcatggcagctttccttcgacgctggattccacgatgg

SEQ ID NO: 18390 - DNA, 238 bp, Glycine max
  Clone ID: 700875185H1
gggagctctaggaactctaaagagttgcttgaacaacgagttacatcaacgtactgtcagtgctaatattggcatgtttgggacgatgaaagaaaaaataactgattagtctttctattataaaatagagtataggcattatcgtgttcttctagcgaaataaaattaagaaattttcatggtaaccattcgtgcaggtgaaattagtgaaattatccgtgaacgcattgagcaatat

SEQ ID NO: 18391 - DNA, 238 bp, Glycine max
  Clone ID: 700875186H1
caaaatgcccacttttttttcttccaacgctcctcctcgttctcatagccttcgccacctctgtctccggccgccgtgacctcgtcggagactttctccggctgccctccgaaactgataacgacgacaacttcaagggcacccggtgggccgtcctcctcgccggttccaatggttactggaattacagacatcaggctgatgtttgtcacgcctatcaaatattgaggaaaggtgg

SEQ ID NO: 18392 - DNA, 238 bp, Glycine max
  Clone ID: 700875188H1
ttccctggcatgctgaaataattgacgatctcgatgatgggcttacgcttcttcgggcccaaacggacgttacaacttacaacgacgtcgtaaaacgcgggggacttaaaaaatggaaaagaggagtaacatgcaatgcatcatcacatctgagggagaggagagcattttcatttttcaacttgagagaagaagagaaggggaaaaggaaaaaaaggcaaaatgggtaaggatctga

SEQ ID NO: 18393 - DNA, 232 bp, Glycine max
  Clone ID: 700875189H1
gtctgagaaagcatctgatgcattctataggcttaccaacacaagggagcagatccaatcatatgtttttgatgtcatcagggccagtgtaccaaagttggagttggattctgtctttgagcagaaaaatgatatagcaaaggctgtggaggaggagcttgagaaggccatgtcaacctatggatttgagatagttcagactctcattgttgatatagagcctgatgttaat

SEQ ID NO: 18394 - DNA, 233 bp, Glycine max
  Clone ID: 700875190H1
cagattagtaccacaaaaatggagaaatagaataactgaatatcgtatagctcaaaataaagatttaaccaaatgcaattcatatgaaaaaagccaattaattctttacaaagaacaacaagtaaacgcattaaaaaaaaaaattagaaaacaatatagatacgatcttttatcctataattttatcaattatgcagataagaaagactcatatatttatggatatagatccc

SEQ ID NO: 18395 - DNA, 232 bp, Glycine max
  Clone ID: 700875191H1
ggatattgctgaacttgtcacaatggaggctggcatcaatgtgaagaggctacattcagctgaaggtgcagaaattttaccacgtcctgcagttgtaacagtgatgggtcatgttgatcatggtaaaacttctcttcttgacgccttgcgtcaaacatcagtggcagccaaggaagccggtggcataactcaacatataggtgcttttgtggtggccatgccatcaggagca

SEQ ID NO: 18396 - DNA, 233 bp, Glycine max
  Clone ID: 700875192H1
ctcaaataaacctcaactcattgtgtgaccaaagttattattacattgcataatcaaccatgtcaatgaagttgtacgcttcccttacctttgtggtgtggcttttcatggccacatcgtccctagcccaatacgttctcgacacaaaccgcgaacgcgtcgacagcgatgatgagtactacatccggccagccataacggacaacggagggcgtttcacattgatcaacaga

SEQ ID NO: 18397 - DNA, 237 bp, Glycine max
  unsure at all n locations
  Clone ID: 700875194H1
ctcgagccgaatggccanagactacggagaagttgagttgtttggtgtggggggaagccatttgccagaagggtgcagattgccctggaactgaagggagtccaatacacttactttgaagaagatcttaggaaacaagagtgatcttcttatcaaatacaaccctattcacaagaaggtacctgtgcttgtccacaatggaagaccattggctgagtcccttgtgatccttgaata

SEQ ID NO: 18398 - DNA, 245 bp, Glycine max
  Clone ID: 700875154H1
ctagtgcaaacacagctatctcaggattgattgtagttgataatagagacaaggaaaaagtagtagatttgagttcatctgggtcaaaggaagacaaaagattgaaccatttgcaccaagattttgttcttccctctccaaaagaaatttctgtgtgcatgacaggaaacagtacaagtagttctagaactttgaagttgagccgaagtagaagttgtaaagcaagtatcatgaggaatttatct

SEQ ID NO: 18399 - DNA, 242 bp, Glycine max
  Clone ID: 700875195H1
gggagccagaatgtcagccaccgcagcctccagctacgcggctgccctggccgacgtggctgccgcgaacaacacgctcgacgcgacaaccgcggacatcgagaaaatcgacgagatattctcggaggcgcaggtgtcggactacttcgccaaccccaccttggccgtggagaagaagcggaagctgatagatgagattgcggaatcttcggggttccagccccacacgagaaacttcctct

SEQ ID NO: 18400 - DNA, 219 bp, Glycine max
  Clone ID: 700875114H1
agccgatagtgtaatggactatgcaaggattaaagttaaactatacaggtaaatttccgttttttatggatatggaaactcactttttattgaaaatgatagcttcttcagctgttgttgctgtttttgttgacctttgtatagtaagtttcatgatgattgttcttggtaatagtagggataaaaactgttggctttgttatcattgtctactatttc

SEQ ID NO: 18401 - DNA, 168 bp, Glycine max
  Clone ID: 700875115H1
gaagcctccgaatcggaatgctgagatctgttccagcaccaacggcggcggaatcggagagaaagagcgcggcgacccggttagggtttccggcgatgatgacggagacggtcagacgatgaaggagttcatagatcttgaattgcggagaggtagaccacagggaga

SEQ ID NO: 18402 - DNA, 252 bp, Glycine max
  Clone ID: 700875116H1
gaaactcttaatattgtcaaggatggtcaggagtgctctccgcaattagaaagtttgttttatagattacagagtgaagctaatggacatgaaaatgttgtgaacaatggattttctagtgagtcaaatggccatggtgcaactggcaggtgtcagcgtgtgttccgtgatatcttagcctctgagaagttcagttcattatgtaaagtgctacttgaaaatttccgaggaatgaaacctgaaactgtattt

SEQ ID NO: 18403 - DNA, 182 bp, Glycine max
  Clone ID: 700875117H1
tccggctcgagcactcatcttagacgacattgacctacacctcttccatttctcttactttctcagcctatttcgattacccatttggttatttcgccctaatggctcttgctccatccaaagtttccaccttttctggtttttctcccaaacccagtgttgggggtgctcagaaaaaccca

SEQ ID NO: 18404 - DNA, 250 bp, Glycine max
  Clone ID: 700875118H1
gttacgcatgcgcaaggagttcataatgtagcaggagagaagaaccatgatgcgtacaattcttatgagttttttgatgcacacctaacctctctcggctgggaacaggttaataatctgcgaaacacgtgaaggcaagtggactttccaaaaatattgaacttgttgtcatttcccccttattaaggaccatgcaaacagcagttggagtctttggtggtgaagcatacactgatgggattggtgagcc

SEQ ID NO: 18405 - DNA, 251 bp, Glycine max
  Clone ID: 700875119H1
tgtccatccaaaccttaaaaagattcagtgaagaacaacgttaatggcatctcttggtgtgcaagcagttcatcctcctccattaacatccacctccgacccacctcctctttttgatggcaccaccaggttgtacatcagttattcttgcccctatgcacaacgtgtatggatcgctcggaacttcaagggactaaaagacaagatcaatttggtccctataaaccttcaagacaggccagcttggtata

SEQ ID NO: 18406 - DNA, 248 bp, Glycine max
  Clone ID: 700875120H1
atcaagcaaacgataagaaatgttatcagaaacattggccatccctgcagtactccttgtaatactcattttgattctatcctctgtcttgttccatcttcaagatgaaagaacaaatgcaccaggtcctaaacccctcccaattattggtaaccttcacatgctggggaaactcccacatcgttcccttcaagcccttgccaaaaattatggacccataatgttcataaagttgggacaagtcccaa

SEQ ID NO: 18407 - DNA, 250 bp, Glycine max
  Clone ID: 700875121H1
atggagtacataagaagacaccacaggcacgagcctggtgagaatcagtgtggctctgcgctcgttaagcatataagagcaccggttcctcaggtatggtccttggtgaggaggtttgatcagccacagacgtgcaatccatttataagtagatgtgttgtaaggggaaaccttgagattgggagtctgagagaagttgatgttaaatcagggcttcgtgccgactacaagtacagaaagattggagctc

SEQ ID NO: 18408 - DNA, 247 bp, Glycine max
  Clone ID: 700875122H1
cttctggttggtttgggtgtgggcatagcttctgtcactgctcgcgtttatattgcagaagcatcaccttccgaaataaggggttcattagtcagcacaaatgtcctcatgataaccggtggacagtttctttcctatcttgttaacctcgcttttactggtgttcctggtacttggcgatggatgcttggtgtttctggtgtgcctgctgttgttcagtttgttctcatgctcttcctccctgaat

SEQ ID NO: 18409 - DNA, 246 bp, Glycine max
  Clone ID: 700875124H1
cgttacttgcacttttctctgcccagctatatgcttgtgtaagaactaataagccagctgaagaatgtgggatatgaatgactcccccgatcagagaaaggactacgagtctgaaggctgttcttcttctctgtatgatgataaaggcaagagggtggcatctgtttccaattcaagctcctctgcggtggtcgttgaagatggatcggaagaagaagacagtgaaagaggtggaagcagaacatt

SEQ ID NO: 18410 - DNA, 241 bp, Glycine max
  Clone ID: 700875125H1
aagaacctcaatctgcccagaacaagtactcaggaagccataaagtgaaggacaagaaagggagtggacaaaagggttcatatgctaatcagcctgtgtcatttgtatcaagtggcttaatccattcagaaactgtacaggttacagttgatgctgaagagactaataggaatggtgtcaccagctctgctaatataggttcatttgaagaacacactactggttttggttcaaaaatgat

SEQ ID NO: 18411 - DNA, 228 bp, Glycine max
  Clone ID: 700875126H1
actatggatgtttggtcatggatatgtgagctccccaactcggtggaggggaccgagtcccactcgccacccatgaagttcgaaatcgcgagtgagaagaacgacgacaagctggacaactcaactcgttccattcacctgaaagctgagcgaacctccggctcagactcggaagctgcggtgatcttcaccgtatgcttgcaaggctttcacccacacaacgctcac

SEQ ID NO: 18412 - DNA, 240 bp, Glycine max
  Clone ID: 700875127H1
catcgacagcatgaatttctccgatcgcaaagttgttttggagaccagcagcagatcgtggaatgttcatttaaggaccttctactccatcgctcaatacgttggtgcgacgatcgttttggcgggtctgggagtcagcatgagcgggaatttcaaaaaaggtgcgaccagcggcggcagcttcctcttcgaattgatattcttctccgcgacgatccctactgccatatcgggcgtcta

SEQ ID NO: 18413 - DNA, 244 bp, Glycine max
  Clone ID: 700875129H1
gcccaggtcatcgtcctcaaccaccctggtcaggtcggtgccggttacgcaccagtcctcgattgccacactgcccacattgcttgcaagttctccgagctcctcgagaagatcgaccgccgtaccgtgaaagtctgttgagaactctcccaagttcatcaagtctggtgacgctgccatcgtcaagatggttccctccaagcccatgtgcgttgaggctttcactgactacccccctcttggt

SEQ ID NO: 18414 - DNA, 77 bp, Glycine max
  Clone ID: 700875132H1
ctactctactgcttcaccttgtgcactagataattcagtggtgatacatggcttcggctactctctctgtagccaaa

SEQ ID NO: 18415 - DNA, 149 bp, Glycine max
  Clone ID: 700875133H1
atgatatccaattttggaataaaaataaatctatggaaggactctctgcaaagaccgttgttgtgagctttgcttgtcagcttattatcttcctttatctgcttgacaatgacacctcttggatgattcttgcaagctcggaaagtggg

SEQ ID NO: 18416 - DNA, 250 bp, Glycine max
  Clone ID: 700875134H1
tgtcaggggatacacagcacctgagtatgcactccatggtcaattatcaaaaaaggctgatacatacagctatggaattgtagtgctagaaatcataagtggtcaaaagagtactgatgtgagagttgatgatgatggtgaggaagagtcccttcttcgacaagcatggaagttgtatgagagaggcatgcacttggagttggtggacgaaaccttgaatgataactatgatgcagaagaagtgaagaaa

SEQ ID NO: 18417 - DNA, 147 bp, Glycine max
  Clone ID: 700875135H1
tggccttctgtcctcaaaatatcccttccctgctttctctgtgtcccatatgtggttacttccatgattgcagacacaaccattctgtggaagccatgagcaaaacttgcatgttgtctccctttggatggaccaaggaccaaggac

SEQ ID NO: 18418 - DNA, 178 bp, Glycine max
  Clone ID: 700875136H1
gtaaatctggagtttttgatgctgaaagatttattgatgtcatgcaagcctttgaaaatgttattactgctgacaaaagtggtggtggagagcgtatgaatggcaatatggcagagcttgggattcttactactagtcagtcagaatatttgttgtcaggataccaatctgttatgac

SEQ ID NO: 18419 - DNA, 242 bp, Glycine max
  Clone ID: 700875140H1
ccagaccttctaattctctactctctcacttctttctatcacattttacttgcaagatggcagcgtcatcagcatgccttgtagggaatggtttatctacacggggtaatagaataactctcaagaaggacttcaatggaagatatctctactcaccttggagactgtcatcattgagcaataaggcatcagaagcattttccataaagtcttccttggagcaaaggcaacaacaagaaggg

SEQ ID NO: 18420 - DNA, 238 bp, Glycine max
  Clone ID: 700875143H1
gcagcttttcagatagtaaacgatgagttgatgttggatggtgcaccaaggctcaacttggcttcgtttgtgaccacttggagtggagcctgagtgtgacaagctcataatggcttcacttaacaaaaactatgttgatatggatgagtatcctgtcaccactgagctccagaaccgttgtgttaatataatagcaaatctattccatgctcctataagtgaagaggagactgcagta

SEQ ID NO: 18421 - DNA, 239 bp, Glycine max
  Clone ID: 700875144H1
acgagagctgcatgcagttcttgaaggacatggaagtcatccaggtccctacctttctcttcatcagagatggcaacattgaaggcaggtacgtcggttctggcaaaggggagctcattggggaaattctcaggtaccaaggtgttcgtgtcacttattaattttcttactacacatacttatttctacttctattaagttcagctcaacaaacacatgtttactaaactttctgagaa

SEQ ID NO: 18422 - DNA, 241 bp, Glycine max
  Clone ID: 700875145H1
tccgtccatgccatgcagccaaatatgggccaaggagggtgcatggctattgaggacagttatcaacttgcatgggagttggagaatgcatgggaacaaagtattaaatcagggagtccaattgacattgattcttccctaaggagctacgagagagaaagaagactacgagttgccattattcatggaatggctagaatggcggctctcatggcttcgacttacaaggcatatctgggtg

SEQ ID NO: 18423 - DNA, 143 bp, Glycine max
  Clone ID: 700875147H1
gcgagaggtacttgctcacagatatatttttttttttgtctccatcattttctcgagagctttcagtttctgtggttcatctttcttcttcttaatctttccccccctctctgtaacatcccgcttctctgaatccctttctg

SEQ ID NO: 18424 - DNA, 166 bp, Glycine max
  Clone ID: 700875148H1
tgcggtctcgggtcgagctcaaaaaaaggttctagatggatatgactgatattgcgtagaataatcaagaagaatattaaattcaaatagattttaggtagaaaaaagacttaaagaggaggatttgaaatgcgagatctaaaagcatatctgtccgtggcaccag

SEQ ID NO: 18425 - DNA, 239 bp, Glycine max
  Clone ID: 700875113H1
agaagatgctgctgctcatgatcatgttcacaccaccagtgccactgcttctcccaaattctcacatgcttcttctgctgctagggttattaacttcaagaagaaaaagcaggactgggagattgatccttctaaactcatcatcaaaactgttatagctcgtggcacttttggcactgtccatcggggtgtctatgatacccaagatgttgctgtgaaattgttggactggggggaag

SEQ ID NO: 18426 - DNA, 248 bp, Glycine max
  Clone ID: 700875150H1
ttgataagatccttccatctagcagcaccttaggatggcatagccttaaagttaagggcgaggttcaaacgaagaaaggcttatggtggatacctaggcacccagagacgaggaagggcgtagtaagcgacgaaatgcttcggggagttgaaaataagcgtagatccggggattcccgatataggtcaacctttcgaactgctgctgaatccacgggcaggcaagagacaacctggtgaactgaaaca

SEQ ID NO: 18427 - DNA, 242 bp, Glycine max
  Clone ID: 700875152H1
gacgaaggttgaatgtgaaaaagcaaagaagcgttacgcactgaacagtgtaaaataaattaagaggaaccctcgatttgtgcttttcaattttctgccccttctcttgcgttcggttgatttgattaatactatcaactaagcccttttctgtttgcaatctggagctatgagttcgtcttcggcagatgtttttccagcaattcaggaagttatgctggagttccgtgctggcaaaatgt

SEQ ID NO: 18428 - DNA, 245 bp, Glycine max
  Clone ID: 700875153H1
aggaactatacctgaatctgaaatcatcagacacatgggttgctgaatacaggaagtggatggacaaagcggggcatggaatgccatatcattttggtcacagcactatctctttgcctaaagagcctgctgtggttgaacatgctcctgcgggactcgtcgcgggacaatcagcttcttcacctaccaaggggggcattggtacaatgcatgccccaaatttcgccaacagatattttaggcat

SEQ ID NO: 18429 - DNA, 164 bp, Glycine max
  Clone ID: 700875071H1
agcaccaaggacttcggtcacagtggtccgttctcttttgatgactctgatccattcggctcctctggcccttttaaggtctcttcagaaaatcattctccgaagaaaggttcagataactggagtgcattctagcctgcaatccaactcttcccgattttctt

SEQ ID NO: 18430 - DNA, 164 bp, Glycine max
  Clone ID: 700875072H1
agaggagcaaaggcataacaagagagagatggattctctgaagatgttgagaactgatggtaaagtagaacaccacctcgaagatcatcgtaaccccaaacccaaacctaaattctcaaaacccttcatcgccgcaatttccgtcttcgcaatcctcttcctta

SEQ ID NO: 18431 - DNA, 163 bp, Glycine max
  Clone ID: 700875073H1
gtaagctcccaagcagtgggaggaggctcgggactctgaccgcgtgcctgttgaagaatgagccggcgactcataggcagtggcttggttaagggaaaccaccggagccgtagcgaaagcgagtcttcacagggcaattgtcactgcttatggacccgaacct

SEQ ID NO: 18432 - DNA, 164 bp, Glycine max
  Clone ID: 700875074H1
ctttcccacactttttccacccacaaacacgtaactactattccaaactccgccatggccactgccaccgccgccgccgccacgtcatactttttcggcacccgtctaaacaacgttaacacgacaaccttaaacaacggaagattccacgcgctcttgaactt

SEQ ID NO: 18433 - DNA, 163 bp, Glycine max
  Clone ID: 700875076H1
gtgaatgcgtataaaaggaaaataaagaaattagcgtcaaaatgttgggtgtgttcagcagctccatagtgtcgccgccggacgagctcgtggccgccggcagccgtactccgtcgccgaagatgacggcggcggcgctgcggaagcggttcgaggagaagaa

SEQ ID NO: 18434 - DNA, 165 bp, Glycine max
  Clone ID: 700875077H1
acctaatctcccttgcaccttgcttctgccaatggccatcttcaggtcgtgtttgagctcttgaaagtggaccataatttgttaggagggaaggcttgctcttcattgtgccgcagtcgaaggaagaattcatgttatctcactgttgaaaccaaaacgtctaga

SEQ ID NO: 18435 - DNA, 166 bp, Glycine max
  Clone ID: 700875078H1
gtggatggcatattgcattccaaactcaccatcactccagggttggaagacaggtccatgttgtttattcggctggaacataggcaagaatagagttaatggcaaacctcagattaagtaccatgatattgatcttacattcccaacttctctggtcgacaaaaca

SEQ ID NO: 18436 - DNA, 165 bp, Glycine max
  Clone ID: 700875079H1
aaagaagctgagcatgaagaggagcctgaggaagtatctggggatgaatctggagaagaatcagaagaggaaacttctaagaaaaaaggaacacaaggagttattgagattgaaaatcctaacttggtaaagccaaagagcttgaaagctagagatgttgatgtt

SEQ ID NO: 18437 - DNA, 163 bp, Glycine max
  Clone ID: 700875080H1
ctctcctctccgaaacttctagaaacaactacaacctaccgctcatttttccggttccgaccctctttctgccctctcagtaaccttatcagatccgatcaaggtaaccaaataatatcacaagttattcttcttcacttatttatatttattttccttttgg

SEQ ID NO: 18438 - DNA, 159 bp, Glycine max
  Clone ID: 700875081H1
ataaaaataatatatataaggtacaaatagtaaatcgaggtacccattttatgataaactttccttccatttttgttcctctagtaggcctagtatttccggcaattgcaatggcttctttatttctttatgttcaaaaaaacaagattttttagatac

SEQ ID NO: 18439 - DNA, 157 bp, Glycine max
  Clone ID: 700875082H1
ggcttatggtggatacctaggcacccagagacgaggaagggcgtagtaagcgacgaaatgcttcggggagttgaaaataagcgtagatccggggattcccgatataggtcaacctttcgaactgctgctgaatccacgggcaggcaagagacaacct

SEQ ID NO: 18440 - DNA, 159 bp, Glycine max
  Clone ID: 700875083H1
gccaatcctatccaccctcaacctttcccacccctctcccattgacctctcatgtcaattctcagccaggaggaggatcttctagcaacatagatatttcaataataagacaagtaggaccttcaactgctcctactaaccatttgggatcacccatta

SEQ ID NO: 18441 - DNA, 156 bp, Glycine max
  Clone ID: 700875084H1
ggccacgatcctgctcctgttcacggtcttcgcggtttcatcggccctagacatgtcgataatctcgtacgacaacgcccacgccgccacgtcgcgcagccagtgagctgatgtccatgtacgagcagtggctagtaaagcacggcaaggtgtaca

SEQ ID NO: 18442 - DNA, 158 bp, Glycine max
  unsure at all n locations
  Clone ID: 700875085H1
ctctcaaacccatcgccaccgttgcgtacacccttttttcttcacatcatttcccgtanctcttgtttttccccctctttctttgttctccttcggttgaatcaatgggtgcagaggttaagatctggaaccccgttgaagtcgcagagcaagctcgc

SEQ ID NO: 18443 - DNA, 160 bp, Glycine max
  Clone ID: 700875086H1
aaaaaaaacaactttgctgacatatatttgtttggtcagaagagtcctccgaatattctggtcttatattggtaattgttttcaatattttaaaaataaaaatagcgaagagaggataggctcattacataaaaaattggtaaatttcccataagtaatt

SEQ ID NO: 18444 - DNA, 160 bp, Glycine max
  Clone ID: 700875087H1
taaaattaactggagtaagttttattattgattttagtcaagactgttaatgaccattctatatatgttgtgactttttaattcttaaaaacatttttggaacttccttttgtcatattctcaatttgtattgggtaccgatactacacctgcatccatg

SEQ ID NO: 18445 - DNA, 162 bp, Glycine max
  Clone ID: 700875089H1
cgcagatgcaaacatcgaaggagaacgcgatgttttgttcctctttggttcttcgtccccttcccaatcttcaactttagggttcctttaatctcgttattcatcttcactcccaaactccgttcactccaacaacactctgatttagaaatggatggaccg

SEQ ID NO: 18446 - DNA, 160 bp, Glycine max
  Clone ID: 700875090H1
agaaaattaaagtgtttgaatgtgattcaataataaatgaggatcgtgatatccactatccagttgtggagatggctagcaggtcaaagttaagcagtatatgttggaatacatacatcaaaagtcaaattgcttcaagcaactttgaaggtgttgtaca

SEQ ID NO: 18447 - DNA, 161 bp, Glycine max
  Clone ID: 700875091H1
ctaaactttggaacccagatgatgtcttcggattctgttcttcctctccccgaaaatcccatcattgtggggtttggtggggttggagtggattttctggcagtagtgccatcttttcctaaacctgattccaagattcgaaccactgaattcacgttcca

SEQ ID NO: 18448 - DNA, 158 bp, Glycine max
  Clone ID: 700875092H1
catgaatgggaatatggctgaacttgggattccttctactagtcagtccagatatttggttgcaggaatccaatccggcaattcctctataacagaagccattgcaaccaagggcagctttagcgtttttgttgtctgacagggggaattttttccga

SEQ ID NO: 18449 - DNA, 96 bp, Glycine max
  Clone ID: 700875093H1
gctttctctcactagggctaatttcctgtgaccaaattccttctttttaacttcactctctctaattttcttgcattttcttccactctcgtagca

SEQ ID NO: 18450 - DNA, 163 bp, Glycine max
  Clone ID: 700875094H1
ctacgagattacccgatgggctcctctccctccggcgactacagacttcacggcgggtgcggcgcttggggtgttttcttcacgggattgtttgcgaagaaagtgtacgtggaggagatttacggtgttggaaggccgttcggggctttgatgggtggcggag

SEQ ID NO: 18451 - DNA, 162 bp, Glycine max
  Clone ID: 700875095H1
atcactttttcctactttcttctccatccatcccttgactaattaattatccctcacaactaccaatgaccgaagagaaacaccacaagcaccgcctcttccaccaccacaaggacgacgataataagccagtagaaaccgatactggttacgacaacacat

SEQ ID NO: 18452 - DNA, 161 bp, Glycine max
  Clone ID: 700875096H1
tgcaattgaagttgaagtcttgcccttctctcttcaactccaaacacgagacatcatcatccatggctgcctccgtctccactgtcggagctgtcaacagagctcttgtgaacctgaatgggtctggacctggggtttcagctcccagttcatccttcttt

SEQ ID NO: 18453 - DNA, 259 bp, Glycine max
  Clone ID: 700875101H1
ctcagtgaaagagaatccgaggcgaagagaagagaaaaattaagatggaggggaaggagcaggatgtgtcgctgggagcgaacaagttcccggagagacagccgattgggacggcggcgcagagccaagacgacggcaaggactaccaggacccgcgccggcgcaactggttgacccgacggagtttacgtcatggtccttttacagagcagggatagcagagtttgtgggcacttttctgtttctatacatcactgtc

SEQ ID NO: 18454 - DNA, 163 bp, Glycine max
  Clone ID: 700875070H1
caccaaccaaagtttcagtttctctctattctaacgttgttgaatggcagtagatctggcaaatattaggatggaagagaatatggcgattcaagaagcagcttccgctgggttgaagagtatggagcatctgattcgcgtcctttcttctcaaatcccttct

SEQ ID NO: 18455 - DNA, 251 bp, Glycine max
  Clone ID: 700875103H1
gcaatatttgcccttagcagtaacaaaattgccgtggtcaagtattctctgttgggttctattctttcaaaccttcttctggttcttgggacctctctattatgtggtggcattgcaaacgttggagtggaacaaaaatatgatagaagacaagcagatgtgaactcacttatgctgttgttgggattgttgtgctacttgcttccaatgctgtccaattccagtggtgcctcagctgctctcactgtaga

SEQ ID NO: 18456 - DNA, 252 bp, Glycine max
  Clone ID: 700875105H1
gtttctaaacttcgccaatccctcaaactcgagaaagttttctgctttgcttcagacccatttgcagaagcgaaatcaaaacacataaaagattcaaacttgtgcagaaaaaaaatgctcactgctgctgcttcagcttctcggcaccttcttcaacgcgatgccagcatcggtgcttgcagtggcagtggcaatcgagttcgctctcttttgactgcttctgccatcaccacaacctacccaattcgcatt

SEQ ID NO: 18457 - DNA, 248 bp, Glycine max
  Clone ID: 700875107H1
attctcctcaagcaaaacctagagctcccacactcctccactacttagaatattaaaagccccttccttcatcaaggtactactgtttcatcttccctcaaagattggaacaacaacaggaacatgggtactctaacaactgttcctgtgctcccttctaagcttaacaagccttcgctttctccgcgtcacaattctctttttccctactacggaagacgcgtcgggaagaagaacaaagcaatggt

SEQ ID NO: 18458 - DNA, 150 bp, Glycine max
  Clone ID: 700875108H1
ccatctatgcattctgcatgttggttctctgtagacagatactgcaaaagacgaataatgttgagtatgtggtcgggttgaatccctgggatgaagcgttgcagacatcacggctatgctaagagtgtcacgctctctcattcatgaccc

SEQ ID NO: 18459 - DNA, 246 bp, Glycine max
  Clone ID: 700875109H1
gaaacaccaaaatacacaaaggattagtaacgtatatttttaaaaatatccaaaagaacatttatatttatgtataatagaaaaagaatactaattggggctttccgttggtagaaaaaataaggcagtactccccagaattccgatccagagtatacttccatccaccgattaaataaataactatcagaaacgaaataatcctttaatttttggaagtccccttttattttacttacacaaaaa

SEQ ID NO: 18460 - DNA, 242 bp, Glycine max
  Clone ID: 700875110H1
ttcaagttcaagctggtgaaatcttggattagtgctcccactctcctatctggtataggacttcgtgggtagacttttctatttctctcctttctttcactctcttcttctcactgatccgcattgccgttcaaagtggtcttatttgaaaaacacttgggcgttggtgcaaatgtttgcttcgttaattttctctggggacaacaggctcactgagaaaacaatttttacttgcagagatt

SEQ ID NO: 18461 - DNA, 238 bp, Glycine max
  Clone ID: 700875111H1
cggtgatccgtatccttttgatggtccaggtgggatattgggccatgcattcgctcccactgatgggaggtgccactttgacgccgacgaatattgggtggcgtctggcgatgtcaccaaatcgccggtgacaagtgcgtttgaccttgaatctgtggcagtgcacgagatcgggcacttgctcggattaggccactcgtcggacctaagagccatcatgtatccttctataccacct

SEQ ID NO: 18462 - DNA, 235 bp, Glycine max
  unsure at all n locations
  Clone ID: 700875112H1
ctanatgggtcctcagttggcagatgcaaaggatgtaatgcaagcagttcataacctgggaggcattagattgccagttctgactcctaatttaaagggttttgaagctgctatagcggctggtgcgagagaagtagctgtttttgcatcagcttctgaatctttctcaaaatcaaacattaattgtagtattgaagagagccttgtccgctatcgagctgttactcatgcggct

SEQ ID NO: 18463 - DNA, 168 bp, Glycine max
  Clone ID: 700875023H1
ggccagtcctcagacagttgctgattacaccctcaagctccttcacaggagaattccccctgctgtccctggaattatgtttttgtctggtggacagtctgaggttgaagctaccctcaatttgaatgccatgaaccaatctccaaacccgtggcacgtgtcattctc

SEQ ID NO: 18464 - DNA, 169 bp, Glycine max
  Clone ID: 700875024H1
ctccccaatatcgaagcagcactatttttgaagatgctacccctgagatggtgagggacttgttttgggatgatgagttccgaccgagatgggatgacatgcttgcatcctcctcaatcattgaagagtgtcccactactggtaccatgaaagtgcagtggatacggaa

SEQ ID NO: 18465 - DNA, 168 bp, Glycine max
  Clone ID: 700875025H1
ccaaggacggaggcaaagatggagacggcgaggatcccgagcaggccaagctacgggccgggctcaactccgcgatcgttagggaaaagcccaacgtgaagtggaacgacgtcgcggggcttgagagcgccaagcaggctttgcaggaagcggttatcttgcccgtga

SEQ ID NO: 18466 - DNA, 169 bp, Glycine max
  Clone ID: 700875027H1
aacctctcttgagagaggtttcaagaagtcaatgatcttatttttgaagccattggctgtggtgaattggaggatgtcaacgttgaaagtgtcaaagaagttgatgcagtcagcacaagcgaacaccctactgtggtggtagctggttcacaagaatgtgtgattctac

SEQ ID NO: 18467 - DNA, 168 bp, Glycine max
  Clone ID: 700875028H1
ctcctacccaattcctctgtccattcttcattttctcactaaaataaacgatagatagacatttgtttctgctttctctgataacccttttgtttctctccttgaattttgcatcaagaaactcagttctcacttctcagcatggtttcacttggagctatatatagt

SEQ ID NO: 18468 - DNA, 170 bp, Glycine max
  Clone ID: 700875029H1
ctttcaatttcatgctcctctaaaacccacattctctgtcttacctcccctcccaaacccctctttctctgccgccactctctgctccgttaccgttccactccgcgactcacatgtaaggcagcccaagtttcggtcgccgaagagtcgtcggcgtccggcgacaactg

SEQ ID NO: 18469 - DNA, 170 bp, Glycine max
  Clone ID: 700875030H1
gcccaggtcatcgtcctcaaccaccctggtcaggtcggtgccggttacgcaccagtcctcgattgccacactgcccacattgcttgcaagttctccgagctcctcgagaagatcgaccgccgtaccggaaagtctgttgagctctctcccaagttcatcaagtctggtga

SEQ ID NO: 18470 - DNA, 172 bp, Glycine max
  Clone ID: 700875031H1
cgatcacatgatctcttcagaaatggtcactcttgtggtcttcaaaatcgcatacttcactctgctcctcatattctccctcctctccacctcggcagtggtctacaccatcgcctccatctacaccgcaaaagacgtgacattcaagagggtcatgagtgttgtccctaag

SEQ ID NO: 18471 - DNA, 171 bp, Glycine max
  Clone ID: 700875032H1
actttcttgaaagttaacatacctggatggaggtttgtacctactactacacatagaaggatgaaggaaatcaacaaagatatagaagcttcgcttatggatatgattaacaagagagagacagctctaaaggcgggtgaagccactaaaaataacttgttagatatactt

SEQ ID NO: 18472 - DNA, 162 bp, Glycine max
  Clone ID: 700875033H1
gggtatttgggtatggttctttgatctcgaaagctgggtttcactatgacgaacgtattgttggtttcatcaaaggctatcgacgagtcttctaccaaggctctactgaccacagaggaacccctgagttccctggaagaacagtgaccctggagcctgctg

SEQ ID NO: 18473 - DNA, 162 bp, Glycine max
  Clone ID: 700875034H1
gttttccctggactgcaaggtggccctcacaaccacactattactggtttagctgttgcgttgaagcaggccactactcccgaatatagagcatatcaagagcaagttctcagcaacagctttaaatttgcacaggctctgagtgagagaagctatgagctt

SEQ ID NO: 18474 - DNA, 165 bp, Glycine max
  unsure at all n locations
  Clone ID: 700875035H1
gttgaaagtcatgtcaacattttcgatcgttttgatcaattttgattgagtcatacaatgatgagtaagaattcgaagcggagatgttaaattttcaagttgagctgacatgtgacagtttggcantgatatatgtttctagaatttatgcccaaatattgccct

SEQ ID NO: 18475 - DNA, 164 bp, Glycine max
  Clone ID: 700875037H1
ccctgctgtctttcttgatagcaggtgcattgatagtggggaacatgatgaggctggcatatgtgttttggcaatctcagaaattggcatttgttatttatggtttggtaatagtatcgaagaactgcgtaatgcaaaacccacaaaaatatccttatctttag

SEQ ID NO: 18476 - DNA, 169 bp, Glycine max
  Clone ID: 700875040H1
ctggaatcacatggacttgtctttctcttgctgggtcctccattaaaattttcttctctcccttctctctctcaccattctcttcttcttcttcttcttagattccttctctctctctctctctcccctccgccatggctgaggataaggagatgctaacctctgtcat

SEQ ID NO: 18477 - DNA, 168 bp, Glycine max
  Clone ID: 700875041H1
gcctctgaaggccaggtggttgaggcatttaaaatattgactgctgatgacaaagtgaaggcaattttggttaacatttttgggggtataatgaagtgtgatgttatagcaagtggaatagtgaatgctgcaaaagaggttgcactgaaagtacccgtagtagttcgt

SEQ ID NO: 18478 - DNA, 166 bp, Glycine max
  Clone ID: 700875042H1
gaagaagaagaagaagaagaagaagaaaagggttttgtgtgtgtcgaagtggataattccttccttcaattaatctccgatccgaaaccgtatggggattctatacgcactggtaggtcgcggatcggtggtgctggcggagttcagcggcaccaccaccaacgcc

SEQ ID NO: 18479 - DNA, 167 bp, Glycine max
  Clone ID: 700875043H1
gggatgggaacaaacatgtacccatcttcttcattgcttggtcaaagcaaggatgctgctgtttcagcagttccagttgatgaattgattgagaaggctgatggatttgctggagtatttcctgaacacaaatatgaaattgtgaagaggctgcaagagaggaagca

SEQ ID NO: 18480 - DNA, 165 bp, Glycine max
  Clone ID: 700875045H1
ctacaagttcagaaatggagaccatgttatccaaattgctaccatccaacaatggatggtgcaattcagaagctttgcaagaatttggaggcaagcctgtgaagcaggaaataggggaatctattccacaagagctaccacacaagaatggttagtcttatggtg

SEQ ID NO: 18481 - DNA, 179 bp, Glycine max
  Clone ID: 700875046H1
ggctcgagctgtccggttcgacaggcaagttactgtggatagacctgatgttgccggcagagttaaaattcttcaggtgcattctagaggagaagcactttcaaaggatgttgactttgaaaaaattcctaggagaacccctggattcactggggctgatctgcagaatctgatgaatg

SEQ ID NO: 18482 - DNA, 169 bp, Glycine max
  Clone ID: 700875047H1
gtcaagttcttgctatcaacgagatttttgagaagaacccaaccaagattaagaactacgggatatggttgcggtatcagagtaggactggttaccacaacatgtacaaggagtaccgcgataccactctaaacggttcagttgaggcaatgtacaatgagatggcttc

SEQ ID NO: 18483 - DNA, 169 bp, Glycine max
  Clone ID: 700875048H1
aagctacttcaccactccaaacccaccacaccaccattattcatatctcattctctaacctttcactctgccttactcactctctactttgctcatcatcgtagatgaaccaacacttctagtctctcttactttataaccatgtaaaaatgagtcacctaatgaaaaa

SEQ ID NO: 18484 - DNA, 146 bp, Glycine max
  Clone ID: 700875050H1
cggctcgagctccttttatcattctgttttaatgtgttgtgtttgtgagaacccctgattacatttttgttaagcgcagcgtgttttagggctttgccgttgcgttgttggtttgctttttaaatgtcaactttatatttgtgttc

SEQ ID NO: 18485 - DNA, 159 bp, Glycine max
  Clone ID: 700875051H1
acaataaaaaagaaaaggagaagctttttcctctcattattcagaaggaacgtgtgttcgtttgttcggtggtgaattcctatccacacgtctcatcggaaacatgtcagcggtggttgctggttcctcctcttcattctctgccaccttcacccccat

SEQ ID NO: 18486 - DNA, 161 bp, Glycine max
  unsure at all n locations
  Clone ID: 700875052H1
atgggacagcttcttctgggctctgtctcctgtcgngtcccgtagcgcgcgcaccctaatggtcttcatcgccggcctcgtcgtctacatcctccgtgtcgcccaatggcacgtcggccgccgccaaacgctgacgccatttgagacggtcaagatatact

SEQ ID NO: 18487 - DNA, 165 bp, Glycine max
  Clone ID: 700875055H1
gaaattgcggttgaagactgtttttttaaaacgttggcattaattatcaatagtgagaaattttagtgggaaaaaaatgaaaattttagaggtgctacttgtggtcgtggtcatggttttgctgcaatccttgatattgtaggaaattgccaaatgccaaccaat

SEQ ID NO: 18488 - DNA, 165 bp, Glycine max
  Clone ID: 700875056H1
caatggtgctttgaattacttttttttttaattgttattgacgtcagtctttcgttgattttctggcggtgaattgttgtcgatcaagaggtttcggttaacagtgctcgtgattttggtactattgcaattaggagtgattgcgaaggtgcactgcatgttcga

SEQ ID NO: 18489 - DNA, 165 bp, Glycine max
  Clone ID: 700875057H1
gataaatttactgaaagaccctttggagtatgtgcatgatattgttgctcctggaaagatgctatctggaagaggcactgcactagttcatctgaatgacatgatcttccgtgttatgaaagatggaacttctgtgacgaatgtcaaggtaaacatgcatgcacc

SEQ ID NO: 18490 - DNA, 164 bp, Glycine max
  Clone ID: 700875058H1
gtcaggtggtcggagggcgttcttcatgtaactctggcaaaggcaagagcagtcagtcctcagtcaagtatggctatagcctagttaaagggaaagcaaaccatccgatggaggactaccacgtagcaaaatttgtgcagttcaaagggcgagagcttgggctt

SEQ ID NO: 18491 - DNA, 168 bp, Glycine max
  Clone ID: 700875022H1
atctcagaatcgggacgccgtcttcctcactacatcgtcccatattagcacactagattttgccaaaaagatcaaattttgaagcaattgtttttgtgggcaacattcattctttcctatccctcgaaaaatcaattttcggcttcgggcatcggaaatggagaaggt

SEQ ID NO: 18492 - DNA, 165 bp, Glycine max
  Clone ID: 700875059H1
caacaactcactcactaagctaaacaatttcatcaagcctgccatggcttcctcgtgtgcttcctctgccattgcagctgttgccatctccacaccaagttcccagaagaatggatcactcttgggaagcacaaaagcttcttttcttagtgggaggaaactgaa

SEQ ID NO: 18493 - DNA, 164 bp, Glycine max
  Clone ID: 700875060H1
gctgcacctcgctgcctaacgtgaaattagtctcattttccatctgggtcttgtgaattgcgattggaaccgcgttttctcgcttctgggcttggcttagaagtagtcagaatgatgtctgtcacaggcaaaggcattgattttgctggcaaaaacttggtctc

SEQ ID NO: 18494 - DNA, 165 bp, Glycine max
  Clone ID: 700875061H1
gtttctgagtaatggcttcgtcgcgagtagatctggatgggaaccccataaagcccatcaccatttgcatgattggcgccggtggcttcattgggtcccacctctgcgagaagctcatgtcggagacccctcacagtgtcctcgccttggatgtctacaatgaca

SEQ ID NO: 18495 - DNA, 165 bp, Glycine max
  Clone ID: 700875063H1
ggccggtcggctctccgaaccctacaagggcattggagattgctttggcagaacaacgaaagacgaggggcttgtttcattgtggagagggaacactgctaacgttatccgttacttcccaacacaggccctgaactttgcatttaagactaatttaagaaagct

SEQ ID NO: 18496 - DNA, 167 bp, Glycine max
  Clone ID: 700875064H1
aaacatttgaacatggctgccacattcttctctcacttgtcgcttcttcaatccaacaacaacccttctctctctcacacaccctctcgcttccctcattctctcaccaaccgtgtcaaaccctccctcggtgtggtatctgtggccaaaagggtaagtggagtggt

SEQ ID NO: 18497 - DNA, 110 bp, Glycine max
  Clone ID: 700875065H1
ctcggcttgcggtacgagctcacgccataccttaacagtcaccaactgggttgtctcactctctctccctgcgcacacaaatggtgttagcgttcttggccaatctctcc

SEQ ID NO: 18498 - DNA, 159 bp, Glycine max
  Clone ID: 700875066H1
aaagaagctgagcatgaagaggagcctgaggaagtatctggggatgaatctggagaagaatcagaagaggaaacttctaagaaaaaaggaacacaaggagttattgagattgaaaatcctaacttggtaaagccaaagagcttgaaagctagagatgtt

SEQ ID NO: 18499 - DNA, 161 bp, Glycine max
  Clone ID: 700875067H1
acgagaccgacctgatctttcagctcctgaaagcttgcaactgtatcttgatacaagatttgagcagctgaaaattgctactgaacttggactctggcaggaagccttcagatcagtggaggatatacatggactgatgtgcttagtcaagaaaacaccct

SEQ ID NO: 18500 - DNA, 255 bp, Glycine max
  Clone ID: 700874980H1
tttttcttctattgtcaaatctacagtgtttttcttttctctctcacacgaaaccctctccctccctttccctcagatttctcacttccttttctcctttccatttctcaccttctccccctctcttcatctcttctctaccccttttttggttttccttactcttacgaatcaaaacccgcaactttggacgtcgttggagggctttcgtcgctacccaccataactgacgaggggtgactctggtagcaggtg

SEQ ID NO: 18501 - DNA, 251 bp, Glycine max
  Clone ID: 700874982H1
atgcagggcaagaccgacgccgacgccatcatcgtcatggacgccttcgccctccccgtcgaaggcactgagactcgcgtcaatgcccaggccgatgcgtacgagtacatggtcgattattcacagacaacaaacaggcagggcggttggagaatgtagtgggatggtatcactctcaccctggttatggttgctggctgtcggggatcgatgtttcgacgcagatgctgaatcagcagtttcaggagccg

SEQ ID NO: 18502 - DNA, 246 bp, Glycine max
  Clone ID: 700874983H1
agcaattccactgattaactgaatagccccctctcgctgatgcatctacagcagaagttttattggctgagcaagcaacttctgctgtaaatgcatcatctgtcacaagccattcagttaatcataatgatatgatccagagcaattccactgattctgttttgtctgaagtgttcacctcttctgggcagacagcttcgacgaatgccagacatcagagactgctctccttgatgagaaatcatt

SEQ ID NO: 18503 - DNA, 247 bp, Glycine max
  Clone ID: 700874984H1
ctccctggaagccaagggagacttgtcacgctttctggacaatcacgaccacgcacgtgcggctgcacatgtggatctgactgttcaggatagtgaagaactcatggaggaaacaggaacacaagcaagtctaaagataataaagatgaggagggagaggcacgtgtgaatcaggttcatgatagggaagaaactgagacagaaccagaagggaataaagaaaaggagggaaacatccggataatga

SEQ ID NO: 18504 - DNA, 252 bp, Glycine max
  Clone ID: 700874985H1
tctcaatcgttttctacataatacaaacctttctaatttttgaagcttattatacccaatctcgatatgcagatcttcgtgaaaaccctaactggcaagacgatcaccttggaggtggagtcctctgacaccatcgacaacgtgaaggccaaaatccaagacaaggagggcattcctccggatcaacagcgtttaatcttcgccggaaaacagctcgaagacggcagaaccctcgccgactacaacatccaa

SEQ ID NO: 18505 - DNA, 251 bp, Glycine max
  Clone ID: 700874986H1
ccaacactttcatattcaaaccccccatctctcatcacccaaagcagcttctttattcccaccgctcttctctacgctttctcaccaaatttaaaaccccctccggagcgaattctcggcggctggttcgaaagccacggcggctcccggggccaagaagacagaaaagccgcacgagagagtccagcgagtccacagcgtggaggagttcgagtcggcgctcgaatccgccaaagacaggcttgtggtgg

SEQ ID NO: 18506 - DNA, 155 bp, Glycine max
  Clone ID: 700874987H1
caccttcacaattagaaaaaaaaaaaaacaaaaaatgggcgtttctcgttctcaaaagcctcatgttgtttgtgtgccattcccagcacaaggccacgtgaacccttttatgcaactaagcaaactcctcctttgcaccggtttccacataacct

SEQ ID NO: 18507 - DNA, 250 bp, Glycine max
  Clone ID: 700874989H1
ctcgagctgctcgagccgattcggctcgagcgaaagctaacgcatcaacttacacacaccatccacttcatctacttcatcatcaacaacaatgcaatcaatcatgaacatgctcggattctctcacaagccaccttcgagaagcctgtaaccaccactgaagtttacaccactgatcgagatacaacttacgtcgagtcttctctcgatgctgatcgaagagatgtcacatactctgagactgtcattg

SEQ ID NO: 18508 - DNA, 249 bp, Glycine max
  Clone ID: 700874990H1
tgtccatccaaaccttaaaaagattcagtgaagaacaacgttaatggcatctcttggtgtgcaagcagttcatcctcctccattaacatccacctccgacccacctcctctttttgatggcaccacaggttgtacatcagttattcttgcccctatgcacaacgtgtatggatcgctcggaacttcaagggactaaaagacaagatcaatttggtccctataaaccttcaagacaggccagcttggtat

SEQ ID NO: 18509 - DNA, 251 bp, Glycine max
  Clone ID: 700874992H1
gaagatagccgtgttgccattttctctgatacccgggctgagtggctcattgcccttcagggctgcttcaggcagaatgtaacagtcgttactatttatgcttctctaggtgaggatgccctgatccactcactaaatgagactgaagtatctactctgatctgtgactccaagcagttgaagaagttggatgcaataagatcaagactaatatctttacaaaatattatttactttgaagatgataacga

SEQ ID NO: 18510 - DNA, 252 bp, Glycine max
  Clone ID: 700874993H1
agcaccaaggacttcggtcacagtggtccgttctcttttgatgactctgatccattcggctcctctggcccttttaaggtctcttcagaaaatcattctccgaagaaaggttcagataactggagtgcttctagcctgcaatccaactcttcccgattttctctgttgtatctatttccttgattgttcatgacagcctattttgttgtgtatagctagaagataagctggacggtaatatatggtgtggcc

SEQ ID NO: 18511 - DNA, 255 bp, Glycine max
  Clone ID: 700874994H1
aatctattagccacaaaacacacacacacatattctcacacaaactgcaactatggctactaccttatgttacaattctcttaacccttcaacaaccgttttctcaagaacccatttctcagttcccttgaataaagagcttccactggatgcttcaccttttgttgttggctataactgtggtgtaggatgcagaacaaggaagcaaaggaagaaagtgatgcatgtgaagtgtgcagtggtggaggctccacc

SEQ ID NO: 18512 - DNA, 259 bp, Glycine max
  Clone ID: 700874995H1
attcgatctccgcgatccggtgcgtggagtttctctctcactctattagggttcaggcgttttgttctctctctctctctctctctcattcgattacttccaaattagggtttctgttcccgattcagcgcattctcccgattcgaattcgcaggatagggttttgttgttccgcgtctcgcttccgcgatgccgcgcagttcgaagcacaaatcgagcaagcacagttcgcgcgacgcgagggagcaaggaggagagt

SEQ ID NO: 18513 - DNA, 263 bp, Glycine max
  Clone ID: 700874996H1
tttgtttctcttttgtactactagttctgaacatggagctgttgtctctgagactcaccccttcaccttctgcttcgacttcatcgcttcctgcagcacttgctcactgctccaagctatgtgagtttcaaccgggaagaagaagaaggtgtgtttcgacgcgcctaggcttgcggtgcggtgtgtgaaagcctcggcgcagcgaaccggtgatactatcgacgatggagagactcggactgggttcaccacacctgccatgg

SEQ ID NO: 18514 - DNA, 168 bp, Glycine max
  Clone ID: 700875001H1
acgagatgagcaagagcgtaacagcaacaaaggactcaggcgacaacaccgcgacccacttgaattttttcgagaaatttaaacgctttaaccctctcgagtcttccttgggagtactagccttcttcttcgtcgcttctctcttcattgccagcttcttctacttgg

SEQ ID NO: 18515 - DNA, 166 bp, Glycine max
  Clone ID: 700875002H1
ctcgggagatctagtaatgtggacttctgggtttgtctttgataagggagagggaattgttggtatggaaactgaccatggaattcttcgaataaaacttttgcctgaatgtgctccacattctgtttcctacattctggagctgttggcattgccacattgtgtt

SEQ ID NO: 18516 - DNA, 75 bp, Glycine max
  Clone ID: 700875003H1
cttattccatctagaatcacggttcctaacatttttgtttcaggcatatattataaaaaaaaggtttgtcaccat

SEQ ID NO: 18517 - DNA, 168 bp, Glycine max
  Clone ID: 700875005H1
cttctctctctctctctctctctctcttccatggaatccaatagtcggcgacgctttcactctctccggcgacgatgaactcatcgccgacgaaatgagtttgcgccggtttcttctctctcctcgttccgtgagttccttcctctcactccttctccgttctccggt

SEQ ID NO: 18518 - DNA, 170 bp, Glycine max
  Clone ID: 700875007H1
gtaagctcccaagcagtgggaggaggctcgggactctgaccgcgtgcctgttgaagaatgagccggcgactcataggcagtggcttggttaagggaaaccaccggagccgtagcgaaagcgagtcttcacagggcaattgtcactgcttatggacccgaacctgggtgat

SEQ ID NO: 18519 - DNA, 170 bp, Glycine max
  Clone ID: 700875008H1
ggtatcattacaatgtagcggatgcaagattagcgcaacatgtggagagagggattgcagatggccttctaattagttgtgtggcttcttgttccaatctctgggcccttattatggatgctggaactggcttttcaagtcaagtttataagttgtcaccatttttctta

SEQ ID NO: 18520 - DNA, 172 bp, Glycine max
  Clone ID: 700875009H1
ctaaagtaacgcgcaagataaggagtcgcagtcacacactacagactacagaggcttccttggcagatcagagggagagagagagtgtgaaagttggaatggcgaaaaaggcagtgttgatcggaataaactacccaggaacaaaggcggagctgagaggatgcataaacga

SEQ ID NO: 18521 - DNA, 171 bp, Glycine max
  Clone ID: 700875010H1
ctctctgtgtatttccctacctctcccttcaagatgcagatcttcgtcaagaccctcaccggcaagaccatcacccttgaggtggaaagctctgacaccatcgacaacgtcaaggccaagatccaggacaaggaaggaatccccccggaccagcaacgtctcattttcgcc

SEQ ID NO: 18522 - DNA, 172 bp, Glycine max
  Clone ID: 700875011H1
gccttatcatattttcttcttggcaactgttattgggctgatacctgctgcctatgtcacagtcaaggtatgtagctatggaaaaaacaaatcttatttagaaattatatttgtaaaacaaattttacaataatgggagaaaaagagagaggagagagaaaagtgtaaaatt

SEQ ID NO: 18523 - DNA, 171 bp, Glycine max
  Clone ID: 700875012H1
atttggccatctactgaagaaattgctaaggttgtccaatccagtgtgttgcctgagatgtttcgaagtacatatgaggctattaccaaagggaacccaatgtggaatcaactacaagttcctgctgacactctatactcatgggaccctgactcaacatatatccatgaa

SEQ ID NO: 18524 - DNA, 172 bp, Glycine max
  Clone ID: 700875013H1
ggcaaagtggctgcatatgcattgacattaacagggtttttctattgccaaacaacaccaaccttgagaccagaagaatgtctgaaatggccaagtaccaaggttgacaacagggatgcagatgaaaattattctgtcaaaccacccatgttgcagaggggggtgctcagga

SEQ ID NO: 18525 - DNA, 172 bp, Glycine max
  Clone ID: 700875015H1
attacggcaagaccaattctatggatttttacttggtcttgactcttgagctaacagcatttccatttttgacagaacttagtccacctgttagattgcagtctgttgaagcttctccgtgggatgattcgatagggaatgtccaagaatgaggggtaaggcgtaagaacta

SEQ ID NO: 18526 - DNA, 170 bp, Glycine max
  Clone ID: 700875016H1
aaacaattaaaacagttgtgggttgtcagccgcggtcttgcactcttatttggcagttctgaaaaggacgcgccgggagaggcgcgtggcagattatggatggtcgaacccgcaagcattatatgattggtgtggtgcgtgttgcatcagaggtggacgcaattcagaat

SEQ ID NO: 18527 - DNA, 165 bp, Glycine max
  Clone ID: 700875018H1
tctctcttcacctttcagtgttttttttctctctctctcctctgtctccccgccggagcccactttcgtcgccggtgtttcctttctgaagctgctcttccgttgcgagccaccgcgacccttttgagagccctgttcaacaagctcgaaagtccggtttttttc

SEQ ID NO: 18528 - DNA, 259 bp, Glycine max
  Clone ID: 700874979H1
acaagtttaaacccaagaccccttacattggtagatgcctgctcaacacaaagatcactggggatgatgctccaggagaaacttggcacatggtcttcagcaccgagggagagattccttacagagaaggacaacaattggggtaattccagatggtattgacaagaatggcaaacctcataaactgagattgtattctattgctagcagtgccattggtgattttggagattccaaaactgtttctctatgcgtgaaa

SEQ ID NO: 18529 - DNA, 94 bp, Glycine max
  Clone ID: 700875019H1
aaagtgggttgtgcgtgtggccagatgtgagacaactttgctttagaaaaggcatgctatatggatttatgcggttgttttccacacagcatac

SEQ ID NO: 18530 - DNA, 166 bp, Glycine max
  Clone ID: 700875021H1
ctaaactttggaacccagatgatgtcttcggattctgttcttcctctccccgaaaatcccatcattgtggggtttggtggggttggagtggattttctggcagtagtgccatcttttcctaaacctgattccaagattcgaaccactgaattcacgttccaaggtg

SEQ ID NO: 18531 - DNA, 255 bp, Glycine max
  Clone ID: 700874943H1
tggaggggttcatagatttagggaatcgattactatactagtaataaattgtacaaaaaataaaaatataaataatataaatataaaaagaacaaacacaaattttatgtgattagtcgcggtatttaaaataaaaatgaaagtagacaaataaaaaaggaaaggagatgtttgaataaaaataattccccttcaagttcttattttttgagaggacaggacaatatgaatgttttattatgctctatcaacaca

SEQ ID NO: 18532 - DNA, 253 bp, Glycine max
  Clone ID: 700874944H1
ggtactgattattaccatgcaaaagcattaatcaaagagatggaaacagtaggtctttcccctaatcagataagctggtcaattttgatagatatatgtggagcatcatcaaatgtggagggtgccattgagatttgaaaaccatgggtgatgctggaattaaacctgatgttattgcatatacaacagccattaaggtttgtgttgaaagtaagaattttatgcaagcattaacattatatgaagaaatgaa

SEQ ID NO: 18533 - DNA, 257 bp, Glycine max
  Clone ID: 700874945H1
gaggttttggacctgctcggagccagggagattgcggtgcgtgcttgggacgaggccctcaacacccaacctgaaaagctcatttggaatgttatgggcatgatgaacaactgctggttcagagtgaaaaccaagtgtgcaggccccacaagggtgagataggtatagtgtttgaacaccccacccaaccaggcaaccaatccggcggatggatggcaaaagaaaaacacctagagaaatcatctgagtccaaccca

SEQ ID NO: 18534 - DNA, 265 bp, Glycine max
  Clone ID: 700874948H1
gaggaatgctaatcagccctctaatgatgtaaataggcatcattctaggagaagtgatgatattggaagatttaattatagacagaatagaaagagaatggacagaagaaacactgggagtggtcaaagcagcaagcatgtacatgtttctcaatcagatcatacagctcaaccaacttctgtgttcattccatatgtggaccagtcatctagagcccatcctactgctgacattctgaccagaaggcaaaggaaacgtgaatca

SEQ ID NO: 18535 - DNA, 126 bp, Glycine max
  Clone ID: 700874949H1
gtggagcaactatgtaattgtacactgcctgtatattactgatgatgcataattcaatataaaggcagtggagcaactatgtaattgtacactgggcactgtgttatataaattatgcatcatcag

SEQ ID NO: 18536 - DNA, 251 bp, Glycine max
  Clone ID: 700874953H1
gtattcctatctcggcatactctgtttccgacacgtgtaccaggttcttgtcggcttgccagcgtggagatgacaagaggtgtcaggagttggtcgggaagattaaggtttggagtagagagagtgagaggacaagaggtgcatagttggtgctggtgctggtgctgttcttgcatatgcctttgattgtttctcaagtaactctattgaaaaacatgtggtgcttttggaggaggttttggaggtgatga

SEQ ID NO: 18537 - DNA, 99 bp, Glycine max
  Clone ID: 700874955H1
atcgcctgacttttagttagcatattgtcgacgagttcaagaatattgaagtttgcaccatgtataaacattttaaaattttgcttataaagttcgtat

SEQ ID NO: 18538 - DNA, 257 bp, Glycine max
  Clone ID: 700874956H1
ctttggttgcagagtcataagtgttaagttgtgtatgcatgaaagtgggcttgagttaattgtgcctcttgtatgatggaatccctttggaaactgttgtacttgctagagcctgcgcctgtcacacttatgcatacagctgtggctgtgacatttggcgcacatttcgagctctaaactatgggaaagaaatggagcataatcgtgacttatgtgaagcatcgattacattggataggtcacaggcattgatgatc

SEQ ID NO: 18539 - DNA, 253 bp, Glycine max
  Clone ID: 700874957H1
aaggacacacctgctgttggcttgttgttcaagaatggcaatttgtaagaaagatgtttggagagttgaatgtggaatcccttctggatttccgctcacagttatttgtaatagcatttttaatgagatgccattagatatagctatgaaaaattactgcgccaggctaaagctccaagtatgtttttacaatccttcaaaaattttgtttctttgtgtgtgtatggtgatgataacttaattagtgttcatg

SEQ ID NO: 18540 - DNA, 72 bp, Glycine max
  Clone ID: 700874958H1
gaagaatacaagcgtgaaaccatgcaggtatattacttgagcctggaagacaattgcattcgcagagaagga

SEQ ID NO: 18541 - DNA, 252 bp, Glycine max
  Clone ID: 700874959H1
ggattaatcttcctattggtttatctatggagcatgagatttataaagcatctaatacattgagaaactactgtcaggtggccaaatccaatcctgagaagtctatccctttaactgttcttaaaagtgcaagggcttagcaattttaacagttgctaaagctggtgcactggtctcttacaaactgggcactggtttggttgttgctcgaagatcagatggatcatggtctgcaccgtcagcaatattctc

SEQ ID NO: 18542 - DNA, 255 bp, Glycine max
  Clone ID: 700874961H1
catggcgtcactaggcaccccagcgcatgttagcagtaacaagaagcccttgcatcgttggagttggaaggcgaacgtgtgatgtgcgcagtgtcaccccccacatggcgtgaagggcggcgcacggtgtcgtgtctcttgctctctcccacttgcttctcattcctaaccgtgatactgccctagcaagtcctttcgataagtatgttaagagaaaaaagcttgatcctctggaggtttatataccagctgtca

SEQ ID NO: 18543 - DNA, 263 bp, Glycine max
  Clone ID: 700874963H1
cggctcgagcgacctaacactcctcaatggccttgcacttttggttgatgttccacgggataaaaacattactgctgaggttatgaagtccttgaatatccctagaggtgtaagccgcgtgcttttcagaactttaacactgacaggcaactcatgtttaagaaagaatttgacacaagctatgtgggattcaaggaggatggtgcaaaatggctggcagagaacactgacatcaaacttgtaggagtcgattacttatctgt

SEQ ID NO: 18544 - DNA, 265 bp, Glycine max
  Clone ID: 700874964H1
gcaggaactgggcataactgctcttcacatcaagctccgtgcgacgggtggaaacaagacaaaaacacctggtcctggtgctcaatcagctcttcgtgcccttgctcgttctggaatgaaaattggccgcatagaggattgacccccattccttccgatagcacacgtagaaagagtggtataaggggtagaaggctttaaggttctcgtggtatgataatttccatgtcaaacagaattgtggcattttgaaattttgcttaag

SEQ ID NO: 18545 - DNA, 259 bp, Glycine max
  Clone ID: 700874965H1
ccctcactccaccccacccaccttcttctttctctctttctccccttttccctttagtcttcgtttgttcttcccttttgggttctcttgtttctctttgatctcatgaagaagatgaaaggggttgtctccttggaccctccttatgaggtatatcaggatcagagggccaggctgaggcaccagagtctcttgcaggactatgaagacctgcacaaggaaacagaagccatgaggaggaaattgcaggctacgaggc

SEQ ID NO: 18546 - DNA, 257 bp, Glycine max
  Clone ID: 700874966H1
tctcgagccgaatcggctcgaggccacgggcaaatgcagatgcaactgcaacaaacgcagcagcagctgcaggccacggcagcaccattctcgacctccactcctcctcctcctcctccttcctccggcggcccgcgtccgaggcaccgccgaagcaggtggctcaagcaatggacaagctcggacaagccgaacgaatcatcgccgacatccgaatcggcgccgaccgcctcctcgaagcgctcttcgtcgcggcg

SEQ ID NO: 18547 - DNA, 253 bp, Glycine max
  Clone ID: 700874968H1
tgcaattgaagttgaagtcttgcccttctctcttcaactccaaacacaagacatcatcatccatggctgcctccgtctccactgtcggagctgtcaacagagctcttttgaacctgaatgggtctggactggggtttcagctcccagttcatccttctttgggagcagcttgaagaaggttattggctcaagggtccccaacacaaagatttcctctggaagcttcaagattgttgctgtagaagagaagaaa

SEQ ID NO: 18548 - DNA, 252 bp, Glycine max
  Clone ID: 700874969H1
cgggaagactggttctcactttaatccagacagtgacttgtttgttcccagtgagagaaaagatgttattacttcaacaatttgttggacagctatggctgctttgcttgttggtctgggatttgtgatcggtccagttcaattgcttaagctttatggcattccctatgcgatttttgttatgtggttggatttggtgacttatttgcatcaccatggccatgaagacaaattaccttggtatcgtggaga

SEQ ID NO: 18549 - DNA, 254 bp, Glycine max
  Clone ID: 700874970H1
cggctcgagctcttcactgctcttcctcttcgattagggtttcattttttcaacccgatctatattgcgttgccgcagctattccttcctctcttcgattttttcacttctcgctcttacacgatcttaagcttcgaagtattacaagtttgcttcattgctatgtggtgccacttggcttatcaccggcaaccacctggttatcctgtgtaaaactccatggtaccagagggctagggagtcatgggctgctc

SEQ ID NO: 18550 - DNA, 254 bp, Glycine max
  Clone ID: 700874971H1
cgatgttgcgaagtacaacaatcgatatgtagtcctaaagctacttgagaaagatcactctctgcagttgtaatgcatgatgccatgctgtcaccaacaagcaaagggggaaactgaggggaagaaggcaggtgacttcgttattttctcttttggtttcttccagccatttagtgtgttaaactaaattgattagcgttgttggatgagttaccatagaatttgttatctatggtcttgtaatgcatttattg

SEQ ID NO: 18551 - DNA, 282 bp, Glycine max
  Clone ID: 700874973H1
acgtccgtattctcgtcattcggctcgagcgttaccattctcatcctcttcattctctctctaccattgccatggatccctacaagcaccggccatccagcgccttcaattctcccttctggactacaaattctggtgctcctatttggaacaacaactctctttaaccgttggagctagaggtccaattctgctggaggattatcatcttgtggagaagcttgcaaattttgatagggaacgtatcccagaacgtgttgtccatgccaggggcgctagtgc

SEQ ID NO: 18552 - DNA, 251 bp, Glycine max
  Clone ID: 700874974H1
cggctcgagcggctcgagagaaaaagcatgcttctggaacatataaaaacctagtattttatctggaggcatgtgaatctgggagtatctttgaaggtcttcttcctgaagatatcaatatttatgcaaccactgcttccaatgcagaagaaagtagttggggaacatattgccccggggagtatcctagtcctcccccagaatatacaacctgtttgggtgacttgtacagtgttgcttggatggaagac

SEQ ID NO: 18553 - DNA, 251 bp, Glycine max
  Clone ID: 700874975H1
attgagaaagcgaaacgcatagaatcgaaagaggggaaaagaaaaagaaaagttagggttagggattttgagagatggcatcgactaagaagatcaccctgaagagttcggacggtgaggccttcgaggtggaggaggcggtggcgctggagtcgcagacgatcaagcacatgatcgaggacgactgcgccgacagtggaatccctctccccaatgtcaccagcaagattctggcgaaggttatcgagtac

SEQ ID NO: 18554 - DNA, 252 bp, Glycine max
  Clone ID: 700874976H1
ccaaggacggaggcaaagatggagacggcgaggatcccgagcaggccaagctacgggccgggctcaactccgcgatcgttagggaaaagcccaacgtgaagtggaacgacgtcgcggggcttgagagcgccaagcaggctttgcaggaagcggttatcttgcccgtgaagtttccgcagttcttcactggtaaacgacgaccttggagagcgtttttgttgtacggaccgccggggacgggtaaatcgtatt

SEQ ID NO: 18555 - DNA, 254 bp, Glycine max
  Clone ID: 700874977H1
tgcctttatattttcttctgtattaagctgaccaaaggcaaatccatttgtatctgtagctggaattttcgtcattcttactttaccttccttcctcaccttctaattctgcaacaagttccaaactttcaatctcacccccccaaaaattcttttttggttacccatttgactttagcctctgcaacagagtctcagatctctgcattccaattcccatggctggtcgctatgacagtaaccccttcgatgag

SEQ ID NO: 18556 - DNA, 256 bp, Glycine max
  Clone ID: 700874942H1
ggatacctaggcacccagagacgaggaagggcgtagtaagcgacgaaatgcttcggggagttgaaaataagcgtagatccggggattcccgatataggtcaacctttcgaactgctgctgaatccacgggcaggcaagagacaacctggtgaactgaaacatcttagtagccagaggaaaagaaagcaaaagcgattcccgtagtagcggcgagcgaaatgggagcagcctaaaccgtgaaaacggggttgtggga

SEQ ID NO: 18557 - DNA, 259 bp, Glycine max
  Clone ID: 700874911H1
tttgtttctcttttgtactactagttctgaacatggagctgttgtctctgagactcaccccttcaccttctgcttcgacttcatcgcttcctgcagcacttgctcactgctccaagctatgtgagtttcaaccgcggagaagaagaaggtgtgtttcgacgcgcctaggcttgcggtgcggtgtgtgaaagcctcggcgcacgaaccggtgatactatcgacgatggagagactcggactgggttcaccacacctgcca

SEQ ID NO: 18558 - DNA, 262 bp, Glycine max
  Clone ID: 700874913H1
ctcaatatccgccattgaattcttcttccatttctcttttttctgcatacccatttcgtttttcttcccaaatggccctttcttgctccaaagttttaagcttttatctctcgcccgttgtgggtggtggtgatgttccaaaaagctcactttttcttcttttttgggtctttctaagggtgttggtggaagcaggagctcgagggtgtgtgctgcttcaaatgcacccgcaccactcgctggggtcatatttgaaccattt

SEQ ID NO: 18559 - DNA, 265 bp, Glycine max
  Clone ID: 700874914H1
gaagaagcacaaagagaagcattagcactaggagcagcaacaactagtctcagctgaaatggcctcttcagtgatggcatctgtggccctcaaacctgcccctttcactgttgagaagtcctcagtgagaggccttccctctctctcaaggaactcttcttcattcagagttgtggccagtggcaagaagatcaagactgacaaaccttatggaattaatggtggcatggctttgagggatggaactgatgcatctggcaggaaa

SEQ ID NO: 18560 - DNA, 266 bp, Glycine max
  Clone ID: 700874915H1
gagaaacaaagttagaagtaaagaagatcatggcttctctagcaaccttggctgctgttcaaccagctacgatcaatggccttgctggaagttccctctctggaactaagctctctttcaagccctctcgccacagtgtcaatccaagaacttcaggagtggtgccgtggtagcaaagtatggtgacaagagtgtgtactttgatttggaggatctgggcaacactacagggcagtgggacttgtatggctcagatgcaccttcac

SEQ ID NO: 18561 - DNA, 275 bp, Glycine max
  Clone ID: 700874916H1
caggtcaatcgacctggcgggacatcatctccgaagatgggaacatcgacatctgctgcgctatcgaacgagtatggatcgatgccgcgaccgaatggaatgccgagttctctcccatcacactccacgtcttcttcgatgtcgccaccccgcagtcgggcgattacggatcgatgccgcgaccaggatcggtatctctaaccggcatgccgaacgctttgggatcttctggaacggtcccgaggacgagttctccatcgccagggatgccaagc

SEQ ID NO: 18562 - DNA, 263 bp, Glycine max
  Clone ID: 700874917H1
cggtgatccgtatccttttgatggtccaggtgggatattgggccatgcattcgctcccactgatgggaggtgccactttgacgccgacgaatattgggtggcgtctggcgatgtcaccaaatcgccggtgacaagtgctttgaccttgaatctgtggcagtgcacgagatcgggcacttgctcggattaggccactcgtcggacctaagagccatcatgtatccttctataccacctcgaactaggaaggtgaatctagcgca

SEQ ID NO: 18563 - DNA, 263 bp, Glycine max
  Clone ID: 700874918H1
tcctattcaacaaaattctgaggtgagtgccatgatagttacaacaaaggaaactcaaaatatcatcatggcaacaacaaatgatgtggaagattattctcagaaatcaattgatgagaaacagcaaagccctgtccacaagaacaagaagaaaaggaaaccactgtggtgaaagataatacagaaacagtaaatagtaaggccaaagatgaggcttttgaagttaaactccaggaagctaacaatgttgccatactagagaa

SEQ ID NO: 18564 - DNA, 226 bp, Glycine max
  Clone ID: 700874919H1
agctcgagcggacgcatttatcctaatgatctaacttactcaacattgattaaaatatacactaaaggtggatgtatgctgaggcgatggatgtttatagagagctaaagcaggaaggcatgaagacagatgttgtttttacagtgctctaattgatgctttaatgcaaaatggtttgattgaatcttctctgaggctactggatgtgatggcagggcaaggaagt

SEQ ID NO: 18565 - DNA, 261 bp, Glycine max
  Clone ID: 700874923H1
ctgccttacgcttagggttttaagagtaagaaatgaaatggattgtctcttcttttttaaattttactggtaactcatacaacatactttttgttgttgttgaaaatacaacatacttcttttgcaactaacttgtacatttcccatgttatccgtattgcttccaatatagttatcctatcagtttattatttatttatatataaaagagtgttaacaatatattctttaacaccaccttaaaggacatatgtgatattt

SEQ ID NO: 18566 - DNA, 261 bp, Glycine max
  Clone ID: 700874924H1
ggttgatagcgctcgtgccggcgctgaagacattgatagttgacaagaatctagggtttcctgtgttctcggccatagatgaccttttcgatgaaggcctttacttgcctcctctaaaaggtatcaggagtatcttgcccaggctcgttaggcatattaaggatattcaggaagacattctcctttttgatcctcccgcaacaatgaacaaggacagatttttctggttaagggacgaagaatttggaagacagactctcg

SEQ ID NO: 18567 - DNA, 255 bp, Glycine max
  Clone ID: 700874926H1
gactattggaggcaactaagaaagatatgcacagtagagttactaacagcaaagcgcgtgcagtcttttcggtccataagagaagaggaggtggcagaactagttaaaaaaatagctgcaactgcaagtgaagaagggggtccatttttaatctcacccagagcatttactcaatgacttttgggatagcggcacgagcggcttttggtaaaaagagcagataccaacaagtgttcatatcaaacatgcataaac

SEQ ID NO: 18568 - DNA, 258 bp, Glycine max
  Clone ID: 700874927H1
gctccgcataactcctcacacacacacacaaaacagaacacaacacatacacatacacatgttgttgatgagtggaggcaacaaaaaacacagatccatcacacacatgaacaattgatctttgtcctttgtatataatttgattctaatttttggcactaagagagccactcaaggctctgggatgtactatacgccattcggggttctgattttcggcggagagaaggttcaagagacccagtgggagaaggagcg

SEQ ID NO: 18569 - DNA, 259 bp, Glycine max
  Clone ID: 700874928H1
tgatgcctctagtccattagctgctcctaagcctgaacctaatgatcagactctgcaggctgggggtaaggtcatgttccaagagggccaacagcaacattatttcccattggttgatgagtgcaaacactccacccaagtgttcaaaatgtggcagctaacaacccagatggacatgctttagaatatcatcagtttgatttacatcaggactatgatcatggcttgtatactggttttaatggtacaggttattgtg

SEQ ID NO: 18570 - DNA, 98 bp, Glycine max
  Clone ID: 700874929H1
caacaattatctaaggctacaaggtcaactgctgctatttacctagcatgtggagtggatccttcaaaggcttcagtatttgtacagtctcatgttcg

SEQ ID NO: 18571 - DNA, 264 bp, Glycine max
  Clone ID: 700874930H1
ctcgagccggggtgagcaggaaagattccaaacagcaagaatcacccgtgctagaaggcgataatccaattggccgtctaaagcgggaagaggaagagaagcagcaacaaatcggcatgagtgtcgatgatggtagtctctcccaagctgatctaccggatgttgtcgaacatgcgcgaaagacgagtggtggtcccactaattttccaccaacaggcccgtttgcagtcgaaaccggcgatttgcgagtactaagggacgaaa

SEQ ID NO: 18572 - DNA, 267 bp, Glycine max
  Clone ID: 700874931H1
gttccaggatgtacaagactcagtattgagggtattgtgactattttaaaagcttacaactctatggatacccaaggggtgaagcatttacacataggtggtctttatggtgttacacaaaagcattttgaagagctgaggtcttgttgggggctgatagtccgctgctcccacactctcacaaatcacactattatcgcaggggaaacttgtacctgtcctgtgatgatgatcaagccatagatattgaagtttgtccacgatgcc

SEQ ID NO: 18573 - DNA, 272 bp, Glycine max
  Clone ID: 700874932H1
gcaaaggattctacccgccgctcgatgggaattgcgcttcaaggcgtctcgtagggctaatccgcctcacgagggtcaccaacggcacgtgcctttggggggccgaggccccctactgctggtcggcaaacggacggcgggcgacgcgtcgcttctagcccggattctgacttagaggcgttcagtcataatccaacgcacggtagcttcgcgccactggcatttcaaccaagcgcgatgaccaattgtgcgaatcaacggttcctctcgta

SEQ ID NO: 18574 - DNA, 265 bp, Glycine max
  Clone ID: 700874933H1
ataacatgaagaaagggcttagacatggagaagcatctccacttcttgataaaattgtgtttgacaaggtaaagcaaggtttagggggtagagtacgtcttattttgtctggagcagcacctttatctgcacatgtggaaggttacttacgggtggtgacttgtgctcatgtcctacagggatatggtctgactgaaacctgtgcgggaacctttgtctcattaccaaatgaaatagaaatgcttggaacagtgggccctcctgt

SEQ ID NO: 18575 - DNA, 260 bp, Glycine max
  Clone ID: 700874934H1
caactacaaaggttgctgtaggagataagatattgaagtagtgctaagtgcctaacacctgcagtgaacaatggcctctgcatcagcatctcttctcaagtcttcacttgttcttgacaagtctgagtgggtgaaggacaaacacttcgccaaccttctgctgcatcagttgtgagatgcaaccccaccaccccatcaggcctcacaatcagagctggttcctatgctgatgagctcgttaagaccgcgaaaacagtggc

SEQ ID NO: 18576 - DNA, 257 bp, Glycine max
  Clone ID: 700874935H1
gtaagctcccaagcagtgggaggaggctcgggactctgaccgcgtgcctgttgaagaatgagccggcgactcataggcagtggcttggttaagggaaaccaccggagccgtagcgaaagcgagtcttcacagggaattgtcactgcttatggacccgaacctgggtgatctatccatgaccaggatgaagcttgggtgaaactaagtggaggtccgaaccgactgatgttgaagaatcagcggatgagttgtggtta

SEQ ID NO: 18577 - DNA, 257 bp, Glycine max
  Clone ID: 700874936H1
gttagtgttcatgggccttggtataaacacttgactgataacatgtgatatttggtggtaagtgcatgcataataatataataaaaaagacacatttgtacataggagcgtgtaaaattgtaagctgtgtatctaggtttgtagagaagtgacattatttgtagaattcttttgatgtaacaaacagaaatgtatataggtatctaaactttttaacattgaattgctaatgtatgattggatcttgaacttttcaa

SEQ ID NO: 18578 - DNA, 257 bp, Glycine max
  Clone ID: 700874937H1
tgcatcttgtcattttcagattgtacaagttgatatacctcaatccttgtttgaggaacaaggaaggcagctttatggagccaacctattagaaatacaggtattggttgcaagttgcaccattttcaggccatcaggcaacttaaattccaacttttttacattactcgtgatttaatgcaaataaaaaaataaaagaaataaaaactctgctctctctcaggcaaaaatgaaactaaatgatcagcagctggcga

SEQ ID NO: 18579 - DNA, 255 bp, Glycine max
  Clone ID: 700874938H1
ggcaggagctactgcaacaacaacagcattaatcaatctcacgcgcccttcacactcctccaagcatcgccacttctcttcaaacaatgctcccttttctatccaaccctttcattccggattctaccacaaccgcgtttaaagccaataatcaccaattgccatggcaagctgaatagctcgggtgggggatacgcgatggatgaagcgggttttgatgagtacgatggagttgaagacgaaagtgatgacgag

SEQ ID NO: 18580 - DNA, 258 bp, Glycine max
  Clone ID: 700874939H1
ggaaaatctttccaatgtgagcttgtctttgccaagatgggaatcaaccccatcatgatgagtgctggagagttggaaagtggaaatgcaggagagccagcaaaactgatcaggcagagataccgtgaagctgcgacatgatcaagaagggaaagatgtgcgctctcttcatcaacgatcttgatgcaggagctggtcgtcttggtggaaccacacaatacactgtgaacaaccagatggtgaatgccactctcatga

SEQ ID NO: 18581 - DNA, 280 bp, Glycine max
  Clone ID: 700874910H1
cacgcgtacggaatctcagcgcctctgcacgagtgctgggcgtatggagaagttctactgggcaccaacaagggatgaccgcattggtgtcatgcactggaatttttcgcaccgattcaattcctgaacaggacgttgtcaagattgttgacaccttcctggccaatccattgatttctttggtgcactgagggccagagtatatgatgacgaagtgaggaagtggatttctggtgttggtgttgacggcattgggaagaagcttgtgaactcaaaagat

SEQ ID NO: 18582 - DNA, 248 bp, Glycine max
  Clone ID: 700874877H1
agaacatctcttgctcttcccactttctctctctaaataatataatactcaaaatttatccattttgattgtatttttcttaaataacaaagcgcgtatagtctcacgcgcccgacgatgggttttccgtaggctacccggtgctgctggttccgaaaatgttcctcctcgcgctctccttcctcgcgtggctgcgctccctcgtcttcgccctcttccgcctcctccgcatctccgacctcctcgac

SEQ ID NO: 18583 - DNA, 255 bp, Glycine max
  Clone ID: 700874878H1
gggaaaagcacaacttgttactccacagcttctcaaggaaatgaagatagaagaagaaagaattgaggctgagaaaaaacgggtaaaagaagaggcacagcaacttgctctaatttttgaaactgttgggctttcaaggtgaagcgtaaaggtggtaaaggaaaacaaatttttggaagtgtcactgctcaagatcttgttgacataatcaaggcacaacttcaaagggaggtggacaagagaattgttgatctt

SEQ ID NO: 18584 - DNA, 255 bp, Glycine max
  Clone ID: 700874879H1
ctctgcctctgcaattcagcgggctcaagtgctccccactctcatcttcttctctcttctccaaaccttctctttggacccaacaatcccaaaagcgcgtttcaattaccattgcgaactcaatagcaaagccaatgcgcagaacaaagagagagcgaggcttaagaaactcttcgaagaagcctacgagagatgccgcaatgctccaatggaaggtgtttccttcaccatcgaagacttcactgctgctcttga

SEQ ID NO: 18585 - DNA, 259 bp, Glycine max
  Clone ID: 700874881H1
ctttcaaccccatccaatcctcacatgcatgctgtctctgccaaagtgccaagtcacataacatttccattgttaccattctttctttccatcacaaccacttattcagcctctgatcctcactttctctccacaaaaacacactcaccatggatcatcgcaaaccattgctacccacttcctctgatgctgctcatattgcacacactcgcaaggaccttcttctagttatttgcggcttgctattactctcttccct

SEQ ID NO: 18586 - DNA, 255 bp, Glycine max
  Clone ID: 700874882H1
tctggatcaaatagtgggagtgctgggccttttgccttgaacaaaatctctgactgccggatgcgccacaagttttcaaacaatgttggtcccggtgctacttgtcggtctccaaacccgaattgctcacaggtggcccagctacattacgggtcagatgataatctcatgccatgagtccctgtctggtgtgcttaatctccagaaaatagtgtttgttgttaaaatgtgggtgcatccttgtatttgttgctt

SEQ ID NO: 18587 - DNA, 250 bp, Glycine max
  Clone ID: 700874883H1
atcatttactgtggtagataatgaaaatcatgttcaagctgttgaggatgaaggactgttcactgttgccaagttaattggctgtgaaattgaagacctgaagttgactttatcaactcgcaaaatgaagttggtaatgatattattgtccagaagttgactctatctcaggctattgatgcaagagatgctttggcgaagtcaatatatgcttgtctgtttgattggttggttgaacaaataaaccaat

SEQ ID NO: 18588 - DNA, 251 bp, Glycine max
  Clone ID: 700874884H1
aattgaagttaaaagccttagccttccctacaactccaaacatcaagacatcatcatccatggctgcctccgtctccactgtcggagctgtcaacagagctcttttgaacctgaatggttctggagctgagcttcagctcccagttcagccttctttgggaccagcttgaagaaggttattgcctcaagggtccccaacagcctggtttccggtggaagcttcaagattgttgctgtagaagagaagaaag

SEQ ID NO: 18589 - DNA, 249 bp, Glycine max
  Clone ID: 700874886H1
atctcaatgggttcttcttctactccaccttcgacctgaaccatgaccatggctgcgatcgttctcctgttcacggtctttgtcgtttcctccgtcctagacatgtcgataatctcgtacgacagcgccacgcggacaaggccgccacgttgcgcaccgaggaggagctgatgtccatgtacgagcagtggctcgtgaagcacgggaaggtgtacaacgcgctcggcgagaaggagaagcgcttccaga

SEQ ID NO: 18590 - DNA, 250 bp, Glycine max
  Clone ID: 700874887H1
cgtagaagaagaaagcgtttccaagaagcgaaaggaaggaaaggggttttgtgatttttgaagaatcgcgtttgggagtagtcggagatggagctttcgactccgaattcttcctcgaagcacttgccatcacgccgggttctagggttttgagaagccctctctccgacgaacagatctggaagcgcctccgtgacgctggcttcgacgaggaatcgattaagcacaaagacaaagctgcgcttattgc

SEQ ID NO: 18591 - DNA, 234 bp, Glycine max
  Clone ID: 700874888H1
ggctcgagggcctttttacctttctccaatatctgtcaacaaacccttccctctcctctacttgcttgaacatgaaagcttccactctacccttatactcaacccctcttcccaaacctccctctctgcttctcatttttctcttcatctccttccaatggcttccattcccacactctccctttcaaaccccaacaaccattgcactctccctcccacctctctcttcggcac

SEQ ID NO: 18592 - DNA, 250 bp, Glycine max
  Clone ID: 700874889H1
cgcggcttcaaccttgtagttattctctttcttcttttttagctatccctctcttgaaaaatctagatctcgttcttccttgatctacgttacgcttttagtgaccggatctgtatggatctgaaccgatctacacgccgatggtggttttggcctggtacgataaatcttccatcggagttttgctctgtataggttcgattcatcgttattagcgtcttgatattgttattttcatttgtcatatagg

SEQ ID NO: 18593 - DNA, 252 bp, Glycine max
  Clone ID: 700874890H1
gaaaaactcagcacaacacccctcccaaccctctttttctcttaatttctcatcatatcatatctattaatcttacacatatattaagacatagatataatttttttcgttttatttttccttgcatggctgttaagataagatgtctcgcacgtgctcacagtgcggcaacaacggccacaactcgcggacatgcaccgacggtggcgccgccgcttcctgcggcgggtctcccagggagaacggcatcat

SEQ ID NO: 18594 - DNA, 251 bp, Glycine max
  Clone ID: 700874891H1
cacacacaaaaaaaactcccttgtatattgttgcagctctagctagggtttcgcaagtgcgatcgaagaagaacaacgacgatggcgatggctgcagctctgcgtcgcgaaggaaggcgtttgacccaccaatcaacgccctccactcttctctcaattcctccctcatctctcaagaccaagcccctcatggcgcgcgctccatttccactcaagttgtgaggaaccgaatgaagagtgtgaggaatatc

SEQ ID NO: 18595 - DNA, 251 bp, Glycine max
  Clone ID: 700874892H1
ttttgaacatgccacaagatatcatgtatggctgggacatctcacaatggtgctttttactgtccatggactcctctatgttattgcatgggcaatggaaggccaccttgtacaaggattaatacaaggaaagatattggtgttgccaatctcccaggagttatcagccttctagctggtttgttaatgtgggtgacctctcttcccggagtgcggacatggaactttgagttgtttttctacacccacca

SEQ ID NO: 18596 - DNA, 254 bp, Glycine max
  Clone ID: 700874894H1
gttaatggctacccttctattccaccacaattcggctcttctattctcttcctccttcttcttctcacagcattaaacgccgtctttttcatgacttcataattcaccggaagcagaacaacaacaagagcagcagcagcagcgcgagttcacatgggattgggaacaaccgcgagaagcagaagaagaatcgaaattcgcgaggccgttagagaggagcgaaacgcgcaggtcgttttactcaactaccgcag

SEQ ID NO: 18597 - DNA, 253 bp, Glycine max
  Clone ID: 700874895H1
caaattcatttcaatcctaattctgcactttttgatcattcgatttttctcctcaagatgcagatattcgtaaaaactttgaccggcaacaccatcacccttgaggtggaatcctccgacaccattgacacgtaaaagctaagattcaagacaaggaagggatcccacctgaccagcagagacttatctttgcgggtaaacaacttgaggatggtcgcacccttgccgattacaacatccaaaaggaatcaac

SEQ ID NO: 18598 - DNA, 271 bp, Glycine max
  Clone ID: 700874901H1
ggcagaacaggttggattgggggtttgctggggaagttgtgtgaaaaacaagaaattccctacgaatatggaaaaggacgactagaggaccgatcatcacttgtggctgatattcagaatgtgaagccaacacacatttttaatgcagcaggagtaactggcagacccaatgttgattggtgtgaatctcacaagacagaaaccattcgcaccaacgttgctgggactttaacattggctgatgtcagcagagagcatggaatcttgatga

SEQ ID NO: 18599 - DNA, 280 bp, Glycine max
  Clone ID: 700874902H1
cgcgtacggctcgtgatttaaatacagggatttgctataccaaaagaggcacaaggaaaagttgcaaaatttgatttccatgggcagccagcggtactcaagcatggcagtgttgtgattgctgcaattacaagctgtacaaatacatcaaacccagtgttatgcttggtgctggtcttgttgcaaaaaaggctcatgagcttggtttacaggtcaatccttgggttaaaacaagtcttgctccaggctctggagttgttacaaaatatctactccagag

SEQ ID NO: 18600 - DNA, 261 bp, Glycine max
  Clone ID: 700874904H1
ctttcaaggtctgcatccagaagtgtgtcccagaaagtgatatcttgggttggcaatatatctcaggaggcttaccagatggccatgagcttgagcgcttggacaatcctgagattcaaggggctaaatttgatccagaggtgaatatgtgaggcaatggctacctgagttggcaagaatgccaactgagtggatccatcatccttgggatgcaccacttactgtgcttcgagcagcaggagttgagctgggccagaatta

SEQ ID NO: 18601 - DNA, 241 bp, Glycine max
  Clone ID: 700874905H1
aagacatggctcaacccagttccaacggggatctgaataataaccagcagcagggtcaggttcagcaacaacagcagcagggtcagttggcggcggcggcgcagcaatccagtatcagcagcaatggatggctatgcatacccggccaccgccatggccatgatgcagcaacagatgttgatgtacccgcagcattatatgccctatgctcaccctcattacccgctgccgccgccggctc

SEQ ID NO: 18602 - DNA, 262 bp, Glycine max
  Clone ID: 700874906H1
ctgagaaataaccaacagaatctactctctattttcctagcttagattccttctccaatggctcttgccgtttccactacttcttcctcctcagctgcagcagcagcagcagcgtcgagctctttcttctcgcgccttgatcttcatcggacgctaaagctccgcaaattggttcctttcggtttccggagaggcctcaagtttcgtctggtgttgttaatttaactcaaagacgctcctcggtgaggccactcaatgccga

SEQ ID NO: 18603 - DNA, 262 bp, Glycine max
  Clone ID: 700874907H1
aaaaccacttacaaagtagtactacttggtttcaatcaaaacaaaaactcacactttggtggccacagcaacaataacaatggcagcctcactacaagctgcagctaccttcatgcaacccaccaaggtgggcatggccctcgcaacctcaaatctacacaatgcatttctaaggcttttggcttggaacccgctgcagctaaactcatttgctcccttaagcccgatctcaaagattttgctcaaaaatgtgtcgacgcca

SEQ ID NO: 18604 - DNA, 264 bp, Glycine max
  Clone ID: 700874908H1
ttcaatcaaagaggacccatcatttcctttcccttattataattattattatgaattttttctgcttctttctttgcgtgtgctgttgatggatcccaagggctcaaagcagcagccacagcaatcacaggaggtggtacaaacttcctcagcctcccccaacagcaacaagggaataccaacaacaacaacatgggagagaacaaacctgcagaggtgaaggatttccagatagtggtagctgagaacaaggaagagagcaag

SEQ ID NO: 18605 - DNA, 95 bp, Glycine max
  Clone ID: 700874909H1
caatttcaatggccgcagaaatttgtggcgggtctctattcttatccgttaaaactcaactgcaacagcgaaaccagcaaaatgtgttcttccat

SEQ ID NO: 18606 - DNA, 252 bp, Glycine max
  Clone ID: 700874875H1
tggaatccctgagccaaatgcagactctagtaagagagaattcgattaacaaggattggattttcagagcagagcttactaacattgtgatctctatccttgggagctctgatgacagagtagtgaagagaagattttgataactttgaatgatgctgtagaggggattacaagaaactaggagaaagtggctgaatctcaaggatgggataacattatttcctgcttagggagtgactctagcacttcaaa

SEQ ID NO: 18607 - DNA, 250 bp, Glycine max
  Clone ID: 700874839H1
ctttgaaccatgtggttattcaatgaactctgttgaaggcgctgctgtttctacgattcatgttaccccagaagatggtttcagttatgcaagcttcgaaactgttggttatgacttcaaagcggtgaactgaacgaaatggttcagagggtattggcatgtttcctcccaactgagttttctgttgcagttcatgtggatggtgcaagcaagtcgtttgagcagacctgctttctggatgttaagggat

SEQ ID NO: 18608 - DNA, 255 bp, Glycine max
  Clone ID: 700874840H1
gtctggtccaagtgctgcaatatgcaaggcaaagaaatggaagggttgtcgtcttcatcggcgatcgcgcagaaaacatgggaactcgagaacaacatcatcccgatggacactccgggcggcgccgctacctcctccaccgctaccaccacgaccaacgccgacgactcgatcttctactacgacgaggcggggcagaacgagttccagcgcgacaagccctgggccaacgacccccactacttcaagcgcgtg

SEQ ID NO: 18609 - DNA, 254 bp, Glycine max
  Clone ID: 700874841H1
gtctaccctgtaaatggaggaggagaactagagaggcaaagggcacagactattgctgatgccatcaccattacaaggccacataacaccatttctccacctcggtgacatcctcttctcaaagggctttccatcaccattctccacaccatcttcaacttcccaaacccttcttcctaccctcacttcaccttccacgccatccccgacgtcttatcagatacagaagcttcaacactcgacgccgtgctcct

SEQ ID NO: 18610 - DNA, 251 bp, Glycine max
  Clone ID: 700874843H1
ctgggaattggttacctcaggatctcaataaggggagattggattatttttattacattataactgctctagaagtcgttaatttcggttactttatattgtgtgccaagtggtataaatacaaagggctggttctagcagcagtggtgaccttcaactcgatcaagtatccaaaccatccgaaagaactgttaacactgtctagtggttctcatttaaacctgtggttatattaagtacttagctttaag

SEQ ID NO: 18611 - DNA, 253 bp, Glycine max
  Clone ID: 700874844H1
cgctgcctaacgtgaaattagtctcattttccatctgggtcttgtgaattgcgattggaaccgcgttttctcgcttctgggcttggcttagaagtagtcagaatgatgtctgtcacaggcaaaggcattgattttgctggcaaaaacttggtctctggctgctcttcaaatgcttcgtttgattggtacactgtgaggaactatgccaaggcgaatagtaataattctaatgggtgtggcagaggccattgac

SEQ ID NO: 18612 - DNA, 257 bp, Glycine max
  Clone ID: 700874846H1
tgccagcagtgaaaatccggaagtagaagaaaagcaggaagatctcagccccccatctggttgtagtaaagaggataaagtaaccaacaaggatgcagtagatgagaaaaagccaagcaagtgttggggagttacagtgacaatgaagctgaagtcacaagttaaggaatgataaacttttcttagtaaaatgattagtaaaaaaaagaaacatagcgaactgtttccttgcaagatgcctaccgagatacctaaaa

SEQ ID NO: 18613 - DNA, 256 bp, Glycine max
  unsure at all n locations
  Clone ID: 700874847H1
ctcgagccgtggcttccgaagaatcccagaacaagccccccagcgagcagtccactaccgaactcatcacgagcgcgaagctggtggcggaggcggcgcagtcggctctgaagagcgacagcgncaaagtggacaaggccaaggtggctgacgctgccggcgatcttctcgacgcggcggggaagtatggaaaacttgatgacaaacaaggcatagggcaatatgttgacaaggctgctgattatctgcataatta

SEQ ID NO: 18614 - DNA, 260 bp, Glycine max
  Clone ID: 700874849H1
ctcagcaactgaaacaattgaacttaacaggccagtacagtgatgtaaacatctacattgagggttatgggctcattgcacgagctcataaaattgttcttagctcctggagtatcccctttgctcggatgttacaaatggaatgagtgaaagcatgtcctcggaggttactttaagggatgtcccaccggaagctttcaaggctatgcttaactttttatatgatgggcaattgaatgacaaagttatagattctggtg

SEQ ID NO: 18615 - DNA, 257 bp, Glycine max
  Clone ID: 700874850H1
cttgaatgccttatcttccatgaagtgtcttctcttcggagctggaacacttggatgccaggttgcgcgcatgcttatggcatggggtgttcgaaaaattactctagttgacaatggaagggtggctatgtcaacccattgaggcagtctctttatactttggatgactgtcttaatggtggggaatttaaagctacggcagcagttgaaagtcttaaacggatatttccagcagtggaagcagaaggcattgttat

SEQ ID NO: 18616 - DNA, 159 bp, Glycine max
  Clone ID: 700874851H1
tatcgagccgaatcggctcgagaaaaacaaagcctgtccgtttcaactcgaattgtgaattacatattcaatgactaaaaaaatggaataaaaaaacgaagaattcaaagaatgattccaaattgaaggtagataagaacaaaggttctacatattcac

SEQ ID NO: 18617 - DNA, 200 bp, Glycine max
  Clone ID: 700874852H1
ttcgtccttcaccataatttgcatgaaatcaaacagtgataccagcaaatagtgacaagcagaaaattcatactgaaactaggaggttcattgtagaaggtggaagaagagaagttttccacgaagaaaaacaataacaacaatgaaagaaattatacaatgatcaacagcacaaaagaagctgattttccacacaacat

SEQ ID NO: 18618 - DNA, 253 bp, Glycine max
  Clone ID: 700874854H1
atggcaaaaatgcgttgcatttagcagctcgtcagggtcatgtggagattgtcaaagccttgctcagtaaagatcctcagttggctcggaggaccgacaagaaagggcaaactgcattgcatatggctgaaaagggcaaagttgtgatgtggtgaaattgcttcttgaggcagatgctgctattgttatgcttcccgacaaattcggtaacacggcgttgcatgtggcaaccaggaaaaaacgagtagagata

SEQ ID NO: 18619 - DNA, 252 bp, Glycine max
  Clone ID: 700874855H1
ccatcatcgaatcttcacccctttgttattacctcaacaatggctcccgttacgaagcaatcatttctgctgtcggccttgctcctgactgcatctgctcaggcctcctggtggcacaacgacgatgccaggatgttgccacgtggaacgctgcccgcctcacgcagtggctgcgcgacaatggcatcgccactcctacctcgttcaccagcgagcagctctctgagcttgtgcaagccaattgggacgcag

SEQ ID NO: 18620 - DNA, 253 bp, Glycine max
  Clone ID: 700874856H1
agaaagaggaaaaaaccgaggatttcacatagtacttttggtcgaaaaatcgatctgatttttttcgtacttttcgctcaatgatgaaatgggtcagattctacaggaccaaaccttgtgggagttaagaatgatggaagaaaagaaataaaaaaaagtaaataataatgcagtagaagagtcctgattccaaacgaaaaaattcaaacttgattgaaaaggatctttctgattattgaagaatgggacaaaa

SEQ ID NO: 18621 - DNA, 252 bp, Glycine max
  Clone ID: 700874859H1
ctagcctaggcacgttacattttatgtgtattgatgcatgtatcacaagggcttgattcaggttaaaggaagaaaattagcttcttggcatcaaaggaagctagcccatcatcaatctttgtatatgatcacaataaagatggtgattgatgtatcacaccaagcttgcttccttttgttcttaacagtgctggaattcggcttgcaaacatgtaactgatacattatactctagtgtttgagtgatccacc

SEQ ID NO: 18622 - DNA, 252 bp, Glycine max
  Clone ID: 700874860H1
gcaggggctaacttctacatcgttggtcgtgaccccgcaggcatgagccatccagttgagaaaagagatctgtatgatgctgaccatgggatgatagtattgagcatggcaccgggactagagcgtctaacattcttcctttcagggttgctgcatatgacaagactcagggtaaaatggcattctttgacccttcaaggcctcaggacttcctgttcatgtcaggcacaaagatgcgcacactggcaagga

SEQ ID NO: 18623 - DNA, 101 bp, Glycine max
  Clone ID: 700874861H1
ccgtttggctctacaagtctttccttttctatttaattcctaaaatcccattcttcttcgctcattcctctgcactgcgatcatcctcaacttccacacaa

SEQ ID NO: 18624 - DNA, 254 bp, Glycine max
  Clone ID: 700874862H1
cgataaagcaaaagcgcatttccgctgttgtatgtgtgtgtttgcgatgccaggtggggcaaccgtctgctccggtcaccggtttctctgcgttgttctgcattcgactcgtccccgactcagctacccgctcggtcgcgacccgttccggttcaacttggatccgtgtttgtgtcgaatggtaatggcgatagtaagcggttcagctccaagttgagcctcattcccagagccgttgattcttccaccgcaca

SEQ ID NO: 18625 - DNA, 81 bp, Glycine max
  Clone ID: 700874863H1
gttattttaaaaaataacacacacttcacacatcattacgacaattaaaagaggtgtggaaatgatgtgtgaagtgtgtgt

SEQ ID NO: 18626 - DNA, 260 bp, Glycine max
  Clone ID: 700874864H1
tgagaaagaggaaaaaaccgaggatttcacatagtacttttggtcgaaaaatcgatctgatttttttcgtacttttcgctcaatgatgaaatgggtcagattctacaggaccaaaccttgtgggagttaaggaagatggaagaaaagaaataaaaaaaagtaaataaaaatgcagtagaagagtcctgattccaaacgaaaaaattcaaacttgattgaaaaggatctttctgattattgaagaatgggacaaaaggatt

SEQ ID NO: 18627 - DNA, 258 bp, Glycine max
  Clone ID: 700874865H1
acaaaatattgggctgttcaacaagcccagcatccgaactgaagcggatacctcgtttgtgcgccagttccagtgtgtgcaaagtgcagtgatagatagctagctcgctagctagggttagggttagggttgggtttctgcgtttatgcgaagatgactaagttcaggaaattgggtcgacccaccggtcaccgaatgtccatgctcagaaccatggtctcgcagttggtgaagcacgagcgcatcgaaactactgtc

SEQ ID NO: 18628 - DNA, 257 bp, Glycine max
  Clone ID: 700874868H1
gcatctaagtgagatacacagtagttaggtagcaagcataagtgtctaaccttagaaacatatctgctacatatcgtgtgcattttggaattgtgcgactaaaattctattcatctatggctgcctcatgctatgctatgcaatcaatccttgcaaaccctatgatccgcatttccagcgggtctagggagaaccattttggtgttcctgcttatcacatgagaaggaatgttggcctgagagttaggtccatggct

SEQ ID NO: 18629 - DNA, 253 bp, Glycine max
  Clone ID: 700874869H1
atcaaatttcatcagtgtgtgcgtttggcccgatttgagaatgatcggacgatttcatttatccctcctgatggatcatttgatttaatgacatataggctcagtacacaggttaagcctttagtttaggtggaagcacaagttgataaacatgcaaaaagccggattgagattatggtaaaagctaggtgccaatttaaggaacgcagtactgccacaaatgttgagattgagttgcctgttcctgctgatg

SEQ ID NO: 18630 - DNA, 253 bp, Glycine max
  Clone ID: 700874870H1
cttcactcttaactgtagaaaagaaaaaccgaagatgagcttgttgaatgaggagagaaaaccgcacgctgtggttactccatatccagttcaaggacatgtgaaccctttgtttaaactagcgaactggcttcatctcagaggctttcacataacctttgttcacactgagtacaactacaagcgtttgctcaagtcaaggggtcctaatgcccttgatggcctaccagattttagatttgagagcatccca

SEQ ID NO: 18631 - DNA, 251 bp, Glycine max
  Clone ID: 700874871H1
gcctccacaggtcaacgagctggatggtatctcattgggggagtgggagaacgagaaagagattgatgaggtcgctgcacagtgtggacttcagagggttggtgtcatattcacagatctcctggatgcagacaagggtgacggctcggtcatttgcaagcgtcacgccgactcgtatttcctttcgtctctcgagatcaccttcgcagcaaggtaccaagcaaaatacccaagaccgtccaagtggagcg

SEQ ID NO: 18632 - DNA, 250 bp, Glycine max
  Clone ID: 700874872H1
ccaaacaccatgtctgtagaagagaagaaggaacgagcagatatgacactgagagaaatgggtctacaagatgccatcaacacaagggttggagggtggaattgtaaaggcctcagtgggggacaaagaggagacttagcatttgcatttagattctaacacacccaaaactcctcttccttgatgaaccaactagtggacttgatagtgcagcttcctattatgttatgagtggaattgcaaatctaat

SEQ ID NO: 18633 - DNA, 259 bp, Glycine max
  Clone ID: 700874836H1
ggaccgcacaatattattaaaacttaaacttcatatttatttaaacactgcacaccaaattagagcaagctagaatcagttacaagtatcctatagttaaaattgaacttgttttgcagagccatggacccgaaatagtaaagaagctaggaagctctcttctggtgccttctgtgcaggaattagcaaagcaaggcatcaccaaagtcccagaacgatatgttcgacccaatgaagacccatgtgttgaatatgacac

SEQ ID NO: 18634 - DNA, 259 bp, Glycine max
  Clone ID: 700874805H1
cggctcgagcggctcgagctcgagccgaatcggctcgaggcggctataagattaaagattcaacaatggccctctcttatgctactacttctcaagtcatctcctgttcttgacaagtgcgagtgggtcaaaggcagacccttcgccaacctctcgtgagatgtaacccttcctcagcatcagctctcaccatcaaagctgcttcctatgctgacgagctcgtcaaaaccgccaaaacagtggcctcaccggggcgtgg

SEQ ID NO: 18635 - DNA, 257 bp, Glycine max
  Clone ID: 700874806H1
ctagctagcgactccgagatgccaagcaaagaggattcacctttagtagaagcaaagcttccactattagaagctcaacctttaacagatgaaagagaacaagaccaaagtttcccacgaaggttttggcttagtcaaagaggctttggcacatagtaggcccttcaattttcagccgtattgcatcctactccatgttagtcataacacaagcctttgcaggccaccttggtgacctcgaactcgctgccatctcc

SEQ ID NO: 18636 - DNA, 257 bp, Glycine max
  Clone ID: 700874807H1
gtgcggcgcacagaacccgttgaaggcttgaagccaccccgacgccgtcgaagagagagcgagcaacaatgtcagacagagaagacaacgcccctgaggaattcactgccgaacagggtatacaacaagacgagagattcgaaggattcaaagagaaaataaggccagggttgttcgtgaaggaaaagagcgtcggaggagatgggcccaaaaaataactcctcgaccatccaaagctggtgaaaaatccgaagacg

SEQ ID NO: 18637 - DNA, 241 bp, Glycine max
  Clone ID: 700874808H1
ggctcgagactgactaggccttgatcatgatctacatgcttacatgattacccacatgtggagaaagaggagatcctttgttattattttcttattcttttgggatttgcgttggtctcttaatggttattttagttgtatagaaacaaagtaaaactattaattactaagttgcagtataaaatatgttggttttgtagagattcgtatttcaggtttgttttctggtggacttggccaa

SEQ ID NO: 18638 - DNA, 257 bp, Glycine max
  Clone ID: 700874810H1
ggcagtcttgcactaattaggctactcttaatttcttctccttcactctcagagaactcatatggccgccacactcactcttctaaagcttccaatccttcctaacaagccattactgccacgcccatcaactcaaaactttttccacttccttccatctattcaaaattaaatatcccaaaagattatattgtttctcctaacaacatcgatgctctcaagcctgcctttctttccctctcggcaatcacatttcc

SEQ ID NO: 18639 - DNA, 254 bp, Glycine max
  Clone ID: 700874811H1
agctcctttctctgttcctaagaggagttatgggggcaaattgaaaacgcattcaattacaacaaacacgtttttttttttggttaatgttgttgcattctcttttccttttgccgtaaacgggggccctccttttctcataagccactgaaaaattttgctcctttcgcccctaaactttaacagaggtcgttgttcaccgcaattcctcaccccaatggaagattcaagtgatttgcaatcagaagaaaata

SEQ ID NO: 18640 - DNA, 256 bp, Glycine max
  Clone ID: 700874812H1
ctcatttgctgctctttttgcaatacttttactactcatctctcctgagcttgcaagtgctgcccaacctagtcttattcttcaactcggccgaaaacttttccaatgcggcagcgcgccgtccctgttcgtggaaataccccatccaatggccgctcctagaggatataccccaccaccaaaacacccactctatggctgaatatttgagatgttagcatccttctttaattttgtgataaaaaaaatactttta

SEQ ID NO: 18641 - DNA, 191 bp, Glycine max
  Clone ID: 700874814H1
gtccatctgagatgcctcatatattatttcattattgtgtaccacttttcaaacttgcttggggtttgtaacaacaacaaccaccaaaaaaaaaaaaactcgtttagagtttgtttgtgtacgtttatattaaataataatacgtgtttggtggctttttagcctaattatcaataacaggcatttgtttt

SEQ ID NO: 18642 - DNA, 258 bp, Glycine max
  Clone ID: 700874816H1
gtcgaaccagacacacttccacgtcaccaccaccctcgtggaaggtggagcgtgaggctgtttccggtaacctctcccggcggcgctgagtggtgatcaaggaaatgggtcagacgctgagttgcgtgcaacagacgaggaccatggtgtgctcttccctgcacttgcaagtggagaattggaggttgttgaggccatggtggaggaagaccccactgtgttggaacacaccattggctgtgacaggctttctcctct

SEQ ID NO: 18643 - DNA, 265 bp, Glycine max
  Clone ID: 700874817H1
gaaaccctaaccctagctcctcgcccccatgcccatggctaagaaacgaaagcttcgatcctccaacccagaacccaccaaacccgtcgagccacagcaacagaaccatgagcctgttgaactcgaccaacagcaaccatccccgaaccaaccctagaagactccaacaccatggccatcgacgaaccaaaacatgaacaagaagaagaaccgcaaaacgccgaaagcgaacaagaggtagaggaagaggaagaggtagaagatg

SEQ ID NO: 18644 - DNA, 261 bp, Glycine max
  Clone ID: 700874818H1
ccgtaagcgataagcaatagaattcagagagagagagaaagagagtctcttgctctgtatctttgatttgatcattccaatcttcaatttttctatatatccatcaatccgctgagtgcaaagttctaatctttgcctattgggttctactcctttctctcttcgtttccgatcgatccaattttcttcccatggctacgatcggacacaacaatctcaatgccaaattggttcttctcggggacatgggtgctgggaaat

SEQ ID NO: 18645 - DNA, 178 bp, Glycine max
  Clone ID: 700874819H1
tctcgagccgaatcggctcgagagaaaacaaagcctttccgtttcaactcgaattgtgaattgaatattcaatgactaaaaaaatggaataaaaaaacgaagaattcaaagaatgattccaaattgaaggtagataagaacaaaggttctacatattcacaaaaaaaaactatgtatg

SEQ ID NO: 18646 - DNA, 260 bp, Glycine max
  Clone ID: 700874820H1
aattaataaaattagtcgtgttttattcgattttttgaattggtttttttttacagtagctaatgctagtcaccgaacttagtcaatgagctagaatgggttataaagatatctatagatatatatagatatattatctatagatatctttagaaaaaaaaaaagagaataaacaaataagacgtatcattttatgtatagtagtgctgaattatgggacaaaaaataaatccgcttggtttcagacttggtacaactca

SEQ ID NO: 18647 - DNA, 233 bp, Glycine max
  Clone ID: 700874821H1
ggcaaagcaaacttggcaagtaaatatttctgttcctgaaggttgtgctgatccaagtgctagaagttgtgatgggacttgcgtgtaacattcttagaattctcaatgtcttaggtgcaaagagaagatgcaagtttgagatgattttactatatttttcatattggactgtcttcctctataattttgagttaaagtgtccacttaaattgaatttggtgccttttcctttt

SEQ ID NO: 18648 - DNA, 255 bp, Glycine max
  Clone ID: 700874822H1
gttgtgaaagcagagaagtgagatacactaagttatcctcataaatacactctaattaggtggcaagataagtgtctaaccttagtaacattgccacatattgtgttcattttggaattgtgccactaaaatctattcaattcatctatggctgcctcttcttatgctatgcaatcaatcctggcaaaccctttgatccgcatttccagcgggtctagggtgaaccaatttggcgttcctgctttgcacatgaga

SEQ ID NO: 18649 - DNA, 255 bp, Glycine max
  Clone ID: 700874823H1
gccttgaggaacgttccagaccacatacagagttttctctagtgatcttcgttcttctgtggagatcttgttttttcatctcacttttcttctaattaaggaacaagctttccgcagttgaaaaccctagcagctagcttccaccaatttgaatcaccaatggctcgctctttctctaacgtcaaggttctctctgctcttgtggccgacggattctccaacactctcaccaggcgtgggtacgcagcagcgaca

SEQ ID NO: 18650 - DNA, 256 bp, Glycine max
  Clone ID: 700874824H1
ggttatcaccaatggtaagtacaagagtgtggagcaccgtgtgatagcacaaacagatgggaccagaatgtccattgcctcattctataaccctggcagtgatgctgtcatctaccctgctccagaattgttggagaaagaggcagaagagaaaaaccagctctacccaaaatttgtgtttgaagactacatgaagctatatgctaagttgaagttccaggccaaggagccaagatttgaagcctttaaagcatca

SEQ ID NO: 18651 - DNA, 257 bp, Glycine max
  Clone ID: 700874825H1
caatgggttcttcttctattacaacatcgctctcaaccatgaccatggctgcgatcgtgctcctgttcacggtctttgccgtttcctccgccctagacatgtcgataatctcgtacgacagcgcccacgcggacaaggccgctacgttgcgcaccgaggaggagctgatgtccatgtacgagcagtggctcgtgaagcacgggaaggtgtacaacgcgctcggcgagaaggagaagcgcttccagatcttcaaggac

SEQ ID NO: 18652 - DNA, 255 bp, Glycine max
  Clone ID: 700874826H1
caacgactggaggaaaacagcactttgtttaacatccattttctttcttgctgctgtaatatggttcataggaatctttttgaaaagtgatgtatatgacaaagatgatgaggagcaatctgccacaactagaggaggaaaactgacgccattgcttgacggcagcagtgacactacatccagtcaagtttaattcttttcaaattttagtactataactatgcttcaagtgtatattaacttctagtgtgaaga

SEQ ID NO: 18653 - DNA, 256 bp, Glycine max
  Clone ID: 700874829H1
ttgtttaaacctaattctcatttcttcatcgttcgattcttctcctcctaaagatgcagatcttcgtgaaaactttgaccggtaagaccatcacccttgaggtggagtcctctgacaccatcgataacgtgaagctaagattcaagacaaggaagggatcccacctgaccagcagagacttatctttgcgggtaaacagcttgaggatggtcgaacccttgccgactacaacatccaaaaggaatccactctccac

SEQ ID NO: 18654 - DNA, 258 bp, Glycine max
  Clone ID: 700874830H1
caaaggtgcgagaagaaagtaggaatgatgaagagaagaggtgactgatatcattcactgcagcagagagcagagcaaagaaaagagaaaagaaaacctttggatcccaaaaaagccatattttttcccacccctttctctcttcccaaacaccgccgtatttcgctttctcctttcttttatcccttccatgccatacttctcttcaattcctcttttttaatcttctctctaacctttcctccttcataagagaag

SEQ ID NO: 18655 - DNA, 258 bp, Glycine max
  Clone ID: 700874832H1
gttagcgacgctcatgaggggtcttcgaggccagaatttgagggactcgctcttcgctgaggacgatgttgaacttcgtcttgttgaggtagacgagagtagtgagtttttgccattggtgtatgatcctgccagatttctgcatattggggaaaacgtccacgcgcggttgcaacgcgcattgtgcagttgctatcagttgcaggaggttttctttctcgcattgccggggatgtgattaacaagaaggttaaagag

SEQ ID NO: 18656 - DNA, 260 bp, Glycine max
  Clone ID: 700874834H1
gtcagcacatacagttgctgtcatggtcccggagtcaattcacaacaccaaatcgccatcatgattgaggaagtcttgaagaagacctcggagatgttcccgctgcccacggcaacggcctcatctctgccttggttgctcccgttcccactgtcatccccggcagcgagcccgtctacgaggttgctggcgatgctggacagaagacgctttgggtcgtctttgtccttatgctgatcgcctctgctggattcactgtc

SEQ ID NO: 18657 - DNA, 258 bp, Glycine max
  Clone ID: 700874835H1
atacttaatgcttaagccatggcatcctcatcctctctgcatctatctcaggcccttctggcacgtgctgtgtaccttcatctcctcttcttcttctgtccgtgtctcactctccttcccatcattctctggcctcaagtcacattctacatgcaaagcagcatcagccacgtcctcgcgtagaaggggtgcttgtccatccacacaacatacgacgtgcccttctacgcgtggtcgtggctgctgctgctttgcatt

SEQ ID NO: 18658 - DNA, 259 bp, Glycine max
  Clone ID: 700874804H1
cggctcagctgtgaaaaacggggtcgcgaatcctatctggtgattcagaaaaggtgaaccataggatgaacggtatggaatctccccaaaaagatggcataaagaaatccaaaaaacaaagaaccccggggctggtccacgagcaagtttcaccggggcccatcacaaaggatgaggaagaggttgtggaaactctatatgcctttgctggaatagttcccttcagataacgcctccaatgttgttaagagtgaacttg

SEQ ID NO: 18659 - DNA, 252 bp, Glycine max
  Clone ID: 700874764H1
gcgttgccattctcatcctcctctgtctctctctctccaccattgccatggatccttacaagctccggccatccagcgctttcaattctcccttctggactacaaattctggtgctcctgtttggaacaacaactcctctttaaccgttggagctagaggtccaattctgcttgaggattatcatcttgtggagaagcttgcaaactttgacagggaacgtatcccagaacgtgttgtccatgccaggggag

SEQ ID NO: 18660 - DNA, 99 bp, Glycine max
  Clone ID: 700874765H1
cttatctttgtcaaatattagggtttggtagggttaaggaaagacattaaattttatatattaaggtgtgattcggtttgattttaacaataggaagtg

SEQ ID NO: 18661 - DNA, 253 bp, Glycine max
  Clone ID: 700874766H1
gcaccaacaagggaagaccgcattggtgtttgcaccggaattttccgcactgatggtattcctgaacaggacattgtcaagcttgttgacaccttccctggccaatccattgatttctttggtgcactgagggccagagtatatgatgatgaagtgaggaagtggatttctggtgttggtgttgacagtgttgggaagaagcttgtgaactcaaaagatggacctccaacctttgagcagcccaagatgactc

SEQ ID NO: 18662 - DNA, 251 bp, Glycine max
  Clone ID: 700874767H1
ggtcagtgtcgattcttccggaaagactgctttgaggatggcgatgcaaactagggagcagcatatcaggagggacaaggccaccagcaacatttgcactgctcaggcactgcttgcaaacatggctgccatgtatgctgtgtatcatggacctgaaggcctcaagaacattgcacaccgtgttcatggtcttgctggggcatttgctcttggaataaagaaacttggaactgtggaaattcaggaccttc

SEQ ID NO: 18663 - DNA, 86 bp, Glycine max
  Clone ID: 700874768H1
gaaaattctctttagagagatagagagatagagagagagagaaagaaattaagaaaaaatggcagcctgcactgtctactccacac

SEQ ID NO: 18664 - DNA, 250 bp, Glycine max
  Clone ID: 700874769H1
accttaacatgtttttttgtgccgagggattttaaacctttgtactttctatgcttaattattattgttatcaactgtgtgacaggttgcaaggattttcctgttcatgttccttttttaccacatagggacccgtttggatgaggtgaaggaagtctttctttttggtttttacaccttgatcatggtgccttctgtgttggcagttttgaacatattttggttctggaagattgcaagtggcatggtt

SEQ ID NO: 18665 - DNA, 252 bp, Glycine max
  Clone ID: 700874770H1
ttttctgcatgtttgttctctcaacgactcctccgcgaaagagtattattcaatattttggttgggttgaatcccggggttgaagcgttgcagacatcacggctattctaagagtgtctcgctccctcattcatgtccgatctgtacgacggaggacgggtagttgcgtaactgccgttaacccttcgccgcacggtgggcgtggtgctttgccttctgaaggtggtagcccttcagacttgctcttcctcg

SEQ ID NO: 18666 - DNA, 254 bp, Glycine max
  Clone ID: 700874771H1
atacttttgcgcatatccaatttgaccgagtacggctgagcgtcaaatccgcgctctcgccaaatcatttcgcggtcacgtcctcagaccactggcgcaatatgttggaccatacaatacccaactatctgttcatccgcggcgttatctttggcttccaagcagtcacacccatatgcatcttcatcgcgtccttcagcatagccgagccgccgcaatcgcccttccgccgatttctcctcgtatggagtctg

SEQ ID NO: 18667 - DNA, 247 bp, Glycine max
  Clone ID: 700874773H1
gctgacttcctctttgttttctgatctatggcttccaaggagttctctggtctttgctccttggctccttcactatctgagagcattttgtgcactactgggttgaaaatgtatatgctggagagcaaaggaggtgccatagcatgcatgttcttgtctcttttcttcttggggacatggcctgctcttttgactatgttagagaggcgtggtcgtcttcctcagcatacctaccttgattactcaa

SEQ ID NO: 18668 - DNA, 243 bp, Glycine max
  Clone ID: 700874774H1
ccaaagttgggcaagaagaggtcctcttccaatttgaagctagcgaggatggacaagtccagttctttccaaatgctccagttgatgttgacaattctcccagctttgttgccatcaatgtcagtcctattgagtatgggcatgttttgctgattccgcgcattttcgagtgtttgcctcaaaggattgaccgtgagagcttcctccttgcacttcacatggcagtggaagctgataatccat

SEQ ID NO: 18669 - DNA, 243 bp, Glycine max
  Clone ID: 700874775H1
ctaggccacaaccgaggcagtcttttattttatatagtataattcattctgtcatatatatctgtgtgtgtaacaatggtggtctttatttgcaaggaagaatatggtgttcccttgagcaatggctgggctgcaacacatgaatttggccacaagttttgcatctcaaatgaaggtgatgatgacgatgatgataatggcgtcatcgatgtggccccagctgcatagaagaatttggcagaa

SEQ ID NO: 18670 - DNA, 242 bp, Glycine max
  Clone ID: 700874776H1
agcgatcgaagtttcacatcagccttatccagtttagggtttcggttccttaccctacctttgacgtatcgaaaccttaaatttgggattaggtctgagcaatctggttggtagaacctttggtcttagagagtcaagttttatgtctggattagacgatcaaattcctactgccttcgatccttttgctgatgcaaatgctgatgactcgggtgctgggtcaaaggagtatgtgcatattc

SEQ ID NO: 18671 - DNA, 246 bp, Glycine max
  Clone ID: 700874778H1
gtcgtgtcttcttctctaaaataaaaaaccctaacttctgaacctttcaccgcatcgccaccgattccctatctccactaatcaaagaaaagaaaatgagtagacgctcgagcagaactgtctacgttgggaatctacccggtgatatccatgaaagagaagttgaagatttgtttctgaagtacggacacataacacacatcgacctaaaggttcccccaagaccacctggttatgcatttgtag

SEQ ID NO: 18672 - DNA, 247 bp, Glycine max
  Clone ID: 700874779H1
aaaggtttccagggtaaagagcatttcattaaataagaacaaagaagtgaaattagccaaacgaaagcaaaactatgataatgctgcatctggagggtttgttcctgattatagtcaaggataccaaaaagttgtggatgaagatacaagcaatagatcaagctcagggtcagctgtctctaactcagagagctgtgctcaatttggtgggactgatgctagtgatttgacaggtcctgctcagtca

SEQ ID NO: 18673 - DNA, 224 bp, Glycine max
  Clone ID: 700874780H1
ggctcgaggcgtacatgctgaaatgtatgtggtggagagactggtgcgcgccatagggtgcatgctggtgtccatcttcttcctcgggacatggcctgctgtcatgactctgctagaaaggcgcggtcgtcttcctcaacacacctaccttgattacaccctcaccaacctcatggctgctgttatcattgctttcacctttggtcagattggcaacgctcaac

SEQ ID NO: 18674 - DNA, 250 bp, Glycine max
  Clone ID: 700874781H1
ctcgagccgtgcaaagaatgctattctcatgaatatgccaaatgctgttctttcaatgtggagatattttgttggagatctcgtctttgaagtttctaagatgacttctccctacattaaatgtacagtctctttcttcatagcatttggaaatttggctgatgacagtctcaattttgaggcttttccccacaagctggtgcagtttggagagattcaggaaaaagttgtattgaaattttcacaagag

SEQ ID NO: 18675 - DNA, 248 bp, Glycine max
  Clone ID: 700874785H1
ctctttttcttctctctcaacaacttcaccttcttcctcctcgatcatgtctcacttcaagggcaagtaccatgatgagcttatcgccaatgctgcgtacattggcactcctggaaagggtattcttgctgctgatgagtcaacagggacaattggcaagcgtttggccagcatcagtgtagagaacattgaatccaacaggcgagctcttagggagctgcttttcactgctcctggtgttcttcaat

SEQ ID NO: 18676 - DNA, 251 bp, Glycine max
  Clone ID: 700874787H1
atcatattgagaagggaaatattgacctgagccaactaaagtttcgtgtccttgatgaagccgatgaacatgctgaggatgggttttgttgaagatgttgaaatgattctaggcaaggtagaaaatgttaataaagttcagacacttcttttcagtgctactttgccagactgggttaagcaaattgctttaaaatttttgaagccagataagaaaactgctgaccttgttggaaatacaaaaatgaaggc

SEQ ID NO: 18677 - DNA, 247 bp, Glycine max
  Clone ID: 700874788H1
gcgcgggtaaacggcgggagtaactatgactctcttaaggtagccaaatgcctcgtcatctaattagtgacgcgcatgaatggattaacgagattcccactgtccctgtctactatccagcgaaaccacagccaagggaacgggcttggcggaatcagcggggaaagaagatccctgttgagcttgactctagtccgactttgtgaaatgacttgagaggtgtaggataagtgggagctggaaacag

SEQ ID NO: 18678 - DNA, 234 bp, Glycine max
  Clone ID: 700874790H1
cggctcgatctctagtcgattcggctcgaggggatcagttgagcactgtttaagagatgctaaactggacaacaggcctgtccatgacgttgtcctggatcgtggttcgatgagaattcccgcggtgcgactgctcctgcgagatctctcgactgggaccgtatctctgccacagcatctatcctgctgtggctgtcgcatatgagcgtgcagtgcaagctgctatccagaggg

SEQ ID NO: 18679 - DNA, 242 bp, Glycine max
  Clone ID: 700874791H1
aattctattcacgcatccaccccgcaaggccgttgccatgatatctgccacctgagtgtcttcgctcacaaacactcgctgtcttctacagcgtgccgcttccgtacggcctttacctattctctcgacgtcacggcgatcacatagcaccttctctcaagcccaagcttcgcagagacttcacggcacccaacgacaaacagacgcgcaattttctaacagccagctgaagcatcatggct

SEQ ID NO: 18680 - DNA, 240 bp, Glycine max
  Clone ID: 700874792H1
gcacccctccgaactcgctcacggcgctaacaacggtcttgacatcgctgttaggcttttggagccactcaaagcggagtttcctattttgagctacgccgatttctaccagttggctggcgttgttgccgttgaggtcaccggtggacctgaagttcccttccatcctggaagagaggacaaacctgagccaccaccagagggtcgcttgcccgatgccactaagggttctgaccattt

SEQ ID NO: 18681 - DNA, 243 bp, Glycine max
  Clone ID: 700874793H1
gtactgcgtttcggaagcaggtaccaaagtagtccttcgaggtttagtgatctgttttgcgcttttgaaaatttgaatatatgattctgcttctagttctgaaacttgtcttaagcatggtttagggtttgagcatagtttagggtttgagcatgattaaatcgattttcacttatcttctatagtttctgctgatttccaaatcttgtatcttagataggccagttgaatttttattcttcc

SEQ ID NO: 18682 - DNA, 245 bp, Glycine max
  Clone ID: 700874795H1
gtggcagaaggagctctgcaactccgtcaacctcatcggcaatgtcgcggcccccgtcgaaatcaaacacctcccctccggcaaggtcgtcgcctggacccgcctctgcgtcaagaaaagcgccacgcaatcatcgtccataagcctcacattctgggacgacctcgctcatgtcgcgtcccagcatctccagaaaggttaccaaattcatgtctccggtcgcctcataatcgacacggtcgaaa

SEQ ID NO: 18683 - DNA, 245 bp, Glycine max
  Clone ID: 700874796H1
gcactgggccacgaccatgcccagtatgttaccttcccgtggatgaagccattgcacttatgccaaagtttccgtcaccttctccagtacttaagaacttagcatttatctatgaggaaactcttagcagggatggtgaatttggtggttcggactttggtggatatcctactttgaggcagagaaatgaatcttttgatatacgagagtcaatgagtgtgcactgtggatttgttagaggaact

SEQ ID NO: 18684 - DNA, 265 bp, Glycine max
  Clone ID: 700874801H1
gttggaccccagtgtggtctcatccagataatatatgtaaggattatctttctgctacaagtagtggcgtttgtggatataatagcatttgcagtttgggagattataagaggccaatttgtaagtgtccaaaatggactcactggttgatcctaatgatcctaatggtagctgcaaaccggattttgtacaatcatgttcagaagatgaacttagtcatatagatcctctctttgactaagttcatcttctgaacatgattgta

SEQ ID NO: 18685 - DNA, 250 bp, Glycine max
  Clone ID: 700874763H1
cacacaatgtcagcaccatccggtaacccaagcgaagtcaagaacgcctcaaacgttgttgtcccagccaagacagccccagttgcagtcgcccaaaaggattcaaccatcgttggtttcctaaaggatttcgttattggaggtgcctcaggtgccgttgccaagaccatcaccgcaccaattgaacgtgtcaagattatcatccaaactcaagacgccaacccacgtatcatctcaggtgaagtcccaa

SEQ ID NO: 18686 - DNA, 252 bp, Glycine max
  Clone ID: 700874731H1
gccgaggctacaagacaaagtcttggaccaagatcactccaatctccatttggcttctcaagaaaagcctcctttcttgttaaggcagctgctactccccctgtcaagcaaggatcagacagacctttgtggtttgcatcaaagcaaagtctttcctacttggatggcagccttccgggtgactatggatttgaccctctgggactttcggaccctgaaggaacaggagggttcattgagccgaaatggcta

SEQ ID NO: 18687 - DNA, 268 bp, Glycine max
  Clone ID: 700874733H1
atctcacattctgtgattcgggtaatggtgattagtggaggcgatgatgggcagaagaagcctgctctcgacccggatattggatgctccggaatgacccggatcacgagttcgactgaagttcgggtcgggttgcttgctggggtgctgagttggcctttcagcgagttgtagggtgaggtgaagactcatgttggatatactcagggtcacactccggatccgaattactgactggattgataccggagacactaaccacgttgaa

SEQ ID NO: 18688 - DNA, 260 bp, Glycine max
  Clone ID: 700874734H1
tattgatagaacttttgaagtagcccaaaaggtctgggcagaggttttcttctaccttgctgagaacaatgtcctttttgagggtattctccttaagcctagcatggttacacctggagccgagtccaaggacaaggccagtcctcagacagttgctgattacaccctcaagctccctcacaggagaattccccctgctgtccctggaattatgtttttgtctggtggacagtctgaggttgaagctaccctcaatttga

SEQ ID NO: 18689 - DNA, 221 bp, Glycine max
  Clone ID: 700874735H1
atttttatgtaatcataattatttttaaacaggtacatgtacatgtacatggccattattctaataaaatatggtgctttctatgtaccctaaaaaaaaaaaaaaaaaaaaaaaaaaaaaaaaaaaaaaaaaaaaaaaaaaaaaaaaaaaaaaaaaaaaaaaaaaaaaaaaaaaaaaaaaaaaaaaaaaaaaaaaaaaaaaaaaaaaaaaaaggggggggg

SEQ ID NO: 18690 - DNA, 257 bp, Glycine max
  Clone ID: 700874736H1
ctctgctgcagcagacgacgcaggtgcagattcgcttctttatccaagtcttgcagcagatgtccaagaatgtgcccatgtccggagttctgtcccctgcctcttttggagagaaggatcccatgacacagaagctgagcgatgccatgagcaagctcagcacgtgtgaaaaccgtcattccatgggtctcggtcgtcctccgccatccccgggtgctggaaaacgcaactcgggcttggagacatcccagatcaac

SEQ ID NO: 18691 - DNA, 254 bp, Glycine max
  Clone ID: 700874737H1
gaaacggcgaagatacatggatcttatccaagaggaagaagaggaagaagaagaaggggttgtggttcggaggaccagtgttcggaagagcggcttggtgaagaagcttggggatgattttgacagggttgccctggaaaacgatgagtccaatacggtgtcgtcgttgaagacgactcgtggtcggaaattggttaagaatggtgaacttgggaacaaaacggtggttgaagtagctgaaaaatcaaacacca

SEQ ID NO: 18692 - DNA, 257 bp, Glycine max
  Clone ID: 700874738H1
gaaccatggcttcatgtaccgcacctccctccctcatgctcgtccactctcaagacctttctccctctcttcgctccttctctcacaggcccatttctagaaccacctctctctctctatcctctccttttgaagccctccaaatggctccatatagagcccaaatccaggacttgccatgccctcgtcgccgctttgtctgcagaggtccaagtgcccgaaactttcgacgacacggaggaggacgacggtgctga

SEQ ID NO: 18693 - DNA, 256 bp, Glycine max
  Clone ID: 700874740H1
gaacaacattcttggctttgtggtgatctctatacttatatacatgcgtgagatcacttgggaattctccgctgatgtgctagtcgtggcaatagtttgtgctgtaacgggcctcactgctagttttcgacccacttttcctctttggacattcttccctgcatacctcatgtacctagtagcattgcttttggtcttcgtcctcaaagatgttctcaattatgtttagtgaccaggctggcataacaaaccatgg

SEQ ID NO: 18694 - DNA, 249 bp, Glycine max
  Clone ID: 700874741H1
gctcactgatgctgttcttcctcccacgaaagactggaggaaagaaggaatagtgagtgatgttaaagatcaaggcagctgcggatcatgctggacattcagcacaactggggctttagaagcagcctatgcacaagcatttgggaagagtatctctctttctgagcagcagctagtggattgtgctggccgtttcaacaactttggctgtaatggtgggttgccatcacaagcctttgagtacatcaa

SEQ ID NO: 18695 - DNA, 249 bp, Glycine max
  Clone ID: 700874742H1
actcgaagtaaatgagataaggctgaaagatgcttccaagctgagggaaaatgaggcatatggaagcgatcaaaatagaaagaaatttaaagatgtttatggagaaggaaatagacttcaagaagcaggtgacaacaaagggattcagaaagttatgaatcaaaccccaatgcaagaacagattaatgggatgttgaatgaggctcaaaggaaaaaagtcactgagggaacatcaagccaaacattagc

SEQ ID NO: 18696 - DNA, 248 bp, Glycine max
  Clone ID: 700874743H1
tttggaaatgacatgggaactttatcagaaaagagaattggtagggcttgtagacatatcactagatggccatttcgatgccgaggaggcatgtaagtttctgaaaattggacttctttgcactcaggacacgtcgaagctccggccgaccatgtcatctgtggtcaagatgctcacaagagaaatggatattgatgaaagtaagataacaaagccaggcttgattccagattttaacgaccttaaaa

SEQ ID NO: 18697 - DNA, 251 bp, Glycine max
  Clone ID: 700874745H1
atctcgagccgattcggctcaggttttatacttctcaaccttctccctcacacgctcaccccccttactcgaaacgctcacaacggtgtcgtttagcgaatcttcctcgaaaccgggatctaattcccccaccttgaaatcctccgtcatcacgccgttaccgtccaacacccccatcctctccaccggcggtaacggcggcacgcggaatattttcactcccggcggcggaggagacggtggaggcggcg

SEQ ID NO: 18698 - DNA, 248 bp, Glycine max
  Clone ID: 700874746H1
gatcattctcgcaaatcggctgaacaggctgtgaaggccatcaaggcagctgaggaaggaaaaacagttgaggagtatgattaccttccatacttctattcccgttcattcgatctgtcttggcaattctatggcgacaatgtcggcgacacagtgctattcggagacaacaatcctgcgtcttcaaagccaaagtttgggacatactggattaaagacgggaaagttgtcggggtctttctggaagg

SEQ ID NO: 18699 - DNA, 249 bp, Glycine max
  Clone ID: 700874747H1
gtgtgaatcagcaaggaccaccttgcaaggctaaatactcctgggtgaccgatagtgaagtagtaccgtgagggaagggtgaaaagaacccccatcggggagtgaaatagaacatgaaaccgtaagctcccaagcagtgggaggaggctcgggactctgaccgcgtgcctgttgaagaatgagccggcgactcataggcagtggcttggttaagggaaaccaccggagccgtagcgaaagcgagtcttc

SEQ ID NO: 18700 - DNA, 254 bp, Glycine max
  Clone ID: 700874748H1
gcaaaaatagcgtagagatgctgaattagattccgatagggtttttgagacgtgaaaggggtaaaacacggtgaaaattgatttggacaagaagtttatagaggagaagtgtgatatagagtgagtattgagctgactttgttttacatacgttattggatgcagaggaatctgaaacagacagcgaggagtctgatgttagtggctccgacggagatgacacgtcgtggatctcgtggttctgcaatttgaga

SEQ ID NO: 18701 - DNA, 259 bp, Glycine max
  Clone ID: 700874749H1
aaacgatctaaacatgcaaatttttgttaagactttaaccggtaagaccattaccctcgatgtcgagccttctgactccatcgagaatgtcaaggccaagatccaagacaaggaaggtatccctcccgatcaacaaagacttatcttcgctggtaagcaactcgaggatggcagaactctttctgactacaacattcagaaggaatctaccctccacttggtcctcagactgagaggtggtatgcaaatcttcgtcaag

SEQ ID NO: 18702 - DNA, 254 bp, Glycine max
  Clone ID: 700874750H1
tcattcttcagtctgcccttgtttccaatctctacttcatctcccagctgctccaccgtaagtacagcggaaacttctttgtagatctattgggaaaatggaaggaatctgaatatggaggtggtcagtctgttcctgttggtggtattgcatactacatcactgcaccatccagcttagctgatatggcggccaatcctttccatgcactgttctatcttgtgtttatgctttcagcttgtgccttgttctca

SEQ ID NO: 18703 - DNA, 254 bp, Glycine max
  Clone ID: 700874751H1
cggctcgagcgaatttggattagatgtggatcatcacaatgcagttgagccagcagcaagcattttcaacaaaaaagtgaaaatcagaagggcaattgaagctgaaggaatcccttacacttacgtttgctcatatgcctttgctggttacttcttgtctacattgggacaagaaaatgtcacagcccctccccgtgataaggttgtcattctaggaaatggaaacgtcaaaggagtttatgtcacggaggaag

SEQ ID NO: 18704 - DNA, 254 bp, Glycine max
  Clone ID: 700874752H1
atttatagtaatattactataaatacgacccgctcaattcaacccaatatttatagtaatatttatagtaaaataaatattggcctgaattgagcgggtcgtatttaaataagaatttcttttccttttttcttagtttctatcgaaaaaaaaaagattcgatagaaactaagaaaataaacaaattgattctccgagaaagaggagagagagggattcgaaccctcgatagttctttgttccgaactataccg

SEQ ID NO: 18705 - DNA, 253 bp, Glycine max
  Clone ID: 700874753H1
ctttctctcgttttttctcagaaccttctgaggttaaagcaaaaaacaaagagagagagagagagaaaatgatgaagccatcgatgctcagatctctccactccgacgccacccgcggcgcctctcatctcttccgccgtgggtacgcctccgagccggtgccggagcgcaaggtagccgttctcggcgccgcggcgggatcgggcagcctctctcccttctcatgaagctcaatcccctcgtttcgagcctc

SEQ ID NO: 18706 - DNA, 249 bp, Glycine max
  unsure at all n locations
  Clone ID: 700874756H1
cttgcagctgctggtgtacactggataatggcttctaaggagcacatcactagaattgttaaaccactcttgtttgtcctgcgatcatcgtctgcctcaagatatgtggtattgtgcaatatccaagtgtttgctaaagctatcccatctctctttgctccacactaccaacagaccancatatgctcttcagattcctatcagataaaggcgttgaagctggatatactttcttctattgctacggat

SEQ ID NO: 18707 - DNA, 246 bp, Glycine max
  Clone ID: 700874759H1
attccattctctctgtgtatttccctacctctcccttcaagatgcagatcttcgtcaagaccctcaccggcaagaccatcacccttgaggtggaaagctctgacaccatcgacaacgtcaaggccaagatccaggacaaggaaggaatccccccggaccagcaacgtctcattttcgccggaaagcaacttgaggacggccgtacccttgctgactacaacattcagaaggagtgtactcttcacc

SEQ ID NO: 18708 - DNA, 242 bp, Glycine max
  Clone ID: 700874760H1
gcaggggctaacttctacatcgttggtcgtgaccccgcaggcatgagccatccagttgagaaaagagatctgtatgatgctgaccatgggaagaaagtattgagcatggcaccgggactagagcgtctaaacattcttcctttcagggttgctgcatatgacaagatgcagggtaaaatggcattctttgacccttcaaggcctcaggacttcctgttcatatcaggcacaaagatgcgcac

SEQ ID NO: 18709 - DNA, 246 bp, Glycine max
  Clone ID: 700874761H1
attacaattcaattggatgatgattattgagtctaataattttgaacagatctggtgtgacgtgcatcacaattgaatcgaattgaaatttgttgtcgtggttccagcaatgaatgccgctggtattagcgaaaagcgattcgatccagattcgcgaggtatggaacgataacctggaagaggagttcgcgttgattcgcgaaattgtggacgattacccttacatcgccatggacacggagtttc

SEQ ID NO: 18710 - DNA, 251 bp, Glycine max
  Clone ID: 700874730H1
gccacatattgtgttcattttggaattgtgccactaaaattctattcaattcatctatggctgcctcttcttatgctatgcaatcaatcctggcaaaccctttgatccgcatttccagcgggtctagggtgaaccaatttggcgttcctgctttgcacatgagaaggaatgttggcctgagagttaggtccatggctaaggaagaacaaccaagtgagcctgcaaccccagttacaccgccaccatcagta

SEQ ID NO: 18711 - DNA, 254 bp, Glycine max
  unsure at all n locations
  Clone ID: 700874695H1
agagaaacccatttctagagagagaaactcgcagtcgcagacatgtcttccttcgatgccttcgccgacgacttgaacgtcaactcttcttccactcaccaccacgaacaagacgaggacaacttctcggttacggcggctactcctccttcaccggaggattctccgccgacggcgatgtcgccgtcgaccactccgcgnccgcgtcgccggagatctacggcttcactgatccgaatcccgcttactctcag

SEQ ID NO: 18712 - DNA, 253 bp, Glycine max
  Clone ID: 700874696H1
ctcgagccgaatcggctcgacggctcgagcacagcaaaacctctaaacagaaacccaaatctcagaaccctttcttcttcttcttcctagaacataaaaatatagatcaaatactccatggccctggtggttactctaccaataggaacccctccacagcatcaacaaatggtgttggacacaggaagccacttcaattggattcagtgccacaacaaaacccctccaacggcgtcgtttgatccatcactct

SEQ ID NO: 18713 - DNA, 268 bp, Glycine max
  Clone ID: 700874701H1
caaactcagggtagggcagagagagagagagagagagagagagagagagagaatgggagggtgggctatcgcggtgcatggtggcgctggtgtcgaccctaatctcccactcgagcgccaagaagaagcgaaacaacttctcacgcgctgtctcaatcttggaatctctgctctaaattctaatcttcccgccatagatgtcgtcgaacttgtggtgagggaattggaaacggatccgctgttcaattcgggccgtggatctgccctg

SEQ ID NO: 18714 - DNA, 263 bp, Glycine max
  Clone ID: 700874703H1
cgaagattggcacatgaatggcaagcattcgtatctcgcactcacaagttaagaaaaacgtttgtatctgtgaaaggcatatactaccaggctgaggtcgagggccagacaataacatggttaactcctcattcactacaacaggttgtatctgatgatgttgacatcactaccatgctaaactttctgcaattgtatgagcctcttcttagttttgtcaatttccgcctctaccattctataaatttgaagtatccccccat

SEQ ID NO: 18715 - DNA, 262 bp, Glycine max
  Clone ID: 700874704H1
gaaacagcgaagaaacaccagaaaagagtaggaaagactagtgagtcactgaagagagtgagagccgtctctactgttgaaacctctccatgcaccttggatgtggactacaatgaagctgcagccaaacttgaaaatatatataaactcagccctgtatctgatacctgtaatgtggaagatatagatagtaaaatcgagagagtcttgcggaggaggaagaaggttagtgaggaacgtgatgatggaaattgtgataatg

SEQ ID NO: 18716 - DNA, 261 bp, Glycine max
  Clone ID: 700874705H1
gtggcagaaggagctctgcaactccgtcaacctcatcggcaatgtcgcggcccccgtcgaaatcaaacacctcccctccggcaaggtcgtcgcctggacccgcctctgcgtcaagaaaagcgccacgcaatcatcgtccataagcctcacattctgggacgacctcgctcatgtcgcgtcccagcatctccagaaaggttaccaaattcatgtctccggtcgcctcataatcgacacggtcgaaaccgaggaaggcaaaac

SEQ ID NO: 18717 - DNA, 272 bp, Glycine max
  Clone ID: 700874707H1
cggctcgagccatataagactcataaccgttcgttcgttcgttcgttccccacttgcttttcattttttttctcccttttcgctaacctcaaagagagttcagtatttatacaaataaaagttttttctttttttatttctggttttcgttttggaatggctgggatttgctgtggagttgttggagaagccgccgagacttcttctcccatcgaacccacctcacgcccttccgcacgccggagtttggaccttttgcccttgaaatacat

SEQ ID NO: 18718 - DNA, 260 bp, Glycine max
  Clone ID: 700874708H1
ttctccccatgcgactcacgtcattccccgccacattcctcacgctccaccactcacaccttccattcacaacctcacccaccaccatctccatttccatccggttctgaaaatacacataatccccaacccaatgcacctcaatggaccccaccacaccccaacaacaacaacaacaatccccttcacccattactaacctcaccaccatctccttcggaatcgctcctatttcctcacaccaataccttaaccctaac

SEQ ID NO: 18719 - DNA, 253 bp, Glycine max
  Clone ID: 700874710H1
ctggtttttggttctcgtttaagccatcatagggaggaggggcttttcaggtcaaagaagtgcaacagagtgagatctgactcataatttggcgacactcttgaaaaaagaggttacttggattttgtgaggttgtcttgtagttggagtcatggcgggtgaggttgtgggatttgagatggttcaaggaccagtggagaatggtactgagggaggaaaacctgttttgaatgagaaggagaatggcaagctg

SEQ ID NO: 18720 - DNA, 252 bp, Glycine max
  Clone ID: 700874712H1
acacgatgaggagccacacattccttaggataacttcacttttggtgtttattgggtggctcacggtttggatcttgttgcctacaaaggtttacaagaacacctggacccccaaactcaaaaccaagttaaactctacatactttagagagcaaggaacaaatctcttgcttttcacattccccgttatgctcataggggccctgagctgcatctatctccatcttcacgaaaaaggaacggaaaagctac

SEQ ID NO: 18721 - DNA, 253 bp, Glycine max
  Clone ID: 700874713H1
ggttgttgctactcaactcttctgaaaaacagtcacccttgtgtagaaggagcaatgcatcatgattgccctgtttgttttgagtatttgtttgaatcaagaaacgatgtcactgttatgccatgtggacatacgatccataagagctgcctgaatgaaatgagagaacatttccagtatgcatgccctctctgctcaaagtcagtctgtgacatgtcaaaggtttgggagaaatttgaccttgagattgctg

SEQ ID NO: 18722 - DNA, 255 bp, Glycine max
  Clone ID: 700874714H1
gaaaaccttagcccaaccggatcttcacgattaggagatggctaagtcgaagaaccacaccgctcacaaccagtcctacaaggcccacaagaatggcatcaaaaagccaaagaggcaccgccacacttccaccaaagggatggatccaaagtttctgaggaaccaaaggtacgcgaggaagcataacaagaagagcggtgaaacagccacggaagaagagtaaagtgtcactctcaaatggggctattaggattt

SEQ ID NO: 18723 - DNA, 253 bp, Glycine max
  Clone ID: 700874715H1
aaaacattttgggaaggatttgaagtgggttattgttgtttgtggatttcttcattgttttgctctaaaaatggagagagattttctgggtctgagctcaaaagaaccattggctatgatgaaggaagagatgaatattgatattggaagcaaagacacaggtttcacaaatggagcagtggtaaaatggcccttcatgaacaaagtatatgtccatcctcttttgatgtcattcaatcctcctcaggtgaat

SEQ ID NO: 18724 - DNA, 256 bp, Glycine max
  Clone ID: 700874716H1
ggcggctctcagaaaagccgtgttctttgtaatcgctcaatgcttcaccttttccgcatatgctgcaaggtttgaaatcacaaaccgatgcacatacactgtctgggctgcgtctgtgcctgttggcggtggcgtgcaattaaacccgggccagtcatggtccgtggacgtgcctgcaggaacgaaaggggcccgcgtttggttccgaaccggctgcaacttcgacggttcgggccgcggtggatgccagaccggt

SEQ ID NO: 18725 - DNA, 261 bp, Glycine max
  Clone ID: 700874717H1
agaagaaccgtgctttctaatcttgtaattttctgcgttgcttcgtggttaattcttcgtgttcttgtgatctttctgttggagtatttacaacactcctttgtaagtttaactaaagaggctaattaattttcaattggaccacagcagatggctgaggagggtcacagggttactctaaatgtttatgacttgagccaaggtcttgcacggcagctttcaatgtcctttttggggaaagctattgaaggcatatggtga

SEQ ID NO: 18726 - DNA, 259 bp, Glycine max
  Clone ID: 700874719H1
cacttcatcctaaagaaattaagctacaaagctagctagctagatatacatgggaaactgttgtgccagtgccacggaatcatcatctatggattggggtggtgatgattggggttctttttcatcatccaagagaaggaggagttcaaggaagaataaggtgtttgatgaagttcatggggagagtttagggaacgtggagaaggagaagctcttgggtgctttgagagcttcttctgatgccaatgggaaagtgaag

SEQ ID NO: 18727 - DNA, 257 bp, Glycine max
  Clone ID: 700874720H1
ctcgagccgccctcatcctggaaatattgcagttgatgatgtcaatggtggaagattgatcttttatgattttggaatgatgggaagtatcagtcaaaatattcgagaaggtttacttgaagctttttatggaatttatgagaagaatccagataaggtccttcaatcaatgattcaaatgtgtgttcttgtcccaactggagatatgactgctgttaaacgaacagcacagttcttcctcaacagttttgaagagc

SEQ ID NO: 18728 - DNA, 259 bp, Glycine max
  Clone ID: 700874721H1
cttgttctttgggaaggataaggaatcaatctgatcgctggaagagaggaagtagcaatagtaatggaaatggggatttccaagacgacaacaaaaacaagcactgaggttaccgacaacaattccaattccaatagcaatagcagcagcaccactcagactgaaactgacaaccatatctccgttgctgctccctacgccgtaggagaaaaggtcttagtctatcactctgattgtctttacgaagccaagctgaggc

SEQ ID NO: 18729 - DNA, 260 bp, Glycine max
  Clone ID: 700874723H1
aaccggcgcacaggcggccaatatcctcgaccccgactacgtgattggcgtgtgggcttcggctagccgcccagccctgcgcacactggtagcccccgacgccaacggcaacaccaccggtgcccaaactacgtcgggcgactacgtgcaagtgtcgcgcctaggcatgccgctcaccaacgaggtggtaaaccccatcggcaacaaagacgagtttaacgctcgcacgccttactcggagaacgccgcattccaagcca

SEQ ID NO: 18730 - DNA, 255 bp, Glycine max
  Clone ID: 700874724H1
gaactgtttttcttagatgacatgttaaaggaatgtccggaaacacatctacaaaacctgcgtactggaatctataaagaaacaatccaattaatcaaaacgcacaacgaagatcgtatgaatacgattttgcacttctcgacaaatataattagacactttattctaagcggttattctattcttggtaatcaagaacttgttcttattaactctttggttcgagaatttatatataatttaagtgacacaata

SEQ ID NO: 18731 - DNA, 252 bp, Glycine max
  Clone ID: 700874725H1
gttcatcatcataaccttcaatgaaaagaaatggctgaggcaagcattggcagcaaaagcagcagatggtctttacagggaatgacagctctcgtcaccggtggatccaaaggaatcggatatgctatcgtggaggagttggcacagcttggagccactgtgcacacttgcgctcggaacgaagctgaactcaatgaatccttaaatgaatggaacacaaaaggatacagagtaactggttccgtctgtgac

SEQ ID NO: 18732 - DNA, 250 bp, Glycine max
  Clone ID: 700874726H1
gaaggatactttaaggcttggagacaaggcagaacagggtaccctttggtggatgctggaatgagagagttgtgggcaactggttggttgcatgatcggatacgcgttgtggtttcaagtttcttcgtgaaggtgctgcagcttccttggagatggggaatgaagtatttctgggacacccttttggatgcagatcttgagagtgatgctcttggttggcagtacatatctggcactctcgctgatggtc

SEQ ID NO: 18733 - DNA, 247 bp, Glycine max
  Clone ID: 700874727H1
ttttccctcactttctcgctccccaaacgcccctctctctcctccaatggccgaccagctcaccgacgaccagatcgccgagttcaaggaggccttcagcctcttcgacaaggacggcgatggctgcattactaccaaggaacttgggactgttatgaggtcattggtcaaaacccaactgaggcagaactgcaggatatgataaacgaggttgatgctgatggcaacggaaccatcgatttcccag

SEQ ID NO: 18734 - DNA, 248 bp, Glycine max
  Clone ID: 700874729H1
gcagatgcttggttggatgacaaagccttcttcagatggaaggataatcctgcaaattacgagaataaactaaaggaattgcgtgcgcagaaagtgttgcttcaattgacaaatattggtgactcagctctagatttgcaagctctacctcaaggtcttgctgcccttttaagcaagttggagccatcgggtcgcgtgaagttgaccgatgaacttcgcaaggtacttggttagaggactttttcgtg

SEQ ID NO: 18735 - DNA, 253 bp, Glycine max
  Clone ID: 700874694H1
cttggaagtgaaggggacaggaacagcaaaccagtgtccaacaattgatggtggattggagtcatttgccttcaagcaagggaaatacaatgccaagaagttctgccttgagccaacttcattcacatgaaggcagagggtgtggccaagaacgctccccctgagttccaaaacacaaagctcatgacacgtttgacctacactcttgatgagattgagggaccctttgaggtgtcttctgatggcactgtga

SEQ ID NO: 18736 - DNA, 257 bp, Glycine max
  Clone ID: 700874657H1
gtttaaacctaattctcatttcttcatcgttcgattcttctcctcctaaagatgcagatcttcgtgaaaactttgaccggtaagaccatcacccttgaggtggagtcctccgacaccatcgataacgtgaaactaagattcaagacaaggaagggatcccacctgaccagcagagacttatctttgcgggtaaacagcttgaggatggtcgaacccttgccgactacaacatccaaaaggaatccactctccacctc

SEQ ID NO: 18737 - DNA, 256 bp, Glycine max
  Clone ID: 700874658H1
acattattgtcaaagttgtagctgctgctctcagaaatgtaccagaagcaaacgcatactggaatgttgagacgggtgaggtggttttaaatgattctattgacatatgcatagcagttgccactgagaaggcttgatgactccaataataaaaaatgctgatcagaagacaatatctgctatctcctcagaggtcaaggaactagctgcaaaggcacgtgctggcaaattgaagccacatgaattccaaggggga

SEQ ID NO: 18738 - DNA, 86 bp, Glycine max
  Clone ID: 700874661H1
atccaagtaaactttttcttaaagaaatataaaatccttgtctttctctctcttaagcacaggcagctataggcctatggccatct

SEQ ID NO: 18739 - DNA, 257 bp, Glycine max
  Clone ID: 700874662H1
gagaaagcaaagagcgtgcttggattggaacctgaatttggacttgtagagggtctagcagactcgtacaacctggactttggtagaggaacatatcggaaagaggctgatttctcaacagatgacataatcttggcaagagtcttgttagcgtataaacttttctatttcaattttaagtatttcacttgtatttagaaaagctgttcggatttgctacattatgaagtcgtgaaatattcatgagcttttcgttc

SEQ ID NO: 18740 - DNA, 259 bp, Glycine max
  Clone ID: 700874663H1
ttcttgatcagatttttcgttgctgagatacgcgcgttttagggatgtaaagttaagaaggagcgaaattatttagttcttaacaaattgtcgctcacacccgcgtttcactactctaaaaaaatttgatttcagtctacccggtgattccagcaaaaagttggaaccatggagtagaagtagttggaacaaatcttatggatgaacttccagtggcaagtcacgctacgactaccttaacactaccttagcctagcgc

SEQ ID NO: 18741 - DNA, 55 bp, Glycine max
  Clone ID: 700874664H1
agagaatatgtgagatgtcacagttcatcacattgcgtctgagtgcgtctgtagc

SEQ ID NO: 18742 - DNA, 252 bp, Glycine max
  Clone ID: 700874665H1
tgactggtggcagtgggaaggttgtggacagtggtcctgatgatcatatatttgtatactatactgaccatggaggtcctggggtgctcgggatgcctgctggtccttacttatacgcggatgatctgatgaagtcttgaagaaaaagcatgcttctggaacatataaaaacctagtattttatctggaggcatgtgaatctgggagtatctttgaaggtcttcttcctgaagatatcaatatttatgcaac

SEQ ID NO: 18743 - DNA, 254 bp, Glycine max
  Clone ID: 700874667H1
cttggagttggagttgtaagcgttttatcaatttttgcaattttctgtatcattcggagaagaagacgtcgtgatgatgataaagagcttctaggaattgatactaagccctacactttcagctattctgagttaaagaatgctacaaatgattttaatcttgaaaataagcttggagagggaggttttggacctgtttataaggggacacttaatgatggaagagtcattgctgtgaaacaactatctgtggg

SEQ ID NO: 18744 - DNA, 255 bp, Glycine max
  Clone ID: 700874668H1
gtcccgttaaaaagcaccaccaccaccaccaccacaacactattcttcttcgcagcaatggcgcgagtggatctggacgggaaccccatgaaggcacttacgatctgcatgatcggcgctggcggcttcaaggctcgcatctctgcgagaatctcatgtccgaaacccctcacaaagtcctcgccctcgacgtctacaacgacaagatcaaacacctcctcgaaccctccgattccccctgggccggccgcatca

SEQ ID NO: 18745 - DNA, 232 bp, Glycine max
  Clone ID: 700874669H1
cgataaggcaaaagcgcatttccgctgttgtatgtgtgagggtgccatgccaagccatagcaaccgtcagtctgccgccaccggtttctctgcgtccccctgcattcgcgtcgtccccgcctcagctgcccactcggtcgcagatcgctccggattcacttagacccgagctttcgtcgcatggcaatggcgatagtacgcggatcagctccaagctgagcattatgcccag

SEQ ID NO: 18746 - DNA, 251 bp, Glycine max
  Clone ID: 700874671H1
atcagcttcaaacttccttcagcgagcctcgtctccttattcttaccgatccaagaacagatcaccagcctattaaggaagctgctcttgggaatattcccaccattgctttctgtgacaccgattcactatgaggtacgtggacattggaattcctgccaacaacaagggcaaacacagcattggttgtctcttctggctccttgcaaggatggtgttgcagatgaggggtaccattcgccctggcctca

SEQ ID NO: 18747 - DNA, 254 bp, Glycine max
  Clone ID: 700874674H1
gcaaaattctccggtacaccatgccggtgaagaagaaattgcagctgatgagagccttttgatttattgcaagcctgttgaactttacaatattctctaccgccgtgctcttcaaaatgttgagagcagaattgtgattttcaattatagggaccgctacaacattcttcgaaagactgaagtgaccgaagacttttcttgtccgttttgcttgatgcagtgtggaaactttaagggtttgcgatttcatcttt

SEQ ID NO: 18748 - DNA, 254 bp, Glycine max
  Clone ID: 700874675H1
gagaggcttatggagagggagagattgcaaatccaggtcattcgccagctcgatctcgaggacctcgaagtcgaagaagtcgatcactccgacgaagacgacaccgacgacgaacccgacgaggagtatggcttttcccttcgcaatacaattcggatacttctcctcctctaccctcatccgccgaattcaatttcgatacctatattgcgccttcgcacacctatctcggtgatgtcgaagaacgcgccaca

SEQ ID NO: 18749 - DNA, 255 bp, Glycine max
  Clone ID: 700874676H1
atttttctcccactaattcacaaataccacggcaacatatattgaaattcgccgcggatcgaatgcttgcgtttctcaaagattggagtaatttacgcatcacggcagtagctggcatattggtatccgtttaatgatcattccaccagctgatgctgttgacgctctcaaaacttgtgcttgcttgttgaaggattgcaggatagaactggctaagtgtctttcaaacccatcttgtgcggccaatattgcttg

SEQ ID NO: 18750 - DNA, 254 bp, Glycine max
  Clone ID: 700874678H1
tgcgtgtaacattcttagaattctcaatgtcttaggtgcaaagagaagatgccaagtttgagatgattttactatatttttcaaaaaaaaaaaaaaggggggccccccgcttagtgacctcgtcccccgggatttattccgggccgggtccctgcggggttccaagtttcccctatggtggtccgtattagaccttggcgtaaccagggccaaacctgttccctggggaaatttgttacccgctcaaattccca

SEQ ID NO: 18751 - DNA, 256 bp, Glycine max
  Clone ID: 700874679H1
gctgagctgcgaaaacccccaactccaacctctgttcatcgtctaccgcgctttcttttcaaccagaactatgattaagctttttaaagtaaaggaaaagcagagagaacttgcagaaaatgcaagtggcggaccacctgttaagaagcaaagtgctggagagttgcgtcttcacaaagatataagtgagctgaatctaccaaaatcatgtaccatgcaattccccaatggcaaagatgatctgatgaactttgaa

SEQ ID NO: 18752 - DNA, 255 bp, Glycine max
  Clone ID: 700874680H1
ttggtaagttgcggagaaggctcaaggtcagagggcaaccccgcatcttttatcgtgtgcaagaaaaaatctgaaagatgttaatgtaaggaacaactcttctaaagcatcggagaagaaagattgggagatgcaacctgctcagtctgtatggaggtcccccacaatgctatccttctcctttgttcatcttattacaagggttgtcgcccatacatgtgtgctactagtcatcgctattcaaactgttttgaa

SEQ ID NO: 18753 - DNA, 251 bp, Glycine max
  Clone ID: 700874682H1
aaaaaaaaaaacccttagccaacacaaccatcatggccacctctgctattcagcaatcagcattcactggtcaaactgctctgaagcagctcaatgagttcgtccgcaagaccggtggcgccggcaaggtcgcactaacatgcgccgcaccgtcaagagtgctcctcagagcatttggtatggccctgaccgtcccaagtacttgggtccattctcggagcagattccatcatacctgaccggagaattcc

SEQ ID NO: 18754 - DNA, 252 bp, Glycine max
  Clone ID: 700874685H1
gtctctagtagccgtgatgcatttgttggtgctgagtcagatatccgtactcgcactgctgaggctagccctggagcagcacatcgagctttgagtgggcaaagaagttctccaattggatcttctgatcctaagagagttgtatcatcagggagaaatgcttctcatgtgaaaaattatgacactgcacttaggggcatggaaggtttgcaattagaaaatgatgagaggacccattattaatttcacaac

SEQ ID NO: 18755 - DNA, 252 bp, Glycine max
  Clone ID: 700874686H1
ctttgagtggtgcaggtctcccatttcccactaaatagaaagaagaaaaattgataagaaaaagggttggttatgctggctttagctctctagttccccatttctttctgggttaagtagaacaaagcttctggcttcagactgcttgaataatccttatttcttacttgcagaagtaaattgtttccattcactgttgtagcttgctacgtatattcccccttctccaatctctttctgttgctgctgtaa

SEQ ID NO: 18756 - DNA, 81 bp, Glycine max
  unsure at all n locations
  Clone ID: 700874687H1
tttatttctttcactctctcagaaccataattttccaaactcctcaactcctcatcagatantcaaccatactactctctc

SEQ ID NO: 18757 - DNA, 252 bp, Glycine max
  Clone ID: 700874689H1
gctgcggatcatgctggacattcagcacaactggggctttagaagcagcctatgcacaagcatttgggaagagtatctctctttctgagcagcagctagtggattgtgctggccgtttcaacaacttcggctgtaatggtgggttgccatcacaagcctttgagtacatcaaatacaatggaggacttgagacagaggaagcatacccctacactggaaaagatggtgtatgcaaattctcagctgaaaatg

SEQ ID NO: 18758 - DNA, 250 bp, Glycine max
  Clone ID: 700874690H1
cagaggtgacacaaaccaactacccacctatggcggcctctgttgtagtgtctacctctctgtctgtgtgtttcaactatggctatcatcgtcgtccatccatttccgctctctcttgtcattcgaatccatcaccaaaacaaacctaaaactcagttcgcaatgtttctccaactcgaattcggtagccccgatttattgccgcaagtttgttgctcgcacttcaattggagaaaacgagagcgagagc

SEQ ID NO: 18759 - DNA, 255 bp, Glycine max
  Clone ID: 700874691H1
atttttcacttttcgagttctaaaagttttaagtgaaaaattgaaattgtttctaactatcttaatagaaaaagcaaaaaggattagcaaaagtattatcgaaagtattcttaaaagtattctcaaaagtattctaagcctaacgaaaataaaacaatttttcaaattgctatttattaaatttaaattcaaaaagatagatgaattgagcgaaaataaaaaagattcaacaatttataagaataatccaatgat

SEQ ID NO: 18760 - DNA, 253 bp, Glycine max
  Clone ID: 700874692H1
aagaagggtaataacaataacaacaatcattgttcacctgctatactttatcactacccttgccctgatggtgcttttgctgcccttgctgcacacctttactttaaggccacttcatcattctctcccttttctttcccaacactgtcttcaaccccctcagtgctgaagatcttcctctgaatgaaattggtgatctttatctcttagattttgtggggcccgatggttttgttcaggaaatctccaccaa

SEQ ID NO: 18761 - DNA, 257 bp, Glycine max
  Clone ID: 700874654H1
attttctcaattacaacatcgtattctgcaaattcaaaccgggtcttggttttctgaaagatgggaggtggcaaggacaagcatcatgatgaatctgacaaaggaattttttcacaccttgctcatggggtactggtgcagcacatggtggacatgggtacccacctggggcttacccaccaccacctggggcataccctccacaacaaggatatcctccagctgggtatcctccacaacaagggtatcctccagct

SEQ ID NO: 18762 - DNA, 254 bp, Glycine max
  Clone ID: 700874693H1
acggaacggaacaaaaggcgcacacaatcgccaaagagaaaaagaaccctcaaccaaacaacaacaacaacaaaaaaaaagccctagaaaagattttggagaagcaatttctcactcctgcaaatctctcctcttcttctttacatttgttttggataaaacattttgctgatactgaattttattttctcttgttttcgtttcttttcgacctttttttttttctgcttcgttgttttcagggagaaagggat

SEQ ID NO: 18763 - DNA, 259 bp, Glycine max
  Clone ID: 700874622H1
actttttgtattttttatttatttaaagaaatgttaaaatgtattttattttttctttattaaatgtatttattttaaaatttgtttttttagaacagacagaattcaataggtctaattcagaaccgtccgataaatcgaatattatctaccttagagatgtatcaagggataaataatcggaccggtccttagatttttttaaggctttaagggagccgtatgaggtgaaaatctcatgtacggttctgtaatagag

SEQ ID NO: 18764 - DNA, 258 bp, Glycine max
  Clone ID: 700874623H1
ggatatcataggatggctccgttggctgcgccacgaggtgggcttccaggattttcgatttgattttgtaaaggggttttcaccaaaatatgtgaaagaatatattgaaggagcaaagccattgttttgtgttgggagtactgggattcttgcaactacaagggttctaccttggactataaccaagatagccatagacagcgaataatcaattggattgatggcactggacaactttcaactgcatttgactttaca

SEQ ID NO: 18765 - DNA, 262 bp, Glycine max
  Clone ID: 700874625H1
cggaacatccctgattccttctacaccaacggcggtctcaaactgcgcgttgtgtggaccatcagttccctcatcgctgcctccgccaggcattacttgctccaacccattatctccgagcacgccaccctcgacacttggtgctcaccgacgccgatggccagggggtactttacatgaacagggagcaactcgaggagctgagggtgaagccgctctcggcctcgtcggcgtcgaagaggactctcgttccggcgcttaa

SEQ ID NO: 18766 - DNA, 262 bp, Glycine max
  Clone ID: 700874626H1
gagcttcacaaccacacccctttctctatttacttcattacctccattctctttattttcttcgtgttcttcaaattagttcaaagatcggattccaaaacctcctctacctgcaaattgcccccaggaccaaggaactacctctcatagggaacatacaccagattgttggctcactgccggttcattactacttaaaaaatttggcagataagtatggtccattaatgcatctaaaactaggagaggtgtccaacatcat

SEQ ID NO: 18767 - DNA, 263 bp, Glycine max
  Clone ID: 700874629H1
accatgcagctgtgaactttgggcaatatgtttatgggggatatttcccaaataggcctacaattgccaggactaaaatgccctcagaggaccctacagaagaagagtggaaaaagttcattgaaaagcctgaaaggcacttctgaagtgctttccttcacaacttcaagcaactagagtcatggctgtcttggacatactctcaactcattcaccagatgaggaatacataggagaaaagatggaaccatcatggggtgaag

SEQ ID NO: 18768 - DNA, 262 bp, Glycine max
  Clone ID: 700874630H1
cgagtgttgagttaaatgtgatatgttgatggaatttgtgaaagattttaaaggtgcagcacagatattggagaaaggtggttatactcaattcacaccccattatataacttggtactgtcctcaggcattcacatgagcaaacagtgcaagtcccagtgcataaatcatggaagatattgtgctccggatcctgagcaagatttcagcactggttatgatgggaaagatgtggttattgaaaatttaaggcagctatgtg

SEQ ID NO: 18769 - DNA, 263 bp, Glycine max
  Clone ID: 700874631H1
cacggagccagagaatcaatgtgctggagcatgtgctaatcatccatgcccatctaaaccatgtaccaacgtacagtgtcgtctcctgcccggtaacgatgtatctatcaacggcagagtatgtgatgaggtatctaactgcctgagagtaataattgtttcatttatcaatgtctgggaacacccacgaatatcagcaatgattatatagcattacccggtccatatcaatccatatgtagtaatagcagcaacctctgtta

SEQ ID NO: 18770 - DNA, 250 bp, Glycine max
  Clone ID: 700874632H1
gagaggcttatggagagggagagattgcaaatccaggtcattcgccagctcgatctcgaggacctcgaagtcgaagaagtcgatcactccgacgaagacgacaccgacgacgaacccgacgaggagtatgcgcttttcccttcgcaatacaattcggatacttctcctcctcctccctcatccgccgaattcaatttcgatacctatattgcgccttcgcacacctatctcggtgatgtcgagacacgcg

SEQ ID NO: 18771 - DNA, 255 bp, Glycine max
  Clone ID: 700874633H1
gtgttgtccctgctgccaacaatatgccactagacggacgagaaaagtttcaagacaaatgtttggtgaactataagaaccaaaatctaaatggtacaaaactatgagaaccaaagcctgaacagaatccaactatagagaccaaaagccatacttttaatgtataggaatcaaaaccaaaatcaaggtaatttctatcgaatacgcagtgcttttaagtatggtgcccgtaaacttggctggattcttaggtta

SEQ ID NO: 18772 - DNA, 249 bp, Glycine max
  Clone ID: 700874634H1
gtgctcttcacctttcactccacgaaatcaaaaacaagtgctaagaagctccgtgtctctattctcaaacatgtagcaccaaacccaagttggcatccaagttttataacactaatactgcttaaatattattataatatacataacaacagttattgatattgttgtgattgtgtgtgattttggtgtcgtccctttttcttatgtttaaggttgtacggagtttatgtgttgattcaattcgtcgat

SEQ ID NO: 18773 - DNA, 257 bp, Glycine max
  unsure at all n locations
  Clone ID: 700874635H1
ggaacatccatgcagtgcagatgtggtgacgaaatagctgatgctccaactctgcgcagactggtctgccgcatacggcaagcaataaatgaaaacgagaacgcccccacgatccaggcccctaatcgactcgccgctaccctgctcgtcgacgcagtacacgagataanaacgacgacgaacgcgaagccactctcatccaagaagacgatggcccgacgagagcgactgcgcgcatcactggccngactccgggg

SEQ ID NO: 18774 - DNA, 260 bp, Glycine max
  Clone ID: 700874636H1
ctttcattacacaatgagcagaaacagcgatgaacctgcgatgactgaagaagcaccaaccaaacagtccctagcgaacatcttctctttgttccgcaaaatcaattttcaactccctttcctcccacccaaaccgaagaaccgaagcttgaggctcaggctcagcaggagggtccgaatcctggccgtgtacagtttccgaaaagccaagtggcgctgattgcgtcttcgcctctgcaagctgaacctgatgctgacca

SEQ ID NO: 18775 - DNA, 257 bp, Glycine max
  Clone ID: 700874637H1
accgtaagctcccaagcagtgggaggaggctcgggactctgaccgcgtgcctgttgaagaatgagccggcgactcataggcagtggcttggttaagggaaaccaccggagccgtagcgaaagcgagtcttcacaggcaattgtcactgcttatggacccgaacctgggtgatctatccatgaccaggatgaagcttgggtgaaactaagtggaggtccgaaccgactgatgttgaagaatcagcggatgagttgtgg

SEQ ID NO: 18776 - DNA, 259 bp, Glycine max
  Clone ID: 700874639H1
atgattcaatagatggcttggaggatggaacatcagatcatgcaactagatttaatttgcctagtcccaaggggagaaaagtttctccattgaataagtacaaacctgcaaacattacaaagaggagaaaagtgaaaaatggagtcagttggaagaggagactctaaggactgctgtagacaagtttggcaggggaaattggaagttaatcctagattctcacaaagatatatttgaagagagaactgaagttgatttg

SEQ ID NO: 18777 - DNA, 259 bp, Glycine max
  Clone ID: 700874640H1
aaaacgatggcaacgcccttcttcaaatcccatacgacagttagacacagtgaaggagggttttcaagagaccacctttatagaacaattggtggaagatgaaagtcaaatggaaggttcacctcctggttgtcaaaaatattgaattggcatctccatttgactgcccataatatagtttacccaaaaggttgggtgcttcagaaaaacctagatgctgtcatacctgtcaagtaatcctccaccaattttattgtgt

SEQ ID NO: 18778 - DNA, 252 bp, Glycine max
  Clone ID: 700874642H1
ccattgacgacctctgcggcgattctgaagctgaaactccgctgctatcggagacgctatacggcgtcgtcaacttcaagggcctccccgtcctacgatctacctctggtggttggaaagctgctgccttcattataagtaatatatattcagtgtttatctcttcatcaggctgcggttgaatttcctgatcgggttctaatctagtccgattcccatgtcgaagtgacgaaacctacctggggaaggggc

SEQ ID NO: 18779 - DNA, 255 bp, Glycine max
  Clone ID: 700874643H1
ctttcagtgttttttttctctctctctactctgtctccccgccggagcccactttcgtcgccggtgtttccgttctgaagctgctcttccgttgcgagccaccgcgacccttttgagagccctgttcaacaagccgaaagtccggtttatttcccgattcgggaaaactggtttggtctttgacttggaaccgtgagtggagttgaagggattttgtttggggactgcgaagaggtgcgtatccaggaaggttct

SEQ ID NO: 18780 - DNA, 258 bp, Glycine max
  Clone ID: 700874646H1
aagaagaacaggtacctgagggtctagaaagagcaataatgacaatgaagaaaggagagcaagctctggtaactgtggatgctgaatatttgtgcgactataataattcaaagggaaacacagctaataataaatcctttattatgaagttgagttggttgatttcgttaaggaaaaaccattttggaaaatggatacacaagagaaaatagaagcttgtgagaggaagaagcatgatggaaatctgctgttcaaggt

SEQ ID NO: 18781 - DNA, 260 bp, Glycine max
  Clone ID: 700874647H1
tatttttctctctctctctctctctctctcgcatcacaatttcatcaaaaccttttaagtcttcatagttttccttctttctttctttgtgaaaaaacaaaaagtccaaaccatggctcagaaaaccgagaaagagaaaccgacttcaaggttcccgaaacgattacgctttgcgttaacaactgcggcgtcaccggaaaccctgctacgaataacatgtgtcagaagtgcttcaccgccttcaccacctctaccgccac

SEQ ID NO: 18782 - DNA, 258 bp, Glycine max
  Clone ID: 700874649H1
ggaccgcacaatattattaaaacttaaacttcatatttatttaaacactgcacaccaaattagagcaagctagaatcagttacaagtatcctatagttaaaattgaacttgttttgcagagccatggacccgaaatagtaaagaagctaggaagctctcttctggtgccttctgtgcaggaattagcaaagcaaggcatcaccaaagtcccagaacgatatgttcgacccaatgaagacccatgtgttgaatatgaca

SEQ ID NO: 18783 - DNA, 256 bp, Glycine max
  Clone ID: 700874650H1
tggcacttgatcttcctcatggtggccatctttctcacggatatcagactgataccaaaaagatatctgcagtctcgatattttttgagacaatgccatatcgattgaatgaaagtacaggatacatcgacatgaccagatggagaaatctgctacactcttcaggccaaaattaattgttgctggagctagcgcttatgcacgtctctatgattatgaacgtgtacgcaaggtttgcgataaacagaaagctata

SEQ ID NO: 18784 - DNA, 257 bp, Glycine max
  Clone ID: 700874651H1
caagaacaatgggaatagagattctggagcctaacacgtgcattaggggttgctgcaccagtgcctctattccccttcatctccctccctcttcttatacccttctctctcctattgcccgagcaagttagtcatccaggaatagcaacaccgattgcggcccatgcaaaaccgcccaattacatgtttttcttcaagttatttgaatctccaaatctagcacaaaagttacatgtggacgagtggatcccaactct

SEQ ID NO: 18785 - DNA, 249 bp, Glycine max
  Clone ID: 700874652H1
agacccgtgagtgttttcagttgcagagtacagagagagagacacataagtaagacaatggcgactctgaatctgttctctcaaccatggcaacctacaatttcaccttctttctgttgttctaatactaacaacaacaacaacgttgtctatgcctatcataatcataatagcaactttcgcaattctaaattatatttattttccaattctcgccaattctctgttctttctcagttgtccacggac

SEQ ID NO: 18786 - DNA, 258 bp, Glycine max
  Clone ID: 700874653H1
atcgtgaatgcgtataaaaggaaaataaagaaattagcgtcaaaatgttgggtgtgttcagcagctccatagtgtcgccgccggacgagctcgtggccgccggcagccgtactccgtcgccgaagatgacggcggcggcgctgcggaagcggttcgaggagaagaacccctccgccgtgtcggtggaggtcggagagcatgtccagctcgcttatacccaccacaacgagtcgccgtttcagcccagatcctttgctg

SEQ ID NO: 18787 - DNA, 262 bp, Glycine max
  Clone ID: 700874619H1
attaattaaggatctggatccaaaagacccggtagattttgtacttcgtttttctttgatgaaaaaaaaataaattcgtaaacgtagaaaaaaattcatcaaaaaaaatactctatccatagtagaggaaaaaaatgaattgcagggatggaaaagccgtatgcatcaatacgcagaaaatgcttgtacggttatttaatattatttttgcccatttttttattttcttatttgtatttatcccttttacctttatttggga

SEQ ID NO: 18788 - DNA, 258 bp, Glycine max
  Clone ID: 700874581H1
gaaggaatatggaggtttctattacagatgaaattgcaggcactatggagctcaaccctgataggctgggtgagctcaaagcatttgatgacacaaaagctggtgtgaaaggccttgttgatgaaggggtcgcaaagtcccaagattatttcatcatccacctgatgaatttgacatggcttcaaagttaggcaacacagaatacactatacctgttatagaccttgcagaagttggcaaagatccaagttcacgcca

SEQ ID NO: 18789 - DNA, 249 bp, Glycine max
  Clone ID: 700874587H1
ctatacttggtgagtctaaaattaaattcacagatagtgagtctaagcttcaggatttgcttgtgcatgttttggataccttgcaacctgccaaatttcactggcagtgggttgtactcaggttgctcttaatgaacaagccctcgttgaaagactagagaatcgtgatgtgtccttggttgatgctataaagttgtcctcacctagtacagactaggcttctgctgcttctgagaatgagaacaattt

SEQ ID NO: 18790 - DNA, 245 bp, Glycine max
  Clone ID: 700874588H1
gcacagcgaggcagagtagaagatgtttatgtggcgggaacctcttgactctggagaagaaaacccgcgtttccttgggtagtcgaaaggaagcagaatgggatccaaaattcttccaaaatgggctcgaagccttgcgtaatgggaatcgacgaagctggaagaggccccgttttagggcctatggtctacggttgcttatactgctctcagtcctatctgaagaccctttccacgttgagttt

SEQ ID NO: 18791 - DNA, 244 bp, Glycine max
  Clone ID: 700874589H1
cacaccagcacacctacaattgttcatcgagatctaaagtctccaaatcttttggttgataagaactggaatgttaaggtatgtgattttgggttgtcacggttgaagcacaacacttttttgtctccaagtcaactgctggaacgccggaatggatggctcctgaagttctccgcaatgagccctcaaatgagaaatgcgatgtttatagttttggagtcatcttatgggagcttgccactct

SEQ ID NO: 18792 - DNA, 244 bp, Glycine max
  Clone ID: 700874590H1
gccttctgcatgttggttctctgtaaacagatactgcaaaagaagaataatattgaatatttggttgggttgaatccctgggttgaagcgttgcagacatcacggctattctaagagtgtcacgctctctcattcatgtcccaactgtacgacggaggacaggttgcgtaactgccaccaacccttcgccgcacggtgggcgtggtgctttgccttctgaaggtggtagcccttcagacttgct

SEQ ID NO: 18793 - DNA, 242 bp, Glycine max
  Clone ID: 700874591H1
cacaaatcggaagaatcagagcgccgtcggaaaccgccgtccacggcggtgaaactcgccttcgcatcctctcgtcttcgaacccgaagcctctctcggttcctcactcttctcacattgccaaaactcaaattcacgatggaagagtttgagctgtggaaggaacaactttcgcacttcgctaacctagctttggatcgtcttcgcgaggttcccccgaatcagctctacgctgctgctgc

SEQ ID NO: 18794 - DNA, 123 bp, Glycine max
  Clone ID: 700874593H1
aatttaagtgaggagctagagaatgatgatgaagtctgctatgtgtgcagtggtggttgtagcacttcttcttctggcggaggtgcgggcccatggctgcatgctgtcgacactgcatcccca

SEQ ID NO: 18795 - DNA, 244 bp, Glycine max
  Clone ID: 700874594H1
gtcatctcttcttccaccaaactttcggagttttctttggttaattagtaaaaaattgcttaattaatttgtccttccagaggatcgaatgagatagaaagggtactggaggggcaattaattaataatctctagtgagtatatatataaatatggagagcctggaagaaagagtgtttatgttgatgaatgaacaatattattattccaattccaatgtatcagatcagctgcatatgcatca

SEQ ID NO: 18796 - DNA, 246 bp, Glycine max
  Clone ID: 700874595H1
aagcaattgaaatgcttacgaatgagtacataaggtcacagctagacattgtattaggtgaggagcaattggattgcataaaggctttattctcgggacaaggagaacgtaggaatgcaccatttgagggaatccgaatcttcaaatcacaagctggatgagcatgccagtgtatgaagcagattttggttggggaaagcctatgtattttggtttggcatatgtgtctgcacaagatagggcagt

SEQ ID NO: 18797 - DNA, 267 bp, Glycine max
  Clone ID: 700874601H1
gttggaccccagtgtggtctcatccagataatatatgtaaggattatctttctgctacaagtagtggcgtttgtggatataatagcatttgcagtttgggagattataagaggccaatttgtaagtgtccaaaatggtaccactggttgatcctaatgatcctaatggtagctgcaaaccggattttgtacaatcatgttcagaagatgaacttagtcatatagatcctctctttgactaagttcatcttctgaacatgattgtaca

SEQ ID NO: 18798 - DNA, 264 bp, Glycine max
  Clone ID: 700874603H1
gttcaactgaggtgatggctttgaatttgccttctcccgcccaagtgaagcccttatttttctcttcaaataactccacaaaacttccaggtagcttttctttgaagagaaaagatagtgacacaacagtagagagacagtttattgctctgccgctgctcaatcaccaccaccagcatggccaggaacagctattcccgagccttctgatttcaagacatgggatgggcaaaaacctatttctgtcttaggatctacgggttc

SEQ ID NO: 18799 - DNA, 263 bp, Glycine max
  Clone ID: 700874605H1
gaagcatcttgggtttgtgaagattgtggcaattaaagcctttgtgtgtgtgtcgaatctctacgacttcgcaaagcaaaactcgggacctttgagatctgctgttggaaccgtggaagacactgtaaccaccgttctggtcccgtctaccaccaattcaaggctgtccccaaccacctcctcctttttgccgacaacaaggtggatgaagctgctcacaaattcgatgagcatgcaccttctttggttaagcaggttgcaac

SEQ ID NO: 18800 - DNA, 263 bp, Glycine max
  Clone ID: 700874606H1
gagcagctctggctgaatattttatgtaccgtgaacgtcacactttaatcatttatgacgatctctccaaacaagcacaggcttatcgccaaatgtctcttctattacgaagaccacctggtcgcgaacttatccagggatgttttttatttacattcacgtcttttggaaagagccgctaaattaagttctcagttaggcgaaggaagtatgactgctttaccaatagttgaaactcaatcgggagatgtttcagcttatat

SEQ ID NO: 18801 - DNA, 261 bp, Glycine max
  Clone ID: 700874607H1
gtatgacattgcagagtctgatgtgcaagttgcatgtgtggaggtggaggttgaagcatgcgtagaaaaggaattgaatggagaagaggtttctattgatgcgccgggtgaaaatagtaatgaatcatcatcagagattccaagttgggagtggattgttctagtgaacaagctcatgaggtgatgtaccttgctggcccagaatgtgaagaagtccatgtccatgtccacgatgaagtcttgcatggtgcaactgtactg

SEQ ID NO: 18802 - DNA, 266 bp, Glycine max
  Clone ID: 700874609H1
ctttctccctccctctctcaaatctcatcaatttcacatatattattataggcacattcacgattaatattggcatagacaatattaattacttacacaccaccatgctaaggtgtttttaaatttggtagaagggctttttatcattactttaaacacatgcactacttaaggaatcagtaataaaataacattttttaaaaacattcattaggaatgtattaaaaatcacaatgacaatgcattaataacattttcaatgaaac

SEQ ID NO: 18803 - DNA, 263 bp, Glycine max
  Clone ID: 700874610H1
gtgcgtgtgaaaaaggttccaggaaatttgatcatctctgctagatcagatgcccattcctttgatgcttctcaaatgaacatgtcacatttcataaacaacttgtcttttggaaagaaagtgacacctagggccatggtgatgtgaagctcttgataccatacataggcagcagccatgacaggctcaatggccggtcattcaccaatactcatgatttaggtgccaatgttactatagagcattatattcagatagttaaa

SEQ ID NO: 18804 - DNA, 266 bp, Glycine max
  Clone ID: 700874611H1
ctcttcttgttctcttgtgtgcgctgggtgtgaacagaaggtaagaaaatggaaagagggaaaagtttttcaaactcctcactttcttaaatcacttctctatgaaagtgaggagtttgaaaaattctctgcaagcttgacaggcttgtcacttatgcaaatttcaaggtaatgatgaagaaacgacacttaaggagacaaaatctgacgacaaatgtgcggagccattgaattctatgaggacacttttagcacaaattcataat

SEQ ID NO: 18805 - DNA, 266 bp, Glycine max
  Clone ID: 700874612H1
gctggagcagagaagttagcggactcaaagtcagctccagccagcccagctccaagtgatcaaattgctaaaccagctccttctaacagtggcatcagtgttcagtcagcaggtaaactttattcctacaaagaagtagcttagccccacctgggacaattgtgaaggtagtggctgaacagtcgccgaaaggaaatcctattcaactaaattctgaggtgagtgccatgatagttgcaacaaaggagactcaaaatatcatggca

SEQ ID NO: 18806 - DNA, 266 bp, Glycine max
  Clone ID: 700874613H1
cggagaaggagctcagcaacagcgcaaagacgctctaactgcagctcgccgcccgctagcccgcccgcacgcatgcgcatatgctcgctcgcaccgccactgatgctcgaggtggcgatttgtcgtccgtctgttcgcgttaactcactagctccgactcggatacgaacgcacactctcacattgggaaaaaaaaaaaaaaaaaaaaaaaaaaaaaaaaaaaaaaaaaaaaaaaaaaaaaaaaaaaaaaaagaattcacaacaaa

SEQ ID NO: 18807 - DNA, 265 bp, Glycine max
  unsure at all n locations
  Clone ID: 700874614H1
ggctcgagttctcttcgaaagcggaatcaatcaatccctcatctcattgctgagatctgcaagctggctatggactacgaaccctacgacagtagcggaactgatgatgaccttccaccaacccatcaaaagagaattccaggggaggaggaggacgtctcgctgggaatgggagatctgctgttggttcaattccttacccaaggatgtatggtgaattgtcnttgggagacccaaattcatcagcttgagcaagaagcataca

SEQ ID NO: 18808 - DNA, 274 bp, Glycine max
  Clone ID: 700874615H1
cagttcgatcgatataagtctcattagcgttcgctccttcgtttgttgcccaggagcctttcattttctctatacccattggttaaactctcagactgttcattatcgatgctaataaaagcgtgtgctcctttgatcactggtcttcgtctggaatggctggagattcgatgtggagtagttggataagcagtcgagagttgttctcccaacgaatccggctaacgtccttccgcacgccggagtttagaccattggcgctagaaataaatag

SEQ ID NO: 18809 - DNA, 265 bp, Glycine max
  Clone ID: 700874616H1
tgatattattgaatcctttcattcattcccaattccatggcacctattctcattaatcacctctttgttatcctctacggtctccgagccataaacacactttccaccactgtttccatctctgatacttctaattccaccaggcacttatctgtgttctggaacatcctgagcaactaaggagaatcaaatctcaactgtaccaggttgcctcaggctcaggctaatacacttgcatgtcaattccaatgtatcttactctcag

SEQ ID NO: 18810 - DNA, 259 bp, Glycine max
  Clone ID: 700874617H1
actgagagtgaaagcaaggctgaactagacaggttctgtgatgctcttatttccattagacaagaaattgctgagattgagaaaggaaatgctgacattaacaacaatgtacttaagagcgcccctcatccaccatactgctcatggctgatgcatggacaaaaccatactccagggaatatgcagccttcccagctccttggctccgtgcttcaaagttctggcctaccacaggacgtgttgataatgtgtacggtga

SEQ ID NO: 18811 - DNA, 260 bp, Glycine max
  Clone ID: 700874618H1
gagctagtttagttatctactcttttctgcatgtttgttctctcaacgactcctccgcgaaagagtattattcaatattttggttgggttgaatcccggggttgaagcgttgcagacatcacggctattctaagatgtctcgctccctcattcatgtccgatctgtacgacggaggacgggtagttgcgtaactgccgttaacccttcgccgcacggtgggcgtggtgctttgccttctgaaggtggtagcccttcagac

SEQ ID NO: 18812 - DNA, 248 bp, Glycine max
  Clone ID: 700874580H1
agaatagccaattgccatctgagaggtcctattatgattctcgcccttccggacctgtggatagtacagtcagttcagtcaatgctaaaaagtaccacagcttgccagatatttcaggatatgccatcctcacagggatgtttacatgtctgataagagtgctccatgggatggttctgttggtggatatagatcttctgcaagtaggactcattatgaaccgtcattatattcaaactctggatcaa

SEQ ID NO: 18813 - DNA, 253 bp, Glycine max
  Clone ID: 700874537H1
gctaggcctcatggataagaatccaacgaagctggaacactttgatgacatgtcggatgctcgaatccactgccacactattatctcacttgaagggggatgatggtcgacatgtcttgacattggatcgtacatattctatccgcaaggtggtggtcaacctgcggatactggctttgtactcattcatggctttgataacaacaaatttctggtttctgatgttcggtccaaagatggaattgtttttcac

SEQ ID NO: 18814 - DNA, 254 bp, Glycine max
  Clone ID: 700874540H1
tcaccactacgagtttctctctctagaaccgccgaagcgaagaagagagatgagagatgagagaagagaatcacggttggctccgtcctggacgcggcatcgcagctcgtctcctgcggaatcgatcccttcctcgcgccacctctccttccccgcgccaccgccgctcaagcaaccttctcaacctccgccaacgctccagccgcgtcttcgccgtatccgccgagccgaaacccgcgccgccgaagaccgct

SEQ ID NO: 18815 - DNA, 251 bp, Glycine max
  Clone ID: 700874542H1
ggtgaagagaacgaatttgccgcagtagagatctcttccatggtgctcatcaagatgcgtgagattgctgaggcttacctaggctccacagtgaagaatgctgttgtcaccgtccctgcttacttcaatgatctcagcgtcaagctaccaaagacgctggtgtcattgctggtctaaatgtgatgcgaattatcaatgagcctactgcagctgccattgcatatggtcttgataagaaggccacgagtgtt

SEQ ID NO: 18816 - DNA, 252 bp, Glycine max
  Clone ID: 700874543H1
ggcggccaacgctgtcgtttcaccgtcgccgttccgacctcagccctttctccggtcatccttctccggcgtctccgtcaagctcactccccaatccataacgctttcacgctccaagcccctcaccgtcttgccgccaccaagaaggccgtcgccgtcctcaaggggacctccgccgtcgaaggcgtcgccactctcatccaagaagacgatggcccgacgacagtttctgttcgcatcactggccttact

SEQ ID NO: 18817 - DNA, 246 bp, Glycine max
  Clone ID: 700874544H1
cattctcatcctcctctgtctctctctctccaccattgccatggtctcttacaatctccggccttccagcgccttcaattctcccttctggacttcatattctcttgctcctgtttggaacaacaactccttttaaccgttggagctagaggtccaattctgcttgaggattatcatcttgtggagaagcttgcaaactttgacagggaacgtatcccagaacgtgttgtccatgccaggggagct

SEQ ID NO: 18818 - DNA, 250 bp, Glycine max
  Clone ID: 700874545H1
cgcatgtaagaaatgtttgattggaacgacgaagagctcgctaacatagtatggggtgaggcgggtgagagtgatgatcatattgtgccttatccggaggcaagtgaagatcttaatgacaagaaagaatgaatcaggaagcttctgctactaaactgattgagcagaggagaatagaggctaaaactgattttcatcaaggaaagctaggaagcagttccaaacttgatattattgagggatcttctgc

SEQ ID NO: 18819 - DNA, 252 bp, Glycine max
  Clone ID: 700874546H1
gttcaactgaggtgatggctttgaatttgccttctcccgcccaagtgaagcccttatttttctcttcaaataactccacaaaacttccaggctgcttttctttgaagagaaaagatagtgacacaacagtaggatacgagtttattgctctgccgctgctcaatcaccaccaccagcatggccaggaacagctattcccgagccttctgatttcaagacatgggatgggcaaaaacctatttctgtcttagg

SEQ ID NO: 18820 - DNA, 254 bp, Glycine max
  Clone ID: 700874548H1
gaccccaagctcgccgtctgctccgcgcactccgacgacgcggcggcccatctgatcaagatcaacgggaggtttactcgttcgtgtcaagctcaaaggttgaaacaaacacgaaggcgctagaaacaaccctagaagtaagaaccagattttatctccatacagtagaagtaaaacagtatattgtagccattcggttgagttcaaattgaaagagacaagatggccgggcaatcaaaccatgacctttcatt

SEQ ID NO: 18821 - DNA, 250 bp, Glycine max
  Clone ID: 700874550H1
cttacttatcttggtgggggttcgcatgcaacatgctacaatgatttacatgttcttgatttgcaaactatggaatggtctcgccccacgcagctaggagaaataccatcaccacgtgctggacatgctgtgtgacagtaggggagaactggttcattgttggtggtggtgacaataagagtggggtctctgagacggttgtactgaatatgtctacactgacttggtcagtggtaacttctgttcaagg

SEQ ID NO: 18822 - DNA, 252 bp, Glycine max
  Clone ID: 700874551H1
caggaaactcttcttcgtcactgtggttgaaattcgaatcctttctctctctctctctctaggcaataaagtgacacgcatcagagaaattcaattcaatggatgcaaatcgcgctcaaattgtggacgttggtcggtggtggaagccgtttctgctgacgacggtgacgctcctctctacagcctcgaaagtctctgcatgcgttgcggtgaaaacgggacttcaagatttttattgactttaattcctaa

SEQ ID NO: 18823 - DNA, 251 bp, Glycine max
  Clone ID: 700874552H1
cgaaaatgtggaagagaacgggttttgaagaagaagcagttcaattgatcaactcagatttcagggacctaagtctagctgctaatagactcgcccatcatgccatcaaacttggtggcattggctttggacctcttttttcggattgtttgctgccattgctgctatttatctgttgattttggatcgtacaaactggaaaacaaatattctcacagcactactcattccatacattttcttcagcttgc

SEQ ID NO: 18824 - DNA, 254 bp, Glycine max
  Clone ID: 700874555H1
gccaggcaccgcgcttctgcgccaacaattgcggtttctttggcagccctgccacgcagaatatgtgctccaagtgctaccgcgatttccagctcaaggagcagcaatcttccaacgccaagatggttctcaatagtcgctggttccttcaccgccaccgggggtgatttctcagccgtcgtcttcttcttcggccgcggtagatccgtcatcggcggtggttgatgacgcgccacgcgaggcggaggaggtta

SEQ ID NO: 18825 - DNA, 248 bp, Glycine max
  Clone ID: 700874560H1
catcaatctttatttaacacttgcctcctcttttttccaaccatctcttgctctctcattcttttcttcttcaattcatatcatatcaattagatttgttttcagagtttgctagtgagataccatggaaactacaacagcaatgacttttggaaattcagtgaccagttgaggcttgaatctggtttggccaatctgtctctgaatgattattccatttggagcaacagctacagctccaagaggcc

SEQ ID NO: 18826 - DNA, 249 bp, Glycine max
  Clone ID: 700874561H1
agcgatcgaagtttcacatcagccttatccagtttagggtttcggttccttaccctacctttgacgtatcgaaaccttaaatttgggattaggtctgagcaatctggttggtagaacctttggtcttagagagtcaagttttatgtctggattagacgatcaaattcctactgccttcgatccttttgctgatgcaaatgctgatgactcgggtgctgggtcaaaggagtatgtgcatattcgcgttca

SEQ ID NO: 18827 - DNA, 248 bp, Glycine max
  Clone ID: 700874563H1
aaattattctcagtatgtaatttcaaaagcagcttggattgaagcacagtatgctgcatgggagaagcagcagaaagaaattgagcatacaagagacttgataagtagattaggtgctggagcaaattctggccgtgcttcttctgctgagaagaagctggagagacttcaggaagaggaactagtggagaagccatttgaacggaaacaaatgataatcaggttccctgagcgtggaaggagtggaa

SEQ ID NO: 18828 - DNA, 249 bp, Glycine max
  Clone ID: 700874564H1
caaactcagggtagggcagagagagagagagagagagagagagagagagagaatgggagggtgggatatcgcggtgcatggtggcgctggtgtcgaccctaatctcccactcgagcgccaagaagaagcgaacaacttctcacgcgctgtctcaatcttggaatctctgctctaaattctaatcttcgcgacatagatgtcgtcgaacttgtggtgagggaattggaaacggatccgctgttcaattcg

SEQ ID NO: 18829 - DNA, 251 bp, Glycine max
  Clone ID: 700874565H1
atctctctcactcttccaacaatcgcaatccaaaaccctaccgacaccacactcaatcgaaattcttcattctcttctcatcgatggggcagaagtctctgatctacgcgttcgtgtcgcggggaacagtattctcgcggagtacaccgaattcagcggaaacttcaactccatcgccttccagtgccttcagaagctccctgccaccaacaacaagttcacctacaattgcgacgcacacaccttcaatt

SEQ ID NO: 18830 - DNA, 249 bp, Glycine max
  Clone ID: 700874566H1
gtcgcttcattaaactctcttatcttcttctgccccttttccacttcaattaggtacttcgccgattcgattcccaatttgcttaaactcaattaagctttcctgcgtcaatcattcaattaaaggtgttattagtatcattcttttttataatccatgtaatcctcctacttcatccttagttatcttaggcatcaaaaccctaatttcacatccttcacgcgcttggtcttggtattttctctgcgc

SEQ ID NO: 18831 - DNA, 248 bp, Glycine max
  Clone ID: 700874567H1
caataattgaagccaagtatgtaatgcggagtccacgggactgggatagattcatgagattcatggagcgatactcaaatgcaaatggtttgcaattcatcaaaaaatgagttaatgtgctaactctgccttctattcttttgcccttttcaggaagtttgtgttctacgatatagtcacatataaaacctgagtgaaatgctatattggcgtacatgtaacttcaattcacatactcatgcattttc

SEQ ID NO: 18832 - DNA, 246 bp, Glycine max
  Clone ID: 700874569H1
caagaggttggtcacaagagccttctccagagtgatgctctttaccaggtaccaccccaattgcattcctttgataaaaagaaaaagaaaaaaaatctttttctcttttgggtttttgataaaatggtatgttgaaaaaaaaatctattttttgggggtttttgataaaatggttatgctgtgtttagtatattctggagacaagtgtctacccaagagaacctgaatccatgaaagaactgagag

SEQ ID NO: 18833 - DNA, 252 bp, Glycine max
  Clone ID: 700874570H1
gccgaggctacaagacaaagtcttggaccaagatcagtccaatctccagttggcttctcaagaatagcctcctgtcttgttaaggcagctgctactccccctgtcaagcaaggatcagacagacctttgtggttgcatcaaagcaaagtctttcctacttggatggcagccttccgggtgactatggatctgaccctctgggactttcgaatcctgaaggaacaggagggttcattgagccgaaatggctag

SEQ ID NO: 18834 - DNA, 246 bp, Glycine max
  Clone ID: 700874572H1
ttagcgtctttctgaattccatatgccagctggttagagctgatatcaacggccaaagttttccgagtagagagcgaagaacatgaccaggagctatatggagaaattggtgagagaagcatatgttgatggaatgacttggaggaaattgatgcggctttcttaacccaaggtgaaactttggagcaatttccaaacaatcatcaagcatcactaatagcatatgatcagaacgactattttggt

SEQ ID NO: 18835 - DNA, 244 bp, Glycine max
  Clone ID: 700874573H1
actagatatgctaagagccagaaggatcaagttattggtcaaattggacttcccatctttatgggggcattcacatttgttggtctagctgttacttcatccacaaaagtgatatttggtcaagttattctgacccaattctgcttcttggtcaaattggtggcctcacaactaagatcgttgcaatccttggtataagccttgcaattatcaccaccaatattgctgccaatgttgtggcacc

SEQ ID NO: 18836 - DNA, 238 bp, Glycine max
  Clone ID: 700874575H1
ctacacatacatatatattaagaaaaattaagcaacgattcaagaagaaaatgggttctgaacttgaagctaacattcacgtcctcatggtgtcctatccagcacaaggacacataaacctttgctcagactaggtaagtgccttgctgcaaagggcttatttgtaaccttcaccacctcagagaccgctggtaaaaacatgcgaaccgccaataacatcactgacaaatcagtgatt

SEQ ID NO: 18837 - DNA, 93 bp, Glycine max
  Clone ID: 700874577H1
aatcgataaattcagtaaattgttcattgaaaaaaaaaaaaaataagggaccttaatgctaaaggaaaagcagttataaaaaaaattgaaaaa

SEQ ID NO: 18838 - DNA, 253 bp, Glycine max
  Clone ID: 700874536H1
ggcaaaacctgtggccccacctgttgcttcttcctccccttctagtgcagctgtaccaggatcagttacagcagatgctccaaaaatggggtctaggttattggataaagatgcactcagaacatttatcagagttcaatgccctttggcacacctacggaccttaattattccaatattattaccataaagaccaacggcttttcggcaacagatttgcctcctgcggaccagaagcagccagcttggaaac

SEQ ID NO: 18839 - DNA, 253 bp, Glycine max
  Clone ID: 700874510H1
atctgattagagtgagcacaagcttggttctagtagttttagtagctctcacagttcaaattttctacatttcacccatagatccagttttgctggatataaaacctgctccttcaaccaaagacaatcaattacaaatatcattaagcttggagaaggacttttgaaggaaccagaagatgttgttgtagataaagaagggactctctatacagctactcgagatggttggattaaaagattgcgcaggaat

SEQ ID NO: 18840 - DNA, 255 bp, Glycine max
  Clone ID: 700874511H1
cttttgacggctcctactaatcccacttctccatcgccgcctcagagtctttcgtcgaatacgatgctgttttctcggatatcgagaaacctcagatgcagcttcaactcatgtcggtggtttctgtccatcggagccacaaccaccgcttcctttcgctgcacaattttcattcacgtggtggagactctactcaacaggttatatgaagtttaattatttcaaagggcctgctagcattgcatagtagtagat

SEQ ID NO: 18841 - DNA, 259 bp, Glycine max
  Clone ID: 700874512H1
cggctcgaggagctagtttagttatctactcttttctgcatgtttgttctctcaacgactcctccgcgaaagagtattattcaatattctggttgggttgaatcccggggttgaagcgttgcagacatcacggctattctaagatgtctcgctccctcattcatgtctgatctattcgacggaggacgggtagcagtgcaactgccgagaaccctacgctgcacggtaggcgtggtgctttgccttctgaaggtggtag

SEQ ID NO: 18842 - DNA, 254 bp, Glycine max
  Clone ID: 700874513H1
gaaacattttgagaaggcatgcagtttccaagaagtatgaagtttcctcatttactgaaaaaacattagtacacaagaaagataatggctaatgaccaaactagagacaatttaaaccacagactatgactcttctccctaatgaagctacccaggaagatggtttcttttttgcatatgtatttgatttgatgatgctactatcactactatatcatgctttgaacataaagtcttcatctcttttccttgag

SEQ ID NO: 18843 - DNA, 257 bp, Glycine max
  Clone ID: 700874514H1
ggcgacgaaggactgaagcttttagcatcagaggaagagggtgaaggagagagagagaaagtgagagaaagagacgaagacgttcaagacgacaacactcaagacgacaacgttaaccatgaatcctgatctcatgaggtcctaagcatgcgtcaaaaagaaatgtcgtaccatcaacttgcacgtgatactcggtcccattcgctcccattgccactcaagacaccgccgcactcactcgatctaatgcgtcacca

SEQ ID NO: 18844 - DNA, 256 bp, Glycine max
  Clone ID: 700874515H1
ctcacttacaagcgtaatcaacgaacttgcctctttctgtttattattttttattttttcgtattttcggtattagaaaaggaaataataacgagagagctctagaggcgcttgcgtaacggtaattgcgaaagaaatgcaaccaacatcgaacggctctgactcgaaagcgacggagcagcggacgccgccgcctcagccagtggccgtgccgccgcagtggatgccgatgcaatacccggcggcggcgatggta

SEQ ID NO: 18845 - DNA, 259 bp, Glycine max
  Clone ID: 700874516H1
tctcgagccgaatcggctcgacgccacgggcaaatgcagatgcacatgcaacaaacgcagcagcagctgcaggccacggacggcaccattctcgacctccactcctcctcctcctcctccttcctccggcggctccgcgccgaggcaccgccgaagcaggtggctcaagcaatggacaagctcggacaagccgaacgaatcatcgccgacatccgaatcggcgccgaccgcctcctcgaagcgctcttcgtcgcggcgg

SEQ ID NO: 18846 - DNA, 283 bp, Glycine max
  Clone ID: 700874517H1
gcatgcacacgtccgtattcggctcgagcactagtgacatttgcggtagacttcccaggatgtgaaccatgccgtccttgctgtggggtatggagttgaaaatggcgtcccatattggctcataaaaaattcatggggagaaagttggggtgagaatggctactcaaaatggaattggggaagaacatgtgtggtgttgcaacttgtgcgtcttatccagttgtggcataaattgcataagaatatggtccctggtgactaccaccttgtcatgcttcagagt

SEQ ID NO: 18847 - DNA, 257 bp, Glycine max
  Clone ID: 700874518H1
actttccaatacaataatcactaactgaatattcgatcggagatgtctgctgccgccgaagaagctaacgctcccgccgtcgaaaagccggttgaggaggtgaaggcgccgaaccccgcgaaggagaagaaacctaggctccgaaggaaaagaagccaaaacaggccaaaacagcttcacatcctccatattttcagatgattaaggaggctttgatcgctttgaacgagaaaggaggatcgagtccttatgcgata

SEQ ID NO: 18848 - DNA, 255 bp, Glycine max
  Clone ID: 700874519H1
gtaataatagtcagtataaaactactagttcagataaccattcttttttcccttcagagttgcctgcaaggtcaaggtttgaggctcagtcaggggactcaagggggaggaattctaagaatctgagaatcttggaggcttggatgatgggaaggtaaggaagatttctaggccagagagaattgttagggaaattgtttcagagtctatacctgtcatggcattgacaattcaggagcttactgatgatgtcat

SEQ ID NO: 18849 - DNA, 253 bp, Glycine max
  Clone ID: 700874520H1
ggactatatctggagattcatactatggctctcacgtgatgcagtatggtgatgtagggcttagcagagatgttctcttccattatttgggtacagatcctgctaatgataatttcacttttgtggatgaaaacccttatggtcaccttcaaaacccctcaaccaacgtgatgctgatctcatccatttttgggataagttccgcaaagctcctgagggttctctcaggaaaaatacagctcagaaacaagtt

SEQ ID NO: 18850 - DNA, 254 bp, Glycine max
  Clone ID: 700874521H1
gagcaacatcagaacagttgcagcattcaatgctcagaacaagatgttatcagtgttctgccacgagcttcgtgtgcctcagagccagagcctgcgccggagccagacatccggcttcttgtttggcctctctcacttgccctctatacttccgaggctctcattctatggtatggtgcacatttggtcagcaaaggtgtttcaaccttctccaaagtcatcaaggtgtttgtggtcttagtgatcacagcaaa

SEQ ID NO: 18851 - DNA, 245 bp, Glycine max
  Clone ID: 700874522H1
aaaggagttatctggcggtagaaaccattttgtggagagttgtggcttgcctattagcacatacttcagtgctttgaagctgctgtggttgatggaaaatgtagatgccgtaaaggaggccataaagaaaaggatgcgctgtttggaactattgacacttggttgatatggaatctaactggtggggtgaatgggggattgcatgttaccgatgtttcaaatgcatctcgtacaatgctcatgaa

SEQ ID NO: 18852 - DNA, 248 bp, Glycine max
  Clone ID: 700874523H1
cttttcacctgaaacttgcttttgttcccgattttctcaaattgctttcggttttcgttctgattctgcaaaatcatggagatggagcgcatcgttgaattccctcacacctacatggatcgacccccagaaagagagcgcgtttgggctgggacatcgctgaggcccccaaggctcaggtaggattgttttgtggacaagaggttgagaatatttcaagctatgctccttcagaacatccccctagt

SEQ ID NO: 18853 - DNA, 253 bp, Glycine max
  Clone ID: 700874524H1
ttcttcttttcgcctcacaccatgaaaccccttctccgcttcggaatcgccttcatcctcctcctccattcctccctcgcttctcatatcccctaccccaaagcaatttccgatttgaaggatacaattgtgaaggatttgggttcacggcggaagatgatgttacgattacggggttcgatcctcgagacgccgaggtagggcattccgtggagtaccaattcgacctcgaaatcgatcacaaggttattcc

SEQ ID NO: 18854 - DNA, 251 bp, Glycine max
  Clone ID: 700874525H1
tttgagtctgctggaaaggatagggcagagagcattgtaggtttcatattgtcaacatcattaacaatatcagagatacagtcatttctaatctcaggtggcttgagtcccattgattttgatgcttatatttgaatagtggcagtgatctatactatccatccctcaatcccggagatcgcccatttgtggttgacttgtattaccactcacacattgaataccgttggggtggagaagggttgaggaag

SEQ ID NO: 18855 - DNA, 252 bp, Glycine max
  Clone ID: 700874526H1
cagaagaactgatgagctagtggatggcccaaatgcttcgcacatcacccccggggccttggacaggtgggagcaacgactgagtgatgtttttgaaggtcgaccctatgatatgtatgatgctgccctctcactactgtctcaaagtacccagttgatattcaggtactttacatagccaaatctaagattgagaattacatctttttagaacaaacttacatgaagttctttagttggttttgatgttaa

SEQ ID NO: 18856 - DNA, 254 bp, Glycine max
  Clone ID: 700874527H1
cagcaagcatctccttctcaaactagtagtattattcttccattccgttctacatataatcattcataatgggtgttttcacattcgaggatgaaatcaactcccctgtggctcctgctactctttacaaggcccagttacagatgccgacaacgtcatcccaaaggctcttgattccttcaagagtgttgaaaacgttgagggaaatggtggcccaggaaccatcaagaagatcactttccttgaggatggag

SEQ ID NO: 18857 - DNA, 251 bp, Glycine max
  Clone ID: 700874528H1
acaaaacccgcaaaaatattccattagttatgatgtcatctcatgattctatgggtttagtctttaagtgtttgtcaaagggtgctgttgactttctagttaaacccatacggaagaatgagtttaaaaacctgggcagcatgtttggagaagatgtcacagttctagtgggagtggcagtgaaagtggcacacaaacccagaagtctataaaatcaaagagtcttgagaagtctgataataattctggaa

SEQ ID NO: 18858 - DNA, 254 bp, Glycine max
  Clone ID: 700874529H1
cttgctctcctttgcttctcattctgcattttcctattgcttgactctgaaggtcgggaagacatcatcaccctccaccagtcagcgaatttaaaactgcttaaactgtagattttttgtatacaatctcagtcttctttctcgcgtgtagcacgtccactctggactatgtctttatttttgtggtgaaatttcggtcagttgaatgagcttgtacaaattgtgacaaatcagtgtgtttggtaacacatttg

SEQ ID NO: 18859 - DNA, 244 bp, Glycine max
  Clone ID: 700874530H1
gtgatcactcctgaaccacactaatggatatctatgagtgggagtttctctctgatgatggctaccttgatttcaatgaagagggtgggaagcaaaagcaaaagcagaattcctttggaaaattggactccgaggcatctttgacatggactacttttgctcatcaccaccaccaccaagggtgagaactcaactagtccctttgccaattcaattggagccaaaaattgggaaggccccagaa

SEQ ID NO: 18860 - DNA, 248 bp, Glycine max; identical to SEQ ID NO: 18827
  Clone ID: 700874531H1

SEQ ID NO: 18861 - DNA, 255 bp, Glycine max
  Clone ID: 700874532H1
ctctcttctcgctcttggcttatcgctcttgactcactctcattcattcatttccaccggtcatggatcccctaagcgtgtggggtaacacgcccttggcgacggtggatcccgagatcgatgacgtcatcgagaggagaagcgccgtcaatgccgcggaatggagctcatcgcctccgagaacttgacctccttcgccgtcatcgaggccctcggcagcgctctcacgaacaaatactccgagggcatgccggg

SEQ ID NO: 18862 - DNA, 255 bp, Glycine max
  Clone ID: 700874533H1
cccagcgatacccgtcgacgatgacgatgacgacgacgacgacggtggtgatgatgatgctatggatgagttggaggatgcaaatgttaactcagtgaacgttactaatgccgcgagtgtaaatcatgaagcggagtggctatgccttccagaactagcgagctcactctttctttcgagggagaagtttatgtctttcccgctgtcactcctcagaaggtgcaagctgtcttgctgcttttgggaggacgtgat

SEQ ID NO: 18863 - DNA, 247 bp, Glycine max
  Clone ID: 700874508H1
atgagtccaaagaagaggacttgcagaacaagagccctttgctcctcaaaatgaacccggttcacaagaaaatcccggttctcatccacaatggcaaacccatttgtgaatctctcgttgctgttcagtagattgagaggtctggaatgacagaaatcccttgtagccttctgacccttaccagagagctcaggctagattctgggctgactttgttgacaatacgatatctgatcttagaagaaag

SEQ ID NO: 18864 - DNA, 243 bp, Glycine max
  Clone ID: 700874455H1
cttaccagtgcctggcgtcgcggacacagaacagagcttgcagaagcgatttctcatttctcattcttaacaacacacttcaacaatggccaaaaccttcaaatacatcatcctcggaggaggagtttccgctggttatgcggcgagggagtttgccaaacagggcgttaagccaggggagttggctatcatttccaaagaagcggtagcaccttatgaacgtcctgctctgagcaaggctta

SEQ ID NO: 18865 - DNA, 242 bp, Glycine max
  Clone ID: 700874456H1
gaacattcctatttcctacacaacactacactgtctggtggaagagtgtcttcactctccatgcaacaacgttggcgatgtctccttattctctctctgtgttagcctctgtctcccccaaaatgcgcacccttctttctttctcctcatcacactctccacatcttccaaaccacaacataactaaatccaataataaactctctcattccatcaatggactttgatcatgcgcttcttct

SEQ ID NO: 18866 - DNA, 53 bp, Glycine max
  Clone ID: 700874457H1
cagaaaatgtatgtgtcttcacaattagtacataatgtaaccttagtgaatag

SEQ ID NO: 18867 - DNA, 236 bp, Glycine max
  Clone ID: 700874464H1
aggcaatggacaaggaagatcgtaccaatgtgagcttgtcttggccaagatgggaatcaaccccatcatgatgagtgctggagagttggaaagtggaaatgcaggagagccagcaaaactgatcaggcagagataccgtgaagccgcagacttgatcaagaagggaaagatgtgtgctctcttcatcaacgatcttgatgcaggagctggtcgtcttggtggaacacccaatacac

SEQ ID NO: 18868 - DNA, 218 bp, Glycine max
  Clone ID: 700874465H1
aggagtaagttgagggtagatggcagcaggaagctaaggcaaaagcagaataccctgatcaacgaaatcttgaatcatctatctcaaatcaagataaagatattgaaaacgattatgtaggatcagacagtgaaaagaatagtaagggtataaagataaagaaagacaagaacaagatggaggcagaacttaatttcttactaagaaattttttgatt

SEQ ID NO: 18869 - DNA, 249 bp, Glycine max
  Clone ID: 700874466H1
atgagtccaaagaagaggacttgcagaacaagagccctttgctcctcaaaatgaacccggttcacaagaaaatcccggttctcatccacaatggcaaacccatttgtgaatctctcgttgctgttcagtacattgaggaggtctggaatgacagaaatcccttgttgccttctgacccttaccagagagctcaggctagattctgggctgactttgttgacaataagatatttgatcttggaagaaaga

SEQ ID NO: 18870 - DNA, 236 bp, Glycine max
  Clone ID: 700874473H1
cctctgcacaatctccttcaaaaagcttctcatccatggcgaaaacgctcatttcgtctcaatcgttcatcggcacaccgctcccctcactccctcgccaccacctcccccaccgcaccaggctcgtcgccaccaaagtcctcgtcagcctccacgaaattcccccaatccactccataagccgcaacattgacttcgccggaatcgtgactagagccgaagccttctctacacgc

SEQ ID NO: 18871 - DNA, 239 bp, Glycine max
  Clone ID: 700874475H1
ccttatcacccttttgcataaaagggccaccccttcttcttcttcccttctcaacttgtactacaatttctggattgaattatcttcaaaatgagacgaaatccttcatgttcaagctggtcaatgtggaaaccaaattggaggcaagttttgggaggtgatgtgtgatgaacatgggattgatgccactggaaattacgtaggtaactttcatcttcaacttgagagggttaacgtgt

SEQ ID NO: 18872 - DNA, 237 bp, Glycine max
  Clone ID: 700874476H1
ggcaattttagagcaagtgttgatttgcagcgcactcatcgtattaaaggaatgattaaaatggtggccacagttggtattcctgagaatacaggtatagcattggcctgtgctatgaatagttcttttagggggcgtgccagttctgatatttacaccatctgctctcaagactgtgaattatggaatcctgcttgcacaaaagcaatgactatgtcatttaatccaaacccgtgt

SEQ ID NO: 18873 - DNA, 238 bp, Glycine max
  Clone ID: 700874478H1
gaagaaggaagaggagaagaagaaagaggcaccaccccctccaccagacccagttttagagctggtcaaggcttatatggcttataatccccacatgaccacatactactatgttcaaagcatggaagagaatcctaatgcttgtgtcgtttgttaaataccaagctgtggaagaaaacatgaggaaaggaagacatatataaaaatatatatcaaactttctctatttgcaatggaa

SEQ ID NO: 18874 - DNA, 238 bp, Glycine max
  Clone ID: 700874479H1
agaaaagaaaaaatttgtcttataactttgcaacttatggttcacttcttcttcttcgacttctgcattatcgtggtgctttgatattattctattgagtcaaaaaatgggagttccatagagggaccctctcgcactattgagcttgcctcctgggcttagggtctaccccacagatgaggagcttctggtgcagtaccgtttctgtatagtatcttgccatcattgctctcttcca

SEQ ID NO: 18875 - DNA, 220 bp, Glycine max
  Clone ID: 700874481H1
tcccatgtcagtgtgaacacgcacactcgtgagagcagaaagatagtcatggacacaagaacattgctcctgaaactactcatcactcttgtggctctttcaggatgctcttcttcggcttcagatcatttggttaatgtatccaagttggagaagttcgtggatgagcttcctcacatgccctaaatcttgggctatcatcttccaaatggcgtcccaa

SEQ ID NO: 18876 - DNA, 246 bp, Glycine max
  Clone ID: 700874482H1
ctcaaaatgttgtcatccaatttcgttccctctcttttcattggtgtgcactttcacttggggagcttcatcaactgcagtggaaattgtgctttgtgcttgagatgtctggtgttcttctttgggtgagttgtggacccaaagagaacatcaactccttggtgagtttttcatgcaggagtagtagtggtggtgaaagaacacaaaagagattttctggaatcagttttgctagtggtacgtctg

SEQ ID NO: 18877 - DNA, 245 bp, Glycine max
  Clone ID: 700874483H1
cagcacaaagcgggttactgtctgttcaagctaccatctctctctctctttcttagtgcctccttgccagaagttaaaatggcccaagaaactttcctattcacatctgaatcagtgaacgaggggcaccctgacaagctctgtgaccagatctccgatgctgtgctcgatgcatgcttggagcaggaccctgacagcaaggttgcctgtgaaacctgcaccaagaccaacatggtgatggtttt

SEQ ID NO: 18878 - DNA, 241 bp, Glycine max
  Clone ID: 700874485H1
ggcccctggtatgacccagacaacctcttgccactggcttggcccctggtatgacccagacaaccaccaccaccaccacagagcagactcttttgaactctggactcgagaacagaagaatgagccagggatacgtcgagcctttgatcgagaacagaagattgagcagaggttacgaggagaccaccctcagctctggctcttactccaacgtagctggaaaccgcctcagcgtcacccg

SEQ ID NO: 18879 - DNA, 237 bp, Glycine max
  Clone ID: 700874486H1
atttgatagctgagaggggcattgctgctcattatagtgggagagaatttgtcacagggttggttggaagtgcaacaccaagtagtaaaagctcaagagggaagacagtttgtctaaacaacgccaatattgccctgagaattggctggctcaatgcaattagagagtggcaagaagagtttgttggcaacatgagttctagggaatttgtcgacaccattacaagagatctgctgg

SEQ ID NO: 18880 - DNA, 237 bp, Glycine max
  Clone ID: 700874487H1
attgcctcaagggtccccaacagcaaggttttcggtggatgcttcaagattgttgctgtagaagagatgaaagagattgaagagacccagcagaccgacaaggacagatggaagggtcttgcctatgatatctcagacgaccaacaagacatcacaagaggaaagggtttggttgactcccttttccaagctccacaggatgctggaactctatatgcagtcatgagctcctacgag

SEQ ID NO: 18881 - DNA, 238 bp, Glycine max
  Clone ID: 700874488H1
aaatggccggggtttgccgttccctaagggagagctgtgtgagtgatcacctttgggagaggcacatgaaacagaaatggggcagagttattggtcaagctgcttatagggagtggaaatggcatgctgcttctaaagggaatgttggaactcttagacatggcaagcaaaggagcttgttgaggctggtgtcacttagttggcctttttcatggatgagaaccaaggtagatgcaat

SEQ ID NO: 18882 - DNA, 231 bp, Glycine max
  Clone ID: 700874489H1
attggccagaaaagacttggtcattgcaatgaaacgacttcaagacatgggtgcctcatatttcatattggatctcagagacaatcttggtgggctagtacaggccggaattgaaattgcaaagcttttcctaaatgaaggagacacggtgatctacactgttggaagagatcctcagttacagaaagctattgttacagatacttcaccattgattcaagctcctattgt

SEQ ID NO: 18883 - DNA, 238 bp, Glycine max
  Clone ID: 700874490H1
aaaaggattagcttattttaataaatacatccaaccaaccccaatccttttaccgattaacatcttagaagatttcacaaaacccttatctcttagttttcgacttttcggaaatatattagctgatgaattagtagttgttgttcttgtttctttagtacctttagtagttcctatacctgtcatgttccttggattattcacaagcggtattcaagctctcatttttgctacttta

SEQ ID NO: 18884 - DNA, 71 bp, Glycine max
  Clone ID: 700874491H1
cacctcaccggtgatggctataggcgtagagtttccggtatgtacacgctcactccaactctctcttcatt

SEQ ID NO: 18885 - DNA, 236 bp, Glycine max
  Clone ID: 700874494H1
gccaaatgctgttctttcaatgtggagatattttgttggagatctcgtctttgaagtttctaagatgacttctccttacattaaatgtacagtctctttcttcatagcatttggaaatttggctgatgacaccatcaattttgaggcttttccccacaagctggtgcagtttggagagattcaggaaaaagttgtattgaaattttcacaagaggaatttcttacagcttggtcaa

SEQ ID NO: 18886 - DNA, 232 bp, Glycine max
  Clone ID: 700874496H1
ggcgacgacagcagccttgtgcggcactatgatgagcagctccttcctgaggagaaaagcagtggtcacaagcctgaaggcattccccaatgctaacgcagtgtttggtgtaaagggtggacgtggaggtggtgtgactgccatggctagcttcaaggtgaagctgataaccccagagggagagaaagaatttgaatgcccagatgatgtatacattcttgaccaggcagag

SEQ ID NO: 18887 - DNA, 64 bp, Glycine max
  Clone ID: 700874502H1
ctgaggtgatggctttgaatttgccttctcccgcccaagtgaagcccttattgttctcttcaaa

SEQ ID NO: 18888 - DNA, 260 bp, Glycine max
  Clone ID: 700874504H1
tggctccaaaaaatctctttctgtctcctcatctctctcattctccttgttacttgcactgctttttccttccaattccatggcttccataatagtgaaagaaatctcacccgtgaaggggattcaaatgtcacacccaaggtatacttcagctcaccaaaagagaaaacaacattgttggccatgcattttataacaaacccatcaaaatattagagaaaacaaattcttcagtgccccaaacaaaattttcctccttt

SEQ ID NO: 18889 - DNA, 237 bp, Glycine max
  Clone ID: 700874454H1
aaattatgttgcttcgtggctcaggcaactgcattgtaaaatttatgtcgtaacttggggatagcagtgtaatctttttatattctcaattcctattccattcaggtagaaaataaatagattacactgctatccccaacttacgacataaatggaataggaattgagaatataaaaaaaaaaaaaaaaaggggcggccgccgattgataacctcttggacccgggatttaattccg

SEQ ID NO: 18890 - DNA, 258 bp, Glycine max
  Clone ID: 700874506H1
aaaacactcataacacaaagcacaaagcaaagctcatccttgagttaaaaaatggcagcagcttcttccatggctctctcatccccatccttggctggcaaggccgtgaagctgggcccatcagccccagaagtgggagggtgagcatgaggaagaccgtcaccaagcaggtctcctcaggaagcccatggtacggcccagaccgagtcaagtacttgggcccattctctgacgagcccccgtcctaactaaccggtg

SEQ ID NO: 18891 - DNA, 256 bp, Glycine max
  Clone ID: 700874507H1
cagcaaagaggttgaacaagtgggaggacaaaacggagccacctgtcaataattgaggctctttgtttctcaatgtagcctagcccagaattatacaataacacaaatcgggctttagatctcatagctttttgtttaaataaattgtaagatgaggccaaattgataatttcactaccagcttgttggtctaacccgactcgtttgcgtagtgttagctacgttgtgttcacatgttgggagaacaaacatgtta

SEQ ID NO: 18892 - DNA, 260 bp, Glycine max
  Clone ID: 700874418H1
gctcgagcgagggtgagaagaagatcgcgtacgatgcgaactgtgcgacctaatggaggagtacggccagatcggcgttgtgaactccgataacgtgggatcgaaccagctccagaacattcgcgagggtctccgtggcgactccgtcgtcctcatggggaagaacaccatgatgaagcgctcagtcaggatgcacgctgagagaaccggaaacaacgcctatctcaaccttatcccgctccttgttggcaatgtgggat

SEQ ID NO: 18893 - DNA, 254 bp, Glycine max
  Clone ID: 700874419H1
ggctctctcacgcagtcgcagtgagtgaaaaggaaaaccctaattgcggtattctcagtgccttcgagagaaagaaaaaatggcagataatcttgttctccgtggcaccatgcgcgcccacaccgacgttgtgacggcgattgccactcccatcgacaactccgacatgatcgtcaccgcctcacgttccaaatccatcatcctctggcatcttaccaaggaggacaagacttacggtgtcccccgccgccgcc

SEQ ID NO: 18894 - DNA, 248 bp, Glycine max
  Clone ID: 700874420H1
ttgccattctcatcctcctctgtctctctctctccaccattgccatggatccttacaagctccggccatccagcgccttcaattctcccttctggactacaaattctggtgctcctgtttggaacaacaactcctctttaaccgttggagctagaggtccaattctgcttgaggattatcatcttgtggagaagcttgcaaactttgacagggaacgtatcccagaacgtgttgtccatgccagggga

SEQ ID NO: 18895 - DNA, 247 bp, Glycine max
  Clone ID: 700874424H1
ctttgttagcactgttgaaatttctaatccgcagtacctaaagtatgtctccaacagtcacacacaaatgtcctcttctctgaaacgctgcacatcctacaccaaatacgagatcagaaagcgaaaccctgaaccaaaatcatgtgccctattggtaatcgacgtgcaaaaccacttctcatccatggccaccccaatcctccataacctcaacaccaccatctccctctgccgccgcgcctccatc

SEQ ID NO: 18896 - DNA, 237 bp, Glycine max
  Clone ID: 700874425H1
ggctacctgtttctgcaatggatgcggtagctaagattgtagaggttcctcccatacgggtgtatgaggttgccacattttactccatgttcaatcgagctaaggttgggaagtaccatctgttggtttgtggaagaacaccttgtatgataagaggttcacgaggaattgaagaagccttattgaaacacttgggagtgaagcgcaatgaagtaacaccagatggtttgttttctg

SEQ ID NO: 18897 - DNA, 244 bp, Glycine max
  Clone ID: 700874426H1
cgtgaaattgaaggagtctccgttcactggacaacaagaaaagccatctgcactaatcacttatttgtacattggccacttcttagcaagatggggtgccagaatgtgggaattctctgttggcttatacatgatcaatatttggccagaatcgttgctgtacgcagcaatatatggtgcagttgaatctgccgctattgctgtgtttggtcccataattggaagatgggttgataagttgtct

SEQ ID NO: 18898 - DNA, 242 bp, Glycine max
  Clone ID: 700874427H1
gaatttgagggcacattctcattaagcatttttagcaaccattcgaggctcaagagtctgctaattggcaatatgtgagttcgcactgacaatccgccttggatcgcaccattgcagttggagcaactaacaattacctcttgcaagtgaaacttacccacatgagtaattccaactgtcctttcggatcagagtagcttgagagatattgatttatcgggtaacaacctagttggtaaatt

SEQ ID NO: 18899 - DNA, 242 bp, Glycine max
  Clone ID: 700874428H1
gaggggctccaaggctttgctcaatttcccagctgaaattgttgctgctgctactgcaacagagttatctttcaaaagtagtagtaataataataataataataataataacaatcccgactgctgtttctgattccagtgctggtagctcttgcacgaacaattccacttgggtaaataggaatcagtcagaaatcacaagtggcacaggttagctaaatggtgttgaagttgaacaatta

SEQ ID NO: 18900 - DNA, 242 bp, Glycine max
  Clone ID: 700874429H1
cagcttcatccctaacgcgtgcatagcagagtcagagacagagacgcagccatggggcggagacctgcgaggtgttataggcaaattaagaacaagccataccccaagtcacgtttctgccgtggtgttcctgatcccaagatcaggatttatgatgttggtatgaagaagaagggtgttgatgagtttcctttctgtgtccatctggttagttgggagaaggaaaatgtttcaagtgaggc

SEQ ID NO: 18901 - DNA, 243 bp, Glycine max
  unsure at all n locations
  Clone ID: 700874430H1
gattcaatcacgcagccacgatattccctgcgcacagcaccactactccctcggtgctcctccgtttccactccaccgccgactcctcgnctctctctctctctcttccaccaataacccgctctctntnctctctctctctctaattcgaagctgaatccgaattcaaaccgtggtggtgacgtgtttcgcatagnctctgcttctagtcgcggcaatgggcttagggttacggctacggtg

SEQ ID NO: 18902 - DNA, 244 bp, Glycine max
  Clone ID: 700874431H1
gcttggtcaactcaggtgcgtcctgcaacaactctgttggctgatgggtgtccatatttgtatgctatggtgcatgatagttcagtgtctacaataccaggtgattttgtcattggtgttaagttgacaaccataaacaatatgtgtgcatatgggctcaatcctggtatttcaggttctcgtcttttgggcaccattcctcagtctatttcacagcaaactgtttggaatcaaatggcaacag

SEQ ID NO: 18903 - DNA, 252 bp, Glycine max
  Clone ID: 700874435H1
gccaaacccagatccagcgctctttattttcgtcttttctacccttcccggatcccaatccctaatctttctaacactctcactccaaaaatctctaattttttcatctgggaagatcggttgacgaatcgaggatccgatcgcttgcgaggaactagggtttcaatcgatcgcatcacacacaaggaatcatgtttagccggatgttcggtaaacctaaacaggaaaccaatgctgttgccactttggaca

SEQ ID NO: 18904 - DNA, 246 bp, Glycine max
  Clone ID: 700874437H1
ctcgagccgattcggctcgaggttttatacttctcaaccttctcgctcacacgctcaccccccttactcgaaacgctcgaaacggtgtcgtttagcgaatcttcctcgaaaccgggatctaattcccccaccttgaaatcctccgtcatcacgccgttaccgtccaacacccccatcctgcccaccggcggtaacggcggcacgcggaatattttcactcccggcggcggaggagacggtggaggc

SEQ ID NO: 18905 - DNA, 244 bp, Glycine max
  Clone ID: 700874438H1
gaaaagtttgccaaatttgaaaggaaatcagctaagcataatgatgaaacagaggataaatcaattacaattgtatcagaggctgcaaggtgtgacaaaagttttgaattgacagatttaatgctagaacaagactgtggtgttgctgaacctgaaactgaaaacgaggatgaaatcttaaaatctgagttaggcagagacaattctcatgtttctatattgcatggatgcaatgctgagcagg

SEQ ID NO: 18906 - DNA, 242 bp, Glycine max
  Clone ID: 700874440H1
catgtagccgtaactttcaaaactaggttcttgatcggcggtggtcaattttcattgctgtttgtttttgatgagtactgttttttgttttgatggtaagaagagtctgagatatttcgaatttcacaagcagctatagggttttagtccatttcctttgctgctgagggatgttttaagttgcatttaatttataacgaattttataaactgtttatggtttaaaggctattattctttaa

SEQ ID NO: 18907 - DNA, 243 bp, Glycine max
  Clone ID: 700874441H1
aatttgtggcgtcaacctatgggtttcattgtttttctaatctcgtccctagcagaatgtgaaagattaccttttgatttaccggaagcggaagaagaactagtagcgggttatcaaaccgaatactcgggtatcaaatttggtttattttatgttgcttcctatttaaacctattcatttcttccttatttgtaacagttctttactttggtggttcaaatatctctattccatacatattc

SEQ ID NO: 18908 - DNA, 242 bp, Glycine max
  Clone ID: 700874442H1
gatggacggagaaacaagcggatcttcaggacgtagctgggatcctgggttggaaattgaggtcccttttgagcagaggccggtgaatgagtactcatctctaaaggatggaatcttgtattcgtggggtgaactaggtccgggatcgttcttccttcgccttggaggtctctggctggcagtatttacagttcttggggggccaattgcagctgcaagctttaatccttcaaaagagcctc

SEQ ID NO: 18909 - DNA, 240 bp, Glycine max
  Clone ID: 700874443H1
cgagagtccagtagccgaaagcatcactagcttacgctctgacccgagtagcatggggcacgtggaatcccgtgtgaatcagcaaggaccaccttgcaaggctaaatactcctgggtgaccgatagtgaagtagtaccgtgagggaagggtgaaaagaacccccatcggggagtgaaatagaacatgaaaccgtaagctcccaagcagtgggaggaggctcgggactctgaccgcgtgcc

SEQ ID NO: 18910 - DNA, 239 bp, Glycine max
  Clone ID: 700874444H1
cacgtgattgacacagcaccatggactggctggctgagaattgctgcgtctttgctacagagcctcatcttccttaccaccatcactgtagttgcattgggggccacgtcctcggcagcaatcgaacgacaatgggatctgccgtatcttgaacagaccgggcaaacgccactgcctcagacctcatatacatctacgcacgaaatgaaagtacgaatccaactggtatgcttttacat

SEQ ID NO: 18911 - DNA, 240 bp, Glycine max
  Clone ID: 700874446H1
atttcaatctagggtttctttgcacgctaattccatcttcaaattctgccttcattcgattcaggggggaattaaattgtttctattttttttcgaatttaccacaaattagaaatcgataaagaaaaatggtgagggtgttgagaagctgcattcaatcgattttgaagctggtgaactcggtgattgggatggcggggctagccatgattctgtactccgcatggatgattagggttt

SEQ ID NO: 18912 - DNA, 231 bp, Glycine max
  Clone ID: 700874448H1
ggattgggctcgagtcgggttccggtcctcgcactcgtcgttgaataggttttcaagtcgacctcgcactcttcccccactctctctgcagcttgctctctcgatctcagcaaaaccagatagatatctctgaagcgagcaaatccgagggttgctctcttcaaatgggttagccatagctctctcgtcacgtcgagctcaaatgtagttcacattcagcgcactgcgcat

SEQ ID NO: 18913 - DNA, 243 bp, Glycine max
  Clone ID: 700874449H1
cttgcacgatctgcttgctgcctgcacatcgtatttcacgtcagctatcaacaggaatcaacaactttcatcatgattgtcgagcccaacgccgtcatggatagcatcatggccgctgccacctcggttgcgcctattccaagcgtcgtcccgactctgcccgatttcgagacggcagcgaatactggtaaccgaaggctaatgggccgtctccgtcatgatggcaatctcgatggcaatttc

SEQ ID NO: 18914 - DNA, 247 bp, Glycine max
  Clone ID: 700874450H1
agatgggctagtgtaaatcttggcatctttatatgcatgcagtgttcaggaatacatcgaagtttgggggtacatatatcaaaggttcgttctgcaaccctggacacttggcttccagatcaagttgcattcatccaatcaatgggaaacgaaaaagcaaatagtttctgggaagcagaattacctccaaattatgacagagttggaattgagaatttcattcgtgcaaagtatgacgagaagagat

SEQ ID NO: 18915 - DNA, 244 bp, Glycine max
  Clone ID: 700874451H1
ccggcttcctttccccgtttgtacgctctctgtcaatcgctttgatgtgaggggagaaccacaacaaagcacaaaccacacactctgctaactcgaggttattgtcttctttccccaaagaggcatgagttgcaacgggtgccgcgtccttcgaaagggttgcagcgagtcttgtagtctgcggccgtgtctacagtggatcgatacgcccgaagcacaaggccatgccactgtcttcgttgcc

SEQ ID NO: 18916 - DNA, 243 bp, Glycine max
  Clone ID: 700874453H1
ccgttgtcctcaaagttggtatgtcatgtcaagggtgtgctggagctgtaaacagggttttggaaaaaatggaaggtgttgagtcatttgacattgatctgaaggagcagaaggtgacagtgaaaggaaatgtgcagccggacgaagttctgcaagccgtttccaaatccggaaagtcgacggcattctgggtggatgaagcacaaccacctgaaaacaagccttctgaaactgcacctgtta

SEQ ID NO: 18917 - DNA, 257 bp, Glycine max
  Clone ID: 700874417H1
ggggtttcttcgctgactgaatcagaaaggcagagttttaaggatgagatagagaagcttaaacatgaaaaagaacaacttcttcgggagttagagatgcatgaacaggagtggaaaatgtatgaggtacaattacaacactccaatgatcgtttggaaaagttggaaaagaagcaagaaaatttggtttcttctgtctctcaagtgttgcagaaacctgggattgccttaaatctcttgctgttgacagaaaacat

SEQ ID NO: 18918 - DNA, 234 bp, Glycine max
  Clone ID: 700874383H1
ccgtcttcctttccccgtttttcttctctctctcaatctctttcatgtgagggtagaaccacaacaaaacacaaaccacacactctcctaactcgaggttatttttttctttccccaaagaggcatgagttgcaacgggtgccgcgtccttcgaaagggttgcagcgagtcttgtattctgcggccgtgtctacagtggatcgatacgcccgaagcacaaggccatgccactgt

SEQ ID NO: 18919 - DNA, 233 bp, Glycine max
  Clone ID: 700874385H1
cccatttgttacttgtggtgcaacctatgtgcccatctatcgaggacaaaaggatgtctcttgcccttactgcacttcccgttttgtgccaagccaagagggacagctatgtactgtgtgtgatcttgcagtggtcggggcagatgcttctggattgctgtgttcaccttcccagatacgttgattctgctgctagaccagaaacattttttcccccaatttgtttcagggtg

SEQ ID NO: 18920 - DNA, 231 bp, Glycine max
  Clone ID: 700874386H1
ggaaaatgtctgtcagcgttgagggctctgcctttgaaaaaaatgtccattctgaagacagcaacgagcttgtgttgcatggtgcatttccattggctaaacatgagagacagaatggatttaatgccacagacatgaatgcatttggaaactccttcaggaactatgatgcagaaagtgaaaggcaaagaatggtggaggaattatataggatgcaacacatcaaccaga

SEQ ID NO: 18921 - DNA, 230 bp, Glycine max
  Clone ID: 700874387H1
ggagtgtgtaacaactcacctgccgaatcaactagccccgaaaatggatggcgctaaagcgcgcgacctatacccggccgtcggggcaaggaccaagccccgatgagtaggagggcgcggcggtcgctgcaaaacccagggcgcgagccgttgcggagcggtcgtcggtgcagtgatcaaaagaatggcatgtagcaaaataagcaaggctcttttcaaccttagttaag

SEQ ID NO: 18922 - DNA, 234 bp, Glycine max
  Clone ID: 700874389H1
gcatgcacacacttgcatagttttggaaaccaagaatttttgaagggtagcatcaacaagaagttctggaaatggagatcaccaatgtcagcgagtatgaagctattgcaaagcagaagttgccaaagatggtgtttgactactacgcatctggtgcagaggaccagtggactctgcaggagaacagaaatgccttttccagaattttgtttcggccacgtattcttattgatg

SEQ ID NO: 18923 - DNA, 230 bp, Glycine max
  Clone ID: 700874390H1
ggcgacgacagcagccttgtgcggcactatgatgagcagctccttcctgaggagaaaagcagtggtcacaagcctgaaggcattccccaatgctaacgcagtgtttggtgtaaagggtggacgtggaggtggtgtgactgccatggctagcttcaaggtgaagctgataaccccagagggagagaaagaatttgaatgcccagatgatgtatacattcttgaccaggcag

SEQ ID NO: 18924 - DNA, 233 bp, Glycine max
  Clone ID: 700874391H1
ggcgacgacagcagccttgtgcggcactatgatgagcagctccttcctgaggagaaaagcagtggtcacaagcctgaacgcattccccaatgctaacgcagtgtttggtgtaaagggtggacgtggaggtggtgtgactgccatggctagcttcaaggtgaagctgataaccccagagggagagaaagaatttgaatgcccagatgatgtatacattcttgaccaggcagagg

SEQ ID NO: 18925 - DNA, 105 bp, Glycine max
  Clone ID: 700874392H1
gcaattgcaaccaaacagtgtctcaatgatactgtttgttctgatgccccaacgtcgaagccctcctccggcactcggcggcaatggaagttctccctcttaaaa

SEQ ID NO: 18926 - DNA, 233 bp, Glycine max
  Clone ID: 700874394H1
cccaatttaggtcgtagatgagctgctgaaaaggcgggaggaaacagaatggtttatagaaggggatttcgatacatatctgcagagaattcaacagccttatgtatggggtggagaaccagagctattgatggcttctcatgttttgaagacaccaatttctgttttcatgagagacacaggctcggttgaattggtaaacatagcaaaatatggtgaagaatacaggaacg

SEQ ID NO: 18927 - DNA, 233 bp, Glycine max
  Clone ID: 700874395H1
gttaaaccagtggttggaaggaaaatcaattggttgaaagctggacttatagaatcatggtttgtgataaccgttagtccaaactatgctaaagaactggtgtcaggtccagacaaaggagtggaattggacaacatcattcgcaaaattgatgatgatggtcgtttggttggaattgtgaatggcatggatgttcaggagtggaatccaaccactgacaaatatatagctgt

SEQ ID NO: 18928 - DNA, 237 bp, Glycine max
  Clone ID: 700874396H1
aaaggcttcctttgaaagatttagagagagactgaagaaactagaaacactgattgatgagaggaatgtttacacaaagttgaagaacagaaatggagctggcattgtaccgtacgagcttttgaaacctgtctcaaagccaggtgtgactggaatggggggtccctgtagtatatctatttaagttgacaaagtcagactgaatattatgtgtgaagtatgatcctaaaccggtat

SEQ ID NO: 18929 - DNA, 258 bp, Glycine max
  Clone ID: 700874401H1
ctctctcacaataaccactaattctcccaactcaatttctctctcaaccggcccaatttagcataagcccagcatggccaccgcaacagcagcagccacctcgtccttcatggggacgcgcctcctggcggcccactccggggcggggcgggtgcaggcccggttcgggtttggcaagacgaaagccgccgccccgaagaaagtttccagggggtcgggctctagctccgataggcccctgtggtatccgggcgccaa

SEQ ID NO: 18930 - DNA, 279 bp, Glycine max
  Clone ID: 700874402H1
catgcatgcgaagtcggctcgagttttggccaactgggtcttgtagattttttgttggggttttaaatttcgtgttgctgggtttgaaagttatttcctttcttccccgtctggattcaactcccaagtatttgctttaattgggaattgttaggttgctttgaggttttccaaggcttgaaagctgaaaatgacgattagtagtcttgcacctaaggcacagaggaagaaatcaaggaagagcaaggcagttgttaatgagaatgcacccttgttgcc

SEQ ID NO: 18931 - DNA, 109 bp, Glycine max
  Clone ID: 700874403H1
ctcaaaaggtttgcatccaatttctttccctctcttttcattggtgtgcactttcacttgtagagctgaatcaactgcagtggaaattgtgctttgttcttggagatgt

SEQ ID NO: 18932 - DNA, 270 bp, Glycine max
  Clone ID: 700874404H1
gcgtacttcggctcgagaaaaaaaaattttaatggcacaaaacagggagtagcgactgtttattaaaaacacaggactttgcgaaatttaattatgaagtataaagtctgacgcctgcccggctttggtacgttaaaaggataattttaaaaattgaaaaaaaaatttaaaattaaaatctaacccccaaaaaacggcagccgtaacactaacggttcaaaggtagcgaaattccttgtcaggtaagttctgacgtgcatgaaaggcgta

SEQ ID NO: 18933 - DNA, 258 bp, Glycine max
  Clone ID: 700874405H1
gctcgaagggagtctcctcatgctgatgagtttgatcttgagcaagctgaatctcgagaccacaagagatggatggaaaggcagaatgcaaaattgacagaaaaagctaggaaggaagactatgcacggatacgcactcttgttgataatgcgtataagagagatcccagaatattgagaagaaaggaagtagaaaaagctgagaaacaaaggaaaaaggaggctaagttcctagcaaagaaggtgcaggaagaagaa

SEQ ID NO: 18934 - DNA, 250 bp, Glycine max
  Clone ID: 700874406H1
taaaaaacagaacaagaaacagagaacatagcaccctcctctgttttgaaacagaacaagaaacagagtgaacaaagaaccatcgccatgcttgatccaagaacacaccaccccaccaattcttttgaattgtacgacgcagcaccacacaaacctcacacatgggaagctacgaacagttccggtttgtggccttcgaaaccagctttcgaggaggtagaggttgatgattccggaatatgttcacctc

SEQ ID NO: 18935 - DNA, 245 bp, Glycine max
  Clone ID: 700874407H1
gacgagagtgaagatgagaagaagaagcaagaggagttgaaggagaagtttgacaacctatgcaaggtgatcaaggatgttttgggtgacaaggttgagaaggttgtagtctctgaccgtgttgttgattcaccatgctgtctggtgactggagaatacggttggactgcaaacatggaaaggatcatgaaagctcaagccctaagggacaacagcatggcaggatacatgtcaagcaagaagac

SEQ ID NO: 18936 - DNA, 248 bp, Glycine max
  Clone ID: 700874409H1
agcacccttaggagcaaagggttggaaggtactcgcagtttatgaaaaatctaccagaagttggtcatggactggcccagttattcataattcacctgactatgataccactgaggaggtgacatctcctgaagcttggggtcttccacataagatgcttgtcaagttggttgattcctttgccaattggttgaaatgtggtcaggaaactcttcaacaaataggaagtcttcctgctccgcctttgg

SEQ ID NO: 18937 - DNA, 244 bp, Glycine max
  Clone ID: 700874410H1
gcaagagcctatagttgacggcgttggttggggttctaagattgttttgtttgagttaaacgcgacaaactcaaatacgtgtgcattacaactcctaacccctcaccatcctcttcttctctctcattcatacccctccttttttatttgtattctcagctttgttagattccgtttctggtttttcccaattccatagtactctgttatcgtcgtcatcccttttataggacagacaaagctg

SEQ ID NO: 18938 - DNA, 254 bp, Glycine max
  Clone ID: 700874411H1
ctcgaggagccctaacaaggccagagaattcgtagggaagccttacctctgtcaatttttggtgatgagacaccagatactgatgaacatcctgtgtctcaagatttatctccctatacaccctcatccccaataaggaacagcttcactagccctggttccaacttttctatcaatgacatatggaatttatataatcaagctgaaaaccaaagttcttctaatgtgacaccaaaagcaagtgaaaatcagat

SEQ ID NO: 18939 - DNA, 244 bp, Glycine max
  Clone ID: 700874412H1
ctttctcctaaaacatctcaatgggttcttcttctattacaacatcgcccccaaccatgaccatggctgcgatcgtgctcctgttcacggtctttgctgtttcctccgccctagacatgtcgataatctcgtacgacagcgcccactcggacaaggccgccacgttgcgcaccgaggaggagctgatgtccatgtacgagcagtggctcgtgaagcacgggaaggtgtacaacgcgctcggcga

SEQ ID NO: 18940 - DNA, 226 bp, Glycine max
  Clone ID: 700874413H1
tttacaagcttccacctgttggtcctgggcggtgatcttgccaaggttcagagggctgtgtgcatgatctccaattccaccagtgttgttgaggtcttctctcgcatcgaccacaaatttgacctcatgtatgccaagagggcttctgtgcattggtatgttcgtgagggtatcgaagagggagagttctctgaggctcgtgaagatctgactgccctggaataag

SEQ ID NO: 18941 - DNA, 245 bp, Glycine max
  Clone ID: 700874414H1
atcaggagcataagctatgtgtgaagatgctttccatacactatttgtttttcttatttctatatacttaattatgccctcttatccctccattccttgattctctctctcacaaatggaagcaaaattggttgcacagtgcaatagtccaacactaactttagctcactggaaactaaaacaaccttgtgtggttggagtgctggcaaggcctgctgatgacatttcaggagaagcaagaaaaa

SEQ ID NO: 18942 - DNA, 241 bp, Glycine max
  Clone ID: 700874415H1
ggtagggatacccgctgaacattactcatgctgaccttattgcatctctaactctaaatgataaaggtgacaaccttactgcctcatattaccacattgtaaacccgctgactaacacggctgttggtgcggagtttcacatagcttttctggcaatgaaaatatactcacctttggtacacagcatgctctggatccactaactctgttgaagtcccgggtgaacaactatggtcgggca

SEQ ID NO: 18943 - DNA, 234 bp, Glycine max
  Clone ID: 700874382H1
caagaacttaagtctgtagccatggcaatagtaatcaaagtggcggctctctctggttcccttagaaaagcttcataccactcaggccttatccgagctggttccatctctctcaattatcttcatgttttgtttttaatttttgtttcatctttgatatatgcttaattgcaaattattgtggtgttgttgactttggtgagtgttggtgatgatgatgatcatggttgcagc

SEQ ID NO: 18944 - DNA, 242 bp, Glycine max
  Clone ID: 700874416H1
tccagtgaagcagatgagatttacaaaatatgcagtgtgctaggtagtccaaccactgaatcttgggcagatggactcaaacttgccagggatatcaactatcagtttccacagcttgctggtgtacatctctctacactgatcccatccagaagcgatgatgcaatcagccttgtgacgtcactttgttcatgggatccctgcaagagaccaactgcagcagaggttcttcaacatccttt

SEQ ID NO: 18945 - DNA, 238 bp, Glycine max
  Clone ID: 700874341H1
cagacggacataatcggcataccgaaacacgaacatgcgcaactcagctctcgtcatcgtcgcactcgtcttcgcccaggcagtggctctcaaccttcccagcatctactactactcttacacgttagtcaacaaggactctaacgcccccttcggccccagaggattcggtgaagaggatggagtgaactctcactacgtataccaagacggaacagactatcaagagtcatggagt

SEQ ID NO: 18946 - DNA, 236 bp, Glycine max
  Clone ID: 700874342H1
tggccatggagggttttcttctgtcgagttcctcagggatgagctgtacaaggagtgtgttgaagctttacaaggtgggttactattagtcgagaaagatttcaaagccattaaaagggcattacaggaggcatttctcaaggctgacgcgaggttattaaaacggcttgaaatgaatggagaggaggatgaatcaggtgctacatcaactgccgtgttcattggagatgatgagc

SEQ ID NO: 18947 - DNA, 236 bp, Glycine max
  Clone ID: 700874343H1
tgcacattcttcatcacttcattcaacatttctctctcccttagctagtttttaccaatggctgctgcggttagtgctgcagtctcttttccatccaccaagtctacttctctcccaagcaggacctccatcattaccccagagagagttgtattcaagaaggcttcattgcaatacagagatgtttgtagcagtggaagggtagtttccatcagagctcaagtcaccactgaggc

SEQ ID NO: 18948 - DNA, 236 bp, Glycine max
  Clone ID: 700874344H1
ctccgatggctaatctctcactcttgttcttcggtctcctcctattctccgctgccgtagccaccgtcgaacgaatcgacgatgaagacaaccttctgatccgtcaagtggtgccggacgcggaggaccaccacctgctcaacgcggagcaccacttctccgccttcaagacaaagttcgccaagacctacgccacgcaggaggagcacgaccaccgcttccgtatcttcaagaac

SEQ ID NO: 18949 - DNA, 233 bp, Glycine max
  unsure at all n locations
  Clone ID: 700874345H1
ctggtattgaaggacagtatgttggccataacgtctacccccttggctccatctatcaacaaccaggtggatcgcctngttattatccagcttctctatcatatggagagttacatacaacaacatactcgtgggattcacctctaatcaatcaagatgggttacaaggacatggttataatgaactggctggttaagcaaatggtagatccaatttgtcttcccagagtcat

SEQ ID NO: 18950 - DNA, 238 bp, Glycine max
  Clone ID: 700874346H1
gggacctcaaggcaagaatgcctggcctaaaggtataatcacatgtggcatgactttcataattataggaacggaggtggctccatggtgcaaaactggtgggttaggagatgttcttggaggtctaccaccagcattggcaggtttcgggcatcgagtaatgactattgtgccacgctatgaccagtacaaagatgcatgggatacaggtgttgtaattgaggtgaaagtaggagat

SEQ ID NO: 18951 - DNA, 239 bp, Glycine max
  Clone ID: 700874347H1
taaggacattgagaatgatcttgatgctcaatcacaggattgctacatagcagtggaggctttatgtgaggttttgcatcacagacagcctcttattgtctattttccggacagttcacaatgtttacataaagccgttcctaagtcaaacagaaatgagttttttcataaggttgaggagatgtttgaccggttatctggccctatagtattcatttgtgggcaaaacaaagttcagt

SEQ ID NO: 18952 - DNA, 234 bp, Glycine max
  Clone ID: 700874353H1
gacgagtatgccttctgattgatacaaagtggggtatgaaaccaagagatcttgaactaattgaattaatggaaagatcaaaaactaaatatcagattgtattaactaagacagatgtggtctttccaattgatgtggcaagacgtgccatgcaaattgaagagagcctcttccagaacaagtctgtagttaagcctgtgatgatggtaagctcaaaatctggagcaggaattc

SEQ ID NO: 18953 - DNA, 236 bp, Glycine max
  Clone ID: 700874354H1
ctcaatctcatcatggccaataaagagttcaaggtcccgccggtggctttcccctccgccggcaaccccgccgcggcgggtccaaacctccagcagcggcgcatgcccacgccgccgttccagccgaactccggtatccccttcatgtccttcgacataggctccgccgcggcgtccacctcctcggggccgatctacaccggccccgccgtgggccccggcggctccgccaactt

SEQ ID NO: 18954 - DNA, 232 bp, Glycine max
  Clone ID: 700874355H1
gcggttgacgcgccactcgatgtttccatttgcctgcatacctttggtattgtggggtgtggttcgtttagtggtgtcaagtcttgcgaacgtgagggtgcatgagtggtaatcgggatgtttttgttgcacggctccatgcttgcgcatgcaacgtgtgacatgcatccttttcattgtcaccttagccttcgtggcttaggtgctgacgattggttcctgtgttgcctac

SEQ ID NO: 18955 - DNA, 237 bp, Glycine max
  Clone ID: 700874362H1
ctcagttattgtcaccagtatgcatggaggctctgaaaatccacaatccatcattgaatctttgttcaagaagctcatggcggatgctggtgaagggtgcaagtccttgcacctttctgacacacagtggtagtaagcgaagagggtttggcaaagtaagagttactgctgaagactcagtttctccctctgagaccattgcagatgactattatgaagttcttggactgcttccag

SEQ ID NO: 18956 - DNA, 237 bp, Glycine max
  Clone ID: 700874363H1
gttctgttccttttctaaacccaacacaacatcgtgtccttttcttctcttcgatccactacgtgcctgatcctctgcttcaggcacatactcccgcaggttaaatggcgaggatcaaacctcaggctctgctacagcaaagcaaaaggaagaagggtccttctcggataagtgccgtgactgttatattttactttttgattcttgccttggttgggtttttcctgtttgcttcgt

SEQ ID NO: 18957 - DNA, 240 bp, Glycine max
  Clone ID: 700874364H1
ttcttgatcagatttttcgttgctgagatacgcgcgttttagggatgtaaagttaagaaggagcgaaattattcagttcttaacaaattgtcgctcacacccgcgtttcactcttctaaaaaaatttgattttagtctacccggtgattccagcaaaaagttggaaccatggagtagaagtagttggaacaaatcttatggatgaacttccagtggcaagtcacgctacgactaccttaa

SEQ ID NO: 18958 - DNA, 240 bp, Glycine max
  Clone ID: 700874365H1
gacgccgtcaacgcgctccacggccacaccaaaaagacgcaccgcaccgacgtccagtgcaaaaaccgcatcgacaccattaagaagaagtacaagatcgagaaggctagggtttcggcctccaacggtactctctcttcctcttggcctttctacgagcgcttggacgctctaatcggccctaattttagcgcgaagaaatcaacctcttcgccgtctccgtcgccgccggtggctctt

SEQ ID NO: 18959 - DNA, 237 bp, Glycine max
  Clone ID: 700874366H1
ccgaaatatgaatttttaaattaaccagaggtggaattatgagtttaggcagtggattgcatgttgaactatggtgaagcagggtttagaagcttgtggagctgctgttaaaagagacacaggctgttacatagatggcgaagtccaccaagggtgctgaagtgaaatttgcgctcaatttgtgccttcttaacactgcaattggtgtaataatttgatgaagttcaagggaagtag

SEQ ID NO: 18960 - DNA, 236 bp, Glycine max
  Clone ID: 700874367H1
ctgccataagtcccttccctattgtaatttctgccagcctcaaaaaagacttgctctgcctctgccactctctgagtaggactacactgccatggctgcctcagtctccactgttggagctgtcaacggagctccactgagcttgaacagctctggagctggagcttcagttcccagttcagccttctttggcaccagcttgaagaaggttattgcctcaagggtccctaacgtca

SEQ ID NO: 18961 - DNA, 234 bp, Glycine max
  Clone ID: 700874370H1
aaggtttttgcgttgcgttgcactagctcctgcacagtagtgtggtacgatgatttgattttgataagataggtctgtgctgtggggaaaattggaagcatcgatcggaaaatgcaatcgttatcgttgagtatgagtctgaggagtagtagcttagtgaattttcttttgctgggttcagagacgagagtgagaagcagaaggagtgtcatcgtagcgtgtgcttcagaggga

SEQ ID NO: 18962 - DNA, 235 bp, Glycine max
  Clone ID: 700874371H1
cacacacacagcaacacactgcactgtgtggaaagtaagcatggcaagagtggtggcactccaacagaaccaactatctttctctcccttagcttcctctctttttgacttcagtggaaccagacttcaaactcaacttcagttcaagagaaaactatgccatccaaaagggtctttctacgtctcggcatcgagcaccaagaaaatcctaataatgggaggcaccaggtttatt

SEQ ID NO: 18963 - DNA, 234 bp, Glycine max
  Clone ID: 700874372H1
gtgataaagagagacccttttgaatggagtctgttctaagccacgttggtgcaggtttcttcaatggcatgatcccaaggggagttttaggtacccatttcaatgctagttcctttgttggtgttgatggtgggaggccaaggcgtgtagtgttggtgaaagctgaggctgtgagcataaacccagatatatggcagagtgaagagagagtggtagattctgtggtggtaactg

SEQ ID NO: 18964 - DNA, 231 bp, Glycine max
  Clone ID: 700874373H1
cgtttctatgaataaataaataatcctactatggaccaactagaccgagcgcacgattttcatgaattctatgggtgatttactctggaggaagctaatgctgcatcccaccctactgtaccagctgacacggacatcatctcacgcgtgcttgctgtatatccaattcttcatactattccttcattgtccaaacacagcttgtggacgtaaccctccaactatgcccat

SEQ ID NO: 18965 - DNA, 234 bp, Glycine max
  unsure at all n locations
  Clone ID: 700874374H1
cacctttctcctaaaacatctccagtgggttcttcttcttctattacaacaacgtcgtccaagaccatgaccatggccatggccacgatcctgctcctgttcacggtcttcgcggtttcatcggccctagacatgtcgataatctcgtacgacaacgcccacgccgccacgtcgcgcagccatgngatgctgatgtccatgtatcagcagtggctagtaaagcacggcaaggtg

SEQ ID NO: 18966 - DNA, 231 bp, Glycine max
  Clone ID: 700874375H1
ccaactctcatgttcgaagaaaacatacacactctcttcaaactctaattttcttttcctttcatttaatttcctcaatggcggcttccctcgaccagcgtccgtaccccggcctccacaatggcgtcgttccgcccctcaaaccaggcccggatatcccgcgtcccaagaagctaccccagccgccgccgccactctcggattcctcaagcgacgaagaagaagacacca

SEQ ID NO: 18967 - DNA, 235 bp, Glycine max
  Clone ID: 700874376H1
gaactagcctaaaacccttcccctccgccccaaacccccaacaatgcgccctctgttccgtttcgctcaattggctcggcgccactacaaggcgtcgccaccaccaccaccgccgaccccaccgaagcccccgaagaagccacagaagttcagcttccacggcgcaacgtgggcggatccatacagctggatgtcgcagctgaacgacaaggtggcgatgcggcacatggacgtg

SEQ ID NO: 18968 - DNA, 234 bp, Glycine max
  Clone ID: 700874377H1
tgtaaattaagagcatggctgcacaagctcttgtatcatcatcttctcttaccttctcagcggaggctgcaagacaaagtcttggaccaagatcactccaatctccatttggcttctccagaaaagcctcctttcttgttaaggcagctgctaccccccctgtcaagcaaggatcagacagacctttgtggtttgcatcaaagcaaagtctttcttacttggatggcagccttc

SEQ ID NO: 18969 - DNA, 233 bp, Glycine max
  Clone ID: 700874378H1
cagtggtgtggtgcgcggtggcggtgctattatgcgccgcggccggtgcgtcgtgggtggaggaggcggcgaacccgatacgaatggtgtctggcgtggaggcggaggtggttcgggtgatcggggagtgccggcgtgcgttgaagtttgctaggttcgtgagcaggttcgggaagagttaccaaagcgaggaagagatgaaggagaggtacgagatattctcgcagaatctc

SEQ ID NO: 18970 - DNA, 239 bp, Glycine max
  Clone ID: 700874380H1
gctatctgctacactaggaagaagaagaaaaagcagcagcagcatcagtgttgaatctcgttttcccagcatctgaagaaagcaagggcacgcacatcttctcagctgtgagtgagaatttggagagtagaagaagacgcagctgattgtggaaatgtcagtgcaagattacctggacaagcacatgctttcccggaaactcgaagatgccgtcaatgccgccgttagggccaaaacct

SEQ ID NO: 18971 - DNA, 240 bp, Glycine max
  Clone ID: 700874340H1
gtggaacactaccattggtcaaggtagaggaaatatctcagactattgacacgctgaattttaccgtccaaaactctgttcagttcgctggtcctttggccaccacctcaattagtactaatgccaaattcgatgttcgaagtccaaaacgtgtgcagataaaatttgaggaaggcataattggcactccacagcttacggactcactagagataccagaaaatgtggaacttctgggtc

SEQ ID NO: 18972 - DNA, 242 bp, Glycine max
  Clone ID: 700874303H1
atggcttctgcagaagtagagttccgatgctttgttggtgggcttgcttgggccaccgaccacgatgctctcgagaaagccttctctcaatttggcgaaatcgtcgaatcgaaggtcatcaacgatcgtgaaactggaagatccagagggtttggatttgtgaccttcgccacagagcaggcgatgagagacgcaattgaaggaatgaacggccagaacctcgacggtcgtaatataaccgt

SEQ ID NO: 18973 - DNA, 237 bp, Glycine max
  Clone ID: 700874305H1
attgagcaatataatacggaagtaaaaattgtaaatacgggtacgtacttcaagtaggcgacggtattgctcgtatttatggtcttgatgaagtaatggcgggtgaattagtggaatttgaagagggtactataggcattgctttgaatttggaatccaaaaatgttggtgttgtattaatgggtgatggtttgatgatacaagagggaagttcagtaaaagcaacaggaagaattg

SEQ ID NO: 18974 - DNA, 243 bp, Glycine max
  Clone ID: 700874306H1
cctcgctctatttctcagtctctgtgtttgcggctgtggattccgaacgagtgaccttcttcgtttctcgcaaagtttaagtaatcatgggtaaggaaaaggttcacatcaacattgtcgtcattggacatgtcgactctgggaagtcaactaccactggtcacttgatctacaagcttggaggtattgacaagcgtgtgattgagaggttcgagaaggaggctgccgagatgaacaagaggt

SEQ ID NO: 18975 - DNA, 241 bp, Glycine max
  Clone ID: 700874307H1
ctaagttttcaaaaacaatatataaggtgtttggagctcaagacagattatcacattggttggatctgtctcaaacttatggaatgtcaatatgaactgcaaattgattcaaataccatagacttgaactttgaagaatgtgttaaaagaagtggaaagttgtagcaatatgtggatggctgtatataacctggtgagaggtatgatttccttgcagaagagggatttagtctcagcagaa

SEQ ID NO: 18976 - DNA, 243 bp, Glycine max
  Clone ID: 700874308H1
ctcagatattctcttcctccttcttcttctcacagcattaaacgccgtcgttttcatgactccataattcaccggaagcagaacaacaacaagaagcagcagcagcagcgcgagttcacatgggattgggaacaaccgcgagaagcagaagaagaatcgtcatcgaagaaggttctagaacaagaacacacaacaacaccaacaacgccgatgccgatggagctggagcaggagctaggttca

SEQ ID NO: 18977 - DNA, 244 bp, Glycine max
  Clone ID: 700874309H1
aggaaacacacgtgctatacgtatcgtgcgcggccacgattacttaaagcgacagggaaggaggcactcaaagacagcaaaagaaggacacgacggcgctcgagattgcagctaacgaggtgctcttcggccagaccggaagcggcgctgacgagccgtgggttgtggggttgtcatcaaccagcaacgccccgtggggtgcgccagacccagcagctttcaactggttgaacaacaccggaga

SEQ ID NO: 18978 - DNA, 201 bp, Glycine max
  Clone ID: 700874310H1
tttacgaaggagccttcttggtgttttgatgtcgattggaattatatcatagaaaggaggaggcttgagggaaaagggtggaaaaaaagtggttaaaagggacagcaacttattggatactagaggataagaagactattgctacaaggcaaagtaaaccaatggaggaaatatcttctaatgttgcagtaccttttacac

SEQ ID NO: 18979 - DNA, 240 bp, Glycine max
  Clone ID: 700874311H1
ctattcttcaagattcaggtactgcgtttcggaagcagacacagatggctcgtacgaagcaaaccgctcgtaagtccacaggaggaaaggctcctaggaagcagcttgcaaccaaggctgcacgtaagtctgcaccaactactggtggtgtgaagaagccccaccgttatcgtcctggtaccgttgctcttcgtgagattaggaaataccagaagagtaccgagcttttgatccggaagc

SEQ ID NO: 18980 - DNA, 241 bp, Glycine max
  Clone ID: 700874312H1
ggcttgtgacaaaatgacacaggagaatttgagccatcctaagcaagcagcatgagtcacagatttcattctctctccaactgataagaaacgtagttccatgtgggctcttaggatccactcacttaactctaaactcgtcgtgtgtgttccttctttccacttcaaacttgtgatccagaaaaaagaccctttccattctcctccttttcttcctcctccactggctgcacctcgctgc

SEQ ID NO: 18981 - DNA, 243 bp, Glycine max
  Clone ID: 700874313H1
ctgcaagtagggataaaatattgatgctgcggttctcctgggcttcccttctaataattattacagcttcaactttggcttgccaccagcttgttgtgtctctatctgaagcttacttgggcaaaatatttgatgctcccaagagatatgcagtcagtgtatgaaattttctcaaaacattcacttttctcagcagaaagagagcattcttatccaacgacaattttccaaaaggaaaaagaa

SEQ ID NO: 18982 - DNA, 243 bp, Glycine max
  Clone ID: 700874314H1
cgttctgtgtgtgcgagacatggcgatggcaatggcgcttcgcaggctttcatcttcaattgacaagcctctgcgccctctcttcaatgccggttccctctactacaagtcgtctttgcctgatgaagctgtttacgacaaggagcgacccggagttacatggccgaagcagttgaatgctccacttgaggtcgtggatcctgagattgctgatattattgagcttgagaacgctaggcaatg

SEQ ID NO: 18983 - DNA, 244 bp, Glycine max
  Clone ID: 700874317H1
aacattttcaatctttttcacctaacacaccatctcctttccattcctttcttccttcgtcccattctcgaattggcgtgtgcctcttgcaatcccccaaaggttttttgaagcagaagaatggacttctttactagagacataaatgaggattctatgcttagatgcccattcttgaggaacatcaatgagcctactaacttctcattctcttcacctttggctttaccaatgcctgttcgtg

SEQ ID NO: 18984 - DNA, 237 bp, Glycine max
  Clone ID: 700874319H1
gtggagcatcaatttattcccacaatggttacgatatccataaggacttcttgattggcagatctttgatgggcacaatggtatatctgctgctatttttgcgaaggaaagcatactaagtaatgttttgagtgcaataccacaagatatcagtagggatgagtggcttcaagctctgcctcgtgctctagttgttggttttgtaaaaactgacatagagtttcagaaaaaagggga

SEQ ID NO: 18985 - DNA, 238 bp, Glycine max
  Clone ID: 700874320H1
ggataagtcgatggggttgtaacagagccacgaaaggagaggagtttttggtttccaaaacctcgtttcttctcaacacacaaaaaaatgatgcagaaactgtgtttgattgcttcccatggatgccctccggggctaactttgcagcaagagctggccatggttggctgcaccattaccaagggttgtcaaccattattgccttcatctgtactgaaacctgaaattatcagatacg

SEQ ID NO: 18986 - DNA, 237 bp, Glycine max
  Clone ID: 700874321H1
ctcgagcgtgcaattgaagttgaagtcttgcccttctctcttcaactccaaacacaacacatcataatccatggctggctccgtctccactgtcggagctgtctacagagctcttttgaacctgaatgggtctggacctggggtttcagctcccagttcatccttctttgggagcagcttgaagaaggttattggctcaagggtccccaacacaaagatttcctctggaagcttcaa

SEQ ID NO: 18987 - DNA, 238 bp, Glycine max
  Clone ID: 700874322H1
caagcagtgggaggaggctcgggactctgaccgcgtgcctgttgaagaatgagccggcgactcataggcagtggcttggttaagggaaaccaccggagccgtagcgaaagcgtgtcttcacagggcaattgtcactgcttatggacccgaacctgggtgatctatccatgaccaggatgaagcttgggtgaaactaagtggaggtccgaaccgactgatgttgaagaatcagcggatg

SEQ ID NO: 18988 - DNA, 240 bp, Glycine max
  Clone ID: 700874323H1
ggcaatgacgcggcctttcggtgtgaagggggggaggaagcgaaagcacgcggaacccaaatacgacgcccatgacgaagaagaagaagaagaaacgcaaccaaagaaaactgtggtggaggtggagcacaaccaagaagaagaagaagaaactccagcaccagcaccagaggatgatggattgagcggtatcccaattgcgcccagtgcgaacaacactaacaaacccaacgtcatctt

SEQ ID NO: 18989 - DNA, 239 bp, Glycine max
  Clone ID: 700874324H1
atttgcggtagacttcccaggatgtgaaccatgccgtccttgctgtggggtatggagttgaaaatggcgtcccatattggctcataaaaaattcatggggagaaagttggggtgagaatggctacttcaaaatggaattggggaagaacatgtgtggtgttgcaacttgtgcgtcttatccagttgtggcataaattgcataagaatatggtccctggtgactaccaccttgtcatgct

SEQ ID NO: 18990 - DNA, 237 bp, Glycine max
  Clone ID: 700874325H1
ctaaactccaaagtctttcacaatgggagttgtcaaaggcatctgtgaagatcatcataggagaaagcgtgtggtgggaagcattgaaatggaatgcagcagagtggggagatgctggtcgacccaatgtttttgaacgaattttttcaccaatcagtgaggaggctgacatcatgactcaactggctgcacatcaagagactcaattaagtacagatcacgatgagtttctgggaa

SEQ ID NO: 18991 - DNA, 238 bp, Glycine max
  Clone ID: 700874326H1
ggaaatggaagcaagcccaagcccaagcccaagcccgaagcaagtagtggcaaggaagctatggaacatagtacgcatcgtgttcctgatgttgagaaagggcatatcaaagagcaaactcgccgctgacttcaacttgaacttgtcgttcaaacgtggcaagctggcagccacaaaggccatagccaacactatcctccaccgctcccaaaacgacgacgccgtttacccgcgcgac

SEQ ID NO: 18992 - DNA, 238 bp, Glycine max
  Clone ID: 700874327H1
ctggtctctggcttccttggtacgggaagaactcaatcttgtccatttccctttggtttttctttcttcgatctcttcaccttcccttcgaccactctcttatcaccgctcgctttcttaactagagccctctctcgttgagtgacgagttcgtgaatattcgcttgagatttgactgcgaactggttttagcgggtttctccaggtgtggtttgatttacagtttctgatgctgaag

SEQ ID NO: 18993 - DNA, 238 bp, Glycine max
  Clone ID: 700874328H1
atttatagtaaaataaatattgggttgaattgagcgggtcgtatttaaataagaatttcttttccttttttcttagtttctatcgaaaaaaaaaagattcgatagaaactaagaaaataaacaaattgattcgccgagaaagaggagagagagggattcgaaccctcgatagttctttgttccgaactataccggttttcaagaccggggctatcaaccactcagccatctctcgaaa

SEQ ID NO: 18994 - DNA, 241 bp, Glycine max
  Clone ID: 700874329H1
cttcatatttcaaaacttttgcgaaatttctctcttcttcatcttgctcttacattctgggtaatgtttgaaacttgggggtagctaagctgtttgacaaaaatgaatattgcacaagttacagcatggcagcctgggatttgtgtgaaaaatatatctcagttacacaggcttcaatcaaaaccatgtgttttaccaaatagttttggtccttgcttacaaagcttaagagcaacacaat

SEQ ID NO: 18995 - DNA, 240 bp, Glycine max
  Clone ID: 700874331H1
aaatggccggggtttgccgttccctaagggagagctgtgtgagtgatcacctttgggagaggcacatgaaacagaaatggggcagagttattggtcaagctgcttatagggagtggaaatggcatgctgcttctaaagggaatgttggaactcttagacatggcaagcaaaggagcttgttgaggctggtgtcacttagttggcctttttcatggatgagaaccaaggtagatgcaaata

SEQ ID NO: 18996 - DNA, 238 bp, Glycine max
  Clone ID: 700874335H1
aaagtagatggtccagattagtaccacaaaaatggagaaatagaataactgaatatcgtatagctcaaaataaagatttaaccaaatgcaattcatatgaaaaaagccaattaattctttacaaagaacaacaagtaaacgcattaaaaaaaaaaattagaaaacaatatagatacgatcttttatcctataattttatcaattatgcagataagaaagactcatatatttatggata

SEQ ID NO: 18997 - DNA, 245 bp, Glycine max
  Clone ID: 700874302H1
gttaatggctacccttctattccaccacaattcgcctcataatattctcttcctccttcttcttctcacagcattaaacgccgtcgttttcatgactccataattcaccggaagcagaacaacaacaagaagcagcagcagcagcgcgagttcacatgggattgggaacaaccgcgagaagcagaagaagaatcgaaattcgcgaggccgttagagaggagcgaaacgcgcaggtcgttttactc

SEQ ID NO: 18998 - DNA, 238 bp, Glycine max
  Clone ID: 700874339H1
gagagaaatagagagagaacttcaagtgagggtgagagtgacacaaatctagagagagcactagtactctaaaagtctattatattcttcaaaatatgaccatgcatcgcgagtcttgggcttttgtcttcggcgttatgggcaacatcatctcctttggagtgttccttgctccattgccaaccttttaccaaatctacaagaagatatccactgaaggtttccagtcacttcctta

SEQ ID NO: 18999 - DNA, 257 bp, Glycine max
  Clone ID: 700874255H1
cttaccttcagccattactgttatggactggagcaatacttatttgcagagcattggagccattaatcctaccttcagaaactagccagattgttaaggaacggcttttgaattttgtaagatcattatcaacagtactggcctttgcctattgtttgtcaagtgtaattcaacaagtgcagaaattcttagccgagagtactgatgcaagtgcggcgagaaatatgggattccaatttgctggcaaagctgtttac

SEQ ID NO: 19000 - DNA, 259 bp, Glycine max
  Clone ID: 700874257H1
cttgagtacagcaactatatcaccagcacttgtgaagcaacttcgaggaagaaacaggagctggaatgatggattgcaaaaaagcactatcagagaccggtggggacattattaaagcacaagagtaccttagaaaaaaaggcttatcaagtgcagacaagaaagcaagcagggtcactgctgaaggaaggataggttcttacatccatgacagcaggataggtgttttggtagaagtaaactgtgagacagattttgt

SEQ ID NO: 19001 - DNA, 255 bp, Glycine max
  Clone ID: 700874259H1
gaagaaaagaatcaaaagattgaaagacatggttgagccagataaaaattgcgagactagggttgaagatgttgcttggctttgctccctttcagagtctgagattgacatgctgattagcttgaaactgttgatcattcagcgtgcaaaaatgatgggttgtaaggagctggctagtaaattcaaccttaaaatgattcgagccattgcacttgttttgatgggccatctgaaggacgagataaaagattcatc

SEQ ID NO: 19002 - DNA, 228 bp, Glycine max
  Clone ID: 700874262H1
tgtggactcactacctgcaacagtcaaataacagcatgggatcatgttaaaactggctctcaatcatttcacgttgagttgtattccatatttgctaacaaatgtagcaatatcatgccagagaggatattaaaaaggacagacaagataaaactggatttctattttgtatgttatcaaagtgagacattatatattgcacttttagtgctacataaaacacataaa

SEQ ID NO: 19003 - DNA, 261 bp, Glycine max
  Clone ID: 700874263H1
aaacaaagaaaaaaaaaaacccttagccaacacaaccatcatggccacctctgctattcagcaatcagcattcactggtcaaactgctctgaagcagctcaatgagttcgtccgcaagaccggtggcgccggcaaaggtcgcactaacatgcgccgcaccgtcaagagtgctcctcagagcatttggtatggccctgaccgtcccaagtacttgggtccattctcggagcagattccatcatacctgaccggagaattccc

SEQ ID NO: 19004 - DNA, 193 bp, Glycine max
  Clone ID: 700874264H1
tgatcggcggtggtcaattttcattgctgtttgtttttgatgagtactgttttttgttttgatggtaagaagagtctgagatatttcgaatttcacaagcagctatagggttttagtccatttcctttgctgctgagggatgttttaagttgcatttaatttataacgaagttttataaactgtttatggttt

SEQ ID NO: 19005 - DNA, 268 bp, Glycine max
  Clone ID: 700874265H1
ctcgaagttagaatgaccatgcagggtattggtactcaatcatgggatgttggtttcattgttcaagctttacttgctactaaccttatagatgattttggacctacaattgcaaaagctcacgatttcatcaagaaatctcaggtaagagaaaatccttcgggagattttaagagtatgtatcgtcacatttgtaaaggctcatggacccttgccgatagagatcatgcatggcaagtttctgataccactgcagaatgtttgaagt

SEQ ID NO: 19006 - DNA, 259 bp, Glycine max
  Clone ID: 700874266H1
ggctcatggccccaataatgctgaaaccactcagatgcaggggcggtaatgcgattgctgtgtctcgagatcacaaaccagaccgaactcgtgagaggcaaaggattgaagaagcaggaggctttgttatgtgggcaggaacttggagagttggaggtgttcttgctgtttctcgtgcatttggtgatagactcctgaagcagtatgttgttgctgatccagaaattcaggaagaaaaagttgacagctcccttgagtt

SEQ ID NO: 19007 - DNA, 65 bp, Glycine max
  Clone ID: 700874267H1
gaaatgtatggattcgatatgcaatccatttatagagtaccaccagccatgcgtgaaaatagtcc

SEQ ID NO: 19008 - DNA, 263 bp, Glycine max
  Clone ID: 700874269H1
gtttttgaaccaagtgtacaagcatgatgaaaaaaaacatcagatgggttgtactgatgtaggtgttggtaatatggcaaaaatcatatatacatgtatgatagcctcaattcatagtccttcaacaaatagggatattagaagagtctgatagagcattctgcaaaggtataggttggccttgagattcactgcactcaacttttttccttggtttttgttgttccattgggtataaagcttttatttttcaactgtgaaca

SEQ ID NO: 19009 - DNA, 245 bp, Glycine max
  Clone ID: 700874270H1
catcagcgtgccaaaatgaaagagttagccaagcaacggactaagcaactgcaggaagaggaggaggaaaggataagaaagcaaaaggctaaagctcttgcaaagttggatgagttaaacaggcgttctcaagcaggagatggatcaacagagaaagagtatgctacaaattctgccatccagaataagcaagaggaattacgaccttctgaatctacaactgcagcaggcaaatttgcacctgt

SEQ ID NO: 19010 - DNA, 255 bp, Glycine max
  Clone ID: 700874271H1
aaaggagttatctggcggtagaaaccattttgtggagagttgtggcttgcctattagcacatacttcagtgctttgaagctgctgtggttgatggaaaatgtagatgccgtaaaggaggccataaagaaaaaggatgcgctgtttggaactattgacacttggttgatatggaatctaactggtggggtgaatgggggattgcatgttaccgatgtttcaaatgcatctcgtacaatgctcatgaatctaaaaac

SEQ ID NO: 19011 - DNA, 198 bp, Glycine max
  Clone ID: 700874274H1
tgccaaactagagtgatgcagaggtagaaaaaaaggtgccaaccatttccaaatctcctacaccaaagttgagtgcttgtgttcactcacacccacaaccccaacaacaacaacaacaacacaagagtctcaaaattcagcctatataaagcccaattccccccatggagcctccccaaacttgattccacacaacat

SEQ ID NO: 19012 - DNA, 255 bp, Glycine max
  Clone ID: 700874276H1
ccctcgagcgaatcggctcgagcatactcatactgtgtgtgaaattatcaaggcccgttgggacgattctgcgcacattgttactcctcattttctgcttcttgacgaatataattgtgacggctatgttgctcctcggtggttctgcggttgtaaatgcattaactggagtgaacctttatgctgctagctttctaataccacttggagtaattgtctatacactagcgggtggactgaaggctacattcttag

SEQ ID NO: 19013 - DNA, 258 bp, Glycine max
  Clone ID: 700874277H1
tctcttcatctctttcgtttcgtccttggcttcaccccaaagcctattttcacattttccccttttcatgataacaactcttcatgtagggcaaacttcacttcaattgaactaacttgtctgtggctttttgtagattgattcaattcaatgggttcagtaatgctccctggaactgaaaagctcactctcagaaccctaaccgggaacggcttaggtttcactggttcggatttgcacggtaagaacttcccaaga

SEQ ID NO: 19014 - DNA, 257 bp, Glycine max
  Clone ID: 700874278H1
ctagaatctaaggactctcgatccgttgtttatgtgaattttggcagcatcactgttatgtctgcagaacaactcttggagtttgcttggggtttggccaatagcaagaaaccctttttgtggatcattaggcctgaccttgtcattggtggatccgtgattttgtcgtctgagtttgtcagtgaaacaagagacagaagcctaatagcaagttggtgtccacaggaacaagtgctaaaccatccttcaattggtgt

SEQ ID NO: 19015 - DNA, 260 bp, Glycine max
  Clone ID: 700874279H1
gagacgtgagatacactaagttatcctcataaatacactctaattaggtggcaagataagtgtctataccttagtaacattgccacatattgtgttcattttggaattgtgccactaaaattctattcaattcatctatggctgcctcttcttatgctatgcaatcaatccttgcaaaccctttgatccgcatttccagcgggtctagggtgaaccaatttggcgttcctgctttgcacatgagaaggaatgttggcctg

SEQ ID NO: 19016 - DNA, 253 bp, Glycine max
  Clone ID: 700874286H1
attcatggtttttgaccaattggtcttgtttttgttagtagtaatttcaagttgttcttgagtttgtgagttttgaaagtttggattgtttttctgtttgatgagtggtgttggaataagtttggtttggtttggtttggtttggttttccaatttttaatgattggatttcatggatgttgttagtgaacttgaattgttccaaagcaagttacagttaataaatgataattcggttttcagaagatggtgg

SEQ ID NO: 19017 - DNA, 252 bp, Glycine max
  Clone ID: 700874287H1
ccattgttcactttcaaatcaactcaagagattcaaccaagaaatatagaagctagggttttgttacatttgtgttagcacgcaatactttgcaaatatggagagcagcttaggagacatgttggttaaggttgtggtgttcattctagttcaagccttggtttaccttatcctctccaattcatcaaacgtgttcaacaagaacatgaagacatctaacagcttcaggccggcacgttcggtgagcattcg

SEQ ID NO: 19018 - DNA, 254 bp, Glycine max
  Clone ID: 700874288H1
gaaactaatgtgagcttgaaggagtccgatgcatggccagctgagcctcaagatgcatatgggctagagaaacttgcaacagaggaattatgcaagcactataacaaggattttggaattgagtgccgcattgggaggttccacaacatatacggtccttttgggacatggaaaggtggaagggagaaggctcctgctgctttttgtcgtaaagtaatcacttccactgatagatttgagatgtggggagatgg

SEQ ID NO: 19019 - DNA, 252 bp, Glycine max
  Clone ID: 700874291H1
attaattaatactgtagtaccatctcttcaatgtgaataaaatcaatttaattaactatgttgactcttgataaagatttatatatgcatcaaggctcaagaccgccaagttaactttaattgatttctattctgtaaataatcaagaccatatatattttaattaatgattaggtgcaaagaagtgtagaagatccaagtgtgttggtaacaacttacgaaggggagcacaaccatgggcaacaacatcaa

SEQ ID NO: 19020 - DNA, 248 bp, Glycine max
  Clone ID: 700874292H1
tgaatatatatctattgaatttattttttttattatttttcgcattcggattgaagaatttaatcagatagttatatgagtgcaataaaacagcttcttttgaatataatttatagaatactatattacttatagttaatagaaaagatgatgattttaaattgcagtaaaaatattgagtctcattttctatgtataagaattaagtgaaaaaaatgaattaaattataggtagaagttgttgtttt

SEQ ID NO: 19021 - DNA, 256 bp, Glycine max
  Clone ID: 700874293H1
tgcagttgtgctgtatctgggtacagtttaagtacagaccaatcctcatattcattcaattcaatggctctctactccttcttctctccctctcttttataccctccctcacatattccccgtcgacttttttgtcccaaggcttccttaagctcttcctcccctgaatccaaagcatcgcaaagtgtttcttctgcaacttccaccaccacttcccctaccccttcggttgagtctaggccacctgaccccgcct

SEQ ID NO: 19022 - DNA, 257 bp, Glycine max
  Clone ID: 700874296H1
cacacacgcacatatattttcttcatcttcgtacaccactgtctcatcatctccttttccttgttctggtggcgctcttgattttcagatgacaacagcaattgggtgaaacgtgaacgccaccaccgatcggggtttgccaaaaccttacaatggaggtcgaaaggatgagacagttgatgctgatgtggtgtagaatacgaagcaaccgtgtcgctcttgtgggtggaaaccataccgctgccaggttttgcagt

SEQ ID NO: 19023 - DNA, 245 bp, Glycine max
  Clone ID: 700874301H1
attaggaatagcaaagggaaaatggccatgcatatgcaagcacccacaatcagtcttaacactgcaaggtccccatcttcattagctccagctgccaatgctggcctgcgaccacacctcaaccctttggctttaaagtcatctttcttctctggttcccttaacctcttacttcatccaatgcaacagtatcttacttctggagctcccaggatttccatgcgtgtggcctccaagcaagccta

SEQ ID NO: 19024 - DNA, 254 bp, Glycine max
  Clone ID: 700874252H1
caaaaccctgaagaaagacacagccattgtttatttactttccattgattgagcgaaagccttgttttttctgcgatcattttccattgggtggaagaaagtctcaacctttagtcgaaagagcaaggatctgagtgagtgagcgatcatgtgtggtggtgcgattatctccgacttcatttcagcgggtcccgccggcggggcgcacgcgtgaccgccgacatcctgtggccgaatttgaggaagcggttctc

SEQ ID NO: 19025 - DNA, 262 bp, Glycine max
  Clone ID: 700874207H1
ctggattccagtgggcatcaaaagaaggtgctttggccgaagaaaacatgagagccatttgctttgaagtatgtgatgttgttctgcacgctgatgctatccacagaggaggtggtcaaatcatccctactgccaggagagtcttctatgcttcccagattactgccaaacccaggcttcttgagcctgtctacctggttgaaatccaggctcctgagcaagctcttggtggaatctacagtgttcttaaccagaaacgtgg

SEQ ID NO: 19026 - DNA, 263 bp, Glycine max
  Clone ID: 700874208H1
aaaaaagtgtgcattaagttgaagataggtaaatttaagatgaaaggaatgaaattataagtgctcacatgtttggtagttgagagatttgggcagaaaaattcacttcaaactaatgttttttgacaatcactgtttcttctgtatttacaaactcaacataaatctggagtttgtgttcctattgtgatatatgcttctgcattctgattgcagctcatgcattataaaacactaggttcgtttttaagatagtgttactt

SEQ ID NO: 19027 - DNA, 266 bp, Glycine max
  Clone ID: 700874209H1
aggatattcaattttacataattaaagataaaatcaacgatagctatagttttaaaattaaccatcgatttagttgcaactggaacacaggtttctttcaatgaaataatattaatatcaatttaataagctggtaatgtaaaatactgctaatgttaatatgaagtttggatggtcttattggcagaagatgctaggtggtgttcatcaatattctgaaaggtaaaacgattttggtttttaatgataatataaccatgaatcta

SEQ ID NO: 19028 - DNA, 263 bp, Glycine max
  Clone ID: 700874211H1
gtggttatgttgcctcaaactcaaaggatgaccctgcaaaggaggctgctaacttcacagcccaagtcatcatcatgaaccaccctggtcagattggaaatggctatgcccctgtcctcgactgccacacttctcacattgctgtcaagtttgctgaactcatgaccaagattgacaggcgatccggcaaagagcttgagaaggagcccaagtttttgaagaacggtgatgctggttttgttaagatgattccaaccaaaccc

SEQ ID NO: 19029 - DNA, 263 bp, Glycine max
  Clone ID: 700874212H1
cacacttgggtggccacagcaacaataacaatggtagcctcactacaagctgctgctaccttcatgcaacccaccaacgtgggcatggtcactcgcaacctcaaatctacacaatgcatttctaaggcttttggcttggaacccgctgcagctaaactcatttgctcccttaagcccgatctcagagctttggctcaaagatgtgtcgacgccaccaaaattgcaggactcgctcttgccacctcagctctcgttgtatctgg

SEQ ID NO: 19030 - DNA, 262 bp, Glycine max
  Clone ID: 700874214H1
gaaaagtttgccatatttgaaaggaaatcagctaagcataatgatgaaacagaggatcaatcaattacaattgtatcagaggctgcaaggtgtgacaaaagttttgaattgacagatttaatgctagaacaagtctgtggtgttgctgaacctgaaactgaaaacgaggatgaaatcttaaaatctgagttaggcagagacaattctcatgtttctatattgcatggatgcaatgctgagcaggtgaaacttctaaaggagc

SEQ ID NO: 19031 - DNA, 267 bp, Glycine max
  Clone ID: 700874215H1
gttgtttttttcttcttcctattcaaatgttgcaatttttaatgagcttaatttctatgcacggtcactaacaaaagttttacactctcaaccaatcataaaatatatgataggtgtgacgactttcaaggtagttattgtaaggtttaattgttaagcaatcagaaatcatgataggtgtgacgacttgcaagaaggcatttattgtaaaaaccaacaaatttaccatttatgtcaaattctaattgaatgacatcgtaaagtgtg

SEQ ID NO: 19032 - DNA, 157 bp, Glycine max
  Clone ID: 700874217H1
cgcgtccgtattccgctcgagaccaaactaagtaaaggcacgcgcagacaactcaaagcaatggagtgagttgcttatgagcatattgagtaaaaaaggcagaggcagaagcagaagcaaaaccccactttttcatggccaaaatcattggcaagag

SEQ ID NO: 19033 - DNA, 256 bp, Glycine max
  Clone ID: 700874220H1
gcgaatccctctctctatctctcacacacactttctccctctctctctctcacccagatcttgtagcaatggcgagcgctcccactccacgcgaagagttcgtgtacatggcgaactggcggagaggccgagcgctacgaggagatggtggagttcatggagaaggtctccgcctccgccgagatcgaggagctgaccgtggaggagcgtaacctcctctccgtcgcctacaagaacgtgatcggcgctcgccgcg

SEQ ID NO: 19034 - DNA, 259 bp, Glycine max
  Clone ID: 700874221H1
ctcttccataaacgggtgctgcctctcttccatctccccagccaaaacctctctcagcaaggccacattacgcccttccgtcttcgcaacccttaacactccttcttctccttcctcttcatcttccttcccctctctcattcaagacaggcctgtttttgctgcccctgcccccatcatcaccccaactgtgagagaggatatggcaaaggaatacgagaaagctattgaagaacttcagaaattgttgagggagaag

SEQ ID NO: 19035 - DNA, 262 bp, Glycine max
  Clone ID: 700874223H1
ctcgagccgctcgagccggttctttcatcaaggaaagtcgaacttttattgggttattttgtccgctgtattcggaggctcagtgatttagagtcttcagatcccctgacaggagtagatgaaaatagtactgaagtagtgcctgattttgagaaatatatattggagctacaacctgctgaaaggggaatgcaaagcaaaatcattgaagcagatctggtattgtggactgttggcaccaagcctcctcttcctcagctgg

SEQ ID NO: 19036 - DNA, 262 bp, Glycine max
  Clone ID: 700874225H1
tttcacttgtggagctgcatcaactgcagtggaaattgtgctttgttcttgagatgtctggtcttcgtctttgggtgagttgtggacccaaagagaacatcaactccttggtgagtttttcatgcaggagtagtagtggtggtgaaagaacacaaaagagattttctggaatcagttttgctagtggtacttctgctttttcaagtgcagtggcagctactgagacttcaagatcttcagaggagagggtctatgaagtggt

SEQ ID NO: 19037 - DNA, 263 bp, Glycine max
  Clone ID: 700874226H1
tctctattttcctttatcccattgtccgaattcacgttctttttcgtcccaatccttaagctttaagctctaaactggatccaccccacccacatacccagtcttcccttttttgaggtaaacgctatgctatattactcaatataaaatattcattcattcttgcgtgtgcgtgtgtgttgcgataatgacgactcaaattcgataattcgcaattgttttttatttcaaatgtaaacgcaaaatgaatacccattttcccc

SEQ ID NO: 19038 - DNA, 262 bp, Glycine max
  Clone ID: 700874230H1
aattctctctactactgctagctgtgacttgttttgagttcaatcaaatcgcattggtatctgaaatcaggaaagatggttagcgtagtgagatcaggcaggcacaaagggcagaaggcccagcaaccatccttgccattggaactgcaaacccaccaaaccgtgttgatcagagcacctatcctgattactacttcagaatcaccaacagtgaccacatgaccgagctcaaagagaaatttcagcgcatgtgtgacaagtc

SEQ ID NO: 19039 - DNA, 266 bp, Glycine max
  Clone ID: 700874232H1
gtcacaatatggggttccgattcaagagtaatccgcaattacgcagagataccagtgcatggagttttgtttttcgatataataatgatgcattatgaccaagttcgttatgtagtacgaatgaaagagtaatgtgaacacgtgcatgcgtttttgcgtaatttgaactttgaaatacatctagggtttggctggtggggtctaacaatcgagcttctgaaagtgattggaaaaattagattgcaatctcttcgaatctaggtgtg

SEQ ID NO: 19040 - DNA, 262 bp, Glycine max
  Clone ID: 700874234H1
ctcgagccgtgttgctacatgactcccgtattactctctgaatcgggtgcgaacgctggcgataactgggatggcgcaaacttggttagggaaaacgcgtctatgaattcgaatttgaatgctgatagttctggtggctcctatggttatggaaatttggtgagtgtggaagagggatggctgcgagttcaagagactgattcggacctttctgcacccttgatggatcgtggaatgaatgtccagctcggtaggggggaag

SEQ ID NO: 19041 - DNA, 264 bp, Glycine max
  Clone ID: 700874235H1
ttcactatggtgtgttaggccatatacactgcgtttatagagtatcatcagccattcgtgaaaataatccgaaagcctacacacctcaaatggtttcaattggcccttttcacaaagcacgtgacgctggaaaggaagacagcatttttgagtcaatggaagatcttaaagtgaactatctcaaggcatttctaaatcgaacccaagtacctgtgggaacctttgttgacacacttcaaaagttggaagacgaaattcgaaggt

SEQ ID NO: 19042 - DNA, 274 bp, Glycine max
  Clone ID: 700874236H1
tccggattcggctcgaggccagatctctccctaacaactcaatttaatgtgttacaatattagaggtttaaattatcagttggatttataggaacatgtagactttggtttgatagttatttgttggaatttggtttttttgtattattgtgtctagtagtgggttgcattgctagatggatgttatgattatccccccagatgatcgacgctgaacatactgagcgattttttctctttcgagataccaagccaataaatctgatccatttaa

SEQ ID NO: 19043 - DNA, 254 bp, Glycine max
  Clone ID: 700874237H1
aataactttgcttacgatatggttttctttgaggaattatttccaggtgatgatcacgaataggaaggaacgaggtgaattattggaagccttagtagttagcgacaaagatatcatcattccaaattttccacagagaatacatctgttatggggagagaatgataaaatattcaatctggagcttgcgcaaaatatgatagaacaactaggggatggtacaacatttgaagccataaagaaagctggtcaca

SEQ ID NO: 19044 - DNA, 156 bp, Glycine max
  Clone ID: 700874240H1
ttccaagtctttgtctttggacttttagagaatacaggtatggagatgtagataaagaaacattatttttattctttttatgtttgtgtctatatacaaattccaaaatctaaagtaacgaatcttggctacaaggtacgttaataatatttatca

SEQ ID NO: 19045 - DNA, 259 bp, Glycine max
  unsure at all n locations
  Clone ID: 700874243H1
tctctctctttctctgtctcactctcctctgatatttctaaattttggtgctctgtgtctctacgatctggatccaacggtccaaaatgttcggggcttgtgctgcttgttttcccaggttttagagctccaaaccttcagatccacctcattcgtctccagatcttccttccttgataacgttttcgggttcgagaaggcacttgtttgtttgtcgtacgaaatggagactanaccgagttcggtgatggttacgctc

SEQ ID NO: 19046 - DNA, 263 bp, Glycine max
  Clone ID: 700874247H1
ggctaatctctcactcttgttcttcggtctcctcctattctccgctgccgtagccaccgtcgaacgaatcgacgatgaagacaaccttctgatccgtcaagtggtgccggacgcggaggaccaccacctgctcaacgcggagcaccacttctccgccttcaagacaaagttcgccaagacctacgccacgcaggaggagcacgaccaccgcttccgtatcttcaagaacaacttgctccgcgccaagtcgcaccagaaattgg

SEQ ID NO: 19047 - DNA, 264 bp, Glycine max
  Clone ID: 700874248H1
ttttcgttggagaatcctgaaaaccgcttgattttaatcaaagggtcatcaggattcgggcacccatatctcgtatcactccttctctcctctgttgtcttagaaagaagacgaagaaaagcatcaatttttgcaagcaatcttcttcttttgccctttctcttgtcttaaacacacacacacaacaacccagctgctgaagctgaagcatcacaactcacacatgattcgagtggccacaaattaagcgtgttggtgttatga

SEQ ID NO: 19048 - DNA, 225 bp, Glycine max
  Clone ID: 700874249H1
tcgacgaccgtcttccccaatcgcctgcgtctctctctgaattgacaagcttaaagacaaagtcttaaatggctggtccaaggattgcccatgctaccttgaaaggtccgagtgtggttaaggagataataattggaataacacttggcttagctgctggtagcgtgtggaagatgcaccactggaatgaacagcggaaaaccaggaccttctacgatttactgg

SEQ ID NO: 19049 - DNA, 269 bp, Glycine max
  Clone ID: 700874203H1
ctcgtcttcaatcctttcgttattctcttagtcatccgtctcttcggattattacaaggttgcgaaggtagtggatgacatgctcgttgagcaagagggggtatcgccttgtgccagtgggtctaggtgatgatgatcaatgcattgaggatgactttactgcatggaaagaagaactgtggccagcattggatgaattgcttagagatgaggacgatgcaactgtgtctacaccttatactgctgcagttttggagtaccgggttgtt

SEQ ID NO: 19050 - DNA, 227 bp, Glycine max
  Clone ID: 700874164H1
gaagaatgttgcagtcaaggatctcaagcgtggttttgttgcatccaactccaaggacgaccctgccaaggaagctgccaacttcacatcccaagtcattatcatgaaccatcctggccagattggtaatggatacgcaccagtccttgactgccacacttctcacattgctgtgaagttttctgaaatcttgaccaagattgacaggcgatctggtaaggagcttg

SEQ ID NO: 19051 - DNA, 233 bp, Glycine max
  Clone ID: 700874165H1
ccaaagatgaactggggaattgactagtgcggcgcgctcctattatcaccgtagacggcggaggtggcggtggtggtgtagacacggcgtgacggcgatctcttgagataaatgttggttgaaagaggaagaagaagaagagttgtattgtagaatgagccaaccaacggtgatacttgccactgcgagctatgatcacacaattcgtttttgggaggccaagagtggccgtt

SEQ ID NO: 19052 - DNA, 231 bp, Glycine max
  Clone ID: 700874166H1
caaaaacccaaacccaaaggtgttacgttcattttcatcattcagagttttcagaggagctctttttttttttttagttcagaaagcagaaagcacgcacttgcggaagtgaagttacggttttgcccttcttctggtggtgtcggagaggaacatgtccgtaggaacaacaacatcgatatcgacatggcgcgttgttttggtttaggttccgttctggttctggcggcg

SEQ ID NO: 19053 - DNA, 233 bp, Glycine max
  Clone ID: 700874167H1
tgaaattgtcaataaagaacgactgttctttacatgggaaaaacactaaatcatactgattggggaatggatattttgtgtcaaaaccgtattatacagatagatactaaccacatgtatccaaaatattcacgcataaaaaactttagtatgccctttttatcaattgtgttaataaaggttctctgcccctttgctacaataaatgtatgttcaggtaaggatgtgtttta

SEQ ID NO: 19054 - DNA, 230 bp, Glycine max
  Clone ID: 700874168H1
gtttgaaggatcacacaaactagtaactagaataatggcagaaacaaagttgagctccttcaaagacaagagatggtcactccatggcatgacagctctagtgacaggaggcacacgaggcatagggtacgcaatagctgaagagttagcagaatttggggcagctgtgcatatttgtgcacgtaaacaacaagatattgataaatgtttagaagaatggaataagaaag

SEQ ID NO: 19055 - DNA, 227 bp, Glycine max
  Clone ID: 700874169H1
atcgtgaagaagccaaaaatcaaacactgatctgtaatggctgcgtctatatagtacaacaataaacataatcctttcagccaaagaagagagaaagaaaataatgttcacagaaattcgtaactatgcttgttgtatggatatggcttattgactttatggtttgatacgttgaggcacagtttatttttaaagatggaaccatcagaaaatatgtacgtatcagg

SEQ ID NO: 19056 - DNA, 227 bp, Glycine max
  Clone ID: 700874172H1
ctcgagccgaaatagccttcaaatccttcgtcggcctccgccagtcctcgccggaggcccgcatttcgccgcccagccaagacccgccactccccaccgcaaattccgcgtcttggctggaaaattcagccccaagctcaatggccggcacctccgcgtggcggtggtgggaggcggtccggctggcggggccgccgcggagacgctggcgaagggcggcgtggaga

SEQ ID NO: 19057 - DNA, 228 bp, Glycine max
  Clone ID: 700874173H1
atactacaaacatcacccaatgcaataaatttggaaggaaagtagtcaaagctgttacatacagggtcaagtccatgccctcaacttcaaagccttgtgcaaatgagacattagaaaatggggataagctgctcagttctcttccagaacctgatccaattgatgctaatccagttaagaattctaaagttagtctcggaaagtctccttcatacaaggaagtggcct

SEQ ID NO: 19058 - DNA, 226 bp, Glycine max
  Clone ID: 700874174H1
aaacacgctaacacgggtttctgttacaagagtcttttaaaaaaagaaaagaccaaatgaaaataaatctattgttcccttgttatctttctccaaatgcttgtctttcgtttcttttagttattagcgtgtcttggtttctggacttcgattagttggtttaaggttaaagcgtcagcgtagtggtctttccttaaatgtcgaacaatgcagggttggcttgagt

SEQ ID NO: 19059 - DNA, 182 bp, Glycine max
  Clone ID: 700874176H1
gccacagagaactagtcttctactctcgaccgcaagaaaaaaatggcatctcacatcgttggatacccccgtatgggtcccaagagagagctcaagttcgctctcgaatctttctgggatggcaagagcagcgccgaggatttgcagaaggtgtctctgatctcaggcatccactggaacag

SEQ ID NO: 19060 - DNA, 225 bp, Glycine max
  Clone ID: 700874177H1
gtatcttctcatattttgcttgcttgtattttatggcgaaggaaatgactcattttcaatatgtttttatgaaaaatttatctccaatatcttctattatattttcttgggcacaaccaaggacattctaaagtatctatacatagtgaacttgttgccctgcatttttaattcattcaactttgtcttttatttctttttgtgtttgtgggatttaaggaagag

SEQ ID NO: 19061 - DNA, 226 bp, Glycine max
  Clone ID: 700874178H1
tgtaactttttgattcctaaattctctaaaattcgaaattctaatttcgttaggggaaagagattgtttgtgtgtgagtgagtatggctggaaaaggcgagggtcctgctatcggaatcgatttgggaacgacgtactcttgcgtcggcgtgtggcaacacgatcgtgttgaaatcatagccaacgatcagggtaacagaactaccccatcctacgtggctttcac

SEQ ID NO: 19062 - DNA, 163 bp, Glycine max
  Clone ID: 700874179H1
cacaaattcatcaagtggaggaataaaagaatcactaactggttatggtatcactatggatgtagatactagaaagatggcaagaatcatggttttctcagttataccactcctcataatgcagattcccagtatattcaacttctcttctattccacacaac

SEQ ID NO: 19063 - DNA, 227 bp, Glycine max
  Clone ID: 700874180H1
ggctcatctacaggtgcttcttggtggtggaggtggtggtggataccggtcaaatagtgtagctgcagccgtatctaatgctgctgctactgatccattcctatcctcatttattttgaacttccctgcttgtgaagctgaagaaatttcaaaatctgtggtaacaagtgctgagaattcttctgccaaaaatgcgacgcctgaacatatttggaaatcaagttttg

SEQ ID NO: 19064 - DNA, 232 bp, Glycine max
  Clone ID: 700874181H1
gtgggcatggattctctactggcgaactatgcctcttcagatgaagaagaagatcaacaacaaccatctccacccaaaacgacttcgttttcctctcttcctcagtccaaatcttctctctttcaatcccttcctcaacccaaatcctctcctttttcttctctatttcaatctcttcctccacccaaacaaccttccagcgaaagcgcttcactccctaaccctaacccta

SEQ ID NO: 19065 - DNA, 230 bp, Glycine max
  Clone ID: 700874182H1
gttagcgacccttcagagcttcccaagtggaactatgatggttccagcacaggtcaagcttctggtgaagacagtgaagtgattttatacccacaagccattttcagggatccattcagaaggggtaacaatatcttggttatctgtgatgcctacactcctgctggagaacctattcccactaacaagaggcacgctgctgccaaggtgtattcttgttcaataccgta

SEQ ID NO: 19066 - DNA, 229 bp, Glycine max
  Clone ID: 700874183H1
ctactctctatgttctcttttcggggagctgaacagattctgggagttcctttcttcttcttcttcttcttcttcttcttcttattattattattattattattattattcatttttcattctctcctagtttttttcttcttcttggtgttatggttttgtcacagtctttctacgatatgttggagaaccctgcaatattgggtctgtgcacagttattggaatgct

SEQ ID NO: 19067 - DNA, 227 bp, Glycine max
  unsure at all n locations
  Clone ID: 700874185H1
aaacacgccaacacgggtttctgttacaagagttttttaaaaaaagaaaataaaaaatgaaaataaatttattgttcccttgttttctttctccatatgcttgtctttcgtttcttttagtttttagcgtgtctttgtttctggacttcgttttgttggtttaaggttaaagcgtcacgangttgtctttccttaaatgtcgaacaaagcagggttggcttgagttt

SEQ ID NO: 19068 - DNA, 228 bp, Glycine max
  Clone ID: 700874186H1
cttggcctagccagctagcgcttctcctctcgcattccgtggagatctagtgctgccaaacctcgctgaaaattagggtttcgtttcggaggtagacgaagatgttcggcagggcaccgaagacaagcgacagcaccaggtactacgacatcctcggcgtttcgaagaacgcttcgccggatgatttacagacggcttacaagacagccgccattaagaaccaccctg

SEQ ID NO: 19069 - DNA, 124 bp, Glycine max
  unsure at all n locations
  Clone ID: 700874187H1
ccgaaaggtcggaacataaggcggggaagagttagtttcttctctcttcgatggaaggcggggaagaggttctcccttacggccactgccacctccgctcnctcaccggcagatccctaccgct

SEQ ID NO: 19070 - DNA, 224 bp, Glycine max
  Clone ID: 700874188H1
ataggattctacccgccgctcgatgggaattgcgcttcaaggcgtctcgtagggctaatccgcctcacgagggtcaccaacggcacgtgcctttggggggccgaggccccctactgctggtcggcaaacggacggcgggcgcacgcgtcgcttctagcccggattctgacttagaggcgttcagtcataatccaacgcacggtagcttcgcgccactggctttt

SEQ ID NO: 19071 - DNA, 222 bp, Glycine max
  Clone ID: 700874189H1
gctgcggatcatgctggacattcagcacaactggggctttagaagcagcctatgcacaagcatttgggaagagtatctctctttctgagcagcagctagtggattgtgctggccgtttcaacaactttggctgtaatggtgggttgccatcacaagcctttgagtacatcaaatacaatggaggacttgagacagaggaagcatacccctacactggaaaag

SEQ ID NO: 19072 - DNA, 225 bp, Glycine max
  Clone ID: 700874190H1
tgaatgtacaagtaaacatgcactaagagaatcactttattttctttgtgtgtgagagagagaaaactgtagaatgaaatatctgtcgcttccttattcatcatcagtttagagctgttaaaaaaaaaaaaaaaaaaaaaaaaaaaaaaaaaaaaaaaaaaaaaaaaaaagaaaaaaaaaaaaaaaaaaaataaaaaaaaaaataaaaaaaaaagggaggggggg

SEQ ID NO: 19073 - DNA, 224 bp, Glycine max
  Clone ID: 700874193H1
tgcaggagagccagcaaaactgatcacgcagagataccgtgaagctgcagacatgatcaagaagggaaagatgtgcgctctcttcatcaacgatcttgatgcaggagctggtcgtcttggtggaaccacacaatacactgtgaacaaccagatggtgaatgccactctcatgaacattgctgataaccccaccaatgtgcagcttccaggtatgtacaacaagg

SEQ ID NO: 19074 - DNA, 222 bp, Glycine max
  Clone ID: 700874194H1
gttgatacttctggggatggtgtgaagctaactcttgaaccagcagctggtggtgatcagactacacttgaagcagatgttgtcctggtatctgctggtaggaccccattcactgccgaacttgggttggacaagataggagttgaaactgacaagattggacggattttggtaaatgaaagatttgccacaaatgtctctggtgtttatgcaattggagat

SEQ ID NO: 19075 - DNA, 223 bp, Glycine max
  Clone ID: 700874195H1
agaagctgtcgtaggcgtctggctggccacaataaaaggaggaggaaaacgcatcctgatgcaactgtagttaatggaggctctctgaatgaagaaaagggcagtagctatttgttaatgagtctgctaaggatactgtccaatatgcattcaaatggctcggataatatgaggaaccaggatgttctatcacatctgctgaggaacctagcaagtctgactg

SEQ ID NO: 19076 - DNA, 227 bp, Glycine max
  Clone ID: 700874163H1
atcatctggaatttatttggcagtcatggattattcatcatggattaacacttccttggatctcaacattaatctccatagggttcacgaagaacttcccaaaaagcaggtggaaaacaatttttttctcattggatttggaggtgaagaaatcttctgtaaaacaagagtcagcaggtgccttggcggaggaactgaagcgggtgagtgcagaaaacaagaagtta

SEQ ID NO: 19077 - DNA, 271 bp, Glycine max
  Clone ID: 700874201H1
ctcgcgcgttggcgcagcgcttcagaacgccgacgaactcatcgactccgtcgagacatttatcttcgattgtgacggagttatatggaaaggtgataaattaatagacggagtgcctgaaacgcttgacatgcttcggtcaaagggcaaaagattagtttttgtcaccaataactcaacaaagtctaggaagcaatatggaaagaagtttgaaacacttggcctgaatgtcagcgaggaggagattttcgcatcatcctttgcagctgct

SEQ ID NO: 19078 - DNA, 233 bp, Glycine max
  Clone ID: 700874126H1
gagagagagagagagagaggacaacatcccaccatttgtggctgccctctattttagtccctagccttaatcatgccatcaggtgctaagaagaggaaagctgccaagaaaaagaaggaaaaggaaactgaaattaacaccaaccacccttcaaccaccaaccctcaaggcaatgatgaggtgaagtctcaagatgagaaagggagtgatggtggttcaccaacacatggtga

SEQ ID NO: 19079 - DNA, 233 bp, Glycine max
  Clone ID: 700874128H1
ctctcatccagatcttgcaaaaaaaaaaaaacacaatggcagcgagcgctcccactccacgcgaagagttcgtgtacatggcgacctggcgaacaggccgagcgctacgaggaaatggtggagttcatggagaaggtctccgcttccgccgaaagcgaggagctaaccgtggaggagcgaaacctcctctccgtggcctacaagaacgtaatcggcgctcgccgcgcctcctg

SEQ ID NO: 19080 - DNA, 187 bp, Glycine max
  Clone ID: 700874129H1
ctctcatccagatcttgcaggaagatcactggtcaatagcaattctaggatcgaattccacgcgagtattccgtgcaattggtaactctggtgaaaatagccattgcctacgggagttgagcaagctaatcggccacggactctcctgctgcctcttcatggctgcatacactggtgactgataact

SEQ ID NO: 19081 - DNA, 234 bp, Glycine max
  Clone ID: 700874130H1
cggcttagtgctgtttatggtggaacatatatgttgaataagcctgagtgcaaggtagaatttgatgaggaaggaaaggttgttggtgttacatctgaaggggaaactgcaaagtgtaaaaaagttgtttgtgatccatcatatttgcctggcaaggtgaggaaggttggtagggttgcaagggcgatagcgatcatgagccacccaatccccagcactgatgattcccattca

SEQ ID NO: 19082 - DNA, 236 bp, Glycine max
  Clone ID: 700874131H1
cctagattcagccacagttggaaaaaaaaaaaaagttgttcgagatggcacgtacgaagcaaactgctcgtaagtccacaggaggaaaggcacctaggaagcagctcgcaaccaaggctgcacgtaagtctgcaccaactactggtggtgtgaagaagccacatcgttatcgtcctggtaccgttgctcttcgtgagattaggaaataccagaagagtaccgagcttttgatcagg

SEQ ID NO: 19083 - DNA, 240 bp, Glycine max
  Clone ID: 700874132H1
cgctcgtcctaggtttgattatttcttccctcaattcccaacctcgcatctcccattattttattctcaaaccacgacaacaaaaacacaacacaccccaacacacacacacaaacacaacacaaacttagtttctcaatttcttcctctcgagccaacccaagttaaattgaaaacaagagcaaaaactaaacaaaggtttggtcttttgatgtgagagtaagaatcagacatctgggt

SEQ ID NO: 19084 - DNA, 239 bp, Glycine max
  Clone ID: 700874133H1
gttccttggacggaggaagagcatagattgttcctgttagggttacacaaagtcggaaaaggagattggagagggatttctagaaacttcgtgaaaactcgcacgcctactcaggtcgctagtcacgctcagaagtactttctccgccgccacaaccagaatcgccgccgccggagatctagcctcttcgacatcaccaccgatacggtgatggaatcttctactataatggaagaaga

SEQ ID NO: 19085 - DNA, 240 bp, Glycine max
  Clone ID: 700874134H1
ctcgagccgcaaaaacaaagaaaaaaaaaaacccttagccaacacaaccatcatggccacctctgctattcagcaatcagcattcactggtcaaactgctctgaagcagctcaatgagttcgtccgcaagaccggtggcgccggcaaaggtcgcactaacatgcgccgcaccgtcaagagtgctcctcagagcatttggtatggccctgaccgtcccaagtacttgggtccattctcgga

SEQ ID NO: 19086 - DNA, 238 bp, Glycine max
  Clone ID: 700874135H1
cttgctctcctttgcttctcattctgcattttcctattgcttgctctgaaggtcgggaagacatcatcaccctccaccagtcagcgaatttaaaactgcttaaactgtagattttttgtatacaatctcagtctgtctttctcgcgtgtagcacgtccactctggactatgtctttatttttgtggtgaaatttcggtcagttgaatgagcttgtacaaattgtgacaaatcagtgtg

SEQ ID NO: 19087 - DNA, 237 bp, Glycine max
  Clone ID: 700874136H1
cgcaggacactcttcttcgtcactgtggttgaaactcgaatcctttctctctctctctctctaggcaataaagtgaaacgcatcagagaaattcaattcaatggatgcaaatcgcgagcaaattgtggacgttgggtcggtggtggaagccgtttctgctgacgacggtgacgctcctctctacagcctcgaaagtctctgcatgcgttgcggtgaaaacgggacttcaagattttt

SEQ ID NO: 19088 - DNA, 235 bp, Glycine max
  Clone ID: 700874137H1
tgattttggtatttctgagggtgttgattttattgctatttcatttgtcaagtctgctgaagttattactcatcttaaaagctatattgctgcacgatctcgtgatagtgatatttctgtcattgcaaagatagaaagtattgactcattgaagaacttagaagagatcgttctagcggcagacggagctatggtggcacgaggagacttgggagctcaaatacctttagaacag

SEQ ID NO: 19089 - DNA, 232 bp, Glycine max
  Clone ID: 700874139H1
gcctactttaatttggaaaataagtatggaaaccctagagaggaggctgttatgaaagtattccaaagagctctacagtacaatgatcccaaaaaggtctacctagcactcttgggaatgtatgagaggactgaacagcataatttagccgatgaacttctcaataaaatgacaaagaagttcaagcattcatgcaaagtttggttgaggcgtatacaaagtcttttgaagc

SEQ ID NO: 19090 - DNA, 234 bp, Glycine max
  Clone ID: 700874140H1
tgcaattgaagttgaagtcttgcccttctctcttcaactccaaacacaagacatcatcatccatggctgcctccgtctccactgtcggagctgtcaacagagctcttttgaacctgaatgggtctggacctggggtttcagctcccagttcatccttctttgggagcagcttgaagaaggttattggctcaagggtccccaacacaaagatttcctctggaagcttcaagattg

SEQ ID NO: 19091 - DNA, 229 bp, Glycine max
  Clone ID: 700874143H1
ggctctctcacgcagtcgcagtgagtgaaaaggaaaaccctaattgcggtattctcagtgccttcgagagaaagaaaaaatggcagataatcttgttctccgtggcaccatgcgcgcccacaccgacgttgtgacggcgattgccactcccatcgacaactccgacatgatcgtcaccgcctcacgcgacaaatccatcatcctctggcatcttaccaaggaggacaag

SEQ ID NO: 19092 - DNA, 231 bp, Glycine max
  Clone ID: 700874144H1
attaattcatcactgtatgcatattctaaacttgttgggaacggcaatagaattgaagcctctggatttggttcattggttctaaaggcttaattggttaattagtgggattagttttttggttcatacatccttttttctttttggtacgttgttgagatattgtcagatttgatctggtcactttttacttcccagaagattacacactgcgagactttctcaccccat

SEQ ID NO: 19093 - DNA, 232 bp, Glycine max
  Clone ID: 700874145H1
tttttcttctattgtcaaatctacagtgtttttcttttctctctcacacgaaaccctctccctccctttccctcagatttctcacttccttttctcctttccatttctcaccttctccccctctcttcatctcttctctaccccttttttggttttccttactcttacgaatcaatacccgcaactttggacgtcgttggagggctttcgtcgctacccaccataactgacg

SEQ ID NO: 19094 - DNA, 61 bp, Glycine max
  Clone ID: 700874146H1
tgtgaagaagcatgctgagcgtggtgcgcgtgcacctgccctcggaaattcccattgtagg

SEQ ID NO: 19095 - DNA, 226 bp, Glycine max
  Clone ID: 700874147H1
ttaagatacggttatgttgttgctgattgctggagtcgtcgtaggtctctccgtcgtgtcgtttgtagtgacaaaattccgtgctccaggctttaacgtcgagggcaaacacgtgttcattacaggcgggagctccggtttggggctggcattagccaaaaagtatgcgcaacagggagctaaggtgtcgattgtggcccgtagtctcgacaagctggaggaatcc

SEQ ID NO: 19096 - DNA, 233 bp, Glycine max
  Clone ID: 700874148H1
ttctaaaactgaaagaaaagacaaaccaaagcagattcttggactaaaatccaatggtttaagggtcttcatcaaaaaaaaaaaaaaaaaaaaaaagggggccccccgattagtaacctcttcacccggggattaattccgggccgggtccctgcagggtaaccattttccccaaaagggagccgttttaaaccttggcgaaaccagggccaaacctgttccctggggaaaat

SEQ ID NO: 19097 - DNA, 236 bp, Glycine max
  Clone ID: 700874149H1
gccgctatgaacatcgacaacctccgacgtttcatcaaccttaactccggaaagtggaacggctctttctatcaatttgattcatgtgggaatatgttgcaacaactgagtaccaggctttctgctagctcttatggggaagatgaactcatgagtctcattcaaacgctgtatattaaacaaccttcatcaagtacttcaatttctggagatgacaatgatgcagaatgggcaga

SEQ ID NO: 19098 - DNA, 235 bp, Glycine max
  Clone ID: 700874151H1
ctactctgtcttttggctaactaccccacatggctctcctccacaagctcgcacctttcacctctctctacaccaataccccccattccccaccaccccgccgccacgtcatcatctccttctccgtctcacccttcaccgagaagcactccacagagcgctaccagagggaccaatgggtctaccagagcaccactcaagagggtcaacctcaaacgacgccgtttcctcctct

SEQ ID NO: 19099 - DNA, 229 bp, Glycine max
  Clone ID: 700874156H1
ggcacttgcaataggactaaggaatggtggggttgtggttttggttgtgttggggatgttgtatttcgcggggtttgtgtacttaacggtggtttggcaactggcgagtgtggtgaccatgttggaggaagacacgtgcggggtaagagcaatgatgaagaccaacgagttgataaaagggagaatagggttgaccgtactcatattcttgaagctcgtgatttctttt

SEQ ID NO: 19100 - DNA, 231 bp, Glycine max
  Clone ID: 700874157H1
ctcgagccgtgcccttctctcttcatttccaaacacaagacatcatcatccatggctgcctccgtctccactgtcggagctgtcaacagagctcttttgaacctgaatgggtctggacctggggtttcagctcccagttcatccttctttgggagcagcttgaagaaggttattggctcaagggtccccaacacaaagatttcctctggaagcttcaagattgttgctgta

SEQ ID NO: 19101 - DNA, 212 bp, Glycine max
  Clone ID: 700874158H1
gtaccatgccatcggcaatcgtgataaagcaagtagatggcaaaccaggcaaggtgtactaccctctcgaaaagatcagcatcccagagcaacagccacaggtaaatgatacggtcatatccctaacggcagtcgactcaatcaccgcgagctcttcattcgccaacacatctaccccggcacaaacttcggcgtgtcccttctcgccgacg

SEQ ID NO: 19102 - DNA, 228 bp, Glycine max
  Clone ID: 700874159H1
ggtagcaccagctccagcaatgatgaacctattcaaacaactggtgcttcaccaagtactgctccattgccaacaatgggtttaattgtagatgaggcacagtcagtgacatcaatccagctgaggttggctgatggcacacgcatggtttctcgcttcaatcaccatcatacaatccgagatgttcgagcattcattgatgcatcaagacccgggggtgtaagaagt

SEQ ID NO: 19103 - DNA, 217 bp, Glycine max
  Clone ID: 700874160H1
aaacatttgggtctgtctccgccttggccaaatccctagcctcttgttgtttgattgagatgacgatggcgttgttagcgggtcagagctccatttccgcgcttccctttgttaacccaacttccttgagcttcaaacctctcgcctttaccaaatccctagctctcccttcagcacagaggccaacttcgctgaggctgaaatgcaagatggagag

SEQ ID NO: 19104 - DNA, 236 bp, Glycine max
  Clone ID: 700874124H1
gatatttcgtatctcactaaccgcgctgctgtctatttggaaatgggaaagtatgaggaatgcataaaagattgtgacaaggctgttgaaagaggaagagaactaagatcagattttaagatgatagcaagagctttgacaaggaaaggaaatgccttggtgaaaatggcgaagtgctcgaaggattacgagtctgccattgagacttatcagaaagcactcactgagcaccgcaa

SEQ ID NO: 19105 - DNA, 229 bp, Glycine max
  Clone ID: 700874161H1
cctttttcatcttcttcctcctctcataccaccttcacttccatgaagccacaacatcaatatcaatgacaacaacagtttccaccgatttcctcccccagttcaacccctaccccaaccgcaccaattcccattctaattcccgtacactcccaattctcaatgaaaccaccaatctcaaccgcactctctccttccgtttccaagccccaaacccataccctcgatt

SEQ ID NO: 19106 - DNA, 250 bp, Glycine max
  Clone ID: 700874079H1
taggcgaaggactttaggttgggatttgggaattagggttattcgcgtggcgaagatgattgaggtggttttgaacgatcgattggggaagaaggtgcgcgtgaagtgcaacgaccgatgataccatcggcgacctgaagaagcttgtggcggctcagactggcacaagagccgacaagatccgcatccagaagtggtacaccatctacaaggatcacatcactctcaaggattacgagatccatgacgg

SEQ ID NO: 19107 - DNA, 251 bp, Glycine max
  Clone ID: 700874082H1
caaggttgctccttctttagctgctggctgcaccatggtcctcaagcccgccgagcaaacacccctctctgctttgtttaatgctcatcttgctaaattggctggaatcccagatggagtgatcaatgtagtgcctggatttggcccaactgctggtgctgcattaagctcacacatcattgttgataaggttagctttactggttcaacacaaacaggccgtgagataatgcaggctgcagctaagagta

SEQ ID NO: 19108 - DNA, 253 bp, Glycine max
  Clone ID: 700874083H1
tgctaccagactttgtggcctaaataagacattgaagaggggataagatcatagttggtgacattggttatatgggtctctcatattttcttctaatccatgtgcttgtttcttggggagtagtgataaatcttagtgtaaagaaagaaggaattttactctagtataggtttataccttgcatagaaccatttgagttcttagatagcttagcgatttgaaagtatatggttatttgaggttgtatattatt

SEQ ID NO: 19109 - DNA, 254 bp, Glycine max
  Clone ID: 700874084H1
gttctctgtgaaagtgtgcagggcttttaggactgaggatggtggggatgtaaaggagaaaaaggttacgaaatttgaagaaaaatgaagagaaaaccaaaagggaaagtgggttttggagttccctcaagtctatcttgttgaggaatttcatggtgggttcaaaatcagatgatgagtatcgccaagctgtggccaaggtggagggtctcctatcctcgatcgccattcaaattggaagatatattgtgact

SEQ ID NO: 19110 - DNA, 253 bp, Glycine max
  Clone ID: 700874085H1
gattgtttgttgttgtaactcgttcttcttcttttgttgttctgtgtttgtgtttgttttttctctcacctgaaaatgtcttgctgcggtggtaactgtggttgcggaagctcctgcaagtgcggcaacggctgcggagggtaagattttcgttgtaacattgtttttttcttgggaaaatagagtttttccgggaaaattttctttttggatttttaattgttattatggttacccttttggttcaattgca

SEQ ID NO: 19111 - DNA, 253 bp, Glycine max
  Clone ID: 700874086H1
gtcttgcaattgaagttgaagtcttgcccttctctcttcaactccaaacacaagacatcatcactcatggctgcctccgtctccactgtcggagctgtcaacagagctcttttgaacctgaatgggtctggacctggggtttcagctcccagttcatccttctttgggagcagcttgaagaaggttattggctcaagggtccccaacacaaagatttcctctggaagcttcaagattgttgctgtagaagaga

SEQ ID NO: 19112 - DNA, 75 bp, Glycine max
  Clone ID: 700874089H1
ctcgagccgaatcggctcgagcggctcgagcggctcgagcggctcgagatattttatctttataccacacaacat

SEQ ID NO: 19113 - DNA, 249 bp, Glycine max
  Clone ID: 700874091H1
ctcgagccgttgcaattgaagttgaagtcttgcccttctctcttcaactccaaacacaagacatcatcatccatggctgcctccgtctccactgtcggagctgtcaacagagctcttttgaacctgaatgggtctggacctggggtttcagctcccagttcatccttctttgggagcagcttgaagaaggttattggctcaagggtccccaacacaaagatttcctctggaagcttcaagattgttgct

SEQ ID NO: 19114 - DNA, 243 bp, Glycine max
  Clone ID: 700874092H1
gcctctgaaggccaggtggttgaggcatttaaaatattgactgctgatgacaaagtgaaggcaattttggttaacatttttgggggtataatgaagtgtgatgttatagcaagtggaatagtgaatgctgcaaaagaggttgcactgaaagtacccgtagtagttcgtctggaaggcaccaatgttgatcatggaaaaagaattttgaaggaaagtggtatggcgttgataacggctgaagat

SEQ ID NO: 19115 - DNA, 246 bp, Glycine max
  Clone ID: 700874094H1
tccatacatagcaagataaacacactcacacacagtgcttgtttagactagtgatcttccatggctgtgaaggatagaatcctggtcttgggacccacaggagccattggaaggcacatagtttgggcaagtttaaaggcagggaatcccacttttatattggttagggacacccctgcctctgttaacaagccaaggcttgtcactgctgctaatcctgaaaccagggaagaactcattcagagc

SEQ ID NO: 19116 - DNA, 246 bp, Glycine max
  Clone ID: 700874095H1
gtctgttcttatcttcatcctacgccaatagcccaaaaccttgttctctttttgtggttcatttctctcttccagatgccacttgctgttcttcaccctcacgattttctcaggaaaaacccatctaaccagtaccagaccataatccctcactctcccaacatgaatcctaataagtctcatcggacttcccgaaaccgtaagaagcggcccgatccaagcccacaaggcgttgtcagcccagcc

SEQ ID NO: 19117 - DNA, 249 bp, Glycine max
  Clone ID: 700874096H1
tagacctaccatgaaacaagttacaaggtacttgaactttgatgaacctcttcctgatattgttgattggggacatggtgtttctgggagcagtagattgagttcaggtttcttagaagttacgtattctatgggaactgttgaaacattagggtatttgtcatccattagcatgagtactaagtccatagatgctggtaggcagcaaataatcatatagtaacattttacactttaatgtatatttct

SEQ ID NO: 19118 - DNA, 247 bp, Glycine max
  Clone ID: 700874102H1
acgatgcagatcactattgtggttcatgctgttatggttgcagaacaggagataagaagggaactgactccactttgttggttgattctgtaggcaatggtgcagtgatcctcactggatgtaaagctgagagattcatacttgaaaatggaaagaatggaatgaagaaaaagaagtgcttaggagtgattgctgcagcaagttggaggagtaaggtaacaaagaaactccaaattgaatccaaggt

SEQ ID NO: 19119 - DNA, 238 bp, Glycine max
  Clone ID: 700874104H1
ctgcaagtagggataaaatattgatgctgcggttctcctgggcttcccttctaataattattacagcttcaactttggcttgccaccagcttgttgtgtctctatctgaagcttacttgggcaaaatatttgatgctcccaagagatatgcagtcagtgtatgaaattttctcaaaacattcacttttctcagcagaaagagagcattcttatccaacgacaattttccaaaaggaaa

SEQ ID NO: 19120 - DNA, 240 bp, Glycine max
  Clone ID: 700874105H1
cagaagcaaagatccctatgaccgtgttttggttgataccacagaacttgtttgtgggggcaggggaggcatttatgtacatggggcagttggactttttccttagagagtgtcccaaagggatgaaaacaatgagcacgggattgttcttgagcacactctctttggggtttttctttagcaccttgttatgctctatagtgaacaaaatgacagcacatggtaggccatggctcgcag

SEQ ID NO: 19121 - DNA, 239 bp, Glycine max
  Clone ID: 700874106H1
ctcttttcattacttttagcctgcatagttttaaataagaaaacaaaaacagcgactttgtgactagttaagatcaccgtttcttcttcttcttcttcttcttcttcttctactactactactactacttttcctccacaaaatgatgctcagaatcaagagggttcccactgtcgtttccaactaccaaaaagacgacgctgcagactctcctcgtcccgtcggaggttgtggtcgga

SEQ ID NO: 19122 - DNA, 239 bp, Glycine max
  Clone ID: 700874110H1
ctcgagccgcattcggctcgagggctaaccattcgtgcagatgaaattagtaaaattatccgtgaacgcattgagcaatatactacggcagtaaaaattgtaaatacgggtacgtacttcaagtaggcgacggtattgctcgtatttatggtcttgatgaagtaatggcgggtgaattagtggaatttgaagagggtactataggcattgctttgaatttggaatccaaaatgttggtg

SEQ ID NO: 19123 - DNA, 237 bp, Glycine max
  Clone ID: 700874111H1
ttttcgttggagaatcctgaaaaccgcttgattttaatcaaagggtcatcaggattcgggcacccatatctcgtatcactccttctctcctctgttgtcttagaaagaagaccaagaaaagcatcaatttttgcaagcaatcttcttcttttgccctttctcttgtcttaaacacacacacacaacaacccagctgctgaagctgaagcatcacaactcacacatgattcgagtggc

SEQ ID NO: 19124 - DNA, 237 bp, Glycine max
  Clone ID: 700874112H1
gtagattgtggcgtgttctcgatgatgatgatgatgagccgcagcggcgccaaccgggtagcgaacaccgcaatgtttgtggcgaagggtttaagcggcgaagttggtggtttaagagcattatatggcggtggtgtgaggagtgagagcactttggctttgtcagagaaggaaaagattgagaagaaggttggtttgtcttctgctggtgggaacaaagaagaaaaagtgatcgtg

SEQ ID NO: 19125 - DNA, 237 bp, Glycine max
  Clone ID: 700874114H1
cgccatacgtggctgcaaattttatcgcggccagagatggcacgctggcagtgcgacccgactcgctgctgtggaatgtcacggatcgtgcccgtttcgcgcagttcggcatcgaccggccgttcacgttcctcgtgtactgtcctgctatgtatcagccagcggtgattgcgctgcagctgcgtatcgaaacccaacagtccatgctggccttcaactcattgctggcgtcgcggg

SEQ ID NO: 19126 - DNA, 237 bp, Glycine max
  Clone ID: 700874115H1
ggagaatcaacaccggatgtcatagtcagtgaatttttgaagggtgagaaggagctgattgagaagttgttacaaactgaaataaatatattccgctcaatcagagatggaagtgctctgatgcagcatatggaggatttctattacatcacgttactagagaatgtaagatcaaattaccaccaagctgtctcaaggtccgaacaagatcaaaactatagactataatatgatcca

SEQ ID NO: 19127 - DNA, 255 bp, Glycine max
  Clone ID: 700874117H1
ttcggctcgagcattggtccattatctatcgttaatggaagtggaagtagcacttccattttccattttgcatttcccagtagagtaggcaaagccaaatccaaagggaacacgttcattcaattgcaattatttatattaattaataataattcacaaattgtgtgtggccagcactccaatcccctccctcaactacccgacaacttttccattcccggcatctcctcccagcctcgtaccccagatacctta

SEQ ID NO: 19128 - DNA, 239 bp, Glycine max
  Clone ID: 700874119H1
gctgctgaatcattggctgatcctgaagaatatccaaatttgtttgaagattggcaggttgcactagctgtcgaatctaaagctgtggaaacaaggaatgtgtaccctcctgcggagcagtacgtcaaccatgctgacaaatcacaaattacccttgttgaagcctttagaaacatgcagattgaggaaggagaggagcatctggagaatggggactctactcatgagttgacagaaca

SEQ ID NO: 19129 - DNA, 239 bp, Glycine max
  Clone ID: 700874120H1
atatgatgtgactacaattagagcaagcacacctatgtttctcatgtctcggaagattaaatcacttggtgtcaaatgggttatctcaggagaaggatctgatgagatctttggagggtatttgtacttccacaaggcacccaacaaggaggagttccacagagaaacatgccgcaagatcaaagcacttcaccaatatgattgcttgcgagccaataaatcaacatttgcttggggtc

SEQ ID NO: 19130 - DNA, 237 bp, Glycine max
  Clone ID: 700874121H1
ggaataacaaaagaaaagaaaagaaaaacggattaggagaggaaaaaaaaaaaaagcttgtgcgagagaaatgttagaaccttgtttctgatttttttttcctcttcgatttggatttttttttctgttgtagtttttgttgttgttgctctctctattttcgaaacgagattggagctctgactttggggttttggaatttcattgctgggattgtttttcccaaattgctgcatc

SEQ ID NO: 19131 - DNA, 235 bp, Glycine max
  Clone ID: 700874123H1
gtggtgaataccttacaagaaagaggagcaatggaatacactattgtagtagctgaaacagcggattctccagctacattacaatacctcgccccttatacaggagcagctctggctgaatattttatgtaccgtgaacgtcacactttaatcatttatgacgatctctccaaacaagctcaggctcatcgccaaatgtctcttctattacgaagaccacctggtcgcgaagtta

SEQ ID NO: 19132 - DNA, 251 bp, Glycine max
  Clone ID: 700874074H1
gaagatgttagggtgcaacgagacaaaggttttgggtttgtgagatacagtacccatgctgaagcagctcttgctatacagatgggtaatgctcgaattctatttggcaaacctatcaagtgttcatggggtagcaagcctactcctccagggactgcctcaactcctctcccaccacctacttctgcgaatgtgtcgggattttctcttgctagtcttgcagcttatgaacgccaaatggctttgagtaa

SEQ ID NO: 19133 - DNA, 260 bp, Glycine max
  Clone ID: 700874019H1
tttggagctagcaacttgcattgatacaaggtgcataacatcttatgatgataaatcttcagacttcaagcttcaagcagtctgtctgtactctgtagtcttgtaatcatgccccaggctcagatgaggaaggattcctaatgggaactgctgcttatttgaacatttttttttgttcatacccaattcttgaatatgtctattcaattttcaggacaatgtttgtaatgtaatgtactactttgttggtggtaaaagat

SEQ ID NO: 19134 - DNA, 259 bp, Glycine max
  Clone ID: 700874022H1
gattaatgaagcaaggccacatgataagcttccatacaggggtgcttggttgtgggtaggctctgagatgaaccatttgatggagcttccaaaccctgacactttaactggacgagctcaacatggtggtcgagatcgtcacacgtgtattgcgattcgtgatgtttccaagctgaaagcaatctttgataaagcggggatcccttacacacttagtcattctggaagaccagctatctttgcacgtgatcccgatgca

SEQ ID NO: 19135 - DNA, 261 bp, Glycine max
  Clone ID: 700874023H1
ggcaacaacaactatctctcatccttcttctttctgtatccgtaacacttgcaacacacatggctacaatcaccaacactttcatattcaaaccccccatctctcatcacccaaagcagcttctttattcccaccgctcttctctacgctttctcaccaaatttaaaaccccctccggagcgatttctcggcggctggttccgaaagccacggcggctcccggggccaagaagacagaaaagccgcacgagagagtccagc

SEQ ID NO: 19136 - DNA, 261 bp, Glycine max
  Clone ID: 700874024H1
gttgcaagtgttgtttctgtaggccaagaagtgaaggtgaagctgattgaagtgaatacggaaactcagcgtatatctctctctatgcgtgaaaatgttgacactggtaagcagcgtaaagatgcacccaccaagacagagaaagctggacctgggaagaggaacaattcaaaacccagtccaaagaaagataatgtgacgaaaagcacaaaatttgccattgggcagcaactggttggttcagtgaagaatttggctagg

SEQ ID NO: 19137 - DNA, 261 bp, Glycine max
  Clone ID: 700874025H1
ggaaaatgaagaatctttgtcagaattttgatgttagagccacgattccggttaaaataggaaaaaaatcgacttgggatgttttgtttcctcgtaggttgtggttgccgacgtggacgtgtgatcagaggaaggaggggaagttgaacttaaaggtgcagtgcggtactaggaaagaagggtgggttgaatctgcgggaaaaagcgcgtttgggtttggcgtttcggccgcggttttgttctctgcgttctgctactcgc

SEQ ID NO: 19138 - DNA, 260 bp, Glycine max
  Clone ID: 700874026H1
tgcaattgaagttgaagtcttgcccttctctcttcaactccaaacacaagacatcatcatccatggctgcctccgtctccactgtcggagctgtcaacagagctcttttgaacctgaatgggtctggacctggggtttcagctcccagttcatccttctttgggagcagcttgaagaaggttattggctcaagggtccccaacacaaagatttcctctggaagcttcaagattgttgctgtagaagagaagaaagagatt

SEQ ID NO: 19139 - DNA, 254 bp, Glycine max
  Clone ID: 700874028H1
gaataataatattctctctttgttcctctctctaaaattaatggctgaagcacaaagtggccaagctagtgaagggattaaactgtttggaacaacgattacgttgcatggaagagaaagaaaagaagatagaaatgatagtgaagatgggacagaggagataaagagacctgataagatcataccatgcccaagatgcaagagcatggaaaccaagttttgctacttcaataactacaacgttaatcagccca

SEQ ID NO: 19140 - DNA, 253 bp, Glycine max
  Clone ID: 700874030H1
caaaggagaggaaaagtactgtgccacttcgcttgaatccatgattgatttcagcacttccaagcttggaaaaaatgttgaggttgtgtccacggaagtagtggaggacaaggaaacgggattgcagaaatacaccgtagcaccgggagtgaacaagttatcaggggacaaggctgttgtgtgccacaagcagaactacccttatgctgttttttactgtcacaaaactgagaccacaagagcttactctgtg

SEQ ID NO: 19141 - DNA, 254 bp, Glycine max
  Clone ID: 700874031H1
gaatttttaattttctcgggaaaaatgtggttccacctaagaaaacgacactagcattgcatagcaatagttgatttttctccagaaaattaaggagctcaacttagtagtggtaagaagtaataacgcgcgcacacacacatacacaaagacagtgacagtggtgttgaattttcctcaaagaggatgtggaaactcgtgcgatatgccgccgcctccaacctcgcccgatcgcggcggttctccgccggatt

SEQ ID NO: 19142 - DNA, 257 bp, Glycine max
  Clone ID: 700874032H1
ctcgagccgttgcaattgaagttgaagtcttgcccttctctcttcaactccaaacacaagacatcatcatccatggctgcctccgtctccactgtcggagctgtcaacagagctcttttgaacctgaatgggtctggacctggggtttcagctcccagttcatccttctttgggagcagcttgaagaaggttattggctcaagggtccccaacacaaagatttcctctggaagcttcaagattgttgctgtagaaga

SEQ ID NO: 19143 - DNA, 260 bp, Glycine max
  Clone ID: 700874033H1
gggtgggtgtcatgttttggttcttctgattgtcttctttgttttagcttcttctggggtttgtggcctggtcttggaaattggttttgtgaagtgggtacaatgggtatcgataccaatttggtgaccactgtcattggctttggtttgagtgcaactttcattgtttttgtttgcgcaagaataatttgtggaagactacgagagcgaacacggactatatatgaaattgaagcaataacagatatagaacgggcaga

SEQ ID NO: 19144 - DNA, 132 bp, Glycine max
  Clone ID: 700874034H1
ggtttcaataatgagtttgatagcttcgaggacgtgcgttgtctctttgatggcggagtttatctccctacagatgtactcagcaaaattagccccataccggtgctcaaagaaatcttccacacgacagac

SEQ ID NO: 19145 - DNA, 259 bp, Glycine max
  Clone ID: 700874040H1
ctgtagacaatggggaattggatgaatttggtcctctcatgagacagccattctttgatcttcatcgaagctatagtaacttcagtaatgaatacacgaatggctttgggtacgaaggagactggggtcctcatccggctgagatcgaacctagtggaattgaactttttgagtaccgtgatgatgatgaaccctctgaagatgttgacataagcatcaagggcaagaggaaagatgatggtggtatctttttgagact

SEQ ID NO: 19146 - DNA, 111 bp, Glycine max
  Clone ID: 700874041H1
gttgatgcgcaaggatatcgtctccacactcaagggtctcgcacaacggcttggaaagcgcgaaatcaccgatgcggatatgatcaagttggccaattacatggcgccgaa

SEQ ID NO: 19147 - DNA, 253 bp, Glycine max
  Clone ID: 700874046H1
ctggccaaggtcttggactcatttgagcagtgcaacagagatgatggcatgtgtgagcagtcatcatcacttgaggaattcatactgaaggatcttgagatggtaattggacagttcaccaagaggacccgtatttgcttccgagatgctctgtaccgtcttgatagaaacactgaagaacaacatgtaatgctggaccagaatgaagatcttaacatacagaaggcaataccacatacagatcacaatgaaa

SEQ ID NO: 19148 - DNA, 253 bp, Glycine max
  Clone ID: 700874048H1
gtcagaaagttgaatggtattaatgtggatcttaatgggcaacctgcttccactgattatgatgaagatgatgaagaagaggaagacaatcatggagcaagagattcctctcctgaggatgcttgagaatcttaaattgttcctttgaccaaagggtgaatggccaatgaattccttcctgcactaaaactgtcgtgttgaggacttgacactgttcctggttttgatggaaaattcatgcgacacattaatc

SEQ ID NO: 19149 - DNA, 168 bp, Glycine max
  Clone ID: 700874049H1
ggctcgagacaacttgtgtactgaagttgtacataaattgattaaattccttatgtccttttgatctccatcaaaatgttcatcttgagtgttactagtattggtgctaaagtaaaatatggttgtacaagacagtgaggaaacatttaccatgatgaggtccttttt

SEQ ID NO: 19150 - DNA, 167 bp, Glycine max
  Clone ID: 700874050H1
tgaaattcgaacaatgattttttcattttctttttaatacttttttggtttagactccctaagaatctgtcgatatttccaattaaatcttcttgttcctgtgaaggtcctataaaaaaaaagggctatgccctttctttactcagaagggccttattccaagttcc

SEQ ID NO: 19151 - DNA, 252 bp, Glycine max
  Clone ID: 700874051H1
tgctaccagactttgtggcctaaataagacattgaagaggggataagatcatagttggtgacattggttatatgggtctctcatattttcttctaatccatgtgcttgtttcttggggagtagtgataaatcttagtgtaaagaaagaaggaattttactctagtataggtttataccttgcatagaaccatttgagttcttagatagcttagcgatttgaaagtatatggttatttgaggttgtatattat

SEQ ID NO: 19152 - DNA, 259 bp, Glycine max
  Clone ID: 700874056H1
tgaaatttccagatatggttcatgctcttaaacccaatcccaagaaccacatccaagagaattggtaggatccttgacttcttctctcactttccagaaagccttcacatgttcacctttttatttgatgatttgggtgttccacaagattacaggcaaatggatggttttggagttaacacatatacgctgatcaacaaggctgggaaagcagtgtatgtgaaatttcactggaagaccactagtggtatatagtgtc

SEQ ID NO: 19153 - DNA, 255 bp, Glycine max
  Clone ID: 700874058H1
tgtttcgttactatgctggttgggcagataaaatccatggtctgacagtgcctgctgatggaaattatcatgtggagacattgcatgaaccaattggtgttgcaggacaaatcataccttggaactttcctctcctcatgtttgcttggaaagttggaccagctcttgcatgtggaaatactgtcatccttaagactgctgaacaaacacctttaacagctctctatgtagcaaaactttttcatgaggctggtc

SEQ ID NO: 19154 - DNA, 265 bp, Glycine max
  Clone ID: 700874064H1
attcggctcgagggcgtatatgatgataagttcactgatgacccctccactgagaagaaaatgcttcaacagtatgatgatccagctgcagaagagggtttaactttggatgaaaagggacgattctcaggtgaagctgagaagaaacttgaagagctgcgaagaaggttaacaggtgtttccacgaatacctttgaagatctaacttcatctggaaaggtatcatcagattactatactcatgaagaaatgctaaagtttaaga

SEQ ID NO: 19155 - DNA, 259 bp, Glycine max
  Clone ID: 700874065H1
tttttcgtctttgctctccaaaaatctgacacacacaggtatctatcatatggggtctcaccaactagaaccatggctattggataatgggaaaccaagggctttgaccaaggagaccaggcatggccgttctgcacacagaatgtcctccacctctttgcgcaagaaatctagccgaactcttgtctcaaaggttccatgtgccactctcagaaactttctttcaaatttgcaagaggttattcttggcaccaagctt

SEQ ID NO: 19156 - DNA, 256 bp, Glycine max
  Clone ID: 700874068H1
cataatgagagtttccgcaagtgtagtcccagaagatgattatagaactagctccttcagactggaggcttcaggagagttcctagaattcataccagaggaagaatcctcagaacctgaaaatccaccaaaggacaacatggatgattacactcttctgctttcttcaattgaatctgaggagaatgtgaagttaccaatctcagctaaaatcaaacaacaatttggaaaccttttagtcaactccaatttcaga

SEQ ID NO: 19157 - DNA, 256 bp, Glycine max
  Clone ID: 700874072H1
cgataattaaaaatgggcaacttgacaaattaaaagatacttttcaagtattccaatattatttcctggacgaaaacgagagaatttataaacctgatctgtgtagtaacatcattttaaatccattctatttgaattggcattttctccaccataattattgtgaaaaaacgtttacaataatgagtcttggtcaatttatttgcgaaaatgtatgtatagttcaaacgaaaaatgcaccacacctaaaatcggg

SEQ ID NO: 19158 - DNA, 262 bp, Glycine max
  Clone ID: 700874018H1
agtgtgttggcattgccgatagatctgcatatgatttgcgtgctcactcggataaaagtggtgttccgttagtggctcatgaaaaatttgcagaacctaaggaagtggagaaattggttataactccagtaaagaaatagctgggtctggcattcaaggggaaccagaggatggtggttgaagccattgaggcaatggctgagaaagaagctttggatatgaaggctgctctggagtcaaaaggggaggtggagtttcaagt

SEQ ID NO: 19159 - DNA, 244 bp, Glycine max
  Clone ID: 700873983H1
gtgggtttaagaagcgtggctccttctctctttctctcagttctctcatttcttgccttctctatttattttaatttttaattgtccgatttcacagccatagcataatcctagcaacacagtattttttttattttcttaattaattttccgtccggattcctgtgtgtcatctctcaattttccagttttcaatttctcccaaattctttcaattcttcctcaatctttctagggttagggt

SEQ ID NO: 19160 - DNA, 242 bp, Glycine max
  Clone ID: 700873984H1
caagtggtgggcgaggaacgggctcaatcttggtgtcggcacaagcgagtggatgaagacgaagaccctgaacaattcttagatcacctagcgttttttgtgtgttttgtttcattggagcgatgcatggcgtctgggtttgttatcaacggacggacggatggacggacgggtttaggaacagctggaaacgagcattgatgtttttctcatttggcactttgaaacagcatattgggtag

SEQ ID NO: 19161 - DNA, 234 bp, Glycine max
  Clone ID: 700873985H1
gtcactggctcctgttgttattggtgtgtccatggcatctttgaccgagctctcattcaactgggtcggcttcataagtgctatgatttcaaacatttccttcacgtaccgaagcatctattcaaagaaagccatgactgatatggacagtaccaatatctatgcctacatttccatcattgctctaattgtgtgtataccacctgccgtaattttggaagggccacactgttg

SEQ ID NO: 19162 - DNA, 239 bp, Glycine max
  Clone ID: 700873986H1
cgaaaaatgggtaaaagcaaccccaaaattcttgcgtgtccgaaacctctgaaagaaattgcaatctaatcaaagccagaatgaatgctgatgaacgctgtctgaattttttgagctaaataaaagaagaaaaacagggtgagagagaaacagagtgagagagaaacagaggatcttcatatgaagagtgaagtgagttggagaataaagattcaacaacctgggaaagccgggagagt

SEQ ID NO: 19163 - DNA, 237 bp, Glycine max
  Clone ID: 700873987H1
caacaactgttatgtcatacataaccggctcaacatgtgtgagtttttcgccatcttagctttgctacattttgtatattcatatttgtctacagggactgggttgccagccttgtctgtcatttttgacctgaatgcactactgcttcaaaattttatctcaaacttgaggtgcttacttgctatagtgatatatttgtatacaaaaaaaaaaaaaaaaaaaagggggggccgccg

SEQ ID NO: 19164 - DNA, 241 bp, Glycine max
  Clone ID: 700873988H1
aattcagtccacaatttactttttccactttcccctaacctcccactcggaactcgtcgttacctatcgataatgaatttggggttacctcgctcacatccatcgttcgagtggaagcagcagcttgtggccgatgttgactctaaccccagcgtgtcgcagaagcagcatcagatttccaaggctggagaaaccgttaaggagaagattattttagtgcaagagaagaatattcgaagac

SEQ ID NO: 19165 - DNA, 239 bp, Glycine max
  Clone ID: 700873989H1
ccctgcgcgacctgatcgcataagtaaaataaggctacaatttaagactttcctttcagaagcaactggattttaccatgatcttattacgaaaatcagagctaagtatgatcttcctcttggttactttgacgattcagagaaccggattgtgatggagaaagatggaaagaaatctgctgcgatgaagaaaggcttagtagcttgtcatcgttgtcttatatacttgggtgatcttg

SEQ ID NO: 19166 - DNA, 234 bp, Glycine max
  Clone ID: 700873990H1
atggattcaagggagctgaaattgccatggcatcttattgttctgaacttcaatatttggcgaatccggtgacaagccacgtgcaaagcgcggagcaacacaaccaagatgtgaactctctggggctgatttcatcaaggaagactcatgaggctattgagatcctcaagctcatgtcctccactttcctggtcgccctttgccaagccattgacttgaggcatttggaggaga

SEQ ID NO: 19167 - DNA, 236 bp, Glycine max
  Clone ID: 700873991H1
ggaagatgctgatgaagctggcaatgactccgatgctgaatcaaagacggaagctggggaagacaccaaggaagagggtgtacatgatgaactctaggaagtttgcaaaacggataaagagtgagcggaagttatattccggatagttatatttcagtcgtagtgttttttgttttccctagataagcagaccgtggaaaactgctagtaaaagctggagcttttgcttcgatcac

SEQ ID NO: 19168 - DNA, 73 bp, Glycine max
  Clone ID: 700873992H1
cagacatagatgactgataatctaggtagctcccataattgcatagatcaacatttgtgtttgtttttttttc

SEQ ID NO: 19169 - DNA, 240 bp, Glycine max
  Clone ID: 700873993H1
aaattgcactaggagctgctaagggtcttgcttttcttcatgaagaagctgaacgaccagtaatatatagggattttaaaacttcaaacatattactggatgcagagtacaatgccaagctctcagattttggtcttgccaaagatggtccagaaggtgataaaacccatgtgtctactcgagtgatgggaacctatggttatgcagcaccagaatatgtcatgacgggtcatcttacat

SEQ ID NO: 19170 - DNA, 242 bp, Glycine max
  Clone ID: 700873994H1
ggcacccagagacgaggaagggcgtagtaagcgacgaaatgcttcggggagttgaaaataagcgtagatccggggattcccgatataggtcaacctttcgaactgctgctgaatccacgggcaggcaagagacaacctggtgaactgaaacatcttagtagccagaggaaaagaaagcaaaagcgattcccgtagtagcggcgagcgaaatgggagcagcctaaaccgtgaaaacggggttg

SEQ ID NO: 19171 - DNA, 244 bp, Glycine max
  Clone ID: 700873996H1
gtagcccaaaaggtgtggtcagaggtattcttctacctggctgagaacaatgtcctgttggaaggtattctcctcaagcctagcatggttactccaggagccgagtccaaggacaaggccactcctctgcaagttgctgattacaccctcaagctccttcacaggagaatcccacctgctgtccctggaatcatgtttctgtctggcggacaatctgaggttgaagcaaccttgaacttgaatg

SEQ ID NO: 19172 - DNA, 268 bp, Glycine max
  Clone ID: 700874001H1
ggggttggattatatggatagtctttgttgcttcagctctttcagtcaggtggttggagggcgttcttcatgtaactctggcaaaggcaagagcagtcagtcctcagtcaagtatggctatagcctagttaaagggaaagcaaaccacccgatggaggactatcacgtagcaaaatttgtccagttcgaagggcgagagcttgggctttttgctatatatgatggacacctgggtgacagtgtaccagcctatttacaaaagcatctg

SEQ ID NO: 19173 - DNA, 267 bp, Glycine max
  Clone ID: 700874002H1
cttggtttcaatattcatcatcaaatcactggtcctccttttatagaaatcttagatctgcttttaacacaaggttttggtggagaagaagaagcaaagacgacggtgtataaatacaagagtagaagaagaagaagaagctcttagagggagagttagtgagcaaggtggatcgaaggcaagggaagaggtctctccctcctcatgaggagaaaaaagaagctttcaactttcctattattcatccaacaccatctcaaaatcgaa

SEQ ID NO: 19174 - DNA, 255 bp, Glycine max
  Clone ID: 700874004H1
caactctttcaaaagggagaagaaaaggaaaggaaacaaaacgcacaaaggattattatagcaatggcagaacaaaaccaaaaccagacaactgaagctggaaggcaccaagaggttggccacaagagccttctccagagtgatgctctttaccagtatattctggagaccagtgtctacccaagagaacctgaatccatgaaagaactgagagagttgacagcaaaacacccatggaacatcatgacaacctct

SEQ ID NO: 19175 - DNA, 262 bp, Glycine max
  Clone ID: 700874005H1
tccaccttcaccataagctcctttctctgttcctaagaggagttatgggggcaaattgaaaacgcattcaattacaacaaacacgttttttttttgttaatgttgttgcattctcttttccttttgccgtaaacgggggccctcgcttttctcataagccactgaaaaattttgctcctttcgcccctaaactttaacagaggtcgttgttcaccgcaattcctcaccccaatggaagattcaagtgaattgcaatcagaag

SEQ ID NO: 19176 - DNA, 263 bp, Glycine max
  Clone ID: 700874006H1
cttcatgatagtcaatatggggcctcaccacccatcaatgcatggtgttcttagacttattgttactctagacggtgaggatgttattgattgtgaacctatacagggttatttacacagaggaatggaaaaaatagcggaaaaccgaacaattatacaatatttgccttatgtaacacgttgggactatttagctactatgttcacagaagcaataactgtaaatggaccagaacagttgggaaatattcaagtacctaaaa

SEQ ID NO: 19177 - DNA, 265 bp, Glycine max
  Clone ID: 700874008H1
taggcgaaggactttaggttgggatttgggaattagggttattcgcgtggcgaagatgattgaggtggttttgaacgatcgattggggaagaaggtgcgcgtgaagtgcaacgacgatgataccatcggcgacctgaagaagcttgtggcggctcagactggcacaagagccgacaagatccgcatccagaagtggtacaccatctacaaggatcacatcactctcaaggattacgagatccatgacggcatgggtctcgaactc

SEQ ID NO: 19178 - DNA, 262 bp, Glycine max
  Clone ID: 700874011H1
gtcgtttcatttaacaacaatcaatcttttccctctttctcttaattcccaatattcttcacattcacttctcttctgccatgtgaacaaacatcaaacatagcaagcacaaaacaaaatcgcagttccatccatagcactgcctcaattcttcccccaaaaaaatgagccagtgtgttcccagttgggatgtcgaagacaacccaccaccctcaagagtctcacttcgctccaactctaattcaactgcccctgatgttcc

SEQ ID NO: 19179 - DNA, 259 bp, Glycine max
  Clone ID: 700874012H1
aaaaaacacagagacagtgttcttagcgccgccgttgccctaccatcttcatattattctattgcctttctttcacgtttttctggtttttaagcccttccagtgccctatttacgcttatacccttctggttatgatagcttccattcggcgtcaccagagagccgaagctcttggcttccacacatactttcggttccgtcgattgagatacaaagcctccaagccagccgagccaatcctcaaattccaactttac

SEQ ID NO: 19180 - DNA, 257 bp, Glycine max
  Clone ID: 700874013H1
ggcttatggtggatacctaggcacccagagacgaggaagggcgtagtaagcgacgaaatgcttcggggagttgaaaataagcgtagatccggggattcccgatataggtcaacctttcgaactgctgctgaatccacgggcaggcaagagacaacctggtgaactgaaacatcttagtagccagaggaaaagaaagcaaaagcgattcccgtagtagcggcgagcgaaatgggagcagcctaaaccgtgaaaacggg

SEQ ID NO: 19181 - DNA, 256 bp, Glycine max
  Clone ID: 700874014H1
ctaccgtggatgacgggctttcatcggatgcagaagataagcgagccaaaaccaccgagcttgcacagttgctagtggagcttcaacgcatgaacgctgagaacaagaagctgaaagagatgctcagccatgtcaccggtaactacaccgccttgcagatgcatcttgtgacactaatgcaacagaaccagcagcgaacagaaagcacggaaaatggggtacttataaattccaagttgctcagggaaaggttgag

SEQ ID NO: 19182 - DNA, 253 bp, Glycine max
  Clone ID: 700874015H1
gaactattgcaaggctgtaaaagcaggccttcttaaaattctttccaaaatgggcatctcgttgctatcaagttactgtggtgcacaaatatttgaagtctatggattagggaaggaagttgttgatcttgcattcagaggaagtgtgtcgaaaattggtggattaacttttgatgaggtggcaagagagactttgtctttctgggtgaaggcattctctgaagttacagctaaagggttggaaaattttgga

SEQ ID NO: 19183 - DNA, 260 bp, Glycine max
  Clone ID: 700874017H1
ggtggatacctaggcacccagagacgagtaagggcgtagtaagcgacgaaatgcttcggggaattgaaaataagcgtagatccggggattcccgatataggtcaacctttcgaactgctgctgaatccacgggcaggcaagagacaacctggtgaactgaaacatcttaatagccagaggaaaagaaagcaaaagcgattcccgtagtagcggcgagcgaaatgggagcagctaaaccgtgaaaacggggttgtgggaga

SEQ ID NO: 19184 - DNA, 245 bp, Glycine max
  Clone ID: 700873982H1
cggctaccccaccatattctacgacgccatttatagttcttctatggtctcaaacagaatccaaatccctctcttatccaaccacctcagcgacgcttccatcaaagacaagcccagcgtcacccccgatggacaatatttactatacgtgtccagccacgagaacccgggcgttccacgggccagttggaccgcggtttactccactcagctcgagtcaggcctcacccaaagactcacccctt

SEQ ID NO: 19185 - DNA, 245 bp, Glycine max
  Clone ID: 700873941H1
acctggtgttgggaagacagcaattgctgaaggtcttgctcagcggattgctaatggtgatgtacctgaaaccatagagggaaaaaaggtcataacccttgacatgggtctgcttgttgccggaactaaatatcgtggtgagtttgaggagaggttgaagaaactgatggaagaaatcaaacaaagtgatgagataatactttttatcgatgaagtgcacactttgattggagcaggagcagcgg

SEQ ID NO: 19186 - DNA, 244 bp, Glycine max
  Clone ID: 700873942H1
cggctcgagcggctcgagcaaaattttcaggttttaggtgaggcttaccaagttctgagtgacccagctcaaagacaagcttatgatgctcatggaaaatcaggaatttcaactgaagcaattattgatcctgcagcaatctttgccatgctttttggtagtgagctttttgaggaatatataggtcagttagccatggcatcaatggcttcaatggacatctttactgaaggagaacaatttg

SEQ ID NO: 19187 - DNA, 244 bp, Glycine max
  unsure at all n locations
  Clone ID: 700873943H1
aaggaagacgcactataagctaaagcagcaatgagtactccttctaagcttttatctttattctttgtactcattgtcttgctgatgcccttagtttccttactcaacatgatttctctatcttcaccattaaaaccatttcatacctagtttcctttagtgaaaagccaaaccattactctaatttcagcattattccatacaacgtgaatgggagnnnacaaaatggccacatcaccacaaa

SEQ ID NO: 19188 - DNA, 80 bp, Glycine max
  Clone ID: 700873946H1
tgcctttatattttcttctgtattaagctgaccaaaggcaaatccatttgtatctgtagctggaattttcgtcattctta

SEQ ID NO: 19189 - DNA, 250 bp, Glycine max
  Clone ID: 700873948H1
cttcgtaaccatgttgctcttggttgtcatttacttgcagcaagaggtaagtttttagccttcaagcattatctccgtcctgaaggattgcctccattacgaacatatttactgaagggattggctcccatggtttcagtatgcgaatataaagatagtttttgaattaaagctatgttagcatcttgaatcaagtgcaatttgttgaattaaagcaaaatcatctatgttggcatcttgaatcaagtgc

SEQ ID NO: 19190 - DNA, 250 bp, Glycine max
  Clone ID: 700873950H1
aaaagggacaacattgaagacaacgttatcatatccttctttgcttggaatggaacaagctgggaagcaaggaattatggtggcgtctcagagtcaaaaccccattgagcaaatccaagcgcgcttcaaggacttggaaactggattccgcctctggctctccaagcagtccctccccgtcgaggccgccgtcgtcaccaccaccagcgccgcccagggcgccgccatcggcgccttcatgggcaccctc

SEQ ID NO: 19191 - DNA, 242 bp, Glycine max
  Clone ID: 700873955H1
ggcggaatattttcgagatgtcaatgaacaagatgtacttctatttatcgacaatatctttcgcttcgtccaagcaggatctgaagtatctgccttattgggtcgaatgccttctgctgtgggttatcaacccactcttagtactgaaatgggttctttacaagaaagaatcacttctcccaaagaggggtccataacttctattcaagcagtttatgtacccgcagacgatttaaccgatc

SEQ ID NO: 19192 - DNA, 244 bp, Glycine max
  Clone ID: 700873956H1
gagatgctagaatgaggctcatgaaacatgatgtcaatcttggaaggagtgtcttttgggatatgaagaatcgtcttcctcgaagcatcacaactttggagtgggagaacagttttgtttctgtttacagcaaggataatccaaacttgctttttagcatgtgtggatttgaagtaaggatacttcctaaaattagaatgactcaagaagcattcagtaacacaagagatggtgtctggaatct

SEQ ID NO: 19193 - DNA, 243 bp, Glycine max
  Clone ID: 700873957H1
tccaccttggcctagccagctagcgcttcttctctcgcattccgtggagatctagtgctgccaaacctcgctgaaaattagggtttcgtttcggaggtagacgaagatgttcggaagggcaccgaagaaaagcgacagcaccaggtactacgaaatcctcggcgtttcgaagaacgcttcgccggatgatttaaagaaggcttacaagaaagccgccattaagaaccaccctgacaaaggcgg

SEQ ID NO: 19194 - DNA, 241 bp, Glycine max
  Clone ID: 700873958H1
ctcccattttttcaaaacattcaacaatgtcgtatttttcaaggggacgtcgcgacgacgacgacacggtggacgactacgacgagtacgaccccaccccatacggcgaccgctacgacattcacctcacctacggccgccccgtctctccttcagaagaaacctgctacccactcggagcctcttccgatgaaaacttcgattacgatcgcccccagtacacctcttacgctgaaccctc

SEQ ID NO: 19195 - DNA, 239 bp, Glycine max
  Clone ID: 700873959H1
tcttggtggtggattcactgggccttccatgaaccctgccaatgcctttggatgggcctttgtcaacaacaagcacaacacttgggagcagttttatgtctattggatttgtcccttcattggggcttcctcagctgctttgattttcaggtctatgtttatgccaccaatcaagcagaagaaagcttgaattagttaagcttttacattttgatttactagttgagtaataaataaac

SEQ ID NO: 19196 - DNA, 230 bp, Glycine max
  Clone ID: 700873960H1
cagtcatagatgactgataatctaggtagctcccataattgcatagatcaacatttgttttttttttttttttccatttccagttggttagaatgttacttttgtacggaatatttattatgtttaagatcaaaggatgatatccaattgctaaaatacaattaaaatgcctttttttaagccaaaaaaaaaaaaaaaggggggccccccgataagggcccccgccaccc

SEQ ID NO: 19197 - DNA, 242 bp, Glycine max
  Clone ID: 700873961H1
aagaagaaaggcgaaggagagcattcgaaggcataaacataaagaaattgaagataatgcgaaccctttgcgacgtatgcgagagcgccgctgccattctcttctgcgccgctgatgaggccgctctctgctccgcttgtgaccacaagatccatatgtgtaacaaacttgctagtaggcatgttcgagttggccttgctgaccccactgatgttccacgctgtgacatatgtgaaaatgca

SEQ ID NO: 19198 - DNA, 79 bp, Glycine max
  Clone ID: 700873963H1
ctccaatgaagtcataacaagaagaagagaaagaagaaaaaaaaacacttcccagagttcaaagacctcaaattccaca

SEQ ID NO: 19199 - DNA, 248 bp, Glycine max
  Clone ID: 700873964H1
ccaactgcgtaaagctcaaagcttttgacagtttgagcatttcagacaaacatggggcgtgatggaaagaagattagtggagagggggggttagtgaaggttgagccaaaacccagcaatggtttcacctcaaaagtggttgatttgttggagaaattggtggtgaagttcttgtatgattcttcactgccccatcactacctcactggtaattttgctcccgtgagtgagacccctccaaccaagga

SEQ ID NO: 19200 - DNA, 246 bp, Glycine max
  Clone ID: 700873967H1
cctcgagccgaatcggctcgagagaaacccgagtcaatcaaatggacccagagccatgaatccaccgccagttggacttcaagataatcgcaatcgtaataatacaaactctcatcgacctggcaactttaatccaaatgttccgctaagtggacctgctacaaattatgttcatggcaatactgatcagttatggagcaataacagtaatctacagggcaatcatcaaattccttattcacagcc

SEQ ID NO: 19201 - DNA, 248 bp, Glycine max
  Clone ID: 700873968H1
ctcgagccgttttcttagatatggaaacttgcagcgtactggaaattggaaattaggatctcggtgggatttggttcaattgtctgcaactcattttgttgtggaggtatgatattttttagaatgggcgaatttggataccttcacagtacatctgttctaatacttttagcatgtaaatgtccatgggtgctagattgggaaccaaggaggtcatggattgctattttagagctggattgtgtata

SEQ ID NO: 19202 - DNA, 242 bp, Glycine max
  Clone ID: 700873969H1
gtgggcaaacaagtatcaggccatattggaggtgttactttccaaatacccaagcaataatctatgttgttgattcaagtgacgttgataggcttgtgatagctaaggaggagttccatgcaattctggaggaggaagaactaaaaggtgcagttgttctcattttcgcaaacaaacaggaccttcccggtgcacttgatgatgcagcagtgacggaggctctagagttacacaagatcaaa

SEQ ID NO: 19203 - DNA, 240 bp, Glycine max
  Clone ID: 700873970H1
cccggtggaaggcgtccaggtgcagttcagcagtcccagcagccagttcctatgatgccacagcagatgcttcctaggggacgtgtctatcgttatcctcctggtaggggtattcctgatgttcctatacctggggttgctggaggtatgttttctgttccatatgatgtgggtgggatgccgctgcgtgatgcatcaatctcccagcaaatacctgttggggctctggcaacggctctg

SEQ ID NO: 19204 - DNA, 242 bp, Glycine max
  Clone ID: 700873971H1
gctgtgggaagttgaggggaagtgggttgttaaaggagcagttgatgtagacattggtgcaaacccttctgctgagggtggaggagaagatgagggagttgatgatgcagctgttaaggttgttgacattgttgacacattcagacttcaggagcaacccgcattcgataagaaggagtttgttaccttcatgaagaggtttatcaagaatttgactcccaagctcgatgcagagcaacagg

SEQ ID NO: 19205 - DNA, 243 bp, Glycine max
  Clone ID: 700873972H1
cttatcttttctcattcccttctcttcttcctcaacacacacaagatatctcttccaatttcaatttctcgtcgtccctcatcatggctcgtctcgcgatcgctgtcgccgccgtgctcctcgtggccctctccgcctccaccgcgacggcgcgtccctgcaggaccttcataatctcctcctactcgttccgcaaccctaactccaacaccttcgccaccatcaccgagatccgatccttca

SEQ ID NO: 19206 - DNA, 241 bp, Glycine max
  Clone ID: 700873974H1
ctgcaacacaacacacataacacgtaacaaagagaatgagagcgctaaattcgcacgtgctcctcgtagatcttcactcccaccatcacgtgcccacctcaaccctctcctacctcagaaactcccgcttcatatcatccctccgtcgacgctccccaagaaccggaatccgatgtacggcgtcgccggagattcgccgcccctccgatcgcttctacggctcctcgccgtcgacgtcgcg

SEQ ID NO: 19207 - DNA, 239 bp, Glycine max
  Clone ID: 700873976H1
tgggattgcatgtgtcaatttgtctccatggtcagacaacggaaggtatcagtctgaaggtcttctaattgtcactaactcttgcatcatcaccaatgcatcactgacttttgcatgagcaccactaagtccaggtctgtcaagaggaagaaggtagcgatgaatttgcaaatgcgggtgtagttcttcatgaaacatgtaattgattgaatgactaaggggaggcaaatgattcctga

SEQ ID NO: 19208 - DNA, 240 bp, Glycine max
  Clone ID: 700873977H1
tgcaattacaatataaaatgctattgatgtaacgcaagttatttgtgtctgttgtaacaactctagttaggaatggcgagtgcgttgtcaacactttgcggacaagcatacggtacaaaagaatatgtcatgatgggagtgcatcttcaaagatcatggatagttatgtccataacttcactctttcttcttccggtgttcatcttcacgaggccgattttgatgctcttaggccaagat

SEQ ID NO: 19209 - DNA, 85 bp, Glycine max
  Clone ID: 700873978H1
cgaatgtacaagtaaacatgcactaagagaatcactttattttctttgtgtgtgagagagagaaaactgtagaatgaaatatctg

SEQ ID NO: 19210 - DNA, 243 bp, Glycine max
  Clone ID: 700873979H1
atcaccactctgtgtaatgtaagcatgtctttgaagtcagcttgtttctatctacttttaaatttttagtaaattgagattgagggtgagggctgacacaacatcaagatttttatttttaaacatctatccttcctacactccattttggtaggagcttcgtgcagagttgcccatataaccatattataatcttctcttgttctttaaatcaaaggtggatacccctttactcatacacct

SEQ ID NO: 19211 - DNA, 245 bp, Glycine max
  Clone ID: 700873981H1
atcgcctgccaggctgccactgttcctgcgttctgttcgggtgcttgcgtgtctcggcgactctgctaaccgaagatccactctgtcacgcactcaactcacatcagggtctcggccaaccatcaacccacgcctttctgtctctgactccacgcctgctcagctgcctgcatggatgccggcgctatgcctttgagataggcgagtgaggcaggtcagagagcgacaatccacctcaacgcaga

SEQ ID NO: 19212 - DNA, 245 bp, Glycine max
  Clone ID: 700873940H1
ggctcgagtgctgtcccattccttgaaaagctagtcattgctgatgttgccgggcttgcccctggaactgggacattgactgttttcacaaatgaaaaaggaggggcaattgatgattcagtaattactaaggtgacggatgaccacatatatttggttgtgaatgctggttgcagggataaagatctggctcatattgaggaacatatgaaggcattcaaggccaaaggtggtgatgtgtcttg

SEQ ID NO: 19213 - DNA, 117 bp, Glycine max
  unsure at all n locations
  Clone ID: 700873896H1
aactggtgaaaagtccttacagcaaagttagtcacttcttgagttatntgtctagctagcaagagacggtgaccatctttgagtgacattgaccttgtatagaagaagcgaaagggt

SEQ ID NO: 19214 - DNA, 256 bp, Glycine max
  Clone ID: 700873901H1
gcaaaattctccggtacaccatgccggtgaagaagaaattgcagctgatgagagcctattgatttattgcaagcctgttgaactttacaatattctctaccgccgtgctcttcaaaatgttgagagcaggaattgtgattttcaattatagggaccgctacaacattcttcgaaagactgaagtgaccgaagacttttcttgtccgttttgcttgatgcagtgtggaaactttaagggcttgcgatttcatctttg

SEQ ID NO: 19215 - DNA, 113 bp, Glycine max
  Clone ID: 700873902H1
ctcgggtttcggctcgagcgcaaagagagaaaccacgacacaatacaacacaaaaacctccttagacttcgtgtaattgtgtagttgtgtttgtgttgttccttcataaacac

SEQ ID NO: 19216 - DNA, 252 bp, Glycine max
  Clone ID: 700873904H1
gtcaaaacacttcaactttaggctccatctcaaaaaaatgggtggtttagctagcaatcttcctctaattgttatggtgggtctgcaaattcattatgcagcacttgctatattcacaagagccgctttgttagatggattgagtacgacggtctttgtagtgtacaggcaaggcatagccactttggctttggcgcctatgtttttctctcctaagcggagacaatcagtgaaagattctttgggattcag

SEQ ID NO: 19217 - DNA, 254 bp, Glycine max
  Clone ID: 700873905H1
caggattggtgccacatcattacatagtagagcaaaggatggaaaactcaatttagttgaatcttcacatgttaatcaagcactggacttgaaaaaagaaccacttccagagaaacatgattataacgaagggctaacaactgtaaaagaaaataaggatgagaaccacgcaaaagtatttactcttctccaggaggtaccctgttcctctgtatcttcagcaaatgagagttcaataacaatgtctgtgccac

SEQ ID NO: 19218 - DNA, 250 bp, Glycine max
  Clone ID: 700873907H1
ggtgaggggaggtttgtttgttgtttcgtttttcctttcctttccgccagaatccgttgagaatggcgttgccggtagtcgtcgatgcagagtacctcaaggaggtcgacaaggctcgccgcgatctccgcgcactcatcgctaacaggaactgcgctcctctcatgctccgattagcctggcacgatgccggaacttacgatgctaagaccaagaccggtggacctaacggttcgatccggaacgagga

SEQ ID NO: 19219 - DNA, 248 bp, Glycine max
  Clone ID: 700873908H1
cagagaggatgtggacaaacaaagctataatttttagaggggttaccaccctcaccttctgccaaaccaaacccacccttatctctctttaagctactattgtgctgagagctgaagaggagatggtgggtggtaatcaagaggcagtgaagcagctgtagaccctgattgacaatgtggatgatgatcagctgaataacacattccagattatgcaccagggttatcaaactgaaacgttaatacgg

SEQ ID NO: 19220 - DNA, 95 bp, Glycine max
  Clone ID: 700873910H1
ggtctctcgctccatctctccactcttatctcgttccctttcacaactcaaacaattgccaaaatcccacccttgtgccctctgggcctcctcct

SEQ ID NO: 19221 - DNA, 249 bp, Glycine max
  Clone ID: 700873911H1
gtgaaatgagactaaaacttcaagaattggagagggctttgctttctgatgaagaagaggaggagcaaggcatatttgagactgttcaaagcatggagattgatcctgacatggtcgagtgggccaatccgcttcaagatatgctgctccatgactcaccaaaggagtcctcatcctcagattcttccaatcttagcagcatcagtagcaccaccaatcacacatcacaaaactcaccccaaaccccta

SEQ ID NO: 19222 - DNA, 249 bp, Glycine max
  Clone ID: 700873912H1
gcatagcaaattctgaatggaaatgtgtggagccacagctctgacatggtctcacaccatctgtccatcgcttcaccatcctcgatccgtctctaccagggaggctaggaggagcttcagtgtttggtgagtctctgatcaagaccccaagggaaataaaatgatcatatctgtaactggagcaacaggttttattggtagaaggttggtgcaaagattacatgcagacaatcacagtgttcatgtctt

SEQ ID NO: 19223 - DNA, 248 bp, Glycine max
  Clone ID: 700873913H1
tggtggatctttacactgctaggcaactgaattcagtgccatcagactgtaggagccgcgagttatttcctactgatcctgaaattcttgcaaccggcggtgcccctaagagtttgtcttctgcatatgatgatgctaacctcggggaaggaaagagagaattggagaagaggaggaggggtgttaatgacgatggaggggtggagatgaatgatggagctggttctcttaatttgaaccttgggggt

SEQ ID NO: 19224 - DNA, 249 bp, Glycine max
  Clone ID: 700873914H1
gtagcataaacctaggtggtcaaactgctttagcattacgattacttttggctactttttcatcgaagatctcttcagatattaatcgcccttttggtgatgagtttcgtgctgatcggaaagcttctgaggaaattggtgcacaaatagttttaggagatcggccaattgaaataacgcttcaaagagcatggaaggctatgaaatggactcagaaactaagtttagtgttatcaattattcggggga

SEQ ID NO: 19225 - DNA, 252 bp, Glycine max
  Clone ID: 700873915H1
ctctttctctagtcctgttatttctcagcgcgtaaagcatggctttgttggtggagaaaaccacgagtggtcgcgagtacaaggtcaaggacctttcccaggccgacttcggccgcctcgagatcgagctggccgaggttgagatgcccggcctcatggcctgtcggaccgagttcggcccctcccagcccttcaagggggcccgcatcaccggctccctccacatgaccatccagaccgccgttctcattg

SEQ ID NO: 19226 - DNA, 254 bp, Glycine max
  Clone ID: 700873917H1
gaaggatactttaaggcttggagacaaggcagaacagggtaccctttggtggatgctggaatgagagagttgtgggcaactggttggttgcatgatcggatacgcgttgtggtttcaagtttcttcgtgaaggtgctgcagcttccttggagatggggaatgaagtatttctgggacacccttttggatgcagatcttgagagtgatgctcttggttggcagtacatatctggcactctccctgatggtcgtga

SEQ ID NO: 19227 - DNA, 254 bp, Glycine max
  Clone ID: 700873919H1
tgggaaagggagattgaattcgatcctgggacgttaacgttgtttcaattcaattgtggtcctgtcggtgccctatctcagacgacgatgtcatctttatatagaggggaatccaggaggtacaacaataaaccaagaggacgtcataatttgacaacgcagaagaagcaagagattaaggaagcctttgagttatttgatactgatggctcaggtactattgatgccaaggagctgaatgttgctatgagggc

SEQ ID NO: 19228 - DNA, 250 bp, Glycine max
  Clone ID: 700873920H1
aaaagcgtcaatctaaagaatcatttggtgacttcacaaaccgaatgggatttgagaagcttaaagaatatattgagaaatgggagggtccagtggtagcaccatcacgccacaacctcaagctttttgctgacaaggagacatatgaatcaatggatgcattagcaaagcttcaaaacaagactgctcatcagttggccatggaagttatccgtaattatgttgcttccaaccaaaatggaaaaggcga

SEQ ID NO: 19229 - DNA, 250 bp, Glycine max
  Clone ID: 700873922H1
cctccaaaacacaacaccacaaggaaacaaaacaacccattgagagcttgcacaactctcatggtagtagtagcactactacttcacacactctctctctgagtgcctcacaccacagattctgtgatatatataccaatggaggccctcaatgctgctggcttgacccctctatctgtgctctctgatacaaaaacaacaagaactaaacacccttctgtttctgtatgcaaagtctcaaacttttcca

SEQ ID NO: 19230 - DNA, 248 bp, Glycine max
  Clone ID: 700873925H1
ctcgagccgctcgagccgattcggctcgaggcctttatttcacttattcacaacaagcatagcacattggactcggtaagagggtaatattgttctcgtatggaagtggcttaacttccacaatgttctctttgctattacgtgaaggtcaacatccatttagcctgtcaaacattgataaaatgatggatgttgctgggaaattgaagtcaagacatgagtttccaccagagaaatttgttgaaacc

SEQ ID NO: 19231 - DNA, 247 bp, Glycine max
  Clone ID: 700873928H1
gcaagttgtaagtggtaactctttcaactcggccgtgcaagttttattggcagcgctggaaccatcttctcttctcttcacctacgtttttctttttctctttctctttctcttactctttctctttctcttactctcttcaacactttctcaaatcccttccttcttcgctcttgtcttctctttcaggtgcaccttccagttaagcaggagttggataattgttggacatagatgaaatagtgat

SEQ ID NO: 19232 - DNA, 248 bp, Glycine max
  Clone ID: 700873929H1
gctcgtgccgcgaggggatctgcggctcctgcgcaatgaacatcgacggctgcaacggcctggcgtgcctcaccaagatcccctcggaaaaaaactccgccgccacgacgatcactcctctgccgcacatgttcgtgatcaaggacctggtcgtggacatgacgaacttctacaatcagtataagactatcgagccctggctgaagaggaagaacccaccggtgccgggaaaagagattctgcagagc

SEQ ID NO: 19233 - DNA, 251 bp, Glycine max
  Clone ID: 700873931H1
atttgaagaaaaagaaaacagaggcttaggcaactaagaaagaaagatgaagctgaaggtatatgcggaccgcatgtcccagccatcccgtgcggttctcatattttgcaaagtgaatggaatagattttgaggagatcaaagtcgatttatccaaacgtcagcagttatctcccgaattccgagcggttaaccctttaaggaaagtccctgctattgttgatggaaggttcaagctatttgagagtcatg

SEQ ID NO: 19234 - DNA, 254 bp, Glycine max
  Clone ID: 700873932H1
tgaagatctcagtgaaggttgctggcattcactggcactatggctcaaggtctcacgccccagaactcacagcagggtataacaacacccggttccgtgatggctacatccccattgctcaaatgttggcacgccacggtgccatcttcaacttcacctgtattgagatgcgcgatcacgagcagccacaagatgccctttgtgcacccgagaagcttgtgaagcaagtggctctggcaacgcagaaggcacag

SEQ ID NO: 19235 - DNA, 252 bp, Glycine max
  Clone ID: 700873933H1
cgaagtgttaagagaatgcctctttctatagggggaggagctggtgcaaagaatgctattctcatgaatatgccaaatgctgttctttcaatgtggagatattttgttggagatctcgtctttgaagtttctaagatgacttctccctacattaaatgtacagtctctttcttcatagcatttggaaatttggctgatgacaccatcaattttgaggcttttccccacaagctggtgcagtttggagagatt

SEQ ID NO: 19236 - DNA, 248 bp, Glycine max
  Clone ID: 700873936H1
ctcgagccgttttcatagatatggaaacttgcagcgtactggaaattggaaattaggatctcggtgggatttggttcaattgtctgcaactcattttgttgtggaggtatgatattttttagaataggcgaatttggataccttcacagtacatctgttctaatacttttagcatgtaaatgtccatgggtgctagattgggaaccaaggaggtcatggattgctattttagagctggattgtgtata

SEQ ID NO: 19237 - DNA, 247 bp, Glycine max
  Clone ID: 700873938H1
gcgagagagagagaagaaagaatcaagcttagtcaaagtgtctgtgactgtcacacacagtctttaagatctggaagcgcttctcacttgcccacaacaacaattcaaatcaatttcaaaattttcagcttcaaaataataaaaccctaagagaggggttgcaagcacaatgagaagcgcaaagatgtggacggttttgatgtgtctgatggtgagcttcttcgctcgcattgaatcgctgtctgtg

SEQ ID NO: 19238 - DNA, 244 bp, Glycine max
  Clone ID: 700873939H1
gttctcgcgtctcaatggctgcttccaagtacgatttcaagatcgagccccaagtcgacgcccaatttccagccgaaaaaggtcgttaccatctttacgtggcttattcatgtccattttcctgtcgtgcactcgcagcccgcaacctcctgggccttgaagacgtcatcagtctgtcggtggcacaccccatttttcagaagaccaagccgaatgacgccagtaacgaccacaagggatgggc

SEQ ID NO: 19239 - DNA, 201 bp, Glycine max
  unsure at all n locations
  Clone ID: 700873895H1
ggatggcgacatgtgggcgcagaaggcgacgctgtccggaagcgcttactcttgggcatttatttccagcttaacttcagtgattggaaatttcgcaacactctctgtcaatcaggctgacttctcgcgttactcacgcgtgagcgtcaagtggcagatcatctacgtcnccttcttaccgcttgtgttcacgttcatcgc

SEQ ID NO: 19240 - DNA, 238 bp, Glycine max
  Clone ID: 700873861H1
gtaaaaataaaaaataaaaaattcaccttggccttgagaatgaacttgtctgggtagcctttttttttttaatttagcttgattgctcattgctggcattggcttataatttacattataaattattttagggatcccaacatgctgcgagacgtgctgctagttttgtgcgaggagatgatgtccttcacaagcggtttacagaactggcttatcggtacaaggatagacctggagg

SEQ ID NO: 19241 - DNA, 242 bp, Glycine max
  Clone ID: 700873862H1
ggaagccgtaacaggctcccaccatttttccactctctccctttctttctctcacaacaaaaccttgcgctcttcttctgccaaatcaatcaggctttcctctccttcgaccaacgcttccttatcttccagaaactggttcgcgaaagaggtatggggttgggtgaactccaactccaaaggcgtcgccgtgagaaggtacacacgcggagtggtggtcagggctgaaatgttcggccagt

SEQ ID NO: 19242 - DNA, 244 bp, Glycine max
  Clone ID: 700873863H1
aaacactcataacacaaagcacaaagcaaagctcatccttgagttaaaaaatggcagcagcttcttccatggctctctcatccccatccttggctggcaaggccgtgaagctgggcccatcagccccagaagtgggaagggtgagcatgaggaagaccgtcaccaagcaggtctcctcaggaagcccatggtacggcccagaccgagtcaagtacatgggcccattctctggcgagcccccgtc

SEQ ID NO: 19243 - DNA, 222 bp, Glycine max
  Clone ID: 700873865H1
tatacatctcgcaacaccagaagtctgttgtcaatctcgactgccgttgtagccaatcttacatcatgatcttccttcgctccatgtcgatgctgcgctcggcactctacggccgcgcactttcggcgggcctccgtggccgtggacaagtccgcttcgacgagctcagattacgcgcttccggtaactggcaaggcagctggagagtgatgacagtggcaa

SEQ ID NO: 19244 - DNA, 250 bp, Glycine max
  unsure at all n locations
  Clone ID: 700873866H1
ctttttctgccctcaaaactattcaattcaattcaattcccttctaattcttccactaccccttttcgttcantcttcttcaattctcccaaaaatcatatttttacactctgagtggtttttcagcttgtgggtcgatgtcaactgtgtcaaaagatgacaacttggcgctttcttcggaggactcttcatgcccagaagagtctgagcttgaattgggtcttgggttgagcctctcctctggctcttc

SEQ ID NO: 19245 - DNA, 235 bp, Glycine max
  Clone ID: 700873870H1
acatctttctgtaggcttttggtccatgggcactcgagttcggtcatgcttgttgtagctgtgccacctttgtatattgatttgatctcgaagaatagaatagaatgtgatcttgttgaagatcataaaatttggttagtttaggtggatgttttaacgactttacatcccataaataataccttttgagttgaaatttctaatgatctgtagcttcttgtgcgatgtggcgttg

SEQ ID NO: 19246 - DNA, 232 bp, Glycine max
  Clone ID: 700873871H1
acgtaagcgataagcaatagaattcagagagagagagaaagagagtctcttgctctgtatctttgatttgatcattccaatcttcaatttttctatatatccatcaatccgctgagtgcaaagttctaatctttcgcctattgggttctactcctttctctcttcgtttccgatcgatccaattttcttcccatggctacgatcggacacaacaatctcaatgccaaattgg

SEQ ID NO: 19247 - DNA, 234 bp, Glycine max
  Clone ID: 700873872H1
ttacagccatgtatgtctctggaaatgacatgatggacaaaggcgtttcaatatatattttgaacttggcattggtttctctactttctgattctctcatcttcctcatatcctggggattttttagttttgtctttcagctaccaaagtccatgatgttgtacccttattgaagtaataatctgagaggaaagagagttgctgccattattatcagttcagtgatatttcttt

SEQ ID NO: 19248 - DNA, 157 bp, Glycine max
  Clone ID: 700873874H1
tgtggttgtccactattctggtaatactgggttttagttttgaggttgagagaactttgttttattacaccatttcaaattgcatgcgttttgtttcagaatcgcacactttcgagaagccagtaaagatttataattaggaaactggaattgatga

SEQ ID NO: 19249 - DNA, 218 bp, Glycine max
  Clone ID: 700873875H1
gggaactttagctggtgtttatcttggaatggaatatggggtagagaggatccgtggcaccagagattggaagaatgccatgattgggggtgcagtaactgcgactctgttatctgttgccaccaccaacaacaaagacaaaattgtacctgatgccattactggggcagcaattgctactgctgcagagtccataaattaccttacctgaagaatga

SEQ ID NO: 19250 - DNA, 228 bp, Glycine max
  Clone ID: 700873876H1
ctcgagccgaatcggctcgagagataaggttggaaatatcctttgcccagccgggactttagggctgacgctgaaggaagaggtctaagggctcttacaatatcacagttgggtgagattctaacaccagctgcttgcaccattgtttcttcgctcaaaaacgataatgtcgactcctatgttctatctgagtccagcctctttgtctatgcctacaagatcatcatc

SEQ ID NO: 19251 - DNA, 227 bp, Glycine max
  Clone ID: 700873877H1
gatggtttggtcagaactcttaaggatctagccaatagtccatattcaccagagtatgatattgctggtatcacagacccatttctgcacatcagattgcttaaacttttgcgagtgttgggtgaaggcaatgctgatgctagcgacaccatgaatgacatacttgcccaggtggctacgaagactgagtcaaataaagttgcagggaatgccattttataagaatg

SEQ ID NO: 19252 - DNA, 238 bp, Glycine max
  Clone ID: 700873878H1
cacttgagaagcgagaagaaagatacaagactgtgtttgcagacagaatttcagtttcccggagggcatgctgtgagctttttggttacaagattgtgatggatgaacaccagcgttctaatggaatcccggtgacacggtttaccttgcaatccatttatgcacaaagtgatgacgaaaagcttgaatttgaatatgaatcagggaatactaacattttggcaaatcattatacatc

SEQ ID NO: 19253 - DNA, 238 bp, Glycine max
  Clone ID: 700873879H1
cacaacttcgttcggcgactcataataagaaagtaagagatatgattgatgatgaagccttgggagccattgccaactttcttggcatcttcatttttgctttggttatagcttatcacctggtcactgcggaccccaaatatgaagccaagtgggatttggacagtttcccaggatggttctattccatgaacccaacccccaaaccaagatcatctgatcctacttatcttcaact

SEQ ID NO: 19254 - DNA, 217 bp, Glycine max
  Clone ID: 700873880H1
ggctcgaggttggtctttcagtacgacgggggcgttggaaggagctgattatctggccactggtgaactcgtgagccttagcgagcaacagcttgtggattgcgatcacgtgtgtgatccagaagaatatggagcgtgtgactcaggctgtaatggtgggttgatggacaacgcatttgagtacatacttcagtctgggggattacaggaagaaaag

SEQ ID NO: 19255 - DNA, 252 bp, Glycine max
  Clone ID: 700873881H1
attgtatccaattgagattttaaaaatgactgggataaacttaagaattcaattattgaaattgaataagtaaacaatttaattggattggtcgaatggtatcacaaaaatggagtactaactcccatttcttatttattattgaattaaccgatcaacttgctttgttatcgaacatttcttgttgatttcaaaaattttccggaaaaaatttgaatctattattatatgcgagtcaatcctactacttct

SEQ ID NO: 19256 - DNA, 235 bp, Glycine max
  Clone ID: 700873883H1
cacctttctcctaaaacatctccagtgggttcttcttcttctattacaactacgtcacacaagaccatgaccatggccatggccacgatcctgctcctgttcacggtcttcgcggtttcatcggccctagacatgtcgataatctcgtacgacaacgcccacgccgccacgtcgcgcagcacgaggagctgatgtccatgtacgagcagtggctagtaaagcacggcaaggtgta

SEQ ID NO: 19257 - DNA, 234 bp, Glycine max
  Clone ID: 700873884H1
cttacctgctacttactactatagtgtctgactctcaggccagaacgcaaagattttgagcacaatggcctcgacacaatgctctctgcaccaccacgccctcaccactccagctagagcttcaacacagcgcctagttgtgagcaccaaaccaaaccacattgtttgcaaggcagcacagaagcaggttactgtccaagagggtgaggacactactactggccttgtctctcg

SEQ ID NO: 19258 - DNA, 230 bp, Glycine max
  Clone ID: 700873885H1
cctcactagctcaattcctcgccgagtttttattgttgcgacgtggcaatcggaatgctgccgccgattcaaagcgtctccgccggtgatctccgttgctgattctccgacaccgcttttggccatatattgaaatagttttctggtgcgccaatgagccggactgatgttattgacagtagaagggggaggattcttcacatcttcagcttcagggtatagtaagggtc

SEQ ID NO: 19259 - DNA, 232 bp, Glycine max
  Clone ID: 700873886H1
cttcaagggatcgcacctctattgatgactttgagattataaaacctatcagtcgtggggcatttggaagggttttcttggctaaaaatagaacaactggtgatctttttgcaataaaggttctcaagaaggcagatatgatccgtaagaatgctgtggaaagtatattagcagaacgtgatatcttaattacagtacgcaacccttttgtggttcgattcttctattcttt

SEQ ID NO: 19260 - DNA, 236 bp, Glycine max
  Clone ID: 700873887H1
ctccaccttcatcaacccacgctagcttttcccttttccatgttggatcacaacccttctcacaagttttccccgattccattccaaccttaacaacaacaacacaccccactcagcacttacttccaccattaaactctatataatcccacaattgcatactaactcatctttctaacctcaaagtactttctaaacctgggtcctctctctccttccgatcttccttaacaaca

SEQ ID NO: 19261 - DNA, 232 bp, Glycine max
  Clone ID: 700873889H1
actaaggcaatcaaggaatggggtcaacccaagtccaagattacccatctcatcttttgcaccactagtggtgtcgacatgcctggtgctgattatcagctcactaaactattaggccttcgcccctccgtcaagcgttacatgatgtaccaacaaggctgctttgccggtggcacggtgcttcgtttggccaaagacctcgctgaaaacaacaagggtgctcgcgtgcttg

SEQ ID NO: 19262 - DNA, 229 bp, Glycine max
  Clone ID: 700873890H1
ttgaagtgtatgttttgtcataagcagatatttcacttctaatggatttcatttcattttggtttgtgactcagttcaattgatatattattctctttgttttcagcattcacaatgttcgttgctattaccttcccattcttcggtggtctcctaggattttttggaggatttgcttttgcaccaacaacatactttgtaagccaaatacattggtgaatttaatcac

SEQ ID NO: 19263 - DNA, 124 bp, Glycine max
  Clone ID: 700873891H1
cttccctacaactccaaacagcaaagacatccacatccatggctgcctccgtctccactgtcggagctgtcaacagagctcttttgaacctgaatggttctggagctggagcttcagctcccag

SEQ ID NO: 19264 - DNA, 231 bp, Glycine max
  Clone ID: 700873892H1
cacactatggatgtttggtcatggatatgtgagctccccaactcggtggaggggaccgagtcccactcgccacccatgaagttcgaaatcgcgagtgagaagaacgacgacaagctggacaactcaactcgttccattcacctgaaagctgagcgaaactccggctcagactcggaagctgcggtgatcttcaccgtatgcttgcaaggctttcgcccacacaacgctcac

SEQ ID NO: 19265 - DNA, 227 bp, Glycine max
  Clone ID: 700873893H1
agcagacccagaggttgccgatgccattgaaaatgaaaaggtggttaataagaccataaaaatatacaacattgatcgtgctgtatgtggacgtatagctggtgtcattgcaaagaagtacggtgacactggttttgctggacagttgaatataacatttacaggaagtgctgggcagtcatttgcatgctttctgactcctggaatgaacattcgccttgttggag

SEQ ID NO: 19266 - DNA, 233 bp, Glycine max
  Clone ID: 700873894H1
gcagcaccttccttacgttcccaccataaccaactacactcaagtttggtgggttcctaatgttgttgtggctcatcagaaggagggcatagaagctcttcatttggcatctggtcgaacaatatgcaagcttcatctccaggaaggtggtctacatgctgatattaatggtgatggagttctagatcatgtgcaggctgttggaggaaatggtgctgagcagactgtagtta

SEQ ID NO: 19267 - DNA, 239 bp, Glycine max
  Clone ID: 700873859H1
agcgaagtgtgaagacagacacagtgagaaagatgaagcgtcggttccttttggttctcttggttctctatgtcacagtggagttctacgtagaagcagatggtagtggtgggtttgtgagaacaagaggagtgcagcttatgctgaatgggagcccctactatgctaatggctttaatgcctattggctaatgtatcttgcctctgatccttctcagagaaacaaagtctcatcagtg

SEQ ID NO: 19268 - DNA, 245 bp, Glycine max
  Clone ID: 700873825H1
gaggacgaaaaaggtacaaggaaccgattctagagagagaaagcgtgttgaatttctagagagagagagcggagggcgcgcgggatggttcagatcgcaaggaggaggaagaagggacggccgtcgaaggcggatctggcgcgccgctcaggccagtctccggccgccgcatcgcagcctgattctcggcggagctccggcgccgaagcgtgaggtacaacatcatcgactacgacggcgattac

SEQ ID NO: 19269 - DNA, 245 bp, Glycine max
  Clone ID: 700873826H1
ctcaatcaacccaaccaatcgatcaaccagccaatatgtctggagacgaaggccccaccaccgcctacacatggcagatctccgcccaggaccaacagggcggccccggtctcgacaaggacatgaaggagcaggccaactggacacagctcgagtactggggtgacgacggcaagccatacctcaaggagtacgaaggccgaggactcctagagaacaaagccgtcctcatcaccggtggcgat

SEQ ID NO: 19270 - DNA, 243 bp, Glycine max
  Clone ID: 700873827H1
aaaaaattaaattcttatcatttacagaatatggagtcccagacttccacacgagagaaggagtctctcaatctcagggaagtcccagaagcagataaaaccttgggcttggacatggccaagggcagcgcattctgcaagatgggtgaaggttggacatgcatcataactaaaactgaggggcctgatgctggcaaagttttcgttaaatgtggtgaaaattgcacctgtaccattgagggc

SEQ ID NO: 19271 - DNA, 196 bp, Glycine max
  Clone ID: 700873830H1
agatagaaccgtgctttctaatcttgtaattgtctgtgtagcttcgtggttaatgcttcgtgttactgtgatgcagctgttgtatttgtactacactcctatataagtataactaaagatgctaattaatattcaattggactacagcagatggctgatgatggacatatggttactctaaatgtgtatgacttga

SEQ ID NO: 19272 - DNA, 247 bp, Glycine max
  Clone ID: 700873831H1
gtcgagtggacggaggacgagatggccgcgctcgaggagggcatgcgagagacgagccgcgtgctcccgaaccgctgggcaacgatcctgcgcatgttccggccgcgcttccacgagaagcgcacctcggtgcacatcaaggacaaggtgcgcaacgagacgaaccgccgccgcaaggtgggcgagccgctcggcgtctttgccgaccagtagtcgatggcacgctgctaatataccgggtaatgtg

SEQ ID NO: 19273 - DNA, 154 bp, Glycine max
  Clone ID: 700873833H1
tgtgagagagaagggattggaactttggatatctatagcgaaagtgtgacaacaacaaaaaccggactggttccaaattttttttttaattcttcaaacattcgaattccaaaaccctaccgaaacaaaactcaatcgaaattcttcattctct

SEQ ID NO: 19274 - DNA, 248 bp, Glycine max
  Clone ID: 700873835H1
ctcgagccgttttgaggcctcaatacatgctaaatcacttcgagttttctttgactggacagactacctgaaattctaccagctaggaacgtattggccatacactccttccatacatttgctgtatggtctgagagctgctcttgatctgatttttgaggaaggacttgaaaatgtgattgcaagacacagtcgtttaggcaaagcaaccagacttgctgtagaggcatggggtttgaagaattgca

SEQ ID NO: 19275 - DNA, 217 bp, Glycine max
  Clone ID: 700873836H1
ggatgtttggtcatggatatgtgagctccccaaccggtggaggggaccgagtcccactcgccacccatgaagttcgaaatcgcgagtgagaagaacgacgacaagctggacaactcaactcgttccattcacctgaaagctgagcgaacctccggctcagactcggaagctgcggtgatcttcaccgtatgctacgcaaggctttcacccacacaac

SEQ ID NO: 19276 - DNA, 208 bp, Glycine max
  Clone ID: 700873837H1
ccacttactctaccaattaccaccgtcgccgttcagaagtagcctccaccgaccacactagataccacaaccatcctactttgatccgcttccctcatacctaacaaattatttcactcttcttctaatttacctttggattctgttgcgggatgaaacaactcaacaagccaagcatatcccttgcagtaaatattccacacaacat

SEQ ID NO: 19277 - DNA, 239 bp, Glycine max
  Clone ID: 700873838H1
tctctctctctcacccagatcttgtagcaatggcgagcgctcccactccacgcgaagagttcgataacatggcgaactggcggagaggccgagcgctacgaggagatggtggagttcatggagaaggtctccgcctccgccgagagcgaggagctgaccgtggaggagcgtaacctcctctccgtcgcctacaagaacgtgatcggcgctcgccgcgcctcctggcgcatcatctcctc

SEQ ID NO: 19278 - DNA, 244 bp, Glycine max
  Clone ID: 700873839H1
catcctccgtaacctccgagctctgcaccgaagaacgaagccatggggaagacacatggaatgggatctgctcgcaagctcaagtcccaccgcaggaggcaaaggtgggctgacaagtcatacaagaaatcacatcttggaaatgaatggaagaaaccttttgctggttcatcccatgccaagggaattgtccttgaaaagataggtattgaggctaagcagcccaactctgccattcgtaagt

SEQ ID NO: 19279 - DNA, 228 bp, Glycine max
  Clone ID: 700873840H1
gcattctcaatgtcttaggtgcaaagagaagatgctaagtttgagatgatcttactatatttttcatattggaccgtcttcctctataattttgagttacagtgtccacttaaattgaaaaaaaaaaaaaaaaaaaaaagggggggccgccgacaagggaccccgtcgccccgggaataaatccgggccgggaacctgcgggggaacaagtttcccctaaggggagcc

SEQ ID NO: 19280 - DNA, 244 bp, Glycine max
  Clone ID: 700873841H1
tcgcgagattggaggttcaagagaataatccctgctcactttgctgctccaataagtgctagtaggtctgatttcagggctgcatttgcatttttggatgagtttttgggggaaagtaatgctgcatggccttcactttcccttctcttctcatcaatcatgggaaaggcagccagctattttcctccggatgacatgaggaccctatcatcccttgaccagtttttggtgtctgttggtgctg

SEQ ID NO: 19281 - DNA, 243 bp, Glycine max
  Clone ID: 700873842H1
cataaattcttcaataagctctcacattttgtgaccaaaataatactttaggaaaaaagaaaaaaatgtcatccactgctagcttgggttatggggctccaacctgcttcaacaatgttcatcacacaaagaagcatattgcaatgaggaacagtttcttgagcaataagcacaacagtgtgagagtgatgaagggttggagaggaagacatggtaacactaacaacacatccaaaagggtag

SEQ ID NO: 19282 - DNA, 234 bp, Glycine max
  Clone ID: 700873843H1
aaataatccaggatgaggcatctccgttatcatgtgccagtataagagccagcactctggctaggtcttgtagccagaatctgattctggcttgaatggtagcttgctgaggctatcagaagcagtcaagaatcaccatagatttctgagaatcagatcaggtctactcatcagtcatggatagcagcaagaagggagccctcatgagtaatgaaagcgcaaaagatttatcag

SEQ ID NO: 19283 - DNA, 58 bp, Glycine max
  Clone ID: 700873846H1
ctgagtcttgcaattgaagttgaagtcttgcccttctctcttcaactccacacaacat

SEQ ID NO: 19284 - DNA, 208 bp, Glycine max
  Clone ID: 700873847H1
cggctcgagcggctcgagcaaatttaaggaatcagcctggaaatgtgtttattatctttccgccgagattcttgctatgtctgtaacatacgatgaaccatggtttacaaatactataaacttttgggtgggaccagggacccaggtctggccagatcaaaagatcaagttgaaattaaaggcagcctatatgtacgcggctggattt

SEQ ID NO: 19285 - DNA, 257 bp, Glycine max
  Clone ID: 700873848H1
ttcggctcgagaaaaaatagtgtttcctggaggcgggactcattttcattatggagctgacaaatacatagcatcaattgcaaatatgcttaacttttcaaacaataatctaaacaatgaaggaaggttgcggacagtgcttgatgttggttgtggtgttgcaagttttggagcatatcttctatcatctgatatcattgcaatgtccttggcaccaaatgatgtgcatcagaatcaaattcaatttgctctagaaa

SEQ ID NO: 19286 - DNA, 250 bp, Glycine max
  Clone ID: 700873849H1
attttatccaattgaaattttaaaaatgactgggataaacttaagaattcaattattgaaattgaataagtaaacaatttaattggattggtcgaatggtatcaaaaaaatggagtactaactcccatttcttatttattattgaattaaccgatcaacttgctttgttatcgaacatttctttttgatttcaaaaattttccggaaaaaatttgaatctatttttatatgcgagtcaatcctactactt

SEQ ID NO: 19287 - DNA, 252 bp, Glycine max
  Clone ID: 700873850H1
tcttcctgcactgtaatctcaccgatgaattctcatttctctgcgctatcctccaccgacatcctccgcctcatcttcgagaaccttccaatcatcgatctcgcacgtgcgagctgcgtgtgccgtctctggtgctccgtggcctcccagagggacatggtaactagagccttcgtggcaccttggaaactgaacgacgtcgtcggcaacccactctctggaagcttctggagagacaactccctcgccaat

SEQ ID NO: 19288 - DNA, 243 bp, Glycine max
  Clone ID: 700873851H1
cttccctacaactccaaacacaaagacatcgtcatccatggctgcctccgtctccactgtcggagtagtcaacagagctcttttgaacctgaatggttctggagctggagcttcagctcccagttcagccttctttgggaccagcttgaagaaggttattgcctcaagggtccccaacagcaaggtttccggtggaagcttcaagattgttgctgtagaagagaagaaagagattgaagagac

SEQ ID NO: 19289 - DNA, 249 bp, Glycine max
  Clone ID: 700873853H1
tacaactttcaagggatgatagcattttgtggcataaggattaaggaggcataaaggaccaattgctttggaatattcactcatgacaaggcacaaggtcatgcgtgtatgccaacacatagtaatgatgtgtgtttttattcagtaggcaactggcagatcgggttttcccttgtcacttttgtataattattttggaagaatttatgatgtcaaagttattgtttaaaaaaaaaaaaaaaagggggg

SEQ ID NO: 19290 - DNA, 239 bp, Glycine max
  unsure at all n locations
  Clone ID: 700873854H1
tgattcttccattgagagcatttagttngctcttccttgcttctttgtatttaaacactaggttgtaaaacatttgatgtttatctgtattgcttgtgccaaaataatcatagaactctagtgttgtaggaaccacaactagggcatttgtggtagagccagtggaagggggtctctcctttcttttcacaatcattacataataaaacctgagtttgactagaaatctcatcagaaat

SEQ ID NO: 19291 - DNA, 218 bp, Glycine max
  unsure at all n locations
  Clone ID: 700873855H1
aggggaacattcaatgctttttgatctggtgccatctttgcaataccggcagtganataaaaacatattgagatgaagacacaaaataatgtagaagattcgattatgatctaaagtcactacctacctgggctagcagctatactctcttgagcagcatatttgttaaattgttaatatctgtctctctctagcacttttgaacattcggcagctac

SEQ ID NO: 19292 - DNA, 246 bp, Glycine max
  unsure at all n locations
  Clone ID: 700873856H1
taggatggaagaggtttgcagtgcttgcagcgatgtgcattctagctgttcgggcagtaatagttcaacttgcattttttcttcacatatataatatagtatacatgaggtcacctgtcttnacaagatcatttatttttgctactgcattcatgagcttcttctctgtagttatagcacagtttaaggtnatacctgacattgtaggagataaagtatttggcatccaatctttttcagtgcgtt

SEQ ID NO: 19293 - DNA, 238 bp, Glycine max
  Clone ID: 700873857H1
ctggttcttgggacctctctattatgtggtggcattgcaaacgctggagtggaacaaaaatatgatagaagacaagcagatgtgaactcacttatgctgttgttgggattgttgtgctacttgcttccaatgctgttcaaatacagtggtgcctcagctgctctcactgtagacccttcactacacttgtcaagagcttctagcattgtgatgttgattgcatatgttgtctacattg

SEQ ID NO: 19294 - DNA, 248 bp, Glycine max
  Clone ID: 700873824H1
gagctcagtacttttctgttggtggcatgttcctgtttgtcttaacatttgctctcggagctggcccagttccaggtctccttctaccagaaatctttcctattcgaataagagccaaagccatggcagtctgtatgtcagtgcattgggatgggaaagctcgtaatatggaatccttctctcatttgattaatggtcttgtacagtaatttttgtaaaaagaaatgtggtggaaaccaaagggaagt

SEQ ID NO: 19295 - DNA, 238 bp, Glycine max
  unsure at all n locations
  Clone ID: 700873858H1
cctcgagtcgaattcggctcgaggttggtctctcggtacgacggacgttggtggaangagacattatcttgccactggtgagctcgtgagccttagcgagcaacagcttgtggattgcgctcacgtgtgtgatccagaagaatatggagcgtgtgactcaggctgtaatggtgggttgatgaacaacgcatatgagtacatacttcagtctgggggagtacagaaccgataggactat

SEQ ID NO: 19296 - DNA, 206 bp, Glycine max
  Clone ID: 700873793H1
gccttgaggaacgttccagaccacatacagagtgttctctagtgatcttcgttcttctgtggagatcttgttttttcatctcacttttcttctaattaaggaacaagctttccgcagttgaaaaccctagctagctagcttccaccaatttgaatcaccaatggctcgctctttctctaacgtcaaggttctctctgctcttgtgg

SEQ ID NO: 19297 - DNA, 250 bp, Glycine max
  Clone ID: 700873794H1
tcgcgagattggaggttcacgagcataatccctgctcactttgctgctccaataagtgcaagtcggtctgatttcatggctgcatttgcatttttggatgagtttttgggggatagtaatgctgcatggccttcactttcccttctcttctcatcaatcatgggaaaggcagccagctattttcctccggctgacatgaggaccctatcatcccttgaccagtttttcgtgtctgttggtgctgtgaaaa

SEQ ID NO: 19298 - DNA, 247 bp, Glycine max
  Clone ID: 700873795H1
tccatctggatccggtggtgctggccccaagatcgaggaagttgattaaattgtttcattatttagatgggatgggcttgtgttggatctattccgtttttgtttcctttattttatttggtctagaatattggcccattattttggttactaacaccaggtatggtgattggtaattctttttttttggttttgaatagtttatccagatttcacctcgatggagacttgtttaaaatttttgcca

SEQ ID NO: 19299 - DNA, 246 bp, Glycine max
  Clone ID: 700873796H1
aaaggaagaagcttaactcatacgagcctccttgcattgtcgctctactcttttctcgctgtctgggagctccattcatcacccctattcacttacgaagcaaccggactcgcctcaacaagagaagctgcatcccgtaggcagaaagagaaccgctgctttgacttgactctcccctgtaaccctttgccctcctgcctgcagattgccacaaaagacgtgtgagtacgcccctcatgctttgcg

SEQ ID NO: 19300 - DNA, 265 bp, Glycine max
  Clone ID: 700873801H1
tagacatgttactgtgcacgttgttgacgggaaccttggaacaaatactcaaaatccatcacaagatatgttgtttcgagactctatgtttcagccaataggaggggttaatggacaacaaaatgttttcaccaattcagctccatcgaacacaagtgaaagtcaaaataacactgtgcgatgttctgttcatcagtcatttcttccttatcctcccttcacacaacacaaccaagacgattgccaatcattttttcacatgtct

SEQ ID NO: 19301 - DNA, 263 bp, Glycine max
  Clone ID: 700873802H1
aggacgctacgaattcggctcgagagctggaggagcaggtggtggattccatgtcaaagctatgtccaatattgatgattgggccaacagttccatcctttcacttggacaaggcagtcccaaatgacacagacaatgttttgaatctctttcaagtagattcatcagccattagttggctgagacaaaagcctgcagggtcagttatttacatatcatttggcagcatggtgtgcttcagctcacagcagatggaggaaata

SEQ ID NO: 19302 - DNA, 209 bp, Glycine max
  Clone ID: 700873803H1
ggctcgagtctctctctctgctcggttctccgatcgccgtcttcgccttgcccattcctgatcaatatgtctagaagatatgatagccgtacaacaatcttctcccccgaaggacgtctttaccaagtggagtatgcaatggaggccattgggaatgctggaactgcaatagggatcttgtcaaaaaatggggtagtctcggttggtga

SEQ ID NO: 19303 - DNA, 256 bp, Glycine max
  Clone ID: 700873804H1
ctcttccataaacgggtggtgcctctcttccatctccccagccaaaacctctctcaggaaggccacattacgcccttccgtcttcgcaacccttaacactccttcttctccttcctcttcatcttccttcccctctctcattcaagacaggcctgtttttgctgcccctgcccccatcatcaccccaactgtgagagaggatatggcaaaggaatacgagaaagctattgataaacttcagaaattgttgagggag

SEQ ID NO: 19304 - DNA, 252 bp, Glycine max
  Clone ID: 700873805H1
caagaggttggtcacaagagccttctccagagtgatgctctttaccaggtaccaccccaattgcattccattgataaaaagaaaaagaaaaaaaatctttttctcttttgggtttttgataaaatggttatgttgataaaaaaatctattttttgggggtttttgataaaatggttatgctgtgtttagtatattctggagacaagtgtctacccaagataacctgaatccatgaaagaactgagagagttg

SEQ ID NO: 19305 - DNA, 254 bp, Glycine max
  Clone ID: 700873806H1
tgcaagttgccttacagcgggtttacatcacatgagttggctgtcttattaaaaaagaaatttgtaaatttgacaagtttaaattttgactactgtcaatatttaacacacataccagatgtattttgtctcccacatttggaaaatttgtcatttcaatggtgtcaaaatttatctgcaattcactattcagttgggttcttggaaaaacttaaaatcttagacggagaaggttgctccagacttaagagttt

SEQ ID NO: 19306 - DNA, 252 bp, Glycine max
  Clone ID: 700873807H1
ggagctcttctccattggttcttcatctgcatgcacacacttgcatagttttggaaaccaagaatttttgaagggtagcatcaacaagaagttctggaaatggagatcaccaatgtcagcgagtatgaagctattgcaaagcagaagttgccaaagatggtgtttgactactacgcatctggtgcagaggaccagtggactctgcaggagaacagaaatgccttttccagaattttgtttcggccacgtatt

SEQ ID NO: 19307 - DNA, 248 bp, Glycine max
  Clone ID: 700873808H1
cttttctttgtcaataccactagatgtctataccttgaactaaatatttctaagattgtgtattgtgatatgaacatttctgcatttgtgcaatatataggactttatgcttggagagacagtaagaagcttacctcattgccatcacatgtttcacctaccttgcatagataagtggctcttcagacatggttctggccaattagcacaaggggctctgaaattgtatatgcgtagtacagaccgcg

SEQ ID NO: 19308 - DNA, 244 bp, Glycine max
  Clone ID: 700873810H1
attgagaggtccacaaaccttgactggtacaagggtccaactctgcttgatgcacttgaccagattagtgagcccaagaggccctctgacaagcccctcaggcttccccttcaggatgtgtacaagattggaggtattggaactgtgccagtgggacgtgttgagaccggtgtcttgaagcctggaatggtggtgactttgcaccaactggactgacaactgaagtcaagtctgtggagatgca

SEQ ID NO: 19309 - DNA, 243 bp, Glycine max
  Clone ID: 700873811H1
atggacttcttcgcccagggtcaccaccacaccaccgcctaccccaccatctccgccacgggcaccatctcggtcaacccgcccggtgggacgcacaccgcccatgaccccaagcacacgggcgggcttccgccccctcacactggcttcccggtcccggtcaacaagttcatccaacactcacacgtgggtcagacggccctctgggtcgtcttcggtctgttcactgccggtctcgtcggc

SEQ ID NO: 19310 - DNA, 250 bp, Glycine max
  Clone ID: 700873812H1
attcgtgaattacttgacggctgcggaagagttgatagagacttgaagagcgaaaaggaaggacttcttgaacaagtcaatgagttgagaactgaattggcttcacttagggctgccaaagagaaagaggttgcggattatcagaagctttttatggaggaaaaagagaaaaatgaaactctttctgaagaagttgagaaattgctaaagcttcaccaggaaagaacatgtcatgatttatataataaca

SEQ ID NO: 19311 - DNA, 210 bp, Glycine max
  Clone ID: 700873813H1
ctcagtgaaagagaatccgaggcgaagagaagagaaaaattaagatggaggggaaggagcaggatgtgtcgctgggagcgaacaagttcccggagagacagccgattgggacggcggcgcagagccaagacgacggcaaggactaccaggagccggcgccggcgccactggttgacccgacggagtttacgtcatggtccttttacagag

SEQ ID NO: 19312 - DNA, 248 bp, Glycine max
  Clone ID: 700873814H1
cccaaaggtgcttttatgttgcaaagtcatacagtgtggctggaaagagggctgaagcatatgcattgtactgtcgtgctcgcaatttggcagatgatgccttaaaaaagttccaaatgttggatggtgataataagactatgatgaaagagttggaggatttgtgcaatgagtgccgatctaacagttgtatagagcatgcattggggatcatggaggagaaaaagactcaagaaaatctatctgaa

SEQ ID NO: 19313 - DNA, 242 bp, Glycine max
  Clone ID: 700873815H1
gtgcgggtgagatgtttcaggtgaccactttgctgagtgaggcggagagattggagaaggagttgttgcagaatccacctccgtcggaagcggatgtggaggcggctagggttgttgttcaggagaaaggggaggttgtgtctcagttgaaagctgccaaggcgagtaagcaggagattggtgctgctgtggatcagcttaagaaggcgaaggagagtttggctaaggtggaggagtggtct

SEQ ID NO: 19314 - DNA, 230 bp, Glycine max
  Clone ID: 700873817H1
gaacttttgaagtagcccaaaaggtctgcggagaggttatcttctaccttgatgagaacaatgtccattttgatggtattctccttaagtctaacatggttacacctggaggcgagtccaaggacaaggacagtcctcagacagtagctgattacaccctcaagctaactcaaaggagaattcacactgatgaccctggaattatgataatgccaggtggacagtctgaa

SEQ ID NO: 19315 - DNA, 241 bp, Glycine max
  Clone ID: 700873818H1
tcgcgagattggaggttcaagagaataatccctgctcactttgctgctccaataagtgcaagcaggtctgatttcagggctgcatttgcatttttggatgagtttttgggggaaagtaatgctgcatggccttcactttcccttctcttctcatcaatcatgggaaaggcagccagctattttcctccggatgacatgaggaccctatcatcccttgaccagtttttggtgtctgttggtg

SEQ ID NO: 19316 - DNA, 250 bp, Glycine max
  Clone ID: 700873819H1
gcgagtcaccagaatataaatctaattgggaatgtgtactcaagggactttgctgcatatgctgtgaaagcaatatcgattcttcgttgtacagatgtggtcatttgtgtacatgttcaaaatgtgcgaatgagttgcttcaaagcagaaggaagtgcccaatgtgtcaagctcctgtggtggaggtgatacgtgcttattctatacaataatttgacattaatataaaggtcacacttttaacaaaata

SEQ ID NO: 19317 - DNA, 252 bp, Glycine max
  Clone ID: 700873820H1
tggagagtgagtccgtgaagcgcagaattcacatgattgctgctcactttgcacccaatgatgatatttcaactaccaacgttctgcctatgaactgcagtggcagtctgaactctgtactccggagatgtgataataaggtgtattttgcacgccaagcttctgcttctcttggttattttatgaggcagacttcaattgaagagggtggctcaacttcctttattgctcctaaaacaaatcatggtgctg

SEQ ID NO: 19318 - DNA, 248 bp, Glycine max
  unsure at all n locations
  Clone ID: 700873821H1
aattgcaaaatatttgccagtattctgtctctcccagcatgaagagagtatttttcatacatataatggcactagtgttttatggtgggtttttttgttttaaaggattgccaagantatcatcaagctaaggatggtgatggatgggttgaacaatcttcccaaccatttctttttggcttattgcagaaggttgatgctccttcagcatatgtgtgtgctggtagcaggatatatgatgccaccga

SEQ ID NO: 19319 - DNA, 249 bp, Glycine max
  Clone ID: 700873822H1
gcagatgtgaactcacttatgctgttgttgggattgttgtgctacttgcttccaatgctgttcaaatacagtggtgcctcagctgctctcactgtagacccttcactacacttgtcaagagcttctagcattgtgatgttgattgcatatgttgtctacattgtctttcaactgtggacacacagggagttatttgaagaagaagatgacggtaaagatggcgaggatggttcagaagaacaagctgtg

SEQ ID NO: 19320 - DNA, 247 bp, Glycine max
  Clone ID: 700873823H1
gaggcttttccccacaagctggtgcagtttggagagattcaggaaaaagttgtattgaaattttcacaagaggaatttcttacagcttggtcaactcaggtgcgtcctgcaacaactctgttggctgatgggtgtccatatttgtatgctatggtgcatgatagttcagtgtctacaataccaggtgattttgtcattggtgttaagttgacaaccataaacaatatgtgtgcatatgggctcaatc

SEQ ID NO: 19321 - DNA, 195 bp, Glycine max
  Clone ID: 700873792H1
ggagggttcttctggagtctctaagttctccgctcatgtatctcttacgggggcttctgccctgaccaaggctgagggcttacatcatgaactctaggtattatgcaatccgtgtgacgagtgtgtcgactctctttgccgtgtactgctattcctgtccgactgagtttggatcacactaccgctattgaccgt

SEQ ID NO: 19322 - DNA, 184 bp, Glycine max
  unsure at all n locations
  Clone ID: 700873748H1
ggcgttgttcaaatggttggcgggatacgggcccgtggggggctttaattgacgngccgagaatcggccggttcgaccgttcgggccggtcggttgctttacgtggccacagcgcgtctttagttgtgcttggttcgtttttgctatggttcggctggtacggcttcaaccctggttcgtttct

SEQ ID NO: 19323 - DNA, 256 bp, Glycine max
  Clone ID: 700873749H1
attttctaattctagataattttggtgcttgggagtccctaatgattaaatgaaccaagattttaccatgactgcaattttagagagagagagagaaattccaaaaccatgtcgtcccacagtcatctaagtttcgcctttggggttctaggtaacatcgcctccttcgtgtgctttctggcaccactaccgacattttatagagtttgtaagaagaaatcaaccgaagggctccaatcaattccatatgtggctg

SEQ ID NO: 19324 - DNA, 166 bp, Glycine max
  Clone ID: 700873754H1
aaaaaatggcatggaaatgaccccttctgatttatgtgccttgaaagagatattatgttactcaattcctccctgtaacatgaaagatgaatgcctgaacttccacttgttctgacttatgctgcaacatgagtttttaattcgtatgactaatttattctagtag

SEQ ID NO: 19325 - DNA, 259 bp, Glycine max
  Clone ID: 700873755H1
gaaaaacaagtagttgagaactaagaagaaggaaatggcttcctcaatgatctcctccccagctgttaccaccgtcaaccgtgccggtgccggcatggttgctccattcaccggcctcaaatccatggctggcttccccacgaggaagaccaacaatgacattacctccattgctagcaacggtggaagagtacaatgcatgcaggtgtggccaccaattggcaagaagaagttcgagactctttcctacttgccagac

SEQ ID NO: 19326 - DNA, 248 bp, Glycine max
  Clone ID: 700873757H1
gcatgattctgaagctgtcaaagatttgggggatatagattcggatggatcaaatacatgctcatctgttttagaagagatttcagtctgcatggaagagcaagatgataatgataatgatatggctaagtccagtccttgtccacatttgccaaatggcttttcttgctttgacaaggattcttctgtttcagtggattatcaaaatacaagggaagattcaggccataaagatgtgactaaatgca

SEQ ID NO: 19327 - DNA, 249 bp, Glycine max
  Clone ID: 700873758H1
ggcttatggtggatacctaggcacccagagacgaggaagggcgtagtaagcgacgaaatgcttcggggagttgaaaataagcgtagatccggggattcccgatataggtcaacctttcgaactgctgctgaatccacgggcaggcaagagacaacctggtgaactgaaacatcttagtagccagaggaaaagaaagcaaaagcgattcccgtagtagcggcgagcgaaatgggagcagcctaaaccgtg

SEQ ID NO: 19328 - DNA, 233 bp, Glycine max
  Clone ID: 700873760H1
tgcgcctctcatccgtgatgggcgtatggagaagttctactgggcaccaacaagggatgaccgcattggtgtctgcactggaatttttcgcaccgattcaattcctgaacaggacgttgtcaagattgttgacaccttccctggccaatccattgatttctttggtgcactgagggccagagtatatgatgacgaagtgaggaagtggatttctggtgttggtgttgacggca

SEQ ID NO: 19329 - DNA, 179 bp, Glycine max
  unsure at all n locations
  Clone ID: 700873761H1
gaattcggctgtaggcaagtcggtctggaggatggagtggcagactagcgctggatcagcatatgnacacagaactgccgtggggaacgagaaatcgtgttacatacccagagggctgggagttcatgcagccgacagtcgtgaacttcaagcacagatgagggcagttagaatgatcc

SEQ ID NO: 19330 - DNA, 271 bp, Glycine max
  Clone ID: 700873763H1
ggaattcggctcgcggccgccgtccccaccgatgcgatggcggtgcgtgcgtcaggacgccgacgacatccggatccgtcatgtgtgtgccagatgttgccgatcgtgtgatgagaccaacctgttgaacgccgttcaccacgtcgcgagcttcaaggccaagttcgccatgacctacgccagcaaggaggttcacgatcatcgcttcggcgttttcaagtccatctccgcagagccaggctgcacgccaagctcgacccttccgccgtcc

SEQ ID NO: 19331 - DNA, 252 bp, Glycine max
  Clone ID: 700873764H1
cgtttttgtctttcttggagtggtgatattggctgttataatataccaatttgcattaatgtaagctttgtgtggtttgtatgagtctatgctaaaaaaaaaagaaaaaaaaaaaaaaaaagaaagaaaaaaaaaaaaggggtaggggagtaaagagaaccggtgcatcgagtaagactctccgctgtaagccagtggccgcgtgcctgcagactgccacaaaagacgtgtgagtacgcgccgcaggcttgg

SEQ ID NO: 19332 - DNA, 255 bp, Glycine max
  Clone ID: 700873769H1
cgctttagccacgatgaaggtagccttactccgatgactaaagcagattttaaattttaagatcaaatttgtaaccccacccctcccctccccccaaagtgtttagaggactatcatttttgtgcggaggtaattgtggggatgtgtattagtatttgctacttaagatggaattgataaagttcccctggctaaaccaaaaaaaaataaaaaaaaaaaaggggggccccccacttagtgaccccgtgacccggg

SEQ ID NO: 19333 - DNA, 254 bp, Glycine max
  Clone ID: 700873771H1
gagcatgtaaggatcctcttatggtaatagttacagagctattaccagggatgtcactgcgtaaatatttaacgagtatccgtcctaaactattagaccttgatgtggctataaactttgcccttgatattgctcgagccatggattggctacatgccaatgggatcatacacagagatctgaaacctgacaatctattgcttacggcggaccagaagtctgttaaacttgcagatttgggtcttgcaagagaa

SEQ ID NO: 19334 - DNA, 253 bp, Glycine max
  Clone ID: 700873773H1
cgggtggtgcctctcttccatctccccagccaaattctctctcaagaaggccacattaggcccttctgtcttcgcaaccgttagcactccttcttctccttcttcttcttcttcttcttccttcccttctctcattcaagacaggcctgtctttgctgcccctgcccccatcatcaccccaactgtgagagaggatatggcaaaggaatacgagcaagctattgaagaactccagaaattgttgagggagaag

SEQ ID NO: 19335 - DNA, 253 bp, Glycine max
  Clone ID: 700873777H1
gatggctccaaagtttcaagaattatctgaaaagtatctggatgttgtctttctaaagcttgattgcaaccaagagaacaggcccccaaaacaagccccaattatggctctgaatctttgtatctcacctaactgtaaatgggtttcatctcctgcttccttagatagtgcatcttctttgagatcttcacttggttcttgttttggtaacataaacattgctagtgtgagtttaagcactagtagaagtttg

SEQ ID NO: 19336 - DNA, 250 bp, Glycine max
  Clone ID: 700873778H1
ccatggcagctcctctgcaggttgtattatacggaaatcagcctcacccagaagccaagtttttgtttttgaggagtactggtcgttgcactaattttcaggttcactcctctcgcagagcaccccctggtgttgacaccagaatccattgggaaaacgaagatgaaggttggatcggaggtaccaataccaaacaccaacaaacccacaaacccaataacatgttacaggctgatgactttccagatct

SEQ ID NO: 19337 - DNA, 221 bp, Glycine max
  Clone ID: 700873782H1
cgcgccttcaatttgttcttccaacaccctcagtcattgtgtgagtccgaagctcaacctctctcgctcttcaatggccgtatcctctattcgaatcgccgtcgtcggtgatgtgcatgattgctggaaccttgaacaagattcgaaagcacttgagctcttgcagccagatttggtgctgtttacaggtgattttggtgaagaaaatcttgaagtcatta

SEQ ID NO: 19338 - DNA, 253 bp, Glycine max
  Clone ID: 700873783H1
ttttccttatgtcaagtttaagtctttattactatggaattattcttatgtatgattatctattccttttctatatgtatgttctttcattaggaagatggtgggaaaaaaatagaactgaagccaggatttttgatggagcatgatgaagatgttggagcagttgttgttgggtttgatcgctacttcaactactataaaatccagtatgggacactctgtatacgtgaaaaccctggatgtcttttcattg

SEQ ID NO: 19339 - DNA, 251 bp, Glycine max
  Clone ID: 700873784H1
ctttggttgcagagtcataagtgttaagttgtgtatgcatgaaagtgggcttgagttaattgtgcctcttgtatgatggaatccctttggaaactgttgtacttgctagagcctgcgcctgtcacacttatcattacagctgtggctgtgacatttggcgcacatttcgagctctaaactatgggaaagaaatggagcataatcgtgacttatgtgaagcatcgattacattggataggtcacaggcattg

SEQ ID NO: 19340 - DNA, 257 bp, Glycine max
  Clone ID: 700873785H1
gctaaaatcacttcatcatggcttcctcgtgtgcttcctctgccattgcagctgttgccatctccacaccaagttcccagaagaatggatcactcttgggaagcacaaaagcttcttttcttagtgggaggaaactgaaggtgaacaactttacagcaccagttggagcacgatccagcactacagtttgcgcagttgctgagcctgataggcctctgtggtcccaggcagcacccctctccatggctagatggcag

SEQ ID NO: 19341 - DNA, 253 bp, Glycine max
  Clone ID: 700873786H1
accgcagcagccattaatgatcgacctagttgttttcgatacccaaggggaaatggcattggtgttcagctaccaactggaaataaaggaactcctcttgagattgggaaaggtaggatattgattgaaggggaaagagtggctctcttgggctatggatcagctgttcagaactgtttggctgcagcttccttagtggaatgtcatggcttgcgcttaacagttgctgatgcacgtttctgcaaaccactgg

SEQ ID NO: 19342 - DNA, 227 bp, Glycine max
  Clone ID: 700873787H1
gtattagggagatggctaaggagtgtatcactgtccattgatcacagcatagtctatcatacccgtagatgtagctccttagctaattgggctacaactatgccatgttaggcttcactccatatagtcctttatgacgtgagataaggaaattaactactattcagcttctatctaaccaccggcttgaactgctgactgaactacaagctcatctgagtcagaag

SEQ ID NO: 19343 - DNA, 251 bp, Glycine max
  Clone ID: 700873788H1
aatagcccgaacttggggaatcattgcccctggcctaccttatgttgaacaaactatcaccaatgctggaaattggttgattaggggtgacctagaggtcattgaaccaattcagtacaatgatggacttgatcattttcgtctatctccgacacaactccgtgcagagttcacaaggcgcaatgcggatgctgtgtttgccttccagctccggaatcctgttcacaatggccatgctttgctaatgactg

SEQ ID NO: 19344 - DNA, 247 bp, Glycine max
  Clone ID: 700873789H1
gtcaacatgagtggttccttccaagggtatgcacaaatgatgtcctccattggaagggggagagacaatgtttggattgaaggaactggtaaaagtaatccttggggtccaaatttttaaggccaattggatgtgttggaatgatttgcctttccacaagacactgcaactcaagaatcggttgaatgactataagcctgtcaaatttagcagagattgccaggagttatctccagacatgggtcta

SEQ ID NO: 19345 - DNA, 250 bp, Glycine max
  Clone ID: 700873790H1
gaaaatttgattccaaaatgggatttcttcttgaccacaggttacccaaaatctgagttggttaagttccctcaatattttggatacaatttagaggaaagggttaaacctagattcacaattatgaaaaaatatggagtgaagttactgctgaatcaggttctttcactgtcaagcagcaactttgatgaagccttgaaaaagaaaatgaagaaaatgcaagttagttaggattctagtcatagcagca

SEQ ID NO: 19346 - DNA, 250 bp, Glycine max
  Clone ID: 700873791H1
cttggtcaaaagccttagcttagtttccttctgtgtgtctctaggagcatcatccttatctgtctgaggttgcatcagcaaaggtgtcttcgaaggttcaacaagatttcatcagagagcacttattttactatttctcaaggtacatacagaaagtttgtttgagctaagtgagtaaaaggagaactatgtcattggttatatctgcagagttggctgatacatcatatggaaatgccaagctctacac

SEQ ID NO: 19347 - DNA, 258 bp, Glycine max
  Clone ID: 700873747H1
ggggaattaatcaggtttacatacttggaggagatggaactcagcgaggggcttctgtgatttttgaggaaattagaaaacgtggcttgaaagtttcagtggttggaattccagaatcagttgataatgacatcccggttatcgataagtcattcggttttgacactgctgttgaagaggcacaacgagccataaatgctgctcatgtggaagcagaaagcactgagaatggtatcggtattgtcaaactaatgggtc

SEQ ID NO: 19348 - DNA, 251 bp, Glycine max
  Clone ID: 700873707H1
atcagacccgagtgccgccacgtacctctcgaaccgagcagcagcgtacatgtcctcgggcgactttacctctgcgctcgcagactgcaaagccgccgactcgcttgatccgcgaaacgaaaagaccctcctccgcatggctcggatccacacatctctcggtgatcccgacgctgcgctcaaaatcttcgacactctgccctctgacctggccgccaaggaccgcctgccggcaacaaacatgcagaatt

SEQ ID NO: 19349 - DNA, 265 bp, Glycine max
  Clone ID: 700873708H1
cagcaatggaagctgcattatgcagtgcacttgctctttcacccaaccaagtattcaacgcagcaaatcctggagataaaaatgttcctttgaaatatagcaaagatcggagtgttgtaatgacagtggcagccactggaatattagggaaaggtggtgggttgttggagaggccaaccatagagacaacatcacctggtcgggattctgaatttgacttgaggaaatcgcggaaaacatccccaccctaccgagttttgctgca

SEQ ID NO: 19350 - DNA, 240 bp, Glycine max
  Clone ID: 700873710H1
aatctgaatttttatcttgtgccttatcattaagtaaggagtataattgtgttccagttaaattgaatgtcaaatcaatgaaaggagggggaaaacattgtcttctgtttccattgtgtccaaaaaaaaaaggaaaaatagaaaagaaaaaaaagaaaaaacaaacaacaaaacactggatcgcaagaatccgttgaagtgctatggggctgtcagaattagcagagattgccaggaggt

SEQ ID NO: 19351 - DNA, 263 bp, Glycine max
  Clone ID: 700873713H1
caccactggtgtacccggtggtgaatgcattgtcaaagcagcgtgcaatgctggaaaacataatgagggcttgtgttggataggccccagagaataacatgattctcgagtacaagtgacgcatgggatagaataataattttgttggggtagcctatccgaatggtttatgttaataatatgtttgcttatgattttgcaagtgtaattgattgcatcttctcattaatgctttagagcaggacatattctgttttctaggg

SEQ ID NO: 19352 - DNA, 261 bp, Glycine max
  Clone ID: 700873715H1
cttctatagagacacacggagagagtctcagagcaataaacacccttcaatggctaccactaaagtttacattgtttactattctacgtacggacatgttgagaagttagctgaagagattaaaaagggagctggttccgttgaaggtgtggaagcaaagctatggcaggtacctgaaacactttctgaagaggtccttgggaagatgggtgcacctccaaagagtgatgtaccgattattacacccaacgagctacctga

SEQ ID NO: 19353 - DNA, 262 bp, Glycine max
  Clone ID: 700873716H1
ctgaggttgttgttgttgccaaggctgtaaatgatggtcccgcttctgtgcgtgatgctcttgaagccaacgccaaatccatgcaggcgcgtgccacgtcgaagcgtaccaataacaaggcggttaaggaccgtcaagccagcgtcactcctgagcaacacgagcgcaagtctcagttccctgaacgttatgcccagcagaagaagcacttgagccttcctttgttccccaccaccaccattggttccttccctcagaccaa

SEQ ID NO: 19354 - DNA, 263 bp, Glycine max
  Clone ID: 700873717H1
cagcaactagggtagggttccctccgccaaacccaaagaaagagtagaagaaacctacaaaactcatctctataaacaactccgttagttcatccggcggctttagcaatcactccctccgttttgcgttttggattcatttatctgctgctttatcttaaaggccaagcgataaataacctctctctctctctctctctgtgagattgagaatccgatccttcgtttccgaaattctcgcgagatggacgagaacctgctcg

SEQ ID NO: 19355 - DNA, 261 bp, Glycine max
  Clone ID: 700873718H1
gcaaggtgcccgtttcgccaaatggcgtactgttgtgagcatccccaacggtccctctgctctggcagtgaaggacgctgcctggggtctagctcgctatgctgcaatttcacaggagaacgggttggtcccaattgtggagccagagatctcgcttgatggtgagcatgcgattgacaggacattcgaagtagcccaaaaggtgtggtcagaggtattcttctacctggctgagaacaatgtcctgttggaaggtattct

SEQ ID NO: 19356 - DNA, 225 bp, Glycine max
  Clone ID: 700873719H1
tttggagctagcaacttgcattgatacaaggtgcataacatcttatgatgataaatcttcagacttcaagcttcaagcagtctgtctgtactctgtagtcttgtaatcatgccccaggctcagatgaggaaggattcctaatgggaactgctgcttatttgaacattttttcttgttcatacccaattcttgaatatgtctattcaatttgcaggacaatgtttg

SEQ ID NO: 19357 - DNA, 248 bp, Glycine max
  Clone ID: 700873722H1
caacttacccaccaactaataatctttttaattccaaaaaaccaaacaatgcctctttttctcacttcacaacttttatttctgtttgagttctccaatggcagctcctgcaccattctctctttcttctgatcccttcgcttccaaatctgccacatcaacgatctttggtcctgccgcgctgaaaaaagggaactttgagcaaacccatttcggaattttcacggctttaaggagaaatcaaggtt

SEQ ID NO: 19358 - DNA, 255 bp, Glycine max
  Clone ID: 700873723H1
ggtcagtggcgattcttccggagagactgctttgaggatggcgatgcagactagggagcagcatatcaggaggtacatggccacgagcagcatttgcagtgctcaggcactgcgtgcaaacatggctgccatgtatgctgtgtagcatggacctgaaggcctcaagaacactgcacaccgggtccatggcctcgctggggcatttgctctgggaatacagaaacttggaactgtggacattcaggaccttccctt

SEQ ID NO: 19359 - DNA, 250 bp, Glycine max
  Clone ID: 700873724H1
gtttgttctctcaacgactcctccgcgaaagagtattattcaatattttggttgggttgaatcccggggctaaagcgttgcagacatcacggctattctaagagtgtctcgctccctcattcatgtccgatctgtacgacggaggacgggtagttgcgtaactgccgttaacccttcgccgcacggtgggcgtggtgctttgccttctgaaggtggtagcccttcagacttgctcttcctcgctggtggt

SEQ ID NO: 19360 - DNA, 263 bp, Glycine max
  Clone ID: 700873726H1
caaaaggctgtggaactccagcgctggaaattagaggaagagaggagattggaggaggcaaggctcgccgaagaagctgcattggcagttgcagaaaaggagaaggcaagatcaaaagcagccatggagaatgctgaggttcagcagaggattgcagagttggaatcacagaagagaatcaatgcagaaaagaaagcatttatggaatcagaagaataaagaaaagcagtggatgctttatcaaacaattatgtgaggtatag

SEQ ID NO: 19361 - DNA, 260 bp, Glycine max
  Clone ID: 700873727H1
gcagtttgccaggagattttggctttgatcctctaggtcttgcatctgatcctgagagcctgagatggaatgtccaagcagagcttgtgcactgcagatgggccatgttgggagctgctggcattttcatcccagaattcctcacaaagattggtatcctgaacaccccttcatggtacactgctggagagttggagtacttcacagacaccaccacactcttcatagttgagctctttttcatcggttgggccgagggt

SEQ ID NO: 19362 - DNA, 259 bp, Glycine max
  Clone ID: 700873728H1
ctgttctctctccccctccccgattcgttttgcccctttcgctgccctaatttcaaccatgcctcgccgtagctccggtggaagatctgcccgtcctgctcctcgtgcagcacctcgtcctgctccagttcaccatgctcctcctccagcccctgctcagagcggtggcggatctatgcttggtggcattggttcaaccatagctcaaggtatggcttttggcactggaagtgcagtggcacacatggctgtggatgct

SEQ ID NO: 19363 - DNA, 248 bp, Glycine max
  Clone ID: 700873730H1
caaaggagaggaaaagtactgtgccacttcgcttgaatccatgattgatttcagcacttccaagcttggaaaaaatgttgaggttgtgtccacggaagtagtggaggacaaggaaacgggattgcagaaatacaccgtagcaccgggagtgaacaagttatcaggggacaaggctgttgtgtgccacaagcagaactacccttatgctgttttttactgtcacaaaactgagaccacaagagcttact

SEQ ID NO: 19364 - DNA, 258 bp, Glycine max
  Clone ID: 700873731H1
gctgtgggaagttgaggggaagtgggttgttaaaggagcagttgagctagacattggtgcaaacccttctgctgagggtggaggagaagatgagggagttgatgatgcagctgttaaggtagttgacattgttgacacattcagacttcaggagcaacccgcattcgataagaagcagtttgttaccttcatgaagaggtttatcaagaatttgactcccaagctcgatgcagagcaacaggagttgtttaagaagca

SEQ ID NO: 19365 - DNA, 261 bp, Glycine max
  Clone ID: 700873732H1
atggacttcttcgcccagggtcaccaccacaccaccgcctaccccaccatctccgccacgggcaccatctcggtcaacccgcccggtgggacgcacaccgcccatgaccccaagcacacgggcgggcttccgccccctcacactggcttcccggtcccggtcaacaagttcatccaacactcacacgtgggtcagacggccctctgggtcgtcttcggtctgttcactgccggtctcgtcggcatcttcaccctctcccag

SEQ ID NO: 19366 - DNA, 260 bp, Glycine max
  Clone ID: 700873733H1
aaaaccttcatactccatttgtgacccctgtagctgaaacatgtttgtgttataaatttttagaatgagaaaggtctaatagtatagaaataaggcagacaatatactgtgagtctgtgacagaagacaaaagagagaagaaagagggtaacatgtattgtgatagaagaaaaacatacgataatgaggaaatgcttagaaaataatgaagaacgatatggcctcacttgaggcatgtgtgctgtgacaaacaggttgag

SEQ ID NO: 19367 - DNA, 208 bp, Glycine max
  Clone ID: 700873734H1
ggcttatggtggatacctaggcacccagagacgaggaagggcgtagtaagcgacgaaatgcttcggggagttgaaaataagcgtagatccggggattcccgacataggtcaacctttccaactgctgctgaatccacgggcaggcaagagccaacctggtgaactcagccatcttagtagccagaggaaaagaaagcaaaagcgattc

SEQ ID NO: 19368 - DNA, 59 bp, Glycine max
  Clone ID: 700873736H1
cagctattgtagtttactcattatgtattcctgtctgaaaattaatttgcatcgctatg

SEQ ID NO: 19369 - DNA, 262 bp, Glycine max
  Clone ID: 700873738H1
ggctcgagccaggacaaggaaggcattccaccagaccagcagcgcttgatcttcgccggaaaacagctcgaagacggcagaaccctcgccgattacaatattcagaaagaatcgacgcttcatctggtgcttcgactccgcggagggatgcagatcttcgtgaagacgctcaccgggaaaactattactctggcaggtggagagtgctgatacgatcgataacgtgaaggcgaagattcaggataaggagggattccacggt

SEQ ID NO: 19370 - DNA, 199 bp, Glycine max
  Clone ID: 700873740H1
gctcccctcgagctcagatctgcgagatctacttctgcttgtgtgtgattcagacttggcaacatcggatctggtctcagccatagagatgtcgcgtagtctggtggtccacttcggcgtgtgcttgtggtcgttggcgactctagtctatgaggccctggtggtaagctgtttgagtgggcagccctacgcgctccat

SEQ ID NO: 19371 - DNA, 259 bp, Glycine max
  Clone ID: 700873743H1
gaaattcagatctcaggtttaaaagaaaacctggacagggagcatcagaaatggcgggcaactcaaaccaattatgaaagacaggttgttctccagtccgaaactattcaggagttgacaaaaacatctgaagcactagccttgctgcaggaggaggcatctgaattacggaaactagccaatactcagaaaattgaaaatactgaactaaagactaagtgggaagatgagaaggcacaactagaaaagtctaggaatg

SEQ ID NO: 19372 - DNA, 251 bp, Glycine max
  Clone ID: 700873744H1
gtcgagtggacggaggacgagatggccgcgctcgaggagggcatgcgagagacgagccgcgtgctcccgaaccgctgggcaacgatcctgcgcatgttccggccgcgcttccacgagaagcgcacctcggtgcacatcaaggacaaggtgcgcaacgagacgaaccgccgccgcaaggtgggcgagccgctcggcgtctttgccgaccagtagtcgatggcacgcttgctaatataccgagtagtgtgctc

SEQ ID NO: 19373 - DNA, 260 bp, Glycine max
  Clone ID: 700873706H1
ttggtttccttgaatcccagcttcaggagttggacggtccaaaagcgagtgcttgcagactattttgatgtgatatcaggagcaagcacaggaggacttgtatctgctatgataactgatccaggctacaataatcggcctctgttcgctgccacagatatcaagccttatgacatggaccactgtcctaaaattttcccacagcatagtggcctcggtcggtcgatattagcaaagatgacaagatctctgggaggacc

SEQ ID NO: 19374 - DNA, 241 bp, Glycine max
  Clone ID: 700873667H1
actggagttgctatattttaccccttctaccactctttctacgtgtactataaagagttggctatagcagccacagttctaggaacagtgattatggcagctacgttgggaacactctgttattgggtgattactcaccaccttgaggcctcaagattgcgaagtcttaggacaacaatgagcagtaggcagtcaatgtctatgtcaatgatgtcaggatcggagaatgagtataagacag

SEQ ID NO: 19375 - DNA, 236 bp, Glycine max
  Clone ID: 700873669H1
cagagaacttgaggtggtacgttcaagccgagcttgtgaatggacgttgggccatgttgggtgttgcaggaatgttgcttcctgaggttttcaccaagtttggaatcatcaatgcgcctcaatggtatgatgctgggaaatcagagtactttgcatcttcctcaaccctcttcgtgatcgagttcatcttgttccactacgtcgagatccgaagatggcaggacatcaagaaccct

SEQ ID NO: 19376 - DNA, 238 bp, Glycine max
  Clone ID: 700873670H1
ggaaatgatctattcctgtggctggcctgtttgtcagatctataatggcatgcagcccaatttcaccgccattattgagcgttgcaatctttggagaggttgtgatgatattcaagattcatgggctagcttggaaagtgtaatagattattacggtaacaaccaagacgtgattgtaccaaacgcaggtccaggtcattggaatgatccagacatgttgatcatcggtaattttggg

SEQ ID NO: 19377 - DNA, 238 bp, Glycine max
  Clone ID: 700873671H1
cttgcttccattcacgatggcgttgcaggagaagctatacaagttcaagaagcagcaagagaagtgccaaacgacactttcgagcattgcagctagtaaggccgcggcaacccaaaaatccgccgctcatggctcggccaatggaagaaacgcggcccctgcggttaagttttcgaacgacacagagaggcttcagcatattaatagcattcgcaaggcccctgtgggtgctcagatg

SEQ ID NO: 19378 - DNA, 238 bp, Glycine max
  Clone ID: 700873672H1
gggatcattgtgtggatcttggtggttaattggcatcgcgtggagctcaccgtgagcataatcggggttgcttcccacgcgctttcgaggaacatggctttgttcggggtcctcccttgtttgaccgttgggctggtgctgtgtttcgtgccaatcgtggttttcatggtgtttgcgaggtttaatgggaagattgtggtgaagagtttgaagcctggatatgcttgtgaatggaagg

SEQ ID NO: 19379 - DNA, 242 bp, Glycine max
  Clone ID: 700873674H1
ggaagggatcccaccagaccagcaacgtctcatttttgctggcaagcagcttgaggatggacgtacacttgctgattacaacatccaaaaggagtccactcttcacttggtgctccggctccgtggtggaatgcaaatctttgttaagacattgaccggaaagacaatcacccttgaggtcgagagctctgacaccattgacaatgttaaggctaagattcaggacaaagagggtatcccac

SEQ ID NO: 19380 - DNA, 241 bp, Glycine max
  Clone ID: 700873675H1
ggaagctcagtcagtatttcgtgagcttggaggtcgcggtaatcttggagatgcagcaacagttacggatggttcagcagctgctacaggatctcttgtccatcctcaaccccaaggcattacattttcagcggcccctggagctagtggtttaccacctaaagccagtggagaaagtgagaaaagacttgcattacccaaagctagtgttgaaactcgtcgagcaggtaggagattggtc

SEQ ID NO: 19381 - DNA, 242 bp, Glycine max
  Clone ID: 700873676H1
ggtggacaaggtcagtttgcagatatcaccgtccggtttgaacccatggacccaggtagtggatatgagttcaagagtgaaatcaaaggaggtgctgtaccaaaggaatacattcctggtgtgatgaaaggattggaagagtgtatgagcaatggtgtgcttgctggctttccggtcgttgatgaacgagcagtactcacagatggttcttaccacgatgtagattcaagtgtgttggcttt

SEQ ID NO: 19382 - DNA, 242 bp, Glycine max
  Clone ID: 700873677H1
aaaccatggacgtgggtcagatgcagagacagtggatcgactacaccaaatccctcttcctcgagggcttcctggatggtcagtttctgcaacttcagcagcttcaggatgagaacaaccctgactttgtggtcgaagttgtctctctcttctttgaagattctgaaaggcttctcaaagatctcacctttgccctagatcagaatggcgttgacttcaaaaaagttgatgctcatgtgcac

SEQ ID NO: 19383 - DNA, 248 bp, Glycine max
  Clone ID: 700873680H1
gtggattatttactaggaaaacaggccttcttcggcgaaacacaagccgagggtggttgtgatccaaatgcggtggccacggctaacatcttagagacggcaacacctgtgattgatgggaagccgtactattttctgtctgtgttgacaaggactgctgatggagatgaaggtggcaagcaccacataattagagcaactgtaaaagatggaaaactgttcatttgcaaggctcaagctggagacaa

SEQ ID NO: 19384 - DNA, 240 bp, Glycine max
  Clone ID: 700873682H1
cgaaaattatctctacacctgtttggcacacaccggcgaggtggcttcagttaaagtcattcggaacaaacaaactagtcaatcggagggatatgggtttattgagtttactagtcgtgctggtgctgagagagtccttcaaacatacaatggcaccattatgccaaatggcgggcagaacttcagattgaactgggcaactcttagtgcaggtgagaggcgtcacgatgatagcccaga

SEQ ID NO: 19385 - DNA, 237 bp, Glycine max
  Clone ID: 700873683H1
cacaattcacaaccttcagacataggtataagaataacaccagttgatactccaatgatcctcacgggcttgctccgcgacgtcgccgccaaattcccttcccgccgcgccatctccgtcgccggaaaattcgatctcacccactcccgcctccatcaactggttgaatccgacgtcgcccgcgtagtcgctgccggaatcgaatccggcgacgtcatcgatctcaccttccccaat

SEQ ID NO: 19386 - DNA, 236 bp, Glycine max
  Clone ID: 700873684H1
acttggtcaatgtgtgagggagaatacaactctggaagcttaaaatataaattgcagaaagcaagtgagagggattattgtaggaccataacttctgttatggaatttgaatcagactggataaagcacagaaagtcatcttcttataccgctcaagttattcgttccgcgacatctgttatgccttggtcttgtagaatcccaattggtgatgggtatcatgaatttctttagtt

SEQ ID NO: 19387 - DNA, 236 bp, Glycine max
  Clone ID: 700873685H1
ggctgaacccagcaatttggatcaatcggacgtcgtatagatcgtattcgtagctaggacagggcagcatgcacgacgaacattcctttcccctcctcgcccaattccccctaaccatctccccctttctctccctcccaacctccacccccctcccctacacctacaaaaccctcccctcgaccctcccaccttcaatcctccgatcccccagcaacccttcaaactcctccgac

SEQ ID NO: 19388 - DNA, 236 bp, Glycine max
  Clone ID: 700873686H1
ctcaaagtttcatatctgaagcaagttttcaagaaactgctagagttttatcaaaagccgctctccgggggcgcatagattggttgaaaggtctgaaagagaacgttgttttagggggaatgatacctgttggtaccggattcaaaagaataatgaaccgttcaaagcaaaggcaatataacaagatgacctcggaaacaaaatagaagaatttgttgaatggcgaaatgagagat

SEQ ID NO: 19389 - DNA, 238 bp, Glycine max
  Clone ID: 700873688H1
ccatctttgccttctgcatgttggttctctgtaaacagatactgcaaaagaagaataatattgaatatttggttgggttgaatccctgggttgaagcgttgcagacatcacggctattctaagagtgtctcgctctctcattcatgtcccaactgtacgacggagtccaggttgcgtaactgccaccaacccttcgccgcacggtgggcgtggtgctttgccttctgaaggtggtagc

SEQ ID NO: 19390 - DNA, 237 bp, Glycine max
  Clone ID: 700873689H1
ggcgttgttcacatggttggcgggatagcgggcctgtggggggctttaattgatggcccgagaatcggccggttcgaccgttcgggccggtcggttgctttacgtggccacagcgcgtctttagttgtgcttggttcgtttttgttatggttcggctggtacggcttcaaccctggttcgtttctgacaatagccaaggggtatggaagtggagggtattatggtcaatggagcgct

SEQ ID NO: 19391 - DNA, 239 bp, Glycine max
  Clone ID: 700873690H1
gttgtttggtctcttctctcttatccatggcatcaacgtttctcaccctaccaactcccttcctacacaaaaccaatgccatcagtttctctaacaagagaccctcatttttgcagaggagctctctgaagattcatgcaattaccaaaaaatgggaacccacaaaggttgtgcctcaggctgatagagttcttattcgtttggaggagctttcagataaaacagttggtggagttttg

SEQ ID NO: 19392 - DNA, 239 bp, Glycine max
  Clone ID: 700873691H1
aaaaggcacagatccatcattggctgagttttattttcgtactcatcgaagaaaaaaggatcaaagttgggtgggtcctcatgcagaatctgcttatgataaatttgaacagaggaagactgagttatcttctaagagttcaaaatttacttcgggggaaggtggaactgatagtcaagctgatagtcaaccatctatgaatcatatgccatcagactttgatatttgggcagattcgg

SEQ ID NO: 19393 - DNA, 238 bp, Glycine max
  Clone ID: 700873692H1
tgaaccaacacccttttacttgatattattattgtaacgctactttaattaggaaaatgccggatgttcaagcccttgttaatgattttgtgaatctgcttaagaaacgaattgaagggtctcaagccacagcaaagcagacagcagtgttgctacgctcggtgatttcacagcagcgggtgccacacacaaaccaggccacagttctgattaatgcagtaagggcggtgggggagca

SEQ ID NO: 19394 - DNA, 240 bp, Glycine max
  Clone ID: 700873694H1
cccgaacttggggaaccactgcccctggcctaccctatgttgaacaaactataaccaatgctggaaattggttgattgggggtgacctagaggtcattgaaccaatccagtacaatgatggacttgatcattttcggctgtctccagcagaactccgtgcagagttcacaaggcgcaatgcagatgctgtgtttgccttccagctccggaatcctgttcacaatggccacgctttgctaa

SEQ ID NO: 19395 - DNA, 244 bp, Glycine max
  Clone ID: 700873695H1
cccaaatgccacgaacaaacacaactccctagaagtgatacaacataccaagaattgttttttggctattttggtttccaataatattggctgctactcctactccattttgtttaggctacgcggggtgtgtcaaagttgaaaaaatcaattgtaatagagcaaggaccacgctgccaaagatagaaaatcaggatttggccgcgttcttgtgatcctcttctctctccatgtctttctcaaa

SEQ ID NO: 19396 - DNA, 242 bp, Glycine max
  Clone ID: 700873696H1
gcttgtttgattaattttgtttttataatgaataatctcattttttggagagcttctaaaaaggaagtaaaaatagtctatttcctaacaagaactaagtcctagtgagattgtagtgtccttgcagttgcagattattcttttatggctatgtgcttatgttccttgttctctccctaaaccaacccatttatccgaaataggaatgcttcccaagcctttaaaacttcagctctgtgtta

SEQ ID NO: 19397 - DNA, 271 bp, Glycine max
  Clone ID: 700873704H1
gctcggcgttcggctggagcgagacacggtgtgtgggttcccggtaatccggaggcgacaaggcacggacatctacataggggtatgtccttcatttcactcctcaccctgttgccccatcctgtccatccaaccgacaatgccagatgtaaccacctacctccgccagcaccccgactccgaccccagccccaaccccaatcccaaccccaaccccaaccccgacgacgaccaacccctaattccctttccctattgggatttggccttc

SEQ ID NO: 19398 - DNA, 263 bp, Glycine max
  Clone ID: 700873705H1
aaaaaatcttacgccctaatctgtgtccgattttatcaatcacagactcaaagattcaggtccttatcaccaagatccaacaacttctcaaccacaacgagttgctatttccttcgattcacgaacccagaaaattaaagaattaaaaaagatatcgagtatcaaaaacggcatctggaaaacatgtctcaataccatggtgatgaaatggagtatgcggcagacgataatgaaatggcagaggtagaagaggatatgtattt

SEQ ID NO: 19399 - DNA, 243 bp, Glycine max
  Clone ID: 700873665H1
cctagaacaaacaaacgaacgtcggaagacactgcaatctagaagaaaaaaaaggttcgaactttgatccacgaaagctttcatgtccgatcatgacatgtaccctttagatcacaaggacgaagacgatttctttgacgaaattgatgaccaaaaccatggtgggggtgttggggatgctgctcttgatgaatatgagatgcttactaaggtgactgatacatcagctgctcaagcaagaaa

SEQ ID NO: 19400 - DNA, 242 bp, Glycine max
  Clone ID: 700873636H1
ccaatctcaagttgccactcagatgggaagggttgctgcaaagttaaatatcgactttgtgatatccactggagacaatttctacgatgatggattgactggtatagatgaccctgcatttgaaatttccttctcaaaaatctacactgccaagagcctccaaaagcaatggtatagtgtgttgggcaaccatgactacaggggtgatgttgaagctcaattgaatccaatccttcagaaaa

SEQ ID NO: 19401 - DNA, 240 bp, Glycine max
  Clone ID: 700873637H1
attggtataggttaagctaattgagattgcgagtcggttggaaaaaaaaacattttgaggttttctgatggtgtttgggccttggttgaattaaactgcatgctacggttgcaagtgtttaattcgatgcattccattgcggtgcttgtgcgtattctagttcgagctatttcatattatttgagattgcttttagaacggaagccttaagtttaagaaacaattgtagatgaattgtgt

SEQ ID NO: 19402 - DNA, 241 bp, Glycine max
  Clone ID: 700873638H1
aaacaattaagacagttgtgggttgtcagccgcggtcttgcactcttatttggcagttctgaaaaggacgcgccgggagaggcgcgtggcagattatggatggtcgaacccgcaagcattatatgattggtgtggtgcgtgttgcatcagaggtggacgcaattcagaataacaataaagggtggatgaggatccagaggttcttggccacactggccataactgtctccatactcttggg

SEQ ID NO: 19403 - DNA, 240 bp, Glycine max
  Clone ID: 700873639H1
aacttctcactacatgagaggccttgttgtcctgctgtgctacattgttattggggcatgcttcttcgtacaaagaacaccctttaataaccaagctgatgttactaacatcacacttaaaccagccactaatgcagttttaagcgcttaattagtaggctttggcctatttcttgtcctttcctgagatgatgaatggtggtatcgatccaaacccaaaatgcgattcaaattcaatgg

SEQ ID NO: 19404 - DNA, 243 bp, Glycine max
  Clone ID: 700873640H1
aattcggcgacgatgatgggggaaggagcgagcaatggagggatgctgtaccacgaggtgcaggagtcgaagctctgcgcggtgcattgcgtgaacacggtgctgcagggcccgttcttctcggagttcgatttggccgcgctcgcctccgatctcgaccgcaaggagcgccaggtcatgctccccgcgctctcctcggcggatttcgaatcgcacaatgtctcgctcgacggcgatttcagc

SEQ ID NO: 19405 - DNA, 244 bp, Glycine max
  Clone ID: 700873641H1
cttttgatgggtgtggatcttgtgttaagattcctcaggcttcatctgaaggccccgaagcacgtgctattggatctcctaaagcatgtgccactaggttccctaccttggtgtcccagggtttgctctttgtatggcctgatgagaatggttgggagaaagcaaaggcctccaagcctccaatgttgcctgatgactttgacaaaccggagtttgccacggtcaacattcagcgtgatctgtt

SEQ ID NO: 19406 - DNA, 245 bp, Glycine max
  Clone ID: 700873642H1
tatctgtttcccgccatatatccaataagctttaaccatgtctgcctttgttggaaagtacgcagatgagcttatcaagaatgccaagtacatagccacacctgggaagggcatcttggcagcagatgagagcactggcaccattgggaagcgcctatcgagcattaacgttgagaacattgaggccaaccgccaagctcttcgcgagcttctcttcaccgctccagatgccctccaatacctct

SEQ ID NO: 19407 - DNA, 244 bp, Glycine max
  Clone ID: 700873643H1
gcaggtttttattaatggagggatattacttggatacatatcaaactatggattttcgaagctgacactgaaggtgggatggcgaatgatgcttggagtgggtgcaattccttcggtagtcctaacggtgggagtgttagcgatgcctgagtccccaaggtggctagtgatgaggggtcgtttgggagaggcaagaaaagtgcttaacaaaacctcagacagcagggaagaggcccaactaagg

SEQ ID NO: 19408 - DNA, 240 bp, Glycine max
  Clone ID: 700873645H1
atactgtactatacatcttagtatacaatagaagagagaagcatatttgaagtgtgaagtgtatgggtttgaaacgatagaaccaaaaccctaatttcacaactttcccgatgacgaaggtttacggcacggggttatacgatttcgggcgccaccgcgtggcagagtaccccgtggcggcgcgccatcggagtcgaaagcggaagttccaaaggcaggcggcggcggcggctttccaag

SEQ ID NO: 19409 - DNA, 248 bp, Glycine max
  Clone ID: 700873647H1
aaagaagccatgctggggattagatatcatatgcgcctaatgggcgaggctgcaggtgttccaattgaaccagaaccacaaacacaacttttagatgctacaatgaacttggaaggagtattgttccttggagttccaggggcaggaggatttgatgcagtctttgctgttactttgggagattcgagcagcaatgtgacaaaagtatggagttcactcaagtgtccttgccttgttggttaaagaag

SEQ ID NO: 19410 - DNA, 248 bp, Glycine max
  Clone ID: 700873648H1
gtggattatttactaggaaaacaggccttcttcggcgaaacacaagccgagggtggttttgatccaaatgcggtggccacggctaacatcttagagacggcaacacctgtgattgatgggaagccgtactattttctgtctgtgttgacaaggactgctgatggagatgaaggtggcaagcaccacataattagagcaactgtaaaagatggaaaactgttcatttgcaaggctcaagctggagacaa

SEQ ID NO: 19411 - DNA, 245 bp, Glycine max
  Clone ID: 700873649H1
gtgagcgtgaggtgcattgtgaggcgcaagtgatatcgtggagggaacgcagagttaacgcccaaattacggttgatgctgacactgagtccgtttggaatgctctcactgattatgagcatctcgctgatttcatcccaaatcttgtatggagtgggagaattccttgtccttacccaggatggatatggttagaacaaaggggattccaaagggcaatgtgtttgcatatagaagcccgcgtt

SEQ ID NO: 19412 - DNA, 242 bp, Glycine max
  Clone ID: 700873650H1
acgaagttccagattttgtgcatccttttagtccatatccatttctggggacactcatattggaacagtttaagaatttgtccaagcctttctgtgtgttggtggatagttttgaggaactagagcatgattacatagactatcttacaaagtttgtgcccataaggcccatcggtcctttgttcaagaccccaatagcaacaggcacaagtgaaatccgaggtgattttatgaagagtgat

SEQ ID NO: 19413 - DNA, 241 bp, Glycine max
  Clone ID: 700873651H1
tctgaagactgcaccgtgggaagttatgacgtgccacgtaacacaatgttaatggtgaatgcatgggccattcatagggacccaaaagtatgggctgatccaacgagctttaagcccgagaggtttgagaatggaccagtagatggtcacaagctaatctcttttggattggggaggagatcgtgtcctggtgcaggcatggcccaaagaactctgggcttgactttaggttcgttgattc

SEQ ID NO: 19414 - DNA, 237 bp, Glycine max
  Clone ID: 700873652H1
tcttgcacgatctggttgctgcctgcagatcgtatttcacgtcagctatgagcaggagtcagcgacttgcatcatgattgtcgagcccaacgccgtcatggatagcgtcatggccgctgccacctcggttgcgcctattcccagcgtggtgccgactctgcccgatttcgagaccgcaggcgagactggtcaccgcacgctatgggtcgtcttcgtcatggtggtcatctctgtggt

SEQ ID NO: 19415 - DNA, 241 bp, Glycine max
  Clone ID: 700873653H1
cggctcgagggctcttctcttttcagcacgttaccttattccaatccaatagcaaggagtcaccaaaatagtgtgattcatggctgctacgtatgcgtcaatctttgcatcttccacgcaatcatgctcctcgtgtgtctcctaccatttcaaacacgcttgttagtccttttctcaatgtttcgtcaccaagaagttaccttgtgaagaaaaagcatgtgagatttagcaaacacatcag

SEQ ID NO: 19416 - DNA, 239 bp, Glycine max
  Clone ID: 700873655H1
ctcatttgctgctctttttgcaatacttttactagtcatctctcctgagcttgcaagtgctgcccaacctagtcttattcttcaactcggccgaaaacttttccaatgcggcacgccgcgtccctgttcgtggaaataccccatccaatggccgctcctagaggatataccccaccaccaaaacacccactctatggctgaatatttgagatgttagcatccttctttaattttgtgat

SEQ ID NO: 19417 - DNA, 241 bp, Glycine max
  Clone ID: 700873656H1
ggcgaatccggtgacaagccacgtgcaaagcgcggagcaacacaaccaagatgtgaactctctggggctgatttcatcaaggaagactcatgaggctattgagatcctcaagctcatgtcctccactttcctggtcgccctttgccaagccattgacttgaggcatttggaggagaatttgaagaacacggtcaagaacgttgtgagtcaagttgctaagaggactctcaccacaggtgtc

SEQ ID NO: 19418 - DNA, 242 bp, Glycine max
  Clone ID: 700873657H1
ccagtggtgattatgtgtagggtcgtcgtctcgctctggctctggctctagggtcacattgtgctcttctctagacctctctttgtactctcgctccagcgtatggacgtcgcattcactgccttccggtcaccgctgatcattctccgaggaccaggcctcgcgtctctctcagctctgatcggttccactagtgggatttccagaaggcaactgttcagttcggtatgtaatctcgctct

SEQ ID NO: 19419 - DNA, 243 bp, Glycine max
  Clone ID: 700873658H1
caagcgggttgagctacaaaaggctcttggaaatcaccttgcatggaaagataggtatcccgtgttctttgacgatatagcggcacgattacttccagtcatccccttgattatttatagacttattgaaaatgatgcaatggatacagcagaaagactgttggccatgtattctccattgcttgcttattaccctctaagatttacatttgttcgtgatatacttgcatatttctatggtca

SEQ ID NO: 19420 - DNA, 244 bp, Glycine max
  Clone ID: 700873659H1
cagaaattcaaagtcaccttagtgatgggactgatgaagatctaagaacttttcctgcgctagatccaccaattgaacaagatgattctaatacaatgtcagtggcagttggtaatgatttcgttgaagacaccgtactgtacgggcttcagcatattatatcaaaggcaaactttttctacagttagacatcaaaataagactctgcatcagagatagtttgttccggttggcacaaagtgca

SEQ ID NO: 19421 - DNA, 243 bp, Glycine max
  Clone ID: 700873660H1
ctaaaggcgatttgggatttgttcttgatggttttcgtcgaacagttgagcaagcagaaatattggaaggggtaactgacattgacttggtagtcaatctgaagcttcgagaagatgttctgcttgagagatgccttggtaggagaatttgcaatcagtgtgggggaaattttgatgttgcttccatcaacgtcaaggctgagaatgggagccctggaattgttatggctccacttcttcctc

SEQ ID NO: 19422 - DNA, 238 bp, Glycine max
  Clone ID: 700873661H1
tgcttcttcagtttccgatctttttgggcaccctctattgctcttcctcccttggtgtagtttgtgtaaaagggtatctctatttatggagtttccattgtctctggaggcaattttcgaccttaggtgtgttttggagagtttttttttttttttgtgtggttgatttgtgggggttggtgggtttttgggggagggaatggtgggtgctctatctgttgtgggatcatcggtagtg

SEQ ID NO: 19423 - DNA, 249 bp, Glycine max
  Clone ID: 700873663H1
gaaatggcaaaaaatattctctcaaccctagaccccatcctactacctagttcatcaccatcctcatcatcatcatcatatgtaaaaccaatacatgtttgctccaatccgataatcaaaagcactttgaagagggaattaactctttgcaaagcaacaccacactctccaattgttgtgacaaagagatgcttgtccatcagcttcatcaccagctttgtcgctttcattggctggtaagaagaatgc

SEQ ID NO: 19424 - DNA, 246 bp, Glycine max
  Clone ID: 700873664H1
tttgatagaatattgtacgcataaatctagctccaattcctaatcacctggttaatttcttcacatagagctatcgagatccaacgttaacatgaagaatgttttagtaaggtcagctgcgcgagctctgcttggcggcggtgggcggagtactaccgccagctctcaacggcggcgatcgtggaacagagacaccagcacggtggcggcgcgtttggaagcttccacttgcggaggatgtccact

SEQ ID NO: 19425 - DNA, 247 bp, Glycine max
  Clone ID: 700873633H1
agagaagaaaaagaaacaaaaatggctgaatcaaaattattggaccgtggaagttggaagaaacgcgattatctgatcaagcttctcctaatcggcgactcttccgttggaaaatcctgcttgcttctcagattcgttgttgtggatcgggacttagcagtgagacaatctcggagaatggacaccattggattgggcttgatatttcagcatcaattcctatttattttgaatttttatatatttg

SEQ ID NO: 19426 - DNA, 253 bp, Glycine max
  Clone ID: 700873602H1
ctctctttttattgcagcaccatccaacccttctcttctaagtgaccaacttcatttcatttctcacacatggcgaggcctcttctcagtaatcttctactctcctccatgcccatctccacacttttcttagctatactctcagtcttgtgtgtattttccatcatcacttttctctgtggttctgacatactgaagaacctccacaaagaagcagagaaagcaacaacaagatcatcgaattcgaaggagc

SEQ ID NO: 19427 - DNA, 250 bp, Glycine max
  Clone ID: 700873603H1
gagaaaattaacttgttcaaattcttaattaccctgtggaattatagggtccaccaagattgagttgaacaactctattatttttttaactattggatatgctattaagatccattttgcacatcaactagagagtttttttattattttcttatataaatttaaattgtgctacaagtgaagagttggaaacaaaagatggcaggtttgggaatatggatgggtttcgttagcctgtgtcttctgtctg

SEQ ID NO: 19428 - DNA, 121 bp, Glycine max
  Clone ID: 700873604H1
tcctcaggtggaagaattttgttatataaccgacaatacttacttaaaagaagaggttttgcaaatggaatctgctgtcttgaattatcttagagttcgaagatgacaggctccagacagt

SEQ ID NO: 19429 - DNA, 247 bp, Glycine max
  Clone ID: 700873606H1
agtacaacaactcactcactaagctaaacaatttcatcaagcctgccatggcttcctcgtgtgcttcctctgccattgcagctgttgccatctccacaccaagttcccagaagaatggatcactcttgggaagcacaaaagcttcttttcttagtgggaggaaactgaaggtgaacagttttacagcaccagttggagcacgatccagcactacagtgtgtgcagttgctgagcctgataggcctct

SEQ ID NO: 19430 - DNA, 247 bp, Glycine max
  Clone ID: 700873608H1
gaaagacagaagaaggtcgagaggaagaattggaagtaaaacgagtagtagatacagggcaagaagttgttctccgtgcagtattgaaaatagttatgaagtgactgaggagaaatccgttggtgagaacaattccagacggttacgatcagttattactgttacaaaagaggcggaagaatatggggaattgtatagaaatgaaaccaaggaggagattgtttatgatcatgattacccttgtaga

SEQ ID NO: 19431 - DNA, 250 bp, Glycine max
  Clone ID: 700873609H1
tgagagagtagcagctagcaatggagatttctgccctagcttcttctgctactccaagaccttctcttacaactccttccacttctccacacactgtagtcacaaccaccttcagcaaacctcaactgagacgctcccacgtagcagtatcacttcctacctcaaccaccatttcactgctcgctctcttcgcccctccaagcgaaccaaagccgctgtcagcatcgccaaagaccagattgtctcatct

SEQ ID NO: 19432 - DNA, 249 bp, Glycine max
  Clone ID: 700873610H1
ctcttagcgccaatcttcagcaaatttgaatacttttcgcggattcatcatttttaattttgtttgggttctgaatactcaaggggttttgaggatatttcgttactgggtatccattttctcaaaaaaccatgtctttgttccttaaagctttgcctttgatggccttccgcacgaggccatctcgggtgtttctgcgcagagtttccaacaccattccattgtcactttccagaaccagaaccgtgt

SEQ ID NO: 19433 - DNA, 247 bp, Glycine max
  Clone ID: 700873611H1
gcatggcttcatgtagcgcacctccctccctgatgctggtccaccctcaagacctctctcgctctcagagaaccacattctctctctatcctctcctttttaagccctccaaatgcctccacatagagcccaaatgcaggacttgccatgccctcgtcgccgcttttgctgcagaggtccaagtgcctctgactgtccacgacacggaggaggacgacggttctgatggctccaccgcgacctccgc

SEQ ID NO: 19434 - DNA, 245 bp, Glycine max
  Clone ID: 700873612H1
cgaagaaagacaatccagacagagaagaatagtctgtccgatctgaaaagcagcggagaagactaccctggctccgactaccgtccccaagacagaaaaaactggatgtcccatctcgaccctcagaaactccgcatcaaccaaatcgtctggcccggcacccacgactccgcaaccaacaaaattggcatccctctcctcactcgccccttcgcccagtgccaatccctctccatctacggcca

SEQ ID NO: 19435 - DNA, 252 bp, Glycine max
  Clone ID: 700873613H1
gaagttggaattggaccttatgtggaggtagctttctaccacaaaccttcaaaaacactattggtgacagatgctgttatttttgtcccaagacagccacctgagtgtataagcaaagaatccttattagcatcagcaaaaaatggcttggctgttaaacttcttagtaaaggaaaggaggtacctgacgagccagtagttgacgacaaaaggaaccgacaaaaaggatgggaaagaatggttctacagatc

SEQ ID NO: 19436 - DNA, 252 bp, Glycine max
  Clone ID: 700873614H1
gtcaacttagaggattaggtttgacccctaatcttcttgcttgtcgcagttctaaggaacttgatgacaatgtcaaggcaaagcttggtcaattttgtcatgtgccgctgtcaaacatacttactctccatgacgttccaaatatttggcacattcctttgctattgaaagaccagaaggcacatgaggcgatcctgaaagcattaaacttgctaggtgttgctgcagagcctaatttgaaggagtggactg

SEQ ID NO: 19437 - DNA, 252 bp, Glycine max
  Clone ID: 700873615H1
tattggaacgggatcaggaccttgggagtttctaaggagctcatgagtgcacatggcagacaccataattatagcttcatattaggcctaggtttcagtggtgtttgctgattacattaaagtgagataagctacccctaggttgttaaatcgcttgaaaaattcttctgaaagactagacaattctccctgcttgattgtgcttggggtatttggttgaaaaatctacctctgcatcataatatgtacaga

SEQ ID NO: 19438 - DNA, 210 bp, Glycine max
  Clone ID: 700873616H1
atctgcatgcacacacttgcatagttttgcgaaaccaagaatttttgaagggtagcatcaacaagaagttctggaaatggagatcaccaatgtcagcgagtatgaagctattgcaaagcagaagttgccaaagatggtgtttgactactacgcatctggtgcagaggaccagtggactctgcaggagaacagaaatgccttttccagaat

SEQ ID NO: 19439 - DNA, 248 bp, Glycine max
  Clone ID: 700873618H1
taaaaattggagaggacacttttgaggacttagatgaggttatggaccgctatgttgatcccttggtggctcacttaaagtcaatgttaaactatcgcaaattccgaaagggtacaaaagcagaagttgatgaacttttgaggatggagaaagctgagtatcctatgcgcatagtctatagttttggcatctcccatgatcatcctagcacattgatattaactcgtataagaagtacaaatccacac

SEQ ID NO: 19440 - DNA, 244 bp, Glycine max
  Clone ID: 700873621H1
gcttaaaagaaattcgaaatttgataaaccctagttagatttcagaattggaagaaaaaacagcatggggtttagagtgcgatatctgaatcccgtattccgaacttgcataacaaggctttcgtcttcaaattttcttcctccggtgctggagtcacttgattcccatccattagagtcttgtataaccgataatcccgcgttcaagatcccaaggatatggcatttgggtcatagtcattca

SEQ ID NO: 19441 - DNA, 245 bp, Glycine max
  Clone ID: 700873622H1
aaaggttctcatgacgtgtctgtcgtcaaataattatatgaattggtcaggaaatgtcggttggtgtgagcattgaccaattttcatcatagttacaattgttctctaaaactgttgtgtagggcatctttctattttggtctttcaaaatatatgcgactataatatgttgctccataatttacaaatacatgaatttgtaccctaaaagacatgcaatatcaaattggttcccccacttcccc

SEQ ID NO: 19442 - DNA, 245 bp, Glycine max
  Clone ID: 700873624H1
cagagattggaaaaatggcgttgagtatgactcaacagatcgggaccctagctggtgcgacggtgccggattcctcggccggagaatcgagcgcggcggtgagtgccgccgcgctgtggaagtcaccgacggcgagtctgaagtgcaaggtaatgaggacggatggctgcgcggaggggctttcgccgccgctgagtccgtgccagtcgccggtgctgcgggcggatctgtcggcggcgtgtcag

SEQ ID NO: 19443 - DNA, 244 bp, Glycine max
  Clone ID: 700873625H1
atccattctcatccactatcttagagactccaatggaggatccgtttagcaatttgccagatgaaattctaagctgcatagtttcttttctgccactagaaaccagcctcatatctactaggtggagagacctgtggaaccaagcccttgttagacatggaagcacacaagacgacgtagctagtgttgttgctggttttctgtctcgttttgaagagcttgatccattaagacatcctcgcaa

SEQ ID NO: 19444 - DNA, 248 bp, Glycine max
  Clone ID: 700873626H1
atctgtttcccgccatatatccaataagctttaaccatgtctgcctttgttggaaagtacgcagatgagcttatcaagaatgccaagtacatagccacacctgggaagggcatcttggcagcagatgagagcactggcaccattgggaagcgcctatcgagcattaacgttgagaacattgaggccaaccgccaagctcttcgcgagcttctcttcaccgctccagatgccctccaatacctctctgg

SEQ ID NO: 19445 - DNA, 246 bp, Glycine max
  Clone ID: 700873627H1
agaagggataaaaagagactctaccaaacagttagaacatcacaatacaaaagaaatggtaatgatgaaagagagtattattgaagtgaagcttggaaggagccaaatgtctatggtagaaggtgagttccaaggaacatggggtgtcaagagacgacgaagagaggttgctgcagcagcaagcagccgtgatgataaccaccaccagcagtcaccacagcaagaagttggtgaaaattcttcaat

SEQ ID NO: 19446 - DNA, 248 bp, Glycine max
  Clone ID: 700873628H1
atcctcttagtctgaaaatggatcttgccccagaagagcttcaattccttaccatccccgacatcctacgagaatcaatctcaatcccaaagcgttctccgaaaacattttacctcattaccctcagcctcatcttccccctctccttcgcgattctagctcattccctcttcacgcacccccttatttcccagctgcagtcccctttcaacgacccttcccaaacctcccacgagtggaccctcctt

SEQ ID NO: 19447 - DNA, 246 bp, Glycine max
  Clone ID: 700873629H1
gaacaatggcgtctctctctcacctcaacaaactcctctgcatgcccccgctcaactcttcaccctctatttcgccaccacgcagcagcgtcggaatttggaccaaacctgtcggaaggccgaggctactggtgcgtgtccgagcggtcacgagcgacgacgagtgggggccggagaaggaggaggcgtacggcggcggcgtagcggtggaggagaaaccgacgaagtgcagacggagacggagaa

SEQ ID NO: 19448 - DNA, 248 bp, Glycine max
  Clone ID: 700873630H1
aaaaattcttcccgctgattcggaacattctgcaatttttcagtctatccaggggttgccaaagggtgcacttaggaaaatccttttaactggatcaggaggtgctttcagagaatggcctgctgaaaagatgaaagatattaagcttgctgatgcattaaagcatcccatatggagtttggggagaaaaataactattgactctgctacccttttcaataagggtctagaagtaattgaagcacatt

SEQ ID NO: 19449 - DNA, 249 bp, Glycine max
  Clone ID: 700873631H1
atggcaatagccgcttcctcactgtcttccctctttgtctcctacaccaaattctccggccctactccgcgcttcacgttctcttaagtttccatctttgccctctcgtgttcttctccgaagagcattccggtgacggagaacgaagtgctccaagccatagccgactccgacggcaagaacctcccatgcgtcagaacctacgacaccgacctgtctcagctcactctcgtcggaaccgtcgatttc

SEQ ID NO: 19450 - DNA, 253 bp, Glycine max
  Clone ID: 700873632H1
gcatgcacacacttgcatagttttggaaaccaagaatttttgaagggtagcatcaacaagaagttctggaaatggagatcaccaatgtcagcgagtatgaagctattgcaaagcagaagttgccaaagatggtgtttgactactacgcatctggtgcagaggaccagtggactctgcaagagaacagaaatgccttttccagaattttgtttcgggcacgtatccttattgatgtgagcaagatagaccatca

SEQ ID NO: 19451 - DNA, 253 bp, Glycine max
  Clone ID: 700873601H1
gctgccacaaattgggtcaacaagtacgtgaaagcatactcacaaaacgtgaaattcaagtacattgcagttggtaacgaaattcaccctggtgactctttagcagggtctgtacttccagcacttgaaaacattcagaaagcaatttctgccgccaatttacaaggccaaatgaaggtgtcaacagcaatagacaccactttacttggcaactcttacccaccaaaagatggcgttttcagcagtagtgcaa

SEQ ID NO: 19452 - DNA, 141 bp, Glycine max
  Clone ID: 700873549H1
ataaagcctactggatttagcaaacaatatgcctctggtgaagaaggagctaaaaacaatgtatcgattgcaattagaggagaaaacagcctgaacagaactaacttagatgcgtcttcaggctgtgctcttactccatcg

SEQ ID NO: 19453 - DNA, 233 bp, Glycine max
  Clone ID: 700873550H1
taaatacaatggtggactagagacagaggaagcatatccctacacaggaaaagatggtgtctgcaaattctcagctgaaaatgttgctgttcaagtccttgactctgtgaatatcaccttgggtgctgaagatgaactaaaacatgcagttacatttgttcggccagttagtgtggacctttcaggtggtgaatgggttccatttctacgagaatggagttttcactagtgac

SEQ ID NO: 19454 - DNA, 203 bp, Glycine max
  Clone ID: 700873552H1
gagcccggatccgaacccggtggatggctgcgccggataacctgccgcagaagaatcactacagaggtgtccggcagcggccctggggcaaattcgccgccgagatccgcgacccgaacaaacgcggctctagggtttggctcgaaaccttcgacaccgccgtcgaagccgccaaggcctacgaccgagccgccttcagactc

SEQ ID NO: 19455 - DNA, 231 bp, Glycine max
  Clone ID: 700873555H1
gtttggttgacacagactttgagcagattggtgagttccttcaccgtgctgtgactctcacactggagatccagaaggagcatggcaaacttctcaaggatttcaacaagggtctcgtcaacaacaaggctattgaagatctcaaagctgatgttgagaagttctctgccttgtgtgacatgcctggcttcctggtatctgagatgaagtacaaggattaggttcaaccat

SEQ ID NO: 19456 - DNA, 257 bp, Glycine max
  Clone ID: 700873556H1
acttgagctcgggattcgagctcgagcgcttcttgcttcgatctactctacgtaagttccgtaccacccagtttccggttcaaccaataagtagataaataaatacataaccgaaccgaaccgaaccggcggatctcggttgttccatggaggctcacggcggcgggctccgccgagtccttgttctcgccttctgcgtcgctggaatctggtcggcatacatctaccaaggcgtgctgcaggaaaatgtgtcgacg

SEQ ID NO: 19457 - DNA, 233 bp, Glycine max
  Clone ID: 700873557H1
agccaagtgaaagagagaggagaagtcaaagacaatgtcagggatcattcacaagattgaggagacccttcatgtgggaggccacaagaaggaggaggagcacaagggtgagcagcaccatggtggagaatacaaaggggagcatcatggtgaacacagtactgaatacaaaggagagcatcatgttggtgagcacaagccggagcaccatggaggagaagagcacaaagagg

SEQ ID NO: 19458 - DNA, 231 bp, Glycine max
  Clone ID: 700873558H1
gagaagatgaagttcaatccacgtgtgtcgagcaaccgccgcaagagccgaacggtcatttcacggcgccgtcgagcgtgcggcgggtgcttatgagcgcccctctgtcggcggagctacggtccaagtacaacgtgaggtcgatcccagtacggaaggaggacgaggtgcaggtggtgcgaggaacatacaagggtcgcgaggggaaggtgactcaggtctaccgtcgaa

SEQ ID NO: 19459 - DNA, 232 bp, Glycine max
  Clone ID: 700873561H1
attgggagctatgtaattgaagagaagagctagatagagctagaatgacatggcttcagaggtttcagttgcggatagaatatggaagtgccttcctcgtagaatcgagtctcaaatcattcaggttccccaacagaagaatgactatgactgtgggctttttgtattgtacttcattgaacgtttcatggaagaggcactgaaagactgaaaatgaaagatttagatatgt

SEQ ID NO: 19460 - DNA, 233 bp, Glycine max
  Clone ID: 700873562H1
ggcctttcaggtggtgaatgggttccatttctacgagaatggagttttcactagtgacatttgcggtacacttcccaggatgtgaaccatgccgtccttgctgtggggtatggagttgaaaatggcgtcccatattggctcataaaaaattcatggggagaaagttggggtgagaatggctacttcaaaatggaattggggaagaacatgtgtggtgttgcaacttgtgcgtc

SEQ ID NO: 19461 - DNA, 237 bp, Glycine max
  Clone ID: 700873563H1
gctggattagcagaagtgagctgttctgggatgataagatatcaactgtcagtgctgacgtgatcaaactggcaggtagatcttagtgtttccctcatagtacagagcatggaaacaacaagatcggtgttatttattgtgtgtaacttaccttgtagattaactacccttgtgggtagaagtagaggtttgattcgactggtaaagggaaattgttttgagatggatttagatgct

SEQ ID NO: 19462 - DNA, 271 bp, Glycine max
  Clone ID: 700873564H1
cgtgtagtagcgtggaattgggatcgagctctagaaaaaaatctgaaatgccatgtgctactgttgagctctattgatattgtcggtatgattcttcgtacgaagaaggcagttgatgagcagattggatttgggattatgaaaaaatggcgtgcaggggtatgcttcgttccagcattctcatagaacccagcctactccgttctttaaatttcaattctaacaaacatcacatagcttcactcaaccaatggtcttgccggtttcattc

SEQ ID NO: 19463 - DNA, 132 bp, Glycine max
  Clone ID: 700873568H1
cattcctgagatgtgttgatattaagctggtttgcagagctttgccacaagaaggggactttgctctgtattgatggtacatttgcaactccatctgaaccagaaggcccttgcccttggcgctgatctgat

SEQ ID NO: 19464 - DNA, 230 bp, Glycine max
  Clone ID: 700873572H1
ctgcgtaatgctcaaagctttttgacagtttgagcatttcagacaagcatgggggctgatggatagaagattagtggagagggggggttagtgaaggttgagccaaaacccagcaatggtttcacctcaaaagtggttgatttgttggagaaattggtggtgaagttcttgtatgattcttcactgccccatcactacctcactggtaattttgctcccgtgagtgagat

SEQ ID NO: 19465 - DNA, 230 bp, Glycine max
  Clone ID: 700873576H1
ggcggccgctcgcgatctagaaaacagattgtgcgtctaattccaaattcacccataaaaatacttccttttgctcaccagccatatattatgatggagggagatgagaatgttcaagcatcatcaaagggaaaatatgttgaaagcttcaactgctcggaggcaccaaggaagaaaagcaagaagatagagaacaagaggaggtttagtgatgaacagataagatcact

SEQ ID NO: 19466 - DNA, 225 bp, Glycine max
  Clone ID: 700873577H1
cttggtcatccagtgcgagacgaacatcagcatcaagagatgcagctggacatgcactgccatacttcagcaatcgagatagggtcataagtgctgcttgagaaagataaacacatatctttggcccattatctatagctactttggattcacagagatgtttatcactaatctactttgctcttgttggcgggagaaatataaaacgtgttaaaggggaagatg

SEQ ID NO: 19467 - DNA, 235 bp, Glycine max
  Clone ID: 700873578H1
ggagttcggcacgagatggtggacggccaagatgtgtaaggagaattgacagttgctactcttagcgttgtgattctaacagaggagatagagtgggtaatcgttgtcacatgggtaatgtatgaacctcactgaactgttttcagagtctgataatacgtccaataagggcgaattagatgtgggttactatgatattgcatgagtatatcctgggttttgatatataaatctg

SEQ ID NO: 19468 - DNA, 233 bp, Glycine max
  Clone ID: 700873579H1
attcagaaaaactgttcagcacgagggatttggtgcattagacgagggtctggtgcccaactctgtaaaggtggtcccatcgatagcaattgcattcgtaacatatgaggttgtgaaagacgtgttaggagttgagatcagagtatccgactaaagtttgataaccacacatctgttcacctggtgtggtgtttcattagtttgtcttgttagtatgcaaggggatgcagaga

SEQ ID NO: 19469 - DNA, 236 bp, Glycine max
  Clone ID: 700873580H1
atcaagtttcccagggatgttggcaaggtcagtctcagagcgatcccaaacagaaagaagttccttttagtcaaagaacctcggcaaacggaaatggctcccttttccagcctcaggcatcatcgggtgttttagacagtcaagctgtaaagggtcaacattccagggttctagaaggaagttcaaaaatgggcagtggacttgacaggcaattgagttttcataaacagttttca

SEQ ID NO: 19470 - DNA, 226 bp, Glycine max
  Clone ID: 700873584H1
cttcggattatctagatctaaagaactagtcaaaacagagaaaaatgtaaaaaaagatatattatagcaactgaactattgtgaagcatgaaagagcaaaaatcttatttagtgatgaagcaataaaaatatacagataaatgaagaggtgaaagaaagagagattaaaaatcaatgatatagaattctaatttgtttacgttataaattaattcatatataaata

SEQ ID NO: 19471 - DNA, 226 bp, Glycine max
  Clone ID: 700873585H1
tttcagagacagcttcggctgctgatgtaagacgtgcctacaagaaactcggcttacaatggcatccagataagaacgtcgacaagagggaagaagcagaggctaaattccgagaaattggtgctgcttatgaggtctattatgattatctgatggttacctgacctttctcctacagtctctaatcaggacgtgcctggtcattgtggaatgggaaatgcgaaca

SEQ ID NO: 19472 - DNA, 225 bp, Glycine max
  Clone ID: 700873586H1
gctattactaagttcgtgtgcccttgtgtggcatagtctattatagtcaaattagtgtacttgaatttgagtcaagtctccaactgataatggaacttaattttggatttagactctacacagttttaacgcttgaaccctgaaacgttcaaaaaagaaaaataaagaaaggggcgtcccccaattaaagagctttttatcccgggaatagtttccggacggttc

SEQ ID NO: 19473 - DNA, 226 bp, Glycine max
  Clone ID: 700873587H1
cagagcaagacctacttggaagtgaaggggacatgagcagcaaaccagtgcccaacaattgatggtggattggactcatttgccttcaagccggggaaatacaatgccaagaagttgtgccttgagccaacttcattcacagtgaatgccgagggtgtggccaagaatgctccccttgagttccaaaacacaaagctcatgacacgtttgacctacactctggatg

SEQ ID NO: 19474 - DNA, 228 bp, Glycine max
  Clone ID: 700873590H1
cttatgggcagattcacggcgcacgatccctagctcttatccgtgccgtggaatctcgccgtccggctgctgctgttagtcgacggagctctcctactattcaaaacagaagctatgaaatcgttcaatataaatggaaccactctttctgttgcactctacactgacgtaacaaattcaaaagaactcttggaaagtatgcaagccgggacattggagccagaagtt

SEQ ID NO: 19475 - DNA, 227 bp, Glycine max
  Clone ID: 700873592H1
gggcaaacaagtgagcatgcacaacttatcagaagctttggtgtttatcgggttatagttgctgtaaataagatggatgctgttgtgtactccaaagatcgatttgattttataaggcagcagctgggagtttttctccactcttgtggtttcaaagattcttcgctatcttggattcccatgagtgctatggaaaatcaaaatttggtggcatccccttctgatgc

SEQ ID NO: 19476 - DNA, 226 bp, Glycine max
  Clone ID: 700873594H1
aaaaaaaaggaaaggaacttgagccacattttgtccctggtggactcaagaagagtctttcataggacagttaattataattatagcctgaaataagggttcactagcaatggcctcaacctcttctgctctcactatatcctcttcttccacccttcatgattgcaaggctccaagacagtcaccagctgcttcaccacaatgtgtgagccttccctctcccctt

SEQ ID NO: 19477 - DNA, 239 bp, Glycine max
  Clone ID: 700873548H1
agcgtctgaaagaaggcacatacaaggggaagagattcaatgccatttgccacttttttggttatcaagctcgtggatctctgccatcaaaatttgactgtgattacgcatatgtccttgggcacatctgctaccatatactggccgctggtctaaatggatacatggcaactttaactaacctgaagaatccagtaaacaagtggaaatgtggggctgctccaattgcatctatgatg

SEQ ID NO: 19478 - DNA, 233 bp, Glycine max
  Clone ID: 700873595H1
cttatcatgagtggtttcataaaatgtacattcggaactaacattgaactcctattctgtttagcaaggatactttccttcttttacccaaaaaaatatatcatttcttaaacagacttccaaaatttatgaattatcatttttaatacctctgagaattggcttttactgtctagaaagttcaatagccgatgctgaaaatctcatctatccaatgtttatctgttgtatat

SEQ ID NO: 19479 - DNA, 233 bp, Glycine max
  Clone ID: 700873596H1
gcagctagtggattgtgctggccgtttcaacaactttggctgtaatggtgggttggcatcacaagcctttgagtacatcaaatacaatggaggacttgagacagaggaagcatacccctacactggaaaagatggtgtatgcaaattctcagctgaaaatgttgccgttcaagtcattgactcggtcaatatcaccttgggtgctgagaatgaattaaaacatgcagttgcat

SEQ ID NO: 19480 - DNA, 235 bp, Glycine max
  Clone ID: 700873512H1
ctcgagctacagatttggtctctcaacgactcctccgcgagagattagtattcaatgtttttgtttggggtaaatcccggggttgagtcgttgcatacatcacggctattctaagagtgtctcgcaccctcattcatggccgatctgtacgacggatgactagtagtttcgtaactgccgttaacccgtcgccgcacggtgagcgtggtactttgccttctggaggtggtagccc

SEQ ID NO: 19481 - DNA, 240 bp, Glycine max
  Clone ID: 700873513H1
gtgtggtctttgctagatttgggagatgtctctgctctcagatctcatcaatcttaacctctccggtatgcaccgagaaggtgatcgcagagtacatatggatcggtggatcaggaatggacctgaggagcaaagcaaggactctcccaggaccagttagcgacccttcagagcttcccaagtggaactatgatggttccagcacaggtcaagctcctggtgaagacagtgaagtgattt

SEQ ID NO: 19482 - DNA, 240 bp, Glycine max
  Clone ID: 700873514H1
ctctcttctcttctttgatctccgttaccctttttgttttctcaacagagagagagagagagaatctttcgaagttcgtttgcgtgtgtcgtgtggtcagtcaccgatggcagcaccacctgcgagggcacgtgccgattacgattacctcatcaagcttcttcttattggcgatagcggtgtgtgacagagttgtctgcttttgcgattttctgatggttccttcacaaccagttttat

SEQ ID NO: 19483 - DNA, 149 bp, Glycine max
  Clone ID: 700873515H1
gtggagcaactatgtaattgtacactgcctgtatattactgatgatgcataattcaatataaaggcagtggagcaactatgtaattgtacactgggcactgtgttatataaattatgcatcatcagtaatatactttggacttctcgtt

SEQ ID NO: 19484 - DNA, 253 bp, Glycine max
  Clone ID: 700873516H1
cggctcgagaactaatctaccttaagatccaaattttatccattaatagatggagcgtcgatcgcagctagatctagagggaaattatgagcattacgttcatgcattacttccataccaaggttagctcggttaataatatcagcccaggtattaattacacgaccttgactatcaactacggattggttgaaattgaaaccatttaagttgaaagccatagtgctgatacctaaagcggtaaaccaaatac

SEQ ID NO: 19485 - DNA, 242 bp, Glycine max
  Clone ID: 700873517H1
cggctcaatatcacgaagtctgacaatgaacctagtgaggatgatagagatcacccacgtacttggtccacgaattggagtaccagtggacctgtgatgacaatgagttcaccaatgcaagtttatacttacaagattcttgaagctgatctgctacaagtggccaaagtgatggggcttgaacatgtaatagatgtgactgattacatgggaactgctgaagcgattctagcatccagttc

SEQ ID NO: 19486 - DNA, 231 bp, Glycine max
  Clone ID: 700873518H1
gtcagcaagttgaatggtattaatgtggatcttaatgggcaacctgcttccactgattatgatgaggctgatgaagaagaggaagacaatgctggagcaagagattcctctcctgaggatgcttgagaatcttaaattgttcctttgaccaaagggtgaatggccaatgaattccttcctgcactaaaactgtcgtgttgaggacttgacactgttcctggttttgatgga

SEQ ID NO: 19487 - DNA, 235 bp, Glycine max
  Clone ID: 700873520H1
ctgtattctatagatagttgcttgagctgtgcaacattgattttctgtacagcacgtttacttgaagctgcagcaattgaggagggattcttcatctttggattcgcttttggtgcctcggagtcagagctgcaaggaaagtggagatgctgggatgaaagctgagttttgtgggaaatggctactttagttgaaccccccaacagaattaagcctaaggggaagcattattata

SEQ ID NO: 19488 - DNA, 236 bp, Glycine max
  Clone ID: 700873522H1
tgcacattcttcatcacttcatgcagcatttcgcgctcccttagctagtttttaccaatggctgctgcggttagtgctgcagtctcttttgcatcgaccaagtctacctctctcccaagcaggacctccatcattaccccagagagagttgtattcaagaaggcttcattgcaatacagatatgtttgtagcagtggaagggtagtttccatcagagctcaagtcaccactgaggc

SEQ ID NO: 19489 - DNA, 235 bp, Glycine max
  Clone ID: 700873523H1
agtacaacaactcactcactaagctaaacaatttcatcaagcctgccatggcttcctcgtgtgcttcctctgccattgcagctgttgccatctccacaccaagttcccagaagaatggatcactcttgggaagcacaaaagcttcttttcttagtgggaggaaactgaaggtgaacagttttacagcaccagttggagcacgatccagcactacagtgtgtgcagttgctgagcc

SEQ ID NO: 19490 - DNA, 235 bp, Glycine max
  Clone ID: 700873524H1
ctctctccccccctctttctctctcacacaaatgtctaaaataacaataacctctccaaaacactgtgctgacaaagaaggactaaaaatcaagaactacaagaagatctacttcactttctcagcatttttcatcacaatcctactactaatacttgttatatggctcatcctccaccctgcaaagcctcaattctccctcaaagaagtcgacatcttccaacttaacctttca

SEQ ID NO: 19491 - DNA, 232 bp, Glycine max
  Clone ID: 700873525H1
caggccactactcccgaatatagagcatatcaatggcaagttctcaacaacagctttaaatttgcacaggctctgagtgagagaagctatgagcttgtctctggtggaaccgagaatcacctggttttggtgaatctgaagaataagggtattgatggctccagagttgagaaggtgttggaagcagttcatattgcagctaataaagacactgttcctggagatgtgtctg

SEQ ID NO: 19492 - DNA, 237 bp, Glycine max
  Clone ID: 700873526H1
gtgaggtatccgccggcggcaccgccgctaccggcgccgtacgtggaacaccagaaggcggttacgattaagaacgatgtcaacatcaagaaggagacgcttaggattgagcctgatgacgagaatcctggctgttttctcgtgtcgtttacgtttgatgccaccgtttcgggaagcatcaccatacttttctttgcaaaagaaggggaaggttgcaccctaaccccaatgaaggaa

SEQ ID NO: 19493 - DNA, 170 bp, Glycine max
  Clone ID: 700873527H1
ccgtctccactgtcggagctgtcaacagagctcttttgaacctgaatgggtctggacctggggtttcagctcccaggttcatccttctttgggagcagcttgaagaaggttattggctcaagggtccccaacacaaagatttcctctggaagcttcaagattgttgctgt

SEQ ID NO: 19494 - DNA, 237 bp, Glycine max
  Clone ID: 700873528H1
ctgaaattaaagatgtagactgagtcttcacagctataacatgttggatgactacactgaacaccaatctaattaggttaaagaacaggccgtggcttgcattttccgttgtattgaagacacaatgaatgacacacattcaagagagaatagtgtgatgagcaaagtaacacattctagagaggagtgtggtgagcagagtaacattgcaattgtaatataagttttgacagtaat

SEQ ID NO: 19495 - DNA, 249 bp, Glycine max
  Clone ID: 700873529H1
tcggttcgagatgcattgtgcgggaatagtttatgctgatgtaccagaagctctagaaaagtggcacgccttgggtataaaggtatacatatattctagtggtagcagattggctcaaaggctaatatttggaaaaaccaaccatggggacctaagaaaatatttatctgggttttttgacactacagtggggaacaaaagagagacacgcagttatgttgaaatttctgagtcactcggtgttgaaaa

SEQ ID NO: 19496 - DNA, 239 bp, Glycine max
  Clone ID: 700873530H1
gggcaaatacttttgtggcagaggtacttggagttgatccaagagaggttgatggtccagtggttggcggtcatgctggtgtcacaattttgcctcttttgtcacaggttaagcctcgcagtagcttcactgcagaagaaactgaatacctgacaaatcgcatccaaaatggtggaactgaagttgttgaggcaaaagctgggacaggttctgcaacactatcaatggcatatgcagct

SEQ ID NO: 19497 - DNA, 240 bp, Glycine max
  Clone ID: 700873531H1
gagagatagcgagcagtgtcagacacagagacaggggtttgggattcgagggattgacgctgcgtctcttcctcttctctttcgctcgatccctcattcctaatcctccaatccaaccacctcagcctcacactcacatatacacatatctgaacgcgtatcgtccctcctatggcttcaaagcgcatcctcaatgagctcaaggacttgcagaaagacccatcaacttcttgcagcgct

SEQ ID NO: 19498 - DNA, 224 bp, Glycine max
  Clone ID: 700873533H1
attcggctcgaggctcacttgaacgatagagcaaagtgagggaaggttgactttcaagaggattcccaacagtagctctatctaattaaggagagtttgtggttgccttatctatgtggtacgtctgaataacatagactgtatgcatgtctatgcgtaattattgccgaagcttctacactattgtatttggatactctcggtttggcatatgattgaagtgt

SEQ ID NO: 19499 - DNA, 232 bp, Glycine max
  Clone ID: 700873536H1
gttgaataatatctgctgagcattaaaagttccccaaccatgaaggcaatccttgttttcagtttactctgggcctctattgttttccttcccagttcaactcttgctcgacaactggaggtggtgacaggcggtacccagaaccctaataatcccgcttttaaatgtagccgcggcggcagttataggccttgcgccccatcgaactcgccaccaagaccaccatgtgatg

SEQ ID NO: 19500 - DNA, 232 bp, Glycine max
  Clone ID: 700873539H1
caagaagactgtgcgggagaatcctaacgagtcttccgcagaaaaaataggaggtggaagccattcgctaactgagaaggaaaataatcaagttgaggcttcacctactcagaagccccaagtttctgaagatctacaggagaataatacatctaaagatgaaagaaggtcaactcctgaggtaaattcagtgactgatttgtccaaaaagggtgctacagctgatgttggc

SEQ ID NO: 19501 - DNA, 248 bp, Glycine max
  Clone ID: 700873540H1
cttgggattcggctcgagatttccaaagaggttctgtagatgaattcatttttgagggtcctaaaattgcacgacttaaggctcttttggtcagtgttgaatcaggtcaggtcagtggcgcctaggaagtgtatccttaatggttattaattgtgaagggcaaccatctggaccggaagatggggtaccaacgtacactggcttccagtatgactttcagattgatgatgtgttgcttggtgagggag

SEQ ID NO: 19502 - DNA, 235 bp, Glycine max
  Clone ID: 700873542H1
attgtagctgcattctagcagcaacaaacaatttctcggacgaaaataagcttggacaagggggatttggtcctgtctacaaggggaaaattccagggggagaggaagtagctgtcaagaggctttcaagaaagtctagccaaggtttagaggagttcaagaatgaaatggtgctcatagccaaactgcaacatagaaatctggttagactattggggtgttgcattcaagggga

SEQ ID NO: 19503 - DNA, 235 bp, Glycine max
  Clone ID: 700873543H1
gttgtacttgcatgttggcggtgttgcattctgcggtccgaatgccttggtggttacgctagagagggtgctgggaaacgagactgttgctgagctattgactacaaataagttgtccgaattggcgtggcttggcattgtatctgatgtatgagaaagagcaggggacgaaatctttctggtatccgtacatcagggatcttgatcgccaacgaggtaggggccaactgtctgt

SEQ ID NO: 19504 - DNA, 256 bp, Glycine max
  Clone ID: 700873545H1
tttagctcgtagtgcggctcgagctgttgtgggggtgagagattggggtgggtgtcatcagagagatggtggcacgcattgctgtttcttctccaaagtcgacactgttgtagaaccccatcgtgttgtgtgagtcaagttcaagttgggttggggggtcgttgaagggtctttgcttcagtctgaaacgaaggcaacagagaggagaattgaccaatttggttgttgcttcatccacctcaggtgttagaaatag

SEQ ID NO: 19505 - DNA, 241 bp, Glycine max
  Clone ID: 700873511H1
gcatattcaagaatgaaacagtcagccgtaaagcatttgctttacaatataggctttggtccatttgtgctggctggtactacagttcccatcccgttcttaagggcaacagatatatcaccaattgctctcctgtcagacaatgtacttggtggcatacaacaggatactggtggaactggaacagtgggagcattgcaagagctttttagtggtgacggacagtccaaaaagggccgga

SEQ ID NO: 19506 - DNA, 228 bp, Glycine max
  Clone ID: 700873546H1
caagggtccaactctgcttgatgcacttgaccagattagtgagcccaataggccctctgacaagcccctcaggcttccccttcaggatgtgtgcaagattggaggtattggaactgtgccagtgggacgtgttgagaccggtgtcttgaagcctggaatggtggtgacttttgcaccagctggactgacaactggagtcaagtctgtggagatgcaccatgaatctct

SEQ ID NO: 19507 - DNA, 250 bp, Glycine max
  Clone ID: 700873470H1
gcaactccgcgacatcggtgcgcaggccgtcatcgacgccggtctagcggaccaaacacacattgagtacctatttgagagtgtctggtacccgtggatccctacaccatactgggcaccactaccgaacgctcctacatctccgtcacggcttctagcatggtccagctatcccgctgtaccgtgaccctccgcagtgcctccatgtctgatagccccctcattaatagcaattactatgccgacccca

SEQ ID NO: 19508 - DNA, 256 bp, Glycine max
  Clone ID: 700873472H1
caaggacttccacacatactccgtccaatggaatcctgcaagcatcatattctctgtggacgggaccccaataagggagttcaagaatttggagacaaaaggggttccattcccaaagagccaacccatgagatatactctagtctttggaacgctgaggattgggccacaaggggtgggcttgtgaaaacggattggagcaaggccccattcacagcctcatacagatacttcaattcccaaacttcttcctcca

SEQ ID NO: 19509 - DNA, 259 bp, Glycine max
  Clone ID: 700873473H1
tgatctcgagccgaatcggctcgagatcgtgaatgcgtataaaaggacactaaagaaattagcgacaaaatgttgggtgtgttcagcagctccatagtgtcgccgccggacgagctcgtagccgccggcagccgtactcgtcgccgaagatgacggcggcggcgctgcggaacggttcgaggagaagaaccccaccgccgtttcggtggaggtcggagagcatgtccagctcgcttatacccaccacaacgagtcgccg

SEQ ID NO: 19510 - DNA, 257 bp, Glycine max
  Clone ID: 700873474H1
cggctcgagcaaggagcagaattctgtgacattatctaataatggacctgacgaccaagttttattggctgagcaagcgagttctgctgcaattgcatcatctgtcacaagccattcagttaatcataatgaatgattcagaacaattctactgattctgttttgtctgaagtgttcacctcttctgcgttgacagcttcaacaattgcaaagacatcagagattactctcctcgatggaaaatcattattagcttg

SEQ ID NO: 19511 - DNA, 258 bp, Glycine max
  Clone ID: 700873475H1
aaaattgctctgccactcttaacggcaaccacaagctcaccgatgctgttcttcctccaacgaaagactggagaaaagaaggtatagtgagttcagttaaagatcaaggcagctgcggatcatgctggacattcagcacaactggggctttagaagcagcctatgcacaagcatttgggaagagtatctctctttctgagcagcagctagtggactgtgctggccctttcaacaactttggctgccatggtgggttgc

SEQ ID NO: 19512 - DNA, 257 bp, Glycine max
  Clone ID: 700873476H1
ggctatgacccttgtgattccaattatgtagaagaatacttcaatagaaaagatgttcagtcatcttttcatgcagatactaaaagagacactaacgtagcatggaaggtttgcaataattccatattgaggacttacaacttctctgttttctcggtcctacctgtctacactaaactcatcaaaggtggccttaagatatggatttatagtggagacgcagatggaagagtgccggtgataggaacacgatattg

SEQ ID NO: 19513 - DNA, 258 bp, Glycine max
  Clone ID: 700873480H1
gcagcttttcagataataaacgatgagttgatgttggatggtgcaccaaggctcatcttggcttcgtttgtgaccacttggatggagcctgagtgtgacaagctcataatggcttcacttaacaaaaactatgttgatatggatgagtatcctgtcaccactgagctccagaaccgttgtgttaatataatagcaaatctattccatgctcctataagtgaagaggagactgcagtaggtgtgggaactgtggggtca

SEQ ID NO: 19514 - DNA, 257 bp, Glycine max
  Clone ID: 700873481H1
gaattattgttcttcacttgcatcaaaacttgcaactatcacttggccttaaaaatggtacgagataggaaagaactagcttttgcacgagatgggaataacggtgaggagaaaaagggcggcatagctttgcatctcttggctcaaaatcaaaagcctttggatttttgttgtcattgccaccaacatcaaattcccgtcaagataaaccctggcatgaaacaacacgtgtttcttcaattggttaattttctctg

SEQ ID NO: 19515 - DNA, 224 bp, Glycine max
  Clone ID: 700873482H1
ctttatttttcctattctatccttctcgcttcttaggttagccgagcgtcatcgatccagaaacgataaaggcagtcataaagtgagaatggatctgtgtgctgctcatgcggagaaccttttccacacaatcccccctttcacagacccattccctccaatttgggaaggagcagagtgtttgagatcactgtttccgaggagaaacccttactctagagggt

SEQ ID NO: 19516 - DNA, 249 bp, Glycine max
  Clone ID: 700873484H1
gacgtatggtaacatgcttgtccaagaacaagagaatgtcaagagagtccaattggctgacaagtacttgaacgaggctgcacttggaaatgctaacgaggatgctattaacaggggaactttcttccatcttgaattggaggcaaagcaaacttggcaagtaaatatttctgttcctgaaggttgtgctgatccaagtgctagaagttgtgatgggacttgcgtgtaacattcttagaattctcaatg

SEQ ID NO: 19517 - DNA, 255 bp, Glycine max
  Clone ID: 700873485H1
ctttcactttaccaactcctaacaatttctctctgtttccttcttcaccgcatcaatggagttggacggcgttctcctcggcatgtgcaaccctctcctcgacatctctgccgtcgtcgacgacgctttctcgcaaaaatacggtatcaagttgaacgatgcgattctcgctgaggataagcacaaacctatgtatgaagaattggctaacaatcctaatgtggagtacattgctggaggtgctactcagaattc

SEQ ID NO: 19518 - DNA, 210 bp, Glycine max
  Clone ID: 700873488H1
gagagagacaacagcaagagcaagagctggctaagcatattgcagaggaggatgacgatgatttctgataattgttttttttcaccctatgaattgctatctggataccttcatttccaacgtttgctcacttttccttttgaagaactttcattatcatttcctttttcaaaaagtgaatttttcatttcctaaaaaaaaaaaaaaata

SEQ ID NO: 19519 - DNA, 254 bp, Glycine max
  Clone ID: 700873491H1
tgatcatggtagtgtaacacatataccttcatggggaaaattttggctttcggtacttggtgtagttgatcggtgtggtattaaccctttgcccccagagttctggatccttcctactttttccccaatgatccagctaaaatgtggtgctattgtcgattgatatatatgcccatgtcttactgatatggaaaaaaatttgtgggttcaataacgccattagtcttaaacttgagagaagaactctttactca

SEQ ID NO: 19520 - DNA, 252 bp, Glycine max
  Clone ID: 700873492H1
taaaaccacacgcacccgcgacgacacaccgtatcaccaaacgacaacaacaaccacgcgcgtttcgcacctcacgaactcggagaagcaaacgcagcgtcgtcgattcgtcactcgcaactcgggcacgccggcgatggcgtcggtccacagcaccgtcgctccccgtaccttcctgccgtcaattcccaagccgagagctcctcttcacgccgcaaagttcgtcgccggcggcgcgcacaactttcggag

SEQ ID NO: 19521 - DNA, 252 bp, Glycine max
  Clone ID: 700873493H1
agaaacttctgttgaggatggggaggaggatgacagttgcttgccttcagacttggagggtgcagtgcggcaatcaagtgaggccacggccatatttgtatcttcaggagggataagagccatagttgacttttaatcccccaactgcaatttttggatgacgaaggcgcgcaggtggaactctgggaattgtcaaggatttttttggatacactcattgaaaaaactaaattccagagagttaaagccata

SEQ ID NO: 19522 - DNA, 255 bp, Glycine max
  Clone ID: 700873494H1
cggctcgaggagaaaactttcaatttctggttttctgaatttcggatggttgactctaattttaggagctggaaaaggtactaaatctaaagttggacgaaatgtggatccaaggattcagtttttggatcaaaggtttctctttgctggccttaatatctgtaatttccgctctggaacccgaactgggatcgacccgcgtcgtctttcagacaaagtatggagatattgaatttggtttctatccaactgttg

SEQ ID NO: 19523 - DNA, 257 bp, Glycine max
  Clone ID: 700873495H1
atactttagggctgcagtttcgtgctttcccgccgccgctacactgcgaccgtcttccccgccgtctccgccagagatggcagaagaggattcaaagcctctggaactacatctccgaggtcattctcaagagaggaagaacaccgaagcatgggctttaaggaaaaaagaacagttccagcaaaagaaataccaatccatcaagaagccggaggatttcatccacgagtatcgcaacaaggaagtggaccttataa

SEQ ID NO: 19524 - DNA, 253 bp, Glycine max
  Clone ID: 700873496H1
atcttgttgaaggcaatatatctgtttgcatttgggattccaattttcatcaacagtgattaccctactcctcacgtgaagtggaacttgtgggttgcccacggagctgttgcttacccttgtttatggtttcatattgttcatgtatcatgctaggtggagagaaaggttacctgcaaggcctgcatactacaagtatgttactattatgctcatcttgaatgcaattgcactgtttgcttgtggtattaca

SEQ ID NO: 19525 - DNA, 227 bp, Glycine max
  Clone ID: 700873502H1
gttagcacggaattcggcccgcgatctctctatagcaggtgtacataagcataatattcgttggtagtgatacatccaagaggttttgactttgaatgcagggaagatggattctttcaatgcaacaggaagacaccatctctttgttccatggccggttaacattccggatcagatcatccgggccatgaacagaaacaacgagtgactaccgttctccagcaatt

SEQ ID NO: 19526 - DNA, 254 bp, Glycine max
  Clone ID: 700873503H1
cttccgttagctcggacatcctcgcaagtcgcatcgcacacgctgtgaatgccatcacggcaactggcggcaggaaacacagttgacgagtatgattaccttccatacttctattcccgttcattcgatctgtcttggcaattctatggcgacaatgtcggcgacacagtgctattcggagacaacaatcctgcgtcttcaaagccaaagtttgggacatactggattatagacgggaaagttgtcggggtctt

SEQ ID NO: 19527 - DNA, 249 bp, Glycine max
  Clone ID: 700873505H1
attcggctcgagcaggtcttggacagtcaagagtgagttagcgtagaaagctgcagccaaagcagccatcagagcacaagaggaagctgagaagaagcttaaggaccgtgagaagaaagcaaagaagaaatcaggcactgcagccgtggccaagcctgaggacgaaccgaaggatgaagttgtcgaggttacagagccagagaagattaacgattatgtccaagccccggctccagtgaaggaaaaggt

SEQ ID NO: 19528 - DNA, 237 bp, Glycine max
  Clone ID: 700873507H1
caatacaataatcactaactgaatattcgatcggagatgtctgccgccgccgaagaagctaacgctcccgccgtcgaaaagccggttgaggaggtgaaggcgccgaaccccgcgaaggagaagaaacctaaggctccgaaggaaaagaagccaaaacaggccaaaacagcttcacatcctccatattttcagatgattaaggaggctttgatcgctttgaacgagaaaggaggatcg

SEQ ID NO: 19529 - DNA, 251 bp, Glycine max
  Clone ID: 700873509H1
attcggctcgagcataaatatttggtttatatacacatatgtacagaacatcctctataacttagcttatacaatatacacaacaaaaggctcggtttcgcacagcacacttccctctccaatggaaaatcaattcccagttatcagtgattcctactgtgttccttatcttatcaatctacgaatcaatacagaaaaaggtatcacttacgacgcaaacaatgtccgtcacttttatatcaaagataaat

SEQ ID NO: 19530 - DNA, 249 bp, Glycine max
  Clone ID: 700873510H1
tcggctcgaggcataaacatgaagagaatgttgcgtctgttcgtcgacggctgtctcatgaaaaagacaaatggttaagttcctgtcctgacaccttaaagatcaacatggagtttcttcagcgttgtatatttccacgctgtacttttagtatgccagatgcagtttattgtgctatgttcgtacacacactccattcccttggaacccccttttttaacacagtcaatcacatagatgttcttattt

SEQ ID NO: 19531 - DNA, 256 bp, Glycine max
  Clone ID: 700873469H1
caaacttgttgttcacattaccaagaacttcatgaccctgcccaacatcaaggttcctctcattcttggtatctggggaggcaagggacaaggaaaatcttgtccaatgtgagcttgtctttgccaagatgggatgaaccccatcatgatgagtgctggagagttggaaagtggaaatgcaggagagccagcaaaactgatcaggcagagataccgtgaagccgcagacttgatcaagaagggaaagatgtgtgct

SEQ ID NO: 19532 - DNA, 265 bp, Glycine max
  Clone ID: 700873431H1
ccaacaacttcatgaccctgcccaacatcaaggttcctctcattcttggtatctggggaggcaagggacaaggaaaatgctttccaatgtgagcttgtctttgccaagatgggaatcaaccccatcatgatgagtgctgggagttggaaagtggaaatggcaggagagccagcaaaactgatcaggcagagataccgtgaagctgcagacatgatcaagaagggaaagatgtgcgctctcttcatcaacgatcttgatgcaggag

SEQ ID NO: 19533 - DNA, 264 bp, Glycine max
  Clone ID: 700873432H1
ctcaatatccgccattgaattcttcttccatttctcttttttctgcatacccatttcgtttttcttcccaaatggccctttcttgctccaaagttttaagcttttatctctcgcccgttgtgggtggtggtgatgttccgaaaagctcactttttcttcttttttgggtctttctaagggtgttggtggaagcaggagctcgagggtgtgtgctgcttcaaatgcacccgcaccactcgctggggtcatatttgaaccatttca

SEQ ID NO: 19534 - DNA, 264 bp, Glycine max
  Clone ID: 700873433H1
gttccttggtattgagattggggtccttgttggggtttgggtttcacttgcgtttgtgcttcatgagtcagcaaatccacatattgctgttttaggtcgtttgccagggacaactgtttataggaatgttaaacagtatcctgaagcatatacatacaatggaattgtaatcgttcgtgttgatgctccaatttattttgcaaacacaagttacatcaaggacaggttgcgtgaatatgaagttgatgttgatcggtctaaaag

SEQ ID NO: 19535 - DNA, 259 bp, Glycine max
  Clone ID: 700873435H1
cacatattcaatggcttcctctcttctctctccatcattcacttccttcccccgcataaagaaggatgtctctctctctgctttcacttctcagcgatgcttcaaagcgcttccaaggagaataatccgttgtgcttggcggcgcctcagcgccaaccttccaccactggatcagtgaagactgcaatgaccatgactgagaagatactggccagagcttctgagaaggtacagctgacccctggcgataatgtttggg

SEQ ID NO: 19536 - DNA, 261 bp, Glycine max
  Clone ID: 700873436H1
agaacactaccctgaacatagtaaagaagccagtgctaggatttgttagtgaagcaatggctcaaaccatgttgctcatgtctagtgtctctagcagttattccgtggatttgaagaaagaccttttcctccaattgcagagtcaaagtttaaggcctaagttctctcagctctcattcaacccacttccatcatcaacttcttccttttcttcaccccgtacattcacaactctggccctcttcaaatctaagaccaaag

SEQ ID NO: 19537 - DNA, 260 bp, Glycine max
  Clone ID: 700873438H1
caggtatgtggttggttgccgcagtaaagtggataaggaaaaattgacttccgggacaagggtggttctcgatatgacaacactcaccataatgcgagctcttcctcgagaagttgatccagtggtttacaatatgttgcatgaagatcctggtaatatcagctattcagctgttggtggcttatctgatcagatcagggaattgagggagtcaattgaactacctctgatgaatcctgagctctttcttcgagttggaa

SEQ ID NO: 19538 - DNA, 259 bp, Glycine max
  Clone ID: 700873444H1
ctggactaccacgatttgttgttgccattagtaaaggatgtgagagaacttgaaggcacaacgctatatggatcaagggcattgttcttgctaacccgcgaaggcacattgagacctctggctattgagctgactcggccaccaatggacggaaaaccgcaatggaaggaagtcttcacgccttgctggcactcaactggtgtctggctttggaggctagccaaacttcatatcctcgcccatgactctggttaccatc

SEQ ID NO: 19539 - DNA, 262 bp, Glycine max
  Clone ID: 700873445H1
aagaactaaaagctattattaaagttattcccctgtggtctagagggatcatgatgtatcttaacattggaggctcgtttggattgctgcaagcgaaatcccttaaccgacatatcagtccaaatttcgaagttccactgggtctatgagtgtaatcatgatatttacaatatttgatttggatagctctttatgatcgtgtcattattcctcttgcatcaaagcttagaggcaaaccggttaggatcagtgccaagagaag

SEQ ID NO: 19540 - DNA, 260 bp, Glycine max
  Clone ID: 700873446H1
ggttgcagctactgttatgcttatgcgactactaaattaaaacctactcactcactctctctaacactctccaaccaccgtcgcatttctgcgtcacaacctcactcttccaccttctccatcatcaccaacctcttcttcttccaaaaccctaatttcatcacggggaacactctcttcctcaggatgcagagattttgctcagtaagtggcttaagtaagaacaaagcactggtggagaggttgcagcgctatggagt

SEQ ID NO: 19541 - DNA, 251 bp, Glycine max
  Clone ID: 700873447H1
gacctgctcggagctagggagattgcggtgcgtgcttgggacgaggccctcaacagccaacctgaactgctcatttggaatgttatgggcatgatgaacaactgctggttcagagtgataaccaatggctgcaggcgccacaagggtgagataggtatagtgtttgaacaccccacccaaccaggcacctgatccggcggatggatggcaaaagaaaaacacctgagagaaatcatctgagtccaacccaa

SEQ ID NO: 19542 - DNA, 263 bp, Glycine max
  Clone ID: 700873448H1
atgtgaatcaaccccatcatgatgagtgctggagagttggaaagtggaaatgcaggagagccagcaaaactgatcaggcagagataccgtgaagctgcagacatgatcaagaagggaaagatgtgcgctctcttcatcaacgatcttgatgcaggagctggtcgtcttggtggaaccacacaatacactgtgaacaaccagatggtgaatgccactctcatgaacattgctgataaccccaccaatgtgcagcttccaggtat

SEQ ID NO: 19543 - DNA, 259 bp, Glycine max
  Clone ID: 700873449H1
gcgggaaatggaactggtcataagcatgtatcaggagcttctatcagtggcagtgcaccggctgctaaggcacaggttgttggttggcctcctataagatcatttaggaaaaactcattggccaccacttcaaagataatgatgaagtagatggaaaaccgggtgcagcagcactctttgtgaaggtcagcatggatggtgctcccgatctgaggaaggtagatcgaagaaattatacaatgtaccaggaactgtcttc

SEQ ID NO: 19544 - DNA, 259 bp, Glycine max
  Clone ID: 700873454H1
cgttgccattctcatcctcttctttctctctctacgattgccatggatccctacaagcaccggccatccagcgccttcaattctcccttctggactacaaattctggtgctcctatttggaacaacaactcctctggaaccgttggagctagaggtccaattctgctggaggattatcatcttgtggagaagcttgcaaattttgatagggaacgtatcccagaacgtgttgtccatgccaggggcgctagtgcaaagg

SEQ ID NO: 19545 - DNA, 250 bp, Glycine max
  Clone ID: 700873456H1
ctgttatactgctaaaggaccctatgagtggtttcaagatcctctccctagtgatcaccttttggggatttggctcatatatttatggaagttctaaaatatggccatagactccagttcttaagatgctctcttgagaaattctaaggaggtgattgttgtaagatgtatgattaaatatccgtacataaatattggtaatgttgttgtttggtaaatcacaaatatgattctttatatttaatgcttt

SEQ ID NO: 19546 - DNA, 261 bp, Glycine max
  Clone ID: 700873457H1
attgattccagttccaatggcctctggcactagcgccttgatcggaaggaaggttcttgtctcacccccaacgcccaaaacaaccaaatcatctactccgctacaattcctgttcaagagaagcatctgaaatgctacaattcacaagctgctctagctacccttatcttttcctccgcgagcctctctatgaccccacaaggcccttgccgctgataacgtcacccctccccctgtaattgaagcccaacagagccaatt

SEQ ID NO: 19547 - DNA, 260 bp, Glycine max
  Clone ID: 700873458H1
aagcaactcaggtaaagtatggaaaaaatatgccagttgcggcagctgcagctgcagctgctgctgttgttgcatcttctatggtagttgctgtaacgaagtcaaatgctgactcgaatcttgagattcctgtagcgcagctgctactgctactgctgcagctgttgtagcaaccactgctgctgtaagtaagcagtacgagcagggcagtcggagtgatggtgatgcagagggtgctggttgtgaatcgaagggtagtg

SEQ ID NO: 19548 - DNA, 260 bp, Glycine max
  Clone ID: 700873459H1
cgtcgatctcgtcgccctcgagcaagaagccaaggatgccgtcgaagcgtattcaagctctctgtctcaaattttgagcattgaagacgaggagaaaagtgatcgcaaggaatcagctcaatcacgcaggaagagtcacgtagaacaaaaattattcctgacaatcttctcccaagggttgcaattgttggaaggccaaatgttggcaaatcagcattatttaatcgtcttgttgggggaaacagggcaattgtggtgga

SEQ ID NO: 19549 - DNA, 259 bp, Glycine max
  Clone ID: 700873460H1
cgaaacatggcaagagtggtggcactccaacagaaccaactatctttctctaccttagcttcctctctttctgacttcagtggaaccagacttcaaactcaacttcagttcaagagaaagcaatgccatccaaaaggtctttctacgtctccgcatcgagcaccaagaaaatcctaataatgggaggcaccaggtttattggtgtgtttttgtctaggctccttgtcaaagagggtcaccaggtgactttattcacaag

SEQ ID NO: 19550 - DNA, 256 bp, Glycine max
  Clone ID: 700873461H1
ctagagtagaaacacagttttagctattagcttaacttatttgttctgctaggtagttgcagtagttacagatgtaacagtcaattgataattaactgattgccagactggcattattcatgattattgttcagtctagtggttagtcaggataaatttaatctgaatcatctgtaaataaatagcattgtatccctcttaaaatagcatgatgagatcattctaatttgcttgaggaactctcctcttttccttt

SEQ ID NO: 19551 - DNA, 259 bp, Glycine max
  Clone ID: 700873462H1
agagaccctaaggcttggaaagaccctgaagagttttcacctgagaggttcttggacatcactatagatttacgagggaaagattttgagttaattccatttggtgctggtcgtagaatttgccctggcatgcatatggcaattgcctcattggatcttattcttgctaatcttcttaattcgtttgattgggaattgcctgaaagaatgagagaagaagacattgacactgagatgttaccaggaatcactcagcata

SEQ ID NO: 19552 - DNA, 258 bp, Glycine max
  Clone ID: 700873463H1
ttctaaagattttatccaattgaaattttaaaaatgactgggataaacttaagaattcaattattgaaattgaataagtaaacaatttaattggattggtcgaatggtatcaaaaaaatggagtactaactccctttcttatttattattgaattaaccgatcaacttgctttgttatcgaacatttctttttgatgtcaaaaatcttccggaaaaaatttgaatctattttgatatgcgaatcaatcctactacttc

SEQ ID NO: 19553 - DNA, 261 bp, Glycine max
  Clone ID: 700873464H1
ctgattggttgatggaatgggacgaagaacaccctgtttccaagctaatctcataaaccctaagcacgctcttcgcaccgaaacaaaaaccttcctccttgcactcttccttttcaccactcaaatgctactactccgcttgctcacaaaaccccttcaattttctcaggtctctcttcccctcatctccctaatattctcacgcatttcctcttcaacaccgttgtgaatcttcgtgctttttattaactatttcatttg

SEQ ID NO: 19554 - DNA, 256 bp, Glycine max
  Clone ID: 700873466H1
cttatctttctctcttctctctccccgcccaaaccctaactccctaccctagtccgctttctctcatccatcatgaaaggaggaaagtccaagaccgaatctaagagagccgatgccaaacttgctgtgaatagaagggcgccgccaccaagactaggaaacccgccggaaaggggaaggcagcgaaagatcctaacaagccaaagaggcctccaagtgctttcttcgttttcatggaggaattcaggaaggtgtt

SEQ ID NO: 19555 - DNA, 254 bp, Glycine max
  Clone ID: 700873468H1
tgagagttatctgacaaatgggtatttggactccaaagtggactggattcctggaatgaagaacttccggctgaaggacatacctgacttcataaggacaacggatctaaatgatgtgatgttgcaatttttcattgaagttgcaaatagaattcaaagaaacactactattcttttcaacacttttgatggacttgagagtgatgtaatgaatgctctatcctctatgttcccttctctttatcccattggtc

SEQ ID NO: 19556 - DNA, 259 bp, Glycine max
  Clone ID: 700873430H1
aaacgatctaaacatgcaaatttttgttaagactttaaccggtaagaccattaccctcgatgtcgagccttctgactccatcgagaatgtcaaggccaagatccaagacaaggaaggtatccctcccgatcaacaaagattatcttcgctggtaagcaactcgaggatggcagaactctttctgactacaacattcagaaggaatctaccctccacttggtcctcagactgagaggtggtatgcaaatcttcgtcaaga

SEQ ID NO: 19557 - DNA, 239 bp, Glycine max
  Clone ID: 700873395H1
attcagcgcctccgcggcttcaaccttgtagttattctctttcttcttttttagctatccctctcttgaaaaatctagatctcgttcttccttgatctacgttacgcttttagtgaccggatctgtatggatctgaaccagatctacacgccgatggtggttttggcctggtctttcatagatctgatgcatggaggctcagatctactgtacagaggtgtgcgattcatgttcgtctc

SEQ ID NO: 19558 - DNA, 243 bp, Glycine max
  Clone ID: 700873396H1
aaacaatccaattaatcaaaacgcacaacgaagatcgtatgaatacgattttgcacttctcgacaaatataatttgtttctttattctaagcggttattctattcttggtaatcaagaacttgttcttattaactctttggttcgagaatttatatataatttaagtgacacaataaaagctttttctattcttctattaactgatttatgtataggattccattcaacccatggttgggaac

SEQ ID NO: 19559 - DNA, 284 bp, Glycine max
  Clone ID: 700873402H1
ttcacgcgttcggctgctcaacatcactggtttgcctttccgacttggtccttttctcaacaggcgcactattaggactgatgctgtgaaggattgtatatggctattcgaacaagagcaggcattaggcttcagcagtgtttccacaaacattagaacctagttatcaaactcaaatctgggggcttatggatccatgcacccattgctccaactgatgagtgtattcagcttattaaagaattgggggctccagttgaatatattgttctccctacttttgc

SEQ ID NO: 19560 - DNA, 264 bp, Glycine max
  Clone ID: 700873404H1
ggcttatggtggatacctaggcacccagagacgaggaagggcgtagtaagcgacgagatgcttcggggagttgaaaataagcgtagatccggggattcccgatataggtcaacctttcgaactgctgctgaatccacgggcaggcaagagacaacctggtgaactgaaacatcttagtagccagaggaaaagaaagcaaaagcgattcccgtagtagcggcgagcgaaatgggagcagcctaaaccgtgaaaacggggttgtgg

SEQ ID NO: 19561 - DNA, 260 bp, Glycine max
  Clone ID: 700873407H1
tatggcttcaactcatctgcttcccctagcaaccttcttcttacttctctccgcttcttatctccagattgctgtggcggaagcacaaccgttgactagtctcaagcttaactctcatattcttcaggagtctactgctaagagatcaatgaaaatcccgaggcaggatgggaggctgctataaatcctcgtttctccaattatacagttgaacaatttaagcgccttcttggagtcaaaccaatgcctaagaaggaact

SEQ ID NO: 19562 - DNA, 266 bp, Glycine max
  Clone ID: 700873408H1
cacaaagcagagctcatccttgagttaaaaaatggcagcagcttcttccatggctctctcatccccatccttggctggcaaggccgtgaagctgggcccatcagccccagaagtgggaagggtgagcatgaggaagaccgtcaccaagcaggtctcctcaggaagcccatggtacggcccagaccgagtcaagtacttgggcccattctctggcgagcccccgtcctacctaaccggtgagttcccaggcgactacggctgggaca

SEQ ID NO: 19563 - DNA, 266 bp, Glycine max
  Clone ID: 700873409H1
ggcttatggtggatacctaggcacccagagacgaggaagggcgtagtaagcgacgaaatgcttcggggagttgaaaataagcgtagatccggggattcccgatataggtcaacctttcgaactgctgctgaatccacgggcagcaagagacaacctggtgaactgaaacatcttagtagccagaggaaaagaaagcaaaagcgattcccgtagtagcggcgagcgaaatgggagcagcctaaaccgtgaaaacggggttgtgggag

SEQ ID NO: 19564 - DNA, 265 bp, Glycine max
  Clone ID: 700873410H1
tttccaaactcccttcgtgtgaaggataagtggaatgtttcttttctccaaattttgccaactgattaaggcttacatcccaaacagagggatcgttttggccatagatttgggtttgttagatgttggagcgtatctgatattcgtatgttagggatgaagttagacaacatttttattggagattggaaattgaacgttcatgttaccaaaattgttcaaggggaggtgaaagtgcaacgacaggtcagtggatatggaaaga

SEQ ID NO: 19565 - DNA, 265 bp, Glycine max
  Clone ID: 700873411H1
ctcgagccgctcgagccgtgcaattgatatttggagcattgggtgcatatttgcagaaatgctcactacgaagccattgtttcctgggaaaaatgttgtgcaccaattggatctcatgactgatttgcttggagatcctcctcctgagtccattgcaaggattcgaaatcaaaagggtaaaaggtctcttaatagcatgaggaaaaaacaaccaattccattctcccaaaaatttccaaatgcagatccattggctcttcgtttg

SEQ ID NO: 19566 - DNA, 266 bp, Glycine max
  Clone ID: 700873412H1
ggagcaggtaaagcttttccaaacaagattgtttttgatgataagcttgtgttggctaacacacaagaattctttgatggaaattttccagtggattcttggttaccaatttttgtgaattgtctttatcctgtaagtcaataccttcagaagctgtcgttgtaaatgttacatgtggtagtggacgtggtggtttacccaccactgcttggattagttctgcagttaacaatcgctcctcagacatcaacaaaaagattcgcaca

SEQ ID NO: 19567 - DNA, 264 bp, Glycine max
  Clone ID: 700873413H1
tgctcagattcttgagaggggcggttatactttgttcactccacactacataacttggttttgtccaccacccttcattcttagcagtcagtgcaagtctcaatgtataaaccatgggagatattgtgctccagatccggagaaggattttggagagggatatgaagggaaggatgtggtgtatgaaaatttgaggcagctttgtgttcatagagttgccaatgagagcaaccgttcttgggtttggtgggattatgtgacaga

SEQ ID NO: 19568 - DNA, 261 bp, Glycine max
  Clone ID: 700873414H1
gattttgcaagtggccctaggtttcaagatctgtgccaggcaggagttaaggggcttataacagcaatcgatcgttttgagccaaacaggagattccggctatcaacttatagtttgttttggataagacatgctatcatcgttcaatgaccctctcaaacttcacacgtgttccctttggacttgaatcggttcgagcagaaattcaaaaagctaaaactgagttaacatttgagcttcagaggtcaccaacagaggaag

SEQ ID NO: 19569 - DNA, 265 bp, Glycine max
  Clone ID: 700873415H1
tgcagtcataggaaccaaatgagtaattatacctattttgtatattatctcttctacactttgtttctctggttgcatgctatgtaatagtgtaagtttcctcaaaactgtttaggaagttggggttggagtatgtagatcctatttgattcattggccactgaggatgaaacctgaagccaaagggtaccataatatattaaaggagaatgtgcttccctcctttgacatgaaaggaatatgggaagctatggaagagtgttac

SEQ ID NO: 19570 - DNA, 187 bp, Glycine max
  Clone ID: 700873418H1
catagatgaacttttcgatgaaggcctttacttgcctcctctaaaaggtatcaggagtatcttgccaggctcgttaggcatattaaggatattcaggaagacattctcctttttgatcctcccgcaacaatgaacaatgacagatttttctggttaagggacgaagaatttggaagacagactctcg

SEQ ID NO: 19571 - DNA, 260 bp, Glycine max
  Clone ID: 700873419H1
atattatatcaatggatgcagatagcatatcaagatctaatagcacttacattggaaaactgaggtcaaattttcttggcaccaagtttataatttatgatacacagcctccctataacaatgctcagctgtctcctcaggctgaagccgtaggttttattcaaaaaaagtttctccaaaggtccctagtggcagctactatattgcccagatcacctatgagttgaatgtccttggtactaggggcccgcgcagaatga

SEQ ID NO: 19572 - DNA, 260 bp, Glycine max
  Clone ID: 700873420H1
tggcaaatctcatggccattgtgggataaggtttttggttgttgaatctttgatgaagcatgctggctgaattataattaaatgaatgtgctctgttggattattttttgtagaaacgtagttatgcagtattttagttaggattcatgatgggatacctttgtgaaatgggtgttgtattccaaggggctgcaaactttctggtgcttgttgacagattgtgggttatcgtttgaaatggcatcggtatccagtcaacc

SEQ ID NO: 19573 - DNA, 259 bp, Glycine max
  Clone ID: 700873421H1
ctagctctcgttttttctcagaaccttctgaggttaaagcaaagaacaaagagagagagagagagaaaatgatgaagccatcgatgctcagatctctccactccgccgccacacgcggcgcctctcatctcttccgccggggtacgcctccgagccggtgccggagcgcaaggtagccgttctcggcgccgcggcgggatcgggcagcctctctcccttctcatgaagctcaatcccctcgtttcgagcctcgcgcttt

SEQ ID NO: 19574 - DNA, 274 bp, Glycine max
  Clone ID: 700873422H1
tcggagtgcggctcaagtgccaccagagcaacagaggctcatttttgctggaaaacagcttgaagatggccgaaccttggcagattacaacatccagaaagaatctaccctccacttggtgctgccgtcttcgcggtggtatgcaaatctttgtgagactcttactgcggaggaccactactttggagctagagagctctgacacaattgacaatgtgaaggccaagatccaacacaaggagggtattcctccagacgagcaaaggttgatttt

SEQ ID NO: 19575 - DNA, 258 bp, Glycine max
  Clone ID: 700873423H1
gaagaattgacgataggccaaagttgacgacatgtgtcatgtcgatggccttatactatgttcaaatgatcctcttgttcccttgccctccatttttaccttcaacaattttctggttatgtcccttacactttgcaactctgattgaaccaaacgttatctttcttcatcatcgtctcatacacacatacataccctttagaaagttcttcatactcttccagaagcagaaaaaagtgcctttttcttgtgacttct

SEQ ID NO: 19576 - DNA, 263 bp, Glycine max
  Clone ID: 700873424H1
tctcgagccgaatcggctcgagggatgatagagttagcttatatacgtcaaggagttaagacatcctttgagtggcatacactttacaaactctcttttggaggctacatgcttgtccaatgagcaaaaacagtttcttgagactagtgctgcttgtgagaagcagatgttaaagataatacacgatgttgatattgaaagcattgaggatgggtccctggagcttgaaaagggggattcttgcttggaaatgtcataaatgc

SEQ ID NO: 19577 - DNA, 266 bp, Glycine max
  Clone ID: 700873425H1
gcaacgagaacgagaggaggggttcgggtgtgagagcgagaatcagaagatgaagaaggaagacacagtgaagctgatcagtgccgaaggttttgaattggtggtcgacaaagaagctgcaatggtttcacagaccatactaacatgcttacttctccagggagtttcgctgagaggcagcacggcgaagttacctttcctgagatcagcaccaccattctcgagaagatttgccagtacttttattgggcatctccaattcgcca

SEQ ID NO: 19578 - DNA, 265 bp, Glycine max
  Clone ID: 700873426H1
aaaccctaagaagctacctctcatcgttttcttccacggcagcggcttcatcgtaaccagcgccgcctccactatgttccacgacttctgcgccgccatgtccgccgccgtccccgccgtggtggcctctgtcgaataccgctcgcgccggagcaccgtctcccggcggcgtatgacgacgcggcggaagccttggagtttatccgagacagcagcgaggaagaagaatggttgaccaaacacgccgacatgtctaattgctatc

SEQ ID NO: 19579 - DNA, 262 bp, Glycine max
  Clone ID: 700873427H1
ggttcccaaaattcgtgagagatctctctcgccgcaccgctccgctggaaccatgatctctgcacaggacgactaccaccgccactaccacttccagccgcagcttcccaactctattgacacctctcggtagcagttcacgcggatcgcttcgagctcttcttgtaaagtaggaacccgcgtccttcactcttttgctattacatgatcatgattctagtgaaggtttttttcccttccctttaatctattcactgtaaat

SEQ ID NO: 19580 - DNA, 262 bp, Glycine max
  Clone ID: 700873428H1
gtccaaatctgagatttgatctgcttaaggagctgcatgctttgagcctgaagaaaggaatttttctggtgcttcatggtgcatctggtttgagcaaagaacttgttaagacgtgcatacatcttggtgttagaaagttaatgtcaacaccgaggtaagaaaagcatacacggactcccttgttacccccaagaacgatctagttcatgttatggcctctgcaaaggaagccatgaaagttgtggttgcagaaaagatgcat

SEQ ID NO: 19581 - DNA, 237 bp, Glycine max
  Clone ID: 700873393H1
tggagagtgagtccgtgaagcgcagaattcacatgattgctgctcactttgcacccaatgatgatatttcaactaccaacgttctgcctatgaactgcagtggcagtctgaactctgtactccggagatgtgataataaggtgtattttgcacgccaagcttctgcttctcttggttattttatgaggcagacttcaattgaagagggtggctcaacttcctttattgctcctaaaa

SEQ ID NO: 19582 - DNA, 244 bp, Glycine max
  Clone ID: 700873352H1
atgagaatcgcgtttctgaaccaggagttcgaggtagcgctgagcaggactgtgagggaggagttcaccagcgcattcaaggaggagatggaggtggcagggaagctggagaaggtgcagaaggcgctcgagggtgctgttaatgatttggagctcatggggaggcttttggatgagttcgatttgcttcagaggagggcgcagaatgtgaaccttgatgaggttgatgccaagattagtaagt

SEQ ID NO: 19583 - DNA, 243 bp, Glycine max
  Clone ID: 700873353H1
cttgaattggagttagagactcgaaatcgggcaaaagcagaataccctgatcaacgaaatcttgaatcatctatctcaaaccaagaaaaagatattgaaaacgattatgtaggatcagacagtgaaaagaatagtaagggtataaagaaaaagaaagacaagaacaagatggaggcagaacttaatttcttactaagaaattttttgattttacatttaaattggaataatttcttaggtcaa

SEQ ID NO: 19584 - DNA, 244 bp, Glycine max
  Clone ID: 700873354H1
gttcagttggtcaagataattttgcagcagaaacgagttcccatcgaattaatggaacaaatggctcaatttcaagattctattccacaaatctgaaattacttgatgcctttgatgatgaatatggggggagttgttggttcatccagataggttaccatccaacccatatacctttgcatctgtgttgcgtttgtctctttctcagtggaaaaagatgggaaagaagggaatttggcttaag

SEQ ID NO: 19585 - DNA, 242 bp, Glycine max
  Clone ID: 700873355H1
ggtgagactcgcaccaacaccagcacttcaaagaagacagaatcaagcagaacttggagttggagagagagaattccgaccctaattgtaaaatggaggacgagacagagactatggtggagaagagggagataatcaacaacgtaatgtgtcttttgacagaccctgatggaactcctttgggtgctcctatgtacctacctcagaatgctggtcctcaacacctcatccagattgttaat

SEQ ID NO: 19586 - DNA, 242 bp, Glycine max
  Clone ID: 700873357H1
taactcttctagaagcttccaaaaacgctaacccccagcccgccatcgtttgggcctcctcgagttccgtctatgggctcaatgacgaaagcccattctccgaactccaccgtacggaccagcctgcgagcctctacgcggcaactaaaaaagcaggcgaagcaatcgcgcacacctataatcatatctatggactctccctcaccggattgcgcttcttcactgtttatgggccctgggga

SEQ ID NO: 19587 - DNA, 240 bp, Glycine max
  Clone ID: 700873359H1
ggctattgagggattggctctgaaattgcattcaaacaaaagatattgcttcaaagctgatgcttttgcagaaatgaagagattgagactgttgcaacttgataatgtagaactcactggagattataggtatctttctaagcaactgagatggatctcttggaaaggattttctctaaaatacatacctaagagcttttatctggaaggtgcaattgcaattgatttaaaacacagtag

SEQ ID NO: 19588 - DNA, 243 bp, Glycine max
  Clone ID: 700873360H1
tgggaatcaaccccatcatgatgagtgctggagagttggaaagtggaaatgcaggagagccagcaaaactgatcaggcagagataccgtgaagccgcagacttgatcaagaagggaaagatgtgtgctctcttcatcaacgatcttgatgcaggagctggtcgtcttggtggaaccacccaatacactgtcaacaaccagatggtgaatgccaccctcatgaacattgctgataaccccacca

SEQ ID NO: 19589 - DNA, 246 bp, Glycine max
  Clone ID: 700873362H1
ggcggttgcaattgcatagcatagagaaagtgcagagagagcacagcgtaacgactcagtcaaacactctgtaactctttattttattttctttctttctttctccgatcgcatagctcgctcgcaaccaccatgccttcccgaagaagaactctcttgaaggtcatcattctcggtgacagtgggttcgtctctttctctctctctctctctctctctctctatcttcttccatttctagggttt

SEQ ID NO: 19590 - DNA, 243 bp, Glycine max
  Clone ID: 700873363H1
ctcgagccggatttctgatcccaaattgagtttgagtctcagccatggtatctgtttctctgctcttattcctatctttctttgccttctttgcaccctctgaatctcacgacaaagtctcgttggaattgtactacgaaagcttatgcccctacagcgccaacttcatcgtgaatcacctcccaaaaatcttcaccccagatcttgccccaatcgttcacctcaaactcgttccttggggca

SEQ ID NO: 19591 - DNA, 231 bp, Glycine max
  Clone ID: 700873364H1
tgaattctccagagagaagatgaaacttaatcgatcatcacttcacttcactaatacatcatggcagacgagacccagaacaagtatgagagctctgaggttgaggtccatgatcgtggtgtttttgactttctcggtaagaaaaaggatgaagaagtcaagcctcatcctcaggaggaggtcatcgccaccgagtttcaaaaagtcactgtctcagaccaaggagggaac

SEQ ID NO: 19592 - DNA, 243 bp, Glycine max
  Clone ID: 700873365H1
aagcaactcaggtaaagtatggaaaaaatatgccagttgcggcagtgcagctgcagctgctgctgttgttgcatcttctatggtagttgctgtaacgaagtcaaatgctgactcgaatcttgagattcctgtagcagcagctgctactgctactgctgcagctgttgtagcaaccactgctgctgtaagtaagcagtacgagcagggcagtcggagtgatggtgatgcagagggtgctggttg

SEQ ID NO: 19593 - DNA, 243 bp, Glycine max; identical to SEQ ID NO: 19419
  Clone ID: 700873366H1

SEQ ID NO: 19594 - DNA, 240 bp, Glycine max
  Clone ID: 700873367H1
gaaagaaatgatggtatcacttggtttcatggctgctgcaagtgttcgagtggcaaacgagcttggaaaaggaagctccaaagctgcaaagttctctatagttgtgacagtgcttacatccttggccattggatttgttctcttcttatttttcttatttttaaggggaaaacttgcttacatatttacctcaaataaagacgtggccgatgccgttggggacttgtcacctttgttggc

SEQ ID NO: 19595 - DNA, 241 bp, Glycine max
  Clone ID: 700873368H1
taattgtttaaacctaattctcatttcttcatcgttcgattcttctcctcctaaagatgcagatcttcgtgaaaactttgaccggtaagaccatcacccttgaggtggagtcctccgacaccatcgataacgtgaaagctaagattcaagacaaggaagggatcccacctgaccagcagagacttatcttctacgggtaaacagcttgaggatggtcgaacccttgccgactacaacatcc

SEQ ID NO: 19596 - DNA, 241 bp, Glycine max
  Clone ID: 700873369H1
gtagtagtatgcatacagtgccaagatatgtgaacataggacttctctgtgttcaagaaagtccagcagatagaccaaccatgtctgatgttgtatcaatgattgggaacgatactgtggcccttccttctcctaaaccacctgcatttctaaatgtgagaggtaatcaaaattcaatattgcccgctagcatgccagaaagcttttctttgaatttgatcacagatacaatggtggaagc

SEQ ID NO: 19597 - DNA, 240 bp, Glycine max
  Clone ID: 700873371H1
ggaaagtggagtacgagaagaacatgagagcttataacaagaaacaggcggaaggtcctactggtggggatgaagaagaatctgagaagtctgtatctgaggtgaatgatgaggatgatgacgaggaaggcagtggcgaggaggaggatgacgattagagaatggactgatgataatagcatttatgtagtttctgatgattttgatcatccgtgtaggtggtctggtcatttccttata

SEQ ID NO: 19598 - DNA, 243 bp, Glycine max
  Clone ID: 700873372H1
ccattttatgcattcatctgaagcttcaatcagagattctaagcttgtaatatctgcagaaagcattaagtatggacataaaattctacagggcattcaaaatgagaacaagaacatgaaaaaatcacttaaggacgtggttactgagaatgaatttgagaaaaaactacttactgatgttattccaccgactgatattcgcgtcacatttgacgatattggagctttagaaaatgttaagga

SEQ ID NO: 19599 - DNA, 241 bp, Glycine max
  Clone ID: 700873373H1
ttgggatactaatagtggggctttggtgaccattgttcataatgctcatgttggtaatacttatgctttggcacggagccatacaggggacttcctttttactggaggtgaagatggtgcaattcacatgtatgagattgttaatgatggctatgagtctaaaacttggcatgttgctgcttggattcctcactctgccgctgtgtattcccttgcctttgagtttccatggcttgtttct

SEQ ID NO: 19600 - DNA, 240 bp, Glycine max
  Clone ID: 700873375H1
gctgcagtgaagaaaattcctctgtacaagcacattgctaatctggctggaaacaagactttggtactacctgtgccttcattcaatgttatcaatggaggctcacatgcaggaaataagctagcaatgcaggaatttatgattctccctgttggggcatcttccttcaaagaagccatgaaaatgggcgtagaagtataccatcatctaaaggctgtgattaaaaagaaatacggacag

SEQ ID NO: 19601 - DNA, 240 bp, Glycine max
  Clone ID: 700873376H1
gaagattccgcaacagagagtagaaaagatggcgcggttgatcacagtggtgtggtgcgcggtggcggtgctactgtgcgccgcggcgggcgcgtcgtgggtggaggaggcggcgaacccgatacgaatggtggcgggggtggaggcggaggtggttcgggtgatagggcagtgccgacgcgcgctgaagtttgctaggttcatgagcaggttcgggaagagttaccgaagcgaggaaga

SEQ ID NO: 19602 - DNA, 242 bp, Glycine max
  Clone ID: 700873377H1
cgccttttccacacttccatcgtcccgcacttcatggccgcggcggagccactataagcccatctaacacgcgcgtgggctggatcggcacgggcgtcatgggccagtccatgtgcgcccacctcatccgtgccggctacaccctcaccgtcttcaaccgttccccctccaatgtcccccctcctcgacctcggggcctacttcgccccctccccccacgccgtcgcagcccgctccgacgt

SEQ ID NO: 19603 - DNA, 240 bp, Glycine max
  Clone ID: 700873379H1
gacgagtgaggaagtggatttctggtgttggtgttgacggcattgggaagaagcttgtgaactcaaaagatggacctccaacctttgagcagcccaagatgactctggagaagctcttgacgtatggtaacatgcttgtccaagaacaagagaatgtcaagagagtccaattggctgacaagtacttgaacgaggctgcacttggaaatgctaacgaggatgctattaacaggggaactt

SEQ ID NO: 19604 - DNA, 240 bp, Glycine max
  Clone ID: 700873384H1
aatcaacacacacaaacacaacaacatatggaggtgctaagggtgcaaaccatagcttccaaatccaaagatgctgccatcccagccatgtttgttagggcagagacagagcaaccaggcatcacaaccgttcaaggggtgaaccttgaggtgccaattattgattttagtgacccagatgaagggaaagtggtgcatgagattttggaggcaagtagggactggggcatgttccaaatt

SEQ ID NO: 19605 - DNA, 238 bp, Glycine max
  Clone ID: 700873388H1
gttttccaaggcggcggcggcggcgaggccggtgcagtggttcataggagagcccgccgcaacaacaacgaggaagaaggcggcggcggcggcgaagatagtgagggaaggtgtggagttttacagcaatggtgatttctacgagggggagtttcacaaaggaagaagcaacgggagtggggtctaccattacttggtgaatgggaggtacgaaggggattgggttgatggaaggtac

SEQ ID NO: 19606 - DNA, 235 bp, Glycine max
  Clone ID: 700873390H1
gtgcagcatctgagaaactaaaccccacaaaaatcctcgtccctccctcaccgtatacggcagagccactgcaacaggaagcagagttcgccgctactccgcgaccctaccctatcaattttcgtacttcttttcgtaattgcagcgaagaatggcgaagaggaaggagcggattcagaacccggagccattcgatccgtacggcgccgaccccgcgaagacgaagaagcgttcg

SEQ ID NO: 19607 - DNA, 243 bp, Glycine max
  Clone ID: 700873351H1
agaaagaggaaaaaaccgaggatttcacatagtacttttggtcgaaaaatcgatctgatttttttcgtacttttcgctcaatgatgaaatgggtcagattctacaggaccaaaccttgtgggagttaaggaatgatggaagaaaagaaataaaaaaaagtaaataaaaatgcagtagaagagtcctgattccaaacgaaaaaattcaaacttgattgaaaaggatctttctgattattgaaga

SEQ ID NO: 19608 - DNA, 249 bp, Glycine max
  Clone ID: 700873306H1
gttcatgtggatggtgcaagcaagtcgtttgagcagacctgctttctggatgttaagggatactgtcgtgaagagaggagccacgaagggcttggaatgggtggttctgttgtctaccaaaaattcgggaagactagtgactgtggttcacctagatcaactctaaagtgctggaatgaggaagatgaggaagagtagtttccttaagtgtctttattattctgtccttgtgaaaataagtctggtttt

SEQ ID NO: 19609 - DNA, 248 bp, Glycine max
  Clone ID: 700873308H1
ggaaaatctttccaatgtgagcttgtctttgccaagatgggaatcaaccccatcatgatgagtgctggagagttggaaagtggaaatgcaggagagccagcaaaactgatcaggcagagataccgtgaagctgcagacatgatcaagaagggaaagatgtgcgctctcttcatcaacgatcttgatgcaggagctggtcgtcttggtggaaccacacaatacactgtgaacaaccagatggtgaatgc

SEQ ID NO: 19610 - DNA, 249 bp, Glycine max
  Clone ID: 700873309H1
ggcctttgcactcgagggccaatctccgtctggcccgagatttccaaccaggagaggcctttgtggtcacgaaatgttgccaacattgtcccaccatatgaccagtcaaaatacgctggaactggggctgcagttgagtatgctgttttgcatcttaaggtgtcggagattgtggtcattggacacagtgcttgtggtggtattaaggggcttctgtctttcccatatgatggaacctactctactgat

SEQ ID NO: 19611 - DNA, 247 bp, Glycine max
  Clone ID: 700873311H1
aatttatctaagacgtaacttggtggaagatctacttgaagatactgagaagttccatgataaagttgttggttcttttgtgagaataagaatttctggtagtggtcagaaacaggatttgtataggttggttcaggttgtaggtacatgcaaagcagcagagccatataaagttggtaaaaggatgacagatatcttgctagaaatcttaaatttaaacaagacagagattgtttcaattgatatt

SEQ ID NO: 19612 - DNA, 250 bp, Glycine max
  Clone ID: 700873314H1
cactgtttaggtataatttaccgtgacttaaagcctgaaaatatcttacttcagaaggatggtcatgttgtattagctgattttgatctatcatatatgacatcttgtaaaccacaggttgtgaagcaagcgatacctggtaaaagaagatcacgaagtgaaccaccaccaacatttgttgcagagccagttacacaatcaaactcattcgttggaactgaagaatacattgctccagaaattataactg

SEQ ID NO: 19613 - DNA, 250 bp, Glycine max
  Clone ID: 700873316H1
gccagagggaagcagcattgttacttggacagtttgcagcaactgattcagactgcaaggttcacattgttcagagaggtgctgtccgacctctgatagagatgcttcagtcctctgatgttcagctaaaagaaatgtctgcctttgcattggggagattagcccaggacacacataaccaagctggtattgtgcacaatggtggtttgatgccattactgaagcttcttgactccaaaaatggctcttt

SEQ ID NO: 19614 - DNA, 252 bp, Glycine max
  Clone ID: 700873317H1
ctgtgagaggaattttgccattatttgggggtgactgaagtgggctatgatttgaatggagagaggatgccagagttgagaagtggagctagaaggtcgaaacggcttggagatcttcagcctggtccactgcctgttgatcaaggagagaattggcaacaacctgctgctccgaatcgaactaggaggagagttggaggtggtagaggaagaggtggtaatgccacagctgtaggcaaagggccatcacca

SEQ ID NO: 19615 - DNA, 249 bp, Glycine max
  Clone ID: 700873318H1
cgaacctgttctgttctgtcacgaggtggcactctcactcactcacacgggtgtctcataaagttttctgtcattaaacacttcgtggcagtttcctgctacaaacaccgtttcatttcacacttcacaaacaactacaaaaggatctccacacgcacactcgtccctttcttcattctcttctcttatgtcactcttctgatttctttttctcatctctcagagacccttttgagtcatgaagcaaaa

SEQ ID NO: 19616 - DNA, 247 bp, Glycine max
  Clone ID: 700873319H1
aacacattgaaactaaactccaagttcctaccatagtgctaggaaagtgagtgagagaaagagatcacatagcagaatggcttctactcaatgtttcttgcaccaccatgctcttaccacccctgccagatccccatcacaacgcatcatggttagcaccaagcctaaccagcttgtttgcaaggcacagaagcaagaggatattgatgtcagcccaatctctcgccggttagctctaaccgtgctc

SEQ ID NO: 19617 - DNA, 246 bp, Glycine max
  Clone ID: 700873320H1
agaagcaatacagtgaggaagctgcagagctgaaggctattattactggcgaattaccagctggttgggagaaagcacttccgacatacacaccagaaagccctgctgatgctacaagaaatctgtctcagcaaaatctaaatgcccttgttaaggttcttcctggtctacttggtggtagtgcagatcttgcctcttccaacatgaccttattgaaatcgtatggggatttccaaaagaatactc

SEQ ID NO: 19618 - DNA, 245 bp, Glycine max
  Clone ID: 700873321H1
gacccattgggccttgctgatgacccagaggcttttgctgagcttaaggtgaaggaactcaagaacggacgattggccatgttctctatgtttggcttctttgttcaggccattgtcaccggaaagggtccattggagaacctcgccgatcaccttgctgaccctgtcaacaacaacgcctgggcctatgccaccaacttcgtccccggaaagtgagcgtcaaagaacgaaatgacttttgagag

SEQ ID NO: 19619 - DNA, 243 bp, Glycine max
  Clone ID: 700873325H1
ggaaaggtggaaatgggaaaagatctttgtcccatagtgagtggtgccaaactgttctgtctcaacctgatgtgatatcaatgtcatttgtaccaattacatctctacttggtggaataaatgggagtggatatttaactcatgccatgaatctctatttacgctataaaccacaaattgaagaactgcatcaatttttggagttccagcttccaaggcaatgggcccctgtatttggtgagc

SEQ ID NO: 19620 - DNA, 247 bp, Glycine max
  Clone ID: 700873328H1
ggacccagagaagaagaaataccctggtggtgcttttgatcctttgggatactctaaggaccctaaaacattccatgaatacaaagtcaaagaacttaagaatggacgtcttgctttgttggcttttgtgggattctgtgttcaacaatcagcttatcccggcactggacctttggagaacttggctgctcacttggctgacccatggcacaacaacattggaaacatcattattccacaatcgatt

SEQ ID NO: 19621 - DNA, 247 bp, Glycine max
  Clone ID: 700873330H1
ggaaatttatgttgatgatcaggccaagttgacccttcacgggcttgtgcagcactacatcaaattgaaagaggaagaaaaaaaccgcaagttgaatgatcttcttgatgcactggactttaatcaagttgtgatctttgtgaaacgtcttagcagagcagctgagctggacaaactacttgtggagtccaactttccatctatatgcattccctctggcatgtcccaggaagacaggtttgtttta

SEQ ID NO: 19622 - DNA, 248 bp, Glycine max
  Clone ID: 700873331H1
ctcttctgaagcatggccatggcggtttctgcaattggttttgaaggtttcgagaagaggctggaaatatcctttttccagccgggactttttgctgaccctgagggaatgggtttaagagctcttgcaaagtcccagttggatgagatacttacaccggctgcttgcaccattgtttcatctctcagaaatgatcatgtcgactcctatgttctgtctgagtccagtctctttgtttatgcctacaa

SEQ ID NO: 19623 - DNA, 252 bp, Glycine max
  Clone ID: 700873332H1
aggaaacacacgtgctatacgtatcgtgcgcggccacgattacttaaagcgacagggaaggaggcactcaaagacagcaaaagaaggacacgacggcgctcgagattgcagctaacgaggtgctcttcggccagaccggaagcggcgctgacgagccgtgggttgtggggttgtcatcaaccagcaacgccccgtggggtgcgccagacccagcagctttcaactggttgaacaacaccggagattttactc

SEQ ID NO: 19624 - DNA, 248 bp, Glycine max
  Clone ID: 700873334H1
caatgaatggggctactcccaaagggttgtggatttggctgacattgttgccaacaaatggaagtgagagccaaacaaattctcattggtaattaaattattatgtatgtaccatgccattgtaattttgtatgcttactactactactaccactacaacacttgttgcttcatttttcttttaaacttgtactgagaaacagaaccatcaattttctctgccttctcattgtgcaataaaattctta

SEQ ID NO: 19625 - DNA, 247 bp, Glycine max
  Clone ID: 700873335H1
ccaaagaggtactgaaaaaccatgacctagagtttagtggacgacctaaattacttggccaacagaaattgtcctataatgggtcagagattgcattttccccatacaatgaatattggagacaaattagaaaaatttgtgttgtccatatctttagctccaagcgtgtctctagcttttcctctataagaaattgtgaggtgaagcaaatgataaaaaaaaatatctgggcatgcctcttcttcgg

SEQ ID NO: 19626 - DNA, 243 bp, Glycine max
  Clone ID: 700873338H1
gttcactcttcttctcttgcggctagggttttagcgcactcttctagatttaaggaagatgggtaaggaaaaggttcacatcagtattgtggttattggccatgttgactctgggaagtccactaccactggccacctgatctacaagcttggaggcattgacaagcgtgttattgagagatttgagaaggaagctgctgagatgaacaagaggtctttcaagtatgcctgggtgcttgataa

SEQ ID NO: 19627 - DNA, 246 bp, Glycine max
  Clone ID: 700873339H1
ccaccatctaatttctgattcacagtcctatcctttgagataagagcacacgtttaacaaaatgctattctctatttctcatcactttaatcacgcactatcagtacaacaactcactcactaagctaaacaatttcatcaagcctgccatggcttcctcgtgtgcttcctctgccattgcagctgttgccatctccacaccaagttcccagaagaatggatcactcttgggaagcacaaaagctt

SEQ ID NO: 19628 - DNA, 246 bp, Glycine max
  Clone ID: 700873341H1
cggctcgagcggctcgagcggctcgagatgatatcaaatcaccctcaacttgagagagagcgagagagaaacggatgatacagagagatgaagagaaagaggtggttggtgtgagtgtgctgcacggtggtatgatcataacgatggacgaggagcagcgagtgtatagggacgggggaatcgtggttgaacatgataaaatcaaagcaagcggacaatctgctgatatccttgcggagttttctg

SEQ ID NO: 19629 - DNA, 246 bp, Glycine max
  Clone ID: 700873345H1
gtgtatttccctacctctcccttcaagatgcagatcttcgtcaagaccctcaccggcaagaccatcacccttgaggtggaaagctctgacaccatcgacaacgtcaaggccaagatccaggacaaggaaggaatccccccggaccagcaacgtctcattttcgccggaaagcaacttgaggacggccgtacccttgctgactacaacattcagaaggagagtactcttcacctcgtcctccgtctc

SEQ ID NO: 19630 - DNA, 245 bp, Glycine max
  Clone ID: 700873346H1
gctgggcacgggggtcccagtcccgaacccgtcggctgtcggtggactgctcgagctgcttccgcggcgagagcgggtcgtcgcgtgccggtcgggggacggattgggaacgggcccttcgggtgctcttccccgggcgtcgaacagtcaactcagaactggtacggacaaggggaatccgactgtttaattaaaacaaagcattgcgatggtccctgcggatgttgacgcaatgtgatttctgc

SEQ ID NO: 19631 - DNA, 247 bp, Glycine max
  Clone ID: 700873348H1
aaagaagccatgctggggattagatatcatatgcgcctaatgggcgaggctgcaggtgttccaattgaaccagaaccacaaacacaacttttagatgctacaatgaacttggaaggagtattgttggctggagttccaggggcaggaggatttgatgcagtctttgctgttactttgggagattcgagcagcaatgtgacaaaagtatggagttcactcaatgtccttgccttgttggttaaagaag

SEQ ID NO: 19632 - DNA, 246 bp, Glycine max
  Clone ID: 700873350H1
gaggacatgaccaagagcaagggcaaggatccacttgaaggacttggagggcctatgacaagggctagagcaagaaaagccaaggaagcttttcaacaagtgttgtccatactatttgaatacaaacccaagtttcaaggagaagagtccaaggttgtgagttgtatcatggcccaaatggatgaggactaaatgacaccactttgtctcaattttagagtgtttagtttgtctaaataatggctc

SEQ ID NO: 19633 - DNA, 251 bp, Glycine max
  Clone ID: 700873305H1
aaatctcttaaattagtgtttatagattactgtacgctaggtactctgtccctttaatctctctctctctctcatgtttcattctttctcttctcttgtcgtgttctcattgccctcttctgttcaataataataacttaataaaagaaaaaaacagtaattgaaaattgaaacagctgaagaataatcatcatcgtcgtcatcgcttcccaatcaaacccaccacccatttgaatcaatccagggatccc

SEQ ID NO: 19634 - DNA, 252 bp, Glycine max
  Clone ID: 700873260H1
caagaacttcaggagtggtgccgtggtagcaaagtatggtgacaagagtgtgtactttgatttggaggatctgggcaacactacagggcagtgggacttgtatggctcagatgcaccttcaccctacaaccctcttcagagcaagttcttcgagacatttgctgctccattcacaaagaggggattgttactcaagtttctgatattgggaggtggttccacccttgcatacttcagtgcaactgcctcagg

SEQ ID NO: 19635 - DNA, 255 bp, Glycine max
  Clone ID: 700873262H1
ctctgaacaatggcgtctctctctcacctcaacaaactcctctgcatgcccccgctcaactcttcaccctctatttcgccatcacgcagcagcgtcggaatttggaccaaacctgtcggaaggccgaggctactggtgcgtgtccgagcggtcacgagcgacgacgagtgggggccggagaaggaggaggcgtacggcggcggcgtagcggtggaggagaaaccgacgaagtcgagacggagacggagaagctga

SEQ ID NO: 19636 - DNA, 259 bp, Glycine max
  Clone ID: 700873263H1
cagtagaacccccttgtttattcggcatacacatcgtcgggggctagccaccgagtgcagtgcaaccatcggaaaataatggcagagacagattcgtcgtcctcttcagatggagaaccctcgcaatcgctggcgtcgattgcggagaatcttcagcgttctgccattcaatctgctcgaactgtgcaacatagctcttcaactcatttccgtgcctttcagaattttttaccagaagcagtatcacagtatagaacat

SEQ ID NO: 19637 - DNA, 257 bp, Glycine max
  Clone ID: 700873266H1
gaaaagccaaaccattactctaatttcagcattattccatacaaagcccaaaatagtaaacaaaatggccacatcaccacaaactccaatggaagagacaaaccacgtctttggaggaaagccttcattggcttcaaaaatactcacgagccatcttcgaatatttctcgagcaatatcccttaatgtaagcaagtgttttcccgttgagttaccttctatcgcaataaccaattcccattgttgtccacctagacc

SEQ ID NO: 19638 - DNA, 252 bp, Glycine max
  Clone ID: 700873269H1
tcattctcatctttctctcttctctctccacccaaaccctaactaccgaccctgttcccctctcgtatccgtcatgaaaggaggaaagtccaagaccgaatctaagagagccgatcccaaacttgctgtgaataagaagggagccgccaccaaggctaggaaacccgccggcaaggggaaggcagcgaaagaccctaacaagccaaagaggcctccaagtgctttcttcgttttcatggaggagttcaggaa

SEQ ID NO: 19639 - DNA, 251 bp, Glycine max
  Clone ID: 700873270H1
gcggatgccgtcgggaagggcggagaaggaggaggaccacctgctgaacgcggacaccacttcgcgagcttcaaggcgaagttcgggaagaagtacgcgaccaaggaggagcacgaccgtcgcttcggcgtcttcaagtccaacctccgcagagcgaggctgcacgccaagctcgacccctccgccgtccacggcgtcaccaaattctccgatctcactccggccgagttccgccgccaattcctgggctt

SEQ ID NO: 19640 - DNA, 229 bp, Glycine max
  Clone ID: 700873271H1
ctcgccgactacaacatccagaaggaatcaagccttcacctcgtcctccgtctccgtggtggcatgcagatcttcgttaagaccctcaccggcaagactataaccctagaagtcgagagctccgacaccatcgacaacgtcaaggctaagatccatgacaaggagggtatccccccagaacagcagaggctgatcttcggcgggaaacaagcttcgaggacggacgtac

SEQ ID NO: 19641 - DNA, 77 bp, Glycine max
  Clone ID: 700873273H1
catggatataatgtaagacaatattcataaaacacacacaaaaaaaaaaaacagaaaaaaaagaaaaaaacgaaaaa

SEQ ID NO: 19642 - DNA, 248 bp, Glycine max
  Clone ID: 700873276H1
ctcgagccgtgcccttctctcttcaactccaaacacaagacatcaacatccatggctgcctccgtctccactgtcggagctgtcaacagagctcttttgaacctgaatgggtctggacctggggtttcagctcccagttcatccttctttgggagcagcttgaagaaggttattggctcaagggtccccaacacaaagatttcctctggaagcttcaagattgttgctgtagaagagaagaaagagat

SEQ ID NO: 19643 - DNA, 154 bp, Glycine max
  Clone ID: 700873278H1
gaaaaaaaaagtatccactttcccttcttcttcttccatttgggttttctcaaaagtgaaaagcaaattccgtgacttccacaatcaccactcggctcaaactcttgagtgatagactttgaatgaaatcttgttttctacattcaacgcagat

SEQ ID NO: 19644 - DNA, 253 bp, Glycine max
  Clone ID: 700873279H1
atttcgtaggagatgctcaggagcagcacgctaacacagagtgttacagtcacctgtgttcatcacagtcacagacaatggttccaatcaattcccgtaaattatagattctgtgacgctgctcggaactctctatcatccaactccgccatcttcaagtggaaaagaacggctaattataatcgtaaccgttctggaatgggaaccttcaccacgcgcgcgttggcgcagcgctccagaacgccgacgaact

SEQ ID NO: 19645 - DNA, 257 bp, Glycine max
  Clone ID: 700873280H1
gtaactggtgagaaagcaatttgatcaattagaagaagaactttagcaggttgaagagctttattctacaattaatttgatggctcgacaagtgtgtgatgacaaattatcaactggattctgctactctgatgtatcatcgggaaatccaacgatgttggtgaaccagatccaaggctttgtgtcagacccggagatgtacaacctcaccacgggcatggaaatgatagggtttccaaagagtgacaccaacgctg

SEQ ID NO: 19646 - DNA, 253 bp, Glycine max
  Clone ID: 700873281H1
ccggatcaataaatgaagaggatgacacggttttcctgaaagtacaaatttctaacaaagatgggcaaaagagaaacattttctttccatttgacaccatatacgacactgccattgatgtggcaatggagatggttaaagaactggagattagtgacttggaaccattggagattgctaaaatgattgaggaggagatatcagctttggtccctaaatggagggattggggcagtgctgagtatcaaaagca

SEQ ID NO: 19647 - DNA, 250 bp, Glycine max
  Clone ID: 700873282H1
ctcaagagttggtagcaaaagttggtgaaatatttgaggcaattttgcaggagacagatacaataaggcaagaatccagtgaagacatgtctgtacttcgtggtctttcaatcgttttcgataggaagccagaactgaggttggaggggattgcttataaggtacttcagtggtatttatgtagactggagggctggtttgctgcagacactgatgcaatttcactgaaaggatgggaccaggaggtact

SEQ ID NO: 19648 - DNA, 172 bp, Glycine max
  Clone ID: 700873283H1
cggtgctcgtgtctctaacatatttgtagatgtggaaaagttgcagtctagattccaggaagcaatggataaggctaatgattgttctaaggagacagacctccatatagaatcaagaatgtcagcaattcaggctataagatcaatttccaattggttatactggcaaaca

SEQ ID NO: 19649 - DNA, 262 bp, Glycine max
  Clone ID: 700873284H1
ttgagactttggttgatacatttgtattcttagacaagaacaaggatggatatgtcagcaaaaatgagatggtccaagctataaacgaaactacatcaggggagcgttcttctggaagaatagccatgaaaagatttgaagaaatggattgggataaaaatggaatggttaacttcaaggagtttctatttgcttttacacgttgggttggaattgatgaagttgacgatgaggaaaatgacgaggcttaaatcatttcatc

SEQ ID NO: 19650 - DNA, 251 bp, Glycine max
  Clone ID: 700873286H1
ggcttctgtgagacctaccctctctcaactttctccttcccaatccaattttctcagaaaatctacatggaacaatcatctaccttgctatttacacaaaaggatcgctaagttgctaacttttaccacttctaagtcttccactttcagggtttgctgtagttctcaagagaccaataacaaaaacaatggtgaagagcctccagagtcattatttatgaaggaattaaagaggagaggtatgaccccta

SEQ ID NO: 19651 - DNA, 252 bp, Glycine max
  Clone ID: 700873287H1
ggcgaactcttcaacaaggtcgcaaagggaaggttaaaagaagaagtcgccagaaagtacttccaacagttggtttccgcggtggagttttgccacgcgcgcggcgtgttccacagggatttaaagctcgagaatttgttgctggacgaggatgggaaccttaaagtctccgactttggactcagtgccgtgtcggaccagataaggcatgacgggctgttccacacgttatgcggatccaccgcgtatgtt

SEQ ID NO: 19652 - DNA, 247 bp, Glycine max
  Clone ID: 700873289H1
tgaaatgttaaaaatgactgggataaacttaagaattcaattattgaaattgaataagtaaacaatttaattggattggtcgaatggtatcaaaaaaatggagtactaactcccatttcttatttattattgaattaaccgatcaacttgctttgttatcgaacatttctttttgatttcaaaaattttccggaaaaaatttgaatctatttttatatgcgaatcaatcctactacttctggtcctg

SEQ ID NO: 19653 - DNA, 247 bp, Glycine max
  Clone ID: 700873290H1
gccctttaaaaccattactagctgaaatacctgattaattaagtatagtccctcttgccgaggaaactctccaagcatggaacgggtgaggaaaggtgcgaagagactaatgaggatgtacaatgtgagggtgtgtggatattgccctgaaattcatgttggtgcccagggtctcaaagctaaaaactgtgaagcccataaacaccaacaacgcaatgggcagcatggttggcagtctgcagttctg

SEQ ID NO: 19654 - DNA, 246 bp, Glycine max
  Clone ID: 700873291H1
gtcctttcaaaccattactagctgagatacctgattacgcaagtatagtgcctcttgccgaggaaactctccaagcatcgaacgggcgacgaaaggtgcgaagagactaatgaggatgtacgatgtgacggtgtgtggcacattgccctgaaattcatgttggtgcccagggtctcaaagctaaagactgcggagcccataaacaccatcaacgcaatgggcatcatagttggcagtctgcagttc

SEQ ID NO: 19655 - DNA, 248 bp, Glycine max
  Clone ID: 700873293H1
tgaagttatttaaaatgatgctggaacgaattataacattccttcaggtttccatgagcaacatctcatctaattgcaaggagaaattgaattcatatgagaagcagattagaaattttataaatacaaatagacctaggaaaaacatgcctggacatcttccctcacctcatatgcattccatgtcacaatcacaaccccaagttactcaagtgcagtctcatgaaaatcaaatgaactctcagttg

SEQ ID NO: 19656 - DNA, 248 bp, Glycine max
  Clone ID: 700873294H1
gcttgagagaaaaaatattccatttccagaattagtagcactagtgctctcttttgtttcgaaaaaaatggttcaacaggaagtgcgtaaaggtccttggacagaacaggaagacttcaaattggtgtcctttgttggattgtttggagaccgtagatgggactttatagctaaggtatcaggtttgaaggtggcgggagaaagtaaaataggcattagacaaaaaaaatcaaatgcttatttgggca

SEQ ID NO: 19657 - DNA, 245 bp, Glycine max
  Clone ID: 700873295H1
tgggatttacctcatgtccctaaataagaaaagagataaaatattgtccaggaaaaggctcttgttcatatattttgttgatgatctgtcaggttagtagatggtcttgataaaaccaactggtaaaagggtgagaaaagtgaagaagaataacactcaagaaattgtagaacttaattaattaattgtatcccttagtcagttggggcatcccacaaatagtgggatttaacttctagttcatt

SEQ ID NO: 19658 - DNA, 252 bp, Glycine max
  Clone ID: 700873296H1
ctctagctgtcccatataacatggcctcctcttctccctctctaatgttcacagtgcgaaggtgtcaacctgagctggtgtctcctgctacacccactcctcaccaacttaaaccactatccgacatagatgatcaagacggctttcggttccaggttccaattattcagattgttcataaccagccatcaatggcaggggaagaccctgttgaagtcattcggcaggcactggcaaaaacacttgttttct

SEQ ID NO: 19659 - DNA, 248 bp, Glycine max
  Clone ID: 700873303H1
tgatttagcatggtgatgaagaggaaaagcttgctgaagggataaaactttatgctatatcagtcactgccacttcaaagcggacaattctttactgatcttgtaactgtttacgcaaagggtgggaagactatagttattacacagacaggaagagatgctgatgaagtatcattgtcattaacaaatagtataatgtctgaagcactgcatggtgatatatctcagcatcagagagagagaacact

SEQ ID NO: 19660 - DNA, 251 bp, Glycine max
  Clone ID: 700873259H1
gattgatgaggcatggaaacacttcaattccatgcattataaccatagtatcagtccaaggatggaacattatgcatgtatggttgatttgcttggtcgatctggattgcttttagaagccattgaatttattaactcgatgccttttgatgctgatgcattggtgtggcgtacctttcttggttcttgtcgggttcatcgtaacaccaagcttggggagcatgctgcaaaaaagattcttgagagggaac

SEQ ID NO: 19661 - DNA, 256 bp, Glycine max
  Clone ID: 700873228H1
cttcctttgcagtattcgtagttctctgcatcatggagatggaacgcgtcttcgagtttcctcacactcacatggaacggcgcccgagaaagagagcgagattgggctgggacatccctgaggtccccaagataagatacatagcaaaatgggtgaaggaacttttgggcaggtcttacaatgctgggatagagaaaggaaggaaatggttgccgtaaaaattgtccgtcgtattacgaagtatcgagaagcagcc

SEQ ID NO: 19662 - DNA, 258 bp, Glycine max
  Clone ID: 700873229H1
cttgtcatcaaagttaaattccaagagaatgaagaagatactagtatcaatcaagtttctgctttgtttatctctgctctgtgttttgttcttatcatttcctttactccttcaatccttgaagccatccctcatgcaattcttcagctacatggttgaaaaaagctacatgttccttctctgcaatggcctccttcttgttttaatagccatcaactctgctccaatcaatgcctcttcaccaccaacaactgaacg

SEQ ID NO: 19663 - DNA, 83 bp, Glycine max
  Clone ID: 700873230H1
cttactagtggaggagctgatgatatgctatttagttgctacagcgcaatgcaacagcatatcttcagtttttctactagtaa

SEQ ID NO: 19664 - DNA, 263 bp, Glycine max
  Clone ID: 700873231H1
aaagattttatccaattgaaattttaaaaatgactgggataaacttaagaattcaattattgaaattgaataagtaaacaatttaattggattggtcgaatggtatcaaaaaaatggagtactaactcccatttcttatttattattgaattaaccgatcaacttgctttgttatcgaacatttctttttgatttcaaaaattttccggaaaaaatttgaatctatttttatatgcgaatcaatcctactacttctggtcctg

SEQ ID NO: 19665 - DNA, 263 bp, Glycine max
  Clone ID: 700873232H1
catttttcttcctccatctttatcttaaacataacttgaactctccattccttaaattttagctacgagctagtttcgacacagacaaagcaatggcaaagaccgagttagaggtgactgttgagagcaagaacaaagacctcaagcacctggggtttgtgaggattgctgctattcaaacatttgtgattgtgtcaaatctgtatgagtacgcaaagcagaattctgggcctttgagatccgtcgtaggaacggttgagaac

SEQ ID NO: 19666 - DNA, 263 bp, Glycine max
  Clone ID: 700873233H1
cccatgcttggttgtcgtggctgcaggctgggaatttcatacccagaactgactaagatgcaggcccgtgcaatctttcaggctgctgtttcagtgagtaaccatggtattacagttcttccggagataatggttccacttatcggtacacctcaggagttaaggcatcaagtgaatttaataaggaatgttgctgataaagtgttgtctgagatgggttcttctttaagctataaggttggaactatgattgaagttccaag

SEQ ID NO: 19667 - DNA, 242 bp, Glycine max
  Clone ID: 700873235H1
gcgggaacaacaacaactgcagaaagattcagagtgagagagagagaggtgtgaagctcgtgtacgtttatgagatggggtatataccgtagtgctggaatggtagctggttcgcatcacaggaccgcacttgttagagttacacacggctctgatagtaggtctagacccttgtagacttagaatggtcagacttgtcggatatgtggtaataccattggattaacggctactggtgatgt

SEQ ID NO: 19668 - DNA, 259 bp, Glycine max
  Clone ID: 700873236H1
gcagatcatcttgaagggtatcgtggagagtatgtgccattgacggctaaggatgttcagctggagcagtaccaagtttgatttataatatagcttaattagataaattaaattaatcatcatcatgtgtctagattgatgatgcggttaattatatctgctttggtttcttgatgtctttagaaatatcttttgtgtgtgaaattaaggcaggtgtgaagtgaatttcattactctctatatgattggttatatgtat

SEQ ID NO: 19669 - DNA, 254 bp, Glycine max
  Clone ID: 700873237H1
ctggacaacaataacagctgatggtagtccggctgcacagtttgagcataccattttgataactaagactggagccgaaattttgactaaatgttgacatggtaattctttgtttaatccacattgatgttatgaaatatgaagagtttgtgtctaagttgtaaatatgtgccctgaaattaatttgcttctggaatattatgctctggctagtaaagattgccttcagaagctgtataccaaattctctagtg

SEQ ID NO: 19670 - DNA, 259 bp, Glycine max
  Clone ID: 700873239H1
aaaaaaaaacagaattacacagaaactcaatcaaaataaaaaattattatggatcataggttacgttgttttgtgacaatacccaaaattccttttctattgctactttctctgattctcgtcttcagttacgttaacgcagccttcgacctcgctactatacccttcaacgatggctattctccgctcttcggagatagcaacgttgttcgctccgaggatggcaacggcgtacaactccgcctcgatcgctacacag

SEQ ID NO: 19671 - DNA, 254 bp, Glycine max
  Clone ID: 700873240H1
tggagataacaataccataggtatagagagatagttccgagctccaattcccagagtatatgtattgcaactttgcttcgctttttctcttcattgtgtttcttcctcttctacccctttgatctcatgcaatctcgcctcatggatccctttgatttgattcgcaaagggtttggctgaagctatctggaatatttgtgttacatgtttggaggtccatctatgttttaggcatttggtccatattcttgtca

SEQ ID NO: 19672 - DNA, 256 bp, Glycine max
  Clone ID: 700873242H1
cgattattttcttttcttcttcctctctcttcgttctctctctctctctcttattcctttctctccgaatccacgtcctagatccgttgttctcttcccacagttctcactgaatcaggatccattttgataccaagttgctgttgaatatcgagtttgctctttagagatctgtttccctctagacaacggtctgtgtgacctgttattttagttgaatcgaagccgcgaccaaatcttcctgatctttgcctga

SEQ ID NO: 19673 - DNA, 256 bp, Glycine max
  Clone ID: 700873243H1
aaaaaggatctaatgaaaaaaaagaacttttgttttctaacagtttgggggatggaagtcgacttgcccttttctggttctccccaaaaaaatagattttcatcattttttgaccccatttttaaagaactaaaaaaaaaaacgaaacaatttcaatttttcacttttcgagttctaaaagttttaagtgaaaaattgaaattgtttctaactatcttaatagaaaaagcaaaaaggattagcaaaagtattatcg

SEQ ID NO: 19674 - DNA, 254 bp, Glycine max
  Clone ID: 700873244H1
gagctgtgtctggggaaatttgcgttgtttttcgcggtacagctcacacacactgaacggtaagtatggcggacaaggctgttacaatccgaacccgaaagttcatgaccaacaggcttctttccaggaagcagtttgtcgttgatgttcttcatccagggagggcaaatgtttccaaggctgaacttaaggagaagctagctaggatgtatgatgtgaaagaccctaatactgtatttgtcttcaaattccga

SEQ ID NO: 19675 - DNA, 254 bp, Glycine max
  Clone ID: 700873245H1
atctcttccaatttcaatttctcgtcgtccctcatcatggctcgtctcgcgatcgctgtcgccgccgtgctcctcgtggccctctccgcctccaccgcgatggcgtgtccctgcaggaccttcataatctcctcctactcgttccgcaaccctaactccaacaccttcgccaccatcaccgagatccgatccttcacccctctctacatcaccgacaaacccaccggcaaaccctcctcctcctacgacctctt

SEQ ID NO: 19676 - DNA, 80 bp, Glycine max
  Clone ID: 700873246H1
gtaaaattttgtattatattgttgttttatattctatgcacctaaaacttctatttgttacccttttatattgtgtacgt

SEQ ID NO: 19677 - DNA, 260 bp, Glycine max
  Clone ID: 700873247H1
tacacaacgagaaaatgggagaagagatgaccgcaagtatagtagattgaaatatttgataagctcttggggaattgaaaagtttagaagtgtagttgagcaatattatggcaagaaatttgaacctttccgtgcattgccagaatgggaatttaaaagttatcttgggtggcatgaacagtgcgatggcaaacttttttatggtcttcatgttgataatggtcgtattggtggaaacatgaaaaagacattgagggagg

SEQ ID NO: 19678 - DNA, 257 bp, Glycine max
  Clone ID: 700873248H1
aaactatactgcaaaagtttctgattttggtctctccaagtctatcttagatgatgaaaaagattacgtctccactcaagttaaaggaacaatgggctacttggatccagattattatactagtcagaagttgactgaaaagagtgatgtctatagttttggagtgctaatactggagctgattactgcaagaaagccaatagaacgagggaaatacattgtgacagtggtcaggagtacaatagataagacaaaag

SEQ ID NO: 19679 - DNA, 268 bp, Glycine max
  Clone ID: 700873249H1
ggctcgagtgcaattgaagttaaaagccttagccttccctacaactccaaacaaaaagacatcatcatccatggctgcctccgtctccactgtcggagctgtcaacagagctcttttgaacctgaatggttctggagctggagcttcagctcccagttcagccttctttgggaccagcttgaagaaggttattgcctcaagggtccccaacagcaaggtttccggtggaagcttcaagattgttgctgtagaagagaagaaagagatt

SEQ ID NO: 19680 - DNA, 257 bp, Glycine max
  Clone ID: 700873250H1
ccgcggcttcaaccttgtagttattctctttcttcttttttagctatccctctcttgaaaaatctagatctcgttcttccttgatctacgttacgcttttagtgaccggatctgtatggatctgaaccagatctacacgccgatggtggttttggcctggtctttcatagatctgatgcatggaggctcagatctactgtacagagatactgtagataatttatgagaagaacgcagatccagccgcttccgcttgt

SEQ ID NO: 19681 - DNA, 253 bp, Glycine max
  Clone ID: 700873252H1
aagatatctaaaaaccacaaagtcatgagaggaattcacatgttatttatgatattatatatgtgtcaatattatatattagaactgtttgatagttaccctaaatagagagattaatgcacagtgaactcactatacagatccaaaagatttgtattttgtttaataaacttagtaaagtacaacatgaccagcagttattagtaatttgggttaattattgtgctaatatgcatcttacattttataggga

SEQ ID NO: 19682 - DNA, 255 bp, Glycine max
  Clone ID: 700873253H1
aagccattgaagttccttcgtccgcattatggcactcttaagacctattatgaaactatggtggagtctgatttgaagaagtacctggcggatatattgtcggttttggcactcacaatgtctgctgaaggagaacgagaaagcctcaagtacagattattgggttccgagggtgacattggttcctggggccacgagtatgttaggaatctagctggagaaattgctcaggaatacacaaaacgacagagtgaa

SEQ ID NO: 19683 - DNA, 256 bp, Glycine max
  Clone ID: 700873254H1
aaagacggggcctgaaatcgaccagacacatgtgagcacagctgtcaaaggtagttttgggtaccttgatccggagtatttcaggaggcaacaactaacagaaaagtcagatgtgtattcatttggggtagttctgtttgaagttctttgcgcaaggcccgtcatagatccaacacttcctagagaaatggtaaacttggcggaatgggcgttgaaatggcagaagaaaggacagttggagcaaatcatagatcaa

SEQ ID NO: 19684 - DNA, 246 bp, Glycine max
  Clone ID: 700873257H1
cgaaattgtatctcgaaattttgaaagcattgaggaaaatgaaaagataaggtagtagtttttgtaattattattgactaaaaatgaaatattaagccaaccactcatgtttcatgtgtgcagaaattgaaatgaatctacatgtgaaaaattagttgttgagtgtttgggtctgacaacttgggagtatcttgtcccatgttttatgatgcatttatcattcagtgttgtactacttgtaattca

SEQ ID NO: 19685 - DNA, 254 bp, Glycine max
  Clone ID: 700873258H1
tcctcactaggagctcctctccactggttcttcatctgcatgcacacagttgcatagttttggaaaccaagaattcctgaagaagggtagcatcaacaagcagttctgaaaatggagatcaccaatgtcagtgagtatgaggctattgcaaagcagaagttgccaaagatggcgtttgactactacgcatctggtgcagaggaccagtggactctgcaagagaacagaaatgccttttccagaattttgtttcg

SEQ ID NO: 19686 - DNA, 258 bp, Glycine max
  Clone ID: 700873227H1
gattaattgtcacaaaatttatttaaatttacatgcgtattaaatatacattaaaaattttagtcttatatatagcaacatgatttattttagaacataattaacctattaatttagttggttaaaatgttatgctaataacctgaaagtcatagattcaattcttgcttggatcattaattttaaattaattcataacacgtttttttaaaaaaattaaaaaaataatttgggttgaacctcatatgcgatgtttca

SEQ ID NO: 19687 - DNA, 239 bp, Glycine max
  Clone ID: 700873195H1
gtgggggtctgtgaaaggtggtggaaatgatgatgatggactaagaactctgaacattagccaatgcacagcactcaccccttctgctgtgcaggctgtgtgtgactcatgcccttccctccacacctgttctggaagacactcactcatcatgagtggttgtctgaacctgacttctgtgcattgtgtttgtgctggccaagcacaccgtgctatcactctccccatgcagctcattg

SEQ ID NO: 19688 - DNA, 244 bp, Glycine max
  Clone ID: 700873196H1
atttgagtcttcatgtgtaattgacagtgaattctttcgagttcgtattcgatgtatgtattcttttttctagagtttacaaggcgatgactaactcccgaactgcaagtaaaaaaaatgatagaatagaatatagatgtatctataagctctatgacttgtaatagaacttatgcttgatagaaaggttattatcatatagagttgacgaatgagatgaagttgagtcattaaataaagacga

SEQ ID NO: 19689 - DNA, 264 bp, Glycine max
  Clone ID: 700873202H1
gtttattagtattattatcactagctacctgctatcaaagcatcacaaatggcttctacagacaagcctggcggcgaccctgaatacagaacatcttcaactccagctcctgctggtgttgattactttaaatttgatgtcatcctaaggtttctattgtttgcagcatcactggtagctgttgtggtgatcgtcactgctaatcaaacagaggttattcgtgttccacagcctgtgccatggccagccaagttcagatactca

SEQ ID NO: 19690 - DNA, 265 bp, Glycine max
  Clone ID: 700873203H1
tgcgtttcgattcttcttccgaatcagagggattctggatttcttgttgaagatgcgacgctcttctgcatccaaaaagtcgggtcaatccaattccactcccaacgccgccgatctcttccgctctgcttcaagtaaggcaagctcgaaggaatcagaacgaattgatagtctattctattcatatgccaatgggtctaccgggttgattgaaaggaatcgaaacactttgtgctgatatggaggtggatcatacagatgtgag

SEQ ID NO: 19691 - DNA, 262 bp, Glycine max
  Clone ID: 700873205H1
aaaaaaattgttggatctatgttcaaagctgtttaggattgcttagaaagtgaaacggattgaaaagcggcaaaggggattgaattgaaaggttttggaacaagctttatcttctgggatggccatggttaggtgcttctctcttttgcctgtgaggaaggacaaacacaaggggaatgaaaggtcttcaaaagaggactttaacactctacttgccaaactacaatctacaaaaaaaataacatcagagtcaaccactttt

SEQ ID NO: 19692 - DNA, 262 bp, Glycine max
  Clone ID: 700873206H1
ctctgatggttttgacctaggggggcctaaagaggctggagggtccaaggcatatttagatcgcttttggcaagttgggccagaaacatttgctgagcttcttgagaaacttggtaaatcaaatgaccatgttgattgtgttgtttatgatgcattcttaccttgggcactagatgtggctaagagatttgggatagttggtgctgcttatctcactcaaaatatgactgtgaatagtatatattatcatgtccaattggga

SEQ ID NO: 19693 - DNA, 264 bp, Glycine max
  unsure at all n locations
  Clone ID: 700873207H1
ctccgttttccaatctcatttttccacctccccgcggacgcagagctgnctctccggcgtcgagtccctcttcctctgctcctcctcctcctcctcctctctcccgcagccacctccgccgtcgccttccgcaagaagcacaagatcccagggccgatcaaaaccatagtggtgatagttttggagatatgctccttctatcnagttctctgcttgctgctatcctcccgctccgacatcgatggcctcaccggcaccgaatcc

SEQ ID NO: 19694 - DNA, 261 bp, Glycine max
  Clone ID: 700873208H1
cacttaatctatacttcatgcaggtttgtcttaacatttgctctcggagctggcccagttccaggtctccttctaccagaaatctttcctagtcgaataagagccaaagccatggcagtctgtatgtcagtgcattgggtgataaatttctttgttggactactgttcttgcgtttgctggagaaacttggtccacagctgctttactctatgtttgctaccttttgcatcatggcagtaatttttgtaaaaagaaatgtg

SEQ ID NO: 19695 - DNA, 262 bp, Glycine max
  Clone ID: 700873209H1
agcagagctgaagaggtgaagtgaagatgatgtccggaaaatatacgtcgattgacgcgcagagcttcagggatctgttcctgccgttccagattcacgacccgccaccgtcaatttcgcagattcaaatcttcagacttttcctccttctggagctcagggcaagatcaccgctgcttccgggcctcctcgtgacgctgatgattcattttcaaaacctgtatctggttctgatgaaccgcagcagggtggttggtttcag

SEQ ID NO: 19696 - DNA, 258 bp, Glycine max
  Clone ID: 700873210H1
ccacaactctttctcacccgctagtttccttccatcgcatcttgatttcgcaacctcgtctagcaattctccatggagggtgctgggatggaagagaataatattattaatgatgataataagtttgatgtgcatttgacttctgccgctgcttttgtggagggtggaattcaggatgcttgtgatgatgcttgcagcatatgccttgaagctttctgtgatagtgatccctccacggtgacaagttgcaagcatgag

SEQ ID NO: 19697 - DNA, 257 bp, Glycine max
  Clone ID: 700873211H1
cggctcgagtacaaactagtactacttgctttcaataaaaacaaaaacacactctttggtgaccacaacaacaataacaatggctgcctcactacaagctgcagctaccttcatgcaacccaccaaggttggcatagcctctcgcaacctcaaatctacacaatgcatttctaaggcttttggcttggaacctgctgcagctaaactcacttgctcccttcagcctgatctcaaagaatttgctcaaaaatgtgtcg

SEQ ID NO: 19698 - DNA, 255 bp, Glycine max
  Clone ID: 700873212H1
tacatacaaccccacacccacttcgtcacaatgccaaccagacccttctacaccgacgacctgtcccccccgctgcgcaccgcccaagtgctcggcctcacggctgccgctgctctagctggcaagaccttcggcgccagttacggcaccatccccgccttcctccaagccccagcgcccttgctggcccgccaatggtagacgctgtccgactcggacacactgctcgctccagtcatcagtctcctatccagt

SEQ ID NO: 19699 - DNA, 255 bp, Glycine max
  Clone ID: 700873213H1
gttagtttttttttaggttaatcattgttagcctggaagaaaacaatttctttttattattttcttctgaacattattaattaattgcatatatcatgcaccaatataaattattacatattttaaaggtaattctcatgacattttcatttgaaatatgactccttaataagattaataatggcttaaaagtaagcaatattctatcataatatgctcattctcctgtgaataacaatttcttaattttttctt

SEQ ID NO: 19700 - DNA, 258 bp, Glycine max
  Clone ID: 700873214H1
ctcgagccgaatcggctcagtgatgttgttcgccgccactgaccactgaacactgatatcctcactccttcatggccacttcgctgctatctttctccatttcgcccacaacctcagccttcagattcaaagcctccgccatggctaccaccatcgccgcccctgctaccaaggtggctcccgccgtcattgtcggcggcggaagagtgggcagggccttgcaggacatgggcaccggccaagacctcctcgttcgcc

SEQ ID NO: 19701 - DNA, 260 bp, Glycine max
  Clone ID: 700873215H1
cttaggttaaaagttggaactgagtgattacccaactaatgtaatgatcagttggaagcgttggcaagaaagaatacgtaatagtggtgttgtttgttcattttggtcaaagaaatagtatctgggtacccaggatattgtagttgtaagatgggttatctcaattcagttttgtcatcttcaagccaggttcatgttgcagatgatgcaattgtgagcggcgggggtctaagtcacaatggaaaattcagctacgggta

SEQ ID NO: 19702 - DNA, 264 bp, Glycine max
  Clone ID: 700873216H1
ccaaaagctccaaagtgaattacataggcttcagggacttcactctcatgctaatatcatttatgctgattattacaatgccatattgtcattatatcgtgatcccacaatgtttggttttactaatcttaaaacctgttgtggaatgggaggtccatataattacaacgcatcagcagattgtggggatccaggagtgaatgcttgtgatgatccttctaagcatattggatgggatggtgttcacctgactgaggctgcata

SEQ ID NO: 19703 - DNA, 261 bp, Glycine max
  Clone ID: 700873219H1
gatttatcaaaggccaatcttcggtagaagagaaggttcctttggaacacttatttctatttcagtataccgggtctctttctttcatttcaaaaaatttatagaatttcgattttgaaatgaaagaaaagtgtggggataaatataaatgacaaaaagatattggaacataatcttggaagagatgatggaagcaggagttcattttggccacggtactagaaaatggaatcctaaaatgtcaccttatatatctgcaaa

SEQ ID NO: 19704 - DNA, 261 bp, Glycine max
  Clone ID: 700873220H1
caaaagtcttccgtacattcaatgcatcgatcacattggatgttatgttgaataaggaaactaaagatggagatgttggggaaaagattgttgtttatcaacatgcaaataaacaggttgctatcatttgtaatcatcaacgcagtgtttcaaaatctcatactgcacaaatgtcaaagttaactgaaaaaattgatgaacttcaggctgttctgaaagagctgaaaacggatttagacagggcaaggaaaggaaagcccc

SEQ ID NO: 19705 - DNA, 260 bp, Glycine max
  Clone ID: 700873221H1
ccctttctttttctctctaccctccaacgtgctctcttccctcctccacttcatccaaatctttctcattttctctcccaaatcacactctcaattacaataacacacactcaacttgagaattttccccaaaaatcccaagagctcgcgccatggtttccccggaaaacagcaattggctgttcgattacccgttgatcgacgacgacgttattcccgtcggcgactcctccttcgccgtctccgcttccaccttctcc

SEQ ID NO: 19706 - DNA, 261 bp, Glycine max
  Clone ID: 700873222H1
aggcgttatggcttactcggattaaatggttgtggaaaatctacactgcttacagccatcggtagtcgggaacttccaattcccgaccacatggacatatatcatctaaccagggagattgatgcctctgatatgtctgcattggaagctgtcataagctgtgacgaagaaagattgaaattggagaaagaagcagaagctttagctgcacaggatgatggaggtggtgaatcccttgaacgcatttatgaacgattggat

SEQ ID NO: 19707 - DNA, 262 bp, Glycine max
  Clone ID: 700873223H1
aattcctgtaatgtgcaccagtaaagaccaaagtatgattattgttacattatgctatatgattgtacttgtatatacatattttgtcccgcctttgtaaatacaattgggacactactaggattgggaagaagggtctttacatttttagtttggcaaatagatattgcaactacctttgtataaatctatttctgaagaagcaattacaactttcaagggatgatagcattttgtggcataaggattaaggaggcataaa

SEQ ID NO: 19708 - DNA, 260 bp, Glycine max
  Clone ID: 700873224H1
ggccagaaaaaccatgaacacgccgtggcgtcggaattgaatgcgcgcgtgccacgtgtcgaacgctacaacaattttcttctccaattcaatactagtactataacatagacgattagacggtggagtctgatgatggttcagctgtagtagccacatctggtgaatctgtgacagaggttctgaaaattaaggagtgggaggtgggaatgttccaaaatgaggttgcagctagccagggtataagaataaggagaagg

SEQ ID NO: 19709 - DNA, 258 bp, Glycine max
  Clone ID: 700873225H1
caagaacaaagaaaaaaaaaaacccttagccaacacaaccatcatggccacctctgctattcagcaatcagcattcactggtcaaactgctctgaagcagctcaatgagttcgtccgcaagaccggtggcgccggcaaaggtcgcactaacatgcgccgcaccgtcaagagtgctcctcagagcatttggtatggccctgaccgtcccaagtacttgggtccattctcggagcagattccatcatacctgaccggaga

SEQ ID NO: 19710 - DNA, 254 bp, Glycine max
  Clone ID: 700873226H1
gacgtatggtgatggaggtgccgaagctgggaaaacaagccgcaacgaaagcgattaaggagtggggtcaaccaaagtcaaagatcacacaccttgtgttctgcaccacttcaggcgtggacatgcccggagcagattaccagctcacgaagcttctcggcctgaggccctccgtgaagcgcctcatgatgtatcagcagggctgcttcgccggcggcaccgtactccgcctcgcgaaggacctcgccgagaac

SEQ ID NO: 19711 - DNA, 236 bp, Glycine max
  Clone ID: 700873192H1
aattgttgtaactttttgattcctaaattctctaaaattcgaaattctaatttcgttaggggaaagagattgtttgtgtgtgagtgagtatggctggaaaaggcgagggtcctgctatcggaatcgatttgggaacgacgtactcttgcgtcggcgtgtggcaacacgatcgtgttgaaatcatagccaacgatcagggtaacagaactaccccatcctacgtggtttcaccgaca

SEQ ID NO: 19712 - DNA, 249 bp, Glycine max
  Clone ID: 700873156H1
actatcgtgacaccatgaacatcaatggactcgcaagacaatcactcatcaatgcaggtggcattattgagcaatcatttctgcctgggccatttgctgtggagatgtcttcggcagtttacaaggggtgggttttcactgatcaagcccttcctgcggatcttatcaagagaggaatggcagtggaggatccatcctctccctatggccttcgccttgtgatagatgactaccctatgctgttgatgg

SEQ ID NO: 19713 - DNA, 247 bp, Glycine max
  Clone ID: 700873158H1
ccgtgttgcttcctatgagctgttcttatctgattctcaaagaacgacttcagaaaatttgtccgccttgtttagcctccttttacgtcattcagcaaccttcgagatcttctcctgtctatctgttgaaattctgttgccttgaccggaagggcttgttacacgatgtaacgaaagtgctctcggagcttgaacttaccattcaaaaggtgaaagtgaccacgacccccgatgcagagtcttggac

SEQ ID NO: 19714 - DNA, 247 bp, Glycine max
  Clone ID: 700873159H1
cttcaaaatcggttttgggtgtgagtgaatctcgtgagttgagattttttttttctttctttctatctttgcaccgatgaggatccggaaaaggccggtgcttttcccttcttggctctcgccgttgcgtctctcagatccccacctgatcaaccggtcaccggtggtggtgcaactaagcgacgctacttccaccgcaccgaaactttcttcttcttctgctgctgcagtgttcctcaccatgctg

SEQ ID NO: 19715 - DNA, 248 bp, Glycine max
  Clone ID: 700873160H1
attcaagaagaaggttagccgatgtgtgcggaagtcacaagaaatgttgtgatttacagcttggattctcatcttccttttgtgaacagaaggatatacaacttaatgtgtggattggttcacctgttactgttgaaccgagtatagtgccatttgtcttggaaaaaccaactgtattctaagtgcttggcacttctttacctgtatatggctgttttccctagcgcttcagtatttgtttacttgga

SEQ ID NO: 19716 - DNA, 247 bp, Glycine max
  Clone ID: 700873161H1
ccaaatcctccgtttttctctctgaattctggattccaatagttgttgtgttctgaagagagaacaacatgtcaagcaattcagatgcagcagcagcgacggtgcatgctcatggccgtttggccatgctcgccgctcacctcctcccctctcaactcactcatcacggcgccctccaccctctccatctctcctcccagttgccgccgccgcccaacctcgccggcactttgccgtcgtcgacgaa

SEQ ID NO: 19717 - DNA, 246 bp, Glycine max
  Clone ID: 700873163H1
actcgagccgattcggctcgagggatgaatcaagccaatccaatagcattcaatatacagatatctgggctcagagagatgcaccggatttatgccatgaagagttaaaagagatgcactgtgaccaagctcatgaggcatcaaactcatcaaacatcaaggaggatagaaaaactgttaatgtggatgaacaaagtgatctcaataccaaaaagtcttcttcaaaccctgcacaaattgtgtttt

SEQ ID NO: 19718 - DNA, 247 bp, Glycine max
  Clone ID: 700873164H1
tcgcgcccaaggggaccgtcgatgttcatgagatgctcttcaagaccgctgactatttgaccagagggggtgactctggcactttctcgccgatgcacatgatcctctgcagaaagccccatgacaaggacgaccataactgagcgtttcattgggaaattccaaaactataacaaccaccaccttgtttctttccggtactctctttttttttttcataattatcattatcttggtttaacttatt

SEQ ID NO: 19719 - DNA, 249 bp, Glycine max
  Clone ID: 700873165H1
cagctaaagagggagaaagagaaacctatgtataacttcttcacggggcagtgaacgatttattagaaagtcaaggaaaagaatttgtcctaaatagagaaaaaataaagtatttgtaatagcactataccttgattaccttccatccgtagattcctttccagcatcatcggattaatctctctcttctaacactcccactgtagttcgatattattctatccaaattcgaaagttttttctcacaca

SEQ ID NO: 19720 - DNA, 247 bp, Glycine max
  Clone ID: 700873166H1
aaatgtacagtctctttcttcatagcatttggaaatttggctgatgacaccatcaattttgaggctttttcctgaatctctccaaactgcaccagcttgttgggaaaagcctcaaaattgatggtgtcatcagccaaatttgaggcttttccccacaagctggtgcagtttggagagattcaggaaaaagttgtattgaaattttcacaagaggaatttcttacagcttggtcacttccgtgcgtcc

SEQ ID NO: 19721 - DNA, 245 bp, Glycine max
  Clone ID: 700873167H1
aagatgctgacctctcttcatcttctggacatgattctcaaataccaaacccccatctagcaaacgggcaaccgatgtctggtgagtttccatgtgctacttctgatgctcaatctatgcaaactacatctataggtcaatccgaaaaggttcactcactttcatatgctgatccaaagcaaccaggtcctgagagtgatgaagagataagaagagtgccagagattggaggtaaagtgccggaa

SEQ ID NO: 19722 - DNA, 246 bp, Glycine max
  Clone ID: 700873169H1
atggccatgtcgaaaatgatgaatcttggcacccattgccagagaaaattttcaagagcttggataatgtaacacgcattttaagatttactctaccttttccattgcttgcatatcctatctacctgtggagcaggagtcccgggaagactggttctcactttaatccagacagtgacttgtttgttcccagtgagagaaaagatgttattacttcaacaatttgttggacgctatggctgcttt

SEQ ID NO: 19723 - DNA, 247 bp, Glycine max
  Clone ID: 700873170H1
caaaacactcataacacaaagcacaaagcaaagctcatccttgagttaaaaaatggcagcagcttcttccatggctctctcatccccatccttggctggcaaggccgtgaagctgggcccatcagccccagaagtgggaagggtgagcatgaggaagaccgtcaccaagcaggtctcctcaggaagcccatggtacggcccagaccgagtcaagtacttgggcccattctctggcgagcccccgtcc

SEQ ID NO: 19724 - DNA, 242 bp, Glycine max
  Clone ID: 700873171H1
gtgaaaagaatgcagactatgctgtgaaggtgagtggagtggaaatattgcctgaccccgtggagagaggagtgccattcacctttaagatcccagcttatactcctgaaccaattcaaagcggtgacttgttatatgaaatttcttatgctggaatagaagcacaacctgctacatttctccatgatctctgtgaggaagcaccatgcccagtacctgcaggcaactttggctcgttcaca

SEQ ID NO: 19725 - DNA, 243 bp, Glycine max
  Clone ID: 700873172H1
ccaagctccacaggatgctggaactcactatgctgtcatgagctcctacgagtaccttagcactggacttcgccagtacttggacaacaacatggatggattttacattgctccagcttttatggacaaacttgttgttcacattaccaagaacttcatgaccctgcccaacatcaaggttcctctcattcttggtatctggggaggcaagggacaaggaaaatctttccatgtgagcttgtc

SEQ ID NO: 19726 - DNA, 243 bp, Glycine max
  Clone ID: 700873173H1
ggaacgagtatgaagaaattaacgatacttctttaccttttgagttgttctgccggatcggtcgctcaagacctttggtctctacccggacctgatgaaaaaaatgggatcacatcttatggactcgttgagaataattctgatctagttcatggcctattagaagtagaaggcgctctggtgggatcctcacgtacagaaaaagattgcagtcagtttgataaggatcagtgacattgcttc

SEQ ID NO: 19727 - DNA, 245 bp, Glycine max
  Clone ID: 700873174H1
gattaacattcattcatcgaaacacagagagaagaagaagaatgagcagcactgaagcttcctccatcaacaaaaagaccaaacgccatcaaaagaagtccctctccctccccgcccgtaacggaatcaaccctccggatgatggcggagaaagaaccgttaagaagcttcggttgtctaaggcgctcaccatccccgacggaaccaccgtctccgaggcctgcaggcgcatggctgctcgccgc

SEQ ID NO: 19728 - DNA, 239 bp, Glycine max
  Clone ID: 700873177H1
ccgctcgagctcgagcgctcgagccatcaccatcgcgcccaagagagagagagagagagaggagcgaaactgagcgaccgaaggggaagaagaagggagcgagctttgtgatcgattgcgcgaaccggtggaggataaaattatggacattgcttctctggagaagttccttcaggagaggattaaggttggcggcaaggccggtgcactcggcgattccattactgtcactagggaca

SEQ ID NO: 19729 - DNA, 243 bp, Glycine max
  Clone ID: 700873179H1
gtgaactgcttcttcttcgcaaccatgaattcttggcagagcaagaacaactcaaggctaaatacaatataatgcaaaaaaatattgacgaatttggaagagaccctaaaaatcgttccattgtgtttgatagaccagctcgcattgagattataaatgagcaatccgaaataccactggttgtttatgtgtctcgtgaaagaaggccaaatgttcctcatacatacaagggggagccctcaa

SEQ ID NO: 19730 - DNA, 243 bp, Glycine max
  Clone ID: 700873180H1
tcgagacagaatcggggtcaacgtgggtggctgacctgaagcaagcgtcttcggcggcggtggtgatgttcgagaagccgttgatgaatctgagcttcaaggacctcattgttgcaacgtcacacttcgggaaggagtcgcttctagcggagggaaggtgtgggccagtgtatagggcagtgctacccggggacctccacgtggcaatcaaggtcctggaagaggccaggacgttgatcctga

SEQ ID NO: 19731 - DNA, 244 bp, Glycine max
  Clone ID: 700873181H1
aaaaaaaaagattgcctctttgattcactgagtatagattaagtttgagaaacattgttatgatacttggagttgatattgttttgtgattttatttttttaatataatgaaggaattagcatttatgttatgttatgctaggcagaattaaaggaacatgaattctgatggttgttgtgcttattttttgtttttgctaggttttgatgacatggatagtatctttgctctcctgacgatttt

SEQ ID NO: 19732 - DNA, 242 bp, Glycine max
  Clone ID: 700873182H1
caaagcctcacaaactctagatcaatatcttgctccgaaagttcaagaaattctagttttagagaaccttcagacaacctgaccttagaggagccgttgaagttggatacagcagcagaactgtaatcaagagatcaacacttgccatcaaagactacttccactccatcaattttgcatttactgaaactgaatgctccagagtggccctatgcaatacttgggtcagtggtgcaatattg

SEQ ID NO: 19733 - DNA, 242 bp, Glycine max
  Clone ID: 700873185H1
cagccttgaacttgaactatcgtgtcttcttggctttctctgttcaggatcaacatggatattgtatcacgagctttgctatttccgttggctatacttgtgctcatattaagcacaccttgctcaggtgcttttgggaagagtggaactaatgtgaaaacagctatttttctgtcccccaagtttgaacttggaccaggatcggtagccaataaatatgattatgacctgattttccaaga

SEQ ID NO: 19734 - DNA, 243 bp, Glycine max
  Clone ID: 700873186H1
cttcagcctctacagcagagtcccagatctctgcattccaattcccatggctggtcgctatgacagtaaccccttcgatgaggaagaagttaaccccttctataatcctggaagtgttcccgctgccactaattcaaggctttcacctctgaagccagaacctgttgattataattatggctttggtgcgacagttgatatacctcttgattcatcaacggatttgaaaagaaggagaaggaa

SEQ ID NO: 19735 - DNA, 243 bp, Glycine max
  Clone ID: 700873188H1
ctcttcacccatcaaaaaaaatcttttccctttctctctagaatcttcctcatcccctaccttaaattgcttctaccctaagccccaagtaacgtttcactcattcacattcacacactcaatgaagcgagttacagtgaaagttgaagaaacaatggcgtatgctaatgctgcttcaactagcccaacaacatcttcaaacctctccccgcaacccatggaagggttgccgaggtgggtccc

SEQ ID NO: 19736 - DNA, 239 bp, Glycine max
  Clone ID: 700873189H1
gttggtgaccagaaatgggtagtatggatatgttccttcaatgtccccatggcacctggtaagactcgctccattgtttgcagtgctcgaaacttcttccagttctcagtgccagggcctgcctggtggcaagtcgttcctagatggtatgagcattggacttcaaataaggtatatgatggagacatgattgtccttcaaggtcaagagaaaatcttcctttcaaaaccaaggaaggt

SEQ ID NO: 19737 - DNA, 250 bp, Glycine max
  Clone ID: 700873155H1
cggaatatccataggttctattacgctatgtctgctaagtggtcaagttcacatctacatacttatggttcttttctctgagagcactactccttttgtaaatcttagatggtaaatctgttgttcagaattccatttaccttcatgtacttttcttaccattacttatgacattaattacatatataggtacttggatgttgctggccttaagagctccaaactttacatttggatggcattgcattgt

SEQ ID NO: 19738 - DNA, 258 bp, Glycine max
  Clone ID: 700873124H1
aagtagctgtggtgaagcaaaaagccctattagtaatatatcagcgcaagaacaaagcagccaggatcctgcgggttcagggggaaagacgaatgagaatgtgacaagaacttccaaagctgatcagggggagaatccatctaggaaacaccatccttcccagaaaacaatgggaagacacattgggacaaactcaatggaagacatgccttgtgtatttacaaaaggggatggtcctaatggagaagaattgagggt

SEQ ID NO: 19739 - DNA, 256 bp, Glycine max
  Clone ID: 700873125H1
tcctcactaggagctcctctccactggttcttcatctgcatgcacacagttgcatagttttggaaaccaagaattcctgaagaagggtagcatcaacaagcagttctgaaaatggagatcaccaatgtcagtgagtatgaggctattgcaaagcagaagttgccaaagatggcgtttgactactacgcatctggtgcagaggaccagtggactctgcaagagaacagaaatgccttttccaaattttgtttcggcc

SEQ ID NO: 19740 - DNA, 253 bp, Glycine max
  Clone ID: 700873126H1
gtgatttcagtgagtgatcggtgttcacttgatctcatcataatcgtcagcgtcaattgaagaagatgccgatcagaaacatcgccgtcggaaggcctgaagaggcgactcaccccgacacgttgaaggcggctttggctgagttcatctcaaccttcatcttcgtgttcgccggctcaggctccggcatcgcctacaacaagctcaccgacaacggcgctgccacccctgccggcctcattccgcctccatc

SEQ ID NO: 19741 - DNA, 255 bp, Glycine max
  Clone ID: 700873127H1
gaagcatctaagtgagatacacagtagttacgtagcaagcataagtgtctaaccttagacacatttctgctacatatcgtgtgcattttggaattctgccactaaaattctattcatctatggctgcctcatcttatgctatgcaatcaatccttgcaaaccctatgatccgcatttccagcgggtctagggagaaccattttggtgttcctgcttatcacatgagaaggaatgttggcctgagagttaggtcca

SEQ ID NO: 19742 - DNA, 252 bp, Glycine max
  Clone ID: 700873128H1
ggaaaatacggggagaatcttgccggaagcaccggtaacctaagtggtacaaatgcagtgaaattgtgggttgatgagaaatccaagtatgactacaattccaacacgtgcgttggtggggagtgcaggcactacactcaggttgtttggaaaaactctgtgcgtcttggatgtggaaaagtaaggtgtgacaatggaggcactttcattacttgcaactatgctcctcctggcaactatgtggccaaagac

SEQ ID NO: 19743 - DNA, 253 bp, Glycine max
  Clone ID: 700873129H1
ctagaggccagggtctcggagtgtttgggtttgtttatcttaaacaccacaaacacagaacagaggtgtagagaagaaagctcaaaaatatggcggcagagtcatcactgagggtggcgactcccactctttgcaacctcaatgggtctcagagacgaccaaccaccaccactctctctccgcttcgcttcatgggttttcgtcctcgaccctcctctcactctctcacctcctcttccctttcacacttctt

SEQ ID NO: 19744 - DNA, 250 bp, Glycine max
  Clone ID: 700873130H1
ggaaaatacggggagaatcttgccggaagcaccggtaacctaagtggtacaaatgcagtgaaattgtgggttgatgagaaatccaagtatgactacaattccaacacgtgcgttggtggggagtgcaggcactacactcaggttgtttggaaaaactctgtgcgtcttggatgtggaaaagtaaggtgtgacaatggaggcactttcattacttgcaactatgctcctcctggcaactagttggccaaag

SEQ ID NO: 19745 - DNA, 253 bp, Glycine max
  Clone ID: 700873131H1
ctcatccatcatgaaaggaggaaagtccaagaccgaatctaagagagccgatgccaaacttgctgtgaataagaagggcgccgccaccaagactaggaaacccgccggaaaggggaaggcagcgaaagatcctaacaagccaaagaggcctccaagtgctttcttcgttttcatggaggaattcaggaaggtgttcaacaaggaacatcccgacaacaaagcagtgtctgctgtgggcaaactgctggagcaa

SEQ ID NO: 19746 - DNA, 248 bp, Glycine max
  Clone ID: 700873132H1
cccaaacgcatgagtggaggtgggaaagcgctgtgttgggttgttgctttattttcttcctcctcgtcacaagatacttcaacaaacgacagccaaagttcttctgggtgtcagcaatggcaccactgacgtccgttatattgggaagtctgctggtctatgtcacacacgctgagaaacatggagttcaagtgataggaaatttgaagaaggggctgaatccaccttcggcaaggatttggtgtttg

SEQ ID NO: 19747 - DNA, 258 bp, Glycine max
  Clone ID: 700873133H1
gtgagcacaagcttggttctagtagttttagtagctctcacagttcaaattttctacatttcacccatagatccagttttgctggatataaaacctgctccttcaaccaaagacaatcaattacagaatatcattaagcttggagaaggacttttgaaggaaccagaagatgttgttgtagataaagaagggactctctatacagctactcgagatggttggattaaaagattgcgcaggaatatggaaaatgggaga

SEQ ID NO: 19748 - DNA, 256 bp, Glycine max
  Clone ID: 700873134H1
caattttgccagacatttgataagaaagcaagattggaaggctttgcaagagtttgaccagctccagaaagaactagaagaaggtggagtattcgagggttggaaagagggtgacatagaattcgctccaacatataaatactcatcctccactaccaatagatactgtggtagcctccctagtagatccggagaaaaacaaagaactccagcatggtgtgatagaattttatggtatggtaaagagtggagcaac

SEQ ID NO: 19749 - DNA, 256 bp, Glycine max
  Clone ID: 700873135H1
cacaacacactctgtgaaaaagggggagtttcttattccttctagacgcttccattgatcggcgatttctgatacatggcggacatcacgaacacgaggaagtgaagggtgagtccttgttggagaagatttctgggaagatccacgaccacgattcctcgtcttcgtcggattccgacaacgacaaaaccagcgccactgattccttcaagtctaatgttttcaggcttttcggcagagaaagcccattcatcat

SEQ ID NO: 19750 - DNA, 257 bp, Glycine max
  Clone ID: 700873136H1
tatgagtccaaagaagaggacttgcagaacaagagccctttgctcctcaaaatgaacccggttcacaagaaaatctcggttctcatccacaatggcaaacccatttgtgaatctctcgttgctgttcagtacattgaggaggtctggaatgacagaaatcccttgttgccttctgacccttaccagagagctcaggctagattctgggctgactttgttgacaataagatatttgatcttggagaaagatttggaca

SEQ ID NO: 19751 - DNA, 255 bp, Glycine max
  Clone ID: 700873139H1
ggttgattcaagaaggggaaaaggaggccaaatcagaaagaccgagaaagttgcggacagatgggactagaagtgctattaagctggcagaaaggaggatatatttcatcacgtgttgggttcatgagcagccagaggaagcatggttttctttagcggccattgtaagagcagaaaagacatcagccatggaatttcaacagagcaataaatctgaaaatttgaacaataaggcagaggcaaaggcaaaagttt

SEQ ID NO: 19752 - DNA, 253 bp, Glycine max
  Clone ID: 700873141H1
cttcttccatggcctccaagcggattctgaaggagcttaaggacctccagaaagaccctccaacctcttgcagcgccggtcctgtagcggaagatatgtttcattggcaagcgactataatgggtccccctgatagcccttatgctgggggtgtttttctagttactattcattttcctccggattatccattcaagccacccaaggttgcatttaggactaaagttttccacccaaatatcaacagcaatgg

SEQ ID NO: 19753 - DNA, 248 bp, Glycine max
  Clone ID: 700873142H1
gaagcatctaagtgagatacacagtagttaggtagcaagcataagtgtctaaccttagaaacatatctgctacatatcgtgtgcattttggaattgtgccactaaaattctattcatctatggctgcctcatcttatgctatgcaatcaatccttgcaaaccctatgatccgcatttccagcgggtctagggagaaccattttggtgttcctgcttatcacatgagaaggaatgttgcctgagagtta

SEQ ID NO: 19754 - DNA, 251 bp, Glycine max
  Clone ID: 700873143H1
ccttgatcaagaattgaagcattaatcttcaaccatggccacacccttggcctaccaagagcaccttccggcggcacccagttggctgaacaaaggtgacaacgcatggcagttaacagcagccaccctcgttggtcttcaaagcatgccgggtctcgtgatcctctacgcaagcatagtgaagaagaaatgggcagtgaattcagctttcatggctctctatgcctttgcagcagtctaatatgttgggt

SEQ ID NO: 19755 - DNA, 249 bp, Glycine max
  Clone ID: 700873144H1
gaagcatctaagtgagatacacagtagttaggtagcaagcataagtgtctaaccttagaaacatatctgctacatatcgtgtgcattttggaattgtgccactaaaattctattcatctatggctgcctcatcttatgctatgcaatcaatccttgcaaaccctatgatccgcatttccagcgggtctagggagaaccattttggtgttcctgcttatcacatgagaaggaatgttgcctgagagttag

SEQ ID NO: 19756 - DNA, 251 bp, Glycine max
  Clone ID: 700873145H1
ccgtggtggcatgcagatcttcgttaagaccctcaccggcaagactataaccctagaagtcgagagctccgacaccatcgacaacgtcaaggctaagatccaggacaaggagggtatccccccagaccagcagaggctgatcttcgccggcaagcagctcgaggacggacgtacccttgctgactacaacatccagaaggagtcaactctccacttggtgttgcgtcttcgtggtggatgcagatcttcgt

SEQ ID NO: 19757 - DNA, 251 bp, Glycine max
  Clone ID: 700873146H1
gagaataatcatattaaatattaaatagaaaaaatggcccgatcatttatcaaaggccaatcttcggtagaagagaaggttcctttggaacacttatttctatttcagtataccgggtctctttctttcatttcaaaaaatttatagaatttcgattttgaaatgaaagaaaagtgtggggataaatataaatgacaaaaagatattggaacataatcttggaagagatgatggaacaggagttcattttg

SEQ ID NO: 19758 - DNA, 252 bp, Glycine max
  Clone ID: 700873150H1
aagcagtctgctgaggaaagagaagaaagaagagttaaggctagaagacgcatgttgggaaacatcagattgattggagaactatacaagaagaaaatgttgacagagagaataatgcatgagtgtatcaagaagttactgggtcagtatcaggatccagatgaagaagacattgaagctttgtgcaagctgatgagtactattggggagatgattgaccatccaaaagccaaggtacaatggatgcatatt

SEQ ID NO: 19759 - DNA, 250 bp, Glycine max
  Clone ID: 700873151H1
ggaacatggagaagactttgtggacatgctggatggtatcttctcatttgttctactggacacccgtgacaacagttttatagtggctcgggatgctattggggtcacttccttgtacattggatgggggttagatggctctgtttggatttcatcagaaatgaaaggcctgaatgatgattgtgaacactttgagtgttttccacctggtcacttgtactctagcaaagaaagaggttccgcagatggt

SEQ ID NO: 19760 - DNA, 252 bp, Glycine max
  Clone ID: 700873152H1
ctttgtcttttgcttgcgaatctgaatcgaataataatcaatcaactctcatgtcgtcggcgaagaagatcacactgaagagttcggacggcgaggctttcgaggtggacgaggcggtggcgctggagtctcagacgataaagcacatgatcgaggacgactgcgccgacagcggcatccctctgccgaacgtgacgagcaagatcctggcgaaggtgatcgagtactgcaagaagcagtcgaggccgcgaa

SEQ ID NO: 19761 - DNA, 250 bp, Glycine max
  Clone ID: 700873154H1
aattgttgtaactttttgattcctaaattctctaaaattcgaaattctaatgtcgttaggggaaagagattgtttgtgtgtgagtgagtatggctggaaaaggcgagggtcctgctatcggaatcgatttgggaacgacgtactcttgcgtcggcgtgtggcaacacgatcgtgttgaaatcatagccaacgatcagggtaacagaactaccccatcctacgtggctttcaccgacaagaacggttgatc

SEQ ID NO: 19762 - DNA, 256 bp, Glycine max
  Clone ID: 700873122H1
gtaaattaccaagtcatttctccgaaggatctagcaaaatctattttatctgaagcaggctggtcaaattttctgtgcaaaggaaagaaatttcatgagcctctggatctggcactcttattcgttggtagagagttacaatcttcagatttaagcatgaacaaacatgcaaactcagctcttttggacctgctcaagaactctttcgccagatccaacacttctgtggcatttccctatgttctacatcagagga

SEQ ID NO: 19763 - DNA, 258 bp, Glycine max
  Clone ID: 700873084H1
gttaaatatttctcaagagtgaagcacaatttaacttgcattatcttgatatcctcccttttttttcaaaaaatgtccttctccctctaaaaaattattagatggttcatattattatgttcttaactaatctctatatgataagtaattaattgttattaactttttttgtaaattaaaatctttaactgttttttgttagcgctaaaaatggttgacgatcaaaatagccattttaaaatggctgacatgtgccca

SEQ ID NO: 19764 - DNA, 256 bp, Glycine max
  Clone ID: 700873085H1
aattcctgtaatgtgcaccagtaaagaccaaagtatgattattgttacattatgctatatgattgtacttgtatatacatattttgtcccgcctttgtaaatacaattgggacactactaggattgggaagaagggtctttacatttttagtttggcaaatagatattgcaactacctttgtataaatctatttctgaagaagcaattacaactttcaagggatgatagcattttgtggcataaggattaaggagg

SEQ ID NO: 19765 - DNA, 255 bp, Glycine max
  Clone ID: 700873086H1
actaatccaagtgctagaagttgtgatggaacttgcgtgtaacattcttagcattctcaatgtcttaggtgcaaagagaagatgctaagtttgagatgatcttactatatttttcatattggaccgtcttcctctataattttgagttacagtgtccacttaaattgaatttggtgccttttccttttgtcctatattcgagatttatttttttaaaatttatttcttttgtttgacgtacaaatattagtacat

SEQ ID NO: 19766 - DNA, 254 bp, Glycine max
  unsure at all n locations
  Clone ID: 700873087H1
catcaacccaaaacaaagaaacaatggctctgagattcgcagcagctgcttctgcttctgtctcacgaatatcaaggccacaaattccaccattcttttcacttcaacaccgcaacaacggtactctcaaattccatagcccaccttttcatcatccacttcccacaccctcaaaacgctgcaacgttcgagccataagcgaggtagctgtggaacctgaaatttcaaagaaagaacanaatgagtcacctaaa

SEQ ID NO: 19767 - DNA, 255 bp, Glycine max
  Clone ID: 700873088H1
attgaattacacctctctttcatgatgaaaaaatcaacaacaccaaaagctgttcctatgccgggtcatgcagtttgatacattctttgtaaccacagatataagttataagccatgaagaatgaggcttgatgagctttctgcagacagcaaccgtttgtattattggaattcaattatagattgtggggtatgtattgttgcataaactaaggcacttttaactaactagaagtgctttcttgtagatgaagt

SEQ ID NO: 19768 - DNA, 252 bp, Glycine max
  Clone ID: 700873091H1
gtcgtgtattcctatttcctagtttcattcagctcactgatttcaattacattgcataggcaattttgtaaatcagaggctaagagacttgtagtaatttgtaaagacgcctctgaattttggtccaccaccacacccttcttctcatctccaccacaccaggtgttgttgcgcttcagaaatggcttccggagctgtgccaactacgttttctaccctcaagacatgggattccagtttggggtttgcaaa

SEQ ID NO: 19769 - DNA, 253 bp, Glycine max
  Clone ID: 700873093H1
gaggaattatgatgaaatgcttgctcaatcaagagctatgaggagacaaggtggtggcaatcctcaagcggctccttcaggatttaggtaatcacacagcataaggccacttattcagctccaaatccaatgccttcaaaggatgctcgcgggttaaatttaagttgacgcctggcataaaggtcaaaaagctatctcacatcaaggccatgtggaaaatttctctggatattgtatgatatctgtatcttgg

SEQ ID NO: 19770 - DNA, 256 bp, Glycine max
  Clone ID: 700873095H1
catcaacccaaaacaaagaaacaatggctctgagattcgcagcagctgcttctgcttctgtctcacgaatatcaaggccacaaaacccaccattcttttcacttcaacaccgcaacaacggtactctcaaattccatagcccaccttttcatcatccacttcccacaccctcaaaacgctgcaacgttcgagccataagcgaggtagctgtggaacctgaaatttcaaagaaagaacaaaatgagtcacctaaaga

SEQ ID NO: 19771 - DNA, 256 bp, Glycine max
  Clone ID: 700873096H1
caggaaagatggaggagccattcgccaagaactgtactacctcctcaaagatgagaatgatgttcatttcacatttgggagcataggtggaaatgggattaatcaggcaagccagggcatggccttgtcgaaattctgcctcaacattgcaggggataccccatcctcaaatcgcctttttgatgccatagtaagccactgtgttcctgtgatcatcagtgatgaaattgagctaccctttgaagatgacttggac

SEQ ID NO: 19772 - DNA, 264 bp, Glycine max
  Clone ID: 700873101H1
aaaagaaaggctcctcatgctcatactgtgtgtgaaattgtcaaggcccgttgggggacttctgcgcacattgttttcctcattttctgcttcttgacgaatataattgtgacggctatgttgctcctcggtggttctgcggttgtaaatgcattaactggagtgaacctttatgctgctagctttctaataccacttggagtaattgtctatacactagcgggtggactgaaggccacattcttagcaactatatccattctg

SEQ ID NO: 19773 - DNA, 264 bp, Glycine max
  Clone ID: 700873102H1
catagctatctatttatctatagcaagtgcgtcaagagacacgtggtaccctagctagagtgccattctgtggtttctttctttctttctttctgcatcacatcacaatttgccttgcctcgtgtcctttttcttctttgctctccaaaaatctcacacacacaggtatctagcaaatgggttctcaccaacaagaaccatggctattggagaatgggaaaccaagggttttgaccaaggagaccaggctggccgttctgcaca

SEQ ID NO: 19774 - DNA, 265 bp, Glycine max
  Clone ID: 700873103H1
ctcactttgttttttttctctgcagtaatagaaaaaaaagaaagccagaagaagaagaagaagaagaagaagaagatgttgagggttgcagctagaaggctctcttatctctcctcctcctctccgtggcggcccaaccacgccgcttccgcttatgtctctcgaaacgcagtcgttgatgaccgcagatccgatccttcctcccatcccctttttcccttcagaggttttgctactgaatccctgatcccccaatagaaaacag

SEQ ID NO: 19775 - DNA, 261 bp, Glycine max
  Clone ID: 700873104H1
gtcactggctcctgttgttattggtgtgtccatggcatctttgactgagctctcgttcaactgggtcggcttcataagtgctatgatttcaaacatctccttcacataccgaagcatctattcaaagaaagccatgactgatatggacagtaccaatatctatgcctacatttccatcattgctctaattgtctgtataccacctgccgtaattttggaagggcctacactgttgaagcacggcttcaagatgccattgct

SEQ ID NO: 19776 - DNA, 262 bp, Glycine max
  Clone ID: 700873105H1
ggcaccaacaagggatgaccgcattggtgtctgcactggaatttttcgcaccgattcaattcctgaacaggacgttgtcaagattgttgacaccttccctggccaatccattgatttctttggtgcactgagggccagagtatatgatgacgaagtgaggaagtggatttctggtgttggtgttgacggcattgggaagaagcttgtgaactcaaaagatggacctccaacctttgagcagcccaagtgactctggagaagc

SEQ ID NO: 19777 - DNA, 260 bp, Glycine max
  Clone ID: 700873106H1
actcttgttgccttcatggccaagccagtgtccattgaggtatggaacccaagtggcaaatacagagttgtcagcaccaaaccaatgcctggaactcgttggatcaatcttctcattcaaaatgatgttcgccttgaaatatgtaccgagaagaaaacgattttgtcagttgaagacatcattgctttgattggtgataagtgcgatggagttattggacagttgactgaagactggggagaagagtgttctctgctttg

SEQ ID NO: 19778 - DNA, 258 bp, Glycine max
  Clone ID: 700873109H1
cttatatcaggggttagctattgtcatgcaatgcaagtatgccatcgcgacttgaagttggaaaacacattgttggatggtagtcctgctcctcgtttgaagatttgtgattttggctattccaagtcctcagtgctacattcacaaccaaaatctacagttggtacccctgcatatattgctccagaagttttgcttaagaaggaatatgatggcaagattgcagatgtgtggtcttgcggggtaccttatatgtca

SEQ ID NO: 19779 - DNA, 259 bp, Glycine max
  Clone ID: 700873110H1
catgcttgcaagctcttcaatcattgaagagtgtcccactactggtactatgaaagtgcagtggatacggaagtttccctttttctgtaaagatagagaatacataattggtcggagaatatgggaatctggaaggcattactattgtgtgaccaagggagtaaattgtccttcaatgcctagaaaagataaacctagacgcgttgatgtgtactactctagttggtgcattagagcagtggaataaatagaggtaatg

SEQ ID NO: 19780 - DNA, 259 bp, Glycine max
  Clone ID: 700873111H1
caaagacaagaggaaaggaattggcaggcaggattcattttcctcagagtctccaatgcaggatataccactacttttgcctcaagaagctgatggactagatacttcaaatggagatcatacaaatttaagtgaaaattttccattgttgtcccaaaagctggagcatgaaactttagtttcagacacccagatgaaagggtttcaagatgaagttgttcctttaaacttgggggcacaacctgttgccaatgctcta

SEQ ID NO: 19781 - DNA, 258 bp, Glycine max
  Clone ID: 700873114H1
ccatttcacaagccaaagtgccaaatccatctttcaactttcccttctgtcttcactttcagcttcccattgttcccatttcaacactctaagcacacaaaaaacaaacctttttcacttcctctgcaaaaacccagaattctcagacaaattctgacttctggggtgtggttcaaattttcacctgaaacagaaagtctcattttttaaaacatgagtgcaagtgacgacacatggggtgaattggcacaattgaga

SEQ ID NO: 19782 - DNA, 222 bp, Glycine max
  unsure at all n locations
  Clone ID: 700873115H1
ctattctggaagcatagtattccactatactcgaagtacagttctagttcaggaatagtggaatactattcctgaaccaaaactatgcttccagatgactttgtgtgtgaacaaatattttaccttatccatcttcgcaactggattagctttgctgaaagatggagtgatattagcttcatgtcctcanagtagagtgatccatgtggaaatattatattg

SEQ ID NO: 19783 - DNA, 256 bp, Glycine max
  Clone ID: 700873116H1
ctatatctggagattcatactatggctctcacgtgatgcagtatggtgatgtaggctttagcagagatgttctcttccattatttgggtacagatcctgctaatgataatttcacttttgtggatgaaaactccttatggtcaccttcaaaaccagtcaaccaacgtgatgctgatctcatccatttttgggataaggtatcctatttgtgcaatattttctattctttatgttatgaattaattcttgatcttgt

SEQ ID NO: 19784 - DNA, 87 bp, Glycine max
  Clone ID: 700873118H1
aaaattcctaatcagagtaaaaaaaccctagtaatgccgccgatggggaggaagcgaaaggtagcacccaaatcttctctatccacc

SEQ ID NO: 19785 - DNA, 261 bp, Glycine max
  Clone ID: 700873120H1
ctctcctcctcgatcccaattccactagggattcaattccgatgcgattccgagcttgttagatccacgacaacgtttcagtttcccagattcttttgtaaaaaaaaataatcttcctttgcccaacaggtaagttggaaaaaaatggaccatgacaagactgggtgccaagctcctcctgaaggtcctatattgtgcatcaacaactgtggattttttggaagtgctaccatgaatatgtgttctaatgccacaaagaca

SEQ ID NO: 19786 - DNA, 257 bp, Glycine max
  Clone ID: 700873121H1
gcctcagctgcttcatcgtggcgctgcaggagatgagggagcccaaaagcctcacataacgtgaacaaggagcatgaagaggttctacgctccaaaccctctatccttgccctcagcgatgagctcgataagctccggcaacctctcgccaccgctctctccaaagagctccaaatcaacggcacatcttcttaaaaccctcaccatgagactgagaccgaaaacgaaaccttagttgagagctcgactcgattgag

SEQ ID NO: 19787 - DNA, 258 bp, Glycine max
  Clone ID: 700873083H1
ctcttgtatctgagcttaaacagatgtcaaaagaggttgaagatagtgagttggcagatgtggcagcagtcagtgcagggaacaattatgaagtaggaaatatgattgctgaagcattgagcagagttggtagaaagggtgtcgtgacccttgaggagggaaagagtgctgataacagtctgtatgttgttgaggggatgcaattcgaccgtggttatatttctccatacttcgttactgacagtgagaaaatggctg

SEQ ID NO: 19788 - DNA, 261 bp, Glycine max
  Clone ID: 700873046H1
caacgtccaacctctcccaccaaactgcacggccgttccccacagcgtgcgtcagttcccggccaccaagcgccgccgttaacctccggcggcacctcccacctcctcccaagcccagaaaactgaccctcaaaaccaacaaccgctccaagtgggccattcaattgagcctagtggagcaaagcccaccaaaatcaacgttcaacatgcagcaactcgtgggctttctctacgacgatctaacccacctcttcgacgatc

SEQ ID NO: 19789 - DNA, 98 bp, Glycine max
  unsure at all n locations
  Clone ID: 700873048H1
ttcggctcgaggtctaccctgtaaatggnaggaggagaaacagagaggcaaagggcacagactattgctgatgccatcaccattacaaggccacataa

SEQ ID NO: 19790 - DNA, 266 bp, Glycine max
  Clone ID: 700873049H1
ctttgtttcccagagatcctgccaagaaagagttcggagagcaattgatatcccatgttgatacattcagcagagacctgttcgtttcattgaaaggggatgctgtacagcaagccagtcccgcttttgaatacttggagaatgctcttggtaaatttgatgatgggccattcttgcttggtcaattcagtttggtggatattgcctatattccatttgctgaaagattccaaattgtctttgctgaggtgttcaaacatgacatc

SEQ ID NO: 19791 - DNA, 263 bp, Glycine max
  Clone ID: 700873050H1
ggaattttagtggacaaaactggagattggatcacacttatacaaaattctccaattagtaacttgttgagagttgctgcttggaagaaaggctgtttaatggttaaaattgtgatgtctgggaatgcagcagtcaaaaggagtgattgggcctcattggtacaagtgtttttaacaaacagcaacagtacagagcatttcgatgcatgtaagtggacaaaatcggaaccacattcctgggaattgatcttcccaatagaggt

SEQ ID NO: 19792 - DNA, 264 bp, Glycine max
  Clone ID: 700873053H1
tctagttctagatcgcgatctagaactagacgttttgctctacgattctccctctctctcaaaaatcgttctcttcgattttagggttttgttttgctgctgcctccgttccccccttctcataaacaacgcgttttctcttctgcttcgtatctattctttgcttttggttttggttgattcaaggccttcacagcattcgttgcggcattttaatcgatttatccaagcaggactgaatgaactaatggagtctaaaggtgg

SEQ ID NO: 19793 - DNA, 261 bp, Glycine max
  Clone ID: 700873054H1
atcagcctctaatatttttctcactgtctctccagagaacttgatagagagatggcagctgcaacatctggtgctgtgttaaatgggttgggatcttccttcttgagtggaggaaacaggagccaaacccttctggcctctgctattggaggcaaagttggtgctgctgttactgttaatcccagaagactcattgtggtagctgctgctgcaccaaagaagtcatggctccctggtgttagaggtggtggcaatctcgtc

SEQ ID NO: 19794 - DNA, 261 bp, Glycine max
  Clone ID: 700873058H1
ccaaattcgatcctattctctaaaatttccagagcagatggaagaaaaatgagaccaacttgtatccattttaaaaaataaaggacctaattgaacattttaaaagtaaagagacctaattgaaccattttaaaaaattacaggatctattgaaccttttaataataagtggaccaaattgaatctaaaaaacaaattagagaaccaaaatagtaatttaaacttttttaaaacaaggcaaacccaagtttttaaatttaa

SEQ ID NO: 19795 - DNA, 260 bp, Glycine max
  Clone ID: 700873060H1
gaggaaagggactaagaagaagagagataaactacagggctgctcatggtggctacactggcctccctcctccacctgatgcttctaaacatgacgctttgccctccaaacttcgtcaaatcatctctttcacacaaaacccaactggggcgattaggttttcaaatgacaagaaaaacgttggtgggcatgctcaaaataagactgccttaaaggacacaggtgatgttgaaactgtagatgtcaaacaggggatctct

SEQ ID NO: 19796 - DNA, 257 bp, Glycine max
  Clone ID: 700873061H1
ggctgtagcaatattggatcaaatgaatgtggcaggtgttggaccaaatgagcatacatatacaactcttatgcaaggttatgcttcactgggtgacactgaaaaggcctttcagtacttttcagtgttgaggaatgagggcctggagattgatgtctatacttacgaagcgttattgaagtcatgttgcaagtcaggcagaatgcagagtgcccttgcagtcacaaaagaaatgagtgcaaaaaatattccaagaa

SEQ ID NO: 19797 - DNA, 260 bp, Glycine max
  Clone ID: 700873062H1
caagcagtgggaggaggctcgggactctgaccgcgtgcctgttgaagaatgagccggcgactcataggcagtggcttggttaagggaaaccaccggagccgtagcgaaagcgagtcttcacagggcaattgtcactgcttatggacccgaacctgggtgatctatccatgaccaggatgaagcttgggtgaaactaagtggaggtccgaaccgactgatgttgaagaatcagcggatgagttgtggttaggggtgaaatg

SEQ ID NO: 19798 - DNA, 261 bp, Glycine max
  Clone ID: 700873063H1
cttcttgctccgggaggagaatttgcatttgtggcttttggtgaagctgttaatcagggcataatgtcttcccagttgtcctctttactgtttcttgttgtgggaatttcaatggctctcactccatggctagctgaaggaggtcagctccttgcttcccgttttgagttacacgatgttcgaagtttattacctgtggaaagtgagacagatgatctgcaaaatcatatcattatttgtggatttgggcgagttgggcag

SEQ ID NO: 19799 - DNA, 261 bp, Glycine max
  Clone ID: 700873065H1
atcggcaaattctgccagcagaagtaatattgttgattgggctgagaagctctatggacagtcaattagtgcagtgacggctggtgtaaaaaatcttctatctaatgaccggcagctagcgttggcgaggacagttgaggccttgattgaagggaggccaaaccctgaaacagattcatacctctcgtttgatccccgtgctccaaagtctggttcgggagcaagtagcagccatatgaaaggaccatttaaggaagcaat

SEQ ID NO: 19800 - DNA, 259 bp, Glycine max
  Clone ID: 700873068H1
cttccagcgctatatgtgatcgagcacttgaatttctcgattttgcttagtcattggtagaaccggtgctgtaaccatccgggtcgatggtgtgcgtaaagactggatatggatagctctttcaactgttatatgcccaggatctacaataactgggttgaatatgagttggctatgctattgcattgtgtggagtcgcgatgtacaattagataaaggttaaggatgaccgtgcctctcaattgactgttgaaagtat

SEQ ID NO: 19801 - DNA, 260 bp, Glycine max
  Clone ID: 700873069H1
gtttctgtaaccatggcatccaccactctatcccctacaaccccttctcagctatgctcaggaaagagtgggattttcagtccctcacaggcacttcttgtgaagccagtgaagaggcagatcgatggggaagagcaagggaatgagaattgcatgccaagccaccagcattcctgctgatagagtccctgacatgggcaaaagacagctcatgaatctgcttcttcttggtgccatttcactcccctctgctggaatgc

SEQ ID NO: 19802 - DNA, 257 bp, Glycine max
  Clone ID: 700873070H1
gggaatttgggtgagaacactaacttagtttcaaaacaacaacctcctcctttatcattaaactcaaaccactctcaaagacaagcacaacaccaacaccaacaccaacaacatccaccaccactttttccaaagccagcaaatgtaacttttgctggtgctcctacgcatttgttgaacaatgctcatcaacatgctagccctggcagaaggggagggttgattggagttgctgctgagcattcaatgaatgttgg

SEQ ID NO: 19803 - DNA, 82 bp, Glycine max
  Clone ID: 700873072H1
cattacagtgatcagcatcttcataatcacgtgtcaaaattcttggccaacagctttcttgttaattcctcttgcttggtta

SEQ ID NO: 19804 - DNA, 255 bp, Glycine max
  Clone ID: 700873073H1
gcgattactttttacacggaagatgacattccattccttcggaatgttgctaatcttatggcagcatcaggctgtgaggttccttcctatctcatgaagttgcgcaaaaagaagtggaagaagcaccgacccaaaagagattcaatctccacaaaaccagacctatagccctgtaatagcatagaatgacaacatgcttttaaccttgaaatttccagtggtgtttagtatttcttaaataggccgggcagccta

SEQ ID NO: 19805 - DNA, 256 bp, Glycine max
  Clone ID: 700873074H1
gaaaaagagagaggtagagaaaagcgaagagtctctctcttcctatctctctctttcaatgtcagggcacaaatcttccacctctacttcttcttcttcttccttctaacctatatcagaaggaaacgcgaaaaaagaaaaaaaaaaaaagaggcagaaggttctagaagccgccaatttttatttctttaaatttgtctgagtcagagacgttcgtgattgtaaccatggattcttcgtgtgtcccaaacggcga

SEQ ID NO: 19806 - DNA, 255 bp, Glycine max
  Clone ID: 700873075H1
gtgactttgggttgggtttcgtctcaactcaacaaacgtcgtcgttctcccatttccaatctttctccaatggcttcttctgcttccttaatcaactcgttgacttgctcttcgcctgcacccactcagcactgtttcgccttcacccgcaccaccgccaccgctaccgccacgtcactgagacaattcaacagccaccgtccgcccccactcaccacgaggatctcctcgtcgccttccaccgttgtctgcaaa

SEQ ID NO: 19807 - DNA, 255 bp, Glycine max
  Clone ID: 700873076H1
gtggcgagggtaatgagaaagtgcaggatcttctgttgttggatgttactcctctctcccttgggttggagaccgcgggaggagtcatgactgtgttgattcccagaaacacaaccattcccaccaagaaggagcaggtattttcgacctattccgacaaccagcctggtgtgttgattcaggtctatgaaggtgaacgtacgaggactcgtgataacaatttgcttggcaaatttgagttatctggaattcctc

SEQ ID NO: 19808 - DNA, 257 bp, Glycine max
  Clone ID: 700873078H1
gggggaggagctggtgcaaagaatgctattctcatgaatatgccaaatgctgttctttcaatgtggagatattttgttggagatctcgtctttgtagtttctaagatgacttctccctacattaaatgtacagtctctttcttcatagcatttggaaatttggctgatgacaccatcaattttgaggcttttccccacaagctggtgcatattggagagattcaggaaaaagttgtattgaaattttcacaagagga

SEQ ID NO: 19809 - DNA, 255 bp, Glycine max
  Clone ID: 700873079H1
gtgtcgtcgacgagcgagggtgcgactatgacctgcgacttcgatctccggcaatccgcggcgaggttcgtccagtaaaacggcgccgtatagcgggatctgcgacgctgggcggagtggcaatggagggcgagaacgcgagcaacaaggtgatcgagttgatgaacgagatagccagcatctccgattacaggcctccggtgaagaagcagtactgcaacttggcgcggaggctgaagcttctgatcccgatgt

SEQ ID NO: 19810 - DNA, 256 bp, Glycine max
  Clone ID: 700873080H1
attgttgtaactttttgattcctaaattctctaaaattcgaaattctaatttcgttaggggaaagagattgtttgtgtgtgagtgagtatggctggaaaaggcgagggtcctgctatcggaatcgatttgggaacgacgtactcttgcgtcggcgtgtggcaacacgatcgtgttgaaatcatagccaacgatcagggtaacagaactaccccatcctacgtggctttcaccgacacagaacggttgatcggcgat

SEQ ID NO: 19811 - DNA, 259 bp, Glycine max
  Clone ID: 700873081H1
aattaaacaaacagtactatggatgtttggtcatggatatgtgagctccccaactcggtggagtggacagagtccgactcgccacccatgaagttcgaactcgcgagtgagaagaaggagaactcaactcgttccattcacctgaaagccgagcgaacctccggctcagactcggaagctgcggtgaccttcaccgtatgcttgcaaggctttcacccacacaacgcccacaacgctctctgggtctccgaaaagtgcc

SEQ ID NO: 19812 - DNA, 258 bp, Glycine max
  Clone ID: 700873082H1
cctcaatcaccccccctcgcactcgctcttcccttcctctggtggcgacaatgtcgactcctgctaggaagaggctgatgagagagctcaagatgctgcaacaagacccgcctgcagggatcagtggtgccccccaggataacaacataatgctgtggaatgctgtcatatttggtcctgatgatactccatgggatggaggcacgttcaagttgacactccaatttactgaggactatccaaataaaccaccgactg

SEQ ID NO: 19813 - DNA, 256 bp, Glycine max
  Clone ID: 700873045H1
gggcaatatgttgacaaggctgctgattatctgcataattaccagggtgataataccactgctccttcacagcctgcagagtctaaaggtgaagaaagtggtggtgggttaggtggtcttgcaaacttggctggaggcttcttcaaaaagtagttacaaagcaactaaataagaccttaattgagtccttattctcggtctagtagtggggtttgggtaatatgcaccagatcatagatttaaatcttgttattgt

SEQ ID NO: 19814 - DNA, 274 bp, Glycine max
  Clone ID: 700873004H1
gattagtctttctattataaaatagagtataggcattatttttttcttctaaaaaaataaaattaagaaattttcatggtaaccattcgtgcagatgaaattagtaaaattatccgtgaacgcattgagcaatataatacggaagtaaaaattgtaaatacgggtaccgtacttcaagtaggcgacggtattgctcgtatttatggtcttgatgaagtaatggcgggtgaattagtggaatttgaagagggtactataggcattgctttgaatt

SEQ ID NO: 19815 - DNA, 95 bp, Glycine max
  Clone ID: 700873005H1
agatataagtcttaattaaacaaacttggcattgtagtagtagaaccttatttgactcaggttttcatggctgcatttcctatgttctacacaac

SEQ ID NO: 19816 - DNA, 269 bp, Glycine max
  Clone ID: 700873006H1
atttcgcacatcgtaacaacccaattcatcatttaagctcacacatacaattgtagttcagtccaattcttcaccatcaaattatgttgtcacctgaaccctgtgatccgaactttctgctgtgtctacccgatgatgtgtttggcatggtgtcacggttcctcttgcccagagatgtttgcaatctcagcctctgctgcaagagtctctatgctctttcatcctctgataaagtgtggttccctcagtgttacatggtgggagtggtg

SEQ ID NO: 19817 - DNA, 268 bp, Glycine max
  Clone ID: 700873009H1
gaagaaaccatctctttgttccagggccggttaacattccggaccagatcatccgggccatgaacagaaacaatgaggactaccgttctccagcaattccagctatgacaaaaactttgcttgaggatgtcaagaagattttcaagaccactactggaaccccatttctcatccctacaactggtactggtgcttgggagagtgctctcacaaacacactgtctcctggggatcgaattgtatcgttcctgattggccaattcagctt

SEQ ID NO: 19818 - DNA, 269 bp, Glycine max
  Clone ID: 700873010H1
gaggaaagggaaaaagaagaagagagaaaaactacagggctgctcatggtggctacactggcctccctcctccacctgatgcttctaaacatgacgctttgccctccaaacttcgtcaaatcatctctttcacacaaaacccaactggggcgattgggttttcaaatgacaagaaaaacgttggtgggcatgcccaaaataagactgccttaaaggacacaggtgatgttgaaactgtagatgtcaaacaggggatctctaatggacaa

SEQ ID NO: 19819 - DNA, 267 bp, Glycine max
  Clone ID: 700873011H1
tagagccgtagaggaacctggaaacttccacgaggttttcggtgaaaaccaaatttggggctttgcatcgcatgatttaccctttccaatcaaaattcttctgccttccccaaccaattgtctttctcactatcgatttggtttggttggcattgtaattgattttgtttgtgaagatctgagtgaggggttaggcaaatgacgagtggttttggtgaatcaacgagagcatctgcaccgagcccatcatgctcggggaacagttca

SEQ ID NO: 19820 - DNA, 270 bp, Glycine max
  Clone ID: 700873012H1
agcgaaggcaaccattgcccaccatggatgctatatacttcatccagccaaccagagagattattattatgtttttgtccgacatgtctggaaggaaacccttgtacaggaaggcctttgttttctttagttcacctattgccagagaattggttatggaaattaaaaaagatgcacaggtgttgcctcgtataggtgctctgagagagatgaacttggagtattttaccatagacagtcagggcttcattacaaacaatgagagagctt

SEQ ID NO: 19821 - DNA, 270 bp, Glycine max
  Clone ID: 700873013H1
cggctcgagggcccttgcaaagtgatggctccaaagtttcaagaattatctgaaaagtatctggatgttgtctttctaaagcttgattgcaaccaagagaacaggcccttggcaaaagagctgggaattaacgtggttcccacttttaaaattctgaaggacaacaaggttgtaaaagaagttactggagctaaatacgatgatttggttgatgccattgacaaagttcgatctagctaaaaatatatatgactattctctttctatgta

SEQ ID NO: 19822 - DNA, 275 bp, Glycine max
  Clone ID: 700873016H1
cttcctcaattctcccaaaaatcatatttttaccgttctgattggtttttcagcttgtgggtcgatgtcaactgtgtcgaaagatgacaacttggtgctgtcttcggaggactcttcgtgcccagaagagtctgagcttgaattgggtcttggcttgagcctctcttctggcccttcatcaaagtctcatcaccaccatgttcatgctcctacaactctctatgctagaatttacactgctaaggattttccttcttccgcagcagcagcatcat

SEQ ID NO: 19823 - DNA, 271 bp, Glycine max
  Clone ID: 700873018H1
agaaaggggcacaccttgggctgggtggagcaactattggtgtggactcttcagcttggcccagcaatgacttgacaggtggtggagtattaggaatgctaggttatactggtattggtgcctctggattaggttgggaaattcaacaagattttgaagattttgtggatccacttgccactttggagaacataagtaccagggctttgtctagtcatcctatgagaccttttttcttggttggttctagcaatacacacatttacttgtg

SEQ ID NO: 19824 - DNA, 272 bp, Glycine max
  Clone ID: 700873020H1
attttcccttctgctgatattcagctaaactaagtcaataagatgactcagggaaagatagtttaagctgcagaagctcataaaacacttgaggatttcgatcctccaaagaagcgcaaaaggaacaagtatgcttttgcttgtgctgtgctggcctccatgacttccatcttgcttggctacgatattggtgtgatgagtggagcagccttgtacataaaaagggacctgaaagtgtcggatgtgcaaatcgagatcctgctcggaatcat

SEQ ID NO: 19825 - DNA, 268 bp, Glycine max
  Clone ID: 700873021H1
cctttgttcactcttcttctcttgcggctagggttttagcgcacttcttctagatttaaggaagatgggtaaggaaaaggttcacatcagtattgtggtcattggccatgtcgactctgggaaatccactaccactggtcacctgatttacaagcttggaggcattgacaagcgtgttattgagaggtttgagaaggaagctgctgagatgaacaagaggtctttcaagtatgcctgggtgctggacaaacttaaggctgagcgtgaa

SEQ ID NO: 19826 - DNA, 168 bp, Glycine max
  Clone ID: 700873024H1
atttgagccaagtttgtataatgtggtgcagaacaatggaggaaacagttctatatgtgtttcatgaacctcctttcttttcctttttggagaactcatttaaggttgtatttggaaaactctatgcttaatttcttttaagcattatatgatgatacttgtgtgact

SEQ ID NO: 19827 - DNA, 266 bp, Glycine max
  unsure at all n locations
  Clone ID: 700873028H1
aaaccccctcaaataaacctcaactcattgtgtgaccaaagttattattacattgcataatcaaccatgtcaatgaagttgtacgcttcccttacctttgtggtgtggcttttcatggccacatcgtccctagcccaatacgttctcgacacaaaccgcgaacccgncgacagcgatgatgagtactacatccggccagccataacggacaacggagggcgtttcacattgatcaacagaaacaggtcgtgtcctttgtacgttgg

SEQ ID NO: 19828 - DNA, 267 bp, Glycine max
  Clone ID: 700873030H1
cagcagtcaaaaggagtgattgggcctcattggtacaagtgtttttaacaaacagcaacagtacagagcatttcgatgcatgtaagtggacaaaatcggaaccacattcctgggaattgatcttcccaatagaggtatgtggtcctaataatggttttgaaatgtggagttctgagtgggcaaatcaaacttcatggcacttgagtttccttattgacaatcccaaacagtctacagtttttgatattctcttgggaatttctcaag

SEQ ID NO: 19829 - DNA, 267 bp, Glycine max
  Clone ID: 700873031H1
aattgatccggcaatagaatcttgtcctgtcaattgcatttcggttgttgagaggtccaaccttgcagctttggagttcttgatgtccaagcagcctcgtggctacgtaagagtaggtgcaggtcatacagccggtgctcgtgtctctaacatatttgtagctgtggaaaagtttcagactagattccaggaagcaatggaaaaggctaataagtgttctaaggaaacagacctccaaagagaatcaagaatgtcagcaattccggc

SEQ ID NO: 19830 - DNA, 92 bp, Glycine max
  Clone ID: 700873033H1
gctcaaatggtgtctttgtcactaattgtctacatacagtcaaacgatagctgggcaatagggttgggaattcctgcggctttgatgctaat

SEQ ID NO: 19831 - DNA, 268 bp, Glycine max
  Clone ID: 700873034H1
agcaacttcaagtttcatccatctgtcgtttctcgatctccagttctccactgttccaactccaactccaaccaaaccagcttctgactagtctctctccgcatatacgacaccgcgtttcgtcagatctgaaattgaaatggatcacgtgctggtggcgctgggggagacgaaggaggagagggaggttcgtattcggagcctgttcaacttcttcgacgccgccaacaacggttacttggactacgctcagatagaggcggggcta

SEQ ID NO: 19832 - DNA, 269 bp, Glycine max
  Clone ID: 700873035H1
cgcttattctctcgcattccgtggagatctagtgctactgctgcaagacctcgctgaaaattagggtttcgattcggaggtagacgaagatgttcggaagggctccgaagaaaagcgacagcaccaggtactacgaaatcctcggcgtttccaagaacgcttcgccggatgacttaaagaaggcttacaagaaagccgccattaagaaccatcctgacaaaggcggggatcccgagaagtttaaagagcttgctcaagcctatgaggtt

SEQ ID NO: 19833 - DNA, 262 bp, Glycine max
  Clone ID: 700873039H1
cagacttgtcaggactggtcactggaatggtaaagccatctgtggatattttgtggttcacttggagaatgaagctgttaacaggtcggaggggagttgccatactctatgcttacatgttactcggtttgcgatttctaagaactgttactccagattttggtgatttgattagtcaagaacaacaacttgaaggaacatttaggttcatgcatgaaagactttgtactcatgctgaatctgttgctttctttggaggtgg

SEQ ID NO: 19834 - DNA, 243 bp, Glycine max
  Clone ID: 700873040H1
gtcacaggcacaggtatttcgaacaaacacagcactgaggaacagaggaagtgtgtgtgtgggtgtgtctgaggaagtgtaccctaatttgaatttgaatgcaatttcactattagcaattagcaaagcgagaagtggaagttgagaattcacagcgagagagagaaagaaatatggcagaagccagcgaagggacgacgaagaaggaggagcttttagagtctcagattgaaacggctatgc

SEQ ID NO: 19835 - DNA, 87 bp, Glycine max
  Clone ID: 700873041H1
caatcatcttctttccgaagccctgaacgtgaacaaaaaatatcgacaccctgtttgttcataaaatcaaattgccctattcacaaa

SEQ ID NO: 19836 - DNA, 258 bp, Glycine max
  Clone ID: 700873042H1
cttcttccatggcctccaagcggattctgcaggagcttaaggaactccagtgagaccctccaacctcttgcagcgccggtcctgtagcggtaggtatgtttcattggcaagcgactatcatgggtccccctgatagccctcatgctgggggcgttttactagttactatccaatctcctccggatcatccattcaagccacccaaggctgcatttcagactagagttttccactcacatatgaacagcaatggtagta

SEQ ID NO: 19837 - DNA, 262 bp, Glycine max
  Clone ID: 700873043H1
ctagaaagtgcctttctctttccctctctcaacttccctacaattcatatatagccaagtagtgcagatcccgtgcagaagccaaataaaatccctttgtttgctcacataagatttgggtttcttcaaaattatctttttttttctctcctaaaaaaaaaagagaaaactttgtttgattctttgaaggaggtttgaagaaagcaaaaggtgtagttttgttttaagtttctttgaaatggttttcatgtctgagatattg

SEQ ID NO: 19838 - DNA, 263 bp, Glycine max
  Clone ID: 700873044H1
tatacctgtcatgttccttggattattcacaagcggtattcaagctctcatttttgctactttagctgcggcttatataggtgaatccatggaaggccatcattgaccagttttctacaaaatagtccttttcgtttagcttgccgcacatatattgcggctcaatataatctacttagtaaacatctatatctatctacctatatctatatagatataggtagatagatatagatagatattcgattagcatatattagcat

SEQ ID NO: 19839 - DNA, 273 bp, Glycine max
  Clone ID: 700873003H1
gaaatattggatgatattggcacacgtagcgtcaggtttcttgttcgtgatatgccttccgttttaggcagttctggcagtagcaatagctacttgggaggcagctcatagcatatgggatgtggtggacaacatcattgtgaaaattcaagtcatgctttgacaagatgatgctaatttttcacaatcttccaaaggctctgcaactggaggagtttgaatcataggcatagcctatgccaattgcaaagcttcttcgtttctatctaaact

SEQ ID NO: 19840 - DNA, 236 bp, Glycine max
  Clone ID: 700872969H1
acttgctgaggcaatagactcttgtcctgtcacttgcatttcggttggtgagaggtccaaccttgcagctgtggagttcttgatgtccaagcagcctcgtggcaacgtaagagtaggtgcaggtcatacagtcggtgctcgtgtctctaacatatttgtagatgtggaaaagtttcagactagattccaggaagcaatgggccaggctaataagtgtgctaaggctacagacctcc

SEQ ID NO: 19841 - DNA, 234 bp, Glycine max
  Clone ID: 700872970H1
aacatgctctgctttcattcacccttggtgtgaaacagatgatttgttgctgtaacaaggtaaattatgtgttgaattttaaggcccttatgtctcctttacatcacacaatatcttcattccttttgtgtgttcatatgagattaattagtgttctcttctcattttgaaacagatggatgctactacaccaaagtactccaaggccaggtatgatgaaattgtgaaggaagt

SEQ ID NO: 19842 - DNA, 223 bp, Glycine max
  Clone ID: 700872971H1
ggctcgaggcgaggccaagcacctcgagttacacgagtattcgtgcacctgcaagcgccccgtcgacacgtgtgacgagtacaagacaaagaacgagtgcaagtggcagaacaaggactttgacccgcacacgtgctcgtgtgtcgacaaggtctgcgacgaatacaaggtcaaggcggaatgcaaagccaagcacctcgactttgaccacgaaaattgctgc

SEQ ID NO: 19843 - DNA, 235 bp, Glycine max
  Clone ID: 700872972H1
gtccctgcggatgttgacgcaatgtgatttctgcccagtgctctgaatgtcaaagcgaagaaattcaaccaagcgcgggtaaacggcgggagtaactatgactctcttaaggtagccaaatgcctcgtcatctaattagtgacgcgcatgaatggattaacgagattcccactgtccctgtctactatccagcgaaaccacagccaagggaacgggcttggcggaatcagcgggg

SEQ ID NO: 19844 - DNA, 236 bp, Glycine max
  Clone ID: 700872973H1
ccaagttctcattaacgtcatgccatgccatgcaagccaatgaaaatgagaggatgggcggaaccccagggagcgatgaatcagcaactatgcaacccccaaggtcgcgggatgacagatcatgcttcccaggacctacggtacactgctaagcgccgacatcgcgcctggtgcctggcctgaccgaacttcacagaagatcaacgaaaaaagagcaacaacgcgagtagtagtag

SEQ ID NO: 19845 - DNA, 233 bp, Glycine max
  Clone ID: 700872975H1
caagaaggaaaggttactcaaaagaagagaaaaggtgataagtctaaggatagagatcagagatcttctataaagaaaagcaaaaaattagaggatcctagccacggttgttatgatgttaatccagttagggatgatgccatggacctgacagttgaagatttgatggccatagcagaacagtatgttaaagattatgagaacaaggatcgaaaagaaagatcaagtagaca

SEQ ID NO: 19846 - DNA, 237 bp, Glycine max
  Clone ID: 700872977H1
gcactgactcacacccacaatagtcgggggcagcttcaaagtacctccacattgtctcctactcttactgttctcttctcttctcatcatttttattttttccaatcaaaccaaacaaaacataagcaccgctcttttctctccgaaatccccatctcccttcacttctgagctctggacgagatcccagatctcaccatctttcacgcactcttccatcagattcaccctttcgtt

SEQ ID NO: 19847 - DNA, 242 bp, Glycine max
  Clone ID: 700872978H1
gttaaagataaaggcagctgcggatcatgctggaccttcagctccactagggctttcgacgcaggctatgcacacgtatttaggcgtagagtatctctcttaactgagtagcagctatctggactatgctggtcctttcaagaacttatggctgtcatggtgggttgccatcacaagtctttgaatacattaaatacactggtggactagagactgcggaagtatattcctagacaggagaa

SEQ ID NO: 19848 - DNA, 239 bp, Glycine max
  Clone ID: 700872979H1
acacgatgaggagccacacattccttaggataacttcacttttggtgtttattgggtggctcacggtttggatcttgttgcctacaaaggtttacaagaacacctggacccccaaactcaaaaccaagttaaactctacatactttagagagcaaggaacaaatctcttgcttttcacattccccgttatgctcataggggccctgagctgcatctatctccatcttcacgaaaaagga

SEQ ID NO: 19849 - DNA, 245 bp, Glycine max
  unsure at all n locations
  Clone ID: 700872980H1
caaaatctcttccatattccacacttaaccatttctccnanncannctccaatccatggcttccctgaacctccttccccaccctccacttttctcttctttccttcacagaccacactgcaacacccatcttcttctcacaccaaaaccttctcaacgaaggccttctcttgtggtcaaatctactgtgggtgtggctgacccttctccatcttcttcttcctacgctggggatacctctgatt

SEQ ID NO: 19850 - DNA, 242 bp, Glycine max
  Clone ID: 700872981H1
aagaaaatggacagtggggttgtggctgtgaacaacaacatcaacaactatgaatccaaggcaacttccaccatcaccattaagggcattctcagccttctaatggaaagcattgatgatgagaattgtgatggtggtggaagcaagaagagagttatttctcttggtatgggtgacccaactctcaccacattgttccacacaccaaaggttcgcagaagaggctgtcgctgatgctcttc

SEQ ID NO: 19851 - DNA, 238 bp, Glycine max
  Clone ID: 700872982H1
cgcttattctctcgcattccgtggagatctagtgcttctgctgcaagacctcgctgaaaattagggtttcgattcggaggtagacgaagatgttcggaagggctccgaagaaaagcgacagcaccaggtactacgaaatcctcggcgtttccaagaacgcttcgccggatgacttaaagaaggcttacaagacagccgccattaagaaccatcctgacaaaggcggggatcccgagaa

SEQ ID NO: 19852 - DNA, 234 bp, Glycine max
  Clone ID: 700872983H1
gttccctcttcgtagttactccgatttcttcaatttcttacttaactctaaacaatcgacaaaacgtgacacggtgaaaagatcgtagttttgcaccctccactgtttcactacttttatggattctgtggtagtggattcagacaagggaaatgaagcagaacatagctgtctagaagaaagtataagtatatttggcggagttgaagttcaagagccatatgtgggcatgga

SEQ ID NO: 19853 - DNA, 243 bp, Glycine max
  Clone ID: 700872984H1
ccatctttgccttctgcatgttggttctctgtaaacagatactgcaaaagaagaattatattgaatatttggttgggttgaatccctgggttgaagcgttgcagacatcacggctattctaagagtgtctcgctctctcattcatgtcccaactgtacgacggaggacaggttgcgtaactgccaccaacccttcgccgcacggtgggcgtggtgctttgccttctgaaggtggtagcccttc

SEQ ID NO: 19854 - DNA, 232 bp, Glycine max
  Clone ID: 700872986H1
agagaagaagaaacttaatcgatcatcacttcacttcactaatacatcatggcagacgagacccagaacaagtatgagagctctgaggttgaggtccaggatcgtggtgtttttgactttctcggtaagaaaaaggatgaagaagacaagcctcatcctcaggaggaggtcatcgccaccgagtttcaaaaagtcactgtctcagaccaaggagagaacaagcacagcctct

SEQ ID NO: 19855 - DNA, 229 bp, Glycine max
  Clone ID: 700872987H1
agcctccaatgttgcctgatgactttgacataccggagtttgccacggtcaacattcagcgtgatctgttctatggttacgatactctcatggagaatgtctctgatccttctcacattgagtttgctcatcacaaggtcacaggaaggagagacagagccaagcctctgccattcaagatggattctcgtggttcatggggcttctctggagctaatgaagggaacca

SEQ ID NO: 19856 - DNA, 229 bp, Glycine max
  Clone ID: 700872988H1
gtactaactcccatttcttatttattattgaattaaccgatcaacttgctttgttatcgaacatttctttttgatttcaaaaattttccggaaaaaatttgaatctattttgatatgcgaatcaatcctactacttctggtcccgaggtttctgcgcttgaaaaaaaaaatctgggacgtatcgcccaaataattggtccggtactagatgtagcttttcccccaggta

SEQ ID NO: 19857 - DNA, 229 bp, Glycine max
  unsure at all n locations
  Clone ID: 700872989H1
aaaagaattgttnttatgtttttaattgaaagctgtttcttttctttgtatgcaatgatttttctttccatttttttgtatcatgaaccatgttaggaatgtgagcatcctttggcaccacgacagagaaaatatgtacgagttgagttttttagatctggctggcaaataagagaagtacctggtagcaatgcctgtgagatcacaatgtttcatcaagaagatgctg

SEQ ID NO: 19858 - DNA, 214 bp, Glycine max
  Clone ID: 700872990H1
ggctcgaggcatttttggaaatgtggccattggagcccgttattctccgcgtgttcatggattgaagcgtgtgtttataattgactttgatgttcatcatgggaatggaacaaatgatgctttctatgatgatccagatgtatttttcctttcatttcaccaagatggaagctatcccggtactggtaaatttgatgaagttggaagtggagat

SEQ ID NO: 19859 - DNA, 232 bp, Glycine max
  Clone ID: 700872991H1
gagagtgtggtggatgagctggctttacgttcgcaattgtaatttaacggaccccgacacaccgccaaaaaaccctcgtacccggtttcaatttcaaacaaatgggtcgcacctgacctaggtttccaccttcatatctttgtccctttctcttctcttctcactcctaagaattcctcaattcttactccatcaccccaccatgtccaacaggttttgcaagttctatgcc

SEQ ID NO: 19860 - DNA, 230 bp, Glycine max
  Clone ID: 700872992H1
tggggatctttttactgcgaggcaactgaattcagtgccatcagattgtaggagccgcgagttatttcctactgatcctgaaattcttgcaaccggcggtgcttctaacagtttgtcttctgcatatgatgatgctaacctcggggaaggaaagagagaattggagaagaggaggaggggtgttaatgacgatggagtggtggagatgtatgatggagctggttctctta

SEQ ID NO: 19861 - DNA, 234 bp, Glycine max
  Clone ID: 700872993H1
acagaaattagaaatatttcttcattgtccaccaatcttgttccctgcaagagaaagacagaagggagagaagaagttgttgggttgagttggattggatttctaatctaatctatacctttcttttgtcctatgcttttaaggcacaaacccttctttcttccctcttctttcttcttcttattgttattccttgcctttaccctttagggaaggaagaaggaacaactatat

SEQ ID NO: 19862 - DNA, 237 bp, Glycine max
  Clone ID: 700872994H1
cagagattggaaaaatggcgttgagtatgactcaacagatcgggaccctagctggtgcgacggtgccggattcctcggccggagaatcgaccgcggcggtgagtgccgccgcggtgtggaagtcaccgacggcgagtctgaagtgcaaggtaatgaggacggatggctgcgcggaggggctttcggcgccgctgagtccgtgcaggtcgccggtgctgcgggcggatctgtcggcgg

SEQ ID NO: 19863 - DNA, 206 bp, Glycine max
  Clone ID: 700872995H1
acctactcgtctccttgcgcttactctactgctcgctcgagcgatcgtgcgcgtcatgctcttagctaccatggcgactgagaagcctttcaatagcattttgacgacgctcgacaagcccggtggtgctggcgagtttggtaagtactgtagcttgccttctctcaacgatcgtagaatcgatagacttccttactctatgagga

SEQ ID NO: 19864 - DNA, 256 bp, Glycine max
  Clone ID: 700872996H1
tcggctcgagtggcacttgatcttcctcatggtggccatctttctcacggatgtcagagtgctatggtaagataacttctattgtgattctatcttgcatggtggctgccactggaggcattatcttcggttatgatataggaatttcaggtggagtaacatctatggtgccatttttggacgaatttttcccagatgtgtacaccaagatgaagcaagacaccaaggttagcaactactgcaaatttgatagcca

SEQ ID NO: 19865 - DNA, 276 bp, Glycine max
  Clone ID: 700873002H1
tgcgtttcgagtgtctgtggaatccctaaccctaatttattgtgtggcgaaatgggatcaattggggtactcctggtggctcaggtgataccgtacctggagcaagagctggacaagcgctacaagctgtttcgggcgtatgatcagccgcagacggcgcaggttctaagccagcacgcgagctcgatccgtgcggtggtcggaaactcgaacgccggcgccgacgcggagctgatcgaggcgctgccgaagctggagatcgtgtcgagcttcagc

SEQ ID NO: 19866 - DNA, 240 bp, Glycine max
  Clone ID: 700872967H1
cttacaccggctgcttgcaccattgtttcatctctcagacatgaacatgtcgactcctatgtgctgtctgagtccagtctctatgtttatgcctacaagatcatcatcaaaacctgtggtactacaaagctactgcttgcaatcccatccatattgacatttgctgaaatgctttccctcaatgttagatctgtgaattacaccaggggaagtttcatctttcccggtgctcagccctat

SEQ ID NO: 19867 - DNA, 251 bp, Glycine max
  Clone ID: 700872931H1
caagtaccagcaggctttaaaggatctgtatacgcatctgactcctattcagcgggtcaacatcgcacggcaccctaacaggccaactttccttgatcatgtctttaacataactgaaaagtttgttgaactccatggtgatcgggcaggttatgatgatcctgctattgttactggtctagggactatagatggtagaagctacatgttcatcggtcaccaaaagggtagaaatactaaagaaaacattc

SEQ ID NO: 19868 - DNA, 204 bp, Glycine max
  Clone ID: 700872932H1
caggcatagcatgctacactcgcgggcctttcttgcctagtgtttcttccaagcactctccaccttccatttctccatcttttggcttgaggagtctgaaatcaagctctttatttggagaatcgctaagagtggcctccaaatcaacaataaaggtttcaaagacaaagaatacttcactcgtgaccagatgtgaaattggtg

SEQ ID NO: 19869 - DNA, 252 bp, Glycine max
  Clone ID: 700872933H1
atgagatcctatgaagtagaaatcacttttattttactataaatattactataaatattgggttgaattgagcgggtcgtatttaaataagaatttcttttccttttttcttagtttctatcgaaaaaaaaaagattcgatagaaactaagaaaataaacaaattgattcgccgagaaagaggagagagagggattcgaaccctcgatagttctttgttccgaactataccggttttcaagaccggggctat

SEQ ID NO: 19870 - DNA, 241 bp, Glycine max
  Clone ID: 700872934H1
gtgaacttagggttttctcaccccctttcttccttcactgattctgcacatacgagagaatccagtttccttaatgatttcgtcttgtcggttgcactcgccactggaccgtacaatgcttctcgggatttgactttgagtatataatcccaacgcttgttctgctgccttttgtttttcgtattgtggttccttgtgtttgatgcccaaatatcaaagtgagcgcctccaatcataacat

SEQ ID NO: 19871 - DNA, 245 bp, Glycine max
  Clone ID: 700872936H1
ctttatggtggtgacaaagtaaggtttgtttcatcaaaaagatggtggcacccattgctgtttcttctccaaagtccacacttttgcagaaccccatctgttttggtgactcaagttcaagttttgttggggggtctttgaagggtctttgcttcaatctgaaacgaaggcaacaaagaagagaattgaccaatttggttgttgcttcatccacctcaagtgttacaaatagcaatgctagtggc

SEQ ID NO: 19872 - DNA, 239 bp, Glycine max
  Clone ID: 700872938H1
gcagattacgactcttcgtcccctaggccactgacttcgtggtacttcgaacggcagcccgtttaattccttgcctcctccgagcgcggtatcgaaaggcaacatgaatatcaatgaaccagtaaagggtcgcgcatttgcgctccccttcaccaaggctgccaacccaaaagcgaggttgagccatgacgaaatgcgtttgccgtttctcaacaaagtacctgacaatattcgcaacc

SEQ ID NO: 19873 - DNA, 246 bp, Glycine max
  Clone ID: 700872939H1
cttagatatataccgatctagtttgagaatcacaacaatacaatgcaactaaagctcgtagccttaaccttgtcgatattttggccatggtggagctttgagggtgctgtaggagaccctcaactctttttcctcacatttgaatgcagcacagtctcggcacgcgacttgtccaacttgcatcaaaatcgaaacgcaagtttcgctgccctgagatcgcaggttagcaaccaaagcaagcacttt

SEQ ID NO: 19874 - DNA, 241 bp, Glycine max
  Clone ID: 700872941H1
cccaagccgagagctcctcttcacgccgcaaagttcgtcgccggcgggcgcacaactttcggagactgtcgcgcaacctcattctctccggaaacaaacgcgcggtggcggcgaactcggctgcagaagagttcgacgtgatatcggtgcagagcgacgacatcaccgaccagcaggagggcgtggtggtgagccgcgtcgagatggaaggcggagactgcgaattggcgacgcaggtgag

SEQ ID NO: 19875 - DNA, 238 bp, Glycine max
  Clone ID: 700872942H1
agccatcgtatgagtcttctggcggtggctatgaaggtggttacaacaaaacatcttattctagtgatgagccagcttctggtggtggctatgaaggtgggtacaagaaaacaggttattctggtggcattgatgagacttctggtggctatggcgctggtggtggtggatactctgacgtcactgatggtggctacggcaaaccaagtggtggctatggcgccgctggtggtggtgg

SEQ ID NO: 19876 - DNA, 242 bp, Glycine max
  Clone ID: 700872944H1
tggtagtgctatgccagatcctgctttattgacccagctaatgcaaaatccagctatctcacaaatgatgcaaagtatgctttccaacccacaaacattgaatcagattcttggtgctaatactgagcagcgtggcatgcctgatttaaattctcttagagaagtaatgcaaaatccagaattccttcgtttgttttcttcacctgagacattgcagcaactcttgtctttccagcaaactc

SEQ ID NO: 19877 - DNA, 242 bp, Glycine max
  Clone ID: 700872945H1
gtcttgcaattgaagttgaagtcttgcccttctctcttcaactccaaacacaagacatcatcatccatggctgcctccgtctccactgtcggagctgtcaacagagctcttttgaacctgaatgggtctggacctggggtttcagctcccagttcatccttctttgggagcagcttgaagaaggttattggctcaagggtccccaacacaaagatttcctctggaagcttcaagattgttgc

SEQ ID NO: 19878 - DNA, 245 bp, Glycine max
  Clone ID: 700872946H1
caaagattttgagcacaatggcctcgacacaatgctttttgcaccaccacgccctcaccactccagctagagcttcaacacagcgcctagttgtgagcaccaaaccaaaccacattgtttgcaaggcagcacagaagcaggttactgtccaagagggtgaggacactactactggccttgtctctcgcaggttggccctcactgtgctcattggtgctgctgctgttggctctaaggtggcacct

SEQ ID NO: 19879 - DNA, 248 bp, Glycine max
  Clone ID: 700872949H1
cagtgtgtcaccaccatggccaccgtcacaacccaagcctccgccgcgattttccggccatgtgcctcgaaatcgaggtttctgacgcgctcttccggtaaactcaaccgggaagtgactatgaggccaatggggtgccctccttctgcctctttcaaggttgaagccaagaagggagagtggttacctggcttggcctccccaacttacctcaatggcactcttcctggtgacaatggatttgaccc

SEQ ID NO: 19880 - DNA, 244 bp, Glycine max
  Clone ID: 700872950H1
ggacaagaacattgatatatcttcagataagcgtgctttgcaaaagctacgccgtgaagcagagcgtgtcaagcgtgcattgtcgactcaggctcaggctcgtcttgaaattgagtcgctgctggacggcgaagacttcaccgagtctctgagtcgtgcacgttttgagaagcttaacgaggacctgttcaagaagacccttggcccagtggagaaggtgatgaaggatgctgacctcaagaag

SEQ ID NO: 19881 - DNA, 241 bp, Glycine max
  Clone ID: 700872952H1
ccatctttgccttctgcatgttggttctctgtaaacagatactgcaaaagaagaatgatattgaatatttggttgggttgaatccctgggttgaagcgttgcagacatcacggctattctaagagtgtctcgctctctcattcatgtcccaactgtacgacggaggacaggttgcgtaactgccaccaacccttcgccgcacggtgggcgtggtgctttgccttctgaaggtggtagccct

SEQ ID NO: 19882 - DNA, 237 bp, Glycine max
  Clone ID: 700872954H1
cgttcttctattgatacgttaatgctttttgattcctttcagatttttctaactaactaactatctgtgaatcaaagaaatttcagtgtacgtttcgtctgattctttgggatactgcttgagctcgatgggagatgtggctaaggaccttgcagctgggactgttggaggggcagcacagttgatatgtggacacccctttgacaccatcaaggtcaagctccaaagccagcctgc

SEQ ID NO: 19883 - DNA, 239 bp, Glycine max
  Clone ID: 700872955H1
gaaacattttgagaaggcatgcagtttccaagaagtatgaagtttcctcatttactgaaaaaacattagtacacaagaaagataatggctaatgaccaaactagagacaatttaaaccacagactatgactcttctaccctaatgaagctacccaggaagatggtttcttttttgcatatgtatttgatttgatgatgctactatcactactatatcatgctttgaacataaagtcttc

SEQ ID NO: 19884 - DNA, 236 bp, Glycine max
  Clone ID: 700872956H1
gccattgatattctgctaatgactatggtgttcaaaaacacaaaccagttagaggaaagtatggattccacttatgacaggaaggctgaagtgaaagcctttgatgattcaaaagctggtgttaaaggtcttgtagagtctggattgacaaagatccctcgcatgttccattctggcaggttggatatcattgaaacctcagtcagtgactctaagttcggtatccccatcataga

SEQ ID NO: 19885 - DNA, 237 bp, Glycine max
  Clone ID: 700872958H1
caccaattcccgtttctcttttcgggtttcggaatcaatcaatgccgtgtttttagatactagtacctgctttagctacccttctcatagaattggtaataaaatagcaagtcccagattttttatttctttcttctcctctgtctattttattcccaatcctctagggtcttggccttttcttcattccccccccttttttttataaaaaaaataaggcaataacttttgttgctt

SEQ ID NO: 19886 - DNA, 237 bp, Glycine max
  Clone ID: 700872959H1
gactccgtgccctagcttcttcttcctcctcctcctctgccattgcagcaaggcacacacctcaggctccaacccatttcacgagagatcggattcgctcgccatcatggggaagaagaagaagagagtttcctcgaaggtgtggtgttattactgcgatcgcgaattcgacgacgagaagatcttggtgcagcatcagaaagccaagcactttaagtgccatgtctgacacaagaa

SEQ ID NO: 19887 - DNA, 239 bp, Glycine max
  Clone ID: 700872960H1
ccctcctcttcacacattttctgtgctctctaacaaacattctcgttcacactttcagattgtccgaagatgggggcgggtggccgaactgatgttcctcctgccaacaggaagtcagaggttgaccctttgaagcgggtgccatttgaaaaacctccatttagtctcagccaaatcaagaaggtcattccacctcactgtttccagcgttctgttttccgctcattctcctatgttgt

SEQ ID NO: 19888 - DNA, 243 bp, Glycine max
  Clone ID: 700872961H1
cgccatattccacaagaactctccaatcgatcctccttcccacgagattctttggtgggaaaaatccaagaggtttgaaatttgaaggcagggaagatggattatttcaatgcaccaggaagaaaccatctctttgttccagggccggttaacattccggaccagatcatccgggccatgaacagaaacaatgaggactaccgttctccagcaattccagctatgacaaaaactttgcttgag

SEQ ID NO: 19889 - DNA, 246 bp, Glycine max
  Clone ID: 700872963H1
gccagatctcttcattcaattacaacagcagaagaaacagaagcttctagagagaaagaaatagggaattgaagatgggttgcagaaacagggactcaatcacagagaatcacacttcgtcatcatcatcttcttctgattcactcagtgaagccttgcttttcaccaccatgtgcatcgttggccaccccgtcgatgttcacgttaaggatggctctgtctattctggaatcttccacactgctt

SEQ ID NO: 19890 - DNA, 269 bp, Glycine max
  Clone ID: 700872964H1
aattcggctcatgcgatacgattagatcctgaaccctttgaacatcgtattgcagtcatggatataagcctaatatgatacagatatctgcagtctcgatattttttgagacaatgccatatcgattgaatgaaagtacaggatacatcgactatgaccagatggagaaatctgctacactcttcaggccaaaattaattgttgctggagctagcgcttatgcacgtctctatgattatgaacgtgtacgcaaggtttgcgctaaacag

SEQ ID NO: 19891 - DNA, 244 bp, Glycine max
  Clone ID: 700872965H1
gtaaaagagggtttgacgatggtgggtggttgctggtttgagtttgatagtggtgggtggctactttttcgagtttggcggttttgtgtgggtgctgattcaagttcgatggtggcgtgtgggtcgccccttcaccgtcggcgctgacgtggaccactacaagaccaccctgaccaccgccctcgccgtgttgcctgtcgcctcctcgctaaacaacgaggaagagaaggtgtggtgcatcgcg

SEQ ID NO: 19892 - DNA, 247 bp, Glycine max
  Clone ID: 700872930H1
ccggaattttccgcactgatggtattcctgaacaggacattgtcaagcttgttgacaccttccctggccaatccattgatttctttggtgcactgagggccagagtatatgatgatgaagtgaggaagtggatttctggtgttggtgttgacagtgttgggaagaagcttgtgaactcaaaagatggacctccaacctttgagcagcccaagatgactctggagaagctcttgctgtatggtaacat

SEQ ID NO: 19893 - DNA, 220 bp, Glycine max
  unsure at all n locations
  Clone ID: 700872893H1
ctgacatgcaaattaggagttcanagaaaccaagaagttcggaaattcaaaactctccaagtagtatactctcagtgggcatggaaatgaagcataataataatggtgatcatgcaaataatagagaagccaacaacacaaagtttggcaatgaaaggcaccaccagaaagatggataccctttgatgactagcaatgcaaaccatggtggagggtttgg

SEQ ID NO: 19894 - DNA, 136 bp, Glycine max
  Clone ID: 700872894H1
ttcttgggaaacggatgaggtgtctgagtggtggaagtgatgctgagggtggcgctgcgatggaactcgatttggaggccaatggcttctctgccactaactcccttcacatgccaaaatctccacacaacatacg

SEQ ID NO: 19895 - DNA, 219 bp, Glycine max
  Clone ID: 700872895H1
ttgacaacttgtacgggtgccgtcactctctccctgatggtctgatgagggctactgatgtgatgattgctggaaaggtggctgttgtggctggatatggtgatgttggcaagggttgtgctgctgcattgaagcaggctggtgctcgtgtcatcgtgactgagattgaccccatttgtgcccttcaggctctcatggaaggccttcaggttctgacct

SEQ ID NO: 19896 - DNA, 259 bp, Glycine max
  Clone ID: 700872901H1
aaaaatacaaaaacaactttgcaatttcgtaggagatgctcaggagcagcacgctaacacagagtgttacagtcacctgtgttcgtcacagtcacagacaatggttccaatcaattcccgtaaattatagattctttgacgctgctcggaactctctatcatcacccaactccgcgatcttcaaatggaaaagcgaggccaattataaccgtcatagttctggaatggggaccttcaccactcgcgcgttggcgcagcg

SEQ ID NO: 19897 - DNA, 271 bp, Glycine max
  Clone ID: 700872902H1
catgcacgcgtagatcgcttcttgttactatgatgagaagagatcaaatacgtgcacgtgagatgcgaaccccatccctggttgacctttgtgttcagaaagtaatagataatgtaaggtaccttggaaatgttggttctcttgaccagcatctgctcgagcaaattttgccgcactgcacagctgaccagttgatgcatgtggagaagtccaccaagggaagaaatctcagccctgtaactgataagttgtggaaaaagttctatgaaaa

SEQ ID NO: 19898 - DNA, 253 bp, Glycine max
  Clone ID: 700872903H1
gagaattcagaaatttctcttttgttttgcatttttcatggcaaacgttgtattttgttgcaaatgaattggattatgaaatctagaaaggatggaggggattttgctttgttttaaataaaagaagagtgaatcgaattttgaggagtagctggtgatgaatgaattattggcatgagctgcgacaacgtttctgcgcaccgtgtattgtcacacgggttgttgttgcgatgaataatgtgccaaaatgcta

SEQ ID NO: 19899 - DNA, 262 bp, Glycine max
  Clone ID: 700872904H1
ttcggctcgagcaggccacgaaggatgctggagtcattgcgggtctcaatgtcatgcgtatcatcaatgaacccaccgctgctgccattgcttacggtcttgacaagaaggccaccagtgtgggtgagaagaacgtgttgatttttgacttgggtggcggtacctttgatgtctctcttctcaccattgaggagggtatttttgaggtcaaggccactgccggagatactcatcttggaggtgaagattttgataacaggat

SEQ ID NO: 19900 - DNA, 235 bp, Glycine max
  Clone ID: 700872905H1
aaacatggcaagagtggtggcactccaacagaaccaactatctttctctaccttagcttcctctctttctgacttcagtggaaccagacttcaaactcaacttcagttcaagagaaagcaatgccatccaaaagggtctttctacgtctccgcatcgagcaccaagaaaatcctaataatgggaggcaccaggtttattggtgtgtttttgtctaggctccttgtcaaagagggt

SEQ ID NO: 19901 - DNA, 248 bp, Glycine max
  Clone ID: 700872907H1
gaactattgcaaggctgtaaaagcaggccttcttaaaattctttccaaaatgggcatctcgttgctatcaagttactgtggtgcacaaatatttgaagtctatggattagggaaggaagttgttgatcttgcattcagaggaagtgtgtcgaaaattggtggattaacttttgatgaggtggcaagagagactttgtctttctgggtgaaggcattctctgaagatacagctaaaaggttggaaaatt

SEQ ID NO: 19902 - DNA, 249 bp, Glycine max
  Clone ID: 700872908H1
tttgttagtgaagcaatggctcaaaccatgttgctcatgtctagtgtctctagcagttattccgtggattcgaagaaagaccttttcctccaattgcagagtcaaagtttaaggcctaagttctctcagctctcattcaacccacttccatcatcaacttcttccttttcttcaccccgtacattcacaactctggccctcttcaaatctaagaccaaagccgctcctgctaagactaaggttacaaag

SEQ ID NO: 19903 - DNA, 247 bp, Glycine max
  Clone ID: 700872910H1
tgaggatggtcgcacccttgccgattacaacatccaaaaggaatcaaccctccatctcgtgcttcgcctcaggggtggcatgcaaatctttgtcaagactttgaccgggaagaccatcacccttgaggtggaatcctcggacaccattgataatgttaaggccaagatccaggacaaagagggcatccccccagatcagcagaggctgatttttgccggtaaacaacttgaggatggaagaaccctt

SEQ ID NO: 19904 - DNA, 244 bp, Glycine max
  Clone ID: 700872911H1
gatggagctccatcagactcttgagaatcagaaggtttcatctgacgagaggcagcatgagttacaaggccttctatgtggttgcttgcaggttatcatacagcagttaggatcatctgaaccaacaaagtatcatttcatgcagtatgctgaccaaataatgggtttatttttgagagtgtttacttctcgaagtgcaacagctcatgaggaggctatgcttgccattggagctttggcctat

SEQ ID NO: 19905 - DNA, 250 bp, Glycine max
  Clone ID: 700872912H1
tgttaaagagggtcaccaggtgactttattcacaagaggtaaagcgcctgtcactcaacagttgccaggtgaatcagacaatgattatgctgatttttcttccaagatcttgcatttgaacaggagacaggaaggactttgactttgtaaaatccagtctctcggcagagggatttgatgttgtttatgacataaatggacgtgaggcagatgaagttgagcccatactggatgcgctgcctaatctgga

SEQ ID NO: 19906 - DNA, 172 bp, Glycine max
  Clone ID: 700872913H1
gatccacaagaagcacagcaaactcttgaaatagcagaagctaatttgaataaggcggaaggcaagagacaaacaattgaggcaaatctagctcttagacgagctaggacacgagtagaggctatcaatgtgatttcataacaagttgatgcgtccgaatatcggaataact

SEQ ID NO: 19907 - DNA, 252 bp, Glycine max
  Clone ID: 700872914H1
tatcgattcagttaaatatggctcgtttgctcttcccaagcctgaaagaagaagcaaatggagagtggttgatggggttggcgagaagcaatcagttaccaccttagcagcaactaccacaagttttgatgataacgacgttgttgactcaaattcggctgtggtgaggaatttctatggaggaatcaatgcgcatgacgtggattctgtagagtaccttatggctgagaattgtgtgtatgaagatcttgt

SEQ ID NO: 19908 - DNA, 257 bp, Glycine max
  Clone ID: 700872915H1
aaaagagcaagcagaacttgcaatgaaagctataatgaaactttacatccctggatggagatttctacctactgctaaccataggaggatgaaggaaattgatagagaaataaaagcttcacttacagatatgattagcaacagagagaaagcactaaaggcgggtgaggctaccgagaatgacttgttaggtatacttttggagtcaaatcacaaggaaactgaagaacatggaaacagtaagaatgttggaatga

SEQ ID NO: 19909 - DNA, 256 bp, Glycine max
  Clone ID: 700872916H1
tttgttagtgaagcaatggctcaaaccatgttgctcatgtctagtgtctctagcagttattccgtggatttgaagaaagaccttttcctccaattgcagagtcaaagtttaaggcctaagttctctcagctctcattcaacccacttccatcatcaacttcttccttttcttcaccccgtacattcacaactctggccctcttcaaatctaagaccaaagccgctcctgctaagactaaggttacaaagccaaagc

SEQ ID NO: 19910 - DNA, 252 bp, Glycine max
  Clone ID: 700872918H1
tggagcttaagcaaaagcaaagttacttagtcaaacgaggtcagagttcttgtgccaagtgtgcgaatgcagaaattcgctacaacagaagagttccaggttcacatggtttgcttcaccgcccctttatttattcaatgctagctgttgcagctgtttgtgtatgtgtttgtgtgttcttccgtggtcgccctttcgtaggctcagttgttcccttcagttgggaaaatctggattatggcacaatgtaat

SEQ ID NO: 19911 - DNA, 244 bp, Glycine max
  Clone ID: 700872922H1
ctcgaatggccgaggcttgacgctggaggtggcgtcattcctcgtggaggtcctgggggcaagaaggcgcgtgcaggactgcttgcgagtcctggcgtacgcgcgggagcagggcatccgtcctcgcatccagtcgtactcgagtgcaattggctgctgctacagggaggaggagtttggccacgctctgcgtatgttcgaagtcatgcgaaacgatggatatatcccgcagaccgtgacgtac

SEQ ID NO: 19912 - DNA, 245 bp, Glycine max
  Clone ID: 700872923H1
agaagatcaaagaggctggcggcgccgttgttctcaccgcttgaatttgacggtatcacttttttgaacgatttaggttttgttctgatacgttttgttttggattatgttgttgtttagtctctgctatatttcaggattaaattgaaggttttattattttaatttgcgcgattaactatgccagcctgatgacattagaatctatcgaaattgttaaaattgagcatgttagctttcgtatt

SEQ ID NO: 19913 - DNA, 245 bp, Glycine max
  Clone ID: 700872924H1
gaaatttcgtccataaacgctgcagactacacccactatatagttatgcttcaaaagtttggtgtcactctgggaaaaccaactgagttgtagtaacaagcttaaaggctacataactggaagataaagctgcgatcaaagaattgctggaagacgaggaaaacccatatgataatactatgggatctactctactaagcttgagcctgaataactcagggcaaccccttaaccaaatggggatg

SEQ ID NO: 19914 - DNA, 245 bp, Glycine max
  Clone ID: 700872925H1
ctgggaatgcagcagtcaaaaggagtgattgggcctcattggtacaagtgtttttaacaaacagcgacagtacagagcatttcgatgcatgtaagtggacaaaatcggaaccacattcctgggaattgatcttcccaatagaggtatgtggtcctaataatggttttgaaatgtggagttctgagtgggcaaatcaaacttcatggcacttgagtttccttattgacaatcccaaacagtctaca

SEQ ID NO: 19915 - DNA, 244 bp, Glycine max
  Clone ID: 700872926H1
tttcgcacatcgtaacaacccaattcatcatttaagctcacacatacaattgtccttcagtccaattcttcaccatcatattatcttgtcacctgaaccctgtgatccgaactttctgctgtgtctacccgatgatgtgtttggcatggtgtcacggttcctcttgcccagagatgtttgcaatctcagcctctgctgcaagagtctctatgctctttcatcctctgaaaaagtgtggttccct

SEQ ID NO: 19916 - DNA, 243 bp, Glycine max
  Clone ID: 700872927H1
ttttgaacatgccacaagatatcatgtatggctgggacatctcacaatggtgctttttactgtccatggactcctctatgttattgcatgggcaatggaaggccaccttgtacaagaattaatacaatggaaagatattggtgttgccaatctcccaggagttatcagccttctagctggtttgttaatgtgggtgacctctcttcccggagtgcggacatggaactttgagttgtttttcta

SEQ ID NO: 19917 - DNA, 244 bp, Glycine max
  Clone ID: 700872928H1
gtggccagtggcaagaagatcaagactgacaaaccttatggaattaatggtggcatggccttgagggatggaactgatgcatctggcaggaaaggaaagggaaagggtgtttaccagtttgtagacaaatacggtgctaatgtcgatggttacagtcctatctacgacaccaaggactggtctccaaccggtgatgtctacgctggcggtacgactggcttggctatctgggctgtgactctac

SEQ ID NO: 19918 - DNA, 141 bp, Glycine max
  Clone ID: 700872929H1
tgatgcgacttgccatgtcaacttgtggaaaaccggacatattatcaacgagcttaacataaactccgtgataaccacgccttgccacgaagagatcttgcccatcaactcatgggatactcagatgccttatttcatcag

SEQ ID NO: 19919 - DNA, 217 bp, Glycine max
  Clone ID: 700872891H1
atctggactttagttctgacgctgacatgatcaagaaatttcgtgcaggccttgctttgcagccgatagcaacggctctttttgcaaattcaccctttaaagagggaaagccaaatggttttgtcagtatgagaagccatatttggactgatactgataaggaccgcacaggcatgctgccttttgtttttgatgactcttttgggtttgagcaata

SEQ ID NO: 19920 - DNA, 224 bp, Glycine max
  Clone ID: 700872844H1
agctctcttattaatttgtcatctttcagcagatccccctagtttttcttccaacatgagtttataatctcccctgcaattgctcatcatcatccttctagttttttcatttgttgtctcttctgctgctctccaaacaacatgaaggttaatgccaaacaaagaaaaactctcaatccagattacatctgataagggtgttgaggaattgagaaatggagaag

SEQ ID NO: 19921 - DNA, 230 bp, Glycine max
  Clone ID: 700872847H1
tgtagacatgctttttccgtcaatttgggcattctgtggttcttgcggattatcttacgcttcgcaaaggcttcatcatgaatcacaacctttcattcaaatatgattttcacagctacatgattcgatcaatggaagaggaattccaaaggatagttggtgtgagtggtccactctggggatttgttattgccttcatgcttttcaacattaaaggatctaatctatat

SEQ ID NO: 19922 - DNA, 229 bp, Glycine max
  Clone ID: 700872851H1
ctcttcaaaagggagaagaaaaggaaagaaaactctcaaaaaactattatagcaatggcagaacaaaaccaaaaccaaacaactgaagctggaaggcaccaagaggttggtcacaagagccttctccagagtgatgctctttaccagtatattctggagacaagtgtctacccaagagaacctgaatccatgaaagaactgagagagttgacagcaaaacacccatgga

SEQ ID NO: 19923 - DNA, 228 bp, Glycine max
  Clone ID: 700872853H1
acttgaatcacttaaacaagctaggatatccctacaacaggaactcaagagattgccactagtagagagtgggtacactgctaaaccctctgcttcttttagtaaaagtgaggatagatttgaagttcctgttggatgttctggtctcttcagaatacctacagatttttctgatggagcaactgctagattcaatgttaaagatcctactgctggatttggttcaaa

SEQ ID NO: 19924 - DNA, 223 bp, Glycine max
  Clone ID: 700872855H1
attcgttaggcattcaaactcaggcataaccttcgcgcgtgatgagagtatgagaaaatgattgattgtattctcagcctagagacaatggagagatgaggaaggggacatattggttatctggcaagcaatgccacaatggcatctcatcagatatgtccaaattgtggatgtgatcggcacttatttgaatggtaacatattagcttttgagttgtttgcc

SEQ ID NO: 19925 - DNA, 80 bp, Glycine max
  Clone ID: 700872856H1
gtttgcagcatcactggtagctgttgtggtgatcgtcactgctaatcaaacagaggttattcgtgttccacacaacatac

SEQ ID NO: 19926 - DNA, 223 bp, Glycine max
  Clone ID: 700872858H1
attttgaactgttttaatggttgaattttatatttaaatagttaaattaatttaaaaattggttcaattctgaattgatttcaaaaaattaattttaaattaaattgatttttaatcaattttagactgattctaagagtgaaaataattctcaactgatcctttgagttaaaaaaatatttaggtgaaaaactaaaaaccaaaataatttttataaaacaat

SEQ ID NO: 19927 - DNA, 225 bp, Glycine max
  unsure at all n locations
  Clone ID: 700872859H1
aaatatgttgtcccatagctggtagatgtcntaaaagaagaattggaacaattttttggtaaagattctattgagtcataatcctatgtcaagaattgtgtctccaaaccagtttgctcggcttgtgaatctcttggatgaggataaggtatctgacaaaattgttttgggaggtcagagggatgagaagaaattaaaaattgccccaactatcatattgggtgt

SEQ ID NO: 19928 - DNA, 92 bp, Glycine max
  unsure at all n locations
  Clone ID: 700872861H1
ctttgtttcgtttcacatatttgaaaaagggnaccgtaggcgaggggaagtaacgcaaaaccgaaacgcacaacattcacagccacacaaca

SEQ ID NO: 19929 - DNA, 228 bp, Glycine max
  Clone ID: 700872862H1
gctctcttccctcctccacttcatccaaatctttctcattttctctcccaaatcacactctcaattacaataacacacactcaacttgattattttccccaaaaatcccaagagctcgcgccatggtttccccggaaaacagcaattggctgttcgattacccgttgatcgacgacgacgttattcccgtcggcgactcctccttcgccgtctccgcttccaccttct

SEQ ID NO: 19930 - DNA, 224 bp, Glycine max
  Clone ID: 700872863H1
gttggtggtcaggacaagatccgtccactgtggaggcattatttccagaacactcagggtctcatttttgtggttgatagcaatgatagagatcgagtggttgaggcaagggatgagctgcacagaatgttgaatgaggatgaacttagagatgctgttttgcttgtttttgccaacaagcaagatcttcctaatgcaatgaatgctgcagaaataactgacaa

SEQ ID NO: 19931 - DNA, 221 bp, Glycine max
  Clone ID: 700872864H1
attccttaggcattcaaactcaggcataaccttcttgtgtgatgagaatatgagaaaatgattgattgtattctcagcctagagacaatggagagaggaggaaggggacatattggttatctggaaagcaatgccaaaatggcatctcatcagatatgtccaaattgtggatgtgattggcacttattttttttgtaatatattagcttttgagttgtttg

SEQ ID NO: 19932 - DNA, 184 bp, Glycine max
  Clone ID: 700872865H1
ggtgcaagcaagtcgtttgagcaggctctcaccatggccgattagggacacagacgaccagacccagatagacgactcggctagttgaggactgtcatgccgactaccagtagtgcgcgaatacgatgtacagccgtacaccgagatcgactccatcgtgctggaacgaggaagacgcggaaga

SEQ ID NO: 19933 - DNA, 206 bp, Glycine max
  Clone ID: 700872866H1
gttcattggaaagagtgccaaatgataataacctcaaaacaaacatactctaaacaacaaaagcattggcagggaattatatatggctaagctcacgccatgtatccatctgtctacctagtgacaaaaaatgtgttagctatgaccacagttgagatgacaccaatagagacttttaactctgtctctctctagcttctatttcg

SEQ ID NO: 19934 - DNA, 225 bp, Glycine max
  Clone ID: 700872867H1
gcctcctcaaggagaaagacaacttaaaagctgaggtggcgagcctcaatgagaaggtgcttgcaagagggaaacaagaggggcacatgaagcagcaggctgaaagtgaagaagaaacaaaaagattattgcatctgcaggaacaggaaccaccccagaggcttttactggaatcagtttcggagggagaaggatccaaagtctcttctgttgtcgggggttgta

SEQ ID NO: 19935 - DNA, 220 bp, Glycine max
  Clone ID: 700872869H1
aagatacttaccaagggggagaaatgggtgaacccaaaggatcctgatgatgttttagtcaagtatgaagcatgccttgaagatggaactcttgtggcaaaatctgatggagtggagttcacagtcaatgatggttatttttgtcctgctttgtcaaaggctgttaaaaccatgaagaagggagagaaagtgcttctgacagtgaagcctcaatatggat

SEQ ID NO: 19936 - DNA, 221 bp, Glycine max
  Clone ID: 700872873H1
gtgacactgtgactgctgttcttgttcctgcttacattgatagtactgaaatagttagaagggcatggaagagatacaatttgagcttaggtcttggactgaacaaagttgctgggaaggttttcagaattggacatcttggcaacttgaatgagttgcaactgttgggatgtctagctggtgtggagatgatactgaaagatgtgggctatcctgtaaag

SEQ ID NO: 19937 - DNA, 219 bp, Glycine max
  Clone ID: 700872874H1
gcaagttagttggatgtggctctgctgtgccagctcttcagatttccaatgacgacctttcgaaaatggttgatactaatgatgaatggatatctgttcgcaccggaattcgtagacgacgagttctttcaggcaaagataacttgacaagtttagcagtagaggcagctaggaaagctcttgagatggcaaaggtagaccctgatgatcttgacctaa

SEQ ID NO: 19938 - DNA, 221 bp, Glycine max
  Clone ID: 700872875H1
ggttcttagatatgaggacatttttgattcaaccagcacttttgctgtcatggtcactgcaactgacaagaagtccatcactgactatggttcacctgaggagttcctatcttaggtggattacttgcttggaaaacaagccttctttggccaaactgatgctgagggtggttttgattccaatgctgtggcaactgcaaatatcgttggagagttcaacg

SEQ ID NO: 19939 - DNA, 220 bp, Glycine max
  unsure at all n locations
  Clone ID: 700872877H1
gaggtctctaagtttcactttctttgcatagggcaacctcctttctctgtgactctgagtatcgtatcgttttattattatttctaattctctcttatcaggtccattgaatatgtctccttcgttgtatcttcctcccaagtgtggctatantnttgatctatgccgaagaaacgcaatgcttcaaaacaagggcctcaaatccccatcctttctcaaa

SEQ ID NO: 19940 - DNA, 223 bp, Glycine max
  Clone ID: 700872878H1
ggaaaatctttccaatgtgagcttgtctttgccaagatgggaatcaaccccatcatgatgagtgctggagagttggaaagtggaaatgcaggagagccagcaaaactgatcaggcagagataccgtgaagctgcagacatgatcaagaagggaaagatgtgcgctctcttcatcaacgatcttgatgcaggagctggtcgtcttggtggaaccacacaataca

SEQ ID NO: 19941 - DNA, 161 bp, Glycine max
  Clone ID: 700872880H1
gttttcttggtgccgggtgatttatgattcatagttcatccagttaattgattttgttttattttttattactcaaaaagggtttttagtagattgtatgaatctgttctgttttggctactaaatcattaattagagagagttgtataagttggtatctt

SEQ ID NO: 19942 - DNA, 233 bp, Glycine max
  Clone ID: 700872881H1
tcgggctcgagggtttagtatcaagggtaacaagacttgtgatgtgtgcaaggaggaggttcggaacctccctgtcactctcttaaggatccgaagtgttcgagctcagaatactagagcaaggtccgaacagggagatgacttcagggcttggcaggaacttccagtgcttgtcattgtcagcatgcttgcctatttctgtttccttgagcagctgttggttggaagaatga

SEQ ID NO: 19943 - DNA, 256 bp, Glycine max
  Clone ID: 700872882H1
cgtacgttcggctcgagctccgcttcccccaacccacaatttcctctcagtttccctgatcctattgaacccgactcacattgacgtcaatttcccaaaccgatcgtgttctctctcacgagagcacggtcgccgaagaagtaagagaacgaaggccggacaccgaaagcgcggcggcggcggcggtggaggaggagaacaacaccgccctgttcggaaaatacgaggttggaaggctcctaggatgcggcgcgtt

SEQ ID NO: 19944 - DNA, 220 bp, Glycine max
  Clone ID: 700872885H1
ccctcatcttgcaaaattctctcagctaattcgctattttcttgtagtaaacaaagcaagcaagcatatccatttcagacatggccctcaaaactggttcagttgaaatgttcttcttccccttcgtaggaggaggacatcagattccaatgatagacacagcaagagtgttcgcatctcacggagccaaatcaaccattctagtcacaccctccaacgc

SEQ ID NO: 19945 - DNA, 134 bp, Glycine max
  Clone ID: 700872886H1
ctcaattgcaactagctaatggctatgcatggaacttcttgtttggtgccttctgttctggagctagcaaaacaacccatcatcgaagttccagaacgatatgttcatgccaatcaagatccacatattctttc

SEQ ID NO: 19946 - DNA, 215 bp, Glycine max
  Clone ID: 700872887H1
ggttctgctgacagtcgtttatacaagaagaagtgatgcatttgctgctcataaacgctatgataatgtacttatggatggtaagcccatgaagattgatattggtggtaccaattcaggggtgccgataagtgctcgggtgaatgtgactgaggcgaatgggagcaggaagacgactttgtaatgacgcctagaggtggccaagctggaggtgg

SEQ ID NO: 19947 - DNA, 160 bp, Glycine max
  Clone ID: 700872888H1
acacaccacaaccttcttcttcttcttcttcaacttctggttcaaaacctcaacagtttgttgaattgcgcgttgatctacgactcaatattctttcgcgagctctgttctcacttcaaaggttaggttcttcgacagtttctttgtttccacacaacat

SEQ ID NO: 19948 - DNA, 172 bp, Glycine max
  Clone ID: 700872890H1
cagtttcatttcttggtgttttctatctgttgttcaatgtttatgggcaacatcaataatattatctcttactatcaatcttccttttgtttggaaatggtaatataatgatgttgattgctggacaagcaattgtagcttcttacttcaaatgtacctgacatttgaatct

SEQ ID NO: 19949 - DNA, 227 bp, Glycine max
  Clone ID: 700872843H1
gtgaatgtggatgatacaattgcacaacagatagttgttcacaaaaatagtcctagagggacccattttcgtcgtgctgggcctgctcagtaggtatattttgattcagaggtagtacacgcttgtattgtcacgtgcggtggactttgtcctggtctaaatacagtgataagagaaatagtatgcggcttatatcatatgtatggggtgcacaaagttttgggaat

SEQ ID NO: 19950 - DNA, 235 bp, Glycine max
  Clone ID: 700872805H1
taagaatcttctctctctctctctttctatctctctgtggtgtaagcaacaaaattccatcaagtgtgatctctaaataatatgtggagttgtgtgtgtgtggagtactcttacttgataattttcatgtctgcaattgcaagtgcaagtgccgtcgaaccgtgccactagaccaaaaagtgtttttgttgttgccaccatgtgtgtgcaagatggtgaacaagctggtgaagat

SEQ ID NO: 19951 - DNA, 234 bp, Glycine max
  Clone ID: 700872806H1
agattttgagcacaatggcctcgacacaatgctttttgcaccaccacgccctcaccactccagctagagcttcaacacagcgcctagttgttagcaccaaaccaaaccacattgtttgcaaggcagcacagaagcaggttactgtccaagagggtgaggacactactactggccttgtctctcgcaggttggccctcactgtgctcattggtgctgctgctgttggctctaagg

SEQ ID NO: 19952 - DNA, 232 bp, Glycine max
  Clone ID: 700872807H1
cttgaatcttcgttatccttctttttttctccttgaactcgaatattcactatggcagatgaggtggttctgctagatttctggccaagtccatttgggatgagggtcaggattgcacttgctgaaaagggtatcaaatatgagtccaaagaagaggacttgcagtacaagagccctttgctcctcaaaatgaacccggttcacaagaaaatcccggttctcatccacaatg

SEQ ID NO: 19953 - DNA, 236 bp, Glycine max
  Clone ID: 700872809H1
ccctaatccctatttttcttcctcagtagtgtcatttacgcttctcttctctgcagcaactatgcctaaccctaaggtcttcttcgacatgaccatcggcggtcaatctgctggccgcatcgtgatggagctctacgccgacgtcactccccgcaccgccgagaacttccgcgcgctttgcaccggcgagaagggcgtagggcggagcggcaagcccctccactacaagggctcgt

SEQ ID NO: 19954 - DNA, 232 bp, Glycine max
  Clone ID: 700872810H1
ggacaaaggaaaaaatgttgaagttggattgtcatccccaaatacattggaaagtggatcaatgttagtaggcgtatcttacacttctggagaggaaaatgctagttggactgaagataaaaaaaatttgaaagtcaatacttctggcactcaaaacatggaattaccaatttcagtacctgacagagggccttctattgttggagaaattataagcattggtggatctgac

SEQ ID NO: 19955 - DNA, 233 bp, Glycine max
  Clone ID: 700872811H1
ccacatttggaatgtcaaactggtgatttgcagcaaatcaccagtttggcaaaacagatggtgaccacatttggactgtctgatattggtccttggtcacttatggaaccatcagcaacaggtggggatgtcatcatgagaatgatggcaaggaactcaatgtcagagaggcttgcagaagacattgatgctgccatcaagaggatctcagatgaagcatatgaaattgcact

SEQ ID NO: 19956 - DNA, 230 bp, Glycine max
  Clone ID: 700872812H1
cgcttaagatcaccaagagagaacctaagacacacaacacagactcacacaaagagttacaagagaaatcatcatggcatcagcagcatctgggtttgtgttgtcacttaatgttgcagctgccaccacaaactcaagggtggttatgttcaacaccaagaacaacacttctaggtttgttgtaaaggcttcagatgagcctgcagcggcggcacccgccaccgccacac

SEQ ID NO: 19957 - DNA, 229 bp, Glycine max
  Clone ID: 700872813H1
gagcggttggagctttgttattgctgagatgctgtttagctccagtcttcttgctatcgttggaatggtgatcaggttccgtactatactgtacttgggctcgggctcgggctctgactgtgtattgttttgactgatacatgatgcacatgcagccatctttgtcccctcgccgtctttgtttattcaatacaaccactggagctgctcttagagaattgaattttct

SEQ ID NO: 19958 - DNA, 229 bp, Glycine max
  Clone ID: 700872814H1
tatgtttatataaaccgttatagaagatgataaagaaaaaggtaatttcaatcagcagttactactctcaacagtattagctaattgaaattacctttttctttttcttcatctattgtatgtttatataaaccgttatagaaggtgttcatctacgaaggagttagattttttttttcttttgttgttcatttataaaattctcaccgtaagtgtatatgtacgtgta

SEQ ID NO: 19959 - DNA, 229 bp, Glycine max
  Clone ID: 700872815H1
agaagagggatgctattgacacaaagaaccaggcagactctgtggtataccagacagaaaagcaattgaaagagcttggagacaaggttcctggccctgtgaaagagaaggttgaagcaaaactaggagagcttaaagacgccatttcttggggttcaacccaagctatcaaggatgccatggctgcactaaatcaggaagtcatgcagcttggtcagtccctttacaa

SEQ ID NO: 19960 - DNA, 243 bp, Glycine max
  Clone ID: 700872816H1
cggctcaacacgagctggttctatgctgatgagctcgttaagaccgcgaaaacagtggcttcaccagggaggggtattttggccatggatgagtccaatgctacctgtgggaagcgtttggcttcaattgggctagagaacactgaagctaaccgccaggcgtaccgtaccctccttgtgacagttccaggacttggtcagtacatctctggtgccattctctttgaggaaactctctaccaa

SEQ ID NO: 19961 - DNA, 230 bp, Glycine max
  Clone ID: 700872819H1
gatggagatctctgcagaattaacaagagtgggtgtttttcgtcagcggctgaggtggatagagacccttcttgtgtttcattcaccactttcaacattctggctccgatttacaaacggattgatccacagaacatacgatttagagaaagtgacttcagatcattctggttggacaggaataacaggattcttgattgcttgctttatgaatcatcttctattatgtg

SEQ ID NO: 19962 - DNA, 233 bp, Glycine max
  Clone ID: 700872821H1
caagcaaccacactgctgatcaggctcaaagataaacgatcaacaaattgtattatactagtgtagttcttttcatctgtaattgtatcagcttagatgtttagatttcgattcaccaatatgtctcatcaatatcaggtcagcttggacataaaatggtaaatgcttagacgtacaatcgtgtataccttttattcttgttaactcaattttattgtttgtaatgttattgt

SEQ ID NO: 19963 - DNA, 230 bp, Glycine max
  Clone ID: 700872824H1
tgcaattgaagttgaagtcttgcccttctctcttcaactccaaacacaagacatcatcatccatggctgcctccgtctccactgtcggagctgtcaacagagctcttttgaacctgaatgggtctggacctggggtttcagctcccagttcatccttctttgggagcagcttgaagaaggttattggctcaagggtccccaacacaaagatttcctctggaagcttcaag

SEQ ID NO: 19964 - DNA, 231 bp, Glycine max
  Clone ID: 700872825H1
aattatcaccatcttcccaactctactccaacaagatgggcacatcgatctccagcacaccctctgttgagacagatttctgatagtcgaatcatgggtctgaaatcgccagacaactcaatttctgaaggtaggccatcatttgtactctcaacttgcagcaatgaaatggcagctggatccatatgcggatcatctgatggctggtcaatgcgcaccttttctgagctg

SEQ ID NO: 19965 - DNA, 228 bp, Glycine max
  Clone ID: 700872826H1
gcttttatggacaaacttgttgttcacattaccaagaacttcatgaccctgcccaacatcaaggttcctctcattcttggtatctggggaggcaagggacaaggaaaatctttccaatgtgagcttgtctttgccaagatgggaatcaaccccatcatgatgagtgctggagagttggaaagtggaaatgcaggagagccagcaaaactgatcaggcagagataccgt

SEQ ID NO: 19966 - DNA, 230 bp, Glycine max
  Clone ID: 700872827H1
gggttctgaacttgaagctcccattcacgtcctcatggtgtcctatccagcacaaggacacataaaccctttgctcagactaggtaagtgccttgctgcaaagggcttatttgtaaccttcaccacctcagagaccgctggtaaaaacatgcgaaccgccaataacatcactgacaaatcagtgattcctgtcggcgatgggtttctcaagttcgatttctttgaagatg

SEQ ID NO: 19967 - DNA, 230 bp, Glycine max
  Clone ID: 700872829H1
ggagaatctgcttggccttttgagggttcgcgtgaagcgtggtgtcaaccttgccgttcgtgatgttcgaagcagcgacccttatgttgtcatcaagatgtacatccagaaactaaagactcgtgtgattaaaaaggatgtgaatcctgagtggaatgaagaccttactctttctgttataaatccgaatcacaaaattaaactgactgtgtatgaccatgacactttta

SEQ ID NO: 19968 - DNA, 232 bp, Glycine max
  Clone ID: 700872830H1
gcagcgttcacgaagtgggatacttcgacctcgtcgttaaggtttacttcaaaggggtgcaccctaagttccccaacggtgggatcatgtctcaacacttggactctctccccattggttctgtcttggacgtgaaaggcccacttggccacattgaatacactggcagaggaaacttcctcgttcatgggaaaccaaggtttgccacgaggctagccatgttggctggtgg

SEQ ID NO: 19969 - DNA, 244 bp, Glycine max
  Clone ID: 700872833H1
ggtgcaagcaagtcgtttgagcagacctgctttctggatgttaagggatactgtcgtgaagagaggagccacgaagggcttggaatgggtggttctgttgtctaccaaaaattcgggaagactagtgactgtggttcacctagatcaactctaaagtgctggaatgaggaagatgaggaagagtagtttccttaagtgtctttattattctgtccttgtgaaaataagtctggttttccagata

SEQ ID NO: 19970 - DNA, 231 bp, Glycine max
  Clone ID: 700872835H1
ctcgagccggatttttaagtgacgggaacaactgaaaagagaatagccagatccagacagcccatgccagtgcgagaagcctatcagcaaacagagtcttcttttctttttcttttttctctacacacagtgaaggaaggaagagagtatcatccatggcggccaccagagcagtaaccattgccagcaactccacatgctctctgcttgcaaagaaaacctttgtgggtg

SEQ ID NO: 19971 - DNA, 229 bp, Glycine max
  Clone ID: 700872836H1
gggaaatgatctttatatggaaatgaaagaatctggagtaattaatgaacaaaatattgcagaatcataagtagctctagtatatggtcaaatgaatgaaccgcccggagctcgtatgagagttggtttaactgccctgactatggcggaatattttcgagatgtcaatgaacaagatgtacttctatttatcgacaatatctttcgcttcgtccaagcaggatctgaa

SEQ ID NO: 19972 - DNA, 230 bp, Glycine max
  Clone ID: 700872837H1
gcagagcatgacagcgggaaaagattgacagcagaagagaatggcgggaacaaattgacgagcaaatccctttcattttccctttaaatttatctctattatttacacccataaaattgatttaaatcaaaccaacctataagcaaaactaatatatcactgaattagaaaaaaaaaatggggaagaagaagagaagtagggtttccgaagacgaggaaatcgaatctga

SEQ ID NO: 19973 - DNA, 225 bp, Glycine max
  Clone ID: 700872838H1
tatttttcttcctcagtagtgtcatttccgcttctcttctctgcagcaactatgcctaaccctaatgtcttcttcgacatgaccatcggcgctcaatctgctggccgcatcgtgatggagctctacgccgacgtcactccccgcaccgccgagaacttccgcgcgctttgcaccgtcgagaagggcgtagggcggagctgaaagcccctccactacaagggctcg

SEQ ID NO: 19974 - DNA, 231 bp, Glycine max
  Clone ID: 700872839H1
tgaataacctcaaaatccctttcttttgttcgattagatattgccttcacaccagagtctgaatactctgagactttccttcagtctgtcaccttctttctctctaggcgcaaaacctcgtactgtttgtggcggctaaggatgtcagggaaaggggcgaaggggttgatcacaggcaaaacctccgccgccaacaacaaagacaaggacaagaagacatccatctcgcgt

SEQ ID NO: 19975 - DNA, 229 bp, Glycine max
  unsure at all n locations
  Clone ID: 700872841H1
tttgtttgtatgtgtagggggacacataaacccggcggtgacatttgggctgtttttggcgaggaagttgtcgttgcccagggcgattttctacatcgtgatgcaatgcttgggtgctatttgtggcgctggcgtggtgaagggtttcgaggggaaaacaaaatacggtgcgttgaatggtggtgccaactttgttgcccctggttacaccaagggtngatggtcttgg

SEQ ID NO: 19976 - DNA, 237 bp, Glycine max
  Clone ID: 700872804H1
ctcacagctccaaagccacaagcctcctccgacctccccgaaggcaacaactggcgctacagcgagttcttgaacgccgtcaagaagggtaaagtcgagcgagtcaggttcagcaaagacggttccgccctccagctaaccgccattgacggccgtcgcgcctccgttattgtccccaatgacccggacctcatcgacatcctcgccatgaacggcgtcgacatttccgtcgccgag

SEQ ID NO: 19977 - DNA, 109 bp, Glycine max
  unsure at all n locations
  Clone ID: 700872842H1
ggagggaggaatcaaaggagtaaccagcaacccaacccttccccttccctcaaactccatcacagcatcacaaaannagtaccctgcaacctcaaacaccagatccttc

SEQ ID NO: 19978 - DNA, 245 bp, Glycine max
  Clone ID: 700872755H1
cttggtggtcaggccaagatccgtccactgtggaggcattatttccataacactcagggtctcatttatgtggtctgatagcaatggtagagatcgagtggttgaggcaatggattagctgcacagaatgttgaatgaggctgaacttatagatgctgtcatgcttgtttttgccaacaagcaatatcttcctagtgcaatgaatgctgcagagatacctgagaagcttggacttcattcgctcc

SEQ ID NO: 19979 - DNA, 253 bp, Glycine max
  Clone ID: 700872756H1
atcaaactccaagaatatcacaccgccaaggtagcgcttcaaaacggtgccgcttttgcccaagacgattcaagattcgccaacttgattcaacaatgtgatcgctgcattgcagaggaatcaagtggccttactagcaccttgtcttcccatttgagcaatagaaatcatgggatgactaaagaagaagctgaaggagacagtttgctttcccaaaagaatgaagccacactaaacagaccaaaatacaggc

SEQ ID NO: 19980 - DNA, 250 bp, Glycine max
  Clone ID: 700872757H1
actgaatctactagcccccacaggttctaatgataacactagggaaaatccgggggagggagggtaaagaaaaaaacttcatacaaatgcggtgtaaaatttcttcctgttccgttatatgagagagagagactatcacccactcacccagagtattcttattggcttattcagaaaatatcggcctgctcttccaccacagtaaaggcatcatcacaattcacaggtaagaaactcgttatttcgtcgc

SEQ ID NO: 19981 - DNA, 248 bp, Glycine max
  Clone ID: 700872758H1
atcgattattgaaataatctaatcttctaaacttgatgtttttatttgtaataacagcttcgactttttcttcttttttttttatactatagattgactcttaaatttttggtccttggagtgagaccttttactcttttttctccttcatagaacctggtcctctagtacaactaggatgtgggacaatttctggggctgttggagctacttgtgtctatccattgcaggttattcgaacaaggtac

SEQ ID NO: 19982 - DNA, 243 bp, Glycine max
  Clone ID: 700872762H1
cacgagaatagaaggaaaggacttaacatgtgtgggagtcctttggccttcaatagtttcaaagcctctttatcatacaaaacaccagccactttcacgttcagaatgtaagacccaagaggctttgaaactattgaaggccaaaggactcacgagacagaaaggaaaggacttaacatgtgtgggagtgcaatgctacaaaatggcttttatcataatcacggcttcaacgttggttggttg

SEQ ID NO: 19983 - DNA, 246 bp, Glycine max
  Clone ID: 700872765H1
ctttaaatctttgtgtactgacccccaatcgaattgtttgggattcggaagtgaaggaaatcattttatctactaatagcggacaaattggagtattaccaaatcatgcgcctattgccacagccgtagatataggtattttgagaatacgtcttcttaaagaccaatggttaacgatggctctgatgggcggttttgctagaataaacaataatgagatcactgttttagtaaatgatgcggaaa

SEQ ID NO: 19984 - DNA, 245 bp, Glycine max
  Clone ID: 700872766H1
ttcaaggatggaatgagtgagagttgtgaagtgtataaggagaaagagggtgtcaaaaggtgtgtgagttcaagggtgagtgagtaccctcctcctatttcttgcatagggaggagtgggaagccttgggtgtgtttcaggtcctacagaagtgaagggaggtttgttcttgaagagataaggattccaacacatgagttcttgcatgcttgtagagaggatggaaggctgaagctgcattttgt

SEQ ID NO: 19985 - DNA, 240 bp, Glycine max
  unsure at all n locations
  Clone ID: 700872767H1
taaaccactatcataacatatgaaatatttttctctgatgttcttcaaagtaaagactatgttttgtgngtgttgagggatagatgctaaaactgatattcgtgatgttgataatgttattaacgtagacttatatcataaagccagagttgatactcatctcaaaacagaacatgataccgaaatgcaaaacaattatctgactacttcagctcgtcatgatgaaactaacactaaacc

SEQ ID NO: 19986 - DNA, 243 bp, Glycine max
  unsure at all n locations
  Clone ID: 700872769H1
actgaatctactagcccccacaggttctaatgataacactaacgaaaatccgggggagggagggtaaagaaaaaaacttcatacaaatgcggtgtaaaatttcttcctgttccgttatatgagagagagagactatcacccactcacccagagtattcttattggcttattcagaaaatatcggcctgctcttccacacaacatagattcaggncgatattttctgaataagccaattcgaat

SEQ ID NO: 19987 - DNA, 245 bp, Glycine max
  Clone ID: 700872770H1
tgcagctttacagctgtagtcgattctccctttctttaaccataataatcatgaaatatgcatatttctaaaaattgcttctacttcttgccactagctctgtaaaattttgtaggattatatagtctcaaatagtattacattactatctgtaaaatccatataagaatttcatggaatatcagattagttctccaataaaagttccatttagcacaaaaaaaaaaaaaaaaggggcggccgcc

SEQ ID NO: 19988 - DNA, 247 bp, Glycine max
  Clone ID: 700872773H1
gtcttctggttctttgaagaagaacccttctctttgcgcgtgtcccgttctcttctccaatcctcctccatccccactgtgtgatctgatcctaaaccctatagccatgactaccatggaggttaagctatggaatgacaagcgcgagagagaaatgtatgacaactttggggagctttatgccattatcaaagccgctgtgaggcttgagaaggcctatgttagagatataatctcaccccaggaa

SEQ ID NO: 19989 - DNA, 248 bp, Glycine max
  Clone ID: 700872774H1
gtgacattcattgtacaatcagaacgtgacatggagtagtgaatgtaccttcgtaacagtcaacgtctaaatctggacttggggatcacatttacgggattgtctataattgaaggactaaattcgtgaataaatttaaagagggactaaaatcaaaattggagacaactagagggaacaaaaatgcaattttgccaattatatattatgcttatgtactcctggccccaaaaacatgatgctgaagt

SEQ ID NO: 19990 - DNA, 250 bp, Glycine max
  Clone ID: 700872776H1
tggaaggccaaattggagaagatgcatgagcaggttgacaagatcgcagacaacattctcagagagcatcaagaaaagcgcgaaagggcactacgagaaggcaaggttgacctagaggaggaggatcttgttgatgttcttttgagaatccaacaaagtgacaacctcgagatcaaaattagtaccacaaacatcaaagcccctatattggacgtatttactgctggaacggatacttcagcatcaacac

SEQ ID NO: 19991 - DNA, 252 bp, Glycine max
  Clone ID: 700872777H1
gtggaagagtacaatgcatgcaggtgtggccaccaattggcaagaagaagttcgagactctttcctacttgccagacctcgatgatgcccaattggcaaaggaagtcgaataccttctaaggaaaggatggattccttgcttggaattcgagttggagcacggtttcgtgtaccgtgagcacaacaggtcacctggatactatgatggacgctactggaccatgtggaagctgcctatgtttggctgcactg

SEQ ID NO: 19992 - DNA, 249 bp, Glycine max
  Clone ID: 700872780H1
cattgctggaatcagactctctattaatgtatgtatttccgtttccagagttggatcggcatctcaaattaaagccatgatacaagtatctggtaaattaaaattggaattagcacaattcgcagaattagaagctttttcccaattcgcttctgatctcgataaagctactcaaaatcaattagcaagatgtcaacgattgcgcgagttgcttaaacaatctcaatcagctcctcttaccgtggaaga

SEQ ID NO: 19993 - DNA, 245 bp, Glycine max
  unsure at all n locations
  Clone ID: 700872781H1
gttccagagactgaccgaagtattatcccacatgcagaggttcttcgatcctcgtgtttggaggnctgtcgtggatttacctgactgcaagaccaggtgttcttgttggtgccattgatgcgtaccttttggcacctcttcaactgggtttggacaacttgtctggaaggaggaacttgaagaggagtgactttgttgttggagacaagctcggtgaagggtcctttggtgttgtctattcgggt

SEQ ID NO: 19994 - DNA, 244 bp, Glycine max
  Clone ID: 700872782H1
tagaattcaaagaaacactattattcttttcaacacttttgatggcatttagagtgatgtaatgaatgctctatcctctatgttcccttctctttatcccattggtcctttccctttacttttaaatcaaagtccacaaagccacttgacttctttaggttccaatctttggaatgaagatctagagtgtcttgaatggctagaatctatggaatctcgatccgttgtttatgtgaattttggc

SEQ ID NO: 19995 - DNA, 245 bp, Glycine max
  unsure at all n locations
  Clone ID: 700872783H1
cgctgctaaggcagctataatgttgcgccgggctattcagcgtgctcggctgcatctgccagcgcccattggccacgataacggcggcggtggatcatccagcgatgaagaagattattctgtgagtcccagcgttgcatacaccagcctacgtgacgacgaatcagtccgtgatcatttccgcaagcgtccggaggagntttctggtgtgcatttgattattgcggaagaagcagcaaagacaa

SEQ ID NO: 19996 - DNA, 87 bp, Glycine max
  Clone ID: 700872787H1
acaggatggacgtcttgcgaagtttccagcttccaggtgggaccgccatcgcgctcttcttcgccgctgtagccgtgtacaccatct

SEQ ID NO: 19997 - DNA, 246 bp, Glycine max
  unsure at all n locations
  Clone ID: 700872788H1
gtaagatacatgacggaacctaactcctccttcaggaagagcgcacatgaacaacctctcacagtacgacgcggagttcaacgccgncgacgccggctacgcctctcacgacgtcgttcacgcctccggccgcacgcgcgagccaagcgaggtgtttcttggacggaggaagagcatagattgttcctgttagggttacacaaagtcggaaaaggagattggagagggatttctagaaacttcgtg

SEQ ID NO: 19998 - DNA, 237 bp, Glycine max
  Clone ID: 700872791H1
gaagaagaagagagaggtctctcaacaatggccactgccactgtttcaatttcaactttatgcgctactttcggaacccattgcgccatttcccacaacccaaaacattgattttctcaacctttcaatctcaatcactttccttctaactcttacaagctcgctttctcgcctcgctcacctctttcaccccttcccaaggcctctgaatccgcggtagccgaaaccgaacccggt

SEQ ID NO: 19999 - DNA, 88 bp, Glycine max
  Clone ID: 700872793H1
gtcagagggcaattttagagcaagtgttgatttgcagagcagtcatcgtattaaaggaatgattaaaatggtggccacagttggtatt

SEQ ID NO: 20000 - DNA, 249 bp, Glycine max
  Clone ID: 700872794H1
aacaaacatttttccatgaaacttgcatctaccattattattctatcacatccatggccacagttgtgaagctacatgttgtcccagaatgtttgaaccaacagaaaacgaggtcgctcaggaggggatttggctcatgcccttcccctggggtgcttggttttggccattattgtgatcggttctctgtgaaagtgtgcagggcttttaggactgaggatggtggggatgtaaaggagaaaaagttac

SEQ ID NO: 20001 - DNA, 246 bp, Glycine max
  Clone ID: 700872801H1
ggtgcaagcaagtcgtttgagcagacctgctttctggatgttaagggatactgtcgtgaagagaggagccacgaagggcttggaatgggtggttctgttgtctaccaaaaattcgggaagactagtgactgtggttcacctagatcaactctaaagtgctggaatgaggaagatgaggaagagtagtttccttaagtgtctttattattctgtccttgtgaaaataagtctggttttccagatacg

SEQ ID NO: 20002 - DNA, 258 bp, Glycine max
  Clone ID: 700872802H1
tcgcagcacgcgtagatacgtcataaaatactacttacatgaaatcctgtacagaaattaaccccatatgttcttgtgctggcattgtcaacagagtggtgttcatcatgcagtaaatccatgcccttatagaggcattttcggttctgatggagagaagtatgcaagagatgtacaagatatcattaacttcggaacttctggaaatgttgcagccttcatttctgaagccatacagggagtggggggtatcattga

SEQ ID NO: 20003 - DNA, 238 bp, Glycine max
  Clone ID: 700872803H1
cttcgcttcccccaacccacaatttcctctcaatttccctgatactatttaaaccaactcacattaaccctcaatttcccaaaccgatcgtgttctctctcacgagagcacggtcgccgaagaagtaagaaaaccaatgccagaaaccgaaagcgcggcggcggcggcggtggaggaggagaacaacaccgccctgttcggaaaatacgaggttggaaggctcctaggatgcggcgcg

SEQ ID NO: 20004 - DNA, 247 bp, Glycine max
  Clone ID: 700872754H1
cggcagtgtcatgctcattgccactgccatcgcctccaccggtagtccctcttgcaagaaagattggagcggagttcatagggaccttcatcctcatgttcgcaggcactgccgctgccattgtcaaccaaaagacaaatggctctgagacccttattggatgtgctgccaccactggtctcgccgtcatgatcgtgatcctcgccaccggccacatctccggtgctcatctcaaccctgctgtcac

SEQ ID NO: 20005 - DNA, 257 bp, Glycine max
  Clone ID: 700872707H1
agaggtagaggaaagggtaaaaaactaactgttgccaattttgaggatccagcgagtggcgaggatgaaaaagttcccacgcaaaagagaagagggaggccacaaaaaccgctaaaggacgactttgatgaagaagaggtagagaaaatagaagacgacagtgacaatgttaagaatggaaccgcttacaaagagatgaaaagccccactgcaactgaaaatggaaggaaaagaaagcgaaactcacaggtaaaaga

SEQ ID NO: 20006 - DNA, 261 bp, Glycine max
  Clone ID: 700872709H1
gctccagcacaggatagaaaattgatccttctttacagggtcttcattcacaagacttcagtccgcgattcttagccatcttggagtacgatagcttcgttcactgttgatcaacgtcaatagaccatccatcaggtcgctcatcatgacggtcggcatcgcacttattggcagccgcattttcgctaaggaagaacatcttcctgccattcaaaacacacaatccctcagtctgaaggcagtttactcacgctcactcaa

SEQ ID NO: 20007 - DNA, 261 bp, Glycine max
  Clone ID: 700872710H1
gtatacatggcggctagtggaagttccttttccaacatcactagcttccttcgcaaccaacaaccctcttcccaacctctcgattcttctctcttcctctctgctccttcaatttttgtttcaggttcgagatccatggtgagttttgaagcagaaggagggaaggggtgtaacggctccttcttccgcgcgtttgacatggacgacaatggggacgagtgcatggatgagtactttcataaacccgagaagaagcgtcgt

SEQ ID NO: 20008 - DNA, 258 bp, Glycine max
  Clone ID: 700872711H1
ctcttcttctcttgcggcgagggttttagcgcacttcttctagatttaaggaagatgggtaaggaaaaggttcacatcagtattgtggtcattggccatgtcgactctgggaaatccactaccactggtcacctgatttacaagcttggaggcattgacaagcgtgttattgagaggtttgagaaggaagctgctgagatgaacaagaggtctttcaagtatgcctgggtgctggacaaacttaaggctgagcgtgaa

SEQ ID NO: 20009 - DNA, 262 bp, Glycine max
  Clone ID: 700872713H1
cggctcgagcaacacacgaccgcttcaacaactactccatcatcatccatccacaacaccacatcacacacaagccaccacacaccactgccaacatgcagatctttgtcaagaccctgacgggcaagaccattaccctcgaggttgagtcctcggacacgatcgacaacgtgaagagcaagatccaggacaaggagggcatccctccggaccagcagcgcctcatcttcgcaggcaagcagctggaggatggtcgcactct

SEQ ID NO: 20010 - DNA, 263 bp, Glycine max
  Clone ID: 700872717H1
ttcggctcgagacattaaatacaatggtggcctcgacacagaagaagcatatccctacaccggaaaagatggtgtctgcaaatttacagctaaaaacgttgctgttcgagtcattgactctatcaatatcactttgggtgctgaggatgaattgaaacaagcggttgcttttgttcggccagttagtgtggcatttgaggtagcgaaggacttccgattctacaataatggagtttacactagtaccatttgtggtagcacgc

SEQ ID NO: 20011 - DNA, 157 bp, Glycine max
  Clone ID: 700872718H1
aagtatacttcctgatgtaatgccacactctcttaaggtcagagcgatggctatgtttgaagctgtacaggagattgccatatacattcataggtttctcaatcttgacctttttcagcagggatggtatcagattaaaattactatgagatgggaa

SEQ ID NO: 20012 - DNA, 254 bp, Glycine max
  Clone ID: 700872721H1
ctccttctctcgttgattcggatctagagtcttttttcactcttcagttctcgttgttgttcttcgctttcctgaaactagggttttcaatttcgattcattcgttaataattaaagatgtttgggagggcaccgaagaagagcgataatacgaggtactacgaaatcctcggcgtctcgaagaacgcttcgcaggatgatctgaagaaggcttactcgaaagccgccatcaagaatcaccctgacaagggcgg

SEQ ID NO: 20013 - DNA, 251 bp, Glycine max
  Clone ID: 700872722H1
gaaatatgttagaggctttggagcggatggggctcagcaagtatttccaggcaattgtgacagaagaggatggaatggagtcaatagctcatagatttctttctgctgctgtcaagttggatcggaaaccttccaagtgtgtggtttttgaagatgatcctagaggagtaactgctgcgcacaattgtacaatgatggctgtagcattaattggagctcatcctgcgtatgatttggggcaggctgatctt

SEQ ID NO: 20014 - DNA, 258 bp, Glycine max
  Clone ID: 700872725H1
atatcataccctttctatcctacttgctacttcccacttccattcttttcttaaccagctaggatggtgagtgttgaagagattcgtaaggcgcaacgtgcagaaggccctgccactgtcatggctattggcaccgccactcctcccaactgcgtggatcagagtacctatcctgactattatttccgcatcaccaacagctcgcacatgaccgagctcaaagaaaaattcaagcgcatgtgtgataagtcgatgatt

SEQ ID NO: 20015 - DNA, 161 bp, Glycine max
  unsure at all n locations
  Clone ID: 700872728H1
cgaatttgaaaaaaatgaattaatcttgttgtggatggctgaagatcttttgaagaaaccaaggtaaggtaggactttagaagaggttggtcatgagtattttgatgatttggtatttagatcatttttccaactttcanacacaattagaagtagttggc

SEQ ID NO: 20016 - DNA, 166 bp, Glycine max
  Clone ID: 700872730H1
ggatgtcttattaaatcagatggtggatccatgaatttttgtttgtctggtctccatgataatgaagatagtgatggatgggagactgagtctgtggtttctgagtcgcgtgtcccggttggaaaatacctcgtgaaggaaagctttgctcccatcctgagatcca

SEQ ID NO: 20017 - DNA, 251 bp, Glycine max
  Clone ID: 700872733H1
cggctaagacagaatatggagagtagtgagggaattaggtgtaaggtatgcgtgaccggcggtgctagttacataggctcttgccttgtcaagaagcttctgcaaaagggctacaccgtccactccaccctcagaaactttaaggacgagtcaaagataggccttctgagagggttgcctcatgctaatgatgagagactggtgttatttgaagcagacatatataaaccagacgagtacgagccagcaat

SEQ ID NO: 20018 - DNA, 249 bp, Glycine max
  Clone ID: 700872735H1
gttaccctagggctaggctagtagtatgaatggattatggatggtgaagattgattgattcaagatgactgcaactggagtggccgtgtcgttggggttggggacattctctaactgttactgttacccagtgcctgtaaaggaattgcttttttctacaacgcgcattcgcaatcggagtaggaagaagcgttttggttttggtcaaaaaaggttttgcgttggagctgcaaatgcaaatcatgagtt

SEQ ID NO: 20019 - DNA, 134 bp, Glycine max
  Clone ID: 700872736H1
atatcccccacgcgccgccagtgtcaccaaaccatcagcagcagcagcacgtgattcacggcatgacaaacatcctcggatccggcaattccgatgactactcccgaccgtccttgttcggagaaaacatcgcc

SEQ ID NO: 20020 - DNA, 251 bp, Glycine max
  Clone ID: 700872738H1
gcgacgcacaacagtgtcaggacctcgaaatgtccgcttgcagaaacggtaaatgcctctaccaagtctcatatggtgatggctcattcactgtaggagaatacgtcaccgaaactgtgtcgttcggagccgggtcggttaatagggtcgcaatcggttgcgggcatgataatgagggtttattcgttgggtccgctgggcttcttgggcttggtggtgggcctttgtcattaacttcacaaatcaaagcg

SEQ ID NO: 20021 - DNA, 254 bp, Glycine max
  Clone ID: 700872741H1
atgaaatgttgattggtatttattgatgaattgagtaaagagtaaacctttttcttttagattagagtttttttatagattttgaaagtgaaaaccctttgttttttttatttgttataactacttgagccggatgaaaggaaaccttcacgtccgattttgaaagggggagatcttattggattggatcctatctcaatttttcgtttgctagacccgtagttaaaaaacccactttcttacgattacgaggt

SEQ ID NO: 20022 - DNA, 177 bp, Glycine max
  Clone ID: 700872742H1
ttcccctctaagggtatctttctctctagctttttgttatgctttgctattctgtctttgggagctgaagctcgtagatcaccatcacccatctcttctctcattagcaaagagctttttgattccattttcatccacaaagataacaatgcatgccctgccagaaacttccacaca

SEQ ID NO: 20023 - DNA, 254 bp, Glycine max
  Clone ID: 700872743H1
cggctcgaggacagtctggaaatgaattgcttgattccttttactgtatttattggttgacttggaatattggacttggagtaaacttttttcccaatccgggcatgaagatcattattagcagctatatttgaagttatccacaatcatcacgcgcggaaagatgttggatattactggtccagttttagtgataatccctatctgattttcgatgttttatgcttttaggggagcgactgttatacttcaaa

SEQ ID NO: 20024 - DNA, 158 bp, Glycine max
  Clone ID: 700872744H1
taaacttgaattatgtatatcactttcccattaagacattagcaatggggaaaataattataagatggtatgaaatttattttccccattgctaatgtcttaatgggaaagtgataaacttgaattatgtatatcttgtaaaaatgtaatttatgcac

SEQ ID NO: 20025 - DNA, 254 bp, Glycine max
  unsure at all n locations
  Clone ID: 700872745H1
gatgaagttggggagcgtggtggagcaccagttgtctgcattgtagatgcctccaaacgctgttttgnattttcaagtggcttagctgcttggacacctctacttttattggttcctttggttcttggacttgataaagtcaatccaaggtatattccattattgcgctcaacttttaaactttcccanagccttggcatcatgggtggcaaaccaggtgcttcaacatacattattggttctcagaatgaaaa

SEQ ID NO: 20026 - DNA, 253 bp, Glycine max
  Clone ID: 700872746H1
gtgtcataaaaaatggaacttgaaaagttacatgattcaatcaatttgatactgtcacttcagagtaaaaatggaggtatgactgcgtgggagcccgcaggagcttataaatggttggaactactcaatcctacggaattttttgctgacatagtagttgagcacgaatatcttgaatgcactgcatcagcaattcaggttttagtgttgttcaaaaagctttaccctgagcatagaaaggaagagatagaga

SEQ ID NO: 20027 - DNA, 257 bp, Glycine max
  Clone ID: 700872747H1
gttacaagaagtcttcaacgttgtaccaacttccgaatcagaagagtttcagttaccaactcaaacatcgctttccctcaccttcttcgacctcctatggttaaggttaccacctgttcaacgcgtcttcttctatgaattccctcacccaacccatctcttctttgatacccttcttcccaaactcaaacactctctttctcttgcacttgcccactttttccctcttgcgggccacctcacttggccacttcact

SEQ ID NO: 20028 - DNA, 250 bp, Glycine max
  Clone ID: 700872749H1
tgtctagctatctccctagttttctgaggctctagtggaaccgaacagagacaagaacaaccgcccaggaatattccatttcctttatcctcggtgcttctgtcccctttctcggatctcagattcattcattcacacattccacctcaatggccgcacacgtctccaacgctgtgctcctcggagacgttcacttcgacgacgtcgccgcaaagccttgcggcgttcacttccgcggcgaaacgcggcg

SEQ ID NO: 20029 - DNA, 248 bp, Glycine max
  Clone ID: 700872751H1
acggtctgtgactcacacagactcacttcaagttcccagcttttgccatttttcccactgtttattgagatgaactgcagaacatggcacagattttggctccctctacgcaatggcagatgcgaatctcaaaatcctctcccaatgcaactcccattacatcaaacatgtggagttctttattgtggaaacaaaataagaaagtttcacctaccagttctgctaaatttagagtgctggcaattaag

SEQ ID NO: 20030 - DNA, 244 bp, Glycine max
  Clone ID: 700872752H1
cggctcgaggacagtctggaaatgaattgcttgattccttttactgtatttattggttgacttggaatattggacttggagtaaacttttttcccaatccgggcatgaagatcattattagcagctatatttgaagttatccacaatcatcacgcgcggaaagatgttggatattactggtccagttttagtgataatccctatctgattttcgatgttttatgcttttcagggagcgactgtt

SEQ ID NO: 20031 - DNA, 252 bp, Glycine max
  Clone ID: 700872705H1
tgaacaaatcctgctagtgcagctatgtgtggaatgaaaattgtctctgttggaactgatgccaagggaaacattaatatagaagagctgaggaaggctgctgaaacacacaaggataacttatctgcacttatggtaacatatccttcaacccacggtgtttatgaggaaggtattgacgaaatttgcaatattattcatgataatggaggccaagtatatatggatggtgccaacatgaatgctcaggtg

SEQ ID NO: 20032 - DNA, 235 bp, Glycine max
  Clone ID: 700872640H1
gtgattccacagcgctgatcccagagccaagaaagactggtacgatatcaaggccccttccctcttccaggtcaagaatattggcaaaaccctcgtctctcgtacccagggaaccaagattgcatccgaaggactcaaacatcgggtttttgaggtctcattggctgatctccaaggggatgaagaccactccttcaagaagattcgtttgagagctgaggacgttcaagggaag

SEQ ID NO: 20033 - DNA, 240 bp, Glycine max
  Clone ID: 700872645H1
tctggctcagagctttaccaagcgcccaatgaagggaatgcttaccggtcctgttaccattctcaactggtcctttgttagaaatgaccaacctagatctgagaccacctaccagattgctttgtctatcaaggacgaagtggaagaccttgaaaaggctggcatcactgttatccaaattgatgaagctgctttgagagagggtcttccactgaggaaatcagagcaagctcactactt

SEQ ID NO: 20034 - DNA, 242 bp, Glycine max
  Clone ID: 700872646H1
cttctgttgattcccaaaccgatgctgttattcagaagatcatcagagaggactttgcagctcgtaccatcatcagcattgctcatagaataccaacagtaatggactgtgatagagttctagttgtagatgcagggcgggccaaagaatttgattcaccagccaacttgctccaaaggccatctctctttggggcattagttcaagagtatgccaaccgttccagtggcctataagaaagt

SEQ ID NO: 20035 - DNA, 86 bp, Glycine max
  Clone ID: 700872650H1
cggctcgataaggattctacccgccgctcgatgggaattgcgcttcaaggcgtctcgtagggctaatccgcctcacgatggtcacc

SEQ ID NO: 20036 - DNA, 231 bp, Glycine max
  Clone ID: 700872651H1
cagacaaaggctgctgtaggagataagatattgaagtagtgctaagtgcctaacacctgcagtgaacaatggcctctgcatcagcatctcttctcaagtcttcacttgttcttgacaagtctgagtgggtgaagggacaaacacttcgccaaccttctgctgcatcagttgtgagatgcaaccccaccaccccatcaggcctcaccatcagagctggttcctatgctgatg

SEQ ID NO: 20037 - DNA, 230 bp, Glycine max
  Clone ID: 700872658H1
gcgacgatgaaagcaatgacagcaacgacaacgtttgatgtctctgccgcttgcttccgtgcccctccttcttgttcaccgaatccatgccacaccagtttgtcaggtataaactccctgaatcctcacaagggacgaagcataagcgttgctgttccacctaagtttccaatgttccggagggaagcagctctgcagggtgaatttggaggtagttagagtcccaattc

SEQ ID NO: 20038 - DNA, 242 bp, Glycine max
  Clone ID: 700872663H1
cggtgagggcgatatcgatcgaacatggcggaggagtacgatgtgatcgtgttgggcacgggtctcaaggagtgtattctcagcggtgttctctccgtcgatggcctcaaggttctgcatatggataggaacgactattacggaggagaatccacttcgctcaatcttattcagctttggaagagattcaggggagatgacaagcctcctccacatttgggcgctatagggactacaacatc

SEQ ID NO: 20039 - DNA, 241 bp, Glycine max
  Clone ID: 700872665H1
gattcccatagctaaagttgatgtcttggagttagatcttagctctatgacatctattcggaattttgcatcaaatttcaattcatctggtctttcattgaatattttgataaacaatgcagggatttgtgcagctccttttgcactatccaaggataacattgaacttcaatttgccataaattacttaggccactttcttttaacaaatatgttgttggatactatgaagatagcaaca

SEQ ID NO: 20040 - DNA, 224 bp, Glycine max
  Clone ID: 700872667H1
gaccagatggagaaatctgctacactcttcaggccaaaattaattgttgctggagctagcgcttatgcacgtctctatgattatgaacgtgtacgcaaggtttgcgataaacagaaagctatactattggcagatatggcacacatcagtggattggttgcagctggtgtcatcccatcaccttttgattatgctgatgtagttactaccacaactcacaagtc

SEQ ID NO: 20041 - DNA, 233 bp, Glycine max
  Clone ID: 700872669H1
cattttcttctgcgcttcttctctgtgttctggcttccttggtacgggaacatactaatcttgtccatttccctttggtttttctttcttcgatctcttcaccttcctttcgacctctctcttatcaccgctcgctttctcaacttgatccctctctgctgagggtttctccaggtgtggtttgatttacagtttctgatgctgaataaataaaaaagcttgaaggcttttgc

SEQ ID NO: 20042 - DNA, 163 bp, Glycine max
  Clone ID: 700872674H1
gattataccataaaggagactgctctagtcattgatagtctcttggtttaagacttgatgtaatgcagtcttcatcgtctccaatattagtgtgtggagcttgatgtcttcatctggctttctcaaatttaaacaattttgcatgcaaaacaataattggcct

SEQ ID NO: 20043 - DNA, 233 bp, Glycine max
  Clone ID: 700872675H1
gttaccatgaggacacctactaggaagattcgaaagagtgaatcgtctgagggaaagtcgggttctgaagcaaaaactgcagcaggggtttaaacagcattacactgcttcaattgttatacttgaagaaaccagctggtgcctcaagttacctggcgggttgtcactgaatttagcgtggttgtcaaattgttgggaagacattcagaacaatcttccgcaactgagttttc

SEQ ID NO: 20044 - DNA, 234 bp, Glycine max
  Clone ID: 700872676H1
tgaaattttcatattgtagatttagttgatcaatataatgattgttttaatttaattccttgaattaatttaattattgttcttcgacactttattcagtagattattaatttttttagaaccagaattagtttattgcactatttttttagtcattcacatcggtacatttattcggtatacattaatttatcagtatacattaatacaaagggatttttagaagttagtttt

SEQ ID NO: 20045 - DNA, 233 bp, Glycine max
  Clone ID: 700872677H1
ctcaaccctctcactctcacgctctcatactcattcgctcactcgctcaccctctagggttttttggaatcagaaaacgaaatagggttttagcggaacgatcatggcaccagctagggttttcggggcaatcgccggcagagcgttcatggcggcggcggcgaagagcgcggcgaagaagaaacccgctccgtccagcggagccgctgcgaaagccgctgtgaagaagacgg

SEQ ID NO: 20046 - DNA, 242 bp, Glycine max
  unsure at all n locations
  Clone ID: 700872680H1
atttgattgatgatggaaacgttggccacatcttcttctgcaactcttccatcttctactntcaccttttctatattcccttcaagaagaacttccctttctcctcccaagactctccaatttcgtttaccctcctccaagcgtgatgatgctcgcgattcagactctaaccaaaacaatcttcctattctcagtgatcgctgcctctccctttcccctctttccaaagatgctgcgatggg

SEQ ID NO: 20047 - DNA, 233 bp, Glycine max
  Clone ID: 700872682H1
ctctattacaataaaaacactcaaaagagctgaaaaaaagaagaaaagaatggtaacaatagctggtggtgtgagtgcttcaagccctagcagggtatttgctaatgctaagggaatagactcagcacaaaaggcccaggccgtgaggtttccagctctgtcgaggcccattcaaaagtggcctggtttggtgaagacccggcccgttcgggcgacgccggagaagatatcgg

SEQ ID NO: 20048 - DNA, 234 bp, Glycine max
  Clone ID: 700872683H1
aagaggttaaaggatgaaaaacacaacttcaagtatgaattcaagatagatagtaataacaggcttgaacatattgcatggtcctacagttcatccattcaatcatattaggtctttggtgatgctgtggtttttgatacaacctatcgtgtagaagcttatgacatgctgttgggaatttggcttggtgtggacaataatggaatgacttgtttctttagttgtgcacttcta

SEQ ID NO: 20049 - DNA, 230 bp, Glycine max
  Clone ID: 700872684H1
ctcgagccgattcggctcaggtcgcgaatttgaccgaatagataatccacagtttgtgggctagaaatgtgacccaaatggagaatatgtgcgacgctggcttcctgaacttgctagattaccaactgaatggatacaccatccatggaatgcaccagagtctgtactccaagctgctggaattgaacttggttcaaattatcctcgtcccgttgtgggaatagatgcag

SEQ ID NO: 20050 - DNA, 231 bp, Glycine max
  Clone ID: 700872685H1
ctcagtaggtcggtgctgagaaaaaggttacaacagtgaagccgacataaaaatacaacatttttttaagatctatcttaatttgtatctttagttacaagcattagaagttgagtagtggttgcattaaatattttgaatttttttcatcataataatccaacctgagtaaacccagatttattcagtttagtatgtgttttgtttaatgttaaatagttgattcggatt

SEQ ID NO: 20051 - DNA, 232 bp, Glycine max
  unsure at all n locations
  Clone ID: 700872686H1
aagaaggtttgtttggtttagagagaagaaaacgttggtcggagaacattaccggaaagagactctttgttgattccagaaatgtctagcatcgcttcctcacaccaaagcttcctcaccaacgcccttattccactaacgcacaacccaaagttcaggaccactgttactttcccttcttcactcaaaactgtctcttgcagttccccacaacatgacatcanacaatctc

SEQ ID NO: 20052 - DNA, 232 bp, Glycine max
  Clone ID: 700872687H1
tggcagagatcatgtgcatcagttgcgtctacttatggagctgattggcaccccatcagaggctgatttggggttcctgaatgaaaatgctaagagatacattaggcaactacccctttaccgccgtcaatctttccaggaaaagtttccacatgtccatcctctagctatagatcttgttgaaaaaatgttaacttttgatcctagaaaaaggattactgttgaagatgca

SEQ ID NO: 20053 - DNA, 231 bp, Glycine max
  Clone ID: 700872688H1
ttttggctaagcctcgaaatccaaaaaatcttaagcgaagatgatgcacatgaccttctactggagcagaaaggtgaatctcctaatcgattcatggaagaccaacgattggacggactatctcctcactctgctcgcgtgcctcgtcgtcgccgccttctaccagttcctcgagaatcgccgcatccgcctcaagctcatcggctccggaaagcccttcccggcggagat

SEQ ID NO: 20054 - DNA, 230 bp, Glycine max
  Clone ID: 700872689H1
gttagatggaatgacttggaggaaattgatgcggctttcttaacccaaggtgaaactttggagcaatttccaaacaatcatcaagcatcactaatagcatatgatcagaacgactattttggtgataaatctgccgaagttggtaactatgtaccaacccataatgcacaaattggatgcagcgagtgggcagtgaatggaacatttggcacaacatcatttgtgaatgg

SEQ ID NO: 20055 - DNA, 233 bp, Glycine max
  Clone ID: 700872692H1
tcttgatcattcgatttttctcctcaagatgcagatattcgtaaaaactttgaccggcaagactgtcacccttgaggtggaatcctccgacaccattgacaacgtaaaagctaagattcaagacaaggaagggatcccacctgaccagcagagacttatctgtgcgggtaaacaacttgaggatggtcgcacccttgccgattacaacatccaaaaggaatcaaccctccatc

SEQ ID NO: 20056 - DNA, 234 bp, Glycine max
  Clone ID: 700872693H1
cgctttacaaattctcagtctgcgactctgtgggaatcattaataaacatgggaaaagactcgaagccaaaggagtcaggagggaagggaaaggggaaacaggctgcaagtggaagtgatgagaatgcttctaagggaaaaggaaagggtgggaaaggtggagatgggcttggtacttgcacctatgtcaaagcaaggcatatcttatgtgagaaacaaggtaagatcaatgaa

SEQ ID NO: 20057 - DNA, 154 bp, Glycine max
  Clone ID: 700872639H1
caagatatggttgaggaatggtttgattgtgttgatgaggaggattcctttgaggaagtttctttaactgcagcacttaatggtgttgagggtttggactgtatggaaagaattctgcttgccacatctgagggttttcctcatgtgcttccac

SEQ ID NO: 20058 - DNA, 238 bp, Glycine max
  Clone ID: 700872694H1
tgtgattttctcaagagaaactttaagcagatgtctaatgttttgtgggtggctcctgaggataaggcgagtttatggtcacaacttcattatgtttcgtgtaataatctggaaatgcaagaagcttatcttgtcaatctcgtaaatgtgttacgataattgtatttgcacagtccagaggaagctcgccaattgagaaggaaagctctctctcgtattgaatggctgcaaaaagctg

SEQ ID NO: 20059 - DNA, 255 bp, Glycine max
  Clone ID: 700872704H1
cacagctgcagttgctgctgctgtggcagggtccaaacaagagcaaacagatgcttctcaacagtctccaaaataattatctggcttttttcttccagttttacactgtgtgttggtaagtttctgtagcctagttgaatattccaagtggaagaaagaggccatatgtgaattatagtcttgacacatggtgataacctcttcaaagtctttgtaataagattacactaaatttatacagttcctgaagtttta

SEQ ID NO: 20060 - DNA, 234 bp, Glycine max
  Clone ID: 700872588H1
cggaaatgtaaactacatcgaggcaccaaaggctgctcctagtggttcttgggtcaacgtttggggaaatgacgcaaatcaatgatacgtatgttgttctgctaaaagagtttgtccaaatacattgaaaagaagaaaaaaacagctgcattcatcatgaagatactgaaactgcagaagtcatgtgtatcctgggtttaaaattcagtttgctattttctctttgcttgcgtt

SEQ ID NO: 20061 - DNA, 234 bp, Glycine max
  Clone ID: 700872589H1
tggaaaaggaaagtcgtctggtgagaaggatggagactcaatgcaggttgatagcccaacaacggagaagaaatcagagcctgagccacgtttgagattctgactaatcctgcaagggtggttcctgcacaggagaagtttattaaatttttgcaggacagcagatatgttccagttaagttggcaccatcaggatttgtgcttctcaaagacttgcgtcctactgagccagaa

SEQ ID NO: 20062 - DNA, 236 bp, Glycine max
  Clone ID: 700872591H1
tggaaaaggaaagtcgtctggtgagaaggatggagactcaatgcaggttgatagcataacaacggagaagaaatcagagcctgagccatgtttgagattctgactaatcctgcaagggtggttcctgcacaggagaagtttattaaatttttgcaggacagcagatatgttccagttaagttggcaccatcaggatttgtgcttctcaaagacttgcgtcctactgagccagaagt

SEQ ID NO: 20063 - DNA, 235 bp, Glycine max
  unsure at all n locations
  Clone ID: 700872596H1
ctctctctagagttcttatttcctctctctagaattttctatccgttcatccccctcacaaattagggaaactaacgaatctnntattgtctcaatcgaatccaacgtttcagccatggtttccgattcaatcgccgccctgccgcctcccttcgccgcaaacatcaggaacccggggaaccagaagaggaccaacaggtccgcgaaattgaagcagtacaaaatcgatgcgcgc

SEQ ID NO: 20064 - DNA, 238 bp, Glycine max
  Clone ID: 700872601H1
gagcagtatggggaagtaagcatgttggatttaaaaggtgctgatgctactaaagttgttcttgttattggaataatgactctccattcttttggggactgatctggtgttggggtctcatttgctgggtcaaagggtttcactcaaggcctattcttaactttggctattgcggtacacaacattcctgagggcttagctgtgagcatggtacttgcatcaaggggtgtctctccac

SEQ ID NO: 20065 - DNA, 264 bp, Glycine max
  Clone ID: 700872602H1
acttcggctcgaggactcaccaaaactgtccaagggcaagcagactctcctgccaccaactagaaccaaagtatcaacccaaagtcggtatcattttgattctcccagcaaagtattgaacttggtgtcagagcgctccatgcgcaagagtcgcagtgagggaaattttggagttctgtgagaggctgttccataccaaattgatttgttcaccacctggtttttggagtgtgcatctatttactttgtcgtttcgtatttgtg

SEQ ID NO: 20066 - DNA, 189 bp, Glycine max
  Clone ID: 700872603H1
gtaaactccataccaaataagtagtcccaagaacaagaacaatgttcattttgtgtctttaggatattattggtgaaaaactaaaaaaaaattattggaaaacataaaaaaagttatagatagtataattttgtgcattcaacaaagacatttttcttttagtttattaacaaatgtccttatctggtt

SEQ ID NO: 20067 - DNA, 233 bp, Glycine max
  Clone ID: 700872605H1
aattttcaggatcaatgattagaccatgcaaactagaaatgctttttcttgtataaaggaagggattgctcgatccatttccatatcgatcatgatatatataataattcgagcacccatttcaaacgcatatccaatttttgcacagcagggttatgaaaatccccgagaagcaaccggtcgtattgtctctgccaattgccatttagctaataagcccgtggatattgagg

SEQ ID NO: 20068 - DNA, 170 bp, Glycine max
  Clone ID: 700872606H1
ctccaaagtcagtgaatagtgagtgagtgagtagcagctagcaatggaaattactgccatggcttcttcatctactcctccacgaccttctcttccaactccttccacttctccacacaaataactcccttctacctttagcaaacctcaactcagacgctctcacatag

SEQ ID NO: 20069 - DNA, 253 bp, Glycine max
  Clone ID: 700872608H1
tacggatcgtagcaatgtcaaattgttggaattatatactgtcatgtggccactactcaagagtcgggcaagaagtttgatgtgatctttactcctcaccatccgtatgctcgatggttggcagaaacaaatgcagtgaatgcaacattgccagaagtggtgctggttaggagaacccttgcttgggtaacaggaataatattgctcatttcaacctttatggggatatgctacctcatgaatatgccgctta

SEQ ID NO: 20070 - DNA, 243 bp, Glycine max
  Clone ID: 700872610H1
ctggtaagcctgagaaaagcagagcaccaaagaaggagaagaaggccaagaaagaccccaacaagcctaaaagaccaccgagtgctttcttcgtgttccttgaggagttcaggaagacctttaaggctgagaatcctctcgtgaaggctgtatcagttgttggaaaagctggaggagagaaatggaaatccctgtccagtgctgagaaagctccatatgaagccaaggctgcaaaaaggaaag

SEQ ID NO: 20071 - DNA, 243 bp, Glycine max
  Clone ID: 700872612H1
gtcaggcttcttgggttttgcttgcaaggagaagagaagatacttgtttatgaatatgtgcccaacaaaagtctcgactatattctctttgatcctgaaaagcaaagggagttggattgggggagacgttacaagattattggagggattgctcgaggcattcaataccttcatgaagattctaggcttagaattatacatcgtgatcttaaagctagtaacatattgttggatggagatatg

SEQ ID NO: 20072 - DNA, 242 bp, Glycine max
  Clone ID: 700872615H1
atcagagcctcttagattatctcccacttcacagccactcacacataaaatctctccaagtgctgcatttgcgaattgaacctcaaaatcagtctctaatatttttctcactgtcttgtctctccagagaactgtatagagagagatggcagctgcaacatctggtgctgtgttaaatgggttgggatcttccttcttgagtggaggaaacaggagccaaacccttctggccactgctattg

SEQ ID NO: 20073 - DNA, 247 bp, Glycine max
  Clone ID: 700872617H1
caggaggacctttcttcaacccactaggctttggtgaggatgagaagtccttgaaggatttgaagctcaaggaagtgaagaatggaaggttggctatgttggcaatcttgggttactttgttcaagctcttgtcacaggtgttggcccataccaaaacctcctagatcatttggctgaccccgtgcacaacaacatcttgaccagtctcaagttccactgaatgtattatatgttattttacatatt

SEQ ID NO: 20074 - DNA, 225 bp, Glycine max
  Clone ID: 700872619H1
cttcaaccttcttccctcttgcgtgacttgttgaggcttcatcaaaatggcgagatttctaggtctcagaggtcgtagtctagcgagcgccatcagcatcacgtgcggactttgctttttatgtttcggctatgcccagggtgttatgggcggtctcttgaccgttcagcagttcttggacagatttcctcaggtcgacattgtgaacgagagttcgttccacac

SEQ ID NO: 20075 - DNA, 241 bp, Glycine max
  Clone ID: 700872620H1
cttctcgcggcttctttctccaagattaagtttcagtagtaatgggtaaggaaaaggttcacattaacatcgtggtcattggccatgtcgactctgggaagtcaaccaccaccggtcaccttatctacaagctcggaggtattgacaagcgtgtcatcgagagattcgagaaggaagctgctgagatgaataagaggtctttcaagtatgcctgggtgcttgacaagctcaaggctgagcg

SEQ ID NO: 20076 - DNA, 224 bp, Glycine max
  Clone ID: 700872623H1
gaaaaaaccaataattaagatctagtcctagaatccaacaggggcgacctcacctccaagaacacatagccatgtcaagaaacttgcttcttgttctttttgcagtagccaccttcctccatggctcagaagcacaaaccagacacgtggtaggtgatgccacgggctggatcatccctcccggcggcgccgccacctacaccacctgggcttccaacaaaaca

SEQ ID NO: 20077 - DNA, 237 bp, Glycine max
  Clone ID: 700872624H1
gaacaagcagcattagcaaccaagcaagagaatggcgacttcagcagccttgtgcggcactatgatgagcagctccttcctgaggagaaaagcagtggtcacaagcctgaaggcattccccaatgctaacgcagtgtttggtgtaaagggtggacgtgtgggtggtgtgactgccatggctagcttcaaggtgaagctgataaccccagagggagagaaagaatttgaatgcccaga

SEQ ID NO: 20078 - DNA, 189 bp, Glycine max
  Clone ID: 700872625H1
cagaaaaatggtagtaaccattgtagcttctcattgtgttgttccaaaccaagaaacaccgaaggttcgtttatggttatcagatagtgaccaagtagtgcgtttaggtcatacacccactatatatgtttacaaagcaaaacacaacaccaaaaccatagagagaatgaaaacctcacttggcaagat

SEQ ID NO: 20079 - DNA, 237 bp, Glycine max
  Clone ID: 700872626H1
gtggtatccccaattccccattgagcgcaccgtaagtaaagtgtctctctaacctctgcaaaagtccaaggttgcacggttttaactgcttaggtttttgtcttcaaaattaaaactgtgcaactttggttgcaaagtcataggtgttaagttgtgtttgcatgaaagtgggcttgagataattgtgcctcttgtatgatggaatccctttggaagcttttgtatttgctggagcct

SEQ ID NO: 20080 - DNA, 237 bp, Glycine max
  Clone ID: 700872627H1
cgatgttccgctttcatattatactggtattcttggtatgccgggaatgactgcatatgcaggtttctttgaagtaggctctcccaagaaaggagagaatgtttttgtttcagctgcctctggtgctgttggtcaacttgttggccaatttgctaaattgactgattgttatgtggttggaagtgctggaagtaaagagaaggtggatcttttgaagaataaattaggatttgatga

SEQ ID NO: 20081 - DNA, 242 bp, Glycine max
  Clone ID: 700872630H1
gtcagcttcttgggttttgcttgcaaggagaagagaagatacttgtttatgaatatgtgcccaacaaaagtctcgactatattctctttgatcctgaaaagcaaagggagttggattgggggagacgttacaagattattggagggattgctcgaggcattcaataccttcatgaagattctaggcttagaattatacatcgtgatcttaaagctagtaacatattgttggatggagatatg

SEQ ID NO: 20082 - DNA, 250 bp, Glycine max
  Clone ID: 700872632H1
aggatatccaggtttttattctcgaaatacagttcctttgacaccatgggttgtgaatgatatccacaaacgtggtggaagcatccttgggacatcatatggaggccatgacacctcaaagattgttgatagcattcaggaccggggaattaatcaggtttatatacttggaggatatggaactcagtatgaagcagctatgatttttgacgaagttagaaggcgtggcttgaaagttgcagtggtcgga

SEQ ID NO: 20083 - DNA, 249 bp, Glycine max
  Clone ID: 700872633H1
ttcctcactaggagctcctgtccactggttcttcatctgcatgcacacagttgcatagttttggaaaccaagaattcctgaagaagggtagcatcaacaagcagttctgaaaatggagatcaccaatgtcagtgagtatgaggctattgcaaagcagaagttgccaaagatggcgtttgactactacgcatctggtgcagaggaccagtggactctgcaagagaacagaaatgccttttccagaatttt

SEQ ID NO: 20084 - DNA, 246 bp, Glycine max
  Clone ID: 700872634H1
ccttcgagctctgccgcgccaccggccaccacctccgtcgcatcctcaactccatctcccaaacctcagacctcaaagcaatagtcttggacttcatgaactacagcgccgcacgtgtcaccaacgcgcttcaaatccccacttacttctactacacttccggcgcctccaccctcgccattttccttcagcaaatcatcattcacgaaaacagcaccaagtccttcaaggacctcaacatgcacc

SEQ ID NO: 20085 - DNA, 234 bp, Glycine max
  Clone ID: 700872587H1
aagatatctaaaaaccacaaagtcatgagaggaattcacatgttatttattatattatatatgtgtcaatattatatattagaactgttgatagtcaccctaaatagagagattaatgcacagtgaactcactatacagatccaaaagatttgtattttgtttaataaacttagtaaagtacaacatgaccagcagttattagtaatttgggttaattattgtgctaatatgca

SEQ ID NO: 20086 - DNA, 243 bp, Glycine max
  Clone ID: 700872635H1
caagaagggaaagatgtgcgctctcttcatcaacgatcttgatgcaggagctggtcgtcttggtggaaccacacaatacactgtgaacaaccagatggtgaatgccactctcatgaacattgctgataaccccaccaatgtgcagcttccaggtatgtacaacaaggaagagaacccccgtgttcccatcattgtcaccggtaacgatttctcaacactctatgcacctctcatgcgtgatgg

SEQ ID NO: 20087 - DNA, 248 bp, Glycine max
  Clone ID: 700872517H1
aaagcattgaattcaaaaactaagttcatttcttgtgctttgctttattcctcaaaaccaaacatgtcgaacacatgcggcaactgtgactgcgctgaaagactaactgcaccaagggaaacagctatggtgttatagtagagactgagaagagctacatcgagactgttgacatggatgttccagcagctgagcatgatgggaagtgcaagtgtggcactaactgcacttgcacggactgcacttgt

SEQ ID NO: 20088 - DNA, 239 bp, Glycine max
  Clone ID: 700872521H1
aacttttgacaaaccttagacgcgctgcttctctattctccctatggagtttaatcttggggtccgtcaaaagtttttaaattttgtgaggttcatatgaagaaaaggctcaagcttagttgtcaagttggaatcaacccatactccatggaatggactggtttggccaatagattactgagtaagggcaacgatattctgtgttgcgattatgctagttttgatggtttgattaccaa

SEQ ID NO: 20089 - DNA, 239 bp, Glycine max
  Clone ID: 700872522H1
cgacaaggctcttttgtctgaccctgtattccgccctctcgttgataagtatgcagcggacgaagatgccttctttgctgattacgctgaggctcccaaaagctttccgagcttgggtttgctgatgcctaagcaacgtttaggggattgttgaagaggcatggtgcccataatatttctctaaaaaattgtatggtcatggtttttaatgccaatgtgggttccccagattttagata

SEQ ID NO: 20090 - DNA, 240 bp, Glycine max
  Clone ID: 700872523H1
tcaacatcagtagaataatggagaggtgatgccgggtcagtgggaattccaagttggtacttcagttggaatctcagctggtgatgagatttgggagctcgttacatcttggagaggatcactgagattgctggtgtggtggtttcctttgaccccaagccaattaagggtgattggaatggtgctggtgctcacacaaactacagcaccaagtccatgagagaagatggtggctatgaa

SEQ ID NO: 20091 - DNA, 239 bp, Glycine max
  Clone ID: 700872524H1
cgaaggtggctttggttgtgtatacaagggccaacaatcagatggtacaatgatagcagtaatgcagctttcttcaaaatctaaacaaggaaatctgagtttgtgaatgagatgggactgatatctggacttcaacatcccaatcttgttaagctttatggatgttgtgtggagggcaaccagctaatactgatatatgagtacatggaaaacaattgtctatctcgcattctttttgg

SEQ ID NO: 20092 - DNA, 239 bp, Glycine max
  Clone ID: 700872525H1
catcaatgtcagtcctattgagtatgggcatgttttgctgattccgcgcattttcgagtacatgcctcaaaggattgaccgtgagagcttcctcctgcacttcacatggcagtggaagctgataatccatattttcgattgggttacaacaggttgggtgcttttgcaaccattaaccatcttcacttccaggcttattatttggctctgcccttcccaattgagaaggcccccactaa

SEQ ID NO: 20093 - DNA, 242 bp, Glycine max
  Clone ID: 700872527H1
gggacacccaggaggttaagtttgagaagggtattcaaattctcaaaattttcaagcagcattcaagcaaaacatgcattttggatgattttgggtctatgagactcgtgaaaagatgattcaggaaagaaaatctatggaacaacagcttccgaaacaggctagcaagtccaatgatttaacaacaaatgggacagttatgttgcccaagtctcatgatggagccttgaagaatgaatcag

SEQ ID NO: 20094 - DNA, 244 bp, Glycine max
  Clone ID: 700872534H1
gtaatttcaatttagtctgtgccgtttcgaaccctgggcaactacagcggcgtttgaaactgagaaaataatggggtgggagagcttcgtggtgggcacaacatagcaaagaggcacaacgtgggaacacttgctcgcagtgccaccgcgttcggcgtatcagaactcatcctcgttggtcgaagagatttcaactgtttcgggagccatgggtcctcctcccacctccgatttcgacacttcc

SEQ ID NO: 20095 - DNA, 237 bp, Glycine max
  Clone ID: 700872541H1
ctcgagcgttttgctgattggacttgggaggagatcaaaagacacagactaggcgcagcccaaaattgctctgccactcttaacggcaaccaaagctcactgatgctgttcttcctcccacgaaagactgtaggaaagaaggaatagtgagtgatgttaaagatcaaggcagctgcggatcatgctggacattcagcacaactggggcttcagaagcagcctatgcacaagcatttg

SEQ ID NO: 20096 - DNA, 238 bp, Glycine max
  Clone ID: 700872542H1
taagggaactggcaaggcagacgtttgaagtgattgaacaattcttgatacctttgaaggtagctggatatccagagctcaggcctttgctctgtttggtggagtggatatgagatcgcagcttgatattgtgaagaagggtgttcatattgttgttgccactcctgggaggctgaaggatatgttggccaagaagaaaatgaatcttgataattgcagctatttaatattggatgag

SEQ ID NO: 20097 - DNA, 78 bp, Glycine max
  Clone ID: 700872543H1
tctgcttctgcttgaacccctgactttgtctgtagtccagtccactttctcttcactttctaagttccactactgact

SEQ ID NO: 20098 - DNA, 239 bp, Glycine max
  Clone ID: 700872544H1
aaaaggtctgggcagaggttttcttctaccttgctgagaacaatgtcctttttgagggtaatctccttaagcctagcatggttacacctggagcgagtccaaggacaaggccagtcctcagacagttgctgattacaccctcaagctccttcacaggagaattccccctgctgtccctggaattatgtttttgtctggtggacagtctgaggttgaagctaccctcaatttgaatgcca

SEQ ID NO: 20099 - DNA, 241 bp, Glycine max
  Clone ID: 700872546H1
tagattgagaaaggaagatattgataagatggaacaagaggctgagaagtacaagtctgaagatgaagagcacaagaagaaggttgaggccaaaacgctttggaaaactatgcatacaacatgaggaagaccgtgaaggatgacaagattggtgagaaacttgacccggctgacaagaagaagattgaggatgcaattgagcaagcaatccagtggttagacagcaaccagcttgcagaag

SEQ ID NO: 20100 - DNA, 235 bp, Glycine max
  Clone ID: 700872547H1
caattttacaataaggtctgttgttaatgttgatataattttctgaagctgtctagcacttcggaggaagtatttatatattgaactatattatgtctgccagttttggtggtgtaacacttgtcttaggaatgacctgtaagattgcagttgcaaactgggtgctagtgctactccttttgtgcatctcaaatctcataccttctattttatgagaagaattaatatggctgtc

SEQ ID NO: 20101 - DNA, 259 bp, Glycine max
  Clone ID: 700872548H1
attcggctcgagtttcgattttgaaatgaaagaaaagtgtggggataaatataaatgacaaaaagatattggaacataatcttggatgagatgatggaagcagtagatcatttggccacggtactagaaaatggaatcctaaaatgtcaccttatatatctgcaaagcgtaaggatattcatattataaatcttattagaactgctcggtttttatcagaagcttgtgatttagtttttgatgcagcaagtgagggaaa

SEQ ID NO: 20102 - DNA, 171 bp, Glycine max
  Clone ID: 700872550H1
gcatggaagagtctgagggtagtacaagtgggaatcacagttacagcagctgtggatcaccaatcagcaacatggctcaagactacctctttatattctcctcctcctccccatagatgcaatcctctccctatccatcacttgcaagagattcagggctctcacttccac

SEQ ID NO: 20103 - DNA, 239 bp, Glycine max
  Clone ID: 700872559H1
gcgctgcctgaatatacagccaatagggcccctatgcataacaccttcatgtaatgggttttcaatggcaaagtactattgcaatatatgcaattttttgatgatgaaaggaatgtatatcattgcccattttgcaatttatgccgtgttggacaagggcttggtattgattattttcattgcatgaagtgcaattgttgcctggggattaaatcatcatctcataagtgcctggagaa

SEQ ID NO: 20104 - DNA, 247 bp, Glycine max
  Clone ID: 700872563H1
gaagaaggtggagtcagccttgactatctctgcgacctccatgaaaagcatgaaagctggttatttccctcccaaagtggtaatcatggtctattactgtcaatcagctgccccatcatattgacaactctttacaccctgatataagagaccgcgttttttatctggagggtggtcacatgcattcaagcattcagaaggttcctgctttggttctggactgtgaacccaatattgatttcagcaa

SEQ ID NO: 20105 - DNA, 235 bp, Glycine max
  Clone ID: 700872564H1
attccttaggcattcaaactcaggcataaccttcttgtgtgatgagaatatgagaaaatgattgattgtagtctcagcctagagacaatggagagagatgaaggggacatattggttatctggaaagcaatgccaaaatggcatctcatcagatatgtccaaattgtggatgtgattggcacttattttttttgtaatatattagcttttgagttgtttgccatttagcacttgt

SEQ ID NO: 20106 - DNA, 238 bp, Glycine max
  Clone ID: 700872567H1
gggaagggtgagcatgaggaagaccgtcaccaagcaggtctcctcaggaagcccatggtacggcccagaccgagtcaagtacttgggcccatctctggcgagcccccgtcctacctaaccggtgagttcccaggcgactacggctgggacactgctgggctttccgcagacccagaaaccttcgccaagaaccgtgaactcgaagtgatccactccaggtgggccatgctcggagcct

SEQ ID NO: 20107 - DNA, 146 bp, Glycine max
  Clone ID: 700872568H1
gtgctgtgtaccttggtggctcttcttcttctgaccgtgtcccactctccttcccatcattctctggcctcaagtcacattctacatgcaagcagcatcagccacgtcctcgcgtagaaggggtggctgtccatccacacaacata

SEQ ID NO: 20108 - DNA, 233 bp, Glycine max
  Clone ID: 700872573H1
tgcctgcccatcacagatttcaagtttatgaagttgactgataatggtgagcagaaagatgttacacagtgggtttgggaatacatgagaaaaaagcgccagaaatgctgaatttgcttgcttgcactgaagtatttgatagtagtggtggtggagcagtgaaaatgtgcaatgatatgggggtaacctttcttggtaaagttcctttagatccacagctttgtaaggcagct

SEQ ID NO: 20109 - DNA, 237 bp, Glycine max
  Clone ID: 700872574H1
gcagaagatatgaagaacaggacagcagaattgaagaaggaagctgaagttaccatgcttgcatttgaagaagcagagaaaaagcttaaagggcactggaagaagcagaagcagcaaaagcagctgagaaaaatgctcttgaccatattacagttttaactgaaaggactactgctgcacgtgcatcaacatctgaatctggtgctgtgattacgatctcaaaggaggagtttgact

SEQ ID NO: 20110 - DNA, 237 bp, Glycine max
  Clone ID: 700872576H1
catgaactccctctcaaatccgtaattaattagatcgatctccttccgtagttaatccttgtctctttttcaataattaattagatctgcgctcctatttcctttttttgttttgttctgttatcaaaatcaaataaaaaatctccttctcggaaatggcgtcgtcaatccaacaacaacgctcgactgcaacaagttctggatctgaaggaggaggagatccgcaaatgatcgacg

SEQ ID NO: 20111 - DNA, 242 bp, Glycine max
  Clone ID: 700872579H1
catcaaagttttaatttcaggagtttatgtcaggactgaatcatctgatactagccttattgtgaaagatggataccaatggaggaaatatggcaaaaggtgaccagagataacccttaccctagagcatatttcaagtgctcttttgctcaaagctgccctgtcaaaaagaaggtgcaaagaagtgtggatgatcattctgttctgcttgctacttatgaaggggagcacaatcatcctca

SEQ ID NO: 20112 - DNA, 149 bp, Glycine max
  Clone ID: 700872515H1
gaaattgcaaagagttatgtccttttctgttgtattaaaaactacttgtgtatccaatttcaaacttactaagttaaaaaaaaaaaaaaaaaaaaaaaaaaaaaaaaaaaaaaaaaaaaaaaaaaaaaaaaaaaaaaaaaaaggggggg

SEQ ID NO: 20113 - DNA, 238 bp, Glycine max
  Clone ID: 700872583H1
tggcttcttccatctgtgctctctcgccttccgtccaatcacagctctataaaaccaccctcgttgctccaatccctctctatcaacgaacaagtgcgaaatgagcaggaggagttttgcctttaagggaattgtggcctctggcgtttcggtcgcggcttctactctcacagccgaaccagaaccatcttccaaaggttttgaaagattgccgtacaagccggaagggtacaattat

SEQ ID NO: 20114 - DNA, 235 bp, Glycine max
  Clone ID: 700872586H1
aggggttaaaacatgcttgatgaccggcaatcctgctgaagaagtggctattttttccaaatcatactaactctgcaagcttgcttatctttaaactcccaaataatattatctgcaagtgggtatttgtactttgtttaaatttttacttgctttttgaaaagtcaatttcttgttgtaacttaggtaggttagtacaaaataacacataatatattgattcaggacttcaatt

SEQ ID NO: 20115 - DNA, 256 bp, Glycine max
  Clone ID: 700872468H1
tgaagctcaggagattgagtttgagattgcaagaatgagaccaagattgaatgaggaattctttgcgcaactcaaattcgagttaggacagcttcgattcgctgttaacaaaacacagctcatggaggacagacagattgagctggaggctctagagaaagccatactagaaggattagaagcctatgataagatgcaaggtgaactcgtaaaagccagggcaagcctaaccaaaatcttgacatcaaaggatgcc

SEQ ID NO: 20116 - DNA, 259 bp, Glycine max
  Clone ID: 700872472H1
gggttctccgcaacatggacgacgacgaggtcttcaccttcgccaagagcatcgctgcgccctacgacctcgtcatgcagaccaaacagctcggccgcctccccgtcgtccacttcgccgccggcggagtcgccacccccgccgacgccgcgctcatgatgcagctcggatgcgacggcgtcttcgtcggctccggcgtcttcaagagcggcgatcccgcgaacggacgagggcaattgttcaggccgtgactcactac

SEQ ID NO: 20117 - DNA, 260 bp, Glycine max
  Clone ID: 700872473H1
cctcgagccgaatcggctcgagagctgagaaaggaagaaaaaaagcgtttgtgagtgtgagagagtcataacaatggttgtggaagatgcccaaaaatcagccatcacggaggaccaaaaccctagcagggtcgccaacgacaacaacgacgacgaagatctcgaagagggggagatccccgacgacggtgacgacggcgcctccgccacatcaaagcctccgtccgccctacgtccgcaacccccaccctctcgagaat

SEQ ID NO: 20118 - DNA, 258 bp, Glycine max
  Clone ID: 700872474H1
gttaaaagccttagccttccctacaactccagactgtaagacatcctcatccatggctgcctccgtctccactgtcggagctgtcaacagagctcttttgaacctgaatggttctggagctggagcttaagctcccagttcagccttctttgggaccagcttgaagaaggttattgcctcaagggtccccaacagcaaggtttccggtggaagcttcaagattgttgctgtagaagagaagaaagagattgaagagac

SEQ ID NO: 20119 - DNA, 258 bp, Glycine max
  Clone ID: 700872476H1
tagcacggatatacgctatatgagatactaatatgtgcacctcagcataactggtctgcttacgaggaagctctttagacaaatcctgttcttgccaagatgatgattagtgggattgtgtactccttaggggactggattgcgcagtgcgttgaaggaaaacctctgtttgagtttgaccgtgcgcggatgttcagatcagggcttgttggttttactcttcatggttctctttctcgattctattatcagtgttgc

SEQ ID NO: 20120 - DNA, 257 bp, Glycine max
  Clone ID: 700872478H1
cgatgcagtaacaagggaacaactggtgagagtaatgtccttgctaggagttcagaatgtaacccctgttttcagcatggtacctacagtgggaccctttaagcctgcggctcttatacccaccataactgaagaggatgaagttatattgaacaatgtccagatggtggtggagttcttgactgctggaagttccctatcaagaacatctggtcaggcactgaatattcctcagattatccaagagcttctcccag

SEQ ID NO: 20121 - DNA, 258 bp, Glycine max
  Clone ID: 700872479H1
agcatatccatgtcctttgaaacttcagcgcgcaggactccagtgcagggcctaaacttcttcggccctaaggtcacggtttcatctggtccttgtcagttaaagaacacatgctgtagaaatgtataataaatcaatattggcaccgacacttctttcatcctatctcggagaatgccaatcatgtgaatccatacaagtaaagaaaatagaactctgacaatcacctgatgctgtaaaaatatgaattacattgtt

SEQ ID NO: 20122 - DNA, 260 bp, Glycine max
  Clone ID: 700872481H1
gacataagtataagccagacatttgaagttccttttttgaatctaacaatgaaaggtggagatgattattatgtcatggatcctataatacaagtttctagtgaggaggaaggagatcttctttgtttgggaatccagaaaagtgacagcgtgaatatcattggacaaaacttcatgactggttacaaaatagtcttcgatcgtgacaacatgaatcttggttggaaggaaactaattgttctgatgatgtgctctcaaa

SEQ ID NO: 20123 - DNA, 257 bp, Glycine max
  Clone ID: 700872482H1
gctgttggtgacgacggcaatgacagtgatgaagaggctaagaggagtaagatgcgtgagctgggccacactggcactcctggtaggggaagaggccgaggtagaggaagaggccgtggccgaggggctcgaactattgaaagagatatctgtcatcagcaggttgaatccgagccttgcacctctattctgcaaagtagcaatgatattcctaacactagtgtgccaatagataatggtccacaatccaaggagtt

SEQ ID NO: 20124 - DNA, 257 bp, Glycine max
  Clone ID: 700872484H1
gactcacccaaacaaaaaaacaaacgcacgcttctcattctctctctactcgttcagaagatgtttctcacaaggactgagtatgaccgaggagtcaacaccttttctcccgaaggccgtttgtttcaggttgagtatgcaatcgaagccatcaagctgggatcaactgcgattgggttgaagaccaaagaaggagttgtccttgcagttgaaaagcgcatcacatcgccgctcctggagcctagtagtgttgagaa

SEQ ID NO: 20125 - DNA, 258 bp, Glycine max
  Clone ID: 700872486H1
tagttgatggggaacattcaagtgtaaaggagttacccagcaaacctttaaataaaaaaatcacgtttgcagattctgactcttctagtagcgatgatgatgatgatgatgatgaggaggaggaggtgcaggagggggatgaggaaaagggggacaaaaagccaaaattggatacttctaatgacgacaacaccagtcacgatgatggagtacctgaaaaatcagatcctcataaagttgatgaaccacacactcagg

SEQ ID NO: 20126 - DNA, 257 bp, Glycine max
  Clone ID: 700872488H1
gggatattacttggatacatatcaaactatggattttcgaagctgacactgaaggtgggatggcgaatgatgcttggagtgggtgcaattccttcggtagtcctaacggtgggagtgttagcgatgcctgagtccccaaggtggctagtgatgaggggtcgtttgggagaggcaagataagtgcttaacaaaacctcagacagcagggaagaggcccaactaaggctagccgaaatcaaacaagccgcagggatccc

SEQ ID NO: 20127 - DNA, 209 bp, Glycine max
  Clone ID: 700872489H1
ggttccggtccacctgattccaaagttagatggttccgttcatctagcaatgaaccacggtttattaacacggttacatttgacagtaaggatgattctcctacgctggtgatcgttcatggatatgcagcatcgcagggtttcttctttcgcaattttgatgcccttgcctcccgtttcagagtgattgctattgatcaacttggttg

SEQ ID NO: 20128 - DNA, 252 bp, Glycine max
  Clone ID: 700872493H1
cttgaaggtgctactgaagttatatgttcacgcactccatcgcatctacaatatctaaaacagatctatcattctatgtatggtgtttatcttgagcatgatattcaaacaaacaccagccccggcgatcatcaaaagctcttgcttgcatatataagcacacctcgtcatgagggccccgaggttaatagagaaattgctcagaaggatgcaaagggtctttacaaagcaggggagaagaaactgggaact

SEQ ID NO: 20129 - DNA, 251 bp, Glycine max
  Clone ID: 700872494H1
gagaagcattatggaattcatattgagtacatgttccctgatgcggttgaggttcaggcattagtaagctataaggggctcttctcattttatgaggatgggcatcaagagtgctgtagagtaagaaaggtgaggcccttgaggagagcccttaagggtctcaaagcatggattactggacagagaaaagaccagtctcctggtactaggtctgaaatccctattgtccaggttgatcctgtttttgaggg

SEQ ID NO: 20130 - DNA, 252 bp, Glycine max
  Clone ID: 700872501H1
cactctgctgcgacggagaggacttacaaagaatcattcgattccgctgcaaacaagcgctacgctgatcacataattcctcatattctgcatctgtatggacatctgcaacctctcgcgactttgaaatctatgccgcaaatgcttcatttgaggatccacttatgtgtgcccacggggtgaaacagatcaaatcagcattctatactcttcccaaggtatttaagaagtcaaagatagtggaatacagta

SEQ ID NO: 20131 - DNA, 249 bp, Glycine max
  Clone ID: 700872502H1
ctatgctctagaccaggcaataaggcgtcgttttgataagcgcatatatattccactaccagatttgaatactcgccaacacatgttcaaggtgcatctagagatactccccataacttgactgaaagcgattttgaatacttggctagcaggacagaggggttttctggttcagacatatctgtctgtgtaaaggatgtgttatttgaacctgttcgcaaaacccaagatgcaatgttcttcttgaag

SEQ ID NO: 20132 - DNA, 154 bp, Glycine max
  Clone ID: 700872503H1
ctgtgggcagcgtttggcttcaattgggctagagaacactgaagctaaccgctaggcataccgtaccctccttgtgacagttccaggatttggtcagttcatctctggtgccattctctttgaggaaactctctaccaatccacaactgatggc

SEQ ID NO: 20133 - DNA, 129 bp, Glycine max
  Clone ID: 700872504H1
gaggatgagtgaaggggggtgttgcagaagctgcacatgacttttgggggttctgataggacaattatgcttttgggttggaccgcgtgaccgacacagagatgttctttcttgcttccatgtacttct

SEQ ID NO: 20134 - DNA, 243 bp, Glycine max
  Clone ID: 700872505H1
atgcaattagagctggatgatatctgggcgagtcttgacggttcaaggtttcatctctaatcctctgcatcaggaggatggtcacactcaatgcatcagagaaaaattatttggggatatttctagaaatggcattagagaaatccttggaagatcaaattcaatcgatggctgtcattcaattcccagagatgaccaagaatatgcggaggaacttttggttggcctcccggaaagccatct

SEQ ID NO: 20135 - DNA, 244 bp, Glycine max
  Clone ID: 700872507H1
gagaaatcggagaagctgaaggtgaagaaggcgatcgagaaaggcaacatggacggcgctcgaatctacgcggagaacgcgatccgtaagcgcacggacagatgaactacctccgcctggcctcgcgcctcgacgccgtggtcgcccgcctcgacacgcaggcgaagatgacgacgatcagcaagtcgatgggcaacatcgtgaaatcgctggagtcatcgctggccacggggaacctccagaa

SEQ ID NO: 20136 - DNA, 242 bp, Glycine max
  Clone ID: 700872508H1
ctaattccgaccatggaagccacggcctccgcaatgagcttcgcccttccctcaacaaaagcccacacccaagcccaactcctgacccggcccaccatccattcaccattccctcccgcagcccagcccaccgccccccgccgcgcctccccaccatccgcgccgcaattccccgcacaaagaaagaggcaacggtggagactgtgcgggagcagctcgagaactgttacctcctcgccggc

SEQ ID NO: 20137 - DNA, 242 bp, Glycine max
  Clone ID: 700872511H1
ctcttatttccattagacaagaaattgctgagattgagaaaggaaaggttgacattaacaacaatgtacttaagggcgcccctcatcgaccatcactgtcatggctgatgcatggacaaaaccatactccagggaatatgcagccttcccagatccttggctccgtactgcaaagttctggcctaccacaggacgtgttgataatgtgtacggtgaccgcaacctcatttgcacccttctcc

SEQ ID NO: 20138 - DNA, 242 bp, Glycine max
  Clone ID: 700872513H1
ttcccaaattcattttaatcctaattctgcacttcttgatcatccgattttactcctcaagatgcagatattcgtaaaaactttcaccggcaagaccacacccttgaggtggaatcctccgacaccattgacaacgtaaaagctaagattcaagacaaggaagggatcccacctgaccagcagagacttatctttgcgggtaaacaacttgaggatggtcgcacccttgccgattacaacat

SEQ ID NO: 20139 - DNA, 246 bp, Glycine max
  Clone ID: 700872514H1
gctcttgccaccccagttagaggtatctcctcatcgcgacaagaatcttcctcccaggtcctaacaggccccaaccacatgatctctgcagcagtctgaagtgtaggaatcatcataactcagcattttgaccatttccgcgtttaatatatcactcttgatgcgttggatttgttctaagttacacgaaatcactaatatggcttggaccagtctcttgtcagtggccacaactattgatttgta

SEQ ID NO: 20140 - DNA, 268 bp, Glycine max
  Clone ID: 700872465H1
caagatacctgttgatattttccacttaactttaagatttacggagattagcttccctcaagctaggaaggttttcttaagcaacgttcataaatatataaaagacaacctgttagatgccaaatatgcatgtgcccttatatttaacatatctggaaccaaggattccaagccagaggagtttgcagaggacaagcaaaacctggatgacattattcatatgcattaccaagcaagggcttggctgctttctggacaatcagatgca

SEQ ID NO: 20141 - DNA, 268 bp, Glycine max
  Clone ID: 700872408H1
cgaaatacttcgagatggcccgtacaaagcaaactgctcgtaagtcaactggaggaaaagctcccaggaagcagcttgcaaccaaggctgcacgtaagtctgcaccaacaactggtggtgtgaagaagcctcatcgttatcgccctggaactgttgctcttcgtgagattaggaaataacagaagagcactgagctcctaatcaggaagcttcctttccagaggttggttcgtgaaattgcccaggatttcaagactgatctgcgttt

SEQ ID NO: 20142 - DNA, 267 bp, Glycine max
  Clone ID: 700872409H1
agagacctctcggggagaatcacccagaaagagttatctaaaagctgttaaaaaagtggcaaagacagagaaagatgctcaaataagacttcaactttatgagccatctgaatttcatgtggtgaacccattgaagaagacaagggtagggaaccccgttgggtacaaattggttcccggtgccacagcagctagcctgctggatccagaagatccaccacagaaaagagcagcttttaccaacaaccaattatgggtcactcctta

SEQ ID NO: 20143 - DNA, 264 bp, Glycine max
  Clone ID: 700872412H1
tgcgcatatttgccgtttccccgccacacgcgctgacacttctttgccggagagtctcaccagaatccggtgccggaaacctctctccgtccgatgctccggcgattccacttccggctctgtgggttcggagttcgatccgaaggtgtttcggaagaaccttactcggagtaagaattataaccgcaaaggatttgggtacaaggaagagaccctccaactcatgaatcgcgagtacaccagtgatatcattaagactttgaa

SEQ ID NO: 20144 - DNA, 260 bp, Glycine max
  Clone ID: 700872413H1
agtttccatacttcttgcccaagcttataatttctgcattcgcatttgtagtagctattggctgtatctggattccggaaacacttcacaaccacaattgtagcaatgaatccacagacgatgccaaagctttagaaagtggaaacagtggagctggcaatgaaaagataatccaaaagaatgataacctcctcctgaattggcccttaatgtcatctatcattgtttattgtgttttctcacttcatgatattgcgtat

SEQ ID NO: 20145 - DNA, 262 bp, Glycine max
  Clone ID: 700872414H1
caaagcagccgtagggcagtgctttcacttgttgctgctggtttggccactggctcttttgttcaagctgtgcttgctgatgccaaatctatcaaagttggaccacctcccccaccttctggtggattgcgtatgtgtctctctctctctctccctccctcttctcttacaattcaattcaatccattttgaagaaatgatgattagttgagagtgtaaaaatctctactgatagtgcatgaaaattgatctctctctctct

SEQ ID NO: 20146 - DNA, 121 bp, Glycine max
  Clone ID: 700872419H1
tctcctttgacgacaagatgagcatccgaattccccatcggcagcgattcatagacggagactggaaagtccccgtcctcaagaatcggattcccatcatcaacggttccacacaacatat

SEQ ID NO: 20147 - DNA, 263 bp, Glycine max
  Clone ID: 700872422H1
agcgattggaaaataaatacaaagctgcacaacaagcttctgacgagtggtaccggaaagcacaacttgctcttcagaaaggtgaagaagatcttgctcgtgaagcacttaagaggcgtaaatcttatgcggataatgccagttctttgaaggctcgacttgatcaacaaaagactgttgttgagaatcttgtctctaatacaaggcttttggagagtaagatacaggaggcaaggtcgaagaaggatactctcaaagcaaga

SEQ ID NO: 20148 - DNA, 267 bp, Glycine max
  Clone ID: 700872423H1
gacgggttcaggctcggtggcgctccggcgatcgccttcggaaaggttcggaagaaccgcaaaatgggaatattccccgtttgcagagctggttctgccgtcgtcttccgcgacctcgacgccgacgactttcgccaccctcttgatcaacagaatacgctgctactgagagcaattccgggattgaacgaactgggaaaagctcttctaggaactgtatctgagcaggttatgctccttgaaaacattgggacatccgtccttgtt

SEQ ID NO: 20149 - DNA, 268 bp, Glycine max
  Clone ID: 700872424H1
ggatagaactcactggccgagacttgaattttacaattccaactgaagcaagtgatttcagttcatggagaaatcttcccaacacggactttgagcttgagacgccacctcccccaatcaagaatggtcctaatgcacacccgaagaagctgcttaatggatctggacttaacggatctggtcttaacggatctggtcttaatggatctggacttcacctatctaaccacagtaatggtgatgggttggacctctctcctgtcagcag

SEQ ID NO: 20150 - DNA, 261 bp, Glycine max
  Clone ID: 700872427H1
gcaaatctttgttaagaccttgaccggaaagacaatcacccttgaggtcgagagctctgacaccattgacaatgttaaggctaagattcaggacaaagagggtatcccaccagaccaacaaaggcttatctttgcaggaaagcagctagaagatggcagaaccttggctgattacaatatccagaaggaatctaccctccacttggtgctccgtcttcgtggtgggatgcaaatctttgtcaagaccttgactggaaagac

SEQ ID NO: 20151 - DNA, 263 bp, Glycine max
  Clone ID: 700872428H1
tttcaagaggagttgaagccactgtggttcgaaagatctgccaatcaattgcatttttgtcccctgcaatctgcatgactctttcctcgctggatctagggctatcgccttgggagattgtggggattctcacaagtggtttagccctctcaagctttgccttatcaggactctattgtacccatcaagacatgtcgccagaatatgcaagtatacttctgggtataactaatactgttggggctgttcctggaatagtgggt

SEQ ID NO: 20152 - DNA, 260 bp, Glycine max
  Clone ID: 700872430H1
gctctagctattctctgaacaatggcgtctctctctcacctcaacaaactcctctgcatgcccccgctcaactcttcaccctctatttcgccaccacgcagcagcgtcggaatttggaccaaacctgtcggaaggccgaggctactggtgcgtgtccgagcggtcacgagcgacgacgagtgggggccggagaaggaggaggcgtacggcggcggcgtagcggtggaggagaaaccgacgaatcgcagacggagacggag

SEQ ID NO: 20153 - DNA, 277 bp, Glycine max
  Clone ID: 700872435H1
gctcgggattcagctcgaggtcctcttagctgtacggtgtgccaagcgcttttatttgacaccagcaaatgtgtaccttgttctcatgttttctgcaaagcatgcatatcacgctttaaggcctgcccgttatgtggggctgatattgtgaagatcgagcctgatgctaatcttcaaggtgtagttgatagcttgattgaaggtcatgctaggagcaaaaggtctgttagtgcagacaaaggagaagaagcgacagagagtatacaggtcatatatg

SEQ ID NO: 20154 - DNA, 263 bp, Glycine max
  Clone ID: 700872436H1
cctcgctggacacgatgagtacatcgtaaaaggaggcagggatttgtttcacttgttgcccgatgctttcaagggtatcaagcagattggtgttatcggttgtggatctcagggacctgctcaggctcagaatctacgggactctcttgctgaagcaaagtctgatattgtggtcaagattggactcaggaaaggttctcgttcctttgccgaagctcgggcagctgggttttctgaggagaatgggactctaggtgacatat

SEQ ID NO: 20155 - DNA, 266 bp, Glycine max
  Clone ID: 700872437H1
agcactcagaggagaaaaagaacgaggtcaacgacaccagtaacgccgtcgttacgagttactggggaatcacaaggcccaaggttcgtagggatgacgggacagagtggccgtggaactgcttcatgccatgggatagttaccactctgatgtgtcactagacgtgaccaagcatcatacaccaaagtcattaacggacaaggttgcttttagggctgtcaagtttctaagggttctctctgatatctacttcaaggaacggtat

SEQ ID NO: 20156 - DNA, 253 bp, Glycine max
  Clone ID: 700872438H1
gtgatggtggcgctgtcgctgttggggaaaatccgaatcctcaagtggtagtagatgacgagaaaagcccaaggcggagaagcatcccagacgcaaacaaactcggacaatggttagaaacatgacacgcaagtactgcaaaaagtagaaggagagaagaagaagcgctctcgccgctttattcatttcatttttggaccttacggagacacccctctttcttgtcctctaccctttacttctctccacacaa

SEQ ID NO: 20157 - DNA, 262 bp, Glycine max
  Clone ID: 700872440H1
cagtacacaaatctgtcatatcttgctgctcgatcgttacgatgatggcgctcaattcattgtcaccactttcaattaattctcttcacgtatcttcaatctcaacttcaaagatttcgcattctcattccaagtcctattcccgtcgttgtgtgccaaattaactcaaacagagatcatcgtcaagaatccacaaaatggggaaaagtggtttcggccacgttggcggctgctgttattgccttcagctctgacatgtctg

SEQ ID NO: 20158 - DNA, 262 bp, Glycine max
  Clone ID: 700872441H1
gtgatgtacgttctgactccgctgtgctattggctcgacttgtacaacgccaaaaccttccccattttctcggacgaactcttcacggagaaaggtcaagtttataacatcacagccataatagactccaatttccacctagaccttgcggcttatgagagacaaggtagattgtacatcagcactttctttgccatgacctatggtgttggctttgctgcactcaccgccaccattatgcatgttgctctctttcacggaa

SEQ ID NO: 20159 - DNA, 125 bp, Glycine max
  Clone ID: 700872445H1
gaaaaagatgtgaacctataaaaaccattaataggtgtaggtaggagcttttgtttgtccattgatccgtgttttctacgaaaaaaagaaaaaataaagaaatgaatccacagaggaagaaaaag

SEQ ID NO: 20160 - DNA, 261 bp, Glycine max
  Clone ID: 700872446H1
atttattttgtcatatatgtcttgatgagtacattctacttctatgtcatgctacttctagttcctattgctgcacttttctgtgactttgtttaccaaggggttcaaagatggttcttcccctatgattatcagattattcaagaaatgcatagagatgaggtagatagcactggtagagcacagctgctggagatagggaaccagcttacaccagctgaggcaaggagtcatgctatatctcaactcccacgcgaaata

SEQ ID NO: 20161 - DNA, 263 bp, Glycine max
  Clone ID: 700872448H1
taatggccaggtttgtattggagaccaaggcgacattaatgaatgaacaggagaccaagtttaaggatggtgaagcttcaattactgcattacagagctcaaaagaatacttggaaaaacagatggcagaggtggaaaccaatttgagagaactgctacaacaagatcctggtcttgctaggcaaatcatgtctatgaatgtagtgtaaactttccgttagtgaaattaacttaaagtggcagggttttctggtgcgtttgag

SEQ ID NO: 20162 - DNA, 263 bp, Glycine max
  Clone ID: 700872452H1
ctcgagccgctcgagccgatattgtccaccccattatttgtcttctcattctcatcactaacacacaagtgtgtgttgtagatttctcagcttgcaacatggcttccatcatcatgtcatttgctccagcaactggtagagtctttgcagccacagcggcaaagggtgctggtggaagcaaagaagagaagggtcttcttgattggatccttggagggttgcagaaggaagaccagctgctagagactgatccaatcctcaag

SEQ ID NO: 20163 - DNA, 262 bp, Glycine max
  Clone ID: 700872453H1
atcttggcaatgataggattgcagatgtaccaaggtggtgctggtcctgacatgggtggtgctggtgctggggcagccgaggatgattatgctgctccttctggtggaagtggtgctggccccaagattgaggaagtggactacatgtgtagttgctttcatccatttatctgtttaaaacttatttgatgcttttttattgaattttaacttttatgatttttgttggatgggatactaattgttttgcccgtgtgatatg

SEQ ID NO: 20164 - DNA, 147 bp, Glycine max
  Clone ID: 700872454H1
cacaagtgtagtcccctacctcccaagctccctagcaccatatgctaaggtcgttaacaacttcaatgggaattgtatcagtagcaccaactcagactgtggtgtatttggtccctcggtatcctccatcaatctccacatatatct

SEQ ID NO: 20165 - DNA, 259 bp, Glycine max
  Clone ID: 700872458H1
ctggcgccgaatgttcggcaggtgatcaaactggcgaatctgcttagttcttgggtatgctcccatatcctcggcgtgaaagatacgaagcagcgggcgggaatcatgaagtatttcatccagacttcgatggaagcacgcaatctgaacaatttctcatctatggcatcgttgatggctggtctgaattccgctccgatcttacggctcaaacggactaaagagtttttgagcgcaaagacgaatgctcagaaggttg

SEQ ID NO: 20166 - DNA, 262 bp, Glycine max
  Clone ID: 700872407H1
atcatcttttgtttgttcttcagtactttagtgtgtgatttaattccaagattttgagaatgtctagctgtgggtgtggaagtagctgcaactgtggcagcaactgcggttgcaacaagtactcttttgacttgagctatgttgagaagacaaccacagagactcttgttttgggtgttgggtctgtgaaggcccaattggagggtgctgaaatgggtgttgcagctgagaacggtggctgcaactgtgcgatcaagctgca

SEQ ID NO: 20167 - DNA, 237 bp, Glycine max
  Clone ID: 700872361H1
gaaattctcaacttcctgtgcagatgtattccatctcaatccacagccaccattaagcttgagctacttccattggcagcatacaagttttgatgaggagaaacataacaaaaaaacaagctaagttgcaagaaattatggaaatgctttgttttcctcctattagctcttttgttatactctcatcacctgatatatttttcatatatagaaaatgttaacatgtaatgaatgtgt

SEQ ID NO: 20168 - DNA, 252 bp, Glycine max
  Clone ID: 700872362H1
ataaagagaaatatttgcttactcataagcttgagccctttggtactatgtggctagtttcatacggactcaacgtcgctttgctgtaagatgttcactgtgactcaacagtcctacgactattatcttgtcatgaagactcaaagatcctctgtctttatgctttcttaggactcaaattcctctgtcatttacattttgaagacttcaatatcttcagtcgtttacgctttcaaaagactacaatgtctt

SEQ ID NO: 20169 - DNA, 240 bp, Glycine max
  Clone ID: 700872363H1
tcttgcccttctctcttcaactccaaacacaagacatcatcatccatggctgcctccgtctccactgtcggagctgtcaacagagctcttttgaacctgaatgggtctggacctggggtttcagctcccagttcatccttctttgggagcagcttgaagaaggttattggctcaagggtccccatcacaaagatttcctctggaagcttcaagattgttgctgtagaagagaagaaagag

SEQ ID NO: 20170 - DNA, 191 bp, Glycine max
  Clone ID: 700872364H1
ctgacatgtacactgtaagatcgtattttatagtacaatcctacttgtgttacttacgtgtatgattatgcaacatataattcacgtaagtaacacaattatgattgtactataaaatacgctctgacatgtacactgtaagaatcaataattattttatcaaattcaaggagaaaaaaaaattatcacaa

SEQ ID NO: 20171 - DNA, 166 bp, Glycine max
  Clone ID: 700872365H1
cggcactcggctcgaggaaacagatttattctatacccgataagtaacaatacgcaatggtggggagacgagaggggtttacaattttctctatgaatatttaaataggtaaatgcagacatactcacttatcaccccaatgacccattcgtaacaactttacttt

SEQ ID NO: 20172 - DNA, 180 bp, Glycine max
  Clone ID: 700872367H1
agagaaggtgcagggaaacacattcaagcaggagctaagaagtcgctcatcactgctcctggtaaaggagatatccccacctacgtggttggtgtcaatgagtatgactacagccctgatgaacccatcatcagcaatgcctcttgcaccactaactgccttgcaccctttgtcaaggtc

SEQ ID NO: 20173 - DNA, 203 bp, Glycine max
  Clone ID: 700872369H1
caaactctctccttctgattttcaagattttcagagctatgctaggccttcacatctcttgccagcctctgaagtgaaagtgtatacatatacatcagtagaaaacatttcgtcatctttgaaggaggatggatccaaatctttatttagggtcaagttagttacaagcaacgcttatggctcagctattagtgacttaagtg

SEQ ID NO: 20174 - DNA, 232 bp, Glycine max
  Clone ID: 700872371H1
ggatggttcagtgcagggatctaatgatcacactttaacagcaggcaatgaagggggctctcttgtgagagacaataacacaaaagcttcttgtgctgcaggttctagttcgaactaagcatatctaaggaattgcttgaactctgagatttgttttgtccaaaaggaagaaatagaattgcccattggggatgtgaaattccatggatggcattgcctattggctggcgca

SEQ ID NO: 20175 - DNA, 131 bp, Glycine max
  Clone ID: 700872374H1
aagtcggattcagggaagctcagatttgtctgtattaagtgaagttggggaagagcaagcaaaaaggtgcaagaaagccttggaaaatatatactttgaccagtgttttgcaagtccaatatctcgtgcca

SEQ ID NO: 20176 - DNA, 226 bp, Glycine max
  Clone ID: 700872375H1
agtttggatattttctaaataaagaaaaatatattattctttatcttaaatgtgctatattttatcttaaatgtgctatatttttttttagaaaacaaaaaatgaaaattaatcgatttttaattcctccaaaatgatcattttattaggattgaatcgattaaaaattgaagtgatcttccaatggatagtatggcaatgctaatgtccgactcgttatttttaa

SEQ ID NO: 20177 - DNA, 235 bp, Glycine max
  Clone ID: 700872376H1
gaaaatgcatttctctctctgtgcaacaattagggttttaaacctttaatcccatccaaaaactcacactttttgtgtcttactgtgatttttccacctcgcgcgatatgctgttgtccctttccatttcccattagcttctcctcacacccgttcatgagtcaacatcacaacaaccacgccacgctcaccgtctcaaccggcgatgcaaaccccgacaaccggctccaaccgg

SEQ ID NO: 20178 - DNA, 238 bp, Glycine max
  Clone ID: 700872378H1
aattgatcaaggcccttatgttaatgttaaggaagatggaatggtggctgcattgaacaatgagccaaaacactgacaacgtggaagaaatacaggtaatacaggatacagataatgacggtctagagatgattccagaagaaaaagtggttaaacaagatgagcttgagactaatgcaaagattcgaggttctcctggcattgctcaagcttgtgttcatgatgcagcagtgcatgt

SEQ ID NO: 20179 - DNA, 238 bp, Glycine max
  Clone ID: 700872379H1
caagagaaagctaaaatgggacttgggactctgccactgaccccttcttacagcagtttctcttcaaagtcaggagggcttttacatgacatcaccaatcacagcagggttaatagaagcatgaaattcagagtttcagccaaacaagagaagcaagaagagaagaaaaagcaatctttgttcagcagtgtgactgaagctcttgatttttctcaagtgagatctgctgaggatgctc

SEQ ID NO: 20180 - DNA, 125 bp, Glycine max
  Clone ID: 700872380H1
aaaaaggagagtaatgagtataatctttcgctcagacgatgtactgatatattctatggcggaggttcgaagaacaagcaatttcattttgggccgttttcactttgttaggttcattggggtta

SEQ ID NO: 20181 - DNA, 206 bp, Glycine max
  Clone ID: 700872381H1
aatggagtgaggagcaaatgcgaagtatccaatgttgactctggaaacattcaaaagagtttcttctcctttcttccatcgtgccacggcgatgatgaagatagcgtggcttctgctgctcctcctggtatcagtgtccgttcaagtttgggccctgaaatcgccgtttcacccgagagacgtacttcctctgcttcccaaacagt

SEQ ID NO: 20182 - DNA, 234 bp, Glycine max
  Clone ID: 700872382H1
taggcattcccaattcaaggatgttgcgaatggtcaaaagtcatctgttgctacactctttgagcaagttggattgcaaaagattttgtcattgctggagtcagatgatgccaatgtacgaattcatgccgtgaaagtggtggccaacttagcggctgaagaggctaatcaaaagagaattgttgaagctggtggtcttacttccttgttgatgcttcttcgaagatatgagga

SEQ ID NO: 20183 - DNA, 234 bp, Glycine max
  Clone ID: 700872383H1
agagaagagaaaaattaagatggaggggaaggagcaggatgtgtcgctgggagcgaacaagttcccggagagacagccgattgggacggcggcgcagacccaagacgacggcaaggattaccaggagccggcgccggcgccactggttgacccgacggagtttacgtcatggtccttttacagagcagggatagcagagtttgtggccacttttctgtttctatacatcactgt

SEQ ID NO: 20184 - DNA, 230 bp, Glycine max
  Clone ID: 700872386H1
ggcgcacgttagcacaaactatcatggccacggcaacagcagctgccacctcgtcctttatggggacgcgtctcctggaggctcactccggagcggggcgagtgcacgcccgattcggcttcggcaagaaaaaggctcccgccccaaagaaagcctccaggggatcgggccgagacaccgacagacccctttggtatccgggcgccaaagcgcccgaatacctcgatggg

SEQ ID NO: 20185 - DNA, 225 bp, Glycine max
  Clone ID: 700872387H1
cccaattcctaattgtttaaacctaattctcatttcttcatcgttcgattcttcacctcctaaagatgcagatcttcgtgaaaactttgaccggtaagaccatcacccttgaggtggagtcctccgacaccatcgataacgtgaaagctaagattcaagacaaggaagggatcccacctgaccagcagagacttatctttgcgggtaaacagcttgaggatggtc

SEQ ID NO: 20186 - DNA, 233 bp, Glycine max
  Clone ID: 700872389H1
gagacaaatcagcaagagtggagatggcgacgtcgacgtgcttcctgtgtccgtctacggcgagtttgaaaggcagggccagattcagaatcagaatcagatgcagcagcagcgtgtcggtcaatattcgaagggagcccgaacctgtaacgacgctggtgaaagcgtttgctcccgccacggtggcgaatctaggtccaggcttcgacttcctaggctgcgccgtggacgga

SEQ ID NO: 20187 - DNA, 214 bp, Glycine max
  unsure at all n locations
  Clone ID: 700872391H1
ggccagagggcaaagattttgagcacaatggcctcgacacaatgctttttgcaccaccacgccctcaccactccagctagagcttcaacacagcgcctagttctgagcaccaaaccaaaccacattgtttgcaaggcagcacagaagcaggttactggtccaagacgggtgaggacactgactactaggccttgatctctcgncaggtgtggcc

SEQ ID NO: 20188 - DNA, 150 bp, Glycine max
  Clone ID: 700872392H1
caaaatcaagagcctatagttgacggcgttggttggggttctaacatcgttttgttttcattaaacgcgacaaactcatatacgtgtgcattacaactcctaacccctcaccatcctcttcttctctctcattcatacccctcctttttt

SEQ ID NO: 20189 - DNA, 234 bp, Glycine max
  Clone ID: 700872393H1
gaaatgaactgtgactaccatgtcatgtcagcagcactctcccgagagattattcatatgaccaaactgccctcgttcccctaatccgttttcgagagttacaaccaccatggacggcgggaaccgaccggaggcggagctctggctatacaccgccaacaagctcctgagcgcgcgtgacctgcacggtgcgcgctccttcgccatccgcgcgcgtgagtcggacccgaccta

SEQ ID NO: 20190 - DNA, 235 bp, Glycine max
  Clone ID: 700872394H1
gaagaaagaaaattaagcaaataacaagaaagaaacaatgaacgacttgttctccggttccttctcccgcttccgcagcgaccagtcctccccggaccgccaccacgacatcgagatgggcgccaccgcctccggcggcggtcgcggcggcgaggtgaaccttgacaagttcttcgaggacgtggaaggcgtgaaggaggaactaaaggagttggaaggtttggctcagagtcta

SEQ ID NO: 20191 - DNA, 238 bp, Glycine max
  Clone ID: 700872396H1
gcccccagggatttggttggagatatgttatagttatactacacagatatactcaaattataaacattagtattgtctttataggttgtacagaactcgataatgttatcttttagtattttctgggacatgtatctacttgttatgttaatgatgtaaacaggaaaatttttgagatgataatgatcataaatatgtacacacataataaaacatccaaggatacttgaggaatgag

SEQ ID NO: 20192 - DNA, 269 bp, Glycine max
  Clone ID: 700872403H1
ttgctttatcattgtcagtttttatactatgtatccatgaacaagcaattgaaaataataattaacaatgtttattaacatctttaataatatgtttaaagcgtgtttgacacctttttatgacatcaaaatctttttaaagtgtgtagcatatactagagcttaagcaatgatcagggtatcccataaatataatcggtgttatattatacaagaaaagtcccaatcttttctcataaagtaggtatatatggctttcgtattatgat

SEQ ID NO: 20193 - DNA, 234 bp, Glycine max
  Clone ID: 700872355H1
gaaggctgttgctcgccgatgttttgcctcagtcgctgagctgaaaaagacagtgtttcatgacttccatgttgctcatggtgggaagatggttccatttgctggatggagcatgccaatccaattcaaggactcaatcatggactctaccatcaactgtaggcagaatggtagcctttttgatgtttcccatatgtgtgggctgagcctcaaggggaaggatgctgtcccatt

SEQ ID NO: 20194 - DNA, 212 bp, Glycine max
  Clone ID: 700872405H1
ggcaagcctcaaggttgcatttgtggttgctgtgctatacatggttgtggtgagtgcacacatggcacatgctaggatcaactgcggccgtgtcgcggtcgcggtgtctccgtgccttggctaccttcgtcgcggtggaaggccacaggcgaggtgctgcaacggagtgagaaacctccacgccctggccaagcacaccgtggaccgccgga

SEQ ID NO: 20195 - DNA, 261 bp, Glycine max
  Clone ID: 700872406H1
cgttgccattctcatcctcctctgtctctctctctccaccattgccctggatgcttacaagctccggccatccagcgccttcaattctcccttctggactacaaattctgttgctcctgtttggaacaacaactcctctttaaccgttggagctagaggtccaattctgcttgaggattatcatcttgtggagaagcttgcaaactttgacagggaacgtatcccagaacgtgttgtccatgccaggggagctagtgcaaa

SEQ ID NO: 20196 - DNA, 211 bp, Glycine max
  Clone ID: 700872284H1
atcaaacaaagtttcagtttttggtgttccatttttcttcctccatctttatcttaaacataacttgaactctccattccttaaattttagctacgagctagttccgacacagacaaagcactggcaaagaccgagttagaggtgactgttgagagcaagaacaaagacctcaagcacctggggtttgtgaggattgctgctattcaaaca

SEQ ID NO: 20197 - DNA, 211 bp, Glycine max
  Clone ID: 700872286H1
atctgaagaagcaagcaacattagcagctgaagcaaaagctcaatcccttgcgttaatggtggattgtcagatttaattcgattttggaaacaacttatcgatcccccaatccgctgtgaacagatcgatggcgtggcctgtttgatttgaactgaatttcggattgaaggatctcattttcttggagcattaaagcagaaatttctagta

SEQ ID NO: 20198 - DNA, 210 bp, Glycine max
  Clone ID: 700872287H1
gcaaaaacaatatctggtctagtgtgggctagataaataagttttccctatcagtctttgatatcaagcctatttgagctctcccattcctatccaatgattttgcttgatgagctctccatatgttttacgacccaatttgcttgtctctctaagaagatcaatggcatattttctttgagagataaagatgccttttttggagcaggc

SEQ ID NO: 20199 - DNA, 210 bp, Glycine max
  Clone ID: 700872293H1
ctcacagagaatcttatgattctttgagtgagctgagagagagagagagagagcaagacacccctccctctaagaaatgcggtcaattcctctgggaacctcagtatctccaactcctataaacacctcaaagttatcacctttcagtgttaattttaagaaaccaaccactttcccatcttggggttcaactcctcctcatgaattctc

SEQ ID NO: 20200 - DNA, 211 bp, Glycine max
  Clone ID: 700872294H1
ggcaattgcactgttctcacagtgccattttctctctcactccccaattcccaatactacctttcgtctcagagccatggcgcctcacagcacgcctcttgaactcaatcgcttcgccgaggtcggtaacaaagtcgccgatgctgccggagaagttatccgcaaatacttcagaaaaaacttcgacgttattcacaaacatgatctcagt

SEQ ID NO: 20201 - DNA, 227 bp, Glycine max
  Clone ID: 700872295H1
tatgttacggctcgaggttgaatctctgggtctgatcgttgcagacatcacggctattctaagagtgtctcgctctctcattcatgtcccaactgtacgacggaggacaggttgcgtaactgccaccaacccttcgccgcacggtgggcgtggtgctttgccttctgaaggtggtagcccttcagacttgctcttcttagctggtgttggttctgctgtcttctagc

SEQ ID NO: 20202 - DNA, 205 bp, Glycine max
  Clone ID: 700872302H1
ttttggttggtacagcgagacaatttttggtctggactatatgtcatctcatctaccgttggctttgtgatattgctggctttgttgtatgtttactacgtaaccccatttcacatagaaacatggtggtacaggggactactatatgtaatctgcatggttgcaagtgttgttatctttggttcttctgtggttgcaatgtggc

SEQ ID NO: 20203 - DNA, 241 bp, Glycine max
  Clone ID: 700872307H1
gccatggacacaaaactcaagtgatcaatatttatatattatagcatcaaaaagctaatacaattttcctacttcttgtggttggttgactcatatgttttccctgtgcagttgatacttaaacatgtatgcagtgttttcttgtgagttttgatatctgacaatcttctgttttgcagatggacaacagtccaaccactggcagtgtaaacaccaccactgctgagaagcagcgtctagc

SEQ ID NO: 20204 - DNA, 229 bp, Glycine max
  Clone ID: 700872312H1
caagccaaaagaaagaatcccaggcgaggagaaagatggaggggaaggagcaggatgtgtcgttgggagcgaacaagttccccgagagacagccgattgggacggcggcgcagagccaagacgacggcaaggactaccaggagccggcgccggcgccgctggttgacccgacggagtttacgtcatggtcgttttacagagcagggatagcagagtttgtggccacttt

SEQ ID NO: 20205 - DNA, 246 bp, Glycine max
  Clone ID: 700872315H1
cttggccaccacctcaattagtactaatgccaaatttgatgttcgaagtccaaaacgtgtgcagataaagtttgaggaaggcataattggcactccacagcttacggactcattagagataccggaaaatgtggaatttctgggtcaaaagattgaccttacacttttcaaaggcatccttacctctgtccaagacacagccacatcggtagtgaaaacaatttcaagtaggcctcccttgaagat

SEQ ID NO: 20206 - DNA, 247 bp, Glycine max
  Clone ID: 700872316H1
caagatacctgttgatattttccacttaacatacaaatctacggagattagcttccctcaagctaggaaggttttcttaaccaaagttcataaatatataaaagacaacctgttacatgccaaatatgcatgtgcccttatatttaacatatctggaaccaaggattccaagccagaggagtttgcagaggacaagcaaaacctggatgacattattcatatgcattaccaagcaagggcttggctg

SEQ ID NO: 20207 - DNA, 253 bp, Glycine max
  Clone ID: 700872317H1
cacgcgggcggaatccaaaccctccaaggtttctgtcctgtgctcctccgcgtgtggtgcaccctacgcacgaggtttttgtagctaccaccagttcaccaccgtgagcaattcacatcgcatgtttcgaacgctttgtgctgcaaccgaaatcgaaaatcacagaaagaggagaagagagggagcatggctgatctctttacgtggctcatctccttcttcatccttattgccttaattgtactcgtcattt

SEQ ID NO: 20208 - DNA, 124 bp, Glycine max
  Clone ID: 700872318H1
attcggctcgagaagagagattccgaggcggagactgcagttgctcaggtagaggagccgaccgaaatagagaggcttactcagatgctcaggaatgccgagtaccagcaagctactattgagt

SEQ ID NO: 20209 - DNA, 251 bp, Glycine max
  Clone ID: 700872320H1
cggcacaacattgttcctggtattaaagtcgacaagggtttggtgcccctttgcaggttccaacgtacgagtcatggttgccaaggttctggactggtctagtcctcttcgctcaggctgcatgactacgcagcgaaggtgcccgtattcgccaaatggcgtactgttgtgagcatccccaacggtccctctgctctggcagttaaggaagcagcctggggtctggctcgctatgctgcaattgctcagga

SEQ ID NO: 20210 - DNA, 238 bp, Glycine max
  Clone ID: 700872327H1
agggatcagttatggctctgtgttcagtttttttcaattttcttcttctgcttcttctttctttcaccaaagaagctttaggtgtttcagagcaagaagctgtcagagtgcatggactacccggacagcctccggtgaagttcaaacaatattctggttatatcactgtcaatgaaacccatggaagagcactcttctattggttctttgaggccactcataaaccagaagaaaaacc

SEQ ID NO: 20211 - DNA, 240 bp, Glycine max
  Clone ID: 700872329H1
cggaagcagacacagatggctcgtacgaagcaaaccgctcgtaagtccacaggaggaaaggctcctaggaagcagcttgcaaccaaggctgcacgtaagtctgcaccaactactggtggtgtgaagaagccccaccgttatcgtcctggtaccgttgctcttcgtgagattaggaaataccagaagagtaccgagcttttgatccggaagctccccttccagaggctggttcgtgaaatt

SEQ ID NO: 20212 - DNA, 210 bp, Glycine max
  Clone ID: 700872330H1
tggcgcggttgatcacagtggtgtggtgcgcggtggacgtgctactgtgcgccgcggcgggcgcgtcgtgggtggaggaggcggcgaacccgatacgaatggtggcgggggtggaggcggaggtggttcgggtgatagggcactgccggcgcgcgctgaagtttgctaggttcatgagcaggttcgggaagagttaccgaagcgaggaag

SEQ ID NO: 20213 - DNA, 242 bp, Glycine max
  Clone ID: 700872332H1
ggagcatggtattgacagaacttttgaagtagcacaaaaggtctgggcagaggttttcttctaccttgctgagaacaatgtcctttttgagggtattcttcttaagcctagcatggttacacctggagctgagtccaaggacaaggccagtcctcagacagttgctgattacaccctcaagctccttcacaggagaattccccctgctgtccctggaattatgtttttgtctggtggacagt

SEQ ID NO: 20214 - DNA, 238 bp, Glycine max
  Clone ID: 700872335H1
tgaagttggtccaagggatggattacaaaatgagaaaaacattgtaccaacagatgtaaagattgaattgattcatagattggcaccttctgggttatccgtcattgaagctactagttttgtatctcctaaatgggtccctcagttggcagatgcaaaggatgtaatgcaagcagttcataacctgggaggcattagattgccagttctgactcctaatttaaagggttttgaaact

SEQ ID NO: 20215 - DNA, 238 bp, Glycine max
  Clone ID: 700872340H1
caatggccaggtctgtattagagaccaaggcaatattaatgaatgaacaggagaccacgtttaaggatggtgaagcttcaattactgcattacagaactcaaaagaatacttggaaaaacagatggcagaggtggaaaccaatttgagagaactgctacaacaagatcctggtcttgctaggcacatcacgtctatgaatgtagtgtaaactttccgttagtgaaattaccttaaagt

SEQ ID NO: 20216 - DNA, 118 bp, Glycine max
  Clone ID: 700872341H1
cttaagctatgggaaagtcttacccaaccgtgagcgctgattaccagaaggccgttgagaaggtcgaagaagaagctcagaggcttcatcgctgataagagatgcgctcctctaatgc

SEQ ID NO: 20217 - DNA, 237 bp, Glycine max
  Clone ID: 700872345H1
gcaaccctagctttcagctgtttgcaatcaatggctggtgaatctgatgtatcggaaaacaccctctcttgtgctaattgtggcaaacctgcgaacttcagtgtccaaaatgtatggaattgaagcttcctcgagaaggtgctgccttctgctctcaggattgtttcaagtcttcatggaactctcacaaatcagtgcatctgaaggcaaaactatcctcacctggcacacaaaatt

SEQ ID NO: 20218 - DNA, 240 bp, Glycine max
  Clone ID: 700872346H1
attgaattctccagagagaagaagaaacttaatcgatcatcacttcacttcactaatacatgctggcagacgagtgccagaacaagtatgagagctctgaggttgaggtccaggatcgtggtgtttttgactttctcggtaagaaaaaggatgaagaagacaagcctcatcctcaggaggaggtcatcgccaccgagtttcaaaaagtcactgtctcagaccaaggagagaacaagcaca

SEQ ID NO: 20219 - DNA, 242 bp, Glycine max
  Clone ID: 700872347H1
cgtgcttggttcgtttttgttatggttcggctggtacggcttcaaccctggttcgtttctgacaatagccaaggggtatggaagtggagggtattatggtcaatggagcgctatagggaggacagctgtcacgacgacattggctgggagcactgcggctctgacgacgttgttcagcaagtggttattggctggccactggaacgtgattgacgtgtgtaacggcctgcttggcgggttcg

SEQ ID NO: 20220 - DNA, 123 bp, Glycine max
  Clone ID: 700872348H1
acagatggcagaggtggaaatcaatttgagagaactgctacaacaagatcctggtcttgctaggcaaatcatgtctatgaatgtactgtaaactttccgttagtgaaattaacttaaagtggc

SEQ ID NO: 20221 - DNA, 241 bp, Glycine max
  Clone ID: 700872349H1
ctctgtcgtgcctctagggttatcatatctccatttccattacctctctctcagtttccaagactcttaagctatgggaaagtcttacccaaccgtgagcgctgattaccagaaggccgttgagaaggcgaagaagaagctcagaggcttcatcgctgataagagatgcgctcctctaatgctccgtttggcatggcactctgctggaacttacgacgtgagctcgaagaccggtggtccc

SEQ ID NO: 20222 - DNA, 215 bp, Glycine max
  Clone ID: 700872280H1
cttatcctccacttccagtttcaaccatgtcgaagaggaaaagaacaaagacttcgccggacaaaacctccgacgacttcttcgactctctccccgacgaccttgtcctctctatcctctgcaagctcagctccaccgcaacttccctccccgatttcattagtgtcttaataacgtgcaagagactaaactccttaggccttcactctcttgtg

SEQ ID NO: 20223 - DNA, 239 bp, Glycine max
  Clone ID: 700872350H1
ggccagcgtaagaagaatggcttctcaaagtttgagtttaccaccaacatatattccttacaataggataattgggaagcttgattccaagtttttgttgtggccttcttgtgctcatatcaaacccagaagaatttctacctcaattcgggcaatgggttcctccgcttcttcccactcccagtcacaatatgcagacagcgttgaatctgaagcaggagctgatactattgactata

SEQ ID NO: 20224 - DNA, 252 bp, Glycine max
  Clone ID: 700872353H1
tcggcattcggctcgcgctcgagcgaatcggctcgagcgacggcgctctctcgaagacaggcgcaggcgctatgacgacgatgtagactattaacacgatatgagcgttgaccggcgcccgcaaccgccaccgccacgtcgacgtcgtcgccctcagcgtcgagacagcactcagtctgcatcagactaccagcccaaacctgagaccaaagaccttggtcctacgctaatgacgagtgctgctggtgcgtt

SEQ ID NO: 20225 - DNA, 218 bp, Glycine max
  Clone ID: 700872223H1
gatctgtgtatcaaagataaaggttgttgttgggttctgttccctgttcactgtgagtttcatctgattctttgggagactgctagagcacgatgggagatgtggcgaaggaccttgcagctgggactgttggaggggcagcacagttgatatgtggacacccatttgacaccatcaaggtcaagctccaaagccagcctgcaccactccctggtcag

SEQ ID NO: 20226 - DNA, 218 bp, Glycine max
  Clone ID: 700872225H1
gtggggtgaagatatctgaactgttgaagtatccagttagaggtctcgtctttgagggtggcgatacgctggaagatttatcaaatgttgtttcagatgcctgtatatgtcttcagaacatcaacatacctttcaatgttcttatctctgactgtggaaagcaagtctatctgttaccacagtgttatgcagagaaacaagctcttggagaatggatg

SEQ ID NO: 20227 - DNA, 218 bp, Glycine max
  Clone ID: 700872228H1
aaaacactcataacacaaagcacaaagcaaagctcatccttgagttaaaaaatggcagcagctacttccatggctctctcatccccatccttggctggcaaggccgtgaagctgggcccatcagccccagaagtgggaagggttagcatgaggaagaccgtcaccaagcaggtctcctcaggaagcccatggtacggcccagaccgagtcaagtactt

SEQ ID NO: 20228 - DNA, 221 bp, Glycine max
  Clone ID: 700872233H1
gtggatgctgagcttcttgacacccaagtgaatcctgctgtgtgggaaattagtgggcacatggttctaaagaggaagaaggattatgatgaggcatctgaaggcaatgcttggaggcttcttgcagaggtgtccctctctcaagagaggtttcaagaagtcaatgatcttatttttgaagccattggctgtggtgaattggaggatgtcaacgttgaaag

SEQ ID NO: 20229 - DNA, 217 bp, Glycine max
  Clone ID: 700872235H1
tccatttgactcttgttctgaacgacttttcaagagaatcaaaccatggcagtgaaagtatacggtccccactgtgcttccaccaagcgggtgctggtttgtctggttgagaaggaagtcgaatttgaggttgtccctgttgatgtcactaagggggagcagaaggatcctgagtacctcaaactacagccatttggagttgttcctgtcatcaaag

SEQ ID NO: 20230 - DNA, 218 bp, Glycine max
  Clone ID: 700872236H1
tccatttgactcttgttctgaacgacttttcaagagaatcaaaccatggcagtgaaagtatacggtccccactgtgcttccaccaagcgggtgctggtttgtctggttgagaaggaagtcgaatttgaggttgtccctgttgatgtcactaagggggagcagaaggatcctgagtacctcaaactacagccatttggagttgttcctgtcatcaaaga

SEQ ID NO: 20231 - DNA, 84 bp, Glycine max
  unsure at all n locations
  Clone ID: 700872238H1
ttctcgagccgaatcggctcgagctaanacttaattacatcactcctctcanacaaatctacttttcgctattccacacaacat

SEQ ID NO: 20232 - DNA, 218 bp, Glycine max
  Clone ID: 700872239H1
aaaagagtgtcgatactactgaaggcgtacacatcactgatcctggaattggcaaggctgattcctgggcttctccaaagttcaagagacacttctccaaccttgaaaaatttgatgagcatgggaagataactcgtcacttgccggcttcaaagtcgaagtcttatgagaatgtccaggagttatcagcaatggttaatcttgtaaagccctaggtc

SEQ ID NO: 20233 - DNA, 215 bp, Glycine max
  Clone ID: 700872243H1
cttgcattttgccctgccattgtggttcctggtgtatactactcagatgataagatgcttcagaccaggatattctcttatgctgattcacaaaggcacagacttggaccaaactatctgcaacttcctgctaatgctcccaagtgtgctcaccacaataatcatcatgaaggtttcatgaatttcattcacagggatgaggaggtcaattactt

SEQ ID NO: 20234 - DNA, 216 bp, Glycine max
  Clone ID: 700872244H1
tgttaatctgtggtctatgggatgggagcccataaattttgagaggtccctcttgaggtcaagcctgagaggtttatgaacaataatgaagacaaacaacttgatgtgaagggacagaattccagctattgccatttgggactgggagaaggttgtgccctggtgcatcacttgcacttcagactgtgcctactaacgttgctgctatgattcaat

SEQ ID NO: 20235 - DNA, 216 bp, Glycine max
  Clone ID: 700872247H1
aaaaaatattgatggcagtgcactagcgttgatgttgaagaacacctatatgggctagcgaacaaaatggggatcactgttgttacttcctcacaagtaagaatatattattactgaaaaaaattaaaattttatcatggtaaattggagaaataagagcagttcactagtaagttattccttgtttctcactacaattgggatttggtaagcatt

SEQ ID NO: 20236 - DNA, 219 bp, Glycine max
  Clone ID: 700872248H1
caatggccaggattgtattggagaccaaggcaacattaatgaatgaacatcgagaccaagtttaaggatggtgaagcttcaattactgcattacagagctcaaaagaatacttggaaaaacagatggcagaggtggaaaccaatttgagagaactgctacaacaagatcctggtcttgctaggcaaatcatgtctatgaatgtagtgtaaactttccgt

SEQ ID NO: 20237 - DNA, 218 bp, Glycine max
  Clone ID: 700872249H1
ttgtacttgtatatacatattttgtctcgcctttgtaaatacaattgggacactactaggattgggaagaagggtctttacatttttagtttggcaaatagatattgcaactacctttgtataaatctatttctgaagaagcaattacaactttcaagggatgatagcattttgtggcataaggattaaggaggcataaaggaccaattgctttggaa

SEQ ID NO: 20238 - DNA, 202 bp, Glycine max
  unsure at all n locations
  Clone ID: 700872250H1
ttaaaccttcttttatattctgagtgtagctttaaaggccacttgcccgaatccccggtttgtcttntgtgacacaccactttttgtccgtcacaggatacagtggaacatttaccaaaccaatactaaaattttttgtgggaaagcagaacagagcaatggtttgtgagtattcctcatcgcaaactgctttatcatccga

SEQ ID NO: 20239 - DNA, 215 bp, Glycine max
  unsure at all n locations
  Clone ID: 700872253H1
ctttgttgcgatacgtcattggtttggccctcatctcgctgcaggtatggaccattgcaagcatttacgaatccttgggcgaattcggctggttttttggagacttcttctttccacataacatacgaaggtatttatatngtnntanttatctatttttcaacaatactgagcgcacgatattatttgttggagtctggggcgccgcgatcata

SEQ ID NO: 20240 - DNA, 215 bp, Glycine max
  Clone ID: 700872256H1
ggaatttgaatttgtcgtttgcttacgttgagaaggagagtctgcttatggggttgaaggaggtggctgtgtccagtggcagtgcctgcactagtgctagtttggagccttcttatgtgttgagggcgttgggagttgaagaggacatggctcacacttctattaggtttggaattggtaggttcactaccgaggctgagattgatagggcggtt

SEQ ID NO: 20241 - DNA, 197 bp, Glycine max
  Clone ID: 700872257H1
ctgaattatggtaatggcattgaagatgtttccgctgctctgcgttctgtctctttttgctacctcgtctattatcaccatcactcattccaagactgttccacacaacataggaaggacaaggtcccacagaaccagtttcccgcaagggtgtgttttcgggacagtgtcagtgcatagcagtatgaaggtgctgc

SEQ ID NO: 20242 - DNA, 213 bp, Glycine max
  Clone ID: 700872261H1
tagctcccagagactcttattattcttcgagtgagcagagagagagagatagagagcaagacacccctccctctaagaaatgcggtcaattcctctgggaacctcagtatctccaactcctataaacacctcagagttatcacctttcagtgttaattttaagaaaccaaccactttcccatcttggggttcaactcctcctcatgaattctc

SEQ ID NO: 20243 - DNA, 69 bp, Glycine max
  Clone ID: 700872262H1
ccgagatataaccggtcgtattgtctgtgccaattgccatttagctaataagcccgtggatattgaggt

SEQ ID NO: 20244 - DNA, 181 bp, Glycine max
  Clone ID: 700872263H1
tagccactgttccatccttcgcttcgtggggtcgcccttccctcttccttctgctcccggccaggtgccgcctttcctttctcttcacgcaggcctcgacggtctgcctagcttttgtctcgactcttttccttatccgcgcgcgcacgacggcgacggcgcacacgtcttccacacaaca

SEQ ID NO: 20245 - DNA, 201 bp, Glycine max
  unsure at all n locations
  Clone ID: 700872264H1
gtggaaaactccggaggtcaactcaagagtaagagagagtaatgagcattttattgtgtctcacacactctttgaattcatcctcctaatgaagacgactcttcagcctgattcttttcattgcgatccctgtgaagagaagattattagcataaaccctgatctatgtttttcttgtgcagggcctntggttaaccttcc

SEQ ID NO: 20246 - DNA, 213 bp, Glycine max
  Clone ID: 700872266H1
aaataatccagagagaggagagagaagtaaaaaggtggaggaagaagcgaaaagcgagtgagggcagtgttgcttaataaaagaaaacgaacggtggtgataggcttcagtctagatctcaatcgtctccaccttgctttcttctccagcgtccgattctctcaccgatctcgcgccaaatacaaattcgtgtcaacccaacccagggttccg

SEQ ID NO: 20247 - DNA, 212 bp, Glycine max
  Clone ID: 700872267H1
gaagattttcaagaccactactggaaccccatttctcatccctacaactggtactggtgcttgggagagtgctctcacaaacacactgtctcctggggatcgaattgtatcgttcctgaatggccaattcagcttgctttggattgatcagcagcaacgcctgaagttcaatgttgatgttgttgagagtgaatggggccatggtgctaagc

SEQ ID NO: 20248 - DNA, 213 bp, Glycine max
  Clone ID: 700872270H1
ctcactttctctgtttttgctctgttttcctctgttttttcctcatcatcacacattaaaatggagggtctaattccattcgtgtacaaagctgtaatgcaatacaagaatgagaaacaagggcctattggttcatggctttgtgagtcaccttcttactcatacatgaaacttcccggcgactcaggtcggtttcaaacctctgcttcttct

SEQ ID NO: 20249 - DNA, 213 bp, Glycine max
  Clone ID: 700872271H1
aaatcatggtacattcactcatgtcaatcttctctaagcatactaatctaccaatctcttcagggaagattgacatgagggaatgccccatgattaggtatttaccgaagtctgcagtgtcattgcaatctctgcagcttgtaatttgtgatgaggaggtactagatatgtggagtgatgttgagatgtccaactcaaatgttcttattcaag

SEQ ID NO: 20250 - DNA, 214 bp, Glycine max
  Clone ID: 700872274H1
aaacaggtgtcgcttgctgattgggcgaggttctgctgccacaatgggaccataggccagattgtggaccccactttaaaggggaggatggcgccagagtgtttgaggaaattctgcgaggttgcggtgagttgtttgttggacgacggaacgctgaggccgtcgatgaacgacgtcgtttggatgctggagtttgcgttgcagttgcaggaga

SEQ ID NO: 20251 - DNA, 219 bp, Glycine max
  Clone ID: 700872222H1
caacgttggaatgtcgatttcccgatctgcttcactgctacaatcagttggttgtaaccttggattttcagctgattttgtattgaagaagatcgggaaatcaacgttggaatgttgcatccatcaggtggtagtgcttgttctggctatgaactaatacatgcttcttcatcaaggtgctgaaaatcagcttccaacaattcatcatcaaatggggat

SEQ ID NO: 20252 - DNA, 212 bp, Glycine max
  Clone ID: 700872275H1
caacagagagtagaaaagatggcgcggttgatcacagtggtgtggtgcgcggtggcggtgctactgtgcgccgcggcgggcgcgtcgtgggtggaggaggcggcgaacccgatacgaatggtggcgggggtggaggcggaggtggttcgggtgatagggcagtgccggcgcgcgctgaagtttgctaggttcatgagcaggttcgggaagag

SEQ ID NO: 20253 - DNA, 212 bp, Glycine max
  Clone ID: 700872276H1
gcgcgagcaacaaatggagagcaatgtcgcaccaccagcatcagcctctgtgcacgcgcacgcaccagatcggcgccctcctcctcgtggcgaccaccttcttcttcacgagaatgctttccacctccacgctctccttcagcgtcgtccacgtgtcgcaaccccggttccagtgggggcagtcccagctatccctcaagatctacgtctac

SEQ ID NO: 20254 - DNA, 172 bp, Glycine max
  Clone ID: 700872278H1
ctcgagccgattcggctcgagaatagatgcagtttcaaagaaaattgttaaatttggggctgttgccactatctgcggtggactgaaaccaaactacagcaatgttgccccaaaggttatgtattactctgccagaggaccagatccagaggacagtcttccacacaacata

SEQ ID NO: 20255 - DNA, 223 bp, Glycine max
  Clone ID: 700872279H1
tgctacgagacggaaaatccaccggagaagaaggttgaagagaagaaacctgaagagaaaaaaccagaagaaaaacctaaagagagtatggtggttttgaagatcaaactgcactgtgacggttgcattgcgaaaattcgaagaatcattatgaggttcaaaggtgtacaatcggtgagccttgacggaagcaaggacttggtgacagtgaagggaacaatgg

SEQ ID NO: 20256 - DNA, 232 bp, Glycine max
  Clone ID: 700872167H1
caaaattctcagaagctaacaagctaggtgaaggtggatttggtgaggtttacaagggcttgcttccaagcggacaagaagtggctgtcaagagactctctaaaatctctggacaaggtggggaagaatttaaaatgaagtagagattgttgcaaagcttcaacacaggaatttggtgaggcttctaggattttgtttggaaggggaagaaaagatacttgtctacgaattt

SEQ ID NO: 20257 - DNA, 231 bp, Glycine max
  Clone ID: 700872169H1
gaaaagtgtattttacattataaggaacaggaaaagaatctggaagatcagatcacagagaatctatcattattgactgctgctgaaagcaaactttcagaggctaaaaagcaatatgatcaaatggtaggaataaacagttagaactatcaaggcatttgaaagaaatatctcagcgaaatgatcaggctattaatgatattaagaggaagtatgagttggagaagatgg

SEQ ID NO: 20258 - DNA, 231 bp, Glycine max
  Clone ID: 700872170H1
tgaatttcagtcctcaaagattggaacaacaggaacatgtgtactctcacaactgttcctgtgctcccttctaagcttaacaagccttcgctttctccgcaccacaattctctctctccctactgcggaaacgggtcgggaagaagaacaaagcaatggttcctgttgcaaggttgttcgggccagccatatttgaagcctcaaaactgaaggttttgttcttaggagtgg

SEQ ID NO: 20259 - DNA, 231 bp, Glycine max
  Clone ID: 700872172H1
agttgccaagcaacttgttgatgcaaaactagatgaactacttggtgatcggacagcagctgatgatgaaaagccttctagaaagaagaaggagaaacctgcaaaagtagaggataaggcagcacctgttgctactcctgaaaagtcacctgaagaagaccttaatccatttttaatattccctaatccagaggaaaatttcaaggtgcatactgaagtgccttttagtga

SEQ ID NO: 20260 - DNA, 232 bp, Glycine max
  Clone ID: 700872174H1
tggtgatgacaaattgctgcgtgaaaggacacacctgctgttggcttggtgttcaagaatggcaatttgtaagaaagatgtttggagagttgaatgtggaatcccttctggatttccgctcacagttatttgtatagcatttttaatgagatgctcattagatatagctatgaaaaattactgcgccaggctaaagctccaagtatgtttttacaatccttcaaaaattttg

SEQ ID NO: 20261 - DNA, 239 bp, Glycine max
  Clone ID: 700872177H1
gttctagatgcattgatattccctttttttttcattctagttattgatacggataggggtgaagaagattatagatccaattaagtattaaatatatgtaattaatatgtaattaatctcctcttctttatttcgcttttatttcttcttttttttacaattgtaatagaataagttaggaaagagaaagaataagggttaatttggcctaattgaaattcggagtgaaactcgggatc

SEQ ID NO: 20262 - DNA, 242 bp, Glycine max
  unsure at all n locations
  Clone ID: 700872178H1
agggatgagcacaaagatagtacaaagtgtttttgcagcttctgttctattcatggttaaggaggagcttgttacaggcttttatggttgtggcagataagagcaaaaaagttgtatcaaatataagtagttgactttctcttntggataaagaaagtaaaacagtagttgacttctttaccatatgaaagggataactccctcttgatctacttctcctcgttggtaattcacagattctg

SEQ ID NO: 20263 - DNA, 243 bp, Glycine max
  Clone ID: 700872179H1
caaatacggcatcccggaaggcaacagcagctgtgccaactgccgttgatccaacgagaaagcgagaaagaaagtccgtaggcgactgagcggcatggcgtgtcggactttcgacaaggttgttcgtggactatgcatcttgcttatgcttccgaagcttctctcaatcaatttgcctccgtagtctgtagtctgtatgtccctcgataagctgaatttgctgcgcttcagccttggctcctc

SEQ ID NO: 20264 - DNA, 243 bp, Glycine max
  Clone ID: 700872180H1
cttcttcaaccacgctattgctatcatcactcacacttggaagcaacccatcaatcaactcccgaaacctttcatttttttttgcttcaaaatcgttctttgaatcgacccaagaagcgagtttccttcgttgttcaagagccaagcccactgtggaaattccaaaggtgcagcctcaatttaagcctccgtttcttgggttgactaagactgcagaaatatggaactctagagcttgcatga

SEQ ID NO: 20265 - DNA, 234 bp, Glycine max
  Clone ID: 700872181H1
gttgattggtcccattattccgaagagaaaagaaaagatgtttgagccacaacagctatacactcgcgcgaagaccgaggaattcgacctcgaatcaggagaaaccctctacccagggctgagcgtcggcggaaccagctccgatggggtttcatccgcaaggtctacggcatcctctccgcgcagatcgtcctcaccaccctcgtctccgtcaccaccgttttctatactcca

SEQ ID NO: 20266 - DNA, 228 bp, Glycine max
  Clone ID: 700872182H1
gtggaaatgcaggagagccagcaacactgatcaggcagagataccgtgaagccgcagacttgatcaagaagggaaagatgtgtgctctcttcatcaacgatcttgatgcaggagctggtcgtcttggtggaccacccaatacactgtcaacaaccagatggtgaatgccaccctcatgaacattgctgataaccccaccaatgtgcagcttcctggtatgtataacaa

SEQ ID NO: 20267 - DNA, 229 bp, Glycine max
  Clone ID: 700872185H1
gcaatttgggatggatctcctcccagttttaatgcagatatatggtgctagcgtcaatggtccagttcggcacaaatgtctttctgtcattggaaaattgatgtatttcagcacagctgagatgatcagtctttgttgagtgtaacaaatatatcaagtttcttagctggtgtgttagcatggaaagatccacatgttttggttcctgccttgcaaatttcagaaattc

SEQ ID NO: 20268 - DNA, 228 bp, Glycine max
  Clone ID: 700872187H1
aaaatataaaaaactaaaaaaacatcaaccgaaggggtcatttctcccaatccgtttctgtttctgtcttccaggaacactgtcagttagtgaaggatacgatgaacatcatgtctacccaccagtgtgttggcctgtgagaattcaggatcatcctgacaaaggaagtattaatagggctccattttccagaggatcagacttccttaatgttggataccatactca

SEQ ID NO: 20269 - DNA, 231 bp, Glycine max
  Clone ID: 700872188H1
ctcgttttcgctgcagaagaagaagaagagtgatggctgagtacgacctaactccgcggatggcgccgaatctcgacaggcaccttgtgttccctctcctggagttcctgcaggagcggcagctctagcgctacgaccacatcctgaaggcgaagatcgaccttcttaacaacaccaacatggttgactacgctatggacatccacaagagcctctaccacaccgaggacg

SEQ ID NO: 20270 - DNA, 231 bp, Glycine max
  Clone ID: 700872189H1
gcagaaagtagccattaagattgttggcagcaattctgaagagcaacaaaaaatgttcgggaggcactttgagattgatgatgaacttgtaagccatatttcacggagatctatcgatatactcaaagcaattatcgggatgaactaaatatggaggaatggaggttggttgtgaaattgaagaatcttttcaagatacaatgaggagacttgatgtgtgggcattcattt

SEQ ID NO: 20271 - DNA, 207 bp, Glycine max
  Clone ID: 700872193H1
ctgagtcttgcaattgaagttgaagtcttgcccttctctcttcaactccaaacacaagacatcatcatccatggctgcctccgtctccactgtcggagctgtcaacagagctcttttgaacctgaatgggtctggactggggtttcagctccagttcatccttctttgggagaagcttgaagacggttattggctcaagggtcccca

SEQ ID NO: 20272 - DNA, 193 bp, Glycine max
  Clone ID: 700872194H1
caaaatctaacccgctaatgctaactcgatccctcaaattatcttcacgcactctctcaaagtccacaaaatctgccctcttccctcagactgcctatgctttcagtcaatcatggaagcccaaggtccctaaacatgaattcctctagacaaatctacatatcgtttagctcatccgatctgggatcctaaa

SEQ ID NO: 20273 - DNA, 51 bp, Glycine max
  Clone ID: 700872205H1
ctcgagccgctagttctagatcgcgatctagaacgaacgtttagacctcta

SEQ ID NO: 20274 - DNA, 221 bp, Glycine max
  Clone ID: 700872207H1
ggcaagcctcaaggttgcatttgtggttgctgtgctatacatggttgtggtgagtgcacacatggcacatgctaggatcaactgcggccgtgtcgcggtcgcggtgtctccgtgccttggctaccttcgtcgcggtggaaggccacaggcgaggtgctgcaacggagtgagaaacctccacgccctggccaagaccaccgtggaccgccggacggcgtgca

SEQ ID NO: 20275 - DNA, 244 bp, Glycine max
  unsure at all n locations
  Clone ID: 700872208H1
cgtaagctcggactactaatcgagattaacaaaccagatggaggtgatgtttatgaaggagttccaaaggattacaccggaaaagatgtnactgttggtaacttttatgctgctttacttggatacaagtcgccacttagtggtggcagtgggaaggtgttggacagtggacctgatgatcatatatttgtatactatactgaccatggaggtccaggggagctcgggatgcctgctggtcctt

SEQ ID NO: 20276 - DNA, 223 bp, Glycine max
  Clone ID: 700872209H1
gaggtcctcttccaatttgaagctagcgaggatggacaagtccagttctttccaaatgctccagttgatgttgacaattctcccagctttgttgccatcaatgtcagtcctattgagtatgggcatgttttgctgattccgcgcattttcgagtagactgcctcaaaggattgaccgtgagagcttcctccttgcacttcacatggcagtggaagctgataat

SEQ ID NO: 20277 - DNA, 219 bp, Glycine max
  Clone ID: 700872210H1
cacacacacagctagcagatattacatacacgtgaatcagcaattaagccatggagaagaaatcaatagctgggttgtgcttcctcttccttgttctctttgttgctcaagaagttgtggtgtaaactgaggcaaagacttgcgagaacctggctgatacatacaggggtccatgcttcaccactggcagctgcgatgatcactgcaagaacaaagagc

SEQ ID NO: 20278 - DNA, 221 bp, Glycine max
  unsure at all n locations
  Clone ID: 700872211H1
atccgatgcacggcctcgcccangattcgccgcccctccgatcgcttctacggctcctcgccgtcgccgtcgcgcccggaggacctcaacctcttcctggaactgctccctctgaagatgcgaagggaactctatcgccaccgcgaaatcggaggcctcatagagattgtcatggatttgggaagaaaacctctcgccaggttcccttccggttattgggt

SEQ ID NO: 20279 - DNA, 215 bp, Glycine max
  Clone ID: 700872213H1
ctcgagccgctgctcaacctctcaaagtcgatacaaccacaagattcatgatagatcacaacttttctggcaagaaagttcctcagagagccgctgcatcacgcaatatttccgatgaaggtggatggagatccaaatctagaaagcattcggagacattcggaaaagagcttgatatgacgtcagatgaagcatctatgaagaattcaatgcta

SEQ ID NO: 20280 - DNA, 164 bp, Glycine max
  Clone ID: 700872215H1
tataaaattaccttctgtggcagtagtctctcagcgaaatttgtctctcaatcaaaacttcccaatacgacctcgagtagcagagccgaggcgcctagcagcacgcctcctgagctcgatcgctacgtagaggtccataagaaagtcgacgatgctggcggaga

SEQ ID NO: 20281 - DNA, 68 bp, Glycine max
  Clone ID: 700872166H1
agctcgagggctcgagctgattcacaggccagctggcaaagattttgaccacaatggcctcgacacaa

SEQ ID NO: 20282 - DNA, 223 bp, Glycine max
  Clone ID: 700872217H1
tgcggaatccaaaccctccaaggtttctttctcgtgctcctccgcgtgtggtgcaccctacgcacgaggtttttgtagctaccaccagttcaccaccgtgagcaattcacatcgcatgtttcgaacgctttgtgctgcaaccgaaatcgaaaatcacagaaagaggagaagagagggagcatggctgatctctttacgtggctcatctccttcttcatcctta

SEQ ID NO: 20283 - DNA, 210 bp, Glycine max
  Clone ID: 700872218H1
ccaccaccaccaccagccgccgcaacactttccctctgtcatggcggattcccttaaccccgccactgcactcggcgtcggcgtcggcgtcattcctctcctcgcagccacgccgtttctcgaatccgacaacatcatcctctgaagtaggacacgtggcggcgggggaattcagctatggcaagaccatcaacaacaccatcaaagcca

SEQ ID NO: 20284 - DNA, 88 bp, Glycine max
  Clone ID: 700872219H1
tctgttttgttagatgagtagagttatggttgtattatgttgtttcttcactatcatagatctacgtttttagttttgccagatttcc

SEQ ID NO: 20285 - DNA, 221 bp, Glycine max
  Clone ID: 700872221H1
caggaagcagctggaaaaatatttgaaagcacaccctggtggtccagctgtatcagaatttgactggggcactggtgagaccccaagaagatctacaagaatcagtgagaaggcaaaagcagctcctcgaatagtaagcgagcccccaaagaaacgtactaaaagatcatcagcttcacaaaaggaaacttcccaggaagaaaaagaagagaagacaaagg

SEQ ID NO: 20286 - DNA, 239 bp, Glycine max
  Clone ID: 700872119H1
agagacctctcggggagaatcacccagaaagagttatctaaaagctgttaaaaaagtggcaaagacagagaaagatgctcaaataagacttcaactttatgagccatctgaatttcatgtggtgaacccattgaagagacaagggtagggaaccccgttgggtacaaattggttcccggtgccacagcagctagcctgctggatccagaagatccaccacagaaaagagcagcttttac

SEQ ID NO: 20287 - DNA, 237 bp, Glycine max
  Clone ID: 700872120H1
taaatcctctggctccaccatgaagagtatttagtgatgttctttggaaagtgaaaagatatcaaaaagaaggtccaagtcccagcattaccttcagttaccatagtgctgatggtgaacaaggattccctggtgactcctagtaactgtgagctacattctaacggggaaaaatcaattggttatacttatgaaaggaaaagccctaaacaagccaacaccagtgaatttggcaaa

SEQ ID NO: 20288 - DNA, 236 bp, Glycine max
  Clone ID: 700872121H1
ctactcttttctgcatgtttgttctcttaacgactcctccgcgaaagagtattattcaatattttggttgggttgaatcccggggttgaagcgttgcagacatcacggctattctaagagtgtctcgctccgtcatcatgtccgatctgtacgacggatgacgggttgttgcgtaactgccgttaacccttcgccgcacggtgggcgtggtgctttgccttctgaaggtggtagcc

SEQ ID NO: 20289 - DNA, 239 bp, Glycine max
  Clone ID: 700872124H1
gtttgaagtgctgggaatcccttgtggatgcaaacggacaaagtccacatgcctatgccatcatgaggaataatgactcttataatgcgctggtcgcccgtaaacttgctgacagacaaaggggtgaaatttcggtttaattgcaaatgcaatagagcaacagtcactgagagtggagcttaagcaaaagcaaagttacttagtcaaacgaggtcagagttcttgtgccaagtgtgcga

SEQ ID NO: 20290 - DNA, 240 bp, Glycine max
  Clone ID: 700872125H1
ctgctcgtccactctcaagacctttctccctctcttcgctccttctctcacaggcccatttctagaaccaccttctctctctatcctctccttttgaagccctccaaatggctccacatagcccccaaatccaggactgccatgccctcgtcgccgctttgtctgcagaggtccaagtgcccgaaactttcgacgacacggcggaggacgacggtgctgatggctccaccgccaccaaca

SEQ ID NO: 20291 - DNA, 241 bp, Glycine max
  Clone ID: 700872127H1
atcaatccctcatctcattgctgagatctgcaagctggctatggactacgaaccctacgacagtagcggaactgatgatgaccttccaccaacccatcaaccccgcatttccaggggaggaggaggacgtctcgctgggatgggagatctgctgttggttcaattccttacccaaggatgtatggtgaaattgatatggagacccaaattcatcagcttgagcaagaagcatacagttcag

SEQ ID NO: 20292 - DNA, 242 bp, Glycine max
  unsure at all n locations
  Clone ID: 700872128H1
ctcttcaccaacctctccatcggcccctgcaccatcttccccatcttctgcaaatgccccctctacagccaaggtacaatncnatgatctcctacgtcgtccaacccgaggataacatgtactcaatagcttcaactttcgtgctgaagaacagtccatcattgacgccaacggcggtgagacaactctacatgactatgacattantntcgtgcccgtggcgcggctgccggctctgtcgc

SEQ ID NO: 20293 - DNA, 108 bp, Glycine max
  Clone ID: 700872129H1
ctcgagccgcaatgtttctactttgaggcctccgatgttggtgggtgggtcttacttcactcaaaatggccaccggagtgaacagaaaaatttctgcagcatcagctc

SEQ ID NO: 20294 - DNA, 159 bp, Glycine max
  Clone ID: 700872130H1
tctcagtctctgtgtttgcggctgaggattccgaacgagtgaccttcctcgtttctcgcaaagtttacgtaatcatgggtaaggacaaggttcacatcaacattgtcgtcattggacatgtcgactctgggaagtcaaataccatggtcacttgatcta

SEQ ID NO: 20295 - DNA, 248 bp, Glycine max
  Clone ID: 700872131H1
cagcaacgcttctgatgctttggataagattcgattcgagagtttaaccgacaagagcaagctcgatgctcagccagagctcttcattcgtcttgtgcccgacaaggccaacaagactctttccgttattgacagcggcattggatgaccaaagcagatttggtgaacaacttgggtaccattgcgaggtccgggaccaaggagttcatggaggcattgcaggctggtgctgatgtaagcatgattgg

SEQ ID NO: 20296 - DNA, 253 bp, Glycine max
  Clone ID: 700872132H1
ctccttgtcagtctcttgtctgtgcctgactcccgcactcaagaacatgctgtgacagcgctcctgaatctttccatatacgaaaataaccaaggacgtattgtttcttcaggagcagttccaggtatagttcatgtgctgaagaaggaagcatggaagctcgggaaaatgcagctgcaacacttttcagcctttcagttatagatgaaaacaaggttacaattgggtctttaggagccataccaccactggt

SEQ ID NO: 20297 - DNA, 237 bp, Glycine max
  Clone ID: 700872133H1
tagcgtgataataagtttgagctagctgtaatatgtggatatggagcagccttgttttgtggaactgggtgtttacatcgaagagaaagtctttcgggagcttacttgaaagattacaaagcaatatgggtcagcaagccaatagaaacgataatagagcaattgatgaattgaatgatgcatccaaggttctagccacttgcacctatgaggagatcactcaatgggggaaagaga

SEQ ID NO: 20298 - DNA, 238 bp, Glycine max
  Clone ID: 700872134H1
tgaacccgaagtatggtggtggtgttgggaggaagcaggaggagtatttccctggtcctctgccgctggttcggttgaacccacggtcagattgggccgatgatgagcgtgacacagggcacggtttgagctcggaggtagggaacatggttttcccaagggggaagttttttgggattttgatattcctagggttggtggtttgcctcataagcatgagaagaggggactattgagg

SEQ ID NO: 20299 - DNA, 96 bp, Glycine max
  Clone ID: 700872137H1
gtcgacaagagaaagaacctcagacatttatattatccaaagacagtgccgactcctgcatatcaatgcaggtaattcaacaagggcaacgccttc

SEQ ID NO: 20300 - DNA, 235 bp, Glycine max
  Clone ID: 700872139H1
ttcatcacttcattcaacatttctctctcccttagctagtttttaccaatggctgctgcggttagtgctgcagtctcttttccatccaccaagtctacctctctcccaagcaggacctccatcattaccccaggagagttgtattcaagaaggcttcattgcaatacagagatgtttgtagcagtggaagggtagtttccatcagagctcaagtcaccactgaggctccagccaa

SEQ ID NO: 20301 - DNA, 237 bp, Glycine max
  Clone ID: 700872142H1
caaggttctcggcctgcaccgaaccgcgaccaaggaagagatcaaagcggcgttcaagaagctagcgttccagttccacccggacaagcattcgcaatcgccgaaggccgttcgggaaaatgccacacttcgattcagcaggtctccgaggcctacgaggttctgatggacgatcgcaagcgcgccgattacaatttccggcggactccggcgccggcaccggaaacaactactatt

SEQ ID NO: 20302 - DNA, 239 bp, Glycine max
  Clone ID: 700872143H1
ctttgatgttttgtcttggactgggaattctgtgtggagctgtgggttatcttggttcgaatttgtttgtgaggaggatctacagaaacatcaagtgtgactaaggcttttgtaggagtctgagaccagagcacttcatatgtttgttgctggagacaataaatttcttagaggaagcctctggtcatgtgtggggaccaaacaatgtttacaggtagtaagtatcacagggttgagga

SEQ ID NO: 20303 - DNA, 242 bp, Glycine max
  Clone ID: 700872144H1
cacaaagcacaaagcaaagctcatccttgagttaaaaaatggcagcagcttcttccatggctctctcatccccatccttggctggcaaggccgtgaagctgggcccatcagccccagaagtgggaagggtgagcatgagaagaccgtcaccaagcaggtctcctcaggaagcccatggtacggcccagaccgagtcaagtacttgggcccattctctggcgagcccccgtcctacctaaccg

SEQ ID NO: 20304 - DNA, 245 bp, Glycine max
  Clone ID: 700872145H1
accaaccaaccatcaatggcagatgtaaccacctacctccgccaccaccgcgaccccgaccccgaccccgacgacgacgaccaaaccctaattccattcccttattgggatttggactttgatttcgaccccgaattcccacaaacactttcttcttcaccgaccgcgaaaaccagatcaatttcgtcatggatctcttccaccagcgcgtggagcagtctcaactcaccgatcccctctccaac

SEQ ID NO: 20305 - DNA, 247 bp, Glycine max
  Clone ID: 700872147H1
cggctcgagcttgctctgtgtcgccgtaacacaaaaagggaagagagagaaagaaccaccccacgcaacaacagcttttgttcttcacaagacatagcttcgtgtgtgtgtttcttttcttccttccagcttggaaagactgagtctctgtctttttcaggttttgggggtgttgttgaagatgttggtagcaaatagctttgatctatggcgaaaggacggttttttctctgcggcggaagaagtg

SEQ ID NO: 20306 - DNA, 247 bp, Glycine max
  Clone ID: 700872148H1
ctatggccaggtttgtattggagaccaaggcaacattaatgaatgaacaggagaccaagtttaaggatggtgaagcttcaattactgcattacagagctcaaaagaatacttggaaaaacagatggcagaggtggaaaccaattgagagaactgctacaacaagatcctggtcttgctaggcaaatcatgtctatgaatgtagtgtaaactttccgttagtgaaattaacttaaagtggcagggttt

SEQ ID NO: 20307 - DNA, 236 bp, Glycine max
  Clone ID: 700872149H1
cgccacgccatcgactaagtcctttccccgatgatcctcttttgctccggcgacagggcttccgccgccgtaggagagaagcttccggcaaccgctccccgttcaaccccgttatcgtcctccgcggccccggcgcgactccgccgccgccgaccacgacggcgtcagcacgttcgagctcttctacgacgacggcgacggcaccggcctccgccctcttcctcccaccatgtcgg

SEQ ID NO: 20308 - DNA, 231 bp, Glycine max
  unsure at all n locations
  Clone ID: 700872151H1
gttaggcttaggccaagcaattgaagcactggaagtaattttcattccagtagattgagatcttcactcaatgctagagacttttctgtggatgattttgatttgttattacctgattatgatcatcatcatatcagcagcagcagcagcaacagttccttaatgagttatcatgcctatctccacatgctatgctttgcgntaccatgaaccgctctggtcgaatgaaac

SEQ ID NO: 20309 - DNA, 232 bp, Glycine max
  unsure at all n locations
  Clone ID: 700872153H1
gaagtgatttacactaagttatcctcataaatacactcttattagngtgtctgataagtgtctaaccttagtaacattgccacatattgtgttcattttggaattgtgccactaaaattctattcaattcactatggctgcctcttcttatgctatgcaatcaatcctggcaaaccctttgatccgcatttccagcgggtctagggtgaaccaatttggcgttcctgctttg

SEQ ID NO: 20310 - DNA, 107 bp, Glycine max
  Clone ID: 700872156H1
agattgactaaaaaggactcgactcagcacaagctttatcttctgccatggtcttgtgtaggtgtctctcttttttgactggaatgagagagaaaaacaagggtact

SEQ ID NO: 20311 - DNA, 237 bp, Glycine max
  Clone ID: 700872158H1
gaagtggggagcgacactcatgaactcttttctgttcaatgtggggcttattcttctttgttccattagtgtgatccagttctgctccacagcatttgcctactatgctcaagcaactgcagcacaggaaatattggccacaccttggagtctcttcgtggaattaaatatttgtacaagtacaacgtctttcagattgcattcgttgcattggctggattgacttttgtatattat

SEQ ID NO: 20312 - DNA, 118 bp, Glycine max
  Clone ID: 700872118H1
cccattgactaaaaaggactcgactcagcacaagctttatcttctgccatggtcttgtgtaggtgtctctcttttttgactggaaagagagagaaaaacaagggtactgaacagtctt

SEQ ID NO: 20313 - DNA, 238 bp, Glycine max
  Clone ID: 700872159H1
attcttgccagacttgagatggcgaacgagaacgaacccgcgaagtgctgttaccataccttcaacgcgccgatgagttccaaaagcacgaaccactcatcgcttattactgtcgattatatgctatggaacggggctgaagattccgcaaagtgagcgcacccagaccactaatgctcttctggtttcgctcatgaagcagcttgaacaggataaaaagtcaatccagttggggcct

SEQ ID NO: 20314 - DNA, 247 bp, Glycine max
  Clone ID: 700872163H1
ttcaggtattattactatgaattcttggccacacacacactatcttaaatttttcggtgtatatacatcataagataaatgttagtcatactatttttaatattctttattattgactaaatttttttagaaattttaaatttaatgaatttcattttttatttaattactccctcgatttagaggtagaacccacaaacatatgtgattttcaatcaatttcattcaataacagatagtgttaaaa

SEQ ID NO: 20315 - DNA, 235 bp, Glycine max
  Clone ID: 700872070H1
aggcttatggtggagaccgagggacccagagaggtggaagggcgtagtaagcgacgaaatgcttcggggtgttgaaaataagcgtagatccggggattcgcgatataggtcaacctttcgaactgctgctgaatccacgggcaggcaagaggcagcctggtgaactgaaacatcttagtagccagaggaaaagaaagcgaaagcgattcccgtagtatcggcgagcgagatggga

SEQ ID NO: 20316 - DNA, 237 bp, Glycine max
  Clone ID: 700872074H1
aattgcaaaatatttgccagtattctgtctctcccagcatgaagagagtatttttcatacatatcatggcactagtgttttatggtgggtttttttgttttaaaggattgccaagattttcatcaagctaaggatggtgatggatgggttgaacaatcttcccaaccatttctttttggcttattgcagaaggttgatgctccttcagcatatgtgtgtcctgttaccaggtttttt

SEQ ID NO: 20317 - DNA, 252 bp, Glycine max
  Clone ID: 700872075H1
gtatgtcctctctcgcatcattactagctgtgactgttggaagaagcattgaggaagtttatagagggagtgacaaaggaatactagaggatgtagagcttcttcggcagataactgaagcttcgcgtggagcaattacttccgttgtgcagaggactactaataagaagggtcaagttgttgacgtagctgataaacttacctcaatccttggatttggcataaatgaaccatgggtcgagtacttgtcaa

SEQ ID NO: 20318 - DNA, 100 bp, Glycine max
  Clone ID: 700872076H1
tcgagtgcatatcatattcagacaactgcaagttgtcatgcaatagcaatagcactttcattgatgaaggcatatccattggagtagtccagcgatgagc

SEQ ID NO: 20319 - DNA, 250 bp, Glycine max
  Clone ID: 700872078H1
cctttgtatgttgctgtgcaatattgagccatgggaggcgcattcaactgcgatgtggggtgagtgtcagagagtcttaccacctaaattacgagcagaaaatccaaaggtagctggacttttgtacttggcttgagcatactgaaccttcttctcgtcccaatggcagaatgattttagaatctgaagttatgcgtgaatcagaggaatcagattctgtagatgatgttggaatatctgatgacgaggc

SEQ ID NO: 20320 - DNA, 252 bp, Glycine max
  Clone ID: 700872079H1
gtcatggggaaaactgacttcaatgcagtgaagcataaacagcaatctatgatcttagtggatgtccagactcctggcgttcacataaagagaccattgacagtgtttggctttgatgatgcaccgcatgggcatgcagaagtaacatttgaaaatgtttgtgtgcccgcaaaaaacatcatacttggcgaaggacgtggatttgagattgcccaaggtaggcttggtcctggaaggctccaccattgtatg

SEQ ID NO: 20321 - DNA, 255 bp, Glycine max
  Clone ID: 700872081H1
cacaaactcagggtagggcagagagagagagagagagagagagagagagagagaatgggagggtgggctatcgcggtgcatggtggcgctggtgtcgaccctaatctcacactcgagcgccaagaagaagcgaaacaacttctcacgcgctgtctcaatcttggaatctctgctctaaattctaatcttcgcgccatagatgtcgtcgaacttgtggtgagggattggaaacggatccgctgttcaatcgggcgt

SEQ ID NO: 20322 - DNA, 253 bp, Glycine max
  Clone ID: 700872083H1
agctactgctagagcagcatcagctgctggcacaatcatgacactatcctcatgcgctagttccagtgttgaggaggttgcttctacaggttccgacattcgattttttcaactttatgtgcttaaagacagaaatgtggttgctcagcttgtgagaagagctgaaagagctggtttcaaggcaattgcccttactgtggacactccaattcttggtcatagggaggctgatatcaaaaacagattgacattg

SEQ ID NO: 20323 - DNA, 254 bp, Glycine max
  Clone ID: 700872086H1
ctgcaactagtgccatcaagcaggttgcttctggaaggtttggtgtcaccccaacattcttggtaaatgctgatcagttagaaatcaagattgcacaaggtgcaaaacctggtgaaggtggacaattgcctggaaaaaaagttagcatgtgtattgctaggttgagaaattctaaaccaggagttcctcttatatctccacctacctcatcatgacatttattctatcgaggacctagctcagttgatctttga

SEQ ID NO: 20324 - DNA, 252 bp, Glycine max
  Clone ID: 700872087H1
ctcgagccgctcgagccgattcggctcgaggcctttatttcacttattcacaacaagcatagagccttggaacgtaagagggtaatattgttctcgtatagaagtggcttaacttccacaatgttctctttgctattacgtgaaggtcaacatccatttagcctgtcaaacattgataaaatgatggatgttgctgggaaattgaagtcaagacatgagtttccaccagagaaatttgttgaaaccatgaag

SEQ ID NO: 20325 - DNA, 248 bp, Glycine max
  Clone ID: 700872088H1
ctgatgttttcgaatatgtcgagcgagcaaacggtacactcgagaggtatataccatggtctttcagtgttcccatcgtctttgaaaggcttgactgccattattaagggagcaaacggaatatctggaaactacatgctgcgggtattggtcgcaagatcccgaacgatggagcaagatttatgcttatcgaggcgtccttgggcgatcccaaatggtctgtccaagaacgccgagcatatgcttgg

SEQ ID NO: 20326 - DNA, 251 bp, Glycine max
  Clone ID: 700872089H1
ctcgagccgcgagtgttttaacaagagtgatgatgtgggagggggttcttctgtgttccatgtggatttcaaagatggctctactgatagtgactcaagcgcgatcttgaacgaggagaacaacaaccacagccccaacaataacgcggcgatttcgtcgtgtggggttctgcaaagtcacgggcttttgttgtcgccttcttcgtcgtcgatgaacaactgtttccagttccagaaacagtaccagacga

SEQ ID NO: 20327 - DNA, 249 bp, Glycine max
  Clone ID: 700872090H1
atcaaaagccgtgtctgtgtttgcgtttgttttcactttgcaaatcactgtgttccaaggagtctgttggttgattgaagggtatgcgtgaattattataaactttccggtgtttgagttcaattttgtgtccgtgtgcgtgaatctccattttttacagccatgagcacgcttgtacgaaacgccaccctcaccttcagccgcagaaacagatacgagcttcttggtctgcaaggcaaagacaagatg

SEQ ID NO: 20328 - DNA, 249 bp, Glycine max
  Clone ID: 700872091H1
ttccatatcttatcttctcctcctccatctttgaggttctcacggaaactcctgaagatggctggcatagcattcggaagcttcaatgattctttcagtttggcctccatcaaggcctacattgctgagttcatctcaacccttctctttgtttttgctggtgttggttcagccatagcctatgctaagttgacatcagatgcagctcttgatccaactgggttggtagctgttgccatttgccatggt

SEQ ID NO: 20329 - DNA, 249 bp, Glycine max
  Clone ID: 700872092H1
cctccatatagttttatgaacatacagttgcagaagttccaacataaatggtgatcatcactcgcagttctgctggtagaaaaccaagtgaaattatgaagtttttcttgacaacttttattggtatagttttcggattctttataggagtatcaattccaacattgtcaataacaaagttgaatctcccatctggcctgcttccctccattgatctttcttacattgaagacagatatgcaggtcgcc

SEQ ID NO: 20330 - DNA, 248 bp, Glycine max
  Clone ID: 700872093H1
ctcgagccgcgagtgttttaacaatagtgatgaggtgggagggggttcttctgtgttccatgtggatttcaaagatggctcttctgatagtgactcaagcgcgatcttgaacgatgagaacaacaaccacagccccaacaataacgcggcgatttcgtcgtgtggggttctgcaaagtcacgggcttttgttgtcgccttcttcgtcgtcgatgaacaactgtttccagttccagaaacagtaccaga

SEQ ID NO: 20331 - DNA, 245 bp, Glycine max
  Clone ID: 700872102H1
tacaaaggttgctgtaggagataagattgcagtagtgctaagtgctaacacctgcagtgaacaatggcctctgcatcagcatctctgctcaagtcttcacttgttcttgacaagtctgagtgggtgaagggacaaacccttcgccaaccttctgcatcagttgtgagatgcaaccccaccaccccatcaggcctcaccatcagagctggttcctatgctgatgagctcgttaagaccgcgaaaac

SEQ ID NO: 20332 - DNA, 242 bp, Glycine max
  Clone ID: 700872103H1
agacgagtagaaagagattgaagagacccagcagatcgacaaggacagatggaagggtcttgcctatgatatctcagacgaccaacaagacatcacaagaggaaagggtttggttgactcccttttccaagctccacaggtgctggaactcactatgcagtcatgagctcctacgagtacctcagcactggacttcgccagtacttggacaacaaaatggatggattctacattgctccagc

SEQ ID NO: 20333 - DNA, 91 bp, Glycine max
  Clone ID: 700872106H1
caagcttggtgataattatctgctggtccttgttaccaaggaggctggcaagattagggttcgcctagctacagactcgaaaaaacctttt

SEQ ID NO: 20334 - DNA, 237 bp, Glycine max
  Clone ID: 700872107H1
ctgaaactcaaccttgtgcagaaagcacttctgctcaacaggggtggagacaggttgctgatgcattatgcaaggttgtatctgcatctcctacgaaagcagctatggcagttgttcttcaggccgagaaggaattgagccatggattgccaaagatgacaatctaggtcagaagttgtggagaatcaatcagcggattgtaaaattgataactgaactattgaggaatcatgataa
